United States Patent Application Publication US 2018/0305689 A1 - sequence listing, part 37

SEQ ID NO: 522906 - RNA, 19 nt, Artificial Sequence
  Description of Artificial Sequence: Synthetic oligonucleotide
  Antisense strand to SEQ ID NO: 522905
ucguuccuggacagaguuc

SEQ ID NO: 522907 - RNA, 19 nt, Artificial Sequence
  Description of Artificial Sequence: Synthetic oligonucleotide
  Sense strand starting at position 3089 of SEQ ID NO: 317922
cgaggcaacugauucuaau

SEQ ID NO: 522908 - RNA, 19 nt, Artificial Sequence
  Description of Artificial Sequence: Synthetic oligonucleotide
  Antisense strand to SEQ ID NO: 522907
auuagaaucaguugccucg

SEQ ID NO: 522909 - RNA, 19 nt, Artificial Sequence
  Description of Artificial Sequence: Synthetic oligonucleotide
  Sense strand starting at position 3195 of SEQ ID NO: 317922
auguucuagucucuuaaga

SEQ ID NO: 522910 - RNA, 19 nt, Artificial Sequence
  Description of Artificial Sequence: Synthetic oligonucleotide
  Antisense strand to SEQ ID NO: 522909
ucuuaagagacuagaacau

SEQ ID NO: 522911 - RNA, 19 nt, Artificial Sequence
  Description of Artificial Sequence: Synthetic oligonucleotide
  Sense strand starting at position 3209 of SEQ ID NO: 317922
uaagauacgucaguaaauc

SEQ ID NO: 522912 - RNA, 19 nt, Artificial Sequence
  Description of Artificial Sequence: Synthetic oligonucleotide
  Antisense strand to SEQ ID NO: 522911
gauuuacugacguaucuua

SEQ ID NO: 522913 - RNA, 19 nt, Artificial Sequence
  Description of Artificial Sequence: Synthetic oligonucleotide
  Sense strand starting at position 3238 of SEQ ID NO: 317922
uggaguuuauauccuagca

SEQ ID NO: 522914 - RNA, 19 nt, Artificial Sequence
  Description of Artificial Sequence: Synthetic oligonucleotide
  Antisense strand to SEQ ID NO: 522913
ugcuaggauauaaacucca

SEQ ID NO: 522915 - RNA, 19 nt, Artificial Sequence
  Description of Artificial Sequence: Synthetic oligonucleotide
  Sense strand starting at position 3263 of SEQ ID NO: 317922
aauucuggaucuccguuaa

SEQ ID NO: 522916 - RNA, 19 nt, Artificial Sequence
  Description of Artificial Sequence: Synthetic oligonucleotide
  Antisense strand to SEQ ID NO: 522915
uuaacggagauccagaauu

SEQ ID NO: 522917 - RNA, 19 nt, Artificial Sequence
  Description of Artificial Sequence: Synthetic oligonucleotide
  Sense strand starting at position 3378 of SEQ ID NO: 317922
gggauuguccaaggcauau

SEQ ID NO: 522918 - RNA, 19 nt, Artificial Sequence
  Description of Artificial Sequence: Synthetic oligonucleotide
  Antisense strand to SEQ ID NO: 522917
auaugccuuggacaauccc

SEQ ID NO: 522919 - RNA, 19 nt, Artificial Sequence
  Description of Artificial Sequence: Synthetic oligonucleotide
  Sense strand starting at position 3450 of SEQ ID NO: 317922
gguuuacaaaucggacacu

SEQ ID NO: 522920 - RNA, 19 nt, Artificial Sequence
  Description of Artificial Sequence: Synthetic oligonucleotide
  Antisense strand to SEQ ID NO: 522919
aguguccgauuuguaaacc

SEQ ID NO: 522921 - RNA, 19 nt, Artificial Sequence
  Description of Artificial Sequence: Synthetic oligonucleotide
  Sense strand starting at position 3517 of SEQ ID NO: 317922
uuaaacuugagcgaaguga

SEQ ID NO: 522922 - RNA, 19 nt, Artificial Sequence
  Description of Artificial Sequence: Synthetic oligonucleotide
  Antisense strand to SEQ ID NO: 522921
ucacuucgcucaaguuuaa

SEQ ID NO: 522923 - RNA, 19 nt, Artificial Sequence
  Description of Artificial Sequence: Synthetic oligonucleotide
  Sense strand starting at position 3521 of SEQ ID NO: 317922
acuugagcgaagugaaaua

SEQ ID NO: 522924 - RNA, 19 nt, Artificial Sequence
  Description of Artificial Sequence: Synthetic oligonucleotide
  Antisense strand to SEQ ID NO: 522923
uauuucacuucgcucaagu

SEQ ID NO: 522925 - RNA, 19 nt, Artificial Sequence
  Description of Artificial Sequence: Synthetic oligonucleotide
  Sense strand starting at position 3584 of SEQ ID NO: 317922
agagcagcccagugaagau

SEQ ID NO: 522926 - RNA, 19 nt, Artificial Sequence
  Description of Artificial Sequence: Synthetic oligonucleotide
  Antisense strand to SEQ ID NO: 522925
aucuucacugggcugcucu

SEQ ID NO: 522927 - RNA, 19 nt, Artificial Sequence
  Description of Artificial Sequence: Synthetic oligonucleotide
  Sense strand starting at position 3600 of SEQ ID NO: 317922
gaugcagucugugcauuua

SEQ ID NO: 522928 - RNA, 19 nt, Artificial Sequence
  Description of Artificial Sequence: Synthetic oligonucleotide
  Antisense strand to SEQ ID NO: 522927
uaaaugcacagacugcauc

SEQ ID NO: 522929 - RNA, 19 nt, Artificial Sequence
  Description of Artificial Sequence: Synthetic oligonucleotide
  Sense strand starting at position 3611 of SEQ ID NO: 317922
ugcauuuagccuuguaucu

SEQ ID NO: 522930 - RNA, 19 nt, Artificial Sequence
  Description of Artificial Sequence: Synthetic oligonucleotide
  Antisense strand to SEQ ID NO: 522929
agauacaaggcuaaaugca

SEQ ID NO: 522931 - RNA, 19 nt, Artificial Sequence
  Description of Artificial Sequence: Synthetic oligonucleotide
  Sense strand starting at position 3647 of SEQ ID NO: 317922
augaaagcuuuaccuguga

SEQ ID NO: 522932 - RNA, 19 nt, Artificial Sequence
  Description of Artificial Sequence: Synthetic oligonucleotide
  Antisense strand to SEQ ID NO: 522931
ucacagguaaagcuuucau

SEQ ID NO: 522933 - RNA, 19 nt, Artificial Sequence
  Description of Artificial Sequence: Synthetic oligonucleotide
  Sense strand starting at position 3662 of SEQ ID NO: 317922
gugauuccaugcuuggaga

SEQ ID NO: 522934 - RNA, 19 nt, Artificial Sequence
  Description of Artificial Sequence: Synthetic oligonucleotide
  Antisense strand to SEQ ID NO: 522933
ucuccaagcauggaaucac

SEQ ID NO: 522935 - RNA, 19 nt, Artificial Sequence
  Description of Artificial Sequence: Synthetic oligonucleotide
  Sense strand starting at position 3663 of SEQ ID NO: 317922
ugauuccaugcuuggagaa

SEQ ID NO: 522936 - RNA, 19 nt, Artificial Sequence
  Description of Artificial Sequence: Synthetic oligonucleotide
  Antisense strand to SEQ ID NO: 522935
uucuccaagcauggaauca

SEQ ID NO: 522937 - RNA, 19 nt, Artificial Sequence
  Description of Artificial Sequence: Synthetic oligonucleotide
  Sense strand starting at position 3790 of SEQ ID NO: 317922
caggcucuuguugacauaa

SEQ ID NO: 522938 - RNA, 19 nt, Artificial Sequence
  Description of Artificial Sequence: Synthetic oligonucleotide
  Antisense strand to SEQ ID NO: 522937
uuaugucaacaagagccug

SEQ ID NO: 522939 - RNA, 19 nt, Artificial Sequence
  Description of Artificial Sequence: Synthetic oligonucleotide
  Sense strand starting at position 3801 of SEQ ID NO: 317922
ugacauaacugacuguaau

SEQ ID NO: 522940 - RNA, 19 nt, Artificial Sequence
  Description of Artificial Sequence: Synthetic oligonucleotide
  Antisense strand to SEQ ID NO: 522939
auuacagucaguuauguca

SEQ ID NO: 522941 - RNA, 19 nt, Artificial Sequence
  Description of Artificial Sequence: Synthetic oligonucleotide
  Sense strand starting at position 3825 of SEQ ID NO: 317922
cuuugcucugaauaugaaa

SEQ ID NO: 522942 - RNA, 19 nt, Artificial Sequence
  Description of Artificial Sequence: Synthetic oligonucleotide
  Antisense strand to SEQ ID NO: 522941
uuucauauucagagcaaag

SEQ ID NO: 522943 - RNA, 19 nt, Artificial Sequence
  Description of Artificial Sequence: Synthetic oligonucleotide
  Sense strand starting at position 3959 of SEQ ID NO: 317922
ucuggauuauggcucaaua

SEQ ID NO: 522944 - RNA, 19 nt, Artificial Sequence
  Description of Artificial Sequence: Synthetic oligonucleotide
  Antisense strand to SEQ ID NO: 522943
uauugagccauaauccaga

SEQ ID NO: 522945 - RNA, 19 nt, Artificial Sequence
  Description of Artificial Sequence: Synthetic oligonucleotide
  Sense strand starting at position 13 of SEQ ID NO: 317923
aucaauaacucgguaauga

SEQ ID NO: 522946 - RNA, 19 nt, Artificial Sequence
  Description of Artificial Sequence: Synthetic oligonucleotide
  Antisense strand to SEQ ID NO: 522945
ucauuaccgaguuauugau

SEQ ID NO: 522947 - RNA, 19 nt, Artificial Sequence
  Description of Artificial Sequence: Synthetic oligonucleotide
  Sense strand starting at position 362 of SEQ ID NO: 317923
uggcauuugucagcaauug

SEQ ID NO: 522948 - RNA, 19 nt, Artificial Sequence
  Description of Artificial Sequence: Synthetic oligonucleotide
  Antisense strand to SEQ ID NO: 522947
caauugcugacaaaugcca

SEQ ID NO: 522949 - RNA, 19 nt, Artificial Sequence
  Description of Artificial Sequence: Synthetic oligonucleotide
  Sense strand starting at position 440 of SEQ ID NO: 317923
agaagagaaucuggauuua

SEQ ID NO: 522950 - RNA, 19 nt, Artificial Sequence
  Description of Artificial Sequence: Synthetic oligonucleotide
  Antisense strand to SEQ ID NO: 522949
uaaauccagauucucuucu

SEQ ID NO: 522951 - RNA, 19 nt, Artificial Sequence
  Description of Artificial Sequence: Synthetic oligonucleotide
  Sense strand starting at position 454 of SEQ ID NO: 317923
auuuauacagccugugagu

SEQ ID NO: 522952 - RNA, 19 nt, Artificial Sequence
  Description of Artificial Sequence: Synthetic oligonucleotide
  Antisense strand to SEQ ID NO: 522951
acucacaggcuguauaaau

SEQ ID NO: 522953 - RNA, 19 nt, Artificial Sequence
  Description of Artificial Sequence: Synthetic oligonucleotide
  Sense strand starting at position 460 of SEQ ID NO: 317923
acagccugugagugagaau

SEQ ID NO: 522954 - RNA, 19 nt, Artificial Sequence
  Description of Artificial Sequence: Synthetic oligonucleotide
  Antisense strand to SEQ ID NO: 522953
auucucacucacaggcugu

SEQ ID NO: 522955 - RNA, 19 nt, Artificial Sequence
  Description of Artificial Sequence: Synthetic oligonucleotide
  Sense strand starting at position 467 of SEQ ID NO: 317923
gugagugagaaugguguaa

SEQ ID NO: 522956 - RNA, 19 nt, Artificial Sequence
  Description of Artificial Sequence: Synthetic oligonucleotide
  Antisense strand to SEQ ID NO: 522955
uuacaccauucucacucac

SEQ ID NO: 522957 - RNA, 19 nt, Artificial Sequence
  Description of Artificial Sequence: Synthetic oligonucleotide
  Sense strand starting at position 471 of SEQ ID NO: 317923
gugagaaugguguaagucu

SEQ ID NO: 522958 - RNA, 19 nt, Artificial Sequence
  Description of Artificial Sequence: Synthetic oligonucleotide
  Antisense strand to SEQ ID NO: 522957
agacuuacaccauucucac

SEQ ID NO: 522959 - RNA, 19 nt, Artificial Sequence
  Description of Artificial Sequence: Synthetic oligonucleotide
  Sense strand starting at position 513 of SEQ ID NO: 317923
uuguuuggauucuuaggaa

SEQ ID NO: 522960 - RNA, 19 nt, Artificial Sequence
  Description of Artificial Sequence: Synthetic oligonucleotide
  Antisense strand to SEQ ID NO: 522959
uuccuaagaauccaaacaa

SEQ ID NO: 522961 - RNA, 19 nt, Artificial Sequence
  Description of Artificial Sequence: Synthetic oligonucleotide
  Sense strand starting at position 545 of SEQ ID NO: 317923
aaggauuuauacugagaag

SEQ ID NO: 522962 - RNA, 19 nt, Artificial Sequence
  Description of Artificial Sequence: Synthetic oligonucleotide
  Antisense strand to SEQ ID NO: 522961
cuucucaguauaaauccuu

SEQ ID NO: 522963 - RNA, 19 nt, Artificial Sequence
  Description of Artificial Sequence: Synthetic oligonucleotide
  Sense strand starting at position 548 of SEQ ID NO: 317923
gauuuauacugagaagagc

SEQ ID NO: 522964 - RNA, 19 nt, Artificial Sequence
  Description of Artificial Sequence: Synthetic oligonucleotide
  Antisense strand to SEQ ID NO: 522963
gcucuucucaguauaaauc

SEQ ID NO: 522965 - RNA, 19 nt, Artificial Sequence
  Description of Artificial Sequence: Synthetic oligonucleotide
  Sense strand starting at position 601 of SEQ ID NO: 317923
aaauguucuacggagguuu

SEQ ID NO: 522966 - RNA, 19 nt, Artificial Sequence
  Description of Artificial Sequence: Synthetic oligonucleotide
  Antisense strand to SEQ ID NO: 522965
aaaccuccguagaacauuu

SEQ ID NO: 522967 - RNA, 19 nt, Artificial Sequence
  Description of Artificial Sequence: Synthetic oligonucleotide
  Sense strand starting at position 612 of SEQ ID NO: 317923
ggagguuuagcacagaucu

SEQ ID NO: 522968 - RNA, 19 nt, Artificial Sequence
  Description of Artificial Sequence: Synthetic oligonucleotide
  Antisense strand to SEQ ID NO: 522967
agaucugugcuaaaccucc

SEQ ID NO: 522969 - RNA, 19 nt, Artificial Sequence
  Description of Artificial Sequence: Synthetic oligonucleotide
  Sense strand starting at position 685 of SEQ ID NO: 317923
caagaaucguguccaggau

SEQ ID NO: 522970 - RNA, 19 nt, Artificial Sequence
  Description of Artificial Sequence: Synthetic oligonucleotide
  Antisense strand to SEQ ID NO: 522969
auccuggacacgauucuug

SEQ ID NO: 522971 - RNA, 19 nt, Artificial Sequence
  Description of Artificial Sequence: Synthetic oligonucleotide
  Sense strand starting at position 686 of SEQ ID NO: 317923
aagaaucguguccaggaua

SEQ ID NO: 522972 - RNA, 19 nt, Artificial Sequence
  Description of Artificial Sequence: Synthetic oligonucleotide
  Antisense strand to SEQ ID NO: 522971
uauccuggacacgauucuu

SEQ ID NO: 522973 - RNA, 19 nt, Artificial Sequence
  Description of Artificial Sequence: Synthetic oligonucleotide
  Sense strand starting at position 788 of SEQ ID NO: 317923
ggaaacgacugauuaacgu

SEQ ID NO: 522974 - RNA, 19 nt, Artificial Sequence
  Description of Artificial Sequence: Synthetic oligonucleotide
  Antisense strand to SEQ ID NO: 522973
acguuaaucagucguuucc

SEQ ID NO: 522975 - RNA, 19 nt, Artificial Sequence
  Description of Artificial Sequence: Synthetic oligonucleotide
  Sense strand starting at position 813 of SEQ ID NO: 317923
uuaggagacugguuaauua

SEQ ID NO: 522976 - RNA, 19 nt, Artificial Sequence
  Description of Artificial Sequence: Synthetic oligonucleotide
  Antisense strand to SEQ ID NO: 522975
uaauuaaccagucuccuaa

SEQ ID NO: 522977 - RNA, 19 nt, Artificial Sequence
  Description of Artificial Sequence: Synthetic oligonucleotide
  Sense strand starting at position 817 of SEQ ID NO: 317923
gagacugguuaauuacaau

SEQ ID NO: 522978 - RNA, 19 nt, Artificial Sequence
  Description of Artificial Sequence: Synthetic oligonucleotide
  Antisense strand to SEQ ID NO: 522977
auuguaauuaaccagucuc

SEQ ID NO: 522979 - RNA, 19 nt, Artificial Sequence
  Description of Artificial Sequence: Synthetic oligonucleotide
  Sense strand starting at position 971 of SEQ ID NO: 317923
aagagucaggguuguuaga

SEQ ID NO: 522980 - RNA, 19 nt, Artificial Sequence
  Description of Artificial Sequence: Synthetic oligonucleotide
  Antisense strand to SEQ ID NO: 522979
ucuaacaacccugacucuu

SEQ ID NO: 522981 - RNA, 19 nt, Artificial Sequence
  Description of Artificial Sequence: Synthetic oligonucleotide
  Sense strand starting at position 973 of SEQ ID NO: 317923
gagucaggguuguuagaaa

SEQ ID NO: 522982 - RNA, 19 nt, Artificial Sequence
  Description of Artificial Sequence: Synthetic oligonucleotide
  Antisense strand to SEQ ID NO: 522981
uuucuaacaacccugacuc

SEQ ID NO: 522983 - RNA, 19 nt, Artificial Sequence
  Description of Artificial Sequence: Synthetic oligonucleotide
  Sense strand starting at position 1096 of SEQ ID NO: 317923
uuaucaggaccuggacauu

SEQ ID NO: 522984 - RNA, 19 nt, Artificial Sequence
  Description of Artificial Sequence: Synthetic oligonucleotide
  Antisense strand to SEQ ID NO: 522983
aauguccagguccugauaa

SEQ ID NO: 522985 - RNA, 19 nt, Artificial Sequence
  Description of Artificial Sequence: Synthetic oligonucleotide
  Sense strand starting at position 1195 of SEQ ID NO: 317923
gcuagucagaauggugaaa

SEQ ID NO: 522986 - RNA, 19 nt, Artificial Sequence
  Description of Artificial Sequence: Synthetic oligonucleotide
  Antisense strand to SEQ ID NO: 522985
uuucaccauucugacuagc

SEQ ID NO: 522987 - RNA, 19 nt, Artificial Sequence
  Description of Artificial Sequence: Synthetic oligonucleotide
  Sense strand starting at position 1529 of SEQ ID NO: 317923
ggauuagggaaacgucaca

SEQ ID NO: 522988 - RNA, 19 nt, Artificial Sequence
  Description of Artificial Sequence: Synthetic oligonucleotide
  Antisense strand to SEQ ID NO: 522987
ugugacguuucccuaaucc

SEQ ID NO: 522989 - RNA, 19 nt, Artificial Sequence
  Description of Artificial Sequence: Synthetic oligonucleotide
  Sense strand starting at position 2029 of SEQ ID NO: 317923
ggcguucgagguucguuua

SEQ ID NO: 522990 - RNA, 19 nt, Artificial Sequence
  Description of Artificial Sequence: Synthetic oligonucleotide
  Antisense strand to SEQ ID NO: 522989
uaaacgaaccucgaacgcc

SEQ ID NO: 522991 - RNA, 19 nt, Artificial Sequence
  Description of Artificial Sequence: Synthetic oligonucleotide
  Sense strand starting at position 2250 of SEQ ID NO: 317923
guggaaucauuacugauaa

SEQ ID NO: 522992 - RNA, 19 nt, Artificial Sequence
  Description of Artificial Sequence: Synthetic oligonucleotide
  Antisense strand to SEQ ID NO: 522991
uuaucaguaaugauuccac

SEQ ID NO: 522993 - RNA, 19 nt, Artificial Sequence
  Description of Artificial Sequence: Synthetic oligonucleotide
  Sense strand starting at position 2608 of SEQ ID NO: 317923
agcugauaacuugaaguuu

SEQ ID NO: 522994 - RNA, 19 nt, Artificial Sequence
  Description of Artificial Sequence: Synthetic oligonucleotide
  Antisense strand to SEQ ID NO: 522993
aaacuucaaguuaucagcu

SEQ ID NO: 522995 - RNA, 19 nt, Artificial Sequence
  Description of Artificial Sequence: Synthetic oligonucleotide
  Sense strand starting at position 3008 of SEQ ID NO: 317923
cacagacuguauguaugau

SEQ ID NO: 522996 - RNA, 19 nt, Artificial Sequence
  Description of Artificial Sequence: Synthetic oligonucleotide
  Antisense strand to SEQ ID NO: 522995
aucauacauacagucugug

SEQ ID NO: 522997 - RNA, 19 nt, Artificial Sequence
  Description of Artificial Sequence: Synthetic oligonucleotide
  Sense strand starting at position 3018 of SEQ ID NO: 317923
auguaugaucuuuguaacu

SEQ ID NO: 522998 - RNA, 19 nt, Artificial Sequence
  Description of Artificial Sequence: Synthetic oligonucleotide
  Antisense strand to SEQ ID NO: 522997
aguuacaaagaucauacau

SEQ ID NO: 522999 - RNA, 19 nt, Artificial Sequence
  Description of Artificial Sequence: Synthetic oligonucleotide
  Sense strand starting at position 3101 of SEQ ID NO: 317923
ccuucuuaugcuggaauaa

SEQ ID NO: 523000 - RNA, 19 nt, Artificial Sequence
  Description of Artificial Sequence: Synthetic oligonucleotide
  Antisense strand to SEQ ID NO: 522999
uuauuccagcauaagaagg

SEQ ID NO: 523001 - RNA, 19 nt, Artificial Sequence
  Description of Artificial Sequence: Synthetic oligonucleotide
  Sense strand starting at position 3102 of SEQ ID NO: 317923
cuucuuaugcuggaauaaa

SEQ ID NO: 523002 - RNA, 19 nt, Artificial Sequence
  Description of Artificial Sequence: Synthetic oligonucleotide
  Antisense strand to SEQ ID NO: 523001
uuuauuccagcauaagaag

SEQ ID NO: 523003 - RNA, 19 nt, Artificial Sequence
  Description of Artificial Sequence: Synthetic oligonucleotide
  Sense strand starting at position 3246 of SEQ ID NO: 317923
gacguauaugaauacauuc

SEQ ID NO: 523004 - RNA, 19 nt, Artificial Sequence
  Description of Artificial Sequence: Synthetic oligonucleotide
  Antisense strand to SEQ ID NO: 523003
gaauguauucauauacguc

SEQ ID NO: 523005 - RNA, 19 nt, Artificial Sequence
  Description of Artificial Sequence: Synthetic oligonucleotide
  Sense strand starting at position 3270 of SEQ ID NO: 317923
ugcauaucuguguacauac

SEQ ID NO: 523006 - RNA, 19 nt, Artificial Sequence
  Description of Artificial Sequence: Synthetic oligonucleotide
  Antisense strand to SEQ ID NO: 523005
guauguacacagauaugca

SEQ ID NO: 523007 - RNA, 19 nt, Artificial Sequence
  Description of Artificial Sequence: Synthetic oligonucleotide
  Sense strand starting at position 3278 of SEQ ID NO: 317923
uguguacauaccuaggagu

SEQ ID NO: 523008 - RNA, 19 nt, Artificial Sequence
  Description of Artificial Sequence: Synthetic oligonucleotide
  Antisense strand to SEQ ID NO: 523007
acuccuagguauguacaca

SEQ ID NO: 523009 - RNA, 19 nt, Artificial Sequence
  Description of Artificial Sequence: Synthetic oligonucleotide
  Sense strand starting at position 3313 of SEQ ID NO: 317923
auaguaacuguuuaacugu

SEQ ID NO: 523010 - RNA, 19 nt, Artificial Sequence
  Description of Artificial Sequence: Synthetic oligonucleotide
  Antisense strand to SEQ ID NO: 523009
acaguuaaacaguuacuau

SEQ ID NO: 523011 - RNA, 19 nt, Artificial Sequence
  Description of Artificial Sequence: Synthetic oligonucleotide
  Sense strand starting at position 3491 of SEQ ID NO: 317923
cuugauuuguaguucccua

SEQ ID NO: 523012 - RNA, 19 nt, Artificial Sequence
  Description of Artificial Sequence: Synthetic oligonucleotide
  Antisense strand to SEQ ID NO: 523011
uagggaacuacaaaucaag

SEQ ID NO: 523013 - RNA, 19 nt, Artificial Sequence
  Description of Artificial Sequence: Synthetic oligonucleotide
  Sense strand starting at position 3496 of SEQ ID NO: 317923
uuuguaguucccuacuaau

SEQ ID NO: 523014 - RNA, 19 nt, Artificial Sequence
  Description of Artificial Sequence: Synthetic oligonucleotide
  Antisense strand to SEQ ID NO: 523013
auuaguagggaacuacaaa

SEQ ID NO: 523015 - RNA, 19 nt, Artificial Sequence
  Description of Artificial Sequence: Synthetic oligonucleotide
  Sense strand starting at position 3534 of SEQ ID NO: 317923
ggugcuaucggucauuuau

SEQ ID NO: 523016 - RNA, 19 nt, Artificial Sequence
  Description of Artificial Sequence: Synthetic oligonucleotide
  Antisense strand to SEQ ID NO: 523015
auaaaugaccgauagcacc

SEQ ID NO: 523017 - RNA, 19 nt, Artificial Sequence
  Description of Artificial Sequence: Synthetic oligonucleotide
  Sense strand starting at position 3536 of SEQ ID NO: 317923
ugcuaucggucauuuauau

SEQ ID NO: 523018 - RNA, 19 nt, Artificial Sequence
  Description of Artificial Sequence: Synthetic oligonucleotide
  Antisense strand to SEQ ID NO: 523017
auauaaaugaccgauagca

SEQ ID NO: 523019 - RNA, 19 nt, Artificial Sequence
  Description of Artificial Sequence: Synthetic oligonucleotide
  Sense strand starting at position 3564 of SEQ ID NO: 317923
ggagaaaugucuucucaaa

SEQ ID NO: 523020 - RNA, 19 nt, Artificial Sequence
  Description of Artificial Sequence: Synthetic oligonucleotide
  Antisense strand to SEQ ID NO: 523019
uuugagaagacauuucucc

SEQ ID NO: 523021 - RNA, 19 nt, Artificial Sequence
  Description of Artificial Sequence: Synthetic oligonucleotide
  Sense strand starting at position 3640 of SEQ ID NO: 317923
acagguaauuugcaaauau

SEQ ID NO: 523022 - RNA, 19 nt, Artificial Sequence
  Description of Artificial Sequence: Synthetic oligonucleotide
  Antisense strand to SEQ ID NO: 523021
auauuugcaaauuaccugu

SEQ ID NO: 523023 - RNA, 19 nt, Artificial Sequence
  Description of Artificial Sequence: Synthetic oligonucleotide
  Sense strand starting at position 3709 of SEQ ID NO: 317923
cauugauugcaguacaggu

SEQ ID NO: 523024 - RNA, 19 nt, Artificial Sequence
  Description of Artificial Sequence: Synthetic oligonucleotide
  Antisense strand to SEQ ID NO: 523023
accuguacugcaaucaaug

SEQ ID NO: 523025 - RNA, 19 nt, Artificial Sequence
  Description of Artificial Sequence: Synthetic oligonucleotide
  Sense strand starting at position 79 of SEQ ID NO: 317924
ugggcaauauagugaggaa

SEQ ID NO: 523026 - RNA, 19 nt, Artificial Sequence
  Description of Artificial Sequence: Synthetic oligonucleotide
  Antisense strand to SEQ ID NO: 523025
uuccucacuauauugccca

SEQ ID NO: 523027 - RNA, 19 nt, Artificial Sequence
  Description of Artificial Sequence: Synthetic oligonucleotide
  Sense strand starting at position 178 of SEQ ID NO: 317924
agaaucauuuaaggccaga

SEQ ID NO: 523028 - RNA, 19 nt, Artificial Sequence
  Description of Artificial Sequence: Synthetic oligonucleotide
  Antisense strand to SEQ ID NO: 523027
ucuggccuuaaaugauucu

SEQ ID NO: 523029 - RNA, 19 nt, Artificial Sequence
  Description of Artificial Sequence: Synthetic oligonucleotide
  Sense strand starting at position 308 of SEQ ID NO: 317924
acaaaugauuguguaucca

SEQ ID NO: 523030 - RNA, 19 nt, Artificial Sequence
  Description of Artificial Sequence: Synthetic oligonucleotide
  Antisense strand to SEQ ID NO: 523029
uggauacacaaucauuugu

SEQ ID NO: 523031 - RNA, 19 nt, Artificial Sequence
  Description of Artificial Sequence: Synthetic oligonucleotide
  Sense strand starting at position 312 of SEQ ID NO: 317924
augauuguguauccagcua

SEQ ID NO: 523032 - RNA, 19 nt, Artificial Sequence
  Description of Artificial Sequence: Synthetic oligonucleotide
  Antisense strand to SEQ ID NO: 523031
uagcuggauacacaaucau

SEQ ID NO: 523033 - RNA, 19 nt, Artificial Sequence
  Description of Artificial Sequence: Synthetic oligonucleotide
  Sense strand starting at position 317 of SEQ ID NO: 317924
uguguauccagcuagaugu

SEQ ID NO: 523034 - RNA, 19 nt, Artificial Sequence
  Description of Artificial Sequence: Synthetic oligonucleotide
  Antisense strand to SEQ ID NO: 523033
acaucuagcuggauacaca

SEQ ID NO: 523035 - RNA, 19 nt, Artificial Sequence
  Description of Artificial Sequence: Synthetic oligonucleotide
  Sense strand starting at position 319 of SEQ ID NO: 317924
uguauccagcuagauguaa

SEQ ID NO: 523036 - RNA, 19 nt, Artificial Sequence
  Description of Artificial Sequence: Synthetic oligonucleotide
  Antisense strand to SEQ ID NO: 523035
uuacaucuagcuggauaca

SEQ ID NO: 523037 - RNA, 19 nt, Artificial Sequence
  Description of Artificial Sequence: Synthetic oligonucleotide
  Sense strand starting at position 708 of SEQ ID NO: 317924
uaggcuguguuauccacua

SEQ ID NO: 523038 - RNA, 19 nt, Artificial Sequence
  Description of Artificial Sequence: Synthetic oligonucleotide
  Antisense strand to SEQ ID NO: 523037
uaguggauaacacagccua

SEQ ID NO: 523039 - RNA, 19 nt, Artificial Sequence
  Description of Artificial Sequence: Synthetic oligonucleotide
  Sense strand starting at position 838 of SEQ ID NO: 317924
guguguaaacuaugacaga

SEQ ID NO: 523040 - RNA, 19 nt, Artificial Sequence
  Description of Artificial Sequence: Synthetic oligonucleotide
  Antisense strand to SEQ ID NO: 523039
ucugucauaguuuacacac

SEQ ID NO: 523041 - RNA, 19 nt, Artificial Sequence
  Description of Artificial Sequence: Synthetic oligonucleotide
  Sense strand starting at position 839 of SEQ ID NO: 317924
uguguaaacuaugacagau

SEQ ID NO: 523042 - RNA, 19 nt, Artificial Sequence
  Description of Artificial Sequence: Synthetic oligonucleotide
  Antisense strand to SEQ ID NO: 523041
aucugucauaguuuacaca

SEQ ID NO: 523043 - RNA, 19 nt, Artificial Sequence
  Description of Artificial Sequence: Synthetic oligonucleotide
  Sense strand starting at position 998 of SEQ ID NO: 317924
aguucuuacugccauuuau

SEQ ID NO: 523044 - RNA, 19 nt, Artificial Sequence
  Description of Artificial Sequence: Synthetic oligonucleotide
  Antisense strand to SEQ ID NO: 523043
auaaauggcaguaagaacu

SEQ ID NO: 523045 - RNA, 19 nt, Artificial Sequence
  Description of Artificial Sequence: Synthetic oligonucleotide
  Sense strand starting at position 1037 of SEQ ID NO: 317924
uguugaguucccgguucua

SEQ ID NO: 523046 - RNA, 19 nt, Artificial Sequence
  Description of Artificial Sequence: Synthetic oligonucleotide
  Antisense strand to SEQ ID NO: 523045
uagaaccgggaacucaaca

SEQ ID NO: 523047 - RNA, 19 nt, Artificial Sequence
  Description of Artificial Sequence: Synthetic oligonucleotide
  Sense strand starting at position 1230 of SEQ ID NO: 317924
ugaagaccuuugugaggau

SEQ ID NO: 523048 - RNA, 19 nt, Artificial Sequence
  Description of Artificial Sequence: Synthetic oligonucleotide
  Antisense strand to SEQ ID NO: 523047
auccucacaaaggucuuca

SEQ ID NO: 523049 - RNA, 19 nt, Artificial Sequence
  Description of Artificial Sequence: Synthetic oligonucleotide
  Sense strand starting at position 1245 of SEQ ID NO: 317924
ggauccauuuacgcuuuau

SEQ ID NO: 523050 - RNA, 19 nt, Artificial Sequence
  Description of Artificial Sequence: Synthetic oligonucleotide
  Antisense strand to SEQ ID NO: 523049
auaaagcguaaauggaucc

SEQ ID NO: 523051 - RNA, 19 nt, Artificial Sequence
  Description of Artificial Sequence: Synthetic oligonucleotide
  Sense strand starting at position 1308 of SEQ ID NO: 317924
ucacuugucuagcuuacuu

SEQ ID NO: 523052 - RNA, 19 nt, Artificial Sequence
  Description of Artificial Sequence: Synthetic oligonucleotide
  Antisense strand to SEQ ID NO: 523051
aaguaagcuagacaaguga

SEQ ID NO: 523053 - RNA, 19 nt, Artificial Sequence
  Description of Artificial Sequence: Synthetic oligonucleotide
  Sense strand starting at position 1310 of SEQ ID NO: 317924
acuugucuagcuuacuuua

SEQ ID NO: 523054 - RNA, 19 nt, Artificial Sequence
  Description of Artificial Sequence: Synthetic oligonucleotide
  Antisense strand to SEQ ID NO: 523053
uaaaguaagcuagacaagu

SEQ ID NO: 523055 - RNA, 19 nt, Artificial Sequence
  Description of Artificial Sequence: Synthetic oligonucleotide
  Sense strand starting at position 1372 of SEQ ID NO: 317924
guguuaaucgaccguuuau

SEQ ID NO: 523056 - RNA, 19 nt, Artificial Sequence
  Description of Artificial Sequence: Synthetic oligonucleotide
  Antisense strand to SEQ ID NO: 523055
auaaacggucgauuaacac

SEQ ID NO: 523057 - RNA, 19 nt, Artificial Sequence
  Description of Artificial Sequence: Synthetic oligonucleotide
  Sense strand starting at position 1383 of SEQ ID NO: 317924
ccguuuauguuaucaggaa

SEQ ID NO: 523058 - RNA, 19 nt, Artificial Sequence
  Description of Artificial Sequence: Synthetic oligonucleotide
  Antisense strand to SEQ ID NO: 523057
uuccugauaacauaaacgg

SEQ ID NO: 523059 - RNA, 19 nt, Artificial Sequence
  Description of Artificial Sequence: Synthetic oligonucleotide
  Sense strand starting at position 1408 of SEQ ID NO: 317924
cagucaauagugggcuauu

SEQ ID NO: 523060 - RNA, 19 nt, Artificial Sequence
  Description of Artificial Sequence: Synthetic oligonucleotide
  Antisense strand to SEQ ID NO: 523059
aauagcccacuauugacug

SEQ ID NO: 523061 - RNA, 19 nt, Artificial Sequence
  Description of Artificial Sequence: Synthetic oligonucleotide
  Sense strand starting at position 1409 of SEQ ID NO: 317924
agucaauagugggcuauua

SEQ ID NO: 523062 - RNA, 19 nt, Artificial Sequence
  Description of Artificial Sequence: Synthetic oligonucleotide
  Antisense strand to SEQ ID NO: 523061
uaauagcccacuauugacu

SEQ ID NO: 523063 - RNA, 19 nt, Artificial Sequence
  Description of Artificial Sequence: Synthetic oligonucleotide
  Sense strand starting at position 1411 of SEQ ID NO: 317924
ucaauagugggcuauuagu

SEQ ID NO: 523064 - RNA, 19 nt, Artificial Sequence
  Description of Artificial Sequence: Synthetic oligonucleotide
  Antisense strand to SEQ ID NO: 523063
acuaauagcccacuauuga

SEQ ID NO: 523065 - RNA, 19 nt, Artificial Sequence
  Description of Artificial Sequence: Synthetic oligonucleotide
  Sense strand starting at position 1509 of SEQ ID NO: 317924
augggucaaguguaauuau

SEQ ID NO: 523066 - RNA, 19 nt, Artificial Sequence
  Description of Artificial Sequence: Synthetic oligonucleotide
  Antisense strand to SEQ ID NO: 523065
auaauuacacuugacccau

SEQ ID NO: 523067 - RNA, 19 nt, Artificial Sequence
  Description of Artificial Sequence: Synthetic oligonucleotide
  Sense strand starting at position 1512 of SEQ ID NO: 317924
ggucaaguguaauuaugua

SEQ ID NO: 523068 - RNA, 19 nt, Artificial Sequence
  Description of Artificial Sequence: Synthetic oligonucleotide
  Antisense strand to SEQ ID NO: 523067
uacauaauuacacuugacc

SEQ ID NO: 523069 - RNA, 19 nt, Artificial Sequence
  Description of Artificial Sequence: Synthetic oligonucleotide
  Sense strand starting at position 1609 of SEQ ID NO: 317924
aguccaauuuguuacaaug

SEQ ID NO: 523070 - RNA, 19 nt, Artificial Sequence
  Description of Artificial Sequence: Synthetic oligonucleotide
  Antisense strand to SEQ ID NO: 523069
cauuguaacaaauuggacu

SEQ ID NO: 523071 - RNA, 19 nt, Artificial Sequence
  Description of Artificial Sequence: Synthetic oligonucleotide
  Sense strand starting at position 1617 of SEQ ID NO: 317924
uuguuacaaugugacuaua

SEQ ID NO: 523072 - RNA, 19 nt, Artificial Sequence
  Description of Artificial Sequence: Synthetic oligonucleotide
  Antisense strand to SEQ ID NO: 523071
uauagucacauuguaacaa

SEQ ID NO: 523073 - RNA, 19 nt, Artificial Sequence
  Description of Artificial Sequence: Synthetic oligonucleotide
  Sense strand starting at position 1619 of SEQ ID NO: 317924
guuacaaugugacuauaga

SEQ ID NO: 523074 - RNA, 19 nt, Artificial Sequence
  Description of Artificial Sequence: Synthetic oligonucleotide
  Antisense strand to SEQ ID NO: 523073
ucuauagucacauuguaac

SEQ ID NO: 523075 - RNA, 19 nt, Artificial Sequence
  Description of Artificial Sequence: Synthetic oligonucleotide
  Sense strand starting at position 1664 of SEQ ID NO: 317924
ucgggaucauaauuaagua

SEQ ID NO: 523076 - RNA, 19 nt, Artificial Sequence
  Description of Artificial Sequence: Synthetic oligonucleotide
  Antisense strand to SEQ ID NO: 523075
uacuuaauuaugaucccga

SEQ ID NO: 523077 - RNA, 19 nt, Artificial Sequence
  Description of Artificial Sequence: Synthetic oligonucleotide
  Sense strand starting at position 1936 of SEQ ID NO: 317924
aagucuuaccuggauugua

SEQ ID NO: 523078 - RNA, 19 nt, Artificial Sequence
  Description of Artificial Sequence: Synthetic oligonucleotide
  Antisense strand to SEQ ID NO: 523077
uacaauccagguaagacuu

SEQ ID NO: 523079 - RNA, 19 nt, Artificial Sequence
  Description of Artificial Sequence: Synthetic oligonucleotide
  Sense strand starting at position 1992 of SEQ ID NO: 317924
ugucgaauucuguauauaa

SEQ ID NO: 523080 - RNA, 19 nt, Artificial Sequence
  Description of Artificial Sequence: Synthetic oligonucleotide
  Antisense strand to SEQ ID NO: 523079
uuauauacagaauucgaca

SEQ ID NO: 523081 - RNA, 19 nt, Artificial Sequence
  Description of Artificial Sequence: Synthetic oligonucleotide
  Sense strand starting at position 2068 of SEQ ID NO: 317924
ucuuaauguuugguaaaug

SEQ ID NO: 523082 - RNA, 19 nt, Artificial Sequence
  Description of Artificial Sequence: Synthetic oligonucleotide
  Antisense strand to SEQ ID NO: 523081
cauuuaccaaacauuaaga

SEQ ID NO: 523083 - RNA, 19 nt, Artificial Sequence
  Description of Artificial Sequence: Synthetic oligonucleotide
  Sense strand starting at position 2073 of SEQ ID NO: 317924
auguuugguaaauguguaa

SEQ ID NO: 523084 - RNA, 19 nt, Artificial Sequence
  Description of Artificial Sequence: Synthetic oligonucleotide
  Antisense strand to SEQ ID NO: 523083
uuacacauuuaccaaacau

SEQ ID NO: 523085 - RNA, 19 nt, Artificial Sequence
  Description of Artificial Sequence: Synthetic oligonucleotide
  Sense strand starting at position 2076 of SEQ ID NO: 317924
uuugguaaauguguaauca

SEQ ID NO: 523086 - RNA, 19 nt, Artificial Sequence
  Description of Artificial Sequence: Synthetic oligonucleotide
  Antisense strand to SEQ ID NO: 523085
ugauuacacauuuaccaaa

SEQ ID NO: 523087 - RNA, 19 nt, Artificial Sequence
  Description of Artificial Sequence: Synthetic oligonucleotide
  Sense strand starting at position 2077 of SEQ ID NO: 317924
uugguaaauguguaaucaa

SEQ ID NO: 523088 - RNA, 19 nt, Artificial Sequence
  Description of Artificial Sequence: Synthetic oligonucleotide
  Antisense strand to SEQ ID NO: 523087
uugauuacacauuuaccaa

SEQ ID NO: 523089 - RNA, 19 nt, Artificial Sequence
  Description of Artificial Sequence: Synthetic oligonucleotide
  Sense strand starting at position 2080 of SEQ ID NO: 317924
guaaauguguaaucaaacu

SEQ ID NO: 523090 - RNA, 19 nt, Artificial Sequence
  Description of Artificial Sequence: Synthetic oligonucleotide
  Antisense strand to SEQ ID NO: 523089
aguuugauuacacauuuac

SEQ ID NO: 523091 - RNA, 19 nt, Artificial Sequence
  Description of Artificial Sequence: Synthetic oligonucleotide
  Sense strand starting at position 2169 of SEQ ID NO: 317924
accuuugauggucacauau

SEQ ID NO: 523092 - RNA, 19 nt, Artificial Sequence
  Description of Artificial Sequence: Synthetic oligonucleotide
  Antisense strand to SEQ ID NO: 523091
auaugugaccaucaaaggu

SEQ ID NO: 523093 - RNA, 19 nt, Artificial Sequence
  Description of Artificial Sequence: Synthetic oligonucleotide
  Sense strand starting at position 2171 of SEQ ID NO: 317924
cuuugauggucacauauua

SEQ ID NO: 523094 - RNA, 19 nt, Artificial Sequence
  Description of Artificial Sequence: Synthetic oligonucleotide
  Antisense strand to SEQ ID NO: 523093
uaauaugugaccaucaaag

SEQ ID NO: 523095 - RNA, 19 nt, Artificial Sequence
  Description of Artificial Sequence: Synthetic oligonucleotide
  Sense strand starting at position 2186 of SEQ ID NO: 317924
auuauugcauccuauggau

SEQ ID NO: 523096 - RNA, 19 nt, Artificial Sequence
  Description of Artificial Sequence: Synthetic oligonucleotide
  Antisense strand to SEQ ID NO: 523095
auccauaggaugcaauaau

SEQ ID NO: 523097 - RNA, 19 nt, Artificial Sequence
  Description of Artificial Sequence: Synthetic oligonucleotide
  Sense strand starting at position 2514 of SEQ ID NO: 317924
auaagaaacuuguagaucu

SEQ ID NO: 523098 - RNA, 19 nt, Artificial Sequence
  Description of Artificial Sequence: Synthetic oligonucleotide
  Antisense strand to SEQ ID NO: 523097
agaucuacaaguuucuuau

SEQ ID NO: 523099 - RNA, 19 nt, Artificial Sequence
  Description of Artificial Sequence: Synthetic oligonucleotide
  Sense strand starting at position 3547 of SEQ ID NO: 317924
aggaaugaguucucucauu

SEQ ID NO: 523100 - RNA, 19 nt, Artificial Sequence
  Description of Artificial Sequence: Synthetic oligonucleotide
  Antisense strand to SEQ ID NO: 523099
aaugagagaacucauuccu

SEQ ID NO: 523101 - RNA, 19 nt, Artificial Sequence
  Description of Artificial Sequence: Synthetic oligonucleotide
  Sense strand starting at position 3598 of SEQ ID NO: 317924
uuuaaacguguagguuaaa

SEQ ID NO: 523102 - RNA, 19 nt, Artificial Sequence
  Description of Artificial Sequence: Synthetic oligonucleotide
  Antisense strand to SEQ ID NO: 523101
uuuaaccuacacguuuaaa

SEQ ID NO: 523103 - RNA, 19 nt, Artificial Sequence
  Description of Artificial Sequence: Synthetic oligonucleotide
  Sense strand starting at position 3634 of SEQ ID NO: 317924
uuagcuuggugaguuaaau

SEQ ID NO: 523104 - RNA, 19 nt, Artificial Sequence
  Description of Artificial Sequence: Synthetic oligonucleotide
  Antisense strand to SEQ ID NO: 523103
auuuaacucaccaagcuaa

SEQ ID NO: 523105 - RNA, 19 nt, Artificial Sequence
  Description of Artificial Sequence: Synthetic oligonucleotide
  Sense strand starting at position 311 of SEQ ID NO: 317925
acaaaugauuguguaucca

SEQ ID NO: 523106 - RNA, 19 nt, Artificial Sequence
  Description of Artificial Sequence: Synthetic oligonucleotide
  Antisense strand to SEQ ID NO: 523105
uggauacacaaucauuugu

SEQ ID NO: 523107 - RNA, 19 nt, Artificial Sequence
  Description of Artificial Sequence: Synthetic oligonucleotide
  Sense strand starting at position 1368 of SEQ ID NO: 317925
uagguauuaaucgaccguu

SEQ ID NO: 523108 - RNA, 19 nt, Artificial Sequence
  Description of Artificial Sequence: Synthetic oligonucleotide
  Antisense strand to SEQ ID NO: 523107
aacggucgauuaauaccua

SEQ ID NO: 523109 - RNA, 19 nt, Artificial Sequence
  Description of Artificial Sequence: Synthetic oligonucleotide
  Sense strand starting at position 1371 of SEQ ID NO: 317925
guauuaaucgaccguuuau

SEQ ID NO: 523110 - RNA, 19 nt, Artificial Sequence
  Description of Artificial Sequence: Synthetic oligonucleotide
  Antisense strand to SEQ ID NO: 523109
auaaacggucgauuaauac

SEQ ID NO: 523111 - RNA, 19 nt, Artificial Sequence
  Description of Artificial Sequence: Synthetic oligonucleotide
  Sense strand starting at position 1511 of SEQ ID NO: 317925
ggucaaguguaauuaugua

SEQ ID NO: 523112 - RNA, 19 nt, Artificial Sequence
  Description of Artificial Sequence: Synthetic oligonucleotide
  Antisense strand to SEQ ID NO: 523111
uacauaauuacacuugacc

SEQ ID NO: 523113 - RNA, 19 nt, Artificial Sequence
  Description of Artificial Sequence: Synthetic oligonucleotide
  Sense strand starting at position 1991 of SEQ ID NO: 317925
ggugucgaauucuguauau

SEQ ID NO: 523114 - RNA, 19 nt, Artificial Sequence
  Description of Artificial Sequence: Synthetic oligonucleotide
  Antisense strand to SEQ ID NO: 523113
auauacagaauucgacacc

SEQ ID NO: 523115 - RNA, 19 nt, Artificial Sequence
  Description of Artificial Sequence: Synthetic oligonucleotide
  Sense strand starting at position 1993 of SEQ ID NO: 317925
ugucgaauucuguauauaa

SEQ ID NO: 523116 - RNA, 19 nt, Artificial Sequence
  Description of Artificial Sequence: Synthetic oligonucleotide
  Antisense strand to SEQ ID NO: 523115
uuauauacagaauucgaca

SEQ ID NO: 523117 - RNA, 19 nt, Artificial Sequence
  Description of Artificial Sequence: Synthetic oligonucleotide
  Sense strand starting at position 3567 of SEQ ID NO: 317925
cuccuauaauguguauaac

SEQ ID NO: 523118 - RNA, 19 nt, Artificial Sequence
  Description of Artificial Sequence: Synthetic oligonucleotide
  Antisense strand to SEQ ID NO: 523117
guuauacacauuauaggag

SEQ ID NO: 523119 - RNA, 19 nt, Artificial Sequence
  Description of Artificial Sequence: Synthetic oligonucleotide
  Sense strand starting at position 3568 of SEQ ID NO: 317925
uccuauaauguguauaaca

SEQ ID NO: 523120 - RNA, 19 nt, Artificial Sequence
  Description of Artificial Sequence: Synthetic oligonucleotide
  Antisense strand to SEQ ID NO: 523119
uguuauacacauuauagga

SEQ ID NO: 523121 - RNA, 19 nt, Artificial Sequence
  Description of Artificial Sequence: Synthetic oligonucleotide
  Sense strand starting at position 45 of SEQ ID NO: 317926
uccaguugaguuugacuga

SEQ ID NO: 523122 - RNA, 19 nt, Artificial Sequence
  Description of Artificial Sequence: Synthetic oligonucleotide
  Antisense strand to SEQ ID NO: 523121
ucagucaaacucaacugga

SEQ ID NO: 523123 - RNA, 19 nt, Artificial Sequence
  Description of Artificial Sequence: Synthetic oligonucleotide
  Sense strand starting at position 48 of SEQ ID NO: 317926
aguugaguuugacugagga

SEQ ID NO: 523124 - RNA, 19 nt, Artificial Sequence
  Description of Artificial Sequence: Synthetic oligonucleotide
  Antisense strand to SEQ ID NO: 523123
uccucagucaaacucaacu

SEQ ID NO: 523125 - RNA, 19 nt, Artificial Sequence
  Description of Artificial Sequence: Synthetic oligonucleotide
  Sense strand starting at position 121 of SEQ ID NO: 317926
agagauagauuacucuguu

SEQ ID NO: 523126 - RNA, 19 nt, Artificial Sequence
  Description of Artificial Sequence: Synthetic oligonucleotide
  Antisense strand to SEQ ID NO: 523125
aacagaguaaucuaucucu

SEQ ID NO: 523127 - RNA, 19 nt, Artificial Sequence
  Description of Artificial Sequence: Synthetic oligonucleotide
  Sense strand starting at position 122 of SEQ ID NO: 317926
gagauagauuacucuguua

SEQ ID NO: 523128 - RNA, 19 nt, Artificial Sequence
  Description of Artificial Sequence: Synthetic oligonucleotide
  Antisense strand to SEQ ID NO: 523127
uaacagaguaaucuaucuc

SEQ ID NO: 523129 - RNA, 19 nt, Artificial Sequence
  Description of Artificial Sequence: Synthetic oligonucleotide
  Sense strand starting at position 264 of SEQ ID NO: 317926
guuaaacuuacuggaaggu

SEQ ID NO: 523130 - RNA, 19 nt, Artificial Sequence
  Description of Artificial Sequence: Synthetic oligonucleotide
  Antisense strand to SEQ ID NO: 523129
accuuccaguaaguuuaac

SEQ ID NO: 523131 - RNA, 19 nt, Artificial Sequence
  Description of Artificial Sequence: Synthetic oligonucleotide
  Sense strand starting at position 390 of SEQ ID NO: 317926
uguuaaauucugggucaug

SEQ ID NO: 523132 - RNA, 19 nt, Artificial Sequence
  Description of Artificial Sequence: Synthetic oligonucleotide
  Antisense strand to SEQ ID NO: 523131
caugacccagaauuuaaca

SEQ ID NO: 523133 - RNA, 19 nt, Artificial Sequence
  Description of Artificial Sequence: Synthetic oligonucleotide
  Sense strand starting at position 626 of SEQ ID NO: 317926
ugucuacaucaauacuagu

SEQ ID NO: 523134 - RNA, 19 nt, Artificial Sequence
  Description of Artificial Sequence: Synthetic oligonucleotide
  Antisense strand to SEQ ID NO: 523133
acuaguauugauguagaca

SEQ ID NO: 523135 - RNA, 19 nt, Artificial Sequence
  Description of Artificial Sequence: Synthetic oligonucleotide
  Sense strand starting at position 1014 of SEQ ID NO: 317926
uuguuaaugcaguaagaag

SEQ ID NO: 523136 - RNA, 19 nt, Artificial Sequence
  Description of Artificial Sequence: Synthetic oligonucleotide
  Antisense strand to SEQ ID NO: 523135
cuucuuacugcauuaacaa

SEQ ID NO: 523137 - RNA, 19 nt, Artificial Sequence
  Description of Artificial Sequence: Synthetic oligonucleotide
  Sense strand starting at position 1314 of SEQ ID NO: 317926
gggcgagauuucucucccu

SEQ ID NO: 523138 - RNA, 19 nt, Artificial Sequence
  Description of Artificial Sequence: Synthetic oligonucleotide
  Antisense strand to SEQ ID NO: 523137
agggagagaaaucucgccc

SEQ ID NO: 523139 - RNA, 19 nt, Artificial Sequence
  Description of Artificial Sequence: Synthetic oligonucleotide
  Sense strand starting at position 2013 of SEQ ID NO: 317926
gaaagagcuuucuccagag

SEQ ID NO: 523140 - RNA, 19 nt, Artificial Sequence
  Description of Artificial Sequence: Synthetic oligonucleotide
  Antisense strand to SEQ ID NO: 523139
cucuggagaaagcucuuuc

SEQ ID NO: 523141 - RNA, 19 nt, Artificial Sequence
  Description of Artificial Sequence: Synthetic oligonucleotide
  Sense strand starting at position 2113 of SEQ ID NO: 317926
gguggauucugggcaaaca

SEQ ID NO: 523142 - RNA, 19 nt, Artificial Sequence
  Description of Artificial Sequence: Synthetic oligonucleotide
  Antisense strand to SEQ ID NO: 523141
uguuugcccagaauccacc

SEQ ID NO: 523143 - RNA, 19 nt, Artificial Sequence
  Description of Artificial Sequence: Synthetic oligonucleotide
  Sense strand starting at position 2231 of SEQ ID NO: 317926
uguucucuuucuuugagaa

SEQ ID NO: 523144 - RNA, 19 nt, Artificial Sequence
  Description of Artificial Sequence: Synthetic oligonucleotide
  Antisense strand to SEQ ID NO: 523143
uucucaaagaaagagaaca

SEQ ID NO: 523145 - RNA, 19 nt, Artificial Sequence
  Description of Artificial Sequence: Synthetic oligonucleotide
  Sense strand starting at position 2232 of SEQ ID NO: 317926
guucucuuucuuugagaag

SEQ ID NO: 523146 - RNA, 19 nt, Artificial Sequence
  Description of Artificial Sequence: Synthetic oligonucleotide
  Antisense strand to SEQ ID NO: 523145
cuucucaaagaaagagaac

SEQ ID NO: 523147 - RNA, 19 nt, Artificial Sequence
  Description of Artificial Sequence: Synthetic oligonucleotide
  Sense strand starting at position 2601 of SEQ ID NO: 317926
caaacaaugcuugggugua

SEQ ID NO: 523148 - RNA, 19 nt, Artificial Sequence
  Description of Artificial Sequence: Synthetic oligonucleotide
  Antisense strand to SEQ ID NO: 523147
uacacccaagcauuguuug

SEQ ID NO: 523149 - RNA, 19 nt, Artificial Sequence
  Description of Artificial Sequence: Synthetic oligonucleotide
  Sense strand starting at position 2603 of SEQ ID NO: 317926
aacaaugcuuggguguaua

SEQ ID NO: 523150 - RNA, 19 nt, Artificial Sequence
  Description of Artificial Sequence: Synthetic oligonucleotide
  Antisense strand to SEQ ID NO: 523149
uauacacccaagcauuguu

SEQ ID NO: 523151 - RNA, 19 nt, Artificial Sequence
  Description of Artificial Sequence: Synthetic oligonucleotide
  Sense strand starting at position 2606 of SEQ ID NO: 317926
aaugcuuggguguauaaac

SEQ ID NO: 523152 - RNA, 19 nt, Artificial Sequence
  Description of Artificial Sequence: Synthetic oligonucleotide
  Antisense strand to SEQ ID NO: 523151
guuuauacacccaagcauu

SEQ ID NO: 523153 - RNA, 19 nt, Artificial Sequence
  Description of Artificial Sequence: Synthetic oligonucleotide
  Sense strand starting at position 2637 of SEQ ID NO: 317926
auagucuuacgaugggaga

SEQ ID NO: 523154 - RNA, 19 nt, Artificial Sequence
  Description of Artificial Sequence: Synthetic oligonucleotide
  Antisense strand to SEQ ID NO: 523153
ucucccaucguaagacuau

SEQ ID NO: 523155 - RNA, 19 nt, Artificial Sequence
  Description of Artificial Sequence: Synthetic oligonucleotide
  Sense strand starting at position 2686 of SEQ ID NO: 317926
aagauagagcauuguuucu

SEQ ID NO: 523156 - RNA, 19 nt, Artificial Sequence
  Description of Artificial Sequence: Synthetic oligonucleotide
  Antisense strand to SEQ ID NO: 523155
agaaacaaugcucuaucuu

SEQ ID NO: 523157 - RNA, 19 nt, Artificial Sequence
  Description of Artificial Sequence: Synthetic oligonucleotide
  Sense strand starting at position 2885 of SEQ ID NO: 317926
uagauuagccuuuaggacu

SEQ ID NO: 523158 - RNA, 19 nt, Artificial Sequence
  Description of Artificial Sequence: Synthetic oligonucleotide
  Antisense strand to SEQ ID NO: 523157
aguccuaaaggcuaaucua

SEQ ID NO: 523159 - RNA, 19 nt, Artificial Sequence
  Description of Artificial Sequence: Synthetic oligonucleotide
  Sense strand starting at position 2924 of SEQ ID NO: 317926
ggcaauacccuucgaauua

SEQ ID NO: 523160 - RNA, 19 nt, Artificial Sequence
  Description of Artificial Sequence: Synthetic oligonucleotide
  Antisense strand to SEQ ID NO: 523159
uaauucgaaggguauugcc

SEQ ID NO: 523161 - RNA, 19 nt, Artificial Sequence
  Description of Artificial Sequence: Synthetic oligonucleotide
  Sense strand starting at position 2956 of SEQ ID NO: 317926
uugugaauuauagggcuua

SEQ ID NO: 523162 - RNA, 19 nt, Artificial Sequence
  Description of Artificial Sequence: Synthetic oligonucleotide
  Antisense strand to SEQ ID NO: 523161
uaagcccuauaauucacaa

SEQ ID NO: 523163 - RNA, 19 nt, Artificial Sequence
  Description of Artificial Sequence: Synthetic oligonucleotide
  Sense strand starting at position 2967 of SEQ ID NO: 317926
agggcuuaccauugugacu

SEQ ID NO: 523164 - RNA, 19 nt, Artificial Sequence
  Description of Artificial Sequence: Synthetic oligonucleotide
  Antisense strand to SEQ ID NO: 523163
agucacaaugguaagcccu

SEQ ID NO: 523165 - RNA, 19 nt, Artificial Sequence
  Description of Artificial Sequence: Synthetic oligonucleotide
  Sense strand starting at position 3150 of SEQ ID NO: 317926
uuaggaaauugcuugaccu

SEQ ID NO: 523166 - RNA, 19 nt, Artificial Sequence
  Description of Artificial Sequence: Synthetic oligonucleotide
  Antisense strand to SEQ ID NO: 523165
aggucaagcaauuuccuaa

SEQ ID NO: 523167 - RNA, 19 nt, Artificial Sequence
  Description of Artificial Sequence: Synthetic oligonucleotide
  Sense strand starting at position 3225 of SEQ ID NO: 317926
ggaguucugauagggagua

SEQ ID NO: 523168 - RNA, 19 nt, Artificial Sequence
  Description of Artificial Sequence: Synthetic oligonucleotide
  Antisense strand to SEQ ID NO: 523167
uacucccuaucagaacucc

SEQ ID NO: 523169 - RNA, 19 nt, Artificial Sequence
  Description of Artificial Sequence: Synthetic oligonucleotide
  Sense strand starting at position 3306 of SEQ ID NO: 317926
uugugucacaaaggugaua

SEQ ID NO: 523170 - RNA, 19 nt, Artificial Sequence
  Description of Artificial Sequence: Synthetic oligonucleotide
  Antisense strand to SEQ ID NO: 523169
uaucaccuuugugacacaa

SEQ ID NO: 523171 - RNA, 19 nt, Artificial Sequence
  Description of Artificial Sequence: Synthetic oligonucleotide
  Sense strand starting at position 3308 of SEQ ID NO: 317926
gugucacaaaggugauacu

SEQ ID NO: 523172 - RNA, 19 nt, Artificial Sequence
  Description of Artificial Sequence: Synthetic oligonucleotide
  Antisense strand to SEQ ID NO: 523171
aguaucaccuuugugacac

SEQ ID NO: 523173 - RNA, 19 nt, Artificial Sequence
  Description of Artificial Sequence: Synthetic oligonucleotide
  Sense strand starting at position 3363 of SEQ ID NO: 317926
uuugguugucaugaugaca

SEQ ID NO: 523174 - RNA, 19 nt, Artificial Sequence
  Description of Artificial Sequence: Synthetic oligonucleotide
  Antisense strand to SEQ ID NO: 523173
ugucaucaugacaaccaaa

SEQ ID NO: 523175 - RNA, 19 nt, Artificial Sequence
  Description of Artificial Sequence: Synthetic oligonucleotide
  Sense strand starting at position 3453 of SEQ ID NO: 317926
ugaagaacuguaugugacu

SEQ ID NO: 523176 - RNA, 19 nt, Artificial Sequence
  Description of Artificial Sequence: Synthetic oligonucleotide
  Antisense strand to SEQ ID NO: 523175
agucacauacaguucuuca

SEQ ID NO: 523177 - RNA, 19 nt, Artificial Sequence
  Description of Artificial Sequence: Synthetic oligonucleotide
  Sense strand starting at position 3454 of SEQ ID NO: 317926
gaagaacuguaugugacuu

SEQ ID NO: 523178 - RNA, 19 nt, Artificial Sequence
  Description of Artificial Sequence: Synthetic oligonucleotide
  Antisense strand to SEQ ID NO: 523177
aagucacauacaguucuuc

SEQ ID NO: 523179 - RNA, 19 nt, Artificial Sequence
  Description of Artificial Sequence: Synthetic oligonucleotide
  Sense strand starting at position 3514 of SEQ ID NO: 317926
uuacaauugucuguacuua

SEQ ID NO: 523180 - RNA, 19 nt, Artificial Sequence
  Description of Artificial Sequence: Synthetic oligonucleotide
  Antisense strand to SEQ ID NO: 523179
uaaguacagacaauuguaa

SEQ ID NO: 523181 - RNA, 19 nt, Artificial Sequence
  Description of Artificial Sequence: Synthetic oligonucleotide
  Sense strand starting at position 3608 of SEQ ID NO: 317926
agggaagauuguuauuugu

SEQ ID NO: 523182 - RNA, 19 nt, Artificial Sequence
  Description of Artificial Sequence: Synthetic oligonucleotide
  Antisense strand to SEQ ID NO: 523181
acaaauaacaaucuucccu

SEQ ID NO: 523183 - RNA, 19 nt, Artificial Sequence
  Description of Artificial Sequence: Synthetic oligonucleotide
  Sense strand starting at position 3684 of SEQ ID NO: 317926
ugcuuaaggguuuguauuu

SEQ ID NO: 523184 - RNA, 19 nt, Artificial Sequence
  Description of Artificial Sequence: Synthetic oligonucleotide
  Antisense strand to SEQ ID NO: 523183
aaauacaaacccuuaagca

SEQ ID NO: 523185 - RNA, 19 nt, Artificial Sequence
  Description of Artificial Sequence: Synthetic oligonucleotide
  Sense strand starting at position 3689 of SEQ ID NO: 317926
aaggguuuguauuuguguu

SEQ ID NO: 523186 - RNA, 19 nt, Artificial Sequence
  Description of Artificial Sequence: Synthetic oligonucleotide
  Antisense strand to SEQ ID NO: 523185
aacacaaauacaaacccuu

SEQ ID NO: 523187 - RNA, 19 nt, Artificial Sequence
  Description of Artificial Sequence: Synthetic oligonucleotide
  Sense strand starting at position 3697 of SEQ ID NO: 317926
guauuuguguugccaacac

SEQ ID NO: 523188 - RNA, 19 nt, Artificial Sequence
  Description of Artificial Sequence: Synthetic oligonucleotide
  Antisense strand to SEQ ID NO: 523187
guguuggcaacacaaauac

SEQ ID NO: 523189 - RNA, 19 nt, Artificial Sequence
  Description of Artificial Sequence: Synthetic oligonucleotide
  Sense strand starting at position 3770 of SEQ ID NO: 317926
uugcaugcagaguauugau

SEQ ID NO: 523190 - RNA, 19 nt, Artificial Sequence
  Description of Artificial Sequence: Synthetic oligonucleotide
  Antisense strand to SEQ ID NO: 523189
aucaauacucugcaugcaa

SEQ ID NO: 523191 - RNA, 19 nt, Artificial Sequence
  Description of Artificial Sequence: Synthetic oligonucleotide
  Sense strand starting at position 3778 of SEQ ID NO: 317926
agaguauugauguaagcau

SEQ ID NO: 523192 - RNA, 19 nt, Artificial Sequence
  Description of Artificial Sequence: Synthetic oligonucleotide
  Antisense strand to SEQ ID NO: 523191
augcuuacaucaauacucu

SEQ ID NO: 523193 - RNA, 19 nt, Artificial Sequence
  Description of Artificial Sequence: Synthetic oligonucleotide
  Sense strand starting at position 3785 of SEQ ID NO: 317926
ugauguaagcauuaugucu

SEQ ID NO: 523194 - RNA, 19 nt, Artificial Sequence
  Description of Artificial Sequence: Synthetic oligonucleotide
  Antisense strand to SEQ ID NO: 523193
agacauaaugcuuacauca

SEQ ID NO: 523195 - RNA, 19 nt, Artificial Sequence
  Description of Artificial Sequence: Synthetic oligonucleotide
  Sense strand starting at position 3812 of SEQ ID NO: 317926
aguugugcuugagcauuua

SEQ ID NO: 523196 - RNA, 19 nt, Artificial Sequence
  Description of Artificial Sequence: Synthetic oligonucleotide
  Antisense strand to SEQ ID NO: 523195
uaaaugcucaagcacaacu

SEQ ID NO: 523197 - RNA, 19 nt, Artificial Sequence
  Description of Artificial Sequence: Synthetic oligonucleotide
  Sense strand starting at position 3916 of SEQ ID NO: 317926
uaguguauuuguuugcaag

SEQ ID NO: 523198 - RNA, 19 nt, Artificial Sequence
  Description of Artificial Sequence: Synthetic oligonucleotide
  Antisense strand to SEQ ID NO: 523197
cuugcaaacaaauacacua

SEQ ID NO: 523199 - RNA, 19 nt, Artificial Sequence
  Description of Artificial Sequence: Synthetic oligonucleotide
  Sense strand starting at position 3918 of SEQ ID NO: 317926
guguauuuguuugcaaggu

SEQ ID NO: 523200 - RNA, 19 nt, Artificial Sequence
  Description of Artificial Sequence: Synthetic oligonucleotide
  Antisense strand to SEQ ID NO: 523199
accuugcaaacaaauacac

SEQ ID NO: 523201 - RNA, 19 nt, Artificial Sequence
  Description of Artificial Sequence: Synthetic oligonucleotide
  Sense strand starting at position 53 of SEQ ID NO: 317927
uuuagucugguccauacua

SEQ ID NO: 523202 - RNA, 19 nt, Artificial Sequence
  Description of Artificial Sequence: Synthetic oligonucleotide
  Antisense strand to SEQ ID NO: 523201
uaguauggaccagacuaaa

SEQ ID NO: 523203 - RNA, 19 nt, Artificial Sequence
  Description of Artificial Sequence: Synthetic oligonucleotide
  Sense strand starting at position 55 of SEQ ID NO: 317927
uagucugguccauacuagu

SEQ ID NO: 523204 - RNA, 19 nt, Artificial Sequence
  Description of Artificial Sequence: Synthetic oligonucleotide
  Antisense strand to SEQ ID NO: 523203
acuaguauggaccagacua

SEQ ID NO: 523205 - RNA, 19 nt, Artificial Sequence
  Description of Artificial Sequence: Synthetic oligonucleotide
  Sense strand starting at position 61 of SEQ ID NO: 317927
gguccauacuagucaauaa

SEQ ID NO: 523206 - RNA, 19 nt, Artificial Sequence
  Description of Artificial Sequence: Synthetic oligonucleotide
  Antisense strand to SEQ ID NO: 523205
uuauugacuaguauggacc

SEQ ID NO: 523207 - RNA, 19 nt, Artificial Sequence
  Description of Artificial Sequence: Synthetic oligonucleotide
  Sense strand starting at position 127 of SEQ ID NO: 317927
uugcaaagaucaucuguac

SEQ ID NO: 523208 - RNA, 19 nt, Artificial Sequence
  Description of Artificial Sequence: Synthetic oligonucleotide
  Antisense strand to SEQ ID NO: 523207
guacagaugaucuuugcaa

SEQ ID NO: 523209 - RNA, 19 nt, Artificial Sequence
  Description of Artificial Sequence: Synthetic oligonucleotide
  Sense strand starting at position 186 of SEQ ID NO: 317927
agauccacuucggugaauu

SEQ ID NO: 523210 - RNA, 19 nt, Artificial Sequence
  Description of Artificial Sequence: Synthetic oligonucleotide
  Antisense strand to SEQ ID NO: 523209
aauucaccgaaguggaucu

SEQ ID NO: 523211 - RNA, 19 nt, Artificial Sequence
  Description of Artificial Sequence: Synthetic oligonucleotide
  Sense strand starting at position 215 of SEQ ID NO: 317927
cccaaaugugugcauuaug

SEQ ID NO: 523212 - RNA, 19 nt, Artificial Sequence
  Description of Artificial Sequence: Synthetic oligonucleotide
  Antisense strand to SEQ ID NO: 523211
cauaaugcacacauuuggg

SEQ ID NO: 523213 - RNA, 19 nt, Artificial Sequence
  Description of Artificial Sequence: Synthetic oligonucleotide
  Sense strand starting at position 284 of SEQ ID NO: 317927
auauaaauggcuuggguau

SEQ ID NO: 523214 - RNA, 19 nt, Artificial Sequence
  Description of Artificial Sequence: Synthetic oligonucleotide
  Antisense strand to SEQ ID NO: 523213
auacccaagccauuuauau

SEQ ID NO: 523215 - RNA, 19 nt, Artificial Sequence
  Description of Artificial Sequence: Synthetic oligonucleotide
  Sense strand starting at position 285 of SEQ ID NO: 317927
uauaaauggcuuggguaua

SEQ ID NO: 523216 - RNA, 19 nt, Artificial Sequence
  Description of Artificial Sequence: Synthetic oligonucleotide
  Antisense strand to SEQ ID NO: 523215
uauacccaagccauuuaua

SEQ ID NO: 523217 - RNA, 19 nt, Artificial Sequence
  Description of Artificial Sequence: Synthetic oligonucleotide
  Sense strand starting at position 323 of SEQ ID NO: 317927
aguaauucgcaagaagcca

SEQ ID NO: 523218 - RNA, 19 nt, Artificial Sequence
  Description of Artificial Sequence: Synthetic oligonucleotide
  Antisense strand to SEQ ID NO: 523217
uggcuucuugcgaauuacu

SEQ ID NO: 523219 - RNA, 19 nt, Artificial Sequence
  Description of Artificial Sequence: Synthetic oligonucleotide
  Sense strand starting at position 331 of SEQ ID NO: 317927
gcaagaagccaacgaauua

SEQ ID NO: 523220 - RNA, 19 nt, Artificial Sequence
  Description of Artificial Sequence: Synthetic oligonucleotide
  Antisense strand to SEQ ID NO: 523219
uaauucguuggcuucuugc

SEQ ID NO: 523221 - RNA, 19 nt, Artificial Sequence
  Description of Artificial Sequence: Synthetic oligonucleotide
  Sense strand starting at position 559 of SEQ ID NO: 317927
gaauccacccgauacgaua

SEQ ID NO: 523222 - RNA, 19 nt, Artificial Sequence
  Description of Artificial Sequence: Synthetic oligonucleotide
  Antisense strand to SEQ ID NO: 523221
uaucguaucggguggauuc

SEQ ID NO: 523223 - RNA, 19 nt, Artificial Sequence
  Description of Artificial Sequence: Synthetic oligonucleotide
  Sense strand starting at position 640 of SEQ ID NO: 317927
agucaugggagucagugua

SEQ ID NO: 523224 - RNA, 19 nt, Artificial Sequence
  Description of Artificial Sequence: Synthetic oligonucleotide
  Antisense strand to SEQ ID NO: 523223
uacacugacucccaugacu

SEQ ID NO: 523225 - RNA, 19 nt, Artificial Sequence
  Description of Artificial Sequence: Synthetic oligonucleotide
  Sense strand starting at position 648 of SEQ ID NO: 317927
gagucaguguaauccagac

SEQ ID NO: 523226 - RNA, 19 nt, Artificial Sequence
  Description of Artificial Sequence: Synthetic oligonucleotide
  Antisense strand to SEQ ID NO: 523225
gucuggauuacacugacuc

SEQ ID NO: 523227 - RNA, 19 nt, Artificial Sequence
  Description of Artificial Sequence: Synthetic oligonucleotide
  Sense strand starting at position 792 of SEQ ID NO: 317927
gagggagaaucauacaaua

SEQ ID NO: 523228 - RNA, 19 nt, Artificial Sequence
  Description of Artificial Sequence: Synthetic oligonucleotide
  Antisense strand to SEQ ID NO: 523227
uauuguaugauucucccuc

SEQ ID NO: 523229 - RNA, 19 nt, Artificial Sequence
  Description of Artificial Sequence: Synthetic oligonucleotide
  Sense strand starting at position 1039 of SEQ ID NO: 317927
cgggcauucccucacacaa

SEQ ID NO: 523230 - RNA, 19 nt, Artificial Sequence
  Description of Artificial Sequence: Synthetic oligonucleotide
  Antisense strand to SEQ ID NO: 523229
uugugugagggaaugcccg

SEQ ID NO: 523231 - RNA, 19 nt, Artificial Sequence
  Description of Artificial Sequence: Synthetic oligonucleotide
  Sense strand starting at position 1818 of SEQ ID NO: 317927
gguauuaaagagugaccuu

SEQ ID NO: 523232 - RNA, 19 nt, Artificial Sequence
  Description of Artificial Sequence: Synthetic oligonucleotide
  Antisense strand to SEQ ID NO: 523231
aaggucacucuuuaauacc

SEQ ID NO: 523233 - RNA, 19 nt, Artificial Sequence
  Description of Artificial Sequence: Synthetic oligonucleotide
  Sense strand starting at position 1827 of SEQ ID NO: 317927
gagugaccuuggcuuagau

SEQ ID NO: 523234 - RNA, 19 nt, Artificial Sequence
  Description of Artificial Sequence: Synthetic oligonucleotide
  Antisense strand to SEQ ID NO: 523233
aucuaagccaaggucacuc

SEQ ID NO: 523235 - RNA, 19 nt, Artificial Sequence
  Description of Artificial Sequence: Synthetic oligonucleotide
  Sense strand starting at position 1829 of SEQ ID NO: 317927
gugaccuuggcuuagauau

SEQ ID NO: 523236 - RNA, 19 nt, Artificial Sequence
  Description of Artificial Sequence: Synthetic oligonucleotide
  Antisense strand to SEQ ID NO: 523235
auaucuaagccaaggucac

SEQ ID NO: 523237 - RNA, 19 nt, Artificial Sequence
  Description of Artificial Sequence: Synthetic oligonucleotide
  Sense strand starting at position 1958 of SEQ ID NO: 317927
cgcguaggcccuccugaaa

SEQ ID NO: 523238 - RNA, 19 nt, Artificial Sequence
  Description of Artificial Sequence: Synthetic oligonucleotide
  Antisense strand to SEQ ID NO: 523237
uuucaggagggccuacgcg

SEQ ID NO: 523239 - RNA, 19 nt, Artificial Sequence
  Description of Artificial Sequence: Synthetic oligonucleotide
  Sense strand starting at position 2208 of SEQ ID NO: 317927
ccguuuaaccgguacagaa

SEQ ID NO: 523240 - RNA, 19 nt, Artificial Sequence
  Description of Artificial Sequence: Synthetic oligonucleotide
  Antisense strand to SEQ ID NO: 523239
uucuguaccgguuaaacgg

SEQ ID NO: 523241 - RNA, 19 nt, Artificial Sequence
  Description of Artificial Sequence: Synthetic oligonucleotide
  Sense strand starting at position 2210 of SEQ ID NO: 317927
guuuaaccgguacagaaua

SEQ ID NO: 523242 - RNA, 19 nt, Artificial Sequence
  Description of Artificial Sequence: Synthetic oligonucleotide
  Antisense strand to SEQ ID NO: 523241
uauucuguaccgguuaaac

SEQ ID NO: 523243 - RNA, 19 nt, Artificial Sequence
  Description of Artificial Sequence: Synthetic oligonucleotide
  Sense strand starting at position 2371 of SEQ ID NO: 317927
gauaaauugucuuuaaggu

SEQ ID NO: 523244 - RNA, 19 nt, Artificial Sequence
  Description of Artificial Sequence: Synthetic oligonucleotide
  Antisense strand to SEQ ID NO: 523243
accuuaaagacaauuuauc

SEQ ID NO: 523245 - RNA, 19 nt, Artificial Sequence
  Description of Artificial Sequence: Synthetic oligonucleotide
  Sense strand starting at position 2481 of SEQ ID NO: 317927
auccaagaaccguaguauu

SEQ ID NO: 523246 - RNA, 19 nt, Artificial Sequence
  Description of Artificial Sequence: Synthetic oligonucleotide
  Antisense strand to SEQ ID NO: 523245
aauacuacgguucuuggau

SEQ ID NO: 523247 - RNA, 19 nt, Artificial Sequence
  Description of Artificial Sequence: Synthetic oligonucleotide
  Sense strand starting at position 2547 of SEQ ID NO: 317927
ggaaauauuuagcaaucac

SEQ ID NO: 523248 - RNA, 19 nt, Artificial Sequence
  Description of Artificial Sequence: Synthetic oligonucleotide
  Antisense strand to SEQ ID NO: 523247
gugauugcuaaauauuucc

SEQ ID NO: 523249 - RNA, 19 nt, Artificial Sequence
  Description of Artificial Sequence: Synthetic oligonucleotide
  Sense strand starting at position 2577 of SEQ ID NO: 317927
ucacgaauuuacuaaugau

SEQ ID NO: 523250 - RNA, 19 nt, Artificial Sequence
  Description of Artificial Sequence: Synthetic oligonucleotide
  Antisense strand to SEQ ID NO: 523249
aucauuaguaaauucguga

SEQ ID NO: 523251 - RNA, 19 nt, Artificial Sequence
  Description of Artificial Sequence: Synthetic oligonucleotide
  Sense strand starting at position 2627 of SEQ ID NO: 317927
aaagaaugcuuguugauau

SEQ ID NO: 523252 - RNA, 19 nt, Artificial Sequence
  Description of Artificial Sequence: Synthetic oligonucleotide
  Antisense strand to SEQ ID NO: 523251
auaucaacaagcauucuuu

SEQ ID NO: 523253 - RNA, 19 nt, Artificial Sequence
  Description of Artificial Sequence: Synthetic oligonucleotide
  Sense strand starting at position 2820 of SEQ ID NO: 317927
acccauagccagugaugaa

SEQ ID NO: 523254 - RNA, 19 nt, Artificial Sequence
  Description of Artificial Sequence: Synthetic oligonucleotide
  Antisense strand to SEQ ID NO: 523253
uucaucacuggcuaugggu

SEQ ID NO: 523255 - RNA, 19 nt, Artificial Sequence
  Description of Artificial Sequence: Synthetic oligonucleotide
  Sense strand starting at position 2827 of SEQ ID NO: 317927
gccagugaugaaugaaauu

SEQ ID NO: 523256 - RNA, 19 nt, Artificial Sequence
  Description of Artificial Sequence: Synthetic oligonucleotide
  Antisense strand to SEQ ID NO: 523255
aauuucauucaucacuggc

SEQ ID NO: 523257 - RNA, 19 nt, Artificial Sequence
  Description of Artificial Sequence: Synthetic oligonucleotide
  Sense strand starting at position 2923 of SEQ ID NO: 317927
ggaagcuuuggcuaccaga

SEQ ID NO: 523258 - RNA, 19 nt, Artificial Sequence
  Description of Artificial Sequence: Synthetic oligonucleotide
  Antisense strand to SEQ ID NO: 523257
ucugguagccaaagcuucc

SEQ ID NO: 523259 - RNA, 19 nt, Artificial Sequence
  Description of Artificial Sequence: Synthetic oligonucleotide
  Sense strand starting at position 2940 of SEQ ID NO: 317927
gacuaugcccuacagaugu

SEQ ID NO: 523260 - RNA, 19 nt, Artificial Sequence
  Description of Artificial Sequence: Synthetic oligonucleotide
  Antisense strand to SEQ ID NO: 523259
acaucuguagggcauaguc

SEQ ID NO: 523261 - RNA, 19 nt, Artificial Sequence
  Description of Artificial Sequence: Synthetic oligonucleotide
  Sense strand starting at position 3009 of SEQ ID NO: 317927
auuugaaaugccugggugu

SEQ ID NO: 523262 - RNA, 19 nt, Artificial Sequence
  Description of Artificial Sequence: Synthetic oligonucleotide
  Antisense strand to SEQ ID NO: 523261
acacccaggcauuucaaau

SEQ ID NO: 523263 - RNA, 19 nt, Artificial Sequence
  Description of Artificial Sequence: Synthetic oligonucleotide
  Sense strand starting at position 3022 of SEQ ID NO: 317927
gggugugauugacucuuag

SEQ ID NO: 523264 - RNA, 19 nt, Artificial Sequence
  Description of Artificial Sequence: Synthetic oligonucleotide
  Antisense strand to SEQ ID NO: 523263
cuaagagucaaucacaccc

SEQ ID NO: 523265 - RNA, 19 nt, Artificial Sequence
  Description of Artificial Sequence: Synthetic oligonucleotide
  Sense strand starting at position 3028 of SEQ ID NO: 317927
gauugacucuuagcuauug

SEQ ID NO: 523266 - RNA, 19 nt, Artificial Sequence
  Description of Artificial Sequence: Synthetic oligonucleotide
  Antisense strand to SEQ ID NO: 523265
caauagcuaagagucaauc

SEQ ID NO: 523267 - RNA, 19 nt, Artificial Sequence
  Description of Artificial Sequence: Synthetic oligonucleotide
  Sense strand starting at position 3052 of SEQ ID NO: 317927
gaaguaugcggguauuugu

SEQ ID NO: 523268 - RNA, 19 nt, Artificial Sequence
  Description of Artificial Sequence: Synthetic oligonucleotide
  Antisense strand to SEQ ID NO: 523267
acaaauacccgcauacuuc

SEQ ID NO: 523269 - RNA, 19 nt, Artificial Sequence
  Description of Artificial Sequence: Synthetic oligonucleotide
  Sense strand starting at position 3062 of SEQ ID NO: 317927
gguauuugugccuggguca

SEQ ID NO: 523270 - RNA, 19 nt, Artificial Sequence
  Description of Artificial Sequence: Synthetic oligonucleotide
  Antisense strand to SEQ ID NO: 523269
ugacccaggcacaaauacc

SEQ ID NO: 523271 - RNA, 19 nt, Artificial Sequence
  Description of Artificial Sequence: Synthetic oligonucleotide
  Sense strand starting at position 3106 of SEQ ID NO: 317927
gcuauucugguaggagaca

SEQ ID NO: 523272 - RNA, 19 nt, Artificial Sequence
  Description of Artificial Sequence: Synthetic oligonucleotide
  Antisense strand to SEQ ID NO: 523271
ugucuccuaccagaauagc

SEQ ID NO: 523273 - RNA, 19 nt, Artificial Sequence
  Description of Artificial Sequence: Synthetic oligonucleotide
  Sense strand starting at position 3548 of SEQ ID NO: 317927
cccucuuuggcugagauaa

SEQ ID NO: 523274 - RNA, 19 nt, Artificial Sequence
  Description of Artificial Sequence: Synthetic oligonucleotide
  Antisense strand to SEQ ID NO: 523273
uuaucucagccaaagaggg

SEQ ID NO: 523275 - RNA, 19 nt, Artificial Sequence
  Description of Artificial Sequence: Synthetic oligonucleotide
  Sense strand starting at position 3574 of SEQ ID NO: 317927
uuaucuuagugggcaaaga

SEQ ID NO: 523276 - RNA, 19 nt, Artificial Sequence
  Description of Artificial Sequence: Synthetic oligonucleotide
  Antisense strand to SEQ ID NO: 523275
ucuuugcccacuaagauaa

SEQ ID NO: 523277 - RNA, 19 nt, Artificial Sequence
  Description of Artificial Sequence: Synthetic oligonucleotide
  Sense strand starting at position 3621 of SEQ ID NO: 317927
agauuaguauaugcugaaa

SEQ ID NO: 523278 - RNA, 19 nt, Artificial Sequence
  Description of Artificial Sequence: Synthetic oligonucleotide
  Antisense strand to SEQ ID NO: 523277
uuucagcauauacuaaucu

SEQ ID NO: 523279 - RNA, 19 nt, Artificial Sequence
  Description of Artificial Sequence: Synthetic oligonucleotide
  Sense strand starting at position 3783 of SEQ ID NO: 317927
guucguucugauuguauuu

SEQ ID NO: 523280 - RNA, 19 nt, Artificial Sequence
  Description of Artificial Sequence: Synthetic oligonucleotide
  Antisense strand to SEQ ID NO: 523279
aaauacaaucagaacgaac

SEQ ID NO: 523281 - RNA, 19 nt, Artificial Sequence
  Description of Artificial Sequence: Synthetic oligonucleotide
  Sense strand starting at position 186 of SEQ ID NO: 317928
cugaaauguaaggguagau

SEQ ID NO: 523282 - RNA, 19 nt, Artificial Sequence
  Description of Artificial Sequence: Synthetic oligonucleotide
  Antisense strand to SEQ ID NO: 523281
aucuacccuuacauuucag

SEQ ID NO: 523283 - RNA, 19 nt, Artificial Sequence
  Description of Artificial Sequence: Synthetic oligonucleotide
  Sense strand starting at position 317 of SEQ ID NO: 317928
ggcgcugcugagcucuaau

SEQ ID NO: 523284 - RNA, 19 nt, Artificial Sequence
  Description of Artificial Sequence: Synthetic oligonucleotide
  Antisense strand to SEQ ID NO: 523283
auuagagcucagcagcgcc

SEQ ID NO: 523285 - RNA, 19 nt, Artificial Sequence
  Description of Artificial Sequence: Synthetic oligonucleotide
  Sense strand starting at position 413 of SEQ ID NO: 317928
caggauaaguggcuuguuu

SEQ ID NO: 523286 - RNA, 19 nt, Artificial Sequence
  Description of Artificial Sequence: Synthetic oligonucleotide
  Antisense strand to SEQ ID NO: 523285
aaacaagccacuuauccug

SEQ ID NO: 523287 - RNA, 19 nt, Artificial Sequence
  Description of Artificial Sequence: Synthetic oligonucleotide
  Sense strand starting at position 415 of SEQ ID NO: 317928
ggauaaguggcuuguuuac

SEQ ID NO: 523288 - RNA, 19 nt, Artificial Sequence
  Description of Artificial Sequence: Synthetic oligonucleotide
  Antisense strand to SEQ ID NO: 523287
guaaacaagccacuuaucc

SEQ ID NO: 523289 - RNA, 19 nt, Artificial Sequence
  Description of Artificial Sequence: Synthetic oligonucleotide
  Sense strand starting at position 417 of SEQ ID NO: 317928
auaaguggcuuguuuacau

SEQ ID NO: 523290 - RNA, 19 nt, Artificial Sequence
  Description of Artificial Sequence: Synthetic oligonucleotide
  Antisense strand to SEQ ID NO: 523289
auguaaacaagccacuuau

SEQ ID NO: 523291 - RNA, 19 nt, Artificial Sequence
  Description of Artificial Sequence: Synthetic oligonucleotide
  Sense strand starting at position 550 of SEQ ID NO: 317928
uggauuaauugguuaauuc

SEQ ID NO: 523292 - RNA, 19 nt, Artificial Sequence
  Description of Artificial Sequence: Synthetic oligonucleotide
  Antisense strand to SEQ ID NO: 523291
gaauuaaccaauuaaucca

SEQ ID NO: 523293 - RNA, 19 nt, Artificial Sequence
  Description of Artificial Sequence: Synthetic oligonucleotide
  Sense strand starting at position 581 of SEQ ID NO: 317928
caaucaaaccuccgugguu

SEQ ID NO: 523294 - RNA, 19 nt, Artificial Sequence
  Description of Artificial Sequence: Synthetic oligonucleotide
  Antisense strand to SEQ ID NO: 523293
aaccacggagguuugauug

SEQ ID NO: 523295 - RNA, 19 nt, Artificial Sequence
  Description of Artificial Sequence: Synthetic oligonucleotide
  Sense strand starting at position 582 of SEQ ID NO: 317928
aaucaaaccuccgugguuu

SEQ ID NO: 523296 - RNA, 19 nt, Artificial Sequence
  Description of Artificial Sequence: Synthetic oligonucleotide
  Antisense strand to SEQ ID NO: 523295
aaaccacggagguuugauu

SEQ ID NO: 523297 - RNA, 19 nt, Artificial Sequence
  Description of Artificial Sequence: Synthetic oligonucleotide
  Sense strand starting at position 606 of SEQ ID NO: 317928
ugacgccaucccuaaacaa

SEQ ID NO: 523298 - RNA, 19 nt, Artificial Sequence
  Description of Artificial Sequence: Synthetic oligonucleotide
  Antisense strand to SEQ ID NO: 523297
uuguuuagggauggcguca

SEQ ID NO: 523299 - RNA, 19 nt, Artificial Sequence
  Description of Artificial Sequence: Synthetic oligonucleotide
  Sense strand starting at position 621 of SEQ ID NO: 317928
acaaguguuuaaucuacuu

SEQ ID NO: 523300 - RNA, 19 nt, Artificial Sequence
  Description of Artificial Sequence: Synthetic oligonucleotide
  Antisense strand to SEQ ID NO: 523299
aaguagauuaaacacuugu

SEQ ID NO: 523301 - RNA, 19 nt, Artificial Sequence
  Description of Artificial Sequence: Synthetic oligonucleotide
  Sense strand starting at position 681 of SEQ ID NO: 317928
ccuuuaacucauugggcua

SEQ ID NO: 523302 - RNA, 19 nt, Artificial Sequence
  Description of Artificial Sequence: Synthetic oligonucleotide
  Antisense strand to SEQ ID NO: 523301
uagcccaaugaguuaaagg

SEQ ID NO: 523303 - RNA, 19 nt, Artificial Sequence
  Description of Artificial Sequence: Synthetic oligonucleotide
  Sense strand starting at position 715 of SEQ ID NO: 317928
aaagguguagugcaaauca

SEQ ID NO: 523304 - RNA, 19 nt, Artificial Sequence
  Description of Artificial Sequence: Synthetic oligonucleotide
  Antisense strand to SEQ ID NO: 523303
ugauuugcacuacaccuuu

SEQ ID NO: 523305 - RNA, 19 nt, Artificial Sequence
  Description of Artificial Sequence: Synthetic oligonucleotide
  Sense strand starting at position 873 of SEQ ID NO: 317928
ggcauaguuccagguacca

SEQ ID NO: 523306 - RNA, 19 nt, Artificial Sequence
  Description of Artificial Sequence: Synthetic oligonucleotide
  Antisense strand to SEQ ID NO: 523305
ugguaccuggaacuaugcc

SEQ ID NO: 523307 - RNA, 19 nt, Artificial Sequence
  Description of Artificial Sequence: Synthetic oligonucleotide
  Sense strand starting at position 1046 of SEQ ID NO: 317928
gguacauucuccucaguuu

SEQ ID NO: 523308 - RNA, 19 nt, Artificial Sequence
  Description of Artificial Sequence: Synthetic oligonucleotide
  Antisense strand to SEQ ID NO: 523307
aaacugaggagaauguacc

SEQ ID NO: 523309 - RNA, 19 nt, Artificial Sequence
  Description of Artificial Sequence: Synthetic oligonucleotide
  Sense strand starting at position 1990 of SEQ ID NO: 317928
gcuguuaagguucaaaggu

SEQ ID NO: 523310 - RNA, 19 nt, Artificial Sequence
  Description of Artificial Sequence: Synthetic oligonucleotide
  Antisense strand to SEQ ID NO: 523309
accuuugaaccuuaacagc

SEQ ID NO: 523311 - RNA, 19 nt, Artificial Sequence
  Description of Artificial Sequence: Synthetic oligonucleotide
  Sense strand starting at position 2019 of SEQ ID NO: 317928
aucgcagauucucugacau

SEQ ID NO: 523312 - RNA, 19 nt, Artificial Sequence
  Description of Artificial Sequence: Synthetic oligonucleotide
  Antisense strand to SEQ ID NO: 523311
augucagagaaucugcgau

SEQ ID NO: 523313 - RNA, 19 nt, Artificial Sequence
  Description of Artificial Sequence: Synthetic oligonucleotide
  Sense strand starting at position 2167 of SEQ ID NO: 317928
ucaaauguggcagaauauu

SEQ ID NO: 523314 - RNA, 19 nt, Artificial Sequence
  Description of Artificial Sequence: Synthetic oligonucleotide
  Antisense strand to SEQ ID NO: 523313
aauauucugccacauuuga

SEQ ID NO: 523315 - RNA, 19 nt, Artificial Sequence
  Description of Artificial Sequence: Synthetic oligonucleotide
  Sense strand starting at position 2191 of SEQ ID NO: 317928
auguuaacauguucuguuu

SEQ ID NO: 523316 - RNA, 19 nt, Artificial Sequence
  Description of Artificial Sequence: Synthetic oligonucleotide
  Antisense strand to SEQ ID NO: 523315
aaacagaacauguuaacau

SEQ ID NO: 523317 - RNA, 19 nt, Artificial Sequence
  Description of Artificial Sequence: Synthetic oligonucleotide
  Sense strand starting at position 2276 of SEQ ID NO: 317928
guguucauugcucagagga

SEQ ID NO: 523318 - RNA, 19 nt, Artificial Sequence
  Description of Artificial Sequence: Synthetic oligonucleotide
  Antisense strand to SEQ ID NO: 523317
uccucugagcaaugaacac

SEQ ID NO: 523319 - RNA, 19 nt, Artificial Sequence
  Description of Artificial Sequence: Synthetic oligonucleotide
  Sense strand starting at position 2324 of SEQ ID NO: 317928
gcauguuaaucaucuugac

SEQ ID NO: 523320 - RNA, 19 nt, Artificial Sequence
  Description of Artificial Sequence: Synthetic oligonucleotide
  Antisense strand to SEQ ID NO: 523319
gucaagaugauuaacaugc

SEQ ID NO: 523321 - RNA, 19 nt, Artificial Sequence
  Description of Artificial Sequence: Synthetic oligonucleotide
  Sense strand starting at position 2702 of SEQ ID NO: 317928
aucucaaacucuguaggaa

SEQ ID NO: 523322 - RNA, 19 nt, Artificial Sequence
  Description of Artificial Sequence: Synthetic oligonucleotide
  Antisense strand to SEQ ID NO: 523321
uuccuacagaguuugagau

SEQ ID NO: 523323 - RNA, 19 nt, Artificial Sequence
  Description of Artificial Sequence: Synthetic oligonucleotide
  Sense strand starting at position 2795 of SEQ ID NO: 317928
aguguugagagguacugau

SEQ ID NO: 523324 - RNA, 19 nt, Artificial Sequence
  Description of Artificial Sequence: Synthetic oligonucleotide
  Antisense strand to SEQ ID NO: 523323
aucaguaccucucaacacu

SEQ ID NO: 523325 - RNA, 19 nt, Artificial Sequence
  Description of Artificial Sequence: Synthetic oligonucleotide
  Sense strand starting at position 2932 of SEQ ID NO: 317928
cagaaucauggcgaccuau

SEQ ID NO: 523326 - RNA, 19 nt, Artificial Sequence
  Description of Artificial Sequence: Synthetic oligonucleotide
  Antisense strand to SEQ ID NO: 523325
auaggucgccaugauucug

SEQ ID NO: 523327 - RNA, 19 nt, Artificial Sequence
  Description of Artificial Sequence: Synthetic oligonucleotide
  Sense strand starting at position 3022 of SEQ ID NO: 317928
agcuguaugcuccaauaac

SEQ ID NO: 523328 - RNA, 19 nt, Artificial Sequence
  Description of Artificial Sequence: Synthetic oligonucleotide
  Antisense strand to SEQ ID NO: 523327
guuauuggagcauacagcu

SEQ ID NO: 523329 - RNA, 19 nt, Artificial Sequence
  Description of Artificial Sequence: Synthetic oligonucleotide
  Sense strand starting at position 3071 of SEQ ID NO: 317928
accucagcccuguaugauu

SEQ ID NO: 523330 - RNA, 19 nt, Artificial Sequence
  Description of Artificial Sequence: Synthetic oligonucleotide
  Antisense strand to SEQ ID NO: 523329
aaucauacagggcugaggu

SEQ ID NO: 523331 - RNA, 19 nt, Artificial Sequence
  Description of Artificial Sequence: Synthetic oligonucleotide
  Sense strand starting at position 3080 of SEQ ID NO: 317928
cuguaugauuuccaaauag

SEQ ID NO: 523332 - RNA, 19 nt, Artificial Sequence
  Description of Artificial Sequence: Synthetic oligonucleotide
  Antisense strand to SEQ ID NO: 523331
cuauuuggaaaucauacag

SEQ ID NO: 523333 - RNA, 19 nt, Artificial Sequence
  Description of Artificial Sequence: Synthetic oligonucleotide
  Sense strand starting at position 3201 of SEQ ID NO: 317928
ugcucaugggcugaaaugu

SEQ ID NO: 523334 - RNA, 19 nt, Artificial Sequence
  Description of Artificial Sequence: Synthetic oligonucleotide
  Antisense strand to SEQ ID NO: 523333
acauuucagcccaugagca

SEQ ID NO: 523335 - RNA, 19 nt, Artificial Sequence
  Description of Artificial Sequence: Synthetic oligonucleotide
  Sense strand starting at position 3209 of SEQ ID NO: 317928
ggcugaaauguauaccagu

SEQ ID NO: 523336 - RNA, 19 nt, Artificial Sequence
  Description of Artificial Sequence: Synthetic oligonucleotide
  Antisense strand to SEQ ID NO: 523335
acugguauacauuucagcc

SEQ ID NO: 523337 - RNA, 19 nt, Artificial Sequence
  Description of Artificial Sequence: Synthetic oligonucleotide
  Sense strand starting at position 3245 of SEQ ID NO: 317928
cuggaucuuccugauucca

SEQ ID NO: 523338 - RNA, 19 nt, Artificial Sequence
  Description of Artificial Sequence: Synthetic oligonucleotide
  Antisense strand to SEQ ID NO: 523337
uggaaucaggaagauccag

SEQ ID NO: 523339 - RNA, 19 nt, Artificial Sequence
  Description of Artificial Sequence: Synthetic oligonucleotide
  Sense strand starting at position 3247 of SEQ ID NO: 317928
ggaucuuccugauuccaau

SEQ ID NO: 523340 - RNA, 19 nt, Artificial Sequence
  Description of Artificial Sequence: Synthetic oligonucleotide
  Antisense strand to SEQ ID NO: 523339
auuggaaucaggaagaucc

SEQ ID NO: 523341 - RNA, 19 nt, Artificial Sequence
  Description of Artificial Sequence: Synthetic oligonucleotide
  Sense strand starting at position 3309 of SEQ ID NO: 317928
gugggacuauuaguugaca

SEQ ID NO: 523342 - RNA, 19 nt, Artificial Sequence
  Description of Artificial Sequence: Synthetic oligonucleotide
  Antisense strand to SEQ ID NO: 523341
ugucaacuaauagucccac

SEQ ID NO: 523343 - RNA, 19 nt, Artificial Sequence
  Description of Artificial Sequence: Synthetic oligonucleotide
  Sense strand starting at position 3310 of SEQ ID NO: 317928
ugggacuauuaguugacaa

SEQ ID NO: 523344 - RNA, 19 nt, Artificial Sequence
  Description of Artificial Sequence: Synthetic oligonucleotide
  Antisense strand to SEQ ID NO: 523343
uugucaacuaauaguccca

SEQ ID NO: 523345 - RNA, 19 nt, Artificial Sequence
  Description of Artificial Sequence: Synthetic oligonucleotide
  Sense strand starting at position 3584 of SEQ ID NO: 317928
guauaauaggaaugcaguu

SEQ ID NO: 523346 - RNA, 19 nt, Artificial Sequence
  Description of Artificial Sequence: Synthetic oligonucleotide
  Antisense strand to SEQ ID NO: 523345
aacugcauuccuauuauac

SEQ ID NO: 523347 - RNA, 19 nt, Artificial Sequence
  Description of Artificial Sequence: Synthetic oligonucleotide
  Sense strand starting at position 3709 of SEQ ID NO: 317928
guguuugagauagaggagu

SEQ ID NO: 523348 - RNA, 19 nt, Artificial Sequence
  Description of Artificial Sequence: Synthetic oligonucleotide
  Antisense strand to SEQ ID NO: 523347
acuccucuaucucaaacac

SEQ ID NO: 523349 - RNA, 19 nt, Artificial Sequence
  Description of Artificial Sequence: Synthetic oligonucleotide
  Sense strand starting at position 3768 of SEQ ID NO: 317928
gucauuucuccuugaaugc

SEQ ID NO: 523350 - RNA, 19 nt, Artificial Sequence
  Description of Artificial Sequence: Synthetic oligonucleotide
  Antisense strand to SEQ ID NO: 523349
gcauucaaggagaaaugac

SEQ ID NO: 523351 - RNA, 19 nt, Artificial Sequence
  Description of Artificial Sequence: Synthetic oligonucleotide
  Sense strand starting at position 3787 of SEQ ID NO: 317928
agcaguauguaccuacaaa

SEQ ID NO: 523352 - RNA, 19 nt, Artificial Sequence
  Description of Artificial Sequence: Synthetic oligonucleotide
  Antisense strand to SEQ ID NO: 523351
uuuguagguacauacugcu

SEQ ID NO: 523353 - RNA, 19 nt, Artificial Sequence
  Description of Artificial Sequence: Synthetic oligonucleotide
  Sense strand starting at position 3935 of SEQ ID NO: 317928
auaacuguauuguugagau

SEQ ID NO: 523354 - RNA, 19 nt, Artificial Sequence
  Description of Artificial Sequence: Synthetic oligonucleotide
  Antisense strand to SEQ ID NO: 523353
aucucaacaauacaguuau

SEQ ID NO: 523355 - RNA, 19 nt, Artificial Sequence
  Description of Artificial Sequence: Synthetic oligonucleotide
  Sense strand starting at position 3937 of SEQ ID NO: 317928
aacuguauuguugagauca

SEQ ID NO: 523356 - RNA, 19 nt, Artificial Sequence
  Description of Artificial Sequence: Synthetic oligonucleotide
  Antisense strand to SEQ ID NO: 523355
ugaucucaacaauacaguu

SEQ ID NO: 523357 - RNA, 19 nt, Artificial Sequence
  Description of Artificial Sequence: Synthetic oligonucleotide
  Sense strand starting at position 3976 of SEQ ID NO: 317928
cauugugauugguugauac

SEQ ID NO: 523358 - RNA, 19 nt, Artificial Sequence
  Description of Artificial Sequence: Synthetic oligonucleotide
  Antisense strand to SEQ ID NO: 523357
guaucaaccaaucacaaug

SEQ ID NO: 523359 - RNA, 19 nt, Artificial Sequence
  Description of Artificial Sequence: Synthetic oligonucleotide
  Sense strand starting at position 3978 of SEQ ID NO: 317928
uugugauugguugauacau

SEQ ID NO: 523360 - RNA, 19 nt, Artificial Sequence
  Description of Artificial Sequence: Synthetic oligonucleotide
  Antisense strand to SEQ ID NO: 523359
auguaucaaccaaucacaa

SEQ ID NO: 523361 - RNA, 19 nt, Artificial Sequence
  Description of Artificial Sequence: Synthetic oligonucleotide
  Sense strand starting at position 84 of SEQ ID NO: 317929
aguguucccuuaucagaga

SEQ ID NO: 523362 - RNA, 19 nt, Artificial Sequence
  Description of Artificial Sequence: Synthetic oligonucleotide
  Antisense strand to SEQ ID NO: 523361
ucucugauaagggaacacu

SEQ ID NO: 523363 - RNA, 19 nt, Artificial Sequence
  Description of Artificial Sequence: Synthetic oligonucleotide
  Sense strand starting at position 555 of SEQ ID NO: 317929
auguaaguuccaggagcaa

SEQ ID NO: 523364 - RNA, 19 nt, Artificial Sequence
  Description of Artificial Sequence: Synthetic oligonucleotide
  Antisense strand to SEQ ID NO: 523363
uugcuccuggaacuuacau

SEQ ID NO: 523365 - RNA, 19 nt, Artificial Sequence
  Description of Artificial Sequence: Synthetic oligonucleotide
  Sense strand starting at position 630 of SEQ ID NO: 317929
cacugaagguugccaguaa

SEQ ID NO: 523366 - RNA, 19 nt, Artificial Sequence
  Description of Artificial Sequence: Synthetic oligonucleotide
  Antisense strand to SEQ ID NO: 523365
uuacuggcaaccuucagug

SEQ ID NO: 523367 - RNA, 19 nt, Artificial Sequence
  Description of Artificial Sequence: Synthetic oligonucleotide
  Sense strand starting at position 634 of SEQ ID NO: 317929
gaagguugccaguaaauac

SEQ ID NO: 523368 - RNA, 19 nt, Artificial Sequence
  Description of Artificial Sequence: Synthetic oligonucleotide
  Antisense strand to SEQ ID NO: 523367
guauuuacuggcaaccuuc

SEQ ID NO: 523369 - RNA, 19 nt, Artificial Sequence
  Description of Artificial Sequence: Synthetic oligonucleotide
  Sense strand starting at position 788 of SEQ ID NO: 317929
aggauucacugguuaagug

SEQ ID NO: 523370 - RNA, 19 nt, Artificial Sequence
  Description of Artificial Sequence: Synthetic oligonucleotide
  Antisense strand to SEQ ID NO: 523369
cacuuaaccagugaauccu

SEQ ID NO: 523371 - RNA, 19 nt, Artificial Sequence
  Description of Artificial Sequence: Synthetic oligonucleotide
  Sense strand starting at position 795 of SEQ ID NO: 317929
acugguuaaguggaaguaa

SEQ ID NO: 523372 - RNA, 19 nt, Artificial Sequence
  Description of Artificial Sequence: Synthetic oligonucleotide
  Antisense strand to SEQ ID NO: 523371
uuacuuccacuuaaccagu

SEQ ID NO: 523373 - RNA, 19 nt, Artificial Sequence
  Description of Artificial Sequence: Synthetic oligonucleotide
  Sense strand starting at position 806 of SEQ ID NO: 317929
ggaaguaaggccuaguuga

SEQ ID NO: 523374 - RNA, 19 nt, Artificial Sequence
  Description of Artificial Sequence: Synthetic oligonucleotide
  Antisense strand to SEQ ID NO: 523373
ucaacuaggccuuacuucc

SEQ ID NO: 523375 - RNA, 19 nt, Artificial Sequence
  Description of Artificial Sequence: Synthetic oligonucleotide
  Sense strand starting at position 914 of SEQ ID NO: 317929
gcuaaauguauacagugua

SEQ ID NO: 523376 - RNA, 19 nt, Artificial Sequence
  Description of Artificial Sequence: Synthetic oligonucleotide
  Antisense strand to SEQ ID NO: 523375
uacacuguauacauuuagc

SEQ ID NO: 523377 - RNA, 19 nt, Artificial Sequence
  Description of Artificial Sequence: Synthetic oligonucleotide
  Sense strand starting at position 942 of SEQ ID NO: 317929
cgcauuguaggauaaagaa

SEQ ID NO: 523378 - RNA, 19 nt, Artificial Sequence
  Description of Artificial Sequence: Synthetic oligonucleotide
  Antisense strand to SEQ ID NO: 523377
uucuuuauccuacaaugcg

SEQ ID NO: 523379 - RNA, 19 nt, Artificial Sequence
  Description of Artificial Sequence: Synthetic oligonucleotide
  Sense strand starting at position 977 of SEQ ID NO: 317929
gauauuuguuaugcaguau

SEQ ID NO: 523380 - RNA, 19 nt, Artificial Sequence
  Description of Artificial Sequence: Synthetic oligonucleotide
  Antisense strand to SEQ ID NO: 523379
auacugcauaacaaauauc

SEQ ID NO: 523381 - RNA, 19 nt, Artificial Sequence
  Description of Artificial Sequence: Synthetic oligonucleotide
  Sense strand starting at position 1019 of SEQ ID NO: 317929
ugucauguacuacauuaaa

SEQ ID NO: 523382 - RNA, 19 nt, Artificial Sequence
  Description of Artificial Sequence: Synthetic oligonucleotide
  Antisense strand to SEQ ID NO: 523381
uuuaauguaguacaugaca

SEQ ID NO: 523383 - RNA, 19 nt, Artificial Sequence
  Description of Artificial Sequence: Synthetic oligonucleotide
  Sense strand starting at position 1188 of SEQ ID NO: 317929
aguuucuuggcccaacaga

SEQ ID NO: 523384 - RNA, 19 nt, Artificial Sequence
  Description of Artificial Sequence: Synthetic oligonucleotide
  Antisense strand to SEQ ID NO: 523383
ucuguugggccaagaaacu

SEQ ID NO: 523385 - RNA, 19 nt, Artificial Sequence
  Description of Artificial Sequence: Synthetic oligonucleotide
  Sense strand starting at position 1204 of SEQ ID NO: 317929
agauauagacccuggagca

SEQ ID NO: 523386 - RNA, 19 nt, Artificial Sequence
  Description of Artificial Sequence: Synthetic oligonucleotide
  Antisense strand to SEQ ID NO: 523385
ugcuccagggucuauaucu

SEQ ID NO: 523387 - RNA, 19 nt, Artificial Sequence
  Description of Artificial Sequence: Synthetic oligonucleotide
  Sense strand starting at position 1220 of SEQ ID NO: 317929
gcacuauaagaauauguua

SEQ ID NO: 523388 - RNA, 19 nt, Artificial Sequence
  Description of Artificial Sequence: Synthetic oligonucleotide
  Antisense strand to SEQ ID NO: 523387
uaacauauucuuauagugc

SEQ ID NO: 523389 - RNA, 19 nt, Artificial Sequence
  Description of Artificial Sequence: Synthetic oligonucleotide
  Sense strand starting at position 1351 of SEQ ID NO: 317929
gcgcccaugcauguuacaa

SEQ ID NO: 523390 - RNA, 19 nt, Artificial Sequence
  Description of Artificial Sequence: Synthetic oligonucleotide
  Antisense strand to SEQ ID NO: 523389
uuguaacaugcaugggcgc

SEQ ID NO: 523391 - RNA, 19 nt, Artificial Sequence
  Description of Artificial Sequence: Synthetic oligonucleotide
  Sense strand starting at position 1965 of SEQ ID NO: 317929
aggagauugauacgucauu

SEQ ID NO: 523392 - RNA, 19 nt, Artificial Sequence
  Description of Artificial Sequence: Synthetic oligonucleotide
  Antisense strand to SEQ ID NO: 523391
aaugacguaucaaucuccu

SEQ ID NO: 523393 - RNA, 19 nt, Artificial Sequence
  Description of Artificial Sequence: Synthetic oligonucleotide
  Sense strand starting at position 1966 of SEQ ID NO: 317929
ggagauugauacgucauua

SEQ ID NO: 523394 - RNA, 19 nt, Artificial Sequence
  Description of Artificial Sequence: Synthetic oligonucleotide
  Antisense strand to SEQ ID NO: 523393
uaaugacguaucaaucucc

SEQ ID NO: 523395 - RNA, 19 nt, Artificial Sequence
  Description of Artificial Sequence: Synthetic oligonucleotide
  Sense strand starting at position 2084 of SEQ ID NO: 317929
gugaauuaaguguaguucu

SEQ ID NO: 523396 - RNA, 19 nt, Artificial Sequence
  Description of Artificial Sequence: Synthetic oligonucleotide
  Antisense strand to SEQ ID NO: 523395
agaacuacacuuaauucac

SEQ ID NO: 523397 - RNA, 19 nt, Artificial Sequence
  Description of Artificial Sequence: Synthetic oligonucleotide
  Sense strand starting at position 2299 of SEQ ID NO: 317929
gaggucuagauucggaaga

SEQ ID NO: 523398 - RNA, 19 nt, Artificial Sequence
  Description of Artificial Sequence: Synthetic oligonucleotide
  Antisense strand to SEQ ID NO: 523397
ucuuccgaaucuagaccuc

SEQ ID NO: 523399 - RNA, 19 nt, Artificial Sequence
  Description of Artificial Sequence: Synthetic oligonucleotide
  Sense strand starting at position 2511 of SEQ ID NO: 317929
uuuagauaguacucucaga

SEQ ID NO: 523400 - RNA, 19 nt, Artificial Sequence
  Description of Artificial Sequence: Synthetic oligonucleotide
  Antisense strand to SEQ ID NO: 523399
ucugagaguacuaucuaaa

SEQ ID NO: 523401 - RNA, 19 nt, Artificial Sequence
  Description of Artificial Sequence: Synthetic oligonucleotide
  Sense strand starting at position 2585 of SEQ ID NO: 317929
ggguaacaaagcugaguua

SEQ ID NO: 523402 - RNA, 19 nt, Artificial Sequence
  Description of Artificial Sequence: Synthetic oligonucleotide
  Antisense strand to SEQ ID NO: 523401
uaacucagcuuuguuaccc

SEQ ID NO: 523403 - RNA, 19 nt, Artificial Sequence
  Description of Artificial Sequence: Synthetic oligonucleotide
  Sense strand starting at position 2588 of SEQ ID NO: 317929
uaacaaagcugaguuagau

SEQ ID NO: 523404 - RNA, 19 nt, Artificial Sequence
  Description of Artificial Sequence: Synthetic oligonucleotide
  Antisense strand to SEQ ID NO: 523403
aucuaacucagcuuuguua

SEQ ID NO: 523405 - RNA, 19 nt, Artificial Sequence
  Description of Artificial Sequence: Synthetic oligonucleotide
  Sense strand starting at position 2760 of SEQ ID NO: 317929
auguaaacucacugauggu

SEQ ID NO: 523406 - RNA, 19 nt, Artificial Sequence
  Description of Artificial Sequence: Synthetic oligonucleotide
  Antisense strand to SEQ ID NO: 523405
accaucagugaguuuacau

SEQ ID NO: 523407 - RNA, 19 nt, Artificial Sequence
  Description of Artificial Sequence: Synthetic oligonucleotide
  Sense strand starting at position 2861 of SEQ ID NO: 317929
augacugaaugaucacagu

SEQ ID NO: 523408 - RNA, 19 nt, Artificial Sequence
  Description of Artificial Sequence: Synthetic oligonucleotide
  Antisense strand to SEQ ID NO: 523407
acugugaucauucagucau

SEQ ID NO: 523409 - RNA, 19 nt, Artificial Sequence
  Description of Artificial Sequence: Synthetic oligonucleotide
  Sense strand starting at position 2867 of SEQ ID NO: 317929
gaaugaucacagugguaaa

SEQ ID NO: 523410 - RNA, 19 nt, Artificial Sequence
  Description of Artificial Sequence: Synthetic oligonucleotide
  Antisense strand to SEQ ID NO: 523409
uuuaccacugugaucauuc

SEQ ID NO: 523411 - RNA, 19 nt, Artificial Sequence
  Description of Artificial Sequence: Synthetic oligonucleotide
  Sense strand starting at position 2925 of SEQ ID NO: 317929
aagaaagugguguaaguaa

SEQ ID NO: 523412 - RNA, 19 nt, Artificial Sequence
  Description of Artificial Sequence: Synthetic oligonucleotide
  Antisense strand to SEQ ID NO: 523411
uuacuuacaccacuuucuu

SEQ ID NO: 523413 - RNA, 19 nt, Artificial Sequence
  Description of Artificial Sequence: Synthetic oligonucleotide
  Sense strand starting at position 2938 of SEQ ID NO: 317929
aaguaaguggcgggagaua

SEQ ID NO: 523414 - RNA, 19 nt, Artificial Sequence
  Description of Artificial Sequence: Synthetic oligonucleotide
  Antisense strand to SEQ ID NO: 523413
uaucucccgccacuuacuu

SEQ ID NO: 523415 - RNA, 19 nt, Artificial Sequence
  Description of Artificial Sequence: Synthetic oligonucleotide
  Sense strand starting at position 2983 of SEQ ID NO: 317929
acuggaguuagccagaacu

SEQ ID NO: 523416 - RNA, 19 nt, Artificial Sequence
  Description of Artificial Sequence: Synthetic oligonucleotide
  Antisense strand to SEQ ID NO: 523415
aguucuggcuaacuccagu

SEQ ID NO: 523417 - RNA, 19 nt, Artificial Sequence
  Description of Artificial Sequence: Synthetic oligonucleotide
  Sense strand starting at position 3060 of SEQ ID NO: 317929
acucaaaugguuuguagag

SEQ ID NO: 523418 - RNA, 19 nt, Artificial Sequence
  Description of Artificial Sequence: Synthetic oligonucleotide
  Antisense strand to SEQ ID NO: 523417
cucuacaaaccauuugagu

SEQ ID NO: 523419 - RNA, 19 nt, Artificial Sequence
  Description of Artificial Sequence: Synthetic oligonucleotide
  Sense strand starting at position 3129 of SEQ ID NO: 317929
cuaugucaugcugaguaau

SEQ ID NO: 523420 - RNA, 19 nt, Artificial Sequence
  Description of Artificial Sequence: Synthetic oligonucleotide
  Antisense strand to SEQ ID NO: 523419
auuacucagcaugacauag

SEQ ID NO: 523421 - RNA, 19 nt, Artificial Sequence
  Description of Artificial Sequence: Synthetic oligonucleotide
  Sense strand starting at position 3131 of SEQ ID NO: 317929
augucaugcugaguaauuu

SEQ ID NO: 523422 - RNA, 19 nt, Artificial Sequence
  Description of Artificial Sequence: Synthetic oligonucleotide
  Antisense strand to SEQ ID NO: 523421
aaauuacucagcaugacau

SEQ ID NO: 523423 - RNA, 19 nt, Artificial Sequence
  Description of Artificial Sequence: Synthetic oligonucleotide
  Sense strand starting at position 3177 of SEQ ID NO: 317929
gcugaaggauuguugaaca

SEQ ID NO: 523424 - RNA, 19 nt, Artificial Sequence
  Description of Artificial Sequence: Synthetic oligonucleotide
  Antisense strand to SEQ ID NO: 523423
uguucaacaauccuucagc

SEQ ID NO: 523425 - RNA, 19 nt, Artificial Sequence
  Description of Artificial Sequence: Synthetic oligonucleotide
  Sense strand starting at position 3428 of SEQ ID NO: 317929
auagaaauagaacguaagu

SEQ ID NO: 523426 - RNA, 19 nt, Artificial Sequence
  Description of Artificial Sequence: Synthetic oligonucleotide
  Antisense strand to SEQ ID NO: 523425
acuuacguucuauuucuau

SEQ ID NO: 523427 - RNA, 19 nt, Artificial Sequence
  Description of Artificial Sequence: Synthetic oligonucleotide
  Sense strand starting at position 3434 of SEQ ID NO: 317929
auagaacguaagugagaaa

SEQ ID NO: 523428 - RNA, 19 nt, Artificial Sequence
  Description of Artificial Sequence: Synthetic oligonucleotide
  Antisense strand to SEQ ID NO: 523427
uuucucacuuacguucuau

SEQ ID NO: 523429 - RNA, 19 nt, Artificial Sequence
  Description of Artificial Sequence: Synthetic oligonucleotide
  Sense strand starting at position 3534 of SEQ ID NO: 317929
agaugagugacaugaccuu

SEQ ID NO: 523430 - RNA, 19 nt, Artificial Sequence
  Description of Artificial Sequence: Synthetic oligonucleotide
  Antisense strand to SEQ ID NO: 523429
aaggucaugucacucaucu

SEQ ID NO: 523431 - RNA, 19 nt, Artificial Sequence
  Description of Artificial Sequence: Synthetic oligonucleotide
  Sense strand starting at position 3590 of SEQ ID NO: 317929
gggaauguacuuuguucag

SEQ ID NO: 523432 - RNA, 19 nt, Artificial Sequence
  Description of Artificial Sequence: Synthetic oligonucleotide
  Antisense strand to SEQ ID NO: 523431
cugaacaaaguacauuccc

SEQ ID NO: 523433 - RNA, 19 nt, Artificial Sequence
  Description of Artificial Sequence: Synthetic oligonucleotide
  Sense strand starting at position 3656 of SEQ ID NO: 317929
gcuggacuuacaugggaau

SEQ ID NO: 523434 - RNA, 19 nt, Artificial Sequence
  Description of Artificial Sequence: Synthetic oligonucleotide
  Antisense strand to SEQ ID NO: 523433
auucccauguaaguccagc

SEQ ID NO: 523435 - RNA, 19 nt, Artificial Sequence
  Description of Artificial Sequence: Synthetic oligonucleotide
  Sense strand starting at position 3865 of SEQ ID NO: 317929
cuaauagcuguaugacaac

SEQ ID NO: 523436 - RNA, 19 nt, Artificial Sequence
  Description of Artificial Sequence: Synthetic oligonucleotide
  Antisense strand to SEQ ID NO: 523435
guugucauacagcuauuag

SEQ ID NO: 523437 - RNA, 19 nt, Artificial Sequence
  Description of Artificial Sequence: Synthetic oligonucleotide
  Sense strand starting at position 3910 of SEQ ID NO: 317929
uccaauccugccuaagaug

SEQ ID NO: 523438 - RNA, 19 nt, Artificial Sequence
  Description of Artificial Sequence: Synthetic oligonucleotide
  Antisense strand to SEQ ID NO: 523437
caucuuaggcaggauugga

SEQ ID NO: 523439 - RNA, 19 nt, Artificial Sequence
  Description of Artificial Sequence: Synthetic oligonucleotide
  Sense strand starting at position 3947 of SEQ ID NO: 317929
agguuaugugcugaaacag

SEQ ID NO: 523440 - RNA, 19 nt, Artificial Sequence
  Description of Artificial Sequence: Synthetic oligonucleotide
  Antisense strand to SEQ ID NO: 523439
cuguuucagcacauaaccu

SEQ ID NO: 523441 - RNA, 19 nt, Artificial Sequence
  Description of Artificial Sequence: Synthetic oligonucleotide
  Sense strand starting at position 4 of SEQ ID NO: 317930
cuucuaauauugguugaaa

SEQ ID NO: 523442 - RNA, 19 nt, Artificial Sequence
  Description of Artificial Sequence: Synthetic oligonucleotide
  Antisense strand to SEQ ID NO: 523441
uuucaaccaauauuagaag

SEQ ID NO: 523443 - RNA, 19 nt, Artificial Sequence
  Description of Artificial Sequence: Synthetic oligonucleotide
  Sense strand starting at position 65 of SEQ ID NO: 317930
ggcagugacagauguacaa

SEQ ID NO: 523444 - RNA, 19 nt, Artificial Sequence
  Description of Artificial Sequence: Synthetic oligonucleotide
  Antisense strand to SEQ ID NO: 523443
uuguacaucugucacugcc

SEQ ID NO: 523445 - RNA, 19 nt, Artificial Sequence
  Description of Artificial Sequence: Synthetic oligonucleotide
  Sense strand starting at position 147 of SEQ ID NO: 317930
gccuguuaggaauaguaac

SEQ ID NO: 523446 - RNA, 19 nt, Artificial Sequence
  Description of Artificial Sequence: Synthetic oligonucleotide
  Antisense strand to SEQ ID NO: 523445
guuacuauuccuaacaggc

SEQ ID NO: 523447 - RNA, 19 nt, Artificial Sequence
  Description of Artificial Sequence: Synthetic oligonucleotide
  Sense strand starting at position 289 of SEQ ID NO: 317930
uucuuauguccuuaagaag

SEQ ID NO: 523448 - RNA, 19 nt, Artificial Sequence
  Description of Artificial Sequence: Synthetic oligonucleotide
  Antisense strand to SEQ ID NO: 523447
cuucuuaaggacauaagaa

SEQ ID NO: 523449 - RNA, 19 nt, Artificial Sequence
  Description of Artificial Sequence: Synthetic oligonucleotide
  Sense strand starting at position 321 of SEQ ID NO: 317930
agucuaaugucauuugugu

SEQ ID NO: 523450 - RNA, 19 nt, Artificial Sequence
  Description of Artificial Sequence: Synthetic oligonucleotide
  Antisense strand to SEQ ID NO: 523449
acacaaaugacauuagacu

SEQ ID NO: 523451 - RNA, 19 nt, Artificial Sequence
  Description of Artificial Sequence: Synthetic oligonucleotide
  Sense strand starting at position 575 of SEQ ID NO: 317930
aaggucuagcgcguaagua

SEQ ID NO: 523452 - RNA, 19 nt, Artificial Sequence
  Description of Artificial Sequence: Synthetic oligonucleotide
  Antisense strand to SEQ ID NO: 523451
uacuuacgcgcuagaccuu

SEQ ID NO: 523453 - RNA, 19 nt, Artificial Sequence
  Description of Artificial Sequence: Synthetic oligonucleotide
  Sense strand starting at position 577 of SEQ ID NO: 317930
ggucuagcgcguaaguaug

SEQ ID NO: 523454 - RNA, 19 nt, Artificial Sequence
  Description of Artificial Sequence: Synthetic oligonucleotide
  Antisense strand to SEQ ID NO: 523453
cauacuuacgcgcuagacc

SEQ ID NO: 523455 - RNA, 19 nt, Artificial Sequence
  Description of Artificial Sequence: Synthetic oligonucleotide
  Sense strand starting at position 817 of SEQ ID NO: 317930
aauguuauagugcauguau

SEQ ID NO: 523456 - RNA, 19 nt, Artificial Sequence
  Description of Artificial Sequence: Synthetic oligonucleotide
  Antisense strand to SEQ ID NO: 523455
auacaugcacuauaacauu

SEQ ID NO: 523457 - RNA, 19 nt, Artificial Sequence
  Description of Artificial Sequence: Synthetic oligonucleotide
  Sense strand starting at position 847 of SEQ ID NO: 317930
cuuauugagugccuaauaa

SEQ ID NO: 523458 - RNA, 19 nt, Artificial Sequence
  Description of Artificial Sequence: Synthetic oligonucleotide
  Antisense strand to SEQ ID NO: 523457
uuauuaggcacucaauaag

SEQ ID NO: 523459 - RNA, 19 nt, Artificial Sequence
  Description of Artificial Sequence: Synthetic oligonucleotide
  Sense strand starting at position 858 of SEQ ID NO: 317930
ccuaauaaagucugggaau

SEQ ID NO: 523460 - RNA, 19 nt, Artificial Sequence
  Description of Artificial Sequence: Synthetic oligonucleotide
  Antisense strand to SEQ ID NO: 523459
auucccagacuuuauuagg

SEQ ID NO: 523461 - RNA, 19 nt, Artificial Sequence
  Description of Artificial Sequence: Synthetic oligonucleotide
  Sense strand starting at position 1053 of SEQ ID NO: 317930
agcauaauacagggcuuaa

SEQ ID NO: 523462 - RNA, 19 nt, Artificial Sequence
  Description of Artificial Sequence: Synthetic oligonucleotide
  Antisense strand to SEQ ID NO: 523461
uuaagcccuguauuaugcu

SEQ ID NO: 523463 - RNA, 19 nt, Artificial Sequence
  Description of Artificial Sequence: Synthetic oligonucleotide
  Sense strand starting at position 1177 of SEQ ID NO: 317930
ggcguuaacaccgucucua

SEQ ID NO: 523464 - RNA, 19 nt, Artificial Sequence
  Description of Artificial Sequence: Synthetic oligonucleotide
  Antisense strand to SEQ ID NO: 523463
uagagacgguguuaacgcc

SEQ ID NO: 523465 - RNA, 19 nt, Artificial Sequence
  Description of Artificial Sequence: Synthetic oligonucleotide
  Sense strand starting at position 1530 of SEQ ID NO: 317930
gugaguaggcacuacuguu

SEQ ID NO: 523466 - RNA, 19 nt, Artificial Sequence
  Description of Artificial Sequence: Synthetic oligonucleotide
  Antisense strand to SEQ ID NO: 523465
aacaguagugccuacucac

SEQ ID NO: 523467 - RNA, 19 nt, Artificial Sequence
  Description of Artificial Sequence: Synthetic oligonucleotide
  Sense strand starting at position 1584 of SEQ ID NO: 317930
caaagaaguuaagggauuu

SEQ ID NO: 523468 - RNA, 19 nt, Artificial Sequence
  Description of Artificial Sequence: Synthetic oligonucleotide
  Antisense strand to SEQ ID NO: 523467
aaaucccuuaacuucuuug

SEQ ID NO: 523469 - RNA, 19 nt, Artificial Sequence
  Description of Artificial Sequence: Synthetic oligonucleotide
  Sense strand starting at position 1710 of SEQ ID NO: 317930
cuaaguagccuagaacagu

SEQ ID NO: 523470 - RNA, 19 nt, Artificial Sequence
  Description of Artificial Sequence: Synthetic oligonucleotide
  Antisense strand to SEQ ID NO: 523469
acuguucuaggcuacuuag

SEQ ID NO: 523471 - RNA, 19 nt, Artificial Sequence
  Description of Artificial Sequence: Synthetic oligonucleotide
  Sense strand starting at position 1956 of SEQ ID NO: 317930
ucccuccaucgcgagauuu

SEQ ID NO: 523472 - RNA, 19 nt, Artificial Sequence
  Description of Artificial Sequence: Synthetic oligonucleotide
  Antisense strand to SEQ ID NO: 523471
aaaucucgcgauggaggga

SEQ ID NO: 523473 - RNA, 19 nt, Artificial Sequence
  Description of Artificial Sequence: Synthetic oligonucleotide
  Sense strand starting at position 2076 of SEQ ID NO: 317930
gaaauagugcuuuaaguca

SEQ ID NO: 523474 - RNA, 19 nt, Artificial Sequence
  Description of Artificial Sequence: Synthetic oligonucleotide
  Antisense strand to SEQ ID NO: 523473
ugacuuaaagcacuauuuc

SEQ ID NO: 523475 - RNA, 19 nt, Artificial Sequence
  Description of Artificial Sequence: Synthetic oligonucleotide
  Sense strand starting at position 2084 of SEQ ID NO: 317930
gcuuuaagucaaugaauuc

SEQ ID NO: 523476 - RNA, 19 nt, Artificial Sequence
  Description of Artificial Sequence: Synthetic oligonucleotide
  Antisense strand to SEQ ID NO: 523475
gaauucauugacuuaaagc

SEQ ID NO: 523477 - RNA, 19 nt, Artificial Sequence
  Description of Artificial Sequence: Synthetic oligonucleotide
  Sense strand starting at position 2122 of SEQ ID NO: 317930
gagaaacuaucagugguaa

SEQ ID NO: 523478 - RNA, 19 nt, Artificial Sequence
  Description of Artificial Sequence: Synthetic oligonucleotide
  Antisense strand to SEQ ID NO: 523477
uuaccacugauaguuucuc

SEQ ID NO: 523479 - RNA, 19 nt, Artificial Sequence
  Description of Artificial Sequence: Synthetic oligonucleotide
  Sense strand starting at position 2123 of SEQ ID NO: 317930
agaaacuaucagugguaac

SEQ ID NO: 523480 - RNA, 19 nt, Artificial Sequence
  Description of Artificial Sequence: Synthetic oligonucleotide
  Antisense strand to SEQ ID NO: 523479
guuaccacugauaguuucu

SEQ ID NO: 523481 - RNA, 19 nt, Artificial Sequence
  Description of Artificial Sequence: Synthetic oligonucleotide
  Sense strand starting at position 2173 of SEQ ID NO: 317930
ugacuuguguguccuaaga

SEQ ID NO: 523482 - RNA, 19 nt, Artificial Sequence
  Description of Artificial Sequence: Synthetic oligonucleotide
  Antisense strand to SEQ ID NO: 523481
ucuuaggacacacaaguca

SEQ ID NO: 523483 - RNA, 19 nt, Artificial Sequence
  Description of Artificial Sequence: Synthetic oligonucleotide
  Sense strand starting at position 2223 of SEQ ID NO: 317930
cccggcuuccuggauaaua

SEQ ID NO: 523484 - RNA, 19 nt, Artificial Sequence
  Description of Artificial Sequence: Synthetic oligonucleotide
  Antisense strand to SEQ ID NO: 523483
uauuauccaggaagccggg

SEQ ID NO: 523485 - RNA, 19 nt, Artificial Sequence
  Description of Artificial Sequence: Synthetic oligonucleotide
  Sense strand starting at position 2225 of SEQ ID NO: 317930
cggcuuccuggauaauaga

SEQ ID NO: 523486 - RNA, 19 nt, Artificial Sequence
  Description of Artificial Sequence: Synthetic oligonucleotide
  Antisense strand to SEQ ID NO: 523485
ucuauuauccaggaagccg

SEQ ID NO: 523487 - RNA, 19 nt, Artificial Sequence
  Description of Artificial Sequence: Synthetic oligonucleotide
  Sense strand starting at position 2888 of SEQ ID NO: 317930
gggagaugcucugucaccu

SEQ ID NO: 523488 - RNA, 19 nt, Artificial Sequence
  Description of Artificial Sequence: Synthetic oligonucleotide
  Antisense strand to SEQ ID NO: 523487
aggugacagagcaucuccc

SEQ ID NO: 523489 - RNA, 19 nt, Artificial Sequence
  Description of Artificial Sequence: Synthetic oligonucleotide
  Sense strand starting at position 2989 of SEQ ID NO: 317930
ggucacuuaacaggguauu

SEQ ID NO: 523490 - RNA, 19 nt, Artificial Sequence
  Description of Artificial Sequence: Synthetic oligonucleotide
  Antisense strand to SEQ ID NO: 523489
aauacccuguuaagugacc

SEQ ID NO: 523491 - RNA, 19 nt, Artificial Sequence
  Description of Artificial Sequence: Synthetic oligonucleotide
  Sense strand starting at position 3068 of SEQ ID NO: 317930
cgcacauaaccguaauaca

SEQ ID NO: 523492 - RNA, 19 nt, Artificial Sequence
  Description of Artificial Sequence: Synthetic oligonucleotide
  Antisense strand to SEQ ID NO: 523491
uguauuacgguuaugugcg

SEQ ID NO: 523493 - RNA, 19 nt, Artificial Sequence
  Description of Artificial Sequence: Synthetic oligonucleotide
  Sense strand starting at position 3198 of SEQ ID NO: 317930
gaaguaaaggcuugggcaa

SEQ ID NO: 523494 - RNA, 19 nt, Artificial Sequence
  Description of Artificial Sequence: Synthetic oligonucleotide
  Antisense strand to SEQ ID NO: 523493
uugcccaagccuuuacuuc

SEQ ID NO: 523495 - RNA, 19 nt, Artificial Sequence
  Description of Artificial Sequence: Synthetic oligonucleotide
  Sense strand starting at position 3229 of SEQ ID NO: 317930
cacguuguagaauggaaga

SEQ ID NO: 523496 - RNA, 19 nt, Artificial Sequence
  Description of Artificial Sequence: Synthetic oligonucleotide
  Antisense strand to SEQ ID NO: 523495
ucuuccauucuacaacgug

SEQ ID NO: 523497 - RNA, 19 nt, Artificial Sequence
  Description of Artificial Sequence: Synthetic oligonucleotide
  Sense strand starting at position 3286 of SEQ ID NO: 317930
acaauaguucccgaaggug

SEQ ID NO: 523498 - RNA, 19 nt, Artificial Sequence
  Description of Artificial Sequence: Synthetic oligonucleotide
  Antisense strand to SEQ ID NO: 523497
caccuucgggaacuauugu

SEQ ID NO: 523499 - RNA, 19 nt, Artificial Sequence
  Description of Artificial Sequence: Synthetic oligonucleotide
  Sense strand starting at position 3308 of SEQ ID NO: 317930
gcuauugaaugcccaacau

SEQ ID NO: 523500 - RNA, 19 nt, Artificial Sequence
  Description of Artificial Sequence: Synthetic oligonucleotide
  Antisense strand to SEQ ID NO: 523499
auguugggcauucaauagc

SEQ ID NO: 523501 - RNA, 19 nt, Artificial Sequence
  Description of Artificial Sequence: Synthetic oligonucleotide
  Sense strand starting at position 3408 of SEQ ID NO: 317930
ggcagcaaagcuugagaua

SEQ ID NO: 523502 - RNA, 19 nt, Artificial Sequence
  Description of Artificial Sequence: Synthetic oligonucleotide
  Antisense strand to SEQ ID NO: 523501
uaucucaagcuuugcugcc

SEQ ID NO: 523503 - RNA, 19 nt, Artificial Sequence
  Description of Artificial Sequence: Synthetic oligonucleotide
  Sense strand starting at position 3630 of SEQ ID NO: 317930
gguuuacuuacgcaaaguu

SEQ ID NO: 523504 - RNA, 19 nt, Artificial Sequence
  Description of Artificial Sequence: Synthetic oligonucleotide
  Antisense strand to SEQ ID NO: 523503
aacuuugcguaaguaaacc

SEQ ID NO: 523505 - RNA, 19 nt, Artificial Sequence
  Description of Artificial Sequence: Synthetic oligonucleotide
  Sense strand starting at position 3670 of SEQ ID NO: 317930
uggacucuuuguuugacuu

SEQ ID NO: 523506 - RNA, 19 nt, Artificial Sequence
  Description of Artificial Sequence: Synthetic oligonucleotide
  Antisense strand to SEQ ID NO: 523505
aagucaaacaaagagucca

SEQ ID NO: 523507 - RNA, 19 nt, Artificial Sequence
  Description of Artificial Sequence: Synthetic oligonucleotide
  Sense strand starting at position 3671 of SEQ ID NO: 317930
ggacucuuuguuugacuua

SEQ ID NO: 523508 - RNA, 19 nt, Artificial Sequence
  Description of Artificial Sequence: Synthetic oligonucleotide
  Antisense strand to SEQ ID NO: 523507
uaagucaaacaaagagucc

SEQ ID NO: 523509 - RNA, 19 nt, Artificial Sequence
  Description of Artificial Sequence: Synthetic oligonucleotide
  Sense strand starting at position 3756 of SEQ ID NO: 317930
aagacuugacagugauauu

SEQ ID NO: 523510 - RNA, 19 nt, Artificial Sequence
  Description of Artificial Sequence: Synthetic oligonucleotide
  Antisense strand to SEQ ID NO: 523509
aauaucacugucaagucuu

SEQ ID NO: 523511 - RNA, 19 nt, Artificial Sequence
  Description of Artificial Sequence: Synthetic oligonucleotide
  Sense strand starting at position 3767 of SEQ ID NO: 317930
gugauauuaaauggaguga

SEQ ID NO: 523512 - RNA, 19 nt, Artificial Sequence
  Description of Artificial Sequence: Synthetic oligonucleotide
  Antisense strand to SEQ ID NO: 523511
ucacuccauuuaauaucac

SEQ ID NO: 523513 - RNA, 19 nt, Artificial Sequence
  Description of Artificial Sequence: Synthetic oligonucleotide
  Sense strand starting at position 3771 of SEQ ID NO: 317930
uauuaaauggagugacuua

SEQ ID NO: 523514 - RNA, 19 nt, Artificial Sequence
  Description of Artificial Sequence: Synthetic oligonucleotide
  Antisense strand to SEQ ID NO: 523513
uaagucacuccauuuaaua

SEQ ID NO: 523515 - RNA, 19 nt, Artificial Sequence
  Description of Artificial Sequence: Synthetic oligonucleotide
  Sense strand starting at position 3814 of SEQ ID NO: 317930
acgguaggcacucaguauu

SEQ ID NO: 523516 - RNA, 19 nt, Artificial Sequence
  Description of Artificial Sequence: Synthetic oligonucleotide
  Antisense strand to SEQ ID NO: 523515
aauacugagugccuaccgu

SEQ ID NO: 523517 - RNA, 19 nt, Artificial Sequence
  Description of Artificial Sequence: Synthetic oligonucleotide
  Sense strand starting at position 3827 of SEQ ID NO: 317930
aguauuuguuuccuuucua

SEQ ID NO: 523518 - RNA, 19 nt, Artificial Sequence
  Description of Artificial Sequence: Synthetic oligonucleotide
  Antisense strand to SEQ ID NO: 523517
uagaaaggaaacaaauacu

SEQ ID NO: 523519 - RNA, 19 nt, Artificial Sequence
  Description of Artificial Sequence: Synthetic oligonucleotide
  Sense strand starting at position 3828 of SEQ ID NO: 317930
guauuuguuuccuuucuag

SEQ ID NO: 523520 - RNA, 19 nt, Artificial Sequence
  Description of Artificial Sequence: Synthetic oligonucleotide
  Antisense strand to SEQ ID NO: 523519
cuagaaaggaaacaaauac

SEQ ID NO: 523521 - RNA, 19 nt, Artificial Sequence
  Description of Artificial Sequence: Synthetic oligonucleotide
  Sense strand starting at position 209 of SEQ ID NO: 317931
uguuguuugguugaagcau

SEQ ID NO: 523522 - RNA, 19 nt, Artificial Sequence
  Description of Artificial Sequence: Synthetic oligonucleotide
  Antisense strand to SEQ ID NO: 523521
augcuucaaccaaacaaca

SEQ ID NO: 523523 - RNA, 19 nt, Artificial Sequence
  Description of Artificial Sequence: Synthetic oligonucleotide
  Sense strand starting at position 217 of SEQ ID NO: 317931
gguugaagcauacaaagua

SEQ ID NO: 523524 - RNA, 19 nt, Artificial Sequence
  Description of Artificial Sequence: Synthetic oligonucleotide
  Antisense strand to SEQ ID NO: 523523
uacuuuguaugcuucaacc

SEQ ID NO: 523525 - RNA, 19 nt, Artificial Sequence
  Description of Artificial Sequence: Synthetic oligonucleotide
  Sense strand starting at position 238 of SEQ ID NO: 317931
uccaucuucgcacagauau

SEQ ID NO: 523526 - RNA, 19 nt, Artificial Sequence
  Description of Artificial Sequence: Synthetic oligonucleotide
  Antisense strand to SEQ ID NO: 523525
auaucugugcgaagaugga

SEQ ID NO: 523527 - RNA, 19 nt, Artificial Sequence
  Description of Artificial Sequence: Synthetic oligonucleotide
  Sense strand starting at position 299 of SEQ ID NO: 317931
augagugguuauuccuuua

SEQ ID NO: 523528 - RNA, 19 nt, Artificial Sequence
  Description of Artificial Sequence: Synthetic oligonucleotide
  Antisense strand to SEQ ID NO: 523527
uaaaggaauaaccacucau

SEQ ID NO: 523529 - RNA, 19 nt, Artificial Sequence
  Description of Artificial Sequence: Synthetic oligonucleotide
  Sense strand starting at position 302 of SEQ ID NO: 317931
agugguuauuccuuuauga

SEQ ID NO: 523530 - RNA, 19 nt, Artificial Sequence
  Description of Artificial Sequence: Synthetic oligonucleotide
  Antisense strand to SEQ ID NO: 523529
ucauaaaggaauaaccacu

SEQ ID NO: 523531 - RNA, 19 nt, Artificial Sequence
  Description of Artificial Sequence: Synthetic oligonucleotide
  Sense strand starting at position 304 of SEQ ID NO: 317931
ugguuauuccuuuaugaua

SEQ ID NO: 523532 - RNA, 19 nt, Artificial Sequence
  Description of Artificial Sequence: Synthetic oligonucleotide
  Antisense strand to SEQ ID NO: 523531
uaucauaaaggaauaacca

SEQ ID NO: 523533 - RNA, 19 nt, Artificial Sequence
  Description of Artificial Sequence: Synthetic oligonucleotide
  Sense strand starting at position 407 of SEQ ID NO: 317931
ccuauaagccuguaacaga

SEQ ID NO: 523534 - RNA, 19 nt, Artificial Sequence
  Description of Artificial Sequence: Synthetic oligonucleotide
  Antisense strand to SEQ ID NO: 523533
ucuguuacaggcuuauagg

SEQ ID NO: 523535 - RNA, 19 nt, Artificial Sequence
  Description of Artificial Sequence: Synthetic oligonucleotide
  Sense strand starting at position 415 of SEQ ID NO: 317931
ccuguaacagaauguauua

SEQ ID NO: 523536 - RNA, 19 nt, Artificial Sequence
  Description of Artificial Sequence: Synthetic oligonucleotide
  Antisense strand to SEQ ID NO: 523535
uaauacauucuguuacagg

SEQ ID NO: 523537 - RNA, 19 nt, Artificial Sequence
  Description of Artificial Sequence: Synthetic oligonucleotide
  Sense strand starting at position 831 of SEQ ID NO: 317931
aggugauucucugccacuu

SEQ ID NO: 523538 - RNA, 19 nt, Artificial Sequence
  Description of Artificial Sequence: Synthetic oligonucleotide
  Antisense strand to SEQ ID NO: 523537
aaguggcagagaaucaccu

SEQ ID NO: 523539 - RNA, 19 nt, Artificial Sequence
  Description of Artificial Sequence: Synthetic oligonucleotide
  Sense strand starting at position 854 of SEQ ID NO: 317931
ggcagauuaaagggcaaua

SEQ ID NO: 523540 - RNA, 19 nt, Artificial Sequence
  Description of Artificial Sequence: Synthetic oligonucleotide
  Antisense strand to SEQ ID NO: 523539
uauugcccuuuaaucugcc

SEQ ID NO: 523541 - RNA, 19 nt, Artificial Sequence
  Description of Artificial Sequence: Synthetic oligonucleotide
  Sense strand starting at position 875 of SEQ ID NO: 317931
aggaaacacugauaguaag

SEQ ID NO: 523542 - RNA, 19 nt, Artificial Sequence
  Description of Artificial Sequence: Synthetic oligonucleotide
  Antisense strand to SEQ ID NO: 523541
cuuacuaucaguguuuccu

SEQ ID NO: 523543 - RNA, 19 nt, Artificial Sequence
  Description of Artificial Sequence: Synthetic oligonucleotide
  Sense strand starting at position 996 of SEQ ID NO: 317931
ggcagcauuguacaaauaa

SEQ ID NO: 523544 - RNA, 19 nt, Artificial Sequence
  Description of Artificial Sequence: Synthetic oligonucleotide
  Antisense strand to SEQ ID NO: 523543
uuauuuguacaaugcugcc

SEQ ID NO: 523545 - RNA, 19 nt, Artificial Sequence
  Description of Artificial Sequence: Synthetic oligonucleotide
  Sense strand starting at position 1053 of SEQ ID NO: 317931
cuuuaaagaguuugcauuc

SEQ ID NO: 523546 - RNA, 19 nt, Artificial Sequence
  Description of Artificial Sequence: Synthetic oligonucleotide
  Antisense strand to SEQ ID NO: 523545
gaaugcaaacucuuuaaag

SEQ ID NO: 523547 - RNA, 19 nt, Artificial Sequence
  Description of Artificial Sequence: Synthetic oligonucleotide
  Sense strand starting at position 1054 of SEQ ID NO: 317931
uuuaaagaguuugcauucu

SEQ ID NO: 523548 - RNA, 19 nt, Artificial Sequence
  Description of Artificial Sequence: Synthetic oligonucleotide
  Antisense strand to SEQ ID NO: 523547
agaaugcaaacucuuuaaa

SEQ ID NO: 523549 - RNA, 19 nt, Artificial Sequence
  Description of Artificial Sequence: Synthetic oligonucleotide
  Sense strand starting at position 1063 of SEQ ID NO: 317931
uuugcauucugauuggcaa

SEQ ID NO: 523550 - RNA, 19 nt, Artificial Sequence
  Description of Artificial Sequence: Synthetic oligonucleotide
  Antisense strand to SEQ ID NO: 523549
uugccaaucagaaugcaaa

SEQ ID NO: 523551 - RNA, 19 nt, Artificial Sequence
  Description of Artificial Sequence: Synthetic oligonucleotide
  Sense strand starting at position 1064 of SEQ ID NO: 317931
uugcauucugauuggcaaa

SEQ ID NO: 523552 - RNA, 19 nt, Artificial Sequence
  Description of Artificial Sequence: Synthetic oligonucleotide
  Antisense strand to SEQ ID NO: 523551
uuugccaaucagaaugcaa

SEQ ID NO: 523553 - RNA, 19 nt, Artificial Sequence
  Description of Artificial Sequence: Synthetic oligonucleotide
  Sense strand starting at position 1211 of SEQ ID NO: 317931
uggguuguaggucagauga

SEQ ID NO: 523554 - RNA, 19 nt, Artificial Sequence
  Description of Artificial Sequence: Synthetic oligonucleotide
  Antisense strand to SEQ ID NO: 523553
ucaucugaccuacaaccca

SEQ ID NO: 523555 - RNA, 19 nt, Artificial Sequence
  Description of Artificial Sequence: Synthetic oligonucleotide
  Sense strand starting at position 1268 of SEQ ID NO: 317931
gcagcaauuaguuauaggu

SEQ ID NO: 523556 - RNA, 19 nt, Artificial Sequence
  Description of Artificial Sequence: Synthetic oligonucleotide
  Antisense strand to SEQ ID NO: 523555
accuauaacuaauugcugc

SEQ ID NO: 523557 - RNA, 19 nt, Artificial Sequence
  Description of Artificial Sequence: Synthetic oligonucleotide
  Sense strand starting at position 1283 of SEQ ID NO: 317931
agguuuaaauugcuccaaa

SEQ ID NO: 523558 - RNA, 19 nt, Artificial Sequence
  Description of Artificial Sequence: Synthetic oligonucleotide
  Antisense strand to SEQ ID NO: 523557
uuuggagcaauuuaaaccu

SEQ ID NO: 523559 - RNA, 19 nt, Artificial Sequence
  Description of Artificial Sequence: Synthetic oligonucleotide
  Sense strand starting at position 1284 of SEQ ID NO: 317931
gguuuaaauugcuccaaag

SEQ ID NO: 523560 - RNA, 19 nt, Artificial Sequence
  Description of Artificial Sequence: Synthetic oligonucleotide
  Antisense strand to SEQ ID NO: 523559
cuuuggagcaauuuaaacc

SEQ ID NO: 523561 - RNA, 19 nt, Artificial Sequence
  Description of Artificial Sequence: Synthetic oligonucleotide
  Sense strand starting at position 1286 of SEQ ID NO: 317931
uuuaaauugcuccaaaggu

SEQ ID NO: 523562 - RNA, 19 nt, Artificial Sequence
  Description of Artificial Sequence: Synthetic oligonucleotide
  Antisense strand to SEQ ID NO: 523561
accuuuggagcaauuuaaa

SEQ ID NO: 523563 - RNA, 19 nt, Artificial Sequence
  Description of Artificial Sequence: Synthetic oligonucleotide
  Sense strand starting at position 1442 of SEQ ID NO: 317931
gaggcuuugccucaccuga

SEQ ID NO: 523564 - RNA, 19 nt, Artificial Sequence
  Description of Artificial Sequence: Synthetic oligonucleotide
  Antisense strand to SEQ ID NO: 523563
ucaggugaggcaaagccuc

SEQ ID NO: 523565 - RNA, 19 nt, Artificial Sequence
  Description of Artificial Sequence: Synthetic oligonucleotide
  Sense strand starting at position 2095 of SEQ ID NO: 317931
ggacgccuucgguugcuaa

SEQ ID NO: 523566 - RNA, 19 nt, Artificial Sequence
  Description of Artificial Sequence: Synthetic oligonucleotide
  Antisense strand to SEQ ID NO: 523565
uuagcaaccgaaggcgucc

SEQ ID NO: 523567 - RNA, 19 nt, Artificial Sequence
  Description of Artificial Sequence: Synthetic oligonucleotide
  Sense strand starting at position 2238 of SEQ ID NO: 317931
ggucaaggaugcguauuaa

SEQ ID NO: 523568 - RNA, 19 nt, Artificial Sequence
  Description of Artificial Sequence: Synthetic oligonucleotide
  Antisense strand to SEQ ID NO: 523567
uuaauacgcauccuugacc

SEQ ID NO: 523569 - RNA, 19 nt, Artificial Sequence
  Description of Artificial Sequence: Synthetic oligonucleotide
  Sense strand starting at position 2374 of SEQ ID NO: 317931
uuuaaucuguaagccagaa

SEQ ID NO: 523570 - RNA, 19 nt, Artificial Sequence
  Description of Artificial Sequence: Synthetic oligonucleotide
  Antisense strand to SEQ ID NO: 523569
uucuggcuuacagauuaaa

SEQ ID NO: 523571 - RNA, 19 nt, Artificial Sequence
  Description of Artificial Sequence: Synthetic oligonucleotide
  Sense strand starting at position 2473 of SEQ ID NO: 317931
aagagcauuugcuuguaau

SEQ ID NO: 523572 - RNA, 19 nt, Artificial Sequence
  Description of Artificial Sequence: Synthetic oligonucleotide
  Antisense strand to SEQ ID NO: 523571
auuacaagcaaaugcucuu

SEQ ID NO: 523573 - RNA, 19 nt, Artificial Sequence
  Description of Artificial Sequence: Synthetic oligonucleotide
  Sense strand starting at position 2474 of SEQ ID NO: 317931
agagcauuugcuuguaaug

SEQ ID NO: 523574 - RNA, 19 nt, Artificial Sequence
  Description of Artificial Sequence: Synthetic oligonucleotide
  Antisense strand to SEQ ID NO: 523573
cauuacaagcaaaugcucu

SEQ ID NO: 523575 - RNA, 19 nt, Artificial Sequence
  Description of Artificial Sequence: Synthetic oligonucleotide
  Sense strand starting at position 2876 of SEQ ID NO: 317931
aaagcuucuggccaguuau

SEQ ID NO: 523576 - RNA, 19 nt, Artificial Sequence
  Description of Artificial Sequence: Synthetic oligonucleotide
  Antisense strand to SEQ ID NO: 523575
auaacuggccagaagcuuu

SEQ ID NO: 523577 - RNA, 19 nt, Artificial Sequence
  Description of Artificial Sequence: Synthetic oligonucleotide
  Sense strand starting at position 2903 of SEQ ID NO: 317931
aaacuaucucaaggguaug

SEQ ID NO: 523578 - RNA, 19 nt, Artificial Sequence
  Description of Artificial Sequence: Synthetic oligonucleotide
  Antisense strand to SEQ ID NO: 523577
cauacccuugagauaguuu

SEQ ID NO: 523579 - RNA, 19 nt, Artificial Sequence
  Description of Artificial Sequence: Synthetic oligonucleotide
  Sense strand starting at position 3262 of SEQ ID NO: 317931
ugugcagauaacuagaagu

SEQ ID NO: 523580 - RNA, 19 nt, Artificial Sequence
  Description of Artificial Sequence: Synthetic oligonucleotide
  Antisense strand to SEQ ID NO: 523579
acuucuaguuaucugcaca

SEQ ID NO: 523581 - RNA, 19 nt, Artificial Sequence
  Description of Artificial Sequence: Synthetic oligonucleotide
  Sense strand starting at position 3294 of SEQ ID NO: 317931
accucucaccaaugagaug

SEQ ID NO: 523582 - RNA, 19 nt, Artificial Sequence
  Description of Artificial Sequence: Synthetic oligonucleotide
  Antisense strand to SEQ ID NO: 523581
caucucauuggugagaggu

SEQ ID NO: 523583 - RNA, 19 nt, Artificial Sequence
  Description of Artificial Sequence: Synthetic oligonucleotide
  Sense strand starting at position 3303 of SEQ ID NO: 317931
caaugagaugccugucaag

SEQ ID NO: 523584 - RNA, 19 nt, Artificial Sequence
  Description of Artificial Sequence: Synthetic oligonucleotide
  Antisense strand to SEQ ID NO: 523583
cuugacaggcaucucauug

SEQ ID NO: 523585 - RNA, 19 nt, Artificial Sequence
  Description of Artificial Sequence: Synthetic oligonucleotide
  Sense strand starting at position 3309 of SEQ ID NO: 317931
gaugccugucaaggguaua

SEQ ID NO: 523586 - RNA, 19 nt, Artificial Sequence
  Description of Artificial Sequence: Synthetic oligonucleotide
  Antisense strand to SEQ ID NO: 523585
uauacccuugacaggcauc

SEQ ID NO: 523587 - RNA, 19 nt, Artificial Sequence
  Description of Artificial Sequence: Synthetic oligonucleotide
  Sense strand starting at position 3540 of SEQ ID NO: 317931
ccuaguagacugugggaua

SEQ ID NO: 523588 - RNA, 19 nt, Artificial Sequence
  Description of Artificial Sequence: Synthetic oligonucleotide
  Antisense strand to SEQ ID NO: 523587
uaucccacagucuacuagg

SEQ ID NO: 523589 - RNA, 19 nt, Artificial Sequence
  Description of Artificial Sequence: Synthetic oligonucleotide
  Sense strand starting at position 3554 of SEQ ID NO: 317931
ggauaucuggcguaaacua

SEQ ID NO: 523590 - RNA, 19 nt, Artificial Sequence
  Description of Artificial Sequence: Synthetic oligonucleotide
  Antisense strand to SEQ ID NO: 523589
uaguuuacgccagauaucc

SEQ ID NO: 523591 - RNA, 19 nt, Artificial Sequence
  Description of Artificial Sequence: Synthetic oligonucleotide
  Sense strand starting at position 3561 of SEQ ID NO: 317931
uggcguaaacuaugacuaa

SEQ ID NO: 523592 - RNA, 19 nt, Artificial Sequence
  Description of Artificial Sequence: Synthetic oligonucleotide
  Antisense strand to SEQ ID NO: 523591
uuagucauaguuuacgcca

SEQ ID NO: 523593 - RNA, 19 nt, Artificial Sequence
  Description of Artificial Sequence: Synthetic oligonucleotide
  Sense strand starting at position 3694 of SEQ ID NO: 317931
guuauugauuaugccacau

SEQ ID NO: 523594 - RNA, 19 nt, Artificial Sequence
  Description of Artificial Sequence: Synthetic oligonucleotide
  Antisense strand to SEQ ID NO: 523593
auguggcauaaucaauaac

SEQ ID NO: 523595 - RNA, 19 nt, Artificial Sequence
  Description of Artificial Sequence: Synthetic oligonucleotide
  Sense strand starting at position 3719 of SEQ ID NO: 317931
agcaauaguugauuaagaa

SEQ ID NO: 523596 - RNA, 19 nt, Artificial Sequence
  Description of Artificial Sequence: Synthetic oligonucleotide
  Antisense strand to SEQ ID NO: 523595
uucuuaaucaacuauugcu

SEQ ID NO: 523597 - RNA, 19 nt, Artificial Sequence
  Description of Artificial Sequence: Synthetic oligonucleotide
  Sense strand starting at position 3780 of SEQ ID NO: 317931
guggcaguaaccugauaca

SEQ ID NO: 523598 - RNA, 19 nt, Artificial Sequence
  Description of Artificial Sequence: Synthetic oligonucleotide
  Antisense strand to SEQ ID NO: 523597
uguaucagguuacugccac

SEQ ID NO: 523599 - RNA, 19 nt, Artificial Sequence
  Description of Artificial Sequence: Synthetic oligonucleotide
  Sense strand starting at position 3859 of SEQ ID NO: 317931
ugguacaacuuguuugcaa

SEQ ID NO: 523600 - RNA, 19 nt, Artificial Sequence
  Description of Artificial Sequence: Synthetic oligonucleotide
  Antisense strand to SEQ ID NO: 523599
uugcaaacaaguuguacca

SEQ ID NO: 523601 - RNA, 19 nt, Artificial Sequence
  Description of Artificial Sequence: Synthetic oligonucleotide
  Sense strand starting at position 165 of SEQ ID NO: 317932
gggagucuccuacggaagu

SEQ ID NO: 523602 - RNA, 19 nt, Artificial Sequence
  Description of Artificial Sequence: Synthetic oligonucleotide
  Antisense strand to SEQ ID NO: 523601
acuuccguaggagacuccc

SEQ ID NO: 523603 - RNA, 19 nt, Artificial Sequence
  Description of Artificial Sequence: Synthetic oligonucleotide
  Sense strand starting at position 268 of SEQ ID NO: 317932
accuuauugugaucugaga

SEQ ID NO: 523604 - RNA, 19 nt, Artificial Sequence
  Description of Artificial Sequence: Synthetic oligonucleotide
  Antisense strand to SEQ ID NO: 523603
ucucagaucacaauaaggu

SEQ ID NO: 523605 - RNA, 19 nt, Artificial Sequence
  Description of Artificial Sequence: Synthetic oligonucleotide
  Sense strand starting at position 622 of SEQ ID NO: 317932
ugcacaauuccagagauuc

SEQ ID NO: 523606 - RNA, 19 nt, Artificial Sequence
  Description of Artificial Sequence: Synthetic oligonucleotide
  Antisense strand to SEQ ID NO: 523605
gaaucucuggaauugugca

SEQ ID NO: 523607 - RNA, 19 nt, Artificial Sequence
  Description of Artificial Sequence: Synthetic oligonucleotide
  Sense strand starting at position 632 of SEQ ID NO: 317932
cagagauucuacuagaagg

SEQ ID NO: 523608 - RNA, 19 nt, Artificial Sequence
  Description of Artificial Sequence: Synthetic oligonucleotide
  Antisense strand to SEQ ID NO: 523607
ccuucuaguagaaucucug

SEQ ID NO: 523609 - RNA, 19 nt, Artificial Sequence
  Description of Artificial Sequence: Synthetic oligonucleotide
  Sense strand starting at position 2133 of SEQ ID NO: 317932
cggaguucgcugggagaaa

SEQ ID NO: 523610 - RNA, 19 nt, Artificial Sequence
  Description of Artificial Sequence: Synthetic oligonucleotide
  Antisense strand to SEQ ID NO: 523609
uuucucccagcgaacuccg

SEQ ID NO: 523611 - RNA, 19 nt, Artificial Sequence
  Description of Artificial Sequence: Synthetic oligonucleotide
  Sense strand starting at position 2218 of SEQ ID NO: 317932
gcguguaaugcggugguaa

SEQ ID NO: 523612 - RNA, 19 nt, Artificial Sequence
  Description of Artificial Sequence: Synthetic oligonucleotide
  Antisense strand to SEQ ID NO: 523611
uuaccaccgcauuacacgc

SEQ ID NO: 523613 - RNA, 19 nt, Artificial Sequence
  Description of Artificial Sequence: Synthetic oligonucleotide
  Sense strand starting at position 2266 of SEQ ID NO: 317932
uugccuguuaaauggauga

SEQ ID NO: 523614 - RNA, 19 nt, Artificial Sequence
  Description of Artificial Sequence: Synthetic oligonucleotide
  Antisense strand to SEQ ID NO: 523613
ucauccauuuaacaggcaa

SEQ ID NO: 523615 - RNA, 19 nt, Artificial Sequence
  Description of Artificial Sequence: Synthetic oligonucleotide
  Sense strand starting at position 2268 of SEQ ID NO: 317932
gccuguuaaauggaugagu

SEQ ID NO: 523616 - RNA, 19 nt, Artificial Sequence
  Description of Artificial Sequence: Synthetic oligonucleotide
  Antisense strand to SEQ ID NO: 523615
acucauccauuuaacaggc

SEQ ID NO: 523617 - RNA, 19 nt, Artificial Sequence
  Description of Artificial Sequence: Synthetic oligonucleotide
  Sense strand starting at position 2352 of SEQ ID NO: 317932
gaggcagguacggaucauu

SEQ ID NO: 523618 - RNA, 19 nt, Artificial Sequence
  Description of Artificial Sequence: Synthetic oligonucleotide
  Antisense strand to SEQ ID NO: 523617
aaugauccguaccugccuc

SEQ ID NO: 523619 - RNA, 19 nt, Artificial Sequence
  Description of Artificial Sequence: Synthetic oligonucleotide
  Sense strand starting at position 2417 of SEQ ID NO: 317932
aagguugcuguacaucauu

SEQ ID NO: 523620 - RNA, 19 nt, Artificial Sequence
  Description of Artificial Sequence: Synthetic oligonucleotide
  Antisense strand to SEQ ID NO: 523619
aaugauguacagcaaccuu

SEQ ID NO: 523621 - RNA, 19 nt, Artificial Sequence
  Description of Artificial Sequence: Synthetic oligonucleotide
  Sense strand starting at position 2519 of SEQ ID NO: 317932
cagcguucugugcuuggga

SEQ ID NO: 523622 - RNA, 19 nt, Artificial Sequence
  Description of Artificial Sequence: Synthetic oligonucleotide
  Antisense strand to SEQ ID NO: 523621
ucccaagcacagaacgcug

SEQ ID NO: 523623 - RNA, 19 nt, Artificial Sequence
  Description of Artificial Sequence: Synthetic oligonucleotide
  Sense strand starting at position 2603 of SEQ ID NO: 317932
aguuacaaccggugugaua

SEQ ID NO: 523624 - RNA, 19 nt, Artificial Sequence
  Description of Artificial Sequence: Synthetic oligonucleotide
  Antisense strand to SEQ ID NO: 523623
uaucacaccgguuguaacu

SEQ ID NO: 523625 - RNA, 19 nt, Artificial Sequence
  Description of Artificial Sequence: Synthetic oligonucleotide
  Sense strand starting at position 2612 of SEQ ID NO: 317932
cggugugauaacgaugaga

SEQ ID NO: 523626 - RNA, 19 nt, Artificial Sequence
  Description of Artificial Sequence: Synthetic oligonucleotide
  Antisense strand to SEQ ID NO: 523625
ucucaucguuaucacaccg

SEQ ID NO: 523627 - RNA, 19 nt, Artificial Sequence
  Description of Artificial Sequence: Synthetic oligonucleotide
  Sense strand starting at position 2614 of SEQ ID NO: 317932
gugugauaacgaugagacg

SEQ ID NO: 523628 - RNA, 19 nt, Artificial Sequence
  Description of Artificial Sequence: Synthetic oligonucleotide
  Antisense strand to SEQ ID NO: 523627
cgucucaucguuaucacac

SEQ ID NO: 523629 - RNA, 19 nt, Artificial Sequence
  Description of Artificial Sequence: Synthetic oligonucleotide
  Sense strand starting at position 2615 of SEQ ID NO: 317932
ugugauaacgaugagacga

SEQ ID NO: 523630 - RNA, 19 nt, Artificial Sequence
  Description of Artificial Sequence: Synthetic oligonucleotide
  Antisense strand to SEQ ID NO: 523629
ucgucucaucguuaucaca

SEQ ID NO: 523631 - RNA, 19 nt, Artificial Sequence
  Description of Artificial Sequence: Synthetic oligonucleotide
  Sense strand starting at position 2630 of SEQ ID NO: 317932
acgacuagguguuuccaaa

SEQ ID NO: 523632 - RNA, 19 nt, Artificial Sequence
  Description of Artificial Sequence: Synthetic oligonucleotide
  Antisense strand to SEQ ID NO: 523631
uuuggaaacaccuagucgu

SEQ ID NO: 523633 - RNA, 19 nt, Artificial Sequence
  Description of Artificial Sequence: Synthetic oligonucleotide
  Sense strand starting at position 2655 of SEQ ID NO: 317932
guaugugcaggagaggauu

SEQ ID NO: 523634 - RNA, 19 nt, Artificial Sequence
  Description of Artificial Sequence: Synthetic oligonucleotide
  Antisense strand to SEQ ID NO: 523633
aauccucuccugcacauac

SEQ ID NO: 523635 - RNA, 19 nt, Artificial Sequence
  Description of Artificial Sequence: Synthetic oligonucleotide
  Sense strand starting at position 2777 of SEQ ID NO: 317932
auguacauggcacagauua

SEQ ID NO: 523636 - RNA, 19 nt, Artificial Sequence
  Description of Artificial Sequence: Synthetic oligonucleotide
  Antisense strand to SEQ ID NO: 523635
uaaucugugccauguacau

SEQ ID NO: 523637 - RNA, 19 nt, Artificial Sequence
  Description of Artificial Sequence: Synthetic oligonucleotide
  Sense strand starting at position 2809 of SEQ ID NO: 317932
uugagugaagucugucuca

SEQ ID NO: 523638 - RNA, 19 nt, Artificial Sequence
  Description of Artificial Sequence: Synthetic oligonucleotide
  Antisense strand to SEQ ID NO: 523637
ugagacagacuucacucaa

SEQ ID NO: 523639 - RNA, 19 nt, Artificial Sequence
  Description of Artificial Sequence: Synthetic oligonucleotide
  Sense strand starting at position 2832 of SEQ ID NO: 317932
ugggcuauguacucugaaa

SEQ ID NO: 523640 - RNA, 19 nt, Artificial Sequence
  Description of Artificial Sequence: Synthetic oligonucleotide
  Antisense strand to SEQ ID NO: 523639
uuucagaguacauagccca

SEQ ID NO: 523641 - RNA, 19 nt, Artificial Sequence
  Description of Artificial Sequence: Synthetic oligonucleotide
  Sense strand starting at position 2834 of SEQ ID NO: 317932
ggcuauguacucugaaauu

SEQ ID NO: 523642 - RNA, 19 nt, Artificial Sequence
  Description of Artificial Sequence: Synthetic oligonucleotide
  Antisense strand to SEQ ID NO: 523641
aauuucagaguacauagcc

SEQ ID NO: 523643 - RNA, 19 nt, Artificial Sequence
  Description of Artificial Sequence: Synthetic oligonucleotide
  Sense strand starting at position 2845 of SEQ ID NO: 317932
cugaaauugugguuauaug

SEQ ID NO: 523644 - RNA, 19 nt, Artificial Sequence
  Description of Artificial Sequence: Synthetic oligonucleotide
  Antisense strand to SEQ ID NO: 523643
cauauaaccacaauuucag

SEQ ID NO: 523645 - RNA, 19 nt, Artificial Sequence
  Description of Artificial Sequence: Synthetic oligonucleotide
  Sense strand starting at position 2852 of SEQ ID NO: 317932
ugugguuauaugcagaguu

SEQ ID NO: 523646 - RNA, 19 nt, Artificial Sequence
  Description of Artificial Sequence: Synthetic oligonucleotide
  Antisense strand to SEQ ID NO: 523645
aacucugcauauaaccaca

SEQ ID NO: 523647 - RNA, 19 nt, Artificial Sequence
  Description of Artificial Sequence: Synthetic oligonucleotide
  Sense strand starting at position 2865 of SEQ ID NO: 317932
agaguugcuauugguauca

SEQ ID NO: 523648 - RNA, 19 nt, Artificial Sequence
  Description of Artificial Sequence: Synthetic oligonucleotide
  Antisense strand to SEQ ID NO: 523647
ugauaccaauagcaacucu

SEQ ID NO: 523649 - RNA, 19 nt, Artificial Sequence
  Description of Artificial Sequence: Synthetic oligonucleotide
  Sense strand starting at position 3009 of SEQ ID NO: 317932
uuaucucacccagggauua

SEQ ID NO: 523650 - RNA, 19 nt, Artificial Sequence
  Description of Artificial Sequence: Synthetic oligonucleotide
  Antisense strand to SEQ ID NO: 523649
uaaucccugggugagauaa

SEQ ID NO: 523651 - RNA, 19 nt, Artificial Sequence
  Description of Artificial Sequence: Synthetic oligonucleotide
  Sense strand starting at position 3088 of SEQ ID NO: 317932
ucaguuugcccagaacaga

SEQ ID NO: 523652 - RNA, 19 nt, Artificial Sequence
  Description of Artificial Sequence: Synthetic oligonucleotide
  Antisense strand to SEQ ID NO: 523651
ucuguucugggcaaacuga

SEQ ID NO: 523653 - RNA, 19 nt, Artificial Sequence
  Description of Artificial Sequence: Synthetic oligonucleotide
  Sense strand starting at position 3108 of SEQ ID NO: 317932
gagagacggccuugaagaa

SEQ ID NO: 523654 - RNA, 19 nt, Artificial Sequence
  Description of Artificial Sequence: Synthetic oligonucleotide
  Antisense strand to SEQ ID NO: 523653
uucuucaaggccgucucuc

SEQ ID NO: 523655 - RNA, 19 nt, Artificial Sequence
  Description of Artificial Sequence: Synthetic oligonucleotide
  Sense strand starting at position 3207 of SEQ ID NO: 317932
gacagaucagcacaguugu

SEQ ID NO: 523656 - RNA, 19 nt, Artificial Sequence
  Description of Artificial Sequence: Synthetic oligonucleotide
  Antisense strand to SEQ ID NO: 523655
acaacugugcugaucuguc

SEQ ID NO: 523657 - RNA, 19 nt, Artificial Sequence
  Description of Artificial Sequence: Synthetic oligonucleotide
  Sense strand starting at position 3220 of SEQ ID NO: 317932
aguuguuggucucuaauag

SEQ ID NO: 523658 - RNA, 19 nt, Artificial Sequence
  Description of Artificial Sequence: Synthetic oligonucleotide
  Antisense strand to SEQ ID NO: 523657
cuauuagagaccaacaacu

SEQ ID NO: 523659 - RNA, 19 nt, Artificial Sequence
  Description of Artificial Sequence: Synthetic oligonucleotide
  Sense strand starting at position 3240 of SEQ ID NO: 317932
caacaagaggucuggucaa

SEQ ID NO: 523660 - RNA, 19 nt, Artificial Sequence
  Description of Artificial Sequence: Synthetic oligonucleotide
  Antisense strand to SEQ ID NO: 523659
uugaccagaccucuuguug

SEQ ID NO: 523661 - RNA, 19 nt, Artificial Sequence
  Description of Artificial Sequence: Synthetic oligonucleotide
  Sense strand starting at position 3247 of SEQ ID NO: 317932
aggucuggucaaugguuau

SEQ ID NO: 523662 - RNA, 19 nt, Artificial Sequence
  Description of Artificial Sequence: Synthetic oligonucleotide
  Antisense strand to SEQ ID NO: 523661
auaaccauugaccagaccu

SEQ ID NO: 523663 - RNA, 19 nt, Artificial Sequence
  Description of Artificial Sequence: Synthetic oligonucleotide
  Sense strand starting at position 3260 of SEQ ID NO: 317932
gguuauucuucuguaccaa

SEQ ID NO: 523664 - RNA, 19 nt, Artificial Sequence
  Description of Artificial Sequence: Synthetic oligonucleotide
  Antisense strand to SEQ ID NO: 523663
uugguacagaagaauaacc

SEQ ID NO: 523665 - RNA, 19 nt, Artificial Sequence
  Description of Artificial Sequence: Synthetic oligonucleotide
  Sense strand starting at position 3261 of SEQ ID NO: 317932
guuauucuucuguaccaaa

SEQ ID NO: 523666 - RNA, 19 nt, Artificial Sequence
  Description of Artificial Sequence: Synthetic oligonucleotide
  Antisense strand to SEQ ID NO: 523665
uuugguacagaagaauaac

SEQ ID NO: 523667 - RNA, 19 nt, Artificial Sequence
  Description of Artificial Sequence: Synthetic oligonucleotide
  Sense strand starting at position 3282 of SEQ ID NO: 317932
ccaggaaucccuugcauug

SEQ ID NO: 523668 - RNA, 19 nt, Artificial Sequence
  Description of Artificial Sequence: Synthetic oligonucleotide
  Antisense strand to SEQ ID NO: 523667
caaugcaagggauuccugg

SEQ ID NO: 523669 - RNA, 19 nt, Artificial Sequence
  Description of Artificial Sequence: Synthetic oligonucleotide
  Sense strand starting at position 3317 of SEQ ID NO: 317932
gguaaacccucacugucuu

SEQ ID NO: 523670 - RNA, 19 nt, Artificial Sequence
  Description of Artificial Sequence: Synthetic oligonucleotide
  Antisense strand to SEQ ID NO: 523669
aagacagugaggguuuacc

SEQ ID NO: 523671 - RNA, 19 nt, Artificial Sequence
  Description of Artificial Sequence: Synthetic oligonucleotide
  Sense strand starting at position 3791 of SEQ ID NO: 317932
agcagauauccuggaugau

SEQ ID NO: 523672 - RNA, 19 nt, Artificial Sequence
  Description of Artificial Sequence: Synthetic oligonucleotide
  Antisense strand to SEQ ID NO: 523671
aucauccaggauaucugcu

SEQ ID NO: 523673 - RNA, 19 nt, Artificial Sequence
  Description of Artificial Sequence: Synthetic oligonucleotide
  Sense strand starting at position 3829 of SEQ ID NO: 317932
gugccagaggauggauaau

SEQ ID NO: 523674 - RNA, 19 nt, Artificial Sequence
  Description of Artificial Sequence: Synthetic oligonucleotide
  Antisense strand to SEQ ID NO: 523673
auuauccauccucuggcac

SEQ ID NO: 523675 - RNA, 19 nt, Artificial Sequence
  Description of Artificial Sequence: Synthetic oligonucleotide
  Sense strand starting at position 3883 of SEQ ID NO: 317932
caucuaggagucugggaua

SEQ ID NO: 523676 - RNA, 19 nt, Artificial Sequence
  Description of Artificial Sequence: Synthetic oligonucleotide
  Antisense strand to SEQ ID NO: 523675
uaucccagacuccuagaug

SEQ ID NO: 523677 - RNA, 19 nt, Artificial Sequence
  Description of Artificial Sequence: Synthetic oligonucleotide
  Sense strand starting at position 3896 of SEQ ID NO: 317932
gggauauguugagauauuu

SEQ ID NO: 523678 - RNA, 19 nt, Artificial Sequence
  Description of Artificial Sequence: Synthetic oligonucleotide
  Antisense strand to SEQ ID NO: 523677
aaauaucucaacauauccc

SEQ ID NO: 523679 - RNA, 19 nt, Artificial Sequence
  Description of Artificial Sequence: Synthetic oligonucleotide
  Sense strand starting at position 3905 of SEQ ID NO: 317932
ugagauauuucguacaaag

SEQ ID NO: 523680 - RNA, 19 nt, Artificial Sequence
  Description of Artificial Sequence: Synthetic oligonucleotide
  Antisense strand to SEQ ID NO: 523679
cuuuguacgaaauaucuca

SEQ ID NO: 523681 - RNA, 19 nt, Artificial Sequence
  Description of Artificial Sequence: Synthetic oligonucleotide
  Sense strand starting at position 8 of SEQ ID NO: 317933
gaggguucuguacagcaaa

SEQ ID NO: 523682 - RNA, 19 nt, Artificial Sequence
  Description of Artificial Sequence: Synthetic oligonucleotide
  Antisense strand to SEQ ID NO: 523681
uuugcuguacagaacccuc

SEQ ID NO: 523683 - RNA, 19 nt, Artificial Sequence
  Description of Artificial Sequence: Synthetic oligonucleotide
  Sense strand starting at position 11 of SEQ ID NO: 317933
gguucuguacagcaaauaa

SEQ ID NO: 523684 - RNA, 19 nt, Artificial Sequence
  Description of Artificial Sequence: Synthetic oligonucleotide
  Antisense strand to SEQ ID NO: 523683
uuauuugcuguacagaacc

SEQ ID NO: 523685 - RNA, 19 nt, Artificial Sequence
  Description of Artificial Sequence: Synthetic oligonucleotide
  Sense strand starting at position 237 of SEQ ID NO: 317933
augcaagucucccuggaau

SEQ ID NO: 523686 - RNA, 19 nt, Artificial Sequence
  Description of Artificial Sequence: Synthetic oligonucleotide
  Antisense strand to SEQ ID NO: 523685
auuccagggagacuugcau

SEQ ID NO: 523687 - RNA, 19 nt, Artificial Sequence
  Description of Artificial Sequence: Synthetic oligonucleotide
  Sense strand starting at position 289 of SEQ ID NO: 317933
gcugcuuggauauggauga

SEQ ID NO: 523688 - RNA, 19 nt, Artificial Sequence
  Description of Artificial Sequence: Synthetic oligonucleotide
  Antisense strand to SEQ ID NO: 523687
ucauccauauccaagcagc

SEQ ID NO: 523689 - RNA, 19 nt, Artificial Sequence
  Description of Artificial Sequence: Synthetic oligonucleotide
  Sense strand starting at position 315 of SEQ ID NO: 317933
ccucauuccuagguaguaa

SEQ ID NO: 523690 - RNA, 19 nt, Artificial Sequence
  Description of Artificial Sequence: Synthetic oligonucleotide
  Antisense strand to SEQ ID NO: 523689
uuacuaccuaggaaugagg

SEQ ID NO: 523691 - RNA, 19 nt, Artificial Sequence
  Description of Artificial Sequence: Synthetic oligonucleotide
  Sense strand starting at position 329 of SEQ ID NO: 317933
aguaaauaugucgauuaca

SEQ ID NO: 523692 - RNA, 19 nt, Artificial Sequence
  Description of Artificial Sequence: Synthetic oligonucleotide
  Antisense strand to SEQ ID NO: 523691
uguaaucgacauauuuacu

SEQ ID NO: 523693 - RNA, 19 nt, Artificial Sequence
  Description of Artificial Sequence: Synthetic oligonucleotide
  Sense strand starting at position 699 of SEQ ID NO: 317933
auguuauuccaugauucua

SEQ ID NO: 523694 - RNA, 19 nt, Artificial Sequence
  Description of Artificial Sequence: Synthetic oligonucleotide
  Antisense strand to SEQ ID NO: 523693
uagaaucauggaauaacau

SEQ ID NO: 523695 - RNA, 19 nt, Artificial Sequence
  Description of Artificial Sequence: Synthetic oligonucleotide
  Sense strand starting at position 701 of SEQ ID NO: 317933
guuauuccaugauucuauc

SEQ ID NO: 523696 - RNA, 19 nt, Artificial Sequence
  Description of Artificial Sequence: Synthetic oligonucleotide
  Antisense strand to SEQ ID NO: 523695
gauagaaucauggaauaac

SEQ ID NO: 523697 - RNA, 19 nt, Artificial Sequence
  Description of Artificial Sequence: Synthetic oligonucleotide
  Sense strand starting at position 946 of SEQ ID NO: 317933
agguaacuuguccaaacuu

SEQ ID NO: 523698 - RNA, 19 nt, Artificial Sequence
  Description of Artificial Sequence: Synthetic oligonucleotide
  Antisense strand to SEQ ID NO: 523697
aaguuuggacaaguuaccu

SEQ ID NO: 523699 - RNA, 19 nt, Artificial Sequence
  Description of Artificial Sequence: Synthetic oligonucleotide
  Sense strand starting at position 1015 of SEQ ID NO: 317933
cuacgugguagugagaacu

SEQ ID NO: 523700 - RNA, 19 nt, Artificial Sequence
  Description of Artificial Sequence: Synthetic oligonucleotide
  Antisense strand to SEQ ID NO: 523699
aguucucacuaccacguag

SEQ ID NO: 523701 - RNA, 19 nt, Artificial Sequence
  Description of Artificial Sequence: Synthetic oligonucleotide
  Sense strand starting at position 1062 of SEQ ID NO: 317933
uuugauugaucagugaacu

SEQ ID NO: 523702 - RNA, 19 nt, Artificial Sequence
  Description of Artificial Sequence: Synthetic oligonucleotide
  Antisense strand to SEQ ID NO: 523701
aguucacugaucaaucaaa

SEQ ID NO: 523703 - RNA, 19 nt, Artificial Sequence
  Description of Artificial Sequence: Synthetic oligonucleotide
  Sense strand starting at position 1063 of SEQ ID NO: 317933
uugauugaucagugaacua

SEQ ID NO: 523704 - RNA, 19 nt, Artificial Sequence
  Description of Artificial Sequence: Synthetic oligonucleotide
  Antisense strand to SEQ ID NO: 523703
uaguucacugaucaaucaa

SEQ ID NO: 523705 - RNA, 19 nt, Artificial Sequence
  Description of Artificial Sequence: Synthetic oligonucleotide
  Sense strand starting at position 1193 of SEQ ID NO: 317933
auggaaguuucucuaaaca

SEQ ID NO: 523706 - RNA, 19 nt, Artificial Sequence
  Description of Artificial Sequence: Synthetic oligonucleotide
  Antisense strand to SEQ ID NO: 523705
uguuuagagaaacuuccau

SEQ ID NO: 523707 - RNA, 19 nt, Artificial Sequence
  Description of Artificial Sequence: Synthetic oligonucleotide
  Sense strand starting at position 1361 of SEQ ID NO: 317933
aguucugacaaugguggau

SEQ ID NO: 523708 - RNA, 19 nt, Artificial Sequence
  Description of Artificial Sequence: Synthetic oligonucleotide
  Antisense strand to SEQ ID NO: 523707
auccaccauugucagaacu

SEQ ID NO: 523709 - RNA, 19 nt, Artificial Sequence
  Description of Artificial Sequence: Synthetic oligonucleotide
  Sense strand starting at position 1453 of SEQ ID NO: 317933
aguaaacuauuguccaaga

SEQ ID NO: 523710 - RNA, 19 nt, Artificial Sequence
  Description of Artificial Sequence: Synthetic oligonucleotide
  Antisense strand to SEQ ID NO: 523709
ucuuggacaauaguuuacu

SEQ ID NO: 523711 - RNA, 19 nt, Artificial Sequence
  Description of Artificial Sequence: Synthetic oligonucleotide
  Sense strand starting at position 1536 of SEQ ID NO: 317933
ccuugaagcaguggaauua

SEQ ID NO: 523712 - RNA, 19 nt, Artificial Sequence
  Description of Artificial Sequence: Synthetic oligonucleotide
  Antisense strand to SEQ ID NO: 523711
uaauuccacugcuucaagg

SEQ ID NO: 523713 - RNA, 19 nt, Artificial Sequence
  Description of Artificial Sequence: Synthetic oligonucleotide
  Sense strand starting at position 1545 of SEQ ID NO: 317933
aguggaauuaccugcagag

SEQ ID NO: 523714 - RNA, 19 nt, Artificial Sequence
  Description of Artificial Sequence: Synthetic oligonucleotide
  Antisense strand to SEQ ID NO: 523713
cucugcagguaauuccacu

SEQ ID NO: 523715 - RNA, 19 nt, Artificial Sequence
  Description of Artificial Sequence: Synthetic oligonucleotide
  Sense strand starting at position 1594 of SEQ ID NO: 317933
ggcuuugaccagcagcaaa

SEQ ID NO: 523716 - RNA, 19 nt, Artificial Sequence
  Description of Artificial Sequence: Synthetic oligonucleotide
  Antisense strand to SEQ ID NO: 523715
uuugcugcuggucaaagcc

SEQ ID NO: 523717 - RNA, 19 nt, Artificial Sequence
  Description of Artificial Sequence: Synthetic oligonucleotide
  Sense strand starting at position 1662 of SEQ ID NO: 317933
guuuauaugcaagaagugu

SEQ ID NO: 523718 - RNA, 19 nt, Artificial Sequence
  Description of Artificial Sequence: Synthetic oligonucleotide
  Antisense strand to SEQ ID NO: 523717
acacuucuugcauauaaac

SEQ ID NO: 523719 - RNA, 19 nt, Artificial Sequence
  Description of Artificial Sequence: Synthetic oligonucleotide
  Sense strand starting at position 1980 of SEQ ID NO: 317933
gugggagcugguuaaauua

SEQ ID NO: 523720 - RNA, 19 nt, Artificial Sequence
  Description of Artificial Sequence: Synthetic oligonucleotide
  Antisense strand to SEQ ID NO: 523719
uaauuuaaccagcucccac

SEQ ID NO: 523721 - RNA, 19 nt, Artificial Sequence
  Description of Artificial Sequence: Synthetic oligonucleotide
  Sense strand starting at position 2007 of SEQ ID NO: 317933
ggcgguguucugucuaguu

SEQ ID NO: 523722 - RNA, 19 nt, Artificial Sequence
  Description of Artificial Sequence: Synthetic oligonucleotide
  Antisense strand to SEQ ID NO: 523721
aacuagacagaacaccgcc

SEQ ID NO: 523723 - RNA, 19 nt, Artificial Sequence
  Description of Artificial Sequence: Synthetic oligonucleotide
  Sense strand starting at position 2188 of SEQ ID NO: 317933
ugugaucuccgccggauuu

SEQ ID NO: 523724 - RNA, 19 nt, Artificial Sequence
  Description of Artificial Sequence: Synthetic oligonucleotide
  Antisense strand to SEQ ID NO: 523723
aaauccggcggagaucaca

SEQ ID NO: 523725 - RNA, 19 nt, Artificial Sequence
  Description of Artificial Sequence: Synthetic oligonucleotide
  Sense strand starting at position 2372 of SEQ ID NO: 317933
uacuuuguucugggacuca

SEQ ID NO: 523726 - RNA, 19 nt, Artificial Sequence
  Description of Artificial Sequence: Synthetic oligonucleotide
  Antisense strand to SEQ ID NO: 523725
ugagucccagaacaaagua

SEQ ID NO: 523727 - RNA, 19 nt, Artificial Sequence
  Description of Artificial Sequence: Synthetic oligonucleotide
  Sense strand starting at position 2488 of SEQ ID NO: 317933
agcuacuuucgggaguaua

SEQ ID NO: 523728 - RNA, 19 nt, Artificial Sequence
  Description of Artificial Sequence: Synthetic oligonucleotide
  Antisense strand to SEQ ID NO: 523727
uauacucccgaaaguagcu

SEQ ID NO: 523729 - RNA, 19 nt, Artificial Sequence
  Description of Artificial Sequence: Synthetic oligonucleotide
  Sense strand starting at position 2491 of SEQ ID NO: 317933
uacuuucgggaguauaaac

SEQ ID NO: 523730 - RNA, 19 nt, Artificial Sequence
  Description of Artificial Sequence: Synthetic oligonucleotide
  Antisense strand to SEQ ID NO: 523729
guuuauacucccgaaagua

SEQ ID NO: 523731 - RNA, 19 nt, Artificial Sequence
  Description of Artificial Sequence: Synthetic oligonucleotide
  Sense strand starting at position 2545 of SEQ ID NO: 317933
cuaccacuagaacgaaauu

SEQ ID NO: 523732 - RNA, 19 nt, Artificial Sequence
  Description of Artificial Sequence: Synthetic oligonucleotide
  Antisense strand to SEQ ID NO: 523731
aauuucguucuagugguag

SEQ ID NO: 523733 - RNA, 19 nt, Artificial Sequence
  Description of Artificial Sequence: Synthetic oligonucleotide
  Sense strand starting at position 3051 of SEQ ID NO: 317933
agguuuauguucucaaauu

SEQ ID NO: 523734 - RNA, 19 nt, Artificial Sequence
  Description of Artificial Sequence: Synthetic oligonucleotide
  Antisense strand to SEQ ID NO: 523733
aauuugagaacauaaaccu

SEQ ID NO: 523735 - RNA, 19 nt, Artificial Sequence
  Description of Artificial Sequence: Synthetic oligonucleotide
  Sense strand starting at position 3115 of SEQ ID NO: 317933
acuacaauagaguguuaac

SEQ ID NO: 523736 - RNA, 19 nt, Artificial Sequence
  Description of Artificial Sequence: Synthetic oligonucleotide
  Antisense strand to SEQ ID NO: 523735
guuaacacucuauuguagu

SEQ ID NO: 523737 - RNA, 19 nt, Artificial Sequence
  Description of Artificial Sequence: Synthetic oligonucleotide
  Sense strand starting at position 3171 of SEQ ID NO: 317933
gcgacuggcuugauuguga

SEQ ID NO: 523738 - RNA, 19 nt, Artificial Sequence
  Description of Artificial Sequence: Synthetic oligonucleotide
  Antisense strand to SEQ ID NO: 523737
ucacaaucaagccagucgc

SEQ ID NO: 523739 - RNA, 19 nt, Artificial Sequence
  Description of Artificial Sequence: Synthetic oligonucleotide
  Sense strand starting at position 3486 of SEQ ID NO: 317933
ggauucguggcuagugcuu

SEQ ID NO: 523740 - RNA, 19 nt, Artificial Sequence
  Description of Artificial Sequence: Synthetic oligonucleotide
  Antisense strand to SEQ ID NO: 523739
aagcacuagccacgaaucc

SEQ ID NO: 523741 - RNA, 19 nt, Artificial Sequence
  Description of Artificial Sequence: Synthetic oligonucleotide
  Sense strand starting at position 3492 of SEQ ID NO: 317933
guggcuagugcuuuguuua

SEQ ID NO: 523742 - RNA, 19 nt, Artificial Sequence
  Description of Artificial Sequence: Synthetic oligonucleotide
  Antisense strand to SEQ ID NO: 523741
uaaacaaagcacuagccac

SEQ ID NO: 523743 - RNA, 19 nt, Artificial Sequence
  Description of Artificial Sequence: Synthetic oligonucleotide
  Sense strand starting at position 3523 of SEQ ID NO: 317933
auagaucucccugaaugcu

SEQ ID NO: 523744 - RNA, 19 nt, Artificial Sequence
  Description of Artificial Sequence: Synthetic oligonucleotide
  Antisense strand to SEQ ID NO: 523743
agcauucagggagaucuau

SEQ ID NO: 523745 - RNA, 19 nt, Artificial Sequence
  Description of Artificial Sequence: Synthetic oligonucleotide
  Sense strand starting at position 3577 of SEQ ID NO: 317933
ugauaaaucugggaaagag

SEQ ID NO: 523746 - RNA, 19 nt, Artificial Sequence
  Description of Artificial Sequence: Synthetic oligonucleotide
  Antisense strand to SEQ ID NO: 523745
cucuuucccagauuuauca

SEQ ID NO: 523747 - RNA, 19 nt, Artificial Sequence
  Description of Artificial Sequence: Synthetic oligonucleotide
  Sense strand starting at position 3618 of SEQ ID NO: 317933
ugucuucuggugcaugaaa

SEQ ID NO: 523748 - RNA, 19 nt, Artificial Sequence
  Description of Artificial Sequence: Synthetic oligonucleotide
  Antisense strand to SEQ ID NO: 523747
uuucaugcaccagaagaca

SEQ ID NO: 523749 - RNA, 19 nt, Artificial Sequence
  Description of Artificial Sequence: Synthetic oligonucleotide
  Sense strand starting at position 3700 of SEQ ID NO: 317933
cuuugaaucuuucugguac

SEQ ID NO: 523750 - RNA, 19 nt, Artificial Sequence
  Description of Artificial Sequence: Synthetic oligonucleotide
  Antisense strand to SEQ ID NO: 523749
guaccagaaagauucaaag

SEQ ID NO: 523751 - RNA, 19 nt, Artificial Sequence
  Description of Artificial Sequence: Synthetic oligonucleotide
  Sense strand starting at position 3889 of SEQ ID NO: 317933
cugauuccuggugauccaa

SEQ ID NO: 523752 - RNA, 19 nt, Artificial Sequence
  Description of Artificial Sequence: Synthetic oligonucleotide
  Antisense strand to SEQ ID NO: 523751
uuggaucaccaggaaucag

SEQ ID NO: 523753 - RNA, 19 nt, Artificial Sequence
  Description of Artificial Sequence: Synthetic oligonucleotide
  Sense strand starting at position 3891 of SEQ ID NO: 317933
gauuccuggugauccaacu

SEQ ID NO: 523754 - RNA, 19 nt, Artificial Sequence
  Description of Artificial Sequence: Synthetic oligonucleotide
  Antisense strand to SEQ ID NO: 523753
aguuggaucaccaggaauc

SEQ ID NO: 523755 - RNA, 19 nt, Artificial Sequence
  Description of Artificial Sequence: Synthetic oligonucleotide
  Sense strand starting at position 3921 of SEQ ID NO: 317933
ugcagagaacuuuagugca

SEQ ID NO: 523756 - RNA, 19 nt, Artificial Sequence
  Description of Artificial Sequence: Synthetic oligonucleotide
  Antisense strand to SEQ ID NO: 523755
ugcacuaaaguucucugca

SEQ ID NO: 523757 - RNA, 19 nt, Artificial Sequence
  Description of Artificial Sequence: Synthetic oligonucleotide
  Sense strand starting at position 3923 of SEQ ID NO: 317933
cagagaacuuuagugcauu

SEQ ID NO: 523758 - RNA, 19 nt, Artificial Sequence
  Description of Artificial Sequence: Synthetic oligonucleotide
  Antisense strand to SEQ ID NO: 523757
aaugcacuaaaguucucug

SEQ ID NO: 523759 - RNA, 19 nt, Artificial Sequence
  Description of Artificial Sequence: Synthetic oligonucleotide
  Sense strand starting at position 3972 of SEQ ID NO: 317933
uugauacugcucuagaggu

SEQ ID NO: 523760 - RNA, 19 nt, Artificial Sequence
  Description of Artificial Sequence: Synthetic oligonucleotide
  Antisense strand to SEQ ID NO: 523759
accucuagagcaguaucaa

SEQ ID NO: 523761 - RNA, 19 nt, Artificial Sequence
  Description of Artificial Sequence: Synthetic oligonucleotide
  Sense strand starting at position 156 of SEQ ID NO: 317934
auacucucagccugaguuu

SEQ ID NO: 523762 - RNA, 19 nt, Artificial Sequence
  Description of Artificial Sequence: Synthetic oligonucleotide
  Antisense strand to SEQ ID NO: 523761
aaacucaggcugagaguau

SEQ ID NO: 523763 - RNA, 19 nt, Artificial Sequence
  Description of Artificial Sequence: Synthetic oligonucleotide
  Sense strand starting at position 342 of SEQ ID NO: 317934
uguguaucugaaggguaga

SEQ ID NO: 523764 - RNA, 19 nt, Artificial Sequence
  Description of Artificial Sequence: Synthetic oligonucleotide
  Antisense strand to SEQ ID NO: 523763
ucuacccuucagauacaca

SEQ ID NO: 523765 - RNA, 19 nt, Artificial Sequence
  Description of Artificial Sequence: Synthetic oligonucleotide
  Sense strand starting at position 751 of SEQ ID NO: 317934
uggagaucugccugcucuu

SEQ ID NO: 523766 - RNA, 19 nt, Artificial Sequence
  Description of Artificial Sequence: Synthetic oligonucleotide
  Antisense strand to SEQ ID NO: 523765
aagagcaggcagaucucca

SEQ ID NO: 523767 - RNA, 19 nt, Artificial Sequence
  Description of Artificial Sequence: Synthetic oligonucleotide
  Sense strand starting at position 764 of SEQ ID NO: 317934
gcucuucuuccauaugguu

SEQ ID NO: 523768 - RNA, 19 nt, Artificial Sequence
  Description of Artificial Sequence: Synthetic oligonucleotide
  Antisense strand to SEQ ID NO: 523767
aaccauauggaagaagagc

SEQ ID NO: 523769 - RNA, 19 nt, Artificial Sequence
  Description of Artificial Sequence: Synthetic oligonucleotide
  Sense strand starting at position 2003 of SEQ ID NO: 317934
agguaaugggauugugauu

SEQ ID NO: 523770 - RNA, 19 nt, Artificial Sequence
  Description of Artificial Sequence: Synthetic oligonucleotide
  Antisense strand to SEQ ID NO: 523769
aaucacaaucccauuaccu

SEQ ID NO: 523771 - RNA, 19 nt, Artificial Sequence
  Description of Artificial Sequence: Synthetic oligonucleotide
  Sense strand starting at position 2008 of SEQ ID NO: 317934
augggauugugauuaugac

SEQ ID NO: 523772 - RNA, 19 nt, Artificial Sequence
  Description of Artificial Sequence: Synthetic oligonucleotide
  Antisense strand to SEQ ID NO: 523771
gucauaaucacaaucccau

SEQ ID NO: 523773 - RNA, 19 nt, Artificial Sequence
  Description of Artificial Sequence: Synthetic oligonucleotide
  Sense strand starting at position 2012 of SEQ ID NO: 317934
gauugugauuaugacauca

SEQ ID NO: 523774 - RNA, 19 nt, Artificial Sequence
  Description of Artificial Sequence: Synthetic oligonucleotide
  Antisense strand to SEQ ID NO: 523773
ugaugucauaaucacaauc

SEQ ID NO: 523775 - RNA, 19 nt, Artificial Sequence
  Description of Artificial Sequence: Synthetic oligonucleotide
  Sense strand starting at position 2014 of SEQ ID NO: 317934
uugugauuaugacaucaua

SEQ ID NO: 523776 - RNA, 19 nt, Artificial Sequence
  Description of Artificial Sequence: Synthetic oligonucleotide
  Antisense strand to SEQ ID NO: 523775
uaugaugucauaaucacaa

SEQ ID NO: 523777 - RNA, 19 nt, Artificial Sequence
  Description of Artificial Sequence: Synthetic oligonucleotide
  Sense strand starting at position 2081 of SEQ ID NO: 317934
ggagaagugcggugguuag

SEQ ID NO: 523778 - RNA, 19 nt, Artificial Sequence
  Description of Artificial Sequence: Synthetic oligonucleotide
  Antisense strand to SEQ ID NO: 523777
cuaaccaccgcacuucucc

SEQ ID NO: 523779 - RNA, 19 nt, Artificial Sequence
  Description of Artificial Sequence: Synthetic oligonucleotide
  Sense strand starting at position 2147 of SEQ ID NO: 317934
agauguugacggcgcuaua

SEQ ID NO: 523780 - RNA, 19 nt, Artificial Sequence
  Description of Artificial Sequence: Synthetic oligonucleotide
  Antisense strand to SEQ ID NO: 523779
uauagcgccgucaacaucu

SEQ ID NO: 523781 - RNA, 19 nt, Artificial Sequence
  Description of Artificial Sequence: Synthetic oligonucleotide
  Sense strand starting at position 2150 of SEQ ID NO: 317934
uguugacggcgcuauauuu

SEQ ID NO: 523782 - RNA, 19 nt, Artificial Sequence
  Description of Artificial Sequence: Synthetic oligonucleotide
  Antisense strand to SEQ ID NO: 523781
aaauauagcgccgucaaca

SEQ ID NO: 523783 - RNA, 19 nt, Artificial Sequence
  Description of Artificial Sequence: Synthetic oligonucleotide
  Sense strand starting at position 2260 of SEQ ID NO: 317934
auugaauguagacguuagu

SEQ ID NO: 523784 - RNA, 19 nt, Artificial Sequence
  Description of Artificial Sequence: Synthetic oligonucleotide
  Antisense strand to SEQ ID NO: 523783
acuaacgucuacauucaau

SEQ ID NO: 523785 - RNA, 19 nt, Artificial Sequence
  Description of Artificial Sequence: Synthetic oligonucleotide
  Sense strand starting at position 2269 of SEQ ID NO: 317934
agacguuagugugugaaga

SEQ ID NO: 523786 - RNA, 19 nt, Artificial Sequence
  Description of Artificial Sequence: Synthetic oligonucleotide
  Antisense strand to SEQ ID NO: 523785
ucuucacacacuaacgucu

SEQ ID NO: 523787 - RNA, 19 nt, Artificial Sequence
  Description of Artificial Sequence: Synthetic oligonucleotide
  Sense strand starting at position 2270 of SEQ ID NO: 317934
gacguuagugugugaagag

SEQ ID NO: 523788 - RNA, 19 nt, Artificial Sequence
  Description of Artificial Sequence: Synthetic oligonucleotide
  Antisense strand to SEQ ID NO: 523787
cucuucacacacuaacguc

SEQ ID NO: 523789 - RNA, 19 nt, Artificial Sequence
  Description of Artificial Sequence: Synthetic oligonucleotide
  Sense strand starting at position 2273 of SEQ ID NO: 317934
guuagugugugaagagguu

SEQ ID NO: 523790 - RNA, 19 nt, Artificial Sequence
  Description of Artificial Sequence: Synthetic oligonucleotide
  Antisense strand to SEQ ID NO: 523789
aaccucuucacacacuaac

SEQ ID NO: 523791 - RNA, 19 nt, Artificial Sequence
  Description of Artificial Sequence: Synthetic oligonucleotide
  Sense strand starting at position 2281 of SEQ ID NO: 317934
gugaagagguuggguugau

SEQ ID NO: 523792 - RNA, 19 nt, Artificial Sequence
  Description of Artificial Sequence: Synthetic oligonucleotide
  Antisense strand to SEQ ID NO: 523791
aucaacccaaccucuucac

SEQ ID NO: 523793 - RNA, 19 nt, Artificial Sequence
  Description of Artificial Sequence: Synthetic oligonucleotide
  Sense strand starting at position 2297 of SEQ ID NO: 317934
gaugguuucuggcucuuau

SEQ ID NO: 523794 - RNA, 19 nt, Artificial Sequence
  Description of Artificial Sequence: Synthetic oligonucleotide
  Antisense strand to SEQ ID NO: 523793
auaagagccagaaaccauc

SEQ ID NO: 523795 - RNA, 19 nt, Artificial Sequence
  Description of Artificial Sequence: Synthetic oligonucleotide
  Sense strand starting at position 2301 of SEQ ID NO: 317934
guuucuggcucuuauguaa

SEQ ID NO: 523796 - RNA, 19 nt, Artificial Sequence
  Description of Artificial Sequence: Synthetic oligonucleotide
  Antisense strand to SEQ ID NO: 523795
uuacauaagagccagaaac

SEQ ID NO: 523797 - RNA, 19 nt, Artificial Sequence
  Description of Artificial Sequence: Synthetic oligonucleotide
  Sense strand starting at position 2304 of SEQ ID NO: 317934
ucuggcucuuauguaaauu

SEQ ID NO: 523798 - RNA, 19 nt, Artificial Sequence
  Description of Artificial Sequence: Synthetic oligonucleotide
  Antisense strand to SEQ ID NO: 523797
aauuuacauaagagccaga

SEQ ID NO: 523799 - RNA, 19 nt, Artificial Sequence
  Description of Artificial Sequence: Synthetic oligonucleotide
  Sense strand starting at position 2332 of SEQ ID NO: 317934
gcuagcaucacagaugguu

SEQ ID NO: 523800 - RNA, 19 nt, Artificial Sequence
  Description of Artificial Sequence: Synthetic oligonucleotide
  Antisense strand to SEQ ID NO: 523799
aaccaucugugaugcuagc

SEQ ID NO: 523801 - RNA, 19 nt, Artificial Sequence
  Description of Artificial Sequence: Synthetic oligonucleotide
  Sense strand starting at position 2389 of SEQ ID NO: 317934
uaaacaaugcguucguguu

SEQ ID NO: 523802 - RNA, 19 nt, Artificial Sequence
  Description of Artificial Sequence: Synthetic oligonucleotide
  Antisense strand to SEQ ID NO: 523801
aacacgaacgcauuguuua

SEQ ID NO: 523803 - RNA, 19 nt, Artificial Sequence
  Description of Artificial Sequence: Synthetic oligonucleotide
  Sense strand starting at position 2393 of SEQ ID NO: 317934
caaugcguucguguuguga

SEQ ID NO: 523804 - RNA, 19 nt, Artificial Sequence
  Description of Artificial Sequence: Synthetic oligonucleotide
  Antisense strand to SEQ ID NO: 523803
ucacaacacgaacgcauug

SEQ ID NO: 523805 - RNA, 19 nt, Artificial Sequence
  Description of Artificial Sequence: Synthetic oligonucleotide
  Sense strand starting at position 2395 of SEQ ID NO: 317934
augcguucguguugugauc

SEQ ID NO: 523806 - RNA, 19 nt, Artificial Sequence
  Description of Artificial Sequence: Synthetic oligonucleotide
  Antisense strand to SEQ ID NO: 523805
gaucacaacacgaacgcau

SEQ ID NO: 523807 - RNA, 19 nt, Artificial Sequence
  Description of Artificial Sequence: Synthetic oligonucleotide
  Sense strand starting at position 2402 of SEQ ID NO: 317934
cguguugugaucucuuugu

SEQ ID NO: 523808 - RNA, 19 nt, Artificial Sequence
  Description of Artificial Sequence: Synthetic oligonucleotide
  Antisense strand to SEQ ID NO: 523807
acaaagagaucacaacacg

SEQ ID NO: 523809 - RNA, 19 nt, Artificial Sequence
  Description of Artificial Sequence: Synthetic oligonucleotide
  Sense strand starting at position 2406 of SEQ ID NO: 317934
uugugaucucuuuguaaua

SEQ ID NO: 523810 - RNA, 19 nt, Artificial Sequence
  Description of Artificial Sequence: Synthetic oligonucleotide
  Antisense strand to SEQ ID NO: 523809
uauuacaaagagaucacaa

SEQ ID NO: 523811 - RNA, 19 nt, Artificial Sequence
  Description of Artificial Sequence: Synthetic oligonucleotide
  Sense strand starting at position 2407 of SEQ ID NO: 317934
ugugaucucuuuguaauac

SEQ ID NO: 523812 - RNA, 19 nt, Artificial Sequence
  Description of Artificial Sequence: Synthetic oligonucleotide
  Antisense strand to SEQ ID NO: 523811
guauuacaaagagaucaca

SEQ ID NO: 523813 - RNA, 19 nt, Artificial Sequence
  Description of Artificial Sequence: Synthetic oligonucleotide
  Sense strand starting at position 2408 of SEQ ID NO: 317934
gugaucucuuuguaauaca

SEQ ID NO: 523814 - RNA, 19 nt, Artificial Sequence
  Description of Artificial Sequence: Synthetic oligonucleotide
  Antisense strand to SEQ ID NO: 523813
uguauuacaaagagaucac

SEQ ID NO: 523815 - RNA, 19 nt, Artificial Sequence
  Description of Artificial Sequence: Synthetic oligonucleotide
  Sense strand starting at position 2454 of SEQ ID NO: 317934
auuggaaaguagcaguaau

SEQ ID NO: 523816 - RNA, 19 nt, Artificial Sequence
  Description of Artificial Sequence: Synthetic oligonucleotide
  Antisense strand to SEQ ID NO: 523815
auuacugcuacuuuccaau

SEQ ID NO: 523817 - RNA, 19 nt, Artificial Sequence
  Description of Artificial Sequence: Synthetic oligonucleotide
  Sense strand starting at position 2462 of SEQ ID NO: 317934
guagcaguaaugcaaguaa

SEQ ID NO: 523818 - RNA, 19 nt, Artificial Sequence
  Description of Artificial Sequence: Synthetic oligonucleotide
  Antisense strand to SEQ ID NO: 523817
uuacuugcauuacugcuac

SEQ ID NO: 523819 - RNA, 19 nt, Artificial Sequence
  Description of Artificial Sequence: Synthetic oligonucleotide
  Sense strand starting at position 2498 of SEQ ID NO: 317934
agcagcaaguccucugaaa

SEQ ID NO: 523820 - RNA, 19 nt, Artificial Sequence
  Description of Artificial Sequence: Synthetic oligonucleotide
  Antisense strand to SEQ ID NO: 523819
uuucagaggacuugcugcu

SEQ ID NO: 523821 - RNA, 19 nt, Artificial Sequence
  Description of Artificial Sequence: Synthetic oligonucleotide
  Sense strand starting at position 2500 of SEQ ID NO: 317934
cagcaaguccucugaaaga

SEQ ID NO: 523822 - RNA, 19 nt, Artificial Sequence
  Description of Artificial Sequence: Synthetic oligonucleotide
  Antisense strand to SEQ ID NO: 523821
ucuuucagaggacuugcug

SEQ ID NO: 523823 - RNA, 19 nt, Artificial Sequence
  Description of Artificial Sequence: Synthetic oligonucleotide
  Sense strand starting at position 2565 of SEQ ID NO: 317934
gguaaauagcugugaucag

SEQ ID NO: 523824 - RNA, 19 nt, Artificial Sequence
  Description of Artificial Sequence: Synthetic oligonucleotide
  Antisense strand to SEQ ID NO: 523823
cugaucacagcuauuuacc

SEQ ID NO: 523825 - RNA, 19 nt, Artificial Sequence
  Description of Artificial Sequence: Synthetic oligonucleotide
  Sense strand starting at position 2574 of SEQ ID NO: 317934
cugugaucagcuggaaagu

SEQ ID NO: 523826 - RNA, 19 nt, Artificial Sequence
  Description of Artificial Sequence: Synthetic oligonucleotide
  Antisense strand to SEQ ID NO: 523825
acuuuccagcugaucacag

SEQ ID NO: 523827 - RNA, 19 nt, Artificial Sequence
  Description of Artificial Sequence: Synthetic oligonucleotide
  Sense strand starting at position 2575 of SEQ ID NO: 317934
ugugaucagcuggaaagua

SEQ ID NO: 523828 - RNA, 19 nt, Artificial Sequence
  Description of Artificial Sequence: Synthetic oligonucleotide
  Antisense strand to SEQ ID NO: 523827
uacuuuccagcugaucaca

SEQ ID NO: 523829 - RNA, 19 nt, Artificial Sequence
  Description of Artificial Sequence: Synthetic oligonucleotide
  Sense strand starting at position 3021 of SEQ ID NO: 317934
agaggcgucuugcuauguu

SEQ ID NO: 523830 - RNA, 19 nt, Artificial Sequence
  Description of Artificial Sequence: Synthetic oligonucleotide
  Antisense strand to SEQ ID NO: 523829
aacauagcaagacgccucu

SEQ ID NO: 523831 - RNA, 19 nt, Artificial Sequence
  Description of Artificial Sequence: Synthetic oligonucleotide
  Sense strand starting at position 3566 of SEQ ID NO: 317934
aggcaaagguacucucaaa

SEQ ID NO: 523832 - RNA, 19 nt, Artificial Sequence
  Description of Artificial Sequence: Synthetic oligonucleotide
  Antisense strand to SEQ ID NO: 523831
uuugagaguaccuuugccu

SEQ ID NO: 523833 - RNA, 19 nt, Artificial Sequence
  Description of Artificial Sequence: Synthetic oligonucleotide
  Sense strand starting at position 3665 of SEQ ID NO: 317934
ugaauuaaaugguugaguu

SEQ ID NO: 523834 - RNA, 19 nt, Artificial Sequence
  Description of Artificial Sequence: Synthetic oligonucleotide
  Antisense strand to SEQ ID NO: 523833
aacucaaccauuuaauuca

SEQ ID NO: 523835 - RNA, 19 nt, Artificial Sequence
  Description of Artificial Sequence: Synthetic oligonucleotide
  Sense strand starting at position 3666 of SEQ ID NO: 317934
gaauuaaaugguugaguua

SEQ ID NO: 523836 - RNA, 19 nt, Artificial Sequence
  Description of Artificial Sequence: Synthetic oligonucleotide
  Antisense strand to SEQ ID NO: 523835
uaacucaaccauuuaauuc

SEQ ID NO: 523837 - RNA, 19 nt, Artificial Sequence
  Description of Artificial Sequence: Synthetic oligonucleotide
  Sense strand starting at position 3691 of SEQ ID NO: 317934
ggcauuggcucauuugcaa

SEQ ID NO: 523838 - RNA, 19 nt, Artificial Sequence
  Description of Artificial Sequence: Synthetic oligonucleotide
  Antisense strand to SEQ ID NO: 523837
uugcaaaugagccaaugcc

SEQ ID NO: 523839 - RNA, 19 nt, Artificial Sequence
  Description of Artificial Sequence: Synthetic oligonucleotide
  Sense strand starting at position 3968 of SEQ ID NO: 317934
ugcuuugaacugcaucuua

SEQ ID NO: 523840 - RNA, 19 nt, Artificial Sequence
  Description of Artificial Sequence: Synthetic oligonucleotide
  Antisense strand to SEQ ID NO: 523839
uaagaugcaguucaaagca

SEQ ID NO: 523841 - RNA, 19 nt, Artificial Sequence
  Description of Artificial Sequence: Synthetic oligonucleotide
  Sense strand starting at position 172 of SEQ ID NO: 317935
ccuggauguaccuggaguu

SEQ ID NO: 523842 - RNA, 19 nt, Artificial Sequence
  Description of Artificial Sequence: Synthetic oligonucleotide
  Antisense strand to SEQ ID NO: 523841
aacuccagguacauccagg

SEQ ID NO: 523843 - RNA, 19 nt, Artificial Sequence
  Description of Artificial Sequence: Synthetic oligonucleotide
  Sense strand starting at position 182 of SEQ ID NO: 317935
ccuggaguucucuggaaga

SEQ ID NO: 523844 - RNA, 19 nt, Artificial Sequence
  Description of Artificial Sequence: Synthetic oligonucleotide
  Antisense strand to SEQ ID NO: 523843
ucuuccagagaacuccagg

SEQ ID NO: 523845 - RNA, 19 nt, Artificial Sequence
  Description of Artificial Sequence: Synthetic oligonucleotide
  Sense strand starting at position 214 of SEQ ID NO: 317935
agucaaucaucauuacagu

SEQ ID NO: 523846 - RNA, 19 nt, Artificial Sequence
  Description of Artificial Sequence: Synthetic oligonucleotide
  Antisense strand to SEQ ID NO: 523845
acuguaaugaugauugacu

SEQ ID NO: 523847 - RNA, 19 nt, Artificial Sequence
  Description of Artificial Sequence: Synthetic oligonucleotide
  Sense strand starting at position 215 of SEQ ID NO: 317935
gucaaucaucauuacaguu

SEQ ID NO: 523848 - RNA, 19 nt, Artificial Sequence
  Description of Artificial Sequence: Synthetic oligonucleotide
  Antisense strand to SEQ ID NO: 523847
aacuguaaugaugauugac

SEQ ID NO: 523849 - RNA, 19 nt, Artificial Sequence
  Description of Artificial Sequence: Synthetic oligonucleotide
  Sense strand starting at position 312 of SEQ ID NO: 317935
cuauauucuuacgggagaa

SEQ ID NO: 523850 - RNA, 19 nt, Artificial Sequence
  Description of Artificial Sequence: Synthetic oligonucleotide
  Antisense strand to SEQ ID NO: 523849
uucucccguaagaauauag

SEQ ID NO: 523851 - RNA, 19 nt, Artificial Sequence
  Description of Artificial Sequence: Synthetic oligonucleotide
  Sense strand starting at position 316 of SEQ ID NO: 317935
auucuuacgggagaagcua

SEQ ID NO: 523852 - RNA, 19 nt, Artificial Sequence
  Description of Artificial Sequence: Synthetic oligonucleotide
  Antisense strand to SEQ ID NO: 523851
uagcuucucccguaagaau

SEQ ID NO: 523853 - RNA, 19 nt, Artificial Sequence
  Description of Artificial Sequence: Synthetic oligonucleotide
  Sense strand starting at position 348 of SEQ ID NO: 317935
uucugcucuugguuucuua

SEQ ID NO: 523854 - RNA, 19 nt, Artificial Sequence
  Description of Artificial Sequence: Synthetic oligonucleotide
  Antisense strand to SEQ ID NO: 523853
uaagaaaccaagagcagaa

SEQ ID NO: 523855 - RNA, 19 nt, Artificial Sequence
  Description of Artificial Sequence: Synthetic oligonucleotide
  Sense strand starting at position 368 of SEQ ID NO: 317935
cucugcugcccucaaagau

SEQ ID NO: 523856 - RNA, 19 nt, Artificial Sequence
  Description of Artificial Sequence: Synthetic oligonucleotide
  Antisense strand to SEQ ID NO: 523855
aucuuugagggcagcagag

SEQ ID NO: 523857 - RNA, 19 nt, Artificial Sequence
  Description of Artificial Sequence: Synthetic oligonucleotide
  Sense strand starting at position 636 of SEQ ID NO: 317935
auacucucagccugaguuu

SEQ ID NO: 523858 - RNA, 19 nt, Artificial Sequence
  Description of Artificial Sequence: Synthetic oligonucleotide
  Antisense strand to SEQ ID NO: 523857
aaacucaggcugagaguau

SEQ ID NO: 523859 - RNA, 19 nt, Artificial Sequence
  Description of Artificial Sequence: Synthetic oligonucleotide
  Sense strand starting at position 822 of SEQ ID NO: 317935
uguguaucugaaggguaga

SEQ ID NO: 523860 - RNA, 19 nt, Artificial Sequence
  Description of Artificial Sequence: Synthetic oligonucleotide
  Antisense strand to SEQ ID NO: 523859
ucuacccuucagauacaca

SEQ ID NO: 523861 - RNA, 19 nt, Artificial Sequence
  Description of Artificial Sequence: Synthetic oligonucleotide
  Sense strand starting at position 1231 of SEQ ID NO: 317935
uggagaucugccugcucuu

SEQ ID NO: 523862 - RNA, 19 nt, Artificial Sequence
  Description of Artificial Sequence: Synthetic oligonucleotide
  Antisense strand to SEQ ID NO: 523861
aagagcaggcagaucucca

SEQ ID NO: 523863 - RNA, 19 nt, Artificial Sequence
  Description of Artificial Sequence: Synthetic oligonucleotide
  Sense strand starting at position 1244 of SEQ ID NO: 317935
gcucuucuuccauaugguu

SEQ ID NO: 523864 - RNA, 19 nt, Artificial Sequence
  Description of Artificial Sequence: Synthetic oligonucleotide
  Antisense strand to SEQ ID NO: 523863
aaccauauggaagaagagc

SEQ ID NO: 523865 - RNA, 19 nt, Artificial Sequence
  Description of Artificial Sequence: Synthetic oligonucleotide
  Sense strand starting at position 2483 of SEQ ID NO: 317935
agguaaugggauugugauu

SEQ ID NO: 523866 - RNA, 19 nt, Artificial Sequence
  Description of Artificial Sequence: Synthetic oligonucleotide
  Antisense strand to SEQ ID NO: 523865
aaucacaaucccauuaccu

SEQ ID NO: 523867 - RNA, 19 nt, Artificial Sequence
  Description of Artificial Sequence: Synthetic oligonucleotide
  Sense strand starting at position 2488 of SEQ ID NO: 317935
augggauugugauuaugac

SEQ ID NO: 523868 - RNA, 19 nt, Artificial Sequence
  Description of Artificial Sequence: Synthetic oligonucleotide
  Antisense strand to SEQ ID NO: 523867
gucauaaucacaaucccau

SEQ ID NO: 523869 - RNA, 19 nt, Artificial Sequence
  Description of Artificial Sequence: Synthetic oligonucleotide
  Sense strand starting at position 2492 of SEQ ID NO: 317935
gauugugauuaugacauca

SEQ ID NO: 523870 - RNA, 19 nt, Artificial Sequence
  Description of Artificial Sequence: Synthetic oligonucleotide
  Antisense strand to SEQ ID NO: 523869
ugaugucauaaucacaauc

SEQ ID NO: 523871 - RNA, 19 nt, Artificial Sequence
  Description of Artificial Sequence: Synthetic oligonucleotide
  Sense strand starting at position 2494 of SEQ ID NO: 317935
uugugauuaugacaucaua

SEQ ID NO: 523872 - RNA, 19 nt, Artificial Sequence
  Description of Artificial Sequence: Synthetic oligonucleotide
  Antisense strand to SEQ ID NO: 523871
uaugaugucauaaucacaa

SEQ ID NO: 523873 - RNA, 19 nt, Artificial Sequence
  Description of Artificial Sequence: Synthetic oligonucleotide
  Sense strand starting at position 2561 of SEQ ID NO: 317935
ggagaagugcggugguuag

SEQ ID NO: 523874 - RNA, 19 nt, Artificial Sequence
  Description of Artificial Sequence: Synthetic oligonucleotide
  Antisense strand to SEQ ID NO: 523873
cuaaccaccgcacuucucc

SEQ ID NO: 523875 - RNA, 19 nt, Artificial Sequence
  Description of Artificial Sequence: Synthetic oligonucleotide
  Sense strand starting at position 2627 of SEQ ID NO: 317935
agauguugacggcgcuaua

SEQ ID NO: 523876 - RNA, 19 nt, Artificial Sequence
  Description of Artificial Sequence: Synthetic oligonucleotide
  Antisense strand to SEQ ID NO: 523875
uauagcgccgucaacaucu

SEQ ID NO: 523877 - RNA, 19 nt, Artificial Sequence
  Description of Artificial Sequence: Synthetic oligonucleotide
  Sense strand starting at position 2630 of SEQ ID NO: 317935
uguugacggcgcuauauuu

SEQ ID NO: 523878 - RNA, 19 nt, Artificial Sequence
  Description of Artificial Sequence: Synthetic oligonucleotide
  Antisense strand to SEQ ID NO: 523877
aaauauagcgccgucaaca

SEQ ID NO: 523879 - RNA, 19 nt, Artificial Sequence
  Description of Artificial Sequence: Synthetic oligonucleotide
  Sense strand starting at position 2740 of SEQ ID NO: 317935
auugaauguagacguuagu

SEQ ID NO: 523880 - RNA, 19 nt, Artificial Sequence
  Description of Artificial Sequence: Synthetic oligonucleotide
  Antisense strand to SEQ ID NO: 523879
acuaacgucuacauucaau

SEQ ID NO: 523881 - RNA, 19 nt, Artificial Sequence
  Description of Artificial Sequence: Synthetic oligonucleotide
  Sense strand starting at position 2749 of SEQ ID NO: 317935
agacguuagugugugaaga

SEQ ID NO: 523882 - RNA, 19 nt, Artificial Sequence
  Description of Artificial Sequence: Synthetic oligonucleotide
  Antisense strand to SEQ ID NO: 523881
ucuucacacacuaacgucu

SEQ ID NO: 523883 - RNA, 19 nt, Artificial Sequence
  Description of Artificial Sequence: Synthetic oligonucleotide
  Sense strand starting at position 2750 of SEQ ID NO: 317935
gacguuagugugugaagag

SEQ ID NO: 523884 - RNA, 19 nt, Artificial Sequence
  Description of Artificial Sequence: Synthetic oligonucleotide
  Antisense strand to SEQ ID NO: 523883
cucuucacacacuaacguc

SEQ ID NO: 523885 - RNA, 19 nt, Artificial Sequence
  Description of Artificial Sequence: Synthetic oligonucleotide
  Sense strand starting at position 2753 of SEQ ID NO: 317935
guuagugugugaagagguu

SEQ ID NO: 523886 - RNA, 19 nt, Artificial Sequence
  Description of Artificial Sequence: Synthetic oligonucleotide
  Antisense strand to SEQ ID NO: 523885
aaccucuucacacacuaac

SEQ ID NO: 523887 - RNA, 19 nt, Artificial Sequence
  Description of Artificial Sequence: Synthetic oligonucleotide
  Sense strand starting at position 2777 of SEQ ID NO: 317935
gaugguuucuggcucuuau

SEQ ID NO: 523888 - RNA, 19 nt, Artificial Sequence
  Description of Artificial Sequence: Synthetic oligonucleotide
  Antisense strand to SEQ ID NO: 523887
auaagagccagaaaccauc

SEQ ID NO: 523889 - RNA, 19 nt, Artificial Sequence
  Description of Artificial Sequence: Synthetic oligonucleotide
  Sense strand starting at position 2784 of SEQ ID NO: 317935
ucuggcucuuauguaaauu

SEQ ID NO: 523890 - RNA, 19 nt, Artificial Sequence
  Description of Artificial Sequence: Synthetic oligonucleotide
  Antisense strand to SEQ ID NO: 523889
aauuuacauaagagccaga

SEQ ID NO: 523891 - RNA, 19 nt, Artificial Sequence
  Description of Artificial Sequence: Synthetic oligonucleotide
  Sense strand starting at position 2812 of SEQ ID NO: 317935
gcuagcaucacagaugguu

SEQ ID NO: 523892 - RNA, 19 nt, Artificial Sequence
  Description of Artificial Sequence: Synthetic oligonucleotide
  Antisense strand to SEQ ID NO: 523891
aaccaucugugaugcuagc

SEQ ID NO: 523893 - RNA, 19 nt, Artificial Sequence
  Description of Artificial Sequence: Synthetic oligonucleotide
  Sense strand starting at position 2869 of SEQ ID NO: 317935
uaaacaaugcguucguguu

SEQ ID NO: 523894 - RNA, 19 nt, Artificial Sequence
  Description of Artificial Sequence: Synthetic oligonucleotide
  Antisense strand to SEQ ID NO: 523893
aacacgaacgcauuguuua

SEQ ID NO: 523895 - RNA, 19 nt, Artificial Sequence
  Description of Artificial Sequence: Synthetic oligonucleotide
  Sense strand starting at position 2873 of SEQ ID NO: 317935
caaugcguucguguuguga

SEQ ID NO: 523896 - RNA, 19 nt, Artificial Sequence
  Description of Artificial Sequence: Synthetic oligonucleotide
  Antisense strand to SEQ ID NO: 523895
ucacaacacgaacgcauug

SEQ ID NO: 523897 - RNA, 19 nt, Artificial Sequence
  Description of Artificial Sequence: Synthetic oligonucleotide
  Sense strand starting at position 2882 of SEQ ID NO: 317935
cguguugugaucucuuugu

SEQ ID NO: 523898 - RNA, 19 nt, Artificial Sequence
  Description of Artificial Sequence: Synthetic oligonucleotide
  Antisense strand to SEQ ID NO: 523897
acaaagagaucacaacacg

SEQ ID NO: 523899 - RNA, 19 nt, Artificial Sequence
  Description of Artificial Sequence: Synthetic oligonucleotide
  Sense strand starting at position 2886 of SEQ ID NO: 317935
uugugaucucuuuguaaua

SEQ ID NO: 523900 - RNA, 19 nt, Artificial Sequence
  Description of Artificial Sequence: Synthetic oligonucleotide
  Antisense strand to SEQ ID NO: 523899
uauuacaaagagaucacaa

SEQ ID NO: 523901 - RNA, 19 nt, Artificial Sequence
  Description of Artificial Sequence: Synthetic oligonucleotide
  Sense strand starting at position 2887 of SEQ ID NO: 317935
ugugaucucuuuguaauac

SEQ ID NO: 523902 - RNA, 19 nt, Artificial Sequence
  Description of Artificial Sequence: Synthetic oligonucleotide
  Antisense strand to SEQ ID NO: 523901
guauuacaaagagaucaca

SEQ ID NO: 523903 - RNA, 19 nt, Artificial Sequence
  Description of Artificial Sequence: Synthetic oligonucleotide
  Sense strand starting at position 2888 of SEQ ID NO: 317935
gugaucucuuuguaauaca

SEQ ID NO: 523904 - RNA, 19 nt, Artificial Sequence
  Description of Artificial Sequence: Synthetic oligonucleotide
  Antisense strand to SEQ ID NO: 523903
uguauuacaaagagaucac

SEQ ID NO: 523905 - RNA, 19 nt, Artificial Sequence
  Description of Artificial Sequence: Synthetic oligonucleotide
  Sense strand starting at position 2934 of SEQ ID NO: 317935
auuggaaaguagcaguaau

SEQ ID NO: 523906 - RNA, 19 nt, Artificial Sequence
  Description of Artificial Sequence: Synthetic oligonucleotide
  Antisense strand to SEQ ID NO: 523905
auuacugcuacuuuccaau

SEQ ID NO: 523907 - RNA, 19 nt, Artificial Sequence
  Description of Artificial Sequence: Synthetic oligonucleotide
  Sense strand starting at position 2942 of SEQ ID NO: 317935
guagcaguaaugcaaguaa

SEQ ID NO: 523908 - RNA, 19 nt, Artificial Sequence
  Description of Artificial Sequence: Synthetic oligonucleotide
  Antisense strand to SEQ ID NO: 523907
uuacuugcauuacugcuac

SEQ ID NO: 523909 - RNA, 19 nt, Artificial Sequence
  Description of Artificial Sequence: Synthetic oligonucleotide
  Sense strand starting at position 2978 of SEQ ID NO: 317935
agcagcaaguccucugaaa

SEQ ID NO: 523910 - RNA, 19 nt, Artificial Sequence
  Description of Artificial Sequence: Synthetic oligonucleotide
  Antisense strand to SEQ ID NO: 523909
uuucagaggacuugcugcu

SEQ ID NO: 523911 - RNA, 19 nt, Artificial Sequence
  Description of Artificial Sequence: Synthetic oligonucleotide
  Sense strand starting at position 2980 of SEQ ID NO: 317935
cagcaaguccucugaaaga

SEQ ID NO: 523912 - RNA, 19 nt, Artificial Sequence
  Description of Artificial Sequence: Synthetic oligonucleotide
  Antisense strand to SEQ ID NO: 523911
ucuuucagaggacuugcug

SEQ ID NO: 523913 - RNA, 19 nt, Artificial Sequence
  Description of Artificial Sequence: Synthetic oligonucleotide
  Sense strand starting at position 3045 of SEQ ID NO: 317935
gguaaauagcugugaucag

SEQ ID NO: 523914 - RNA, 19 nt, Artificial Sequence
  Description of Artificial Sequence: Synthetic oligonucleotide
  Antisense strand to SEQ ID NO: 523913
cugaucacagcuauuuacc

SEQ ID NO: 523915 - RNA, 19 nt, Artificial Sequence
  Description of Artificial Sequence: Synthetic oligonucleotide
  Sense strand starting at position 3054 of SEQ ID NO: 317935
cugugaucagcuggaaagu

SEQ ID NO: 523916 - RNA, 19 nt, Artificial Sequence
  Description of Artificial Sequence: Synthetic oligonucleotide
  Antisense strand to SEQ ID NO: 523915
acuuuccagcugaucacag

SEQ ID NO: 523917 - RNA, 19 nt, Artificial Sequence
  Description of Artificial Sequence: Synthetic oligonucleotide
  Sense strand starting at position 3055 of SEQ ID NO: 317935
ugugaucagcuggaaagua

SEQ ID NO: 523918 - RNA, 19 nt, Artificial Sequence
  Description of Artificial Sequence: Synthetic oligonucleotide
  Antisense strand to SEQ ID NO: 523917
uacuuuccagcugaucaca

SEQ ID NO: 523919 - RNA, 19 nt, Artificial Sequence
  Description of Artificial Sequence: Synthetic oligonucleotide
  Sense strand starting at position 3501 of SEQ ID NO: 317935
agaggcgucuugcuauguu

SEQ ID NO: 523920 - RNA, 19 nt, Artificial Sequence
  Description of Artificial Sequence: Synthetic oligonucleotide
  Antisense strand to SEQ ID NO: 523919
aacauagcaagacgccucu

SEQ ID NO: 523921 - RNA, 19 nt, Artificial Sequence
  Description of Artificial Sequence: Synthetic oligonucleotide
  Sense strand starting at position 140 of SEQ ID NO: 317936
ucucaaagugcuggguuaa

SEQ ID NO: 523922 - RNA, 19 nt, Artificial Sequence
  Description of Artificial Sequence: Synthetic oligonucleotide
  Antisense strand to SEQ ID NO: 523921
uuaacccagcacuuugaga

SEQ ID NO: 523923 - RNA, 19 nt, Artificial Sequence
  Description of Artificial Sequence: Synthetic oligonucleotide
  Sense strand starting at position 259 of SEQ ID NO: 317936
gagcaauuccaguaccaga

SEQ ID NO: 523924 - RNA, 19 nt, Artificial Sequence
  Description of Artificial Sequence: Synthetic oligonucleotide
  Antisense strand to SEQ ID NO: 523923
ucugguacuggaauugcuc

SEQ ID NO: 523925 - RNA, 19 nt, Artificial Sequence
  Description of Artificial Sequence: Synthetic oligonucleotide
  Sense strand starting at position 335 of SEQ ID NO: 317936
cgugcucugcaggacagau

SEQ ID NO: 523926 - RNA, 19 nt, Artificial Sequence
  Description of Artificial Sequence: Synthetic oligonucleotide
  Antisense strand to SEQ ID NO: 523925
aucuguccugcagagcacg

SEQ ID NO: 523927 - RNA, 19 nt, Artificial Sequence
  Description of Artificial Sequence: Synthetic oligonucleotide
  Sense strand starting at position 345 of SEQ ID NO: 317936
aggacagauuuccagaagu

SEQ ID NO: 523928 - RNA, 19 nt, Artificial Sequence
  Description of Artificial Sequence: Synthetic oligonucleotide
  Antisense strand to SEQ ID NO: 523927
acuucuggaaaucuguccu

SEQ ID NO: 523929 - RNA, 19 nt, Artificial Sequence
  Description of Artificial Sequence: Synthetic oligonucleotide
  Sense strand starting at position 413 of SEQ ID NO: 317936
acgauugugcacgugcaua

SEQ ID NO: 523930 - RNA, 19 nt, Artificial Sequence
  Description of Artificial Sequence: Synthetic oligonucleotide
  Antisense strand to SEQ ID NO: 523929
uaugcacgugcacaaucgu

SEQ ID NO: 523931 - RNA, 19 nt, Artificial Sequence
  Description of Artificial Sequence: Synthetic oligonucleotide
  Sense strand starting at position 442 of SEQ ID NO: 317936
gggugugcugauugacaca

SEQ ID NO: 523932 - RNA, 19 nt, Artificial Sequence
  Description of Artificial Sequence: Synthetic oligonucleotide
  Antisense strand to SEQ ID NO: 523931
ugugucaaucagcacaccc

SEQ ID NO: 523933 - RNA, 19 nt, Artificial Sequence
  Description of Artificial Sequence: Synthetic oligonucleotide
  Sense strand starting at position 488 of SEQ ID NO: 317936
gacagacugugacucaaau

SEQ ID NO: 523934 - RNA, 19 nt, Artificial Sequence
  Description of Artificial Sequence: Synthetic oligonucleotide
  Antisense strand to SEQ ID NO: 523933
auuugagucacagucuguc

SEQ ID NO: 523935 - RNA, 19 nt, Artificial Sequence
  Description of Artificial Sequence: Synthetic oligonucleotide
  Sense strand starting at position 495 of SEQ ID NO: 317936
ugugacucaaaucgaagaa

SEQ ID NO: 523936 - RNA, 19 nt, Artificial Sequence
  Description of Artificial Sequence: Synthetic oligonucleotide
  Antisense strand to SEQ ID NO: 523935
uucuucgauuugagucaca

SEQ ID NO: 523937 - RNA, 19 nt, Artificial Sequence
  Description of Artificial Sequence: Synthetic oligonucleotide
  Sense strand starting at position 543 of SEQ ID NO: 317936
agcacuuuaguggaugaua

SEQ ID NO: 523938 - RNA, 19 nt, Artificial Sequence
  Description of Artificial Sequence: Synthetic oligonucleotide
  Antisense strand to SEQ ID NO: 523937
uaucauccacuaaagugcu

SEQ ID NO: 523939 - RNA, 19 nt, Artificial Sequence
  Description of Artificial Sequence: Synthetic oligonucleotide
  Sense strand starting at position 545 of SEQ ID NO: 317936
cacuuuaguggaugauagu

SEQ ID NO: 523940 - RNA, 19 nt, Artificial Sequence
  Description of Artificial Sequence: Synthetic oligonucleotide
  Antisense strand to SEQ ID NO: 523939
acuaucauccacuaaagug

SEQ ID NO: 523941 - RNA, 19 nt, Artificial Sequence
  Description of Artificial Sequence: Synthetic oligonucleotide
  Sense strand starting at position 1280 of SEQ ID NO: 317936
cuuugagaggcuuaccacu

SEQ ID NO: 523942 - RNA, 19 nt, Artificial Sequence
  Description of Artificial Sequence: Synthetic oligonucleotide
  Antisense strand to SEQ ID NO: 523941
agugguaagccucucaaag

SEQ ID NO: 523943 - RNA, 19 nt, Artificial Sequence
  Description of Artificial Sequence: Synthetic oligonucleotide
  Sense strand starting at position 1352 of SEQ ID NO: 317936
gcaguaacucucuacuggu

SEQ ID NO: 523944 - RNA, 19 nt, Artificial Sequence
  Description of Artificial Sequence: Synthetic oligonucleotide
  Antisense strand to SEQ ID NO: 523943
accaguagagaguuacugc

SEQ ID NO: 523945 - RNA, 19 nt, Artificial Sequence
  Description of Artificial Sequence: Synthetic oligonucleotide
  Sense strand starting at position 1492 of SEQ ID NO: 317936
ucucaugaucguggaugga

SEQ ID NO: 523946 - RNA, 19 nt, Artificial Sequence
  Description of Artificial Sequence: Synthetic oligonucleotide
  Antisense strand to SEQ ID NO: 523945
uccauccacgaucaugaga

SEQ ID NO: 523947 - RNA, 19 nt, Artificial Sequence
  Description of Artificial Sequence: Synthetic oligonucleotide
  Sense strand starting at position 1495 of SEQ ID NO: 317936
caugaucguggauggagau

SEQ ID NO: 523948 - RNA, 19 nt, Artificial Sequence
  Description of Artificial Sequence: Synthetic oligonucleotide
  Antisense strand to SEQ ID NO: 523947
aucuccauccacgaucaug

SEQ ID NO: 523949 - RNA, 19 nt, Artificial Sequence
  Description of Artificial Sequence: Synthetic oligonucleotide
  Sense strand starting at position 1702 of SEQ ID NO: 317936
cacgguuguguacaucaau

SEQ ID NO: 523950 - RNA, 19 nt, Artificial Sequence
  Description of Artificial Sequence: Synthetic oligonucleotide
  Antisense strand to SEQ ID NO: 523949
auugauguacacaaccgug

SEQ ID NO: 523951 - RNA, 19 nt, Artificial Sequence
  Description of Artificial Sequence: Synthetic oligonucleotide
  Sense strand starting at position 1705 of SEQ ID NO: 317936
gguuguguacaucaaucac

SEQ ID NO: 523952 - RNA, 19 nt, Artificial Sequence
  Description of Artificial Sequence: Synthetic oligonucleotide
  Antisense strand to SEQ ID NO: 523951
gugauugauguacacaacc

SEQ ID NO: 523953 - RNA, 19 nt, Artificial Sequence
  Description of Artificial Sequence: Synthetic oligonucleotide
  Sense strand starting at position 1759 of SEQ ID NO: 317936
cgaacauuggugcauacuu

SEQ ID NO: 523954 - RNA, 19 nt, Artificial Sequence
  Description of Artificial Sequence: Synthetic oligonucleotide
  Antisense strand to SEQ ID NO: 523953
aaguaugcaccaauguucg

SEQ ID NO: 523955 - RNA, 19 nt, Artificial Sequence
  Description of Artificial Sequence: Synthetic oligonucleotide
  Sense strand starting at position 1902 of SEQ ID NO: 317936
guucucuucguuuaagaca

SEQ ID NO: 523956 - RNA, 19 nt, Artificial Sequence
  Description of Artificial Sequence: Synthetic oligonucleotide
  Antisense strand to SEQ ID NO: 523955
ugucuuaaacgaagagaac

SEQ ID NO: 523957 - RNA, 19 nt, Artificial Sequence
  Description of Artificial Sequence: Synthetic oligonucleotide
  Sense strand starting at position 1988 of SEQ ID NO: 317936
aggacuucugccuaaaucu

SEQ ID NO: 523958 - RNA, 19 nt, Artificial Sequence
  Description of Artificial Sequence: Synthetic oligonucleotide
  Antisense strand to SEQ ID NO: 523957
agauuuaggcagaaguccu

SEQ ID NO: 523959 - RNA, 19 nt, Artificial Sequence
  Description of Artificial Sequence: Synthetic oligonucleotide
  Sense strand starting at position 2245 of SEQ ID NO: 317936
uauaaauaucuggguuguu

SEQ ID NO: 523960 - RNA, 19 nt, Artificial Sequence
  Description of Artificial Sequence: Synthetic oligonucleotide
  Antisense strand to SEQ ID NO: 523959
aacaacccagauauuuaua

SEQ ID NO: 523961 - RNA, 19 nt, Artificial Sequence
  Description of Artificial Sequence: Synthetic oligonucleotide
  Sense strand starting at position 2246 of SEQ ID NO: 317936
auaaauaucuggguuguuu

SEQ ID NO: 523962 - RNA, 19 nt, Artificial Sequence
  Description of Artificial Sequence: Synthetic oligonucleotide
  Antisense strand to SEQ ID NO: 523961
aaacaacccagauauuuau

SEQ ID NO: 523963 - RNA, 19 nt, Artificial Sequence
  Description of Artificial Sequence: Synthetic oligonucleotide
  Sense strand starting at position 2297 of SEQ ID NO: 317936
aggaucaucuucuugcaaa

SEQ ID NO: 523964 - RNA, 19 nt, Artificial Sequence
  Description of Artificial Sequence: Synthetic oligonucleotide
  Antisense strand to SEQ ID NO: 523963
uuugcaagaagaugauccu

SEQ ID NO: 523965 - RNA, 19 nt, Artificial Sequence
  Description of Artificial Sequence: Synthetic oligonucleotide
  Sense strand starting at position 2364 of SEQ ID NO: 317936
guguauggugugcuugcua

SEQ ID NO: 523966 - RNA, 19 nt, Artificial Sequence
  Description of Artificial Sequence: Synthetic oligonucleotide
  Antisense strand to SEQ ID NO: 523965
uagcaagcacaccauacac

SEQ ID NO: 523967 - RNA, 19 nt, Artificial Sequence
  Description of Artificial Sequence: Synthetic oligonucleotide
  Sense strand starting at position 2465 of SEQ ID NO: 317936
uguugaaugaauggucuga

SEQ ID NO: 523968 - RNA, 19 nt, Artificial Sequence
  Description of Artificial Sequence: Synthetic oligonucleotide
  Antisense strand to SEQ ID NO: 523967
ucagaccauucauucaaca

SEQ ID NO: 523969 - RNA, 19 nt, Artificial Sequence
  Description of Artificial Sequence: Synthetic oligonucleotide
  Sense strand starting at position 2933 of SEQ ID NO: 317936
aaggcucaggauugucuua

SEQ ID NO: 523970 - RNA, 19 nt, Artificial Sequence
  Description of Artificial Sequence: Synthetic oligonucleotide
  Antisense strand to SEQ ID NO: 523969
uaagacaauccugagccuu

SEQ ID NO: 523971 - RNA, 19 nt, Artificial Sequence
  Description of Artificial Sequence: Synthetic oligonucleotide
  Sense strand starting at position 2935 of SEQ ID NO: 317936
ggcucaggauugucuuacu

SEQ ID NO: 523972 - RNA, 19 nt, Artificial Sequence
  Description of Artificial Sequence: Synthetic oligonucleotide
  Antisense strand to SEQ ID NO: 523971
aguaagacaauccugagcc

SEQ ID NO: 523973 - RNA, 19 nt, Artificial Sequence
  Description of Artificial Sequence: Synthetic oligonucleotide
  Sense strand starting at position 2963 of SEQ ID NO: 317936
aguccaaagcuggauucua

SEQ ID NO: 523974 - RNA, 19 nt, Artificial Sequence
  Description of Artificial Sequence: Synthetic oligonucleotide
  Antisense strand to SEQ ID NO: 523973
uagaauccagcuuuggacu

SEQ ID NO: 523975 - RNA, 19 nt, Artificial Sequence
  Description of Artificial Sequence: Synthetic oligonucleotide
  Sense strand starting at position 2971 of SEQ ID NO: 317936
gcuggauucuaggucagag

SEQ ID NO: 523976 - RNA, 19 nt, Artificial Sequence
  Description of Artificial Sequence: Synthetic oligonucleotide
  Antisense strand to SEQ ID NO: 523975
cucugaccuagaauccagc

SEQ ID NO: 523977 - RNA, 19 nt, Artificial Sequence
  Description of Artificial Sequence: Synthetic oligonucleotide
  Sense strand starting at position 3008 of SEQ ID NO: 317936
cugcauggcucacugauaa

SEQ ID NO: 523978 - RNA, 19 nt, Artificial Sequence
  Description of Artificial Sequence: Synthetic oligonucleotide
  Antisense strand to SEQ ID NO: 523977
uuaucagugagccaugcag

SEQ ID NO: 523979 - RNA, 19 nt, Artificial Sequence
  Description of Artificial Sequence: Synthetic oligonucleotide
  Sense strand starting at position 3050 of SEQ ID NO: 317936
gucauugguaguuagugau

SEQ ID NO: 523980 - RNA, 19 nt, Artificial Sequence
  Description of Artificial Sequence: Synthetic oligonucleotide
  Antisense strand to SEQ ID NO: 523979
aucacuaacuaccaaugac

SEQ ID NO: 523981 - RNA, 19 nt, Artificial Sequence
  Description of Artificial Sequence: Synthetic oligonucleotide
  Sense strand starting at position 3106 of SEQ ID NO: 317936
gaggucuugaaucaccgua

SEQ ID NO: 523982 - RNA, 19 nt, Artificial Sequence
  Description of Artificial Sequence: Synthetic oligonucleotide
  Antisense strand to SEQ ID NO: 523981
uacggugauucaagaccuc

SEQ ID NO: 523983 - RNA, 19 nt, Artificial Sequence
  Description of Artificial Sequence: Synthetic oligonucleotide
  Sense strand starting at position 3111 of SEQ ID NO: 317936
cuugaaucaccguaggauu

SEQ ID NO: 523984 - RNA, 19 nt, Artificial Sequence
  Description of Artificial Sequence: Synthetic oligonucleotide
  Antisense strand to SEQ ID NO: 523983
aauccuacggugauucaag

SEQ ID NO: 523985 - RNA, 19 nt, Artificial Sequence
  Description of Artificial Sequence: Synthetic oligonucleotide
  Sense strand starting at position 3159 of SEQ ID NO: 317936
cuugaugccugcuugauaa

SEQ ID NO: 523986 - RNA, 19 nt, Artificial Sequence
  Description of Artificial Sequence: Synthetic oligonucleotide
  Antisense strand to SEQ ID NO: 523985
uuaucaagcaggcaucaag

SEQ ID NO: 523987 - RNA, 19 nt, Artificial Sequence
  Description of Artificial Sequence: Synthetic oligonucleotide
  Sense strand starting at position 3171 of SEQ ID NO: 317936
uugauaaaccacugacguu

SEQ ID NO: 523988 - RNA, 19 nt, Artificial Sequence
  Description of Artificial Sequence: Synthetic oligonucleotide
  Antisense strand to SEQ ID NO: 523987
aacgucagugguuuaucaa

SEQ ID NO: 523989 - RNA, 19 nt, Artificial Sequence
  Description of Artificial Sequence: Synthetic oligonucleotide
  Sense strand starting at position 3226 of SEQ ID NO: 317936
aaagacaucuuucuggagu

SEQ ID NO: 523990 - RNA, 19 nt, Artificial Sequence
  Description of Artificial Sequence: Synthetic oligonucleotide
  Antisense strand to SEQ ID NO: 523989
acuccagaaagaugucuuu

SEQ ID NO: 523991 - RNA, 19 nt, Artificial Sequence
  Description of Artificial Sequence: Synthetic oligonucleotide
  Sense strand starting at position 3265 of SEQ ID NO: 317936
cuuugcucaaggugaagaa

SEQ ID NO: 523992 - RNA, 19 nt, Artificial Sequence
  Description of Artificial Sequence: Synthetic oligonucleotide
  Antisense strand to SEQ ID NO: 523991
uucuucaccuugagcaaag

SEQ ID NO: 523993 - RNA, 19 nt, Artificial Sequence
  Description of Artificial Sequence: Synthetic oligonucleotide
  Sense strand starting at position 3266 of SEQ ID NO: 317936
uuugcucaaggugaagaau

SEQ ID NO: 523994 - RNA, 19 nt, Artificial Sequence
  Description of Artificial Sequence: Synthetic oligonucleotide
  Antisense strand to SEQ ID NO: 523993
auucuucaccuugagcaaa

SEQ ID NO: 523995 - RNA, 19 nt, Artificial Sequence
  Description of Artificial Sequence: Synthetic oligonucleotide
  Sense strand starting at position 3347 of SEQ ID NO: 317936
caaucauuaccauguggag

SEQ ID NO: 523996 - RNA, 19 nt, Artificial Sequence
  Description of Artificial Sequence: Synthetic oligonucleotide
  Antisense strand to SEQ ID NO: 523995
cuccacaugguaaugauug

SEQ ID NO: 523997 - RNA, 19 nt, Artificial Sequence
  Description of Artificial Sequence: Synthetic oligonucleotide
  Sense strand starting at position 3507 of SEQ ID NO: 317936
aaaguuuaaugagcaagua

SEQ ID NO: 523998 - RNA, 19 nt, Artificial Sequence
  Description of Artificial Sequence: Synthetic oligonucleotide
  Antisense strand to SEQ ID NO: 523997
uacuugcucauuaaacuuu

SEQ ID NO: 523999 - RNA, 19 nt, Artificial Sequence
  Description of Artificial Sequence: Synthetic oligonucleotide
  Sense strand starting at position 3508 of SEQ ID NO: 317936
aaguuuaaugagcaaguau

SEQ ID NO: 524000 - RNA, 19 nt, Artificial Sequence
  Description of Artificial Sequence: Synthetic oligonucleotide
  Antisense strand to SEQ ID NO: 523999
auacuugcucauuaaacuu

SEQ ID NO: 524001 - RNA, 19 nt, Artificial Sequence
  Description of Artificial Sequence: Synthetic oligonucleotide
  Sense strand starting at position 1 of SEQ ID NO: 317937
uguaaauuacaagguguua

SEQ ID NO: 524002 - RNA, 19 nt, Artificial Sequence
  Description of Artificial Sequence: Synthetic oligonucleotide
  Antisense strand to SEQ ID NO: 524001
uaacaccuuguaauuuaca

SEQ ID NO: 524003 - RNA, 19 nt, Artificial Sequence
  Description of Artificial Sequence: Synthetic oligonucleotide
  Sense strand starting at position 156 of SEQ ID NO: 317937
gcaccuugaguuuaucaug

SEQ ID NO: 524004 - RNA, 19 nt, Artificial Sequence
  Description of Artificial Sequence: Synthetic oligonucleotide
  Antisense strand to SEQ ID NO: 524003
caugauaaacucaaggugc

SEQ ID NO: 524005 - RNA, 19 nt, Artificial Sequence
  Description of Artificial Sequence: Synthetic oligonucleotide
  Sense strand starting at position 162 of SEQ ID NO: 317937
ugaguuuaucaugguuccu

SEQ ID NO: 524006 - RNA, 19 nt, Artificial Sequence
  Description of Artificial Sequence: Synthetic oligonucleotide
  Antisense strand to SEQ ID NO: 524005
aggaaccaugauaaacuca

SEQ ID NO: 524007 - RNA, 19 nt, Artificial Sequence
  Description of Artificial Sequence: Synthetic oligonucleotide
  Sense strand starting at position 402 of SEQ ID NO: 317937
ugagcaaaguauucuacuu

SEQ ID NO: 524008 - RNA, 19 nt, Artificial Sequence
  Description of Artificial Sequence: Synthetic oligonucleotide
  Antisense strand to SEQ ID NO: 524007
aaguagaauacuuugcuca

SEQ ID NO: 524009 - RNA, 19 nt, Artificial Sequence
  Description of Artificial Sequence: Synthetic oligonucleotide
  Sense strand starting at position 548 of SEQ ID NO: 317937
guaucuagguaaccagaau

SEQ ID NO: 524010 - RNA, 19 nt, Artificial Sequence
  Description of Artificial Sequence: Synthetic oligonucleotide
  Antisense strand to SEQ ID NO: 524009
auucugguuaccuagauac

SEQ ID NO: 524011 - RNA, 19 nt, Artificial Sequence
  Description of Artificial Sequence: Synthetic oligonucleotide
  Sense strand starting at position 631 of SEQ ID NO: 317937
agggcaguuucuguacaua

SEQ ID NO: 524012 - RNA, 19 nt, Artificial Sequence
  Description of Artificial Sequence: Synthetic oligonucleotide
  Antisense strand to SEQ ID NO: 524011
uauguacagaaacugcccu

SEQ ID NO: 524013 - RNA, 19 nt, Artificial Sequence
  Description of Artificial Sequence: Synthetic oligonucleotide
  Sense strand starting at position 634 of SEQ ID NO: 317937
gcaguuucuguacauauag

SEQ ID NO: 524014 - RNA, 19 nt, Artificial Sequence
  Description of Artificial Sequence: Synthetic oligonucleotide
  Antisense strand to SEQ ID NO: 524013
cuauauguacagaaacugc

SEQ ID NO: 524015 - RNA, 19 nt, Artificial Sequence
  Description of Artificial Sequence: Synthetic oligonucleotide
  Sense strand starting at position 645 of SEQ ID NO: 317937
acauauagcuuggcuuaaa

SEQ ID NO: 524016 - RNA, 19 nt, Artificial Sequence
  Description of Artificial Sequence: Synthetic oligonucleotide
  Antisense strand to SEQ ID NO: 524015
uuuaagccaagcuauaugu

SEQ ID NO: 524017 - RNA, 19 nt, Artificial Sequence
  Description of Artificial Sequence: Synthetic oligonucleotide
  Sense strand starting at position 735 of SEQ ID NO: 317937
aucuauaguuagcuagaag

SEQ ID NO: 524018 - RNA, 19 nt, Artificial Sequence
  Description of Artificial Sequence: Synthetic oligonucleotide
  Antisense strand to SEQ ID NO: 524017
cuucuagcuaacuauagau

SEQ ID NO: 524019 - RNA, 19 nt, Artificial Sequence
  Description of Artificial Sequence: Synthetic oligonucleotide
  Sense strand starting at position 1803 of SEQ ID NO: 317937
uuuagagaccucgaauagu

SEQ ID NO: 524020 - RNA, 19 nt, Artificial Sequence
  Description of Artificial Sequence: Synthetic oligonucleotide
  Antisense strand to SEQ ID NO: 524019
acuauucgaggucucuaaa

SEQ ID NO: 524021 - RNA, 19 nt, Artificial Sequence
  Description of Artificial Sequence: Synthetic oligonucleotide
  Sense strand starting at position 1809 of SEQ ID NO: 317937
gaccucgaauaguccauaa

SEQ ID NO: 524022 - RNA, 19 nt, Artificial Sequence
  Description of Artificial Sequence: Synthetic oligonucleotide
  Antisense strand to SEQ ID NO: 524021
uuauggacuauucgagguc

SEQ ID NO: 524023 - RNA, 19 nt, Artificial Sequence
  Description of Artificial Sequence: Synthetic oligonucleotide
  Sense strand starting at position 1811 of SEQ ID NO: 317937
ccucgaauaguccauaagu

SEQ ID NO: 524024 - RNA, 19 nt, Artificial Sequence
  Description of Artificial Sequence: Synthetic oligonucleotide
  Antisense strand to SEQ ID NO: 524023
acuuauggacuauucgagg

SEQ ID NO: 524025 - RNA, 19 nt, Artificial Sequence
  Description of Artificial Sequence: Synthetic oligonucleotide
  Sense strand starting at position 1813 of SEQ ID NO: 317937
ucgaauaguccauaaguac

SEQ ID NO: 524026 - RNA, 19 nt, Artificial Sequence
  Description of Artificial Sequence: Synthetic oligonucleotide
  Antisense strand to SEQ ID NO: 524025
guacuuauggacuauucga

SEQ ID NO: 524027 - RNA, 19 nt, Artificial Sequence
  Description of Artificial Sequence: Synthetic oligonucleotide
  Sense strand starting at position 2006 of SEQ ID NO: 317937
uagcauugugacugcagga

SEQ ID NO: 524028 - RNA, 19 nt, Artificial Sequence
  Description of Artificial Sequence: Synthetic oligonucleotide
  Antisense strand to SEQ ID NO: 524027
uccugcagucacaaugcua

SEQ ID NO: 524029 - RNA, 19 nt, Artificial Sequence
  Description of Artificial Sequence: Synthetic oligonucleotide
  Sense strand starting at position 2069 of SEQ ID NO: 317937
ggaaaucccugggauuuag

SEQ ID NO: 524030 - RNA, 19 nt, Artificial Sequence
  Description of Artificial Sequence: Synthetic oligonucleotide
  Antisense strand to SEQ ID NO: 524029
cuaaaucccagggauuucc

SEQ ID NO: 524031 - RNA, 19 nt, Artificial Sequence
  Description of Artificial Sequence: Synthetic oligonucleotide
  Sense strand starting at position 2105 of SEQ ID NO: 317937
uguagugcucaucaucaua

SEQ ID NO: 524032 - RNA, 19 nt, Artificial Sequence
  Description of Artificial Sequence: Synthetic oligonucleotide
  Antisense strand to SEQ ID NO: 524031
uaugaugaugagcacuaca

SEQ ID NO: 524033 - RNA, 19 nt, Artificial Sequence
  Description of Artificial Sequence: Synthetic oligonucleotide
  Sense strand starting at position 2160 of SEQ ID NO: 317937
gugggaaguggccauuguu

SEQ ID NO: 524034 - RNA, 19 nt, Artificial Sequence
  Description of Artificial Sequence: Synthetic oligonucleotide
  Antisense strand to SEQ ID NO: 524033
aacaauggccacuucccac

SEQ ID NO: 524035 - RNA, 19 nt, Artificial Sequence
  Description of Artificial Sequence: Synthetic oligonucleotide
  Sense strand starting at position 2163 of SEQ ID NO: 317937
ggaaguggccauuguuaua

SEQ ID NO: 524036 - RNA, 19 nt, Artificial Sequence
  Description of Artificial Sequence: Synthetic oligonucleotide
  Antisense strand to SEQ ID NO: 524035
uauaacaauggccacuucc

SEQ ID NO: 524037 - RNA, 19 nt, Artificial Sequence
  Description of Artificial Sequence: Synthetic oligonucleotide
  Sense strand starting at position 2228 of SEQ ID NO: 317937
agugacgaguuaucaucaa

SEQ ID NO: 524038 - RNA, 19 nt, Artificial Sequence
  Description of Artificial Sequence: Synthetic oligonucleotide
  Antisense strand to SEQ ID NO: 524037
uugaugauaacucgucacu

SEQ ID NO: 524039 - RNA, 19 nt, Artificial Sequence
  Description of Artificial Sequence: Synthetic oligonucleotide
  Sense strand starting at position 2232 of SEQ ID NO: 317937
acgaguuaucaucaagcua

SEQ ID NO: 524040 - RNA, 19 nt, Artificial Sequence
  Description of Artificial Sequence: Synthetic oligonucleotide
  Antisense strand to SEQ ID NO: 524039
uagcuugaugauaacucgu

SEQ ID NO: 524041 - RNA, 19 nt, Artificial Sequence
  Description of Artificial Sequence: Synthetic oligonucleotide
  Sense strand starting at position 2311 of SEQ ID NO: 317937
gaagcuaacucuucuaggu

SEQ ID NO: 524042 - RNA, 19 nt, Artificial Sequence
  Description of Artificial Sequence: Synthetic oligonucleotide
  Antisense strand to SEQ ID NO: 524041
accuagaagaguuagcuuc

SEQ ID NO: 524043 - RNA, 19 nt, Artificial Sequence
  Description of Artificial Sequence: Synthetic oligonucleotide
  Sense strand starting at position 2315 of SEQ ID NO: 317937
cuaacucuucuagguuaga

SEQ ID NO: 524044 - RNA, 19 nt, Artificial Sequence
  Description of Artificial Sequence: Synthetic oligonucleotide
  Antisense strand to SEQ ID NO: 524043
ucuaaccuagaagaguuag

SEQ ID NO: 524045 - RNA, 19 nt, Artificial Sequence
  Description of Artificial Sequence: Synthetic oligonucleotide
  Sense strand starting at position 2368 of SEQ ID NO: 317937
agugacaugggucagaguu

SEQ ID NO: 524046 - RNA, 19 nt, Artificial Sequence
  Description of Artificial Sequence: Synthetic oligonucleotide
  Antisense strand to SEQ ID NO: 524045
aacucugacccaugucacu

SEQ ID NO: 524047 - RNA, 19 nt, Artificial Sequence
  Description of Artificial Sequence: Synthetic oligonucleotide
  Sense strand starting at position 2504 of SEQ ID NO: 317937
auuugcauguuuguuagua

SEQ ID NO: 524048 - RNA, 19 nt, Artificial Sequence
  Description of Artificial Sequence: Synthetic oligonucleotide
  Antisense strand to SEQ ID NO: 524047
uacuaacaaacaugcaaau

SEQ ID NO: 524049 - RNA, 19 nt, Artificial Sequence
  Description of Artificial Sequence: Synthetic oligonucleotide
  Sense strand starting at position 2541 of SEQ ID NO: 317937
cagaaaugaugcuuuggcu

SEQ ID NO: 524050 - RNA, 19 nt, Artificial Sequence
  Description of Artificial Sequence: Synthetic oligonucleotide
  Antisense strand to SEQ ID NO: 524049
agccaaagcaucauuucug

SEQ ID NO: 524051 - RNA, 19 nt, Artificial Sequence
  Description of Artificial Sequence: Synthetic oligonucleotide
  Sense strand starting at position 2564 of SEQ ID NO: 317937
uguuguccaaauuauggua

SEQ ID NO: 524052 - RNA, 19 nt, Artificial Sequence
  Description of Artificial Sequence: Synthetic oligonucleotide
  Antisense strand to SEQ ID NO: 524051
uaccauaauuuggacaaca

SEQ ID NO: 524053 - RNA, 19 nt, Artificial Sequence
  Description of Artificial Sequence: Synthetic oligonucleotide
  Sense strand starting at position 2580 of SEQ ID NO: 317937
guaucagauuugccuuguu

SEQ ID NO: 524054 - RNA, 19 nt, Artificial Sequence
  Description of Artificial Sequence: Synthetic oligonucleotide
  Antisense strand to SEQ ID NO: 524053
aacaaggcaaaucugauac

SEQ ID NO: 524055 - RNA, 19 nt, Artificial Sequence
  Description of Artificial Sequence: Synthetic oligonucleotide
  Sense strand starting at position 2583 of SEQ ID NO: 317937
ucagauuugccuuguuuaa

SEQ ID NO: 524056 - RNA, 19 nt, Artificial Sequence
  Description of Artificial Sequence: Synthetic oligonucleotide
  Antisense strand to SEQ ID NO: 524055
uuaaacaaggcaaaucuga

SEQ ID NO: 524057 - RNA, 19 nt, Artificial Sequence
  Description of Artificial Sequence: Synthetic oligonucleotide
  Sense strand starting at position 2615 of SEQ ID NO: 317937
ucaggaugcugagugacaa

SEQ ID NO: 524058 - RNA, 19 nt, Artificial Sequence
  Description of Artificial Sequence: Synthetic oligonucleotide
  Antisense strand to SEQ ID NO: 524057
uugucacucagcauccuga

SEQ ID NO: 524059 - RNA, 19 nt, Artificial Sequence
  Description of Artificial Sequence: Synthetic oligonucleotide
  Sense strand starting at position 2616 of SEQ ID NO: 317937
caggaugcugagugacaaa

SEQ ID NO: 524060 - RNA, 19 nt, Artificial Sequence
  Description of Artificial Sequence: Synthetic oligonucleotide
  Antisense strand to SEQ ID NO: 524059
uuugucacucagcauccug

SEQ ID NO: 524061 - RNA, 19 nt, Artificial Sequence
  Description of Artificial Sequence: Synthetic oligonucleotide
  Sense strand starting at position 2881 of SEQ ID NO: 317937
agcuguuuaguuuggacaa

SEQ ID NO: 524062 - RNA, 19 nt, Artificial Sequence
  Description of Artificial Sequence: Synthetic oligonucleotide
  Antisense strand to SEQ ID NO: 524061
uuguccaaacuaaacagcu

SEQ ID NO: 524063 - RNA, 19 nt, Artificial Sequence
  Description of Artificial Sequence: Synthetic oligonucleotide
  Sense strand starting at position 3041 of SEQ ID NO: 317937
agauaacuauuauuagcga

SEQ ID NO: 524064 - RNA, 19 nt, Artificial Sequence
  Description of Artificial Sequence: Synthetic oligonucleotide
  Antisense strand to SEQ ID NO: 524063
ucgcuaauaauaguuaucu

SEQ ID NO: 524065 - RNA, 19 nt, Artificial Sequence
  Description of Artificial Sequence: Synthetic oligonucleotide
  Sense strand starting at position 3071 of SEQ ID NO: 317937
ggugccaauuauccaagaa

SEQ ID NO: 524066 - RNA, 19 nt, Artificial Sequence
  Description of Artificial Sequence: Synthetic oligonucleotide
  Antisense strand to SEQ ID NO: 524065
uucuuggauaauuggcacc

SEQ ID NO: 524067 - RNA, 19 nt, Artificial Sequence
  Description of Artificial Sequence: Synthetic oligonucleotide
  Sense strand starting at position 3099 of SEQ ID NO: 317937
agcagagucugugugagaa

SEQ ID NO: 524068 - RNA, 19 nt, Artificial Sequence
  Description of Artificial Sequence: Synthetic oligonucleotide
  Antisense strand to SEQ ID NO: 524067
uucucacacagacucugcu

SEQ ID NO: 524069 - RNA, 19 nt, Artificial Sequence
  Description of Artificial Sequence: Synthetic oligonucleotide
  Sense strand starting at position 3239 of SEQ ID NO: 317937
agguuuguucucuaaacau

SEQ ID NO: 524070 - RNA, 19 nt, Artificial Sequence
  Description of Artificial Sequence: Synthetic oligonucleotide
  Antisense strand to SEQ ID NO: 524069
auguuuagagaacaaaccu

SEQ ID NO: 524071 - RNA, 19 nt, Artificial Sequence
  Description of Artificial Sequence: Synthetic oligonucleotide
  Sense strand starting at position 3700 of SEQ ID NO: 317937
ggcuuuaagaagugauuag

SEQ ID NO: 524072 - RNA, 19 nt, Artificial Sequence
  Description of Artificial Sequence: Synthetic oligonucleotide
  Antisense strand to SEQ ID NO: 524071
cuaaucacuucuuaaagcc

SEQ ID NO: 524073 - RNA, 19 nt, Artificial Sequence
  Description of Artificial Sequence: Synthetic oligonucleotide
  Sense strand starting at position 3762 of SEQ ID NO: 317937
gugggaaugaguuaguuau

SEQ ID NO: 524074 - RNA, 19 nt, Artificial Sequence
  Description of Artificial Sequence: Synthetic oligonucleotide
  Antisense strand to SEQ ID NO: 524073
auaacuaacucauucccac

SEQ ID NO: 524075 - RNA, 19 nt, Artificial Sequence
  Description of Artificial Sequence: Synthetic oligonucleotide
  Sense strand starting at position 3768 of SEQ ID NO: 317937
augaguuaguuaucauagg

SEQ ID NO: 524076 - RNA, 19 nt, Artificial Sequence
  Description of Artificial Sequence: Synthetic oligonucleotide
  Antisense strand to SEQ ID NO: 524075
ccuaugauaacuaacucau

SEQ ID NO: 524077 - RNA, 19 nt, Artificial Sequence
  Description of Artificial Sequence: Synthetic oligonucleotide
  Sense strand starting at position 3803 of SEQ ID NO: 317937
aaaggaugaguuuggcuua

SEQ ID NO: 524078 - RNA, 19 nt, Artificial Sequence
  Description of Artificial Sequence: Synthetic oligonucleotide
  Antisense strand to SEQ ID NO: 524077
uaagccaaacucauccuuu

SEQ ID NO: 524079 - RNA, 19 nt, Artificial Sequence
  Description of Artificial Sequence: Synthetic oligonucleotide
  Sense strand starting at position 3808 of SEQ ID NO: 317937
augaguuuggcuuaguuua

SEQ ID NO: 524080 - RNA, 19 nt, Artificial Sequence
  Description of Artificial Sequence: Synthetic oligonucleotide
  Antisense strand to SEQ ID NO: 524079
uaaacuaagccaaacucau

SEQ ID NO: 524081 - RNA, 19 nt, Artificial Sequence
  Description of Artificial Sequence: Synthetic oligonucleotide
  Sense strand starting at position 54 of SEQ ID NO: 317938
guuagugaaaugugggaca

SEQ ID NO: 524082 - RNA, 19 nt, Artificial Sequence
  Description of Artificial Sequence: Synthetic oligonucleotide
  Antisense strand to SEQ ID NO: 524081
ugucccacauuucacuaac

SEQ ID NO: 524083 - RNA, 19 nt, Artificial Sequence
  Description of Artificial Sequence: Synthetic oligonucleotide
  Sense strand starting at position 106 of SEQ ID NO: 317938
agaggaaaugcuugacuuu

SEQ ID NO: 524084 - RNA, 19 nt, Artificial Sequence
  Description of Artificial Sequence: Synthetic oligonucleotide
  Antisense strand to SEQ ID NO: 524083
aaagucaagcauuuccucu

SEQ ID NO: 524085 - RNA, 19 nt, Artificial Sequence
  Description of Artificial Sequence: Synthetic oligonucleotide
  Sense strand starting at position 109 of SEQ ID NO: 317938
ggaaaugcuugacuuugau

SEQ ID NO: 524086 - RNA, 19 nt, Artificial Sequence
  Description of Artificial Sequence: Synthetic oligonucleotide
  Antisense strand to SEQ ID NO: 524085
aucaaagucaagcauuucc

SEQ ID NO: 524087 - RNA, 19 nt, Artificial Sequence
  Description of Artificial Sequence: Synthetic oligonucleotide
  Sense strand starting at position 115 of SEQ ID NO: 317938
gcuugacuuugaucaagaa

SEQ ID NO: 524088 - RNA, 19 nt, Artificial Sequence
  Description of Artificial Sequence: Synthetic oligonucleotide
  Antisense strand to SEQ ID NO: 524087
uucuugaucaaagucaagc

SEQ ID NO: 524089 - RNA, 19 nt, Artificial Sequence
  Description of Artificial Sequence: Synthetic oligonucleotide
  Sense strand starting at position 145 of SEQ ID NO: 317938
gugagcauuuggcuaauca

SEQ ID NO: 524090 - RNA, 19 nt, Artificial Sequence
  Description of Artificial Sequence: Synthetic oligonucleotide
  Antisense strand to SEQ ID NO: 524089
ugauuagccaaaugcucac

SEQ ID NO: 524091 - RNA, 19 nt, Artificial Sequence
  Description of Artificial Sequence: Synthetic oligonucleotide
  Sense strand starting at position 180 of SEQ ID NO: 317938
ggaaacuauugauagggaa

SEQ ID NO: 524092 - RNA, 19 nt, Artificial Sequence
  Description of Artificial Sequence: Synthetic oligonucleotide
  Antisense strand to SEQ ID NO: 524091
uucccuaucaauaguuucc

SEQ ID NO: 524093 - RNA, 19 nt, Artificial Sequence
  Description of Artificial Sequence: Synthetic oligonucleotide
  Sense strand starting at position 246 of SEQ ID NO: 317938
aguacaugccugcaagauu

SEQ ID NO: 524094 - RNA, 19 nt, Artificial Sequence
  Description of Artificial Sequence: Synthetic oligonucleotide
  Antisense strand to SEQ ID NO: 524093
aaucuugcaggcauguacu

SEQ ID NO: 524095 - RNA, 19 nt, Artificial Sequence
  Description of Artificial Sequence: Synthetic oligonucleotide
  Sense strand starting at position 317 of SEQ ID NO: 317938
gaaguugauuuauaaugag

SEQ ID NO: 524096 - RNA, 19 nt, Artificial Sequence
  Description of Artificial Sequence: Synthetic oligonucleotide
  Antisense strand to SEQ ID NO: 524095
cucauuauaaaucaacuuc

SEQ ID NO: 524097 - RNA, 19 nt, Artificial Sequence
  Description of Artificial Sequence: Synthetic oligonucleotide
  Sense strand starting at position 487 of SEQ ID NO: 317938
agaaucagagcuugcaaag

SEQ ID NO: 524098 - RNA, 19 nt, Artificial Sequence
  Description of Artificial Sequence: Synthetic oligonucleotide
  Antisense strand to SEQ ID NO: 524097
cuuugcaagcucugauucu

SEQ ID NO: 524099 - RNA, 19 nt, Artificial Sequence
  Description of Artificial Sequence: Synthetic oligonucleotide
  Sense strand starting at position 703 of SEQ ID NO: 317938
acuucuucugaugaaguca

SEQ ID NO: 524100 - RNA, 19 nt, Artificial Sequence
  Description of Artificial Sequence: Synthetic oligonucleotide
  Antisense strand to SEQ ID NO: 524099
ugacuucaucagaagaagu

SEQ ID NO: 524101 - RNA, 19 nt, Artificial Sequence
  Description of Artificial Sequence: Synthetic oligonucleotide
  Sense strand starting at position 932 of SEQ ID NO: 317938
ccuugacuaccuugugaac

SEQ ID NO: 524102 - RNA, 19 nt, Artificial Sequence
  Description of Artificial Sequence: Synthetic oligonucleotide
  Antisense strand to SEQ ID NO: 524101
guucacaagguagucaagg

SEQ ID NO: 524103 - RNA, 19 nt, Artificial Sequence
  Description of Artificial Sequence: Synthetic oligonucleotide
  Sense strand starting at position 938 of SEQ ID NO: 317938
cuaccuugugaacaugauu

SEQ ID NO: 524104 - RNA, 19 nt, Artificial Sequence
  Description of Artificial Sequence: Synthetic oligonucleotide
  Antisense strand to SEQ ID NO: 524103
aaucauguucacaagguag

SEQ ID NO: 524105 - RNA, 19 nt, Artificial Sequence
  Description of Artificial Sequence: Synthetic oligonucleotide
  Sense strand starting at position 947 of SEQ ID NO: 317938
gaacaugauuuagagguuu

SEQ ID NO: 524106 - RNA, 19 nt, Artificial Sequence
  Description of Artificial Sequence: Synthetic oligonucleotide
  Antisense strand to SEQ ID NO: 524105
aaaccucuaaaucauguuc

SEQ ID NO: 524107 - RNA, 19 nt, Artificial Sequence
  Description of Artificial Sequence: Synthetic oligonucleotide
  Sense strand starting at position 1012 of SEQ ID NO: 317938
cgauaaagguucuuccuca

SEQ ID NO: 524108 - RNA, 19 nt, Artificial Sequence
  Description of Artificial Sequence: Synthetic oligonucleotide
  Antisense strand to SEQ ID NO: 524107
ugaggaagaaccuuuaucg

SEQ ID NO: 524109 - RNA, 19 nt, Artificial Sequence
  Description of Artificial Sequence: Synthetic oligonucleotide
  Sense strand starting at position 1016 of SEQ ID NO: 317938
aaagguucuuccucaaggu

SEQ ID NO: 524110 - RNA, 19 nt, Artificial Sequence
  Description of Artificial Sequence: Synthetic oligonucleotide
  Antisense strand to SEQ ID NO: 524109
accuugaggaagaaccuuu

SEQ ID NO: 524111 - RNA, 19 nt, Artificial Sequence
  Description of Artificial Sequence: Synthetic oligonucleotide
  Sense strand starting at position 1023 of SEQ ID NO: 317938
cuuccucaaggugauuaau

SEQ ID NO: 524112 - RNA, 19 nt, Artificial Sequence
  Description of Artificial Sequence: Synthetic oligonucleotide
  Antisense strand to SEQ ID NO: 524111
auuaaucaccuugaggaag

SEQ ID NO: 524113 - RNA, 19 nt, Artificial Sequence
  Description of Artificial Sequence: Synthetic oligonucleotide
  Sense strand starting at position 1237 of SEQ ID NO: 317938
uuagaagaguggcugacau

SEQ ID NO: 524114 - RNA, 19 nt, Artificial Sequence
  Description of Artificial Sequence: Synthetic oligonucleotide
  Antisense strand to SEQ ID NO: 524113
augucagccacucuucuaa

SEQ ID NO: 524115 - RNA, 19 nt, Artificial Sequence
  Description of Artificial Sequence: Synthetic oligonucleotide
  Sense strand starting at position 1244 of SEQ ID NO: 317938
aguggcugacauugaacaa

SEQ ID NO: 524116 - RNA, 19 nt, Artificial Sequence
  Description of Artificial Sequence: Synthetic oligonucleotide
  Antisense strand to SEQ ID NO: 524115
uuguucaaugucagccacu

SEQ ID NO: 524117 - RNA, 19 nt, Artificial Sequence
  Description of Artificial Sequence: Synthetic oligonucleotide
  Sense strand starting at position 1245 of SEQ ID NO: 317938
guggcugacauugaacaau

SEQ ID NO: 524118 - RNA, 19 nt, Artificial Sequence
  Description of Artificial Sequence: Synthetic oligonucleotide
  Antisense strand to SEQ ID NO: 524117
auuguucaaugucagccac

SEQ ID NO: 524119 - RNA, 19 nt, Artificial Sequence
  Description of Artificial Sequence: Synthetic oligonucleotide
  Sense strand starting at position 1440 of SEQ ID NO: 317938
aaggguggcccuuaaaugu

SEQ ID NO: 524120 - RNA, 19 nt, Artificial Sequence
  Description of Artificial Sequence: Synthetic oligonucleotide
  Antisense strand to SEQ ID NO: 524119
acauuuaagggccacccuu

SEQ ID NO: 524121 - RNA, 19 nt, Artificial Sequence
  Description of Artificial Sequence: Synthetic oligonucleotide
  Sense strand starting at position 1448 of SEQ ID NO: 317938
cccuuaaauguugguugaa

SEQ ID NO: 524122 - RNA, 19 nt, Artificial Sequence
  Description of Artificial Sequence: Synthetic oligonucleotide
  Antisense strand to SEQ ID NO: 524121
uucaaccaacauuuaaggg

SEQ ID NO: 524123 - RNA, 19 nt, Artificial Sequence
  Description of Artificial Sequence: Synthetic oligonucleotide
  Sense strand starting at position 1449 of SEQ ID NO: 317938
ccuuaaauguugguugaag

SEQ ID NO: 524124 - RNA, 19 nt, Artificial Sequence
  Description of Artificial Sequence: Synthetic oligonucleotide
  Antisense strand to SEQ ID NO: 524123
cuucaaccaacauuuaagg

SEQ ID NO: 524125 - RNA, 19 nt, Artificial Sequence
  Description of Artificial Sequence: Synthetic oligonucleotide
  Sense strand starting at position 1451 of SEQ ID NO: 317938
uuaaauguugguugaagga

SEQ ID NO: 524126 - RNA, 19 nt, Artificial Sequence
  Description of Artificial Sequence: Synthetic oligonucleotide
  Antisense strand to SEQ ID NO: 524125
uccuucaaccaacauuuaa

SEQ ID NO: 524127 - RNA, 19 nt, Artificial Sequence
  Description of Artificial Sequence: Synthetic oligonucleotide
  Sense strand starting at position 1593 of SEQ ID NO: 317938
gggagaagguuaguguuga

SEQ ID NO: 524128 - RNA, 19 nt, Artificial Sequence
  Description of Artificial Sequence: Synthetic oligonucleotide
  Antisense strand to SEQ ID NO: 524127
ucaacacuaaccuucuccc

SEQ ID NO: 524129 - RNA, 19 nt, Artificial Sequence
  Description of Artificial Sequence: Synthetic oligonucleotide
  Sense strand starting at position 1616 of SEQ ID NO: 317938
aagggucuacuuugucaau

SEQ ID NO: 524130 - RNA, 19 nt, Artificial Sequence
  Description of Artificial Sequence: Synthetic oligonucleotide
  Antisense strand to SEQ ID NO: 524129
auugacaaaguagacccuu

SEQ ID NO: 524131 - RNA, 19 nt, Artificial Sequence
  Description of Artificial Sequence: Synthetic oligonucleotide
  Sense strand starting at position 1622 of SEQ ID NO: 317938
cuacuuugucaauggaaac

SEQ ID NO: 524132 - RNA, 19 nt, Artificial Sequence
  Description of Artificial Sequence: Synthetic oligonucleotide
  Antisense strand to SEQ ID NO: 524131
guuuccauugacaaaguag

SEQ ID NO: 524133 - RNA, 19 nt, Artificial Sequence
  Description of Artificial Sequence: Synthetic oligonucleotide
  Sense strand starting at position 2720 of SEQ ID NO: 317938
uugauugauccugggaagc

SEQ ID NO: 524134 - RNA, 19 nt, Artificial Sequence
  Description of Artificial Sequence: Synthetic oligonucleotide
  Antisense strand to SEQ ID NO: 524133
gcuucccaggaucaaucaa

SEQ ID NO: 524135 - RNA, 19 nt, Artificial Sequence
  Description of Artificial Sequence: Synthetic oligonucleotide
  Sense strand starting at position 2863 of SEQ ID NO: 317938
ucagauaacuuaucgagua

SEQ ID NO: 524136 - RNA, 19 nt, Artificial Sequence
  Description of Artificial Sequence: Synthetic oligonucleotide
  Antisense strand to SEQ ID NO: 524135
uacucgauaaguuaucuga

SEQ ID NO: 524137 - RNA, 19 nt, Artificial Sequence
  Description of Artificial Sequence: Synthetic oligonucleotide
  Sense strand starting at position 2868 of SEQ ID NO: 317938
uaacuuaucgaguaccagu

SEQ ID NO: 524138 - RNA, 19 nt, Artificial Sequence
  Description of Artificial Sequence: Synthetic oligonucleotide
  Antisense strand to SEQ ID NO: 524137
acugguacucgauaaguua

SEQ ID NO: 524139 - RNA, 19 nt, Artificial Sequence
  Description of Artificial Sequence: Synthetic oligonucleotide
  Sense strand starting at position 2993 of SEQ ID NO: 317938
ccguuagaugaguauggaa

SEQ ID NO: 524140 - RNA, 19 nt, Artificial Sequence
  Description of Artificial Sequence: Synthetic oligonucleotide
  Antisense strand to SEQ ID NO: 524139
uuccauacucaucuaacgg

SEQ ID NO: 524141 - RNA, 19 nt, Artificial Sequence
  Description of Artificial Sequence: Synthetic oligonucleotide
  Sense strand starting at position 3078 of SEQ ID NO: 317938
guuuaaguggauuggaaau

SEQ ID NO: 524142 - RNA, 19 nt, Artificial Sequence
  Description of Artificial Sequence: Synthetic oligonucleotide
  Antisense strand to SEQ ID NO: 524141
auuuccaauccacuuaaac

SEQ ID NO: 524143 - RNA, 19 nt, Artificial Sequence
  Description of Artificial Sequence: Synthetic oligonucleotide
  Sense strand starting at position 3103 of SEQ ID NO: 317938
ucguuauaugcacccguuu

SEQ ID NO: 524144 - RNA, 19 nt, Artificial Sequence
  Description of Artificial Sequence: Synthetic oligonucleotide
  Antisense strand to SEQ ID NO: 524143
aaacgggugcauauaacga

SEQ ID NO: 524145 - RNA, 19 nt, Artificial Sequence
  Description of Artificial Sequence: Synthetic oligonucleotide
  Sense strand starting at position 3121 of SEQ ID NO: 317938
uguauauaugcccauacac

SEQ ID NO: 524146 - RNA, 19 nt, Artificial Sequence
  Description of Artificial Sequence: Synthetic oligonucleotide
  Antisense strand to SEQ ID NO: 524145
guguaugggcauauauaca

SEQ ID NO: 524147 - RNA, 19 nt, Artificial Sequence
  Description of Artificial Sequence: Synthetic oligonucleotide
  Sense strand starting at position 3193 of SEQ ID NO: 317938
ccuuuaguacuaugauuag

SEQ ID NO: 524148 - RNA, 19 nt, Artificial Sequence
  Description of Artificial Sequence: Synthetic oligonucleotide
  Antisense strand to SEQ ID NO: 524147
cuaaucauaguacuaaagg

SEQ ID NO: 524149 - RNA, 19 nt, Artificial Sequence
  Description of Artificial Sequence: Synthetic oligonucleotide
  Sense strand starting at position 3218 of SEQ ID NO: 317938
uagcguuaggaucaaauaa

SEQ ID NO: 524150 - RNA, 19 nt, Artificial Sequence
  Description of Artificial Sequence: Synthetic oligonucleotide
  Antisense strand to SEQ ID NO: 524149
uuauuugauccuaacgcua

SEQ ID NO: 524151 - RNA, 19 nt, Artificial Sequence
  Description of Artificial Sequence: Synthetic oligonucleotide
  Sense strand starting at position 3314 of SEQ ID NO: 317938
gacuguugugaaugauacu

SEQ ID NO: 524152 - RNA, 19 nt, Artificial Sequence
  Description of Artificial Sequence: Synthetic oligonucleotide
  Antisense strand to SEQ ID NO: 524151
aguaucauucacaacaguc

SEQ ID NO: 524153 - RNA, 19 nt, Artificial Sequence
  Description of Artificial Sequence: Synthetic oligonucleotide
  Sense strand starting at position 3327 of SEQ ID NO: 317938
gauacuguggcucaaguuu

SEQ ID NO: 524154 - RNA, 19 nt, Artificial Sequence
  Description of Artificial Sequence: Synthetic oligonucleotide
  Antisense strand to SEQ ID NO: 524153
aaacuugagccacaguauc

SEQ ID NO: 524155 - RNA, 19 nt, Artificial Sequence
  Description of Artificial Sequence: Synthetic oligonucleotide
  Sense strand starting at position 3408 of SEQ ID NO: 317938
ggauaaaggagcuguggua

SEQ ID NO: 524156 - RNA, 19 nt, Artificial Sequence
  Description of Artificial Sequence: Synthetic oligonucleotide
  Antisense strand to SEQ ID NO: 524155
uaccacagcuccuuuaucc

SEQ ID NO: 524157 - RNA, 19 nt, Artificial Sequence
  Description of Artificial Sequence: Synthetic oligonucleotide
  Sense strand starting at position 3871 of SEQ ID NO: 317938
uagugaauccgauaagguu

SEQ ID NO: 524158 - RNA, 19 nt, Artificial Sequence
  Description of Artificial Sequence: Synthetic oligonucleotide
  Antisense strand to SEQ ID NO: 524157
aaccuuaucggauucacua

SEQ ID NO: 524159 - RNA, 19 nt, Artificial Sequence
  Description of Artificial Sequence: Synthetic oligonucleotide
  Sense strand starting at position 3934 of SEQ ID NO: 317938
uugguugggaagugauauu

SEQ ID NO: 524160 - RNA, 19 nt, Artificial Sequence
  Description of Artificial Sequence: Synthetic oligonucleotide
  Antisense strand to SEQ ID NO: 524159
aauaucacuucccaaccaa

SEQ ID NO: 524161 - RNA, 19 nt, Artificial Sequence
  Description of Artificial Sequence: Synthetic oligonucleotide
  Sense strand starting at position 77 of SEQ ID NO: 317939
ggaauaacugguggguuga

SEQ ID NO: 524162 - RNA, 19 nt, Artificial Sequence
  Description of Artificial Sequence: Synthetic oligonucleotide
  Antisense strand to SEQ ID NO: 524161
ucaacccaccaguuauucc

SEQ ID NO: 524163 - RNA, 19 nt, Artificial Sequence
  Description of Artificial Sequence: Synthetic oligonucleotide
  Sense strand starting at position 91 of SEQ ID NO: 317939
guugaccagcaguaagauu

SEQ ID NO: 524164 - RNA, 19 nt, Artificial Sequence
  Description of Artificial Sequence: Synthetic oligonucleotide
  Antisense strand to SEQ ID NO: 524163
aaucuuacugcuggucaac

SEQ ID NO: 524165 - RNA, 19 nt, Artificial Sequence
  Description of Artificial Sequence: Synthetic oligonucleotide
  Sense strand starting at position 117 of SEQ ID NO: 317939
gggcguuugagggauauca

SEQ ID NO: 524166 - RNA, 19 nt, Artificial Sequence
  Description of Artificial Sequence: Synthetic oligonucleotide
  Antisense strand to SEQ ID NO: 524165
ugauaucccucaaacgccc

SEQ ID NO: 524167 - RNA, 19 nt, Artificial Sequence
  Description of Artificial Sequence: Synthetic oligonucleotide
  Sense strand starting at position 119 of SEQ ID NO: 317939
gcguuugagggauaucacu

SEQ ID NO: 524168 - RNA, 19 nt, Artificial Sequence
  Description of Artificial Sequence: Synthetic oligonucleotide
  Antisense strand to SEQ ID NO: 524167
agugauaucccucaaacgc

SEQ ID NO: 524169 - RNA, 19 nt, Artificial Sequence
  Description of Artificial Sequence: Synthetic oligonucleotide
  Sense strand starting at position 214 of SEQ ID NO: 317939
ccacaucuauggcugacau

SEQ ID NO: 524170 - RNA, 19 nt, Artificial Sequence
  Description of Artificial Sequence: Synthetic oligonucleotide
  Antisense strand to SEQ ID NO: 524169
augucagccauagaugugg

SEQ ID NO: 524171 - RNA, 19 nt, Artificial Sequence
  Description of Artificial Sequence: Synthetic oligonucleotide
  Sense strand starting at position 226 of SEQ ID NO: 317939
cugacauagucauuaucga

SEQ ID NO: 524172 - RNA, 19 nt, Artificial Sequence
  Description of Artificial Sequence: Synthetic oligonucleotide
  Antisense strand to SEQ ID NO: 524171
ucgauaaugacuaugucag

SEQ ID NO: 524173 - RNA, 19 nt, Artificial Sequence
  Description of Artificial Sequence: Synthetic oligonucleotide
  Sense strand starting at position 227 of SEQ ID NO: 317939
ugacauagucauuaucgau

SEQ ID NO: 524174 - RNA, 19 nt, Artificial Sequence
  Description of Artificial Sequence: Synthetic oligonucleotide
  Antisense strand to SEQ ID NO: 524173
aucgauaaugacuauguca

SEQ ID NO: 524175 - RNA, 19 nt, Artificial Sequence
  Description of Artificial Sequence: Synthetic oligonucleotide
  Sense strand starting at position 487 of SEQ ID NO: 317939
uugguccagcaauggaaua

SEQ ID NO: 524176 - RNA, 19 nt, Artificial Sequence
  Description of Artificial Sequence: Synthetic oligonucleotide
  Antisense strand to SEQ ID NO: 524175
uauuccauugcuggaccaa

SEQ ID NO: 524177 - RNA, 19 nt, Artificial Sequence
  Description of Artificial Sequence: Synthetic oligonucleotide
  Sense strand starting at position 716 of SEQ ID NO: 317939
guggaaguccaugagcuuu

SEQ ID NO: 524178 - RNA, 19 nt, Artificial Sequence
  Description of Artificial Sequence: Synthetic oligonucleotide
  Antisense strand to SEQ ID NO: 524177
aaagcucauggacuuccac

SEQ ID NO: 524179 - RNA, 19 nt, Artificial Sequence
  Description of Artificial Sequence: Synthetic oligonucleotide
  Sense strand starting at position 782 of SEQ ID NO: 317939
cucugaagauggcuuuaga

SEQ ID NO: 524180 - RNA, 19 nt, Artificial Sequence
  Description of Artificial Sequence: Synthetic oligonucleotide
  Antisense strand to SEQ ID NO: 524179
ucuaaagccaucuucagag

SEQ ID NO: 524181 - RNA, 19 nt, Artificial Sequence
  Description of Artificial Sequence: Synthetic oligonucleotide
  Sense strand starting at position 915 of SEQ ID NO: 317939
gacaguuuggaagguggua

SEQ ID NO: 524182 - RNA, 19 nt, Artificial Sequence
  Description of Artificial Sequence: Synthetic oligonucleotide
  Antisense strand to SEQ ID NO: 524181
uaccaccuuccaaacuguc

SEQ ID NO: 524183 - RNA, 19 nt, Artificial Sequence
  Description of Artificial Sequence: Synthetic oligonucleotide
  Sense strand starting at position 1024 of SEQ ID NO: 317939
aguugaugucuuugacaga

SEQ ID NO: 524184 - RNA, 19 nt, Artificial Sequence
  Description of Artificial Sequence: Synthetic oligonucleotide
  Antisense strand to SEQ ID NO: 524183
ucugucaaagacaucaacu

SEQ ID NO: 524185 - RNA, 19 nt, Artificial Sequence
  Description of Artificial Sequence: Synthetic oligonucleotide
  Sense strand starting at position 1067 of SEQ ID NO: 317939
ggcauaagacuugauggcu

SEQ ID NO: 524186 - RNA, 19 nt, Artificial Sequence
  Description of Artificial Sequence: Synthetic oligonucleotide
  Antisense strand to SEQ ID NO: 524185
agccaucaagucuuaugcc

SEQ ID NO: 524187 - RNA, 19 nt, Artificial Sequence
  Description of Artificial Sequence: Synthetic oligonucleotide
  Sense strand starting at position 1072 of SEQ ID NO: 317939
aagacuugauggcuuugaa

SEQ ID NO: 524188 - RNA, 19 nt, Artificial Sequence
  Description of Artificial Sequence: Synthetic oligonucleotide
  Antisense strand to SEQ ID NO: 524187
uucaaagccaucaagucuu

SEQ ID NO: 524189 - RNA, 19 nt, Artificial Sequence
  Description of Artificial Sequence: Synthetic oligonucleotide
  Sense strand starting at position 1145 of SEQ ID NO: 317939
gcuauuugcaucgaccagu

SEQ ID NO: 524190 - RNA, 19 nt, Artificial Sequence
  Description of Artificial Sequence: Synthetic oligonucleotide
  Antisense strand to SEQ ID NO: 524189
acuggucgaugcaaauagc

SEQ ID NO: 524191 - RNA, 19 nt, Artificial Sequence
  Description of Artificial Sequence: Synthetic oligonucleotide
  Sense strand starting at position 1282 of SEQ ID NO: 317939
acccauugcccucagagau

SEQ ID NO: 524192 - RNA, 19 nt, Artificial Sequence
  Description of Artificial Sequence: Synthetic oligonucleotide
  Antisense strand to SEQ ID NO: 524191
aucucugagggcaaugggu

SEQ ID NO: 524193 - RNA, 19 nt, Artificial Sequence
  Description of Artificial Sequence: Synthetic oligonucleotide
  Sense strand starting at position 1403 of SEQ ID NO: 317939
ggcaaacaucucugaccuu

SEQ ID NO: 524194 - RNA, 19 nt, Artificial Sequence
  Description of Artificial Sequence: Synthetic oligonucleotide
  Antisense strand to SEQ ID NO: 524193
aaggucagagauguuugcc

SEQ ID NO: 524195 - RNA, 19 nt, Artificial Sequence
  Description of Artificial Sequence: Synthetic oligonucleotide
  Sense strand starting at position 1422 of SEQ ID NO: 317939
guguuaaaggcauaauaga

SEQ ID NO: 524196 - RNA, 19 nt, Artificial Sequence
  Description of Artificial Sequence: Synthetic oligonucleotide
  Antisense strand to SEQ ID NO: 524195
ucuauuaugccuuuaacac

SEQ ID NO: 524197 - RNA, 19 nt, Artificial Sequence
  Description of Artificial Sequence: Synthetic oligonucleotide
  Sense strand starting at position 1445 of SEQ ID NO: 317939
agcauucuggccuagauca

SEQ ID NO: 524198 - RNA, 19 nt, Artificial Sequence
  Description of Artificial Sequence: Synthetic oligonucleotide
  Antisense strand to SEQ ID NO: 524197
ugaucuaggccagaaugcu

SEQ ID NO: 524199 - RNA, 19 nt, Artificial Sequence
  Description of Artificial Sequence: Synthetic oligonucleotide
  Sense strand starting at position 1513 of SEQ ID NO: 317939
cagagauggugacucugua

SEQ ID NO: 524200 - RNA, 19 nt, Artificial Sequence
  Description of Artificial Sequence: Synthetic oligonucleotide
  Antisense strand to SEQ ID NO: 524199
uacagagucaccaucucug

SEQ ID NO: 524201 - RNA, 19 nt, Artificial Sequence
  Description of Artificial Sequence: Synthetic oligonucleotide
  Sense strand starting at position 1557 of SEQ ID NO: 317939
aggucauucugguccagga

SEQ ID NO: 524202 - RNA, 19 nt, Artificial Sequence
  Description of Artificial Sequence: Synthetic oligonucleotide
  Antisense strand to SEQ ID NO: 524201
uccuggaccagaaugaccu

SEQ ID NO: 524203 - RNA, 19 nt, Artificial Sequence
  Description of Artificial Sequence: Synthetic oligonucleotide
  Sense strand starting at position 1690 of SEQ ID NO: 317939
uuguccuuauucuuaggaa

SEQ ID NO: 524204 - RNA, 19 nt, Artificial Sequence
  Description of Artificial Sequence: Synthetic oligonucleotide
  Antisense strand to SEQ ID NO: 524203
uuccuaagaauaaggacaa

SEQ ID NO: 524205 - RNA, 19 nt, Artificial Sequence
  Description of Artificial Sequence: Synthetic oligonucleotide
  Sense strand starting at position 1940 of SEQ ID NO: 317939
cgcacaauggagcaagaau

SEQ ID NO: 524206 - RNA, 19 nt, Artificial Sequence
  Description of Artificial Sequence: Synthetic oligonucleotide
  Antisense strand to SEQ ID NO: 524205
auucuugcuccauugugcg

SEQ ID NO: 524207 - RNA, 19 nt, Artificial Sequence
  Description of Artificial Sequence: Synthetic oligonucleotide
  Sense strand starting at position 1948 of SEQ ID NO: 317939
ggagcaagaauauggcaaa

SEQ ID NO: 524208 - RNA, 19 nt, Artificial Sequence
  Description of Artificial Sequence: Synthetic oligonucleotide
  Antisense strand to SEQ ID NO: 524207
uuugccauauucuugcucc

SEQ ID NO: 524209 - RNA, 19 nt, Artificial Sequence
  Description of Artificial Sequence: Synthetic oligonucleotide
  Sense strand starting at position 1976 of SEQ ID NO: 317939
ggcaauagucaugguggaa

SEQ ID NO: 524210 - RNA, 19 nt, Artificial Sequence
  Description of Artificial Sequence: Synthetic oligonucleotide
  Antisense strand to SEQ ID NO: 524209
uuccaccaugacuauugcc

SEQ ID NO: 524211 - RNA, 19 nt, Artificial Sequence
  Description of Artificial Sequence: Synthetic oligonucleotide
  Sense strand starting at position 2066 of SEQ ID NO: 317939
gugauucuuaacuggaggu

SEQ ID NO: 524212 - RNA, 19 nt, Artificial Sequence
  Description of Artificial Sequence: Synthetic oligonucleotide
  Antisense strand to SEQ ID NO: 524211
accuccaguuaagaaucac

SEQ ID NO: 524213 - RNA, 19 nt, Artificial Sequence
  Description of Artificial Sequence: Synthetic oligonucleotide
  Sense strand starting at position 2509 of SEQ ID NO: 317939
ggaucccucccaugauaca

SEQ ID NO: 524214 - RNA, 19 nt, Artificial Sequence
  Description of Artificial Sequence: Synthetic oligonucleotide
  Antisense strand to SEQ ID NO: 524213
uguaucaugggagggaucc

SEQ ID NO: 524215 - RNA, 19 nt, Artificial Sequence
  Description of Artificial Sequence: Synthetic oligonucleotide
  Sense strand starting at position 2969 of SEQ ID NO: 317939
cucugucauuugcuaggua

SEQ ID NO: 524216 - RNA, 19 nt, Artificial Sequence
  Description of Artificial Sequence: Synthetic oligonucleotide
  Antisense strand to SEQ ID NO: 524215
uaccuagcaaaugacagag

SEQ ID NO: 524217 - RNA, 19 nt, Artificial Sequence
  Description of Artificial Sequence: Synthetic oligonucleotide
  Sense strand starting at position 2972 of SEQ ID NO: 317939
ugucauuugcuagguaggu

SEQ ID NO: 524218 - RNA, 19 nt, Artificial Sequence
  Description of Artificial Sequence: Synthetic oligonucleotide
  Antisense strand to SEQ ID NO: 524217
accuaccuagcaaaugaca

SEQ ID NO: 524219 - RNA, 19 nt, Artificial Sequence
  Description of Artificial Sequence: Synthetic oligonucleotide
  Sense strand starting at position 3107 of SEQ ID NO: 317939
guaaaugacuuaucagagu

SEQ ID NO: 524220 - RNA, 19 nt, Artificial Sequence
  Description of Artificial Sequence: Synthetic oligonucleotide
  Antisense strand to SEQ ID NO: 524219
acucugauaagucauuuac

SEQ ID NO: 524221 - RNA, 19 nt, Artificial Sequence
  Description of Artificial Sequence: Synthetic oligonucleotide
  Sense strand starting at position 3288 of SEQ ID NO: 317939
ccacaugucccuuauagac

SEQ ID NO: 524222 - RNA, 19 nt, Artificial Sequence
  Description of Artificial Sequence: Synthetic oligonucleotide
  Antisense strand to SEQ ID NO: 524221
gucuauaagggacaugugg

SEQ ID NO: 524223 - RNA, 19 nt, Artificial Sequence
  Description of Artificial Sequence: Synthetic oligonucleotide
  Sense strand starting at position 3307 of SEQ ID NO: 317939
agggcaugacucugacuca

SEQ ID NO: 524224 - RNA, 19 nt, Artificial Sequence
  Description of Artificial Sequence: Synthetic oligonucleotide
  Antisense strand to SEQ ID NO: 524223
ugagucagagucaugcccu

SEQ ID NO: 524225 - RNA, 19 nt, Artificial Sequence
  Description of Artificial Sequence: Synthetic oligonucleotide
  Sense strand starting at position 3310 of SEQ ID NO: 317939
gcaugacucugacucauca

SEQ ID NO: 524226 - RNA, 19 nt, Artificial Sequence
  Description of Artificial Sequence: Synthetic oligonucleotide
  Antisense strand to SEQ ID NO: 524225
ugaugagucagagucaugc

SEQ ID NO: 524227 - RNA, 19 nt, Artificial Sequence
  Description of Artificial Sequence: Synthetic oligonucleotide
  Sense strand starting at position 3361 of SEQ ID NO: 317939
uggaaugucugaguugaaa

SEQ ID NO: 524228 - RNA, 19 nt, Artificial Sequence
  Description of Artificial Sequence: Synthetic oligonucleotide
  Antisense strand to SEQ ID NO: 524227
uuucaacucagacauucca

SEQ ID NO: 524229 - RNA, 19 nt, Artificial Sequence
  Description of Artificial Sequence: Synthetic oligonucleotide
  Sense strand starting at position 3369 of SEQ ID NO: 317939
cugaguugaaauggacauu

SEQ ID NO: 524230 - RNA, 19 nt, Artificial Sequence
  Description of Artificial Sequence: Synthetic oligonucleotide
  Antisense strand to SEQ ID NO: 524229
aauguccauuucaacucag

SEQ ID NO: 524231 - RNA, 19 nt, Artificial Sequence
  Description of Artificial Sequence: Synthetic oligonucleotide
  Sense strand starting at position 3501 of SEQ ID NO: 317939
agaacuagucccugggagu

SEQ ID NO: 524232 - RNA, 19 nt, Artificial Sequence
  Description of Artificial Sequence: Synthetic oligonucleotide
  Antisense strand to SEQ ID NO: 524231
acucccagggacuaguucu

SEQ ID NO: 524233 - RNA, 19 nt, Artificial Sequence
  Description of Artificial Sequence: Synthetic oligonucleotide
  Sense strand starting at position 3502 of SEQ ID NO: 317939
gaacuagucccugggaguu

SEQ ID NO: 524234 - RNA, 19 nt, Artificial Sequence
  Description of Artificial Sequence: Synthetic oligonucleotide
  Antisense strand to SEQ ID NO: 524233
aacucccagggacuaguuc

SEQ ID NO: 524235 - RNA, 19 nt, Artificial Sequence
  Description of Artificial Sequence: Synthetic oligonucleotide
  Sense strand starting at position 3519 of SEQ ID NO: 317939
uuaguucuuguugaacuga

SEQ ID NO: 524236 - RNA, 19 nt, Artificial Sequence
  Description of Artificial Sequence: Synthetic oligonucleotide
  Antisense strand to SEQ ID NO: 524235
ucaguucaacaagaacuaa

SEQ ID NO: 524237 - RNA, 19 nt, Artificial Sequence
  Description of Artificial Sequence: Synthetic oligonucleotide
  Sense strand starting at position 3774 of SEQ ID NO: 317939
uggagcauucuuggaugaa

SEQ ID NO: 524238 - RNA, 19 nt, Artificial Sequence
  Description of Artificial Sequence: Synthetic oligonucleotide
  Antisense strand to SEQ ID NO: 524237
uucauccaagaaugcucca

SEQ ID NO: 524239 - RNA, 19 nt, Artificial Sequence
  Description of Artificial Sequence: Synthetic oligonucleotide
  Sense strand starting at position 3777 of SEQ ID NO: 317939
agcauucuuggaugaaacu

SEQ ID NO: 524240 - RNA, 19 nt, Artificial Sequence
  Description of Artificial Sequence: Synthetic oligonucleotide
  Antisense strand to SEQ ID NO: 524239
aguuucauccaagaaugcu

SEQ ID NO: 524241 - RNA, 19 nt, Artificial Sequence
  Description of Artificial Sequence: Synthetic oligonucleotide
  Sense strand starting at position 776 of SEQ ID NO: 317940
uguccaugaggccgagaau

SEQ ID NO: 524242 - RNA, 19 nt, Artificial Sequence
  Description of Artificial Sequence: Synthetic oligonucleotide
  Antisense strand to SEQ ID NO: 524241
auucucggccucauggaca

SEQ ID NO: 524243 - RNA, 19 nt, Artificial Sequence
  Description of Artificial Sequence: Synthetic oligonucleotide
  Sense strand starting at position 788 of SEQ ID NO: 317940
cgagaaucugccugucuug

SEQ ID NO: 524244 - RNA, 19 nt, Artificial Sequence
  Description of Artificial Sequence: Synthetic oligonucleotide
  Antisense strand to SEQ ID NO: 524243
caagacaggcagauucucg

SEQ ID NO: 524245 - RNA, 19 nt, Artificial Sequence
  Description of Artificial Sequence: Synthetic oligonucleotide
  Sense strand starting at position 802 of SEQ ID NO: 317940
ucuuguuuaccacgagauc

SEQ ID NO: 524246 - RNA, 19 nt, Artificial Sequence
  Description of Artificial Sequence: Synthetic oligonucleotide
  Antisense strand to SEQ ID NO: 524245
gaucucgugguaaacaaga

SEQ ID NO: 524247 - RNA, 19 nt, Artificial Sequence
  Description of Artificial Sequence: Synthetic oligonucleotide
  Sense strand starting at position 974 of SEQ ID NO: 317940
uuacuuucguaacuaaagu

SEQ ID NO: 524248 - RNA, 19 nt, Artificial Sequence
  Description of Artificial Sequence: Synthetic oligonucleotide
  Antisense strand to SEQ ID NO: 524247
acuuuaguuacgaaaguaa

SEQ ID NO: 524249 - RNA, 19 nt, Artificial Sequence
  Description of Artificial Sequence: Synthetic oligonucleotide
  Sense strand starting at position 1031 of SEQ ID NO: 317940
ugaauugaaucuguauauc

SEQ ID NO: 524250 - RNA, 19 nt, Artificial Sequence
  Description of Artificial Sequence: Synthetic oligonucleotide
  Antisense strand to SEQ ID NO: 524249
gauauacagauucaauuca

SEQ ID NO: 524251 - RNA, 19 nt, Artificial Sequence
  Description of Artificial Sequence: Synthetic oligonucleotide
  Sense strand starting at position 1141 of SEQ ID NO: 317940
ccugaaagccacuguucua

SEQ ID NO: 524252 - RNA, 19 nt, Artificial Sequence
  Description of Artificial Sequence: Synthetic oligonucleotide
  Antisense strand to SEQ ID NO: 524251
uagaacaguggcuuucagg

SEQ ID NO: 524253 - RNA, 19 nt, Artificial Sequence
  Description of Artificial Sequence: Synthetic oligonucleotide
  Sense strand starting at position 1201 of SEQ ID NO: 317940
ucaauaaccuucguggagu

SEQ ID NO: 524254 - RNA, 19 nt, Artificial Sequence
  Description of Artificial Sequence: Synthetic oligonucleotide
  Antisense strand to SEQ ID NO: 524253
acuccacgaagguuauuga

SEQ ID NO: 524255 - RNA, 19 nt, Artificial Sequence
  Description of Artificial Sequence: Synthetic oligonucleotide
  Sense strand starting at position 1217 of SEQ ID NO: 317940
aguguuuccauagguacua

SEQ ID NO: 524256 - RNA, 19 nt, Artificial Sequence
  Description of Artificial Sequence: Synthetic oligonucleotide
  Antisense strand to SEQ ID NO: 524255
uaguaccuauggaaacacu

SEQ ID NO: 524257 - RNA, 19 nt, Artificial Sequence
  Description of Artificial Sequence: Synthetic oligonucleotide
  Sense strand starting at position 1218 of SEQ ID NO: 317940
guguuuccauagguacuau

SEQ ID NO: 524258 - RNA, 19 nt, Artificial Sequence
  Description of Artificial Sequence: Synthetic oligonucleotide
  Antisense strand to SEQ ID NO: 524257
auaguaccuauggaaacac

SEQ ID NO: 524259 - RNA, 19 nt, Artificial Sequence
  Description of Artificial Sequence: Synthetic oligonucleotide
  Sense strand starting at position 1261 of SEQ ID NO: 317940
ggagccacuguugguaaau

SEQ ID NO: 524260 - RNA, 19 nt, Artificial Sequence
  Description of Artificial Sequence: Synthetic oligonucleotide
  Antisense strand to SEQ ID NO: 524259
auuuaccaacaguggcucc

SEQ ID NO: 524261 - RNA, 19 nt, Artificial Sequence
  Description of Artificial Sequence: Synthetic oligonucleotide
  Sense strand starting at position 1262 of SEQ ID NO: 317940
gagccacuguugguaaauc

SEQ ID NO: 524262 - RNA, 19 nt, Artificial Sequence
  Description of Artificial Sequence: Synthetic oligonucleotide
  Antisense strand to SEQ ID NO: 524261
gauuuaccaacaguggcuc

SEQ ID NO: 524263 - RNA, 19 nt, Artificial Sequence
  Description of Artificial Sequence: Synthetic oligonucleotide
  Sense strand starting at position 1273 of SEQ ID NO: 317940
gguaaauccaaguauguug

SEQ ID NO: 524264 - RNA, 19 nt, Artificial Sequence
  Description of Artificial Sequence: Synthetic oligonucleotide
  Antisense strand to SEQ ID NO: 524263
caacauacuuggauuuacc

SEQ ID NO: 524265 - RNA, 19 nt, Artificial Sequence
  Description of Artificial Sequence: Synthetic oligonucleotide
  Sense strand starting at position 1447 of SEQ ID NO: 317940
guuuguucugccucucauu

SEQ ID NO: 524266 - RNA, 19 nt, Artificial Sequence
  Description of Artificial Sequence: Synthetic oligonucleotide
  Antisense strand to SEQ ID NO: 524265
aaugagaggcagaacaaac

SEQ ID NO: 524267 - RNA, 19 nt, Artificial Sequence
  Description of Artificial Sequence: Synthetic oligonucleotide
  Sense strand starting at position 1461 of SEQ ID NO: 317940
ucauuugaguucugaauua

SEQ ID NO: 524268 - RNA, 19 nt, Artificial Sequence
  Description of Artificial Sequence: Synthetic oligonucleotide
  Antisense strand to SEQ ID NO: 524267
uaauucagaacucaaauga

SEQ ID NO: 524269 - RNA, 19 nt, Artificial Sequence
  Description of Artificial Sequence: Synthetic oligonucleotide
  Sense strand starting at position 1466 of SEQ ID NO: 317940
ugaguucugaauuaggagu

SEQ ID NO: 524270 - RNA, 19 nt, Artificial Sequence
  Description of Artificial Sequence: Synthetic oligonucleotide
  Antisense strand to SEQ ID NO: 524269
acuccuaauucagaacuca

SEQ ID NO: 524271 - RNA, 19 nt, Artificial Sequence
  Description of Artificial Sequence: Synthetic oligonucleotide
  Sense strand starting at position 1479 of SEQ ID NO: 317940
aggaguugcuccuuuacaa

SEQ ID NO: 524272 - RNA, 19 nt, Artificial Sequence
  Description of Artificial Sequence: Synthetic oligonucleotide
  Antisense strand to SEQ ID NO: 524271
uuguaaaggagcaacuccu

SEQ ID NO: 524273 - RNA, 19 nt, Artificial Sequence
  Description of Artificial Sequence: Synthetic oligonucleotide
  Sense strand starting at position 1537 of SEQ ID NO: 317940
accugucaauugcuagaaa

SEQ ID NO: 524274 - RNA, 19 nt, Artificial Sequence
  Description of Artificial Sequence: Synthetic oligonucleotide
  Antisense strand to SEQ ID NO: 524273
uuucuagcaauugacaggu

SEQ ID NO: 524275 - RNA, 19 nt, Artificial Sequence
  Description of Artificial Sequence: Synthetic oligonucleotide
  Sense strand starting at position 1601 of SEQ ID NO: 317940
uacagacauuaguaagaga

SEQ ID NO: 524276 - RNA, 19 nt, Artificial Sequence
  Description of Artificial Sequence: Synthetic oligonucleotide
  Antisense strand to SEQ ID NO: 524275
ucucuuacuaaugucugua

SEQ ID NO: 524277 - RNA, 19 nt, Artificial Sequence
  Description of Artificial Sequence: Synthetic oligonucleotide
  Sense strand starting at position 1604 of SEQ ID NO: 317940
agacauuaguaagagacaa

SEQ ID NO: 524278 - RNA, 19 nt, Artificial Sequence
  Description of Artificial Sequence: Synthetic oligonucleotide
  Antisense strand to SEQ ID NO: 524277
uugucucuuacuaaugucu

SEQ ID NO: 524279 - RNA, 19 nt, Artificial Sequence
  Description of Artificial Sequence: Synthetic oligonucleotide
  Sense strand starting at position 1640 of SEQ ID NO: 317940
agcaauguccuaggacaaa

SEQ ID NO: 524280 - RNA, 19 nt, Artificial Sequence
  Description of Artificial Sequence: Synthetic oligonucleotide
  Antisense strand to SEQ ID NO: 524279
uuuguccuaggacauugcu

SEQ ID NO: 524281 - RNA, 19 nt, Artificial Sequence
  Description of Artificial Sequence: Synthetic oligonucleotide
  Sense strand starting at position 1776 of SEQ ID NO: 317940
uggacauguccugaccuuu

SEQ ID NO: 524282 - RNA, 19 nt, Artificial Sequence
  Description of Artificial Sequence: Synthetic oligonucleotide
  Antisense strand to SEQ ID NO: 524281
aaaggucaggacaugucca

SEQ ID NO: 524283 - RNA, 19 nt, Artificial Sequence
  Description of Artificial Sequence: Synthetic oligonucleotide
  Sense strand starting at position 1860 of SEQ ID NO: 317940
gguccuugcacaggucaaa

SEQ ID NO: 524284 - RNA, 19 nt, Artificial Sequence
  Description of Artificial Sequence: Synthetic oligonucleotide
  Antisense strand to SEQ ID NO: 524283
uuugaccugugcaaggacc

SEQ ID NO: 524285 - RNA, 19 nt, Artificial Sequence
  Description of Artificial Sequence: Synthetic oligonucleotide
  Sense strand starting at position 1872 of SEQ ID NO: 317940
ggucaaaucuaaguucucu

SEQ ID NO: 524286 - RNA, 19 nt, Artificial Sequence
  Description of Artificial Sequence: Synthetic oligonucleotide
  Antisense strand to SEQ ID NO: 524285
agagaacuuagauuugacc

SEQ ID NO: 524287 - RNA, 19 nt, Artificial Sequence
  Description of Artificial Sequence: Synthetic oligonucleotide
  Sense strand starting at position 1972 of SEQ ID NO: 317940
uggccauggugaucucauu

SEQ ID NO: 524288 - RNA, 19 nt, Artificial Sequence
  Description of Artificial Sequence: Synthetic oligonucleotide
  Antisense strand to SEQ ID NO: 524287
aaugagaucaccauggcca

SEQ ID NO: 524289 - RNA, 19 nt, Artificial Sequence
  Description of Artificial Sequence: Synthetic oligonucleotide
  Sense strand starting at position 2270 of SEQ ID NO: 317940
cagauaauggcagguagua

SEQ ID NO: 524290 - RNA, 19 nt, Artificial Sequence
  Description of Artificial Sequence: Synthetic oligonucleotide
  Antisense strand to SEQ ID NO: 524289
uacuaccugccauuaucug

SEQ ID NO: 524291 - RNA, 19 nt, Artificial Sequence
  Description of Artificial Sequence: Synthetic oligonucleotide
  Sense strand starting at position 2282 of SEQ ID NO: 317940
gguaguacaaguugauaaa

SEQ ID NO: 524292 - RNA, 19 nt, Artificial Sequence
  Description of Artificial Sequence: Synthetic oligonucleotide
  Antisense strand to SEQ ID NO: 524291
uuuaucaacuuguacuacc

SEQ ID NO: 524293 - RNA, 19 nt, Artificial Sequence
  Description of Artificial Sequence: Synthetic oligonucleotide
  Sense strand starting at position 2422 of SEQ ID NO: 317940
augccuguggaggguaaau

SEQ ID NO: 524294 - RNA, 19 nt, Artificial Sequence
  Description of Artificial Sequence: Synthetic oligonucleotide
  Antisense strand to SEQ ID NO: 524293
auuuacccuccacaggcau

SEQ ID NO: 524295 - RNA, 19 nt, Artificial Sequence
  Description of Artificial Sequence: Synthetic oligonucleotide
  Sense strand starting at position 2435 of SEQ ID NO: 317940
guaaauuugcacugugauu

SEQ ID NO: 524296 - RNA, 19 nt, Artificial Sequence
  Description of Artificial Sequence: Synthetic oligonucleotide
  Antisense strand to SEQ ID NO: 524295
aaucacagugcaaauuuac

SEQ ID NO: 524297 - RNA, 19 nt, Artificial Sequence
  Description of Artificial Sequence: Synthetic oligonucleotide
  Sense strand starting at position 2440 of SEQ ID NO: 317940
uuugcacugugauugaaau

SEQ ID NO: 524298 - RNA, 19 nt, Artificial Sequence
  Description of Artificial Sequence: Synthetic oligonucleotide
  Antisense strand to SEQ ID NO: 524297
auuucaaucacagugcaaa

SEQ ID NO: 524299 - RNA, 19 nt, Artificial Sequence
  Description of Artificial Sequence: Synthetic oligonucleotide
  Sense strand starting at position 2441 of SEQ ID NO: 317940
uugcacugugauugaaaua

SEQ ID NO: 524300 - RNA, 19 nt, Artificial Sequence
  Description of Artificial Sequence: Synthetic oligonucleotide
  Antisense strand to SEQ ID NO: 524299
uauuucaaucacagugcaa

SEQ ID NO: 524301 - RNA, 19 nt, Artificial Sequence
  Description of Artificial Sequence: Synthetic oligonucleotide
  Sense strand starting at position 2442 of SEQ ID NO: 317940
ugcacugugauugaaauag

SEQ ID NO: 524302 - RNA, 19 nt, Artificial Sequence
  Description of Artificial Sequence: Synthetic oligonucleotide
  Antisense strand to SEQ ID NO: 524301
cuauuucaaucacagugca

SEQ ID NO: 524303 - RNA, 19 nt, Artificial Sequence
  Description of Artificial Sequence: Synthetic oligonucleotide
  Sense strand starting at position 2648 of SEQ ID NO: 317940
gagacaaccucugugacca

SEQ ID NO: 524304 - RNA, 19 nt, Artificial Sequence
  Description of Artificial Sequence: Synthetic oligonucleotide
  Antisense strand to SEQ ID NO: 524303
uggucacagagguugucuc

SEQ ID NO: 524305 - RNA, 19 nt, Artificial Sequence
  Description of Artificial Sequence: Synthetic oligonucleotide
  Sense strand starting at position 2686 of SEQ ID NO: 317940
agagcuuaccucuguaaau

SEQ ID NO: 524306 - RNA, 19 nt, Artificial Sequence
  Description of Artificial Sequence: Synthetic oligonucleotide
  Antisense strand to SEQ ID NO: 524305
auuuacagagguaagcucu

SEQ ID NO: 524307 - RNA, 19 nt, Artificial Sequence
  Description of Artificial Sequence: Synthetic oligonucleotide
  Sense strand starting at position 2688 of SEQ ID NO: 317940
agcuuaccucuguaaauag

SEQ ID NO: 524308 - RNA, 19 nt, Artificial Sequence
  Description of Artificial Sequence: Synthetic oligonucleotide
  Antisense strand to SEQ ID NO: 524307
cuauuuacagagguaagcu

SEQ ID NO: 524309 - RNA, 19 nt, Artificial Sequence
  Description of Artificial Sequence: Synthetic oligonucleotide
  Sense strand starting at position 2956 of SEQ ID NO: 317940
gcggcucacauguauaauc

SEQ ID NO: 524310 - RNA, 19 nt, Artificial Sequence
  Description of Artificial Sequence: Synthetic oligonucleotide
  Antisense strand to SEQ ID NO: 524309
gauuauacaugugagccgc

SEQ ID NO: 524311 - RNA, 19 nt, Artificial Sequence
  Description of Artificial Sequence: Synthetic oligonucleotide
  Sense strand starting at position 3634 of SEQ ID NO: 317940
uucuuaagcccaggaguua

SEQ ID NO: 524312 - RNA, 19 nt, Artificial Sequence
  Description of Artificial Sequence: Synthetic oligonucleotide
  Antisense strand to SEQ ID NO: 524311
uaacuccugggcuuaagaa

SEQ ID NO: 524313 - RNA, 19 nt, Artificial Sequence
  Description of Artificial Sequence: Synthetic oligonucleotide
  Sense strand starting at position 3718 of SEQ ID NO: 317940
cauggagacugcuccauau

SEQ ID NO: 524314 - RNA, 19 nt, Artificial Sequence
  Description of Artificial Sequence: Synthetic oligonucleotide
  Antisense strand to SEQ ID NO: 524313
auauggagcagucuccaug

SEQ ID NO: 524315 - RNA, 19 nt, Artificial Sequence
  Description of Artificial Sequence: Synthetic oligonucleotide
  Sense strand starting at position 3722 of SEQ ID NO: 317940
gagacugcuccauauagua

SEQ ID NO: 524316 - RNA, 19 nt, Artificial Sequence
  Description of Artificial Sequence: Synthetic oligonucleotide
  Antisense strand to SEQ ID NO: 524315
uacuauauggagcagucuc

SEQ ID NO: 524317 - RNA, 19 nt, Artificial Sequence
  Description of Artificial Sequence: Synthetic oligonucleotide
  Sense strand starting at position 3864 of SEQ ID NO: 317940
aaagcaagggcucaguaaa

SEQ ID NO: 524318 - RNA, 19 nt, Artificial Sequence
  Description of Artificial Sequence: Synthetic oligonucleotide
  Antisense strand to SEQ ID NO: 524317
uuuacugagcccuugcuuu

SEQ ID NO: 524319 - RNA, 19 nt, Artificial Sequence
  Description of Artificial Sequence: Synthetic oligonucleotide
  Sense strand starting at position 3982 of SEQ ID NO: 317940
gauauugcagaaugucuau

SEQ ID NO: 524320 - RNA, 19 nt, Artificial Sequence
  Description of Artificial Sequence: Synthetic oligonucleotide
  Antisense strand to SEQ ID NO: 524319
auagacauucugcaauauc

SEQ ID NO: 524321 - RNA, 19 nt, Artificial Sequence
  Description of Artificial Sequence: Synthetic oligonucleotide
  Sense strand starting at position 228 of SEQ ID NO: 317941
ucccgauuaucagugcaau

SEQ ID NO: 524322 - RNA, 19 nt, Artificial Sequence
  Description of Artificial Sequence: Synthetic oligonucleotide
  Antisense strand to SEQ ID NO: 524321
auugcacugauaaucggga

SEQ ID NO: 524323 - RNA, 19 nt, Artificial Sequence
  Description of Artificial Sequence: Synthetic oligonucleotide
  Sense strand starting at position 229 of SEQ ID NO: 317941
cccgauuaucagugcaaug

SEQ ID NO: 524324 - RNA, 19 nt, Artificial Sequence
  Description of Artificial Sequence: Synthetic oligonucleotide
  Antisense strand to SEQ ID NO: 524323
cauugcacugauaaucggg

SEQ ID NO: 524325 - RNA, 19 nt, Artificial Sequence
  Description of Artificial Sequence: Synthetic oligonucleotide
  Sense strand starting at position 231 of SEQ ID NO: 317941
cgauuaucagugcaaugug

SEQ ID NO: 524326 - RNA, 19 nt, Artificial Sequence
  Description of Artificial Sequence: Synthetic oligonucleotide
  Antisense strand to SEQ ID NO: 524325
cacauugcacugauaaucg

SEQ ID NO: 524327 - RNA, 19 nt, Artificial Sequence
  Description of Artificial Sequence: Synthetic oligonucleotide
  Sense strand starting at position 234 of SEQ ID NO: 317941
uuaucagugcaaugugauc

SEQ ID NO: 524328 - RNA, 19 nt, Artificial Sequence
  Description of Artificial Sequence: Synthetic oligonucleotide
  Antisense strand to SEQ ID NO: 524327
gaucacauugcacugauaa

SEQ ID NO: 524329 - RNA, 19 nt, Artificial Sequence
  Description of Artificial Sequence: Synthetic oligonucleotide
  Sense strand starting at position 240 of SEQ ID NO: 317941
gugcaaugugaucacuuga

SEQ ID NO: 524330 - RNA, 19 nt, Artificial Sequence
  Description of Artificial Sequence: Synthetic oligonucleotide
  Antisense strand to SEQ ID NO: 524329
ucaagugaucacauugcac

SEQ ID NO: 524331 - RNA, 19 nt, Artificial Sequence
  Description of Artificial Sequence: Synthetic oligonucleotide
  Sense strand starting at position 265 of SEQ ID NO: 317941
acgcaacuaugcguccaaa

SEQ ID NO: 524332 - RNA, 19 nt, Artificial Sequence
  Description of Artificial Sequence: Synthetic oligonucleotide
  Antisense strand to SEQ ID NO: 524331
uuuggacgcauaguugcgu

SEQ ID NO: 524333 - RNA, 19 nt, Artificial Sequence
  Description of Artificial Sequence: Synthetic oligonucleotide
  Sense strand starting at position 496 of SEQ ID NO: 317941
uauaaacggucuucguaag

SEQ ID NO: 524334 - RNA, 19 nt, Artificial Sequence
  Description of Artificial Sequence: Synthetic oligonucleotide
  Antisense strand to SEQ ID NO: 524333
cuuacgaagaccguuuaua

SEQ ID NO: 524335 - RNA, 19 nt, Artificial Sequence
  Description of Artificial Sequence: Synthetic oligonucleotide
  Sense strand starting at position 526 of SEQ ID NO: 317941
gcgaguagauuucaggaca

SEQ ID NO: 524336 - RNA, 19 nt, Artificial Sequence
  Description of Artificial Sequence: Synthetic oligonucleotide
  Antisense strand to SEQ ID NO: 524335
uguccugaaaucuacucgc

SEQ ID NO: 524337 - RNA, 19 nt, Artificial Sequence
  Description of Artificial Sequence: Synthetic oligonucleotide
  Sense strand starting at position 624 of SEQ ID NO: 317941
gcaggagggucagaaaugu

SEQ ID NO: 524338 - RNA, 19 nt, Artificial Sequence
  Description of Artificial Sequence: Synthetic oligonucleotide
  Antisense strand to SEQ ID NO: 524337
acauuucugacccuccugc

SEQ ID NO: 524339 - RNA, 19 nt, Artificial Sequence
  Description of Artificial Sequence: Synthetic oligonucleotide
  Sense strand starting at position 756 of SEQ ID NO: 317941
accauuccguuccaaagaa

SEQ ID NO: 524340 - RNA, 19 nt, Artificial Sequence
  Description of Artificial Sequence: Synthetic oligonucleotide
  Antisense strand to SEQ ID NO: 524339
uucuuuggaacggaauggu

SEQ ID NO: 524341 - RNA, 19 nt, Artificial Sequence
  Description of Artificial Sequence: Synthetic oligonucleotide
  Sense strand starting at position 866 of SEQ ID NO: 317941
ucggguugacgaugagaag

SEQ ID NO: 524342 - RNA, 19 nt, Artificial Sequence
  Description of Artificial Sequence: Synthetic oligonucleotide
  Antisense strand to SEQ ID NO: 524341
cuucucaucgucaacccga

SEQ ID NO: 524343 - RNA, 19 nt, Artificial Sequence
  Description of Artificial Sequence: Synthetic oligonucleotide
  Sense strand starting at position 1166 of SEQ ID NO: 317941
uuuggauauucuggcaaag

SEQ ID NO: 524344 - RNA, 19 nt, Artificial Sequence
  Description of Artificial Sequence: Synthetic oligonucleotide
  Antisense strand to SEQ ID NO: 524343
cuuugccagaauauccaaa

SEQ ID NO: 524345 - RNA, 19 nt, Artificial Sequence
  Description of Artificial Sequence: Synthetic oligonucleotide
  Sense strand starting at position 1594 of SEQ ID NO: 317941
gcggagagggagugaucaa

SEQ ID NO: 524346 - RNA, 19 nt, Artificial Sequence
  Description of Artificial Sequence: Synthetic oligonucleotide
  Antisense strand to SEQ ID NO: 524345
uugaucacucccucuccgc

SEQ ID NO: 524347 - RNA, 19 nt, Artificial Sequence
  Description of Artificial Sequence: Synthetic oligonucleotide
  Sense strand starting at position 1819 of SEQ ID NO: 317941
agcgguacacguugcauaa

SEQ ID NO: 524348 - RNA, 19 nt, Artificial Sequence
  Description of Artificial Sequence: Synthetic oligonucleotide
  Antisense strand to SEQ ID NO: 524347
uuaugcaacguguaccgcu

SEQ ID NO: 524349 - RNA, 19 nt, Artificial Sequence
  Description of Artificial Sequence: Synthetic oligonucleotide
  Sense strand starting at position 2919 of SEQ ID NO: 317941
gagaacgggucuuucugua

SEQ ID NO: 524350 - RNA, 19 nt, Artificial Sequence
  Description of Artificial Sequence: Synthetic oligonucleotide
  Antisense strand to SEQ ID NO: 524349
uacagaaagacccguucuc

SEQ ID NO: 524351 - RNA, 19 nt, Artificial Sequence
  Description of Artificial Sequence: Synthetic oligonucleotide
  Sense strand starting at position 2969 of SEQ ID NO: 317941
uucgcagucagccaggaau

SEQ ID NO: 524352 - RNA, 19 nt, Artificial Sequence
  Description of Artificial Sequence: Synthetic oligonucleotide
  Antisense strand to SEQ ID NO: 524351
auuccuggcugacugcgaa

SEQ ID NO: 524353 - RNA, 19 nt, Artificial Sequence
  Description of Artificial Sequence: Synthetic oligonucleotide
  Sense strand starting at position 2972 of SEQ ID NO: 317941
gcagucagccaggaauaga

SEQ ID NO: 524354 - RNA, 19 nt, Artificial Sequence
  Description of Artificial Sequence: Synthetic oligonucleotide
  Antisense strand to SEQ ID NO: 524353
ucuauuccuggcugacugc

SEQ ID NO: 524355 - RNA, 19 nt, Artificial Sequence
  Description of Artificial Sequence: Synthetic oligonucleotide
  Sense strand starting at position 3081 of SEQ ID NO: 317941
gucagucugcgggaccaaa

SEQ ID NO: 524356 - RNA, 19 nt, Artificial Sequence
  Description of Artificial Sequence: Synthetic oligonucleotide
  Antisense strand to SEQ ID NO: 524355
uuuggucccgcagacugac

SEQ ID NO: 524357 - RNA, 19 nt, Artificial Sequence
  Description of Artificial Sequence: Synthetic oligonucleotide
  Sense strand starting at position 3111 of SEQ ID NO: 317941
gaguuuccagauugaaaug

SEQ ID NO: 524358 - RNA, 19 nt, Artificial Sequence
  Description of Artificial Sequence: Synthetic oligonucleotide
  Antisense strand to SEQ ID NO: 524357
cauuucaaucuggaaacuc

SEQ ID NO: 524359 - RNA, 19 nt, Artificial Sequence
  Description of Artificial Sequence: Synthetic oligonucleotide
  Sense strand starting at position 3274 of SEQ ID NO: 317941
guuagagacucugaaaugu

SEQ ID NO: 524360 - RNA, 19 nt, Artificial Sequence
  Description of Artificial Sequence: Synthetic oligonucleotide
  Antisense strand to SEQ ID NO: 524359
acauuucagagucucuaac

SEQ ID NO: 524361 - RNA, 19 nt, Artificial Sequence
  Description of Artificial Sequence: Synthetic oligonucleotide
  Sense strand starting at position 3308 of SEQ ID NO: 317941
ggugacaaggcggguaaau

SEQ ID NO: 524362 - RNA, 19 nt, Artificial Sequence
  Description of Artificial Sequence: Synthetic oligonucleotide
  Antisense strand to SEQ ID NO: 524361
auuuacccgccuugucacc

SEQ ID NO: 524363 - RNA, 19 nt, Artificial Sequence
  Description of Artificial Sequence: Synthetic oligonucleotide
  Sense strand starting at position 3464 of SEQ ID NO: 317941
ucaugaaaucucugugaag

SEQ ID NO: 524364 - RNA, 19 nt, Artificial Sequence
  Description of Artificial Sequence: Synthetic oligonucleotide
  Antisense strand to SEQ ID NO: 524363
cuucacagagauuucauga

SEQ ID NO: 524365 - RNA, 19 nt, Artificial Sequence
  Description of Artificial Sequence: Synthetic oligonucleotide
  Sense strand starting at position 3465 of SEQ ID NO: 317941
caugaaaucucugugaagu

SEQ ID NO: 524366 - RNA, 19 nt, Artificial Sequence
  Description of Artificial Sequence: Synthetic oligonucleotide
  Antisense strand to SEQ ID NO: 524365
acuucacagagauuucaug

SEQ ID NO: 524367 - RNA, 19 nt, Artificial Sequence
  Description of Artificial Sequence: Synthetic oligonucleotide
  Sense strand starting at position 3466 of SEQ ID NO: 317941
augaaaucucugugaaguc

SEQ ID NO: 524368 - RNA, 19 nt, Artificial Sequence
  Description of Artificial Sequence: Synthetic oligonucleotide
  Antisense strand to SEQ ID NO: 524367
gacuucacagagauuucau

SEQ ID NO: 524369 - RNA, 19 nt, Artificial Sequence
  Description of Artificial Sequence: Synthetic oligonucleotide
  Sense strand starting at position 3475 of SEQ ID NO: 317941
cugugaaguccuggucauu

SEQ ID NO: 524370 - RNA, 19 nt, Artificial Sequence
  Description of Artificial Sequence: Synthetic oligonucleotide
  Antisense strand to SEQ ID NO: 524369
aaugaccaggacuucacag

SEQ ID NO: 524371 - RNA, 19 nt, Artificial Sequence
  Description of Artificial Sequence: Synthetic oligonucleotide
  Sense strand starting at position 3492 of SEQ ID NO: 317941
uuucucauuuaguggaaua

SEQ ID NO: 524372 - RNA, 19 nt, Artificial Sequence
  Description of Artificial Sequence: Synthetic oligonucleotide
  Antisense strand to SEQ ID NO: 524371
uauuccacuaaaugagaaa

SEQ ID NO: 524373 - RNA, 19 nt, Artificial Sequence
  Description of Artificial Sequence: Synthetic oligonucleotide
  Sense strand starting at position 3502 of SEQ ID NO: 317941
aguggaauaucacaauuua

SEQ ID NO: 524374 - RNA, 19 nt, Artificial Sequence
  Description of Artificial Sequence: Synthetic oligonucleotide
  Antisense strand to SEQ ID NO: 524373
uaaauugugauauuccacu

SEQ ID NO: 524375 - RNA, 19 nt, Artificial Sequence
  Description of Artificial Sequence: Synthetic oligonucleotide
  Sense strand starting at position 3583 of SEQ ID NO: 317941
aagagcagugucugguuua

SEQ ID NO: 524376 - RNA, 19 nt, Artificial Sequence
  Description of Artificial Sequence: Synthetic oligonucleotide
  Antisense strand to SEQ ID NO: 524375
uaaaccagacacugcucuu

SEQ ID NO: 524377 - RNA, 19 nt, Artificial Sequence
  Description of Artificial Sequence: Synthetic oligonucleotide
  Sense strand starting at position 3584 of SEQ ID NO: 317941
agagcagugucugguuuau

SEQ ID NO: 524378 - RNA, 19 nt, Artificial Sequence
  Description of Artificial Sequence: Synthetic oligonucleotide
  Antisense strand to SEQ ID NO: 524377
auaaaccagacacugcucu

SEQ ID NO: 524379 - RNA, 19 nt, Artificial Sequence
  Description of Artificial Sequence: Synthetic oligonucleotide
  Sense strand starting at position 3586 of SEQ ID NO: 317941
agcagugucugguuuauuc

SEQ ID NO: 524380 - RNA, 19 nt, Artificial Sequence
  Description of Artificial Sequence: Synthetic oligonucleotide
  Antisense strand to SEQ ID NO: 524379
gaauaaaccagacacugcu

SEQ ID NO: 524381 - RNA, 19 nt, Artificial Sequence
  Description of Artificial Sequence: Synthetic oligonucleotide
  Sense strand starting at position 52 of SEQ ID NO: 317942
aucaguuucuuccuguaua

SEQ ID NO: 524382 - RNA, 19 nt, Artificial Sequence
  Description of Artificial Sequence: Synthetic oligonucleotide
  Antisense strand to SEQ ID NO: 524381
uauacaggaagaaacugau

SEQ ID NO: 524383 - RNA, 19 nt, Artificial Sequence
  Description of Artificial Sequence: Synthetic oligonucleotide
  Sense strand starting at position 87 of SEQ ID NO: 317942
aguauuuaucucgaagcgu

SEQ ID NO: 524384 - RNA, 19 nt, Artificial Sequence
  Description of Artificial Sequence: Synthetic oligonucleotide
  Antisense strand to SEQ ID NO: 524383
acgcuucgagauaaauacu

SEQ ID NO: 524385 - RNA, 19 nt, Artificial Sequence
  Description of Artificial Sequence: Synthetic oligonucleotide
  Sense strand starting at position 98 of SEQ ID NO: 317942
cgaagcguuaacuagauaa

SEQ ID NO: 524386 - RNA, 19 nt, Artificial Sequence
  Description of Artificial Sequence: Synthetic oligonucleotide
  Antisense strand to SEQ ID NO: 524385
uuaucuaguuaacgcuucg

SEQ ID NO: 524387 - RNA, 19 nt, Artificial Sequence
  Description of Artificial Sequence: Synthetic oligonucleotide
  Sense strand starting at position 102 of SEQ ID NO: 317942
gcguuaacuagauaaaugg

SEQ ID NO: 524388 - RNA, 19 nt, Artificial Sequence
  Description of Artificial Sequence: Synthetic oligonucleotide
  Antisense strand to SEQ ID NO: 524387
ccauuuaucuaguuaacgc

SEQ ID NO: 524389 - RNA, 19 nt, Artificial Sequence
  Description of Artificial Sequence: Synthetic oligonucleotide
  Sense strand starting at position 109 of SEQ ID NO: 317942
cuagauaaaugggauauua

SEQ ID NO: 524390 - RNA, 19 nt, Artificial Sequence
  Description of Artificial Sequence: Synthetic oligonucleotide
  Antisense strand to SEQ ID NO: 524389
uaauaucccauuuaucuag

SEQ ID NO: 524391 - RNA, 19 nt, Artificial Sequence
  Description of Artificial Sequence: Synthetic oligonucleotide
  Sense strand starting at position 158 of SEQ ID NO: 317942
augguaaaugcucaguaag

SEQ ID NO: 524392 - RNA, 19 nt, Artificial Sequence
  Description of Artificial Sequence: Synthetic oligonucleotide
  Antisense strand to SEQ ID NO: 524391
cuuacugagcauuuaccau

SEQ ID NO: 524393 - RNA, 19 nt, Artificial Sequence
  Description of Artificial Sequence: Synthetic oligonucleotide
  Sense strand starting at position 160 of SEQ ID NO: 317942
gguaaaugcucaguaaguu

SEQ ID NO: 524394 - RNA, 19 nt, Artificial Sequence
  Description of Artificial Sequence: Synthetic oligonucleotide
  Antisense strand to SEQ ID NO: 524393
aacuuacugagcauuuacc

SEQ ID NO: 524395 - RNA, 19 nt, Artificial Sequence
  Description of Artificial Sequence: Synthetic oligonucleotide
  Sense strand starting at position 161 of SEQ ID NO: 317942
guaaaugcucaguaaguua

SEQ ID NO: 524396 - RNA, 19 nt, Artificial Sequence
  Description of Artificial Sequence: Synthetic oligonucleotide
  Antisense strand to SEQ ID NO: 524395
uaacuuacugagcauuuac

SEQ ID NO: 524397 - RNA, 19 nt, Artificial Sequence
  Description of Artificial Sequence: Synthetic oligonucleotide
  Sense strand starting at position 174 of SEQ ID NO: 317942
aaguuaaccguuugacauu

SEQ ID NO: 524398 - RNA, 19 nt, Artificial Sequence
  Description of Artificial Sequence: Synthetic oligonucleotide
  Antisense strand to SEQ ID NO: 524397
aaugucaaacgguuaacuu

SEQ ID NO: 524399 - RNA, 19 nt, Artificial Sequence
  Description of Artificial Sequence: Synthetic oligonucleotide
  Sense strand starting at position 267 of SEQ ID NO: 317942
aguauaaauuccucgauua

SEQ ID NO: 524400 - RNA, 19 nt, Artificial Sequence
  Description of Artificial Sequence: Synthetic oligonucleotide
  Antisense strand to SEQ ID NO: 524399
uaaucgaggaauuuauacu

SEQ ID NO: 524401 - RNA, 19 nt, Artificial Sequence
  Description of Artificial Sequence: Synthetic oligonucleotide
  Sense strand starting at position 268 of SEQ ID NO: 317942
guauaaauuccucgauuaa

SEQ ID NO: 524402 - RNA, 19 nt, Artificial Sequence
  Description of Artificial Sequence: Synthetic oligonucleotide
  Antisense strand to SEQ ID NO: 524401
uuaaucgaggaauuuauac

SEQ ID NO: 524403 - RNA, 19 nt, Artificial Sequence
  Description of Artificial Sequence: Synthetic oligonucleotide
  Sense strand starting at position 302 of SEQ ID NO: 317942
acagaauaccugcgaaguu

SEQ ID NO: 524404 - RNA, 19 nt, Artificial Sequence
  Description of Artificial Sequence: Synthetic oligonucleotide
  Antisense strand to SEQ ID NO: 524403
aacuucgcagguauucugu

SEQ ID NO: 524405 - RNA, 19 nt, Artificial Sequence
  Description of Artificial Sequence: Synthetic oligonucleotide
  Sense strand starting at position 358 of SEQ ID NO: 317942
cccugaaugguggguuaua

SEQ ID NO: 524406 - RNA, 19 nt, Artificial Sequence
  Description of Artificial Sequence: Synthetic oligonucleotide
  Antisense strand to SEQ ID NO: 524405
uauaacccaccauucaggg

SEQ ID NO: 524407 - RNA, 19 nt, Artificial Sequence
  Description of Artificial Sequence: Synthetic oligonucleotide
  Sense strand starting at position 359 of SEQ ID NO: 317942
ccugaaugguggguuauag

SEQ ID NO: 524408 - RNA, 19 nt, Artificial Sequence
  Description of Artificial Sequence: Synthetic oligonucleotide
  Antisense strand to SEQ ID NO: 524407
cuauaacccaccauucagg

SEQ ID NO: 524409 - RNA, 19 nt, Artificial Sequence
  Description of Artificial Sequence: Synthetic oligonucleotide
  Sense strand starting at position 369 of SEQ ID NO: 317942
ggguuauagagucaagcua

SEQ ID NO: 524410 - RNA, 19 nt, Artificial Sequence
  Description of Artificial Sequence: Synthetic oligonucleotide
  Antisense strand to SEQ ID NO: 524409
uagcuugacucuauaaccc

SEQ ID NO: 524411 - RNA, 19 nt, Artificial Sequence
  Description of Artificial Sequence: Synthetic oligonucleotide
  Sense strand starting at position 1577 of SEQ ID NO: 317942
gagagaagguggcccauau

SEQ ID NO: 524412 - RNA, 19 nt, Artificial Sequence
  Description of Artificial Sequence: Synthetic oligonucleotide
  Antisense strand to SEQ ID NO: 524411
auaugggccaccuucucuc

SEQ ID NO: 524413 - RNA, 19 nt, Artificial Sequence
  Description of Artificial Sequence: Synthetic oligonucleotide
  Sense strand starting at position 2266 of SEQ ID NO: 317942
agcugugugacauccguuu

SEQ ID NO: 524414 - RNA, 19 nt, Artificial Sequence
  Description of Artificial Sequence: Synthetic oligonucleotide
  Antisense strand to SEQ ID NO: 524413
aaacggaugucacacagcu

SEQ ID NO: 524415 - RNA, 19 nt, Artificial Sequence
  Description of Artificial Sequence: Synthetic oligonucleotide
  Sense strand starting at position 2272 of SEQ ID NO: 317942
gugacauccguuuacacag

SEQ ID NO: 524416 - RNA, 19 nt, Artificial Sequence
  Description of Artificial Sequence: Synthetic oligonucleotide
  Antisense strand to SEQ ID NO: 524415
cuguguaaacggaugucac

SEQ ID NO: 524417 - RNA, 19 nt, Artificial Sequence
  Description of Artificial Sequence: Synthetic oligonucleotide
  Sense strand starting at position 2488 of SEQ ID NO: 317942
gggugaugcgcaccgaagu

SEQ ID NO: 524418 - RNA, 19 nt, Artificial Sequence
  Description of Artificial Sequence: Synthetic oligonucleotide
  Antisense strand to SEQ ID NO: 524417
acuucggugcgcaucaccc

SEQ ID NO: 524419 - RNA, 19 nt, Artificial Sequence
  Description of Artificial Sequence: Synthetic oligonucleotide
  Sense strand starting at position 2561 of SEQ ID NO: 317942
uuaauuguugcguacuacu

SEQ ID NO: 524420 - RNA, 19 nt, Artificial Sequence
  Description of Artificial Sequence: Synthetic oligonucleotide
  Antisense strand to SEQ ID NO: 524419
aguaguacgcaacaauuaa

SEQ ID NO: 524421 - RNA, 19 nt, Artificial Sequence
  Description of Artificial Sequence: Synthetic oligonucleotide
  Sense strand starting at position 2728 of SEQ ID NO: 317942
ucuagccgucuguuguaua

SEQ ID NO: 524422 - RNA, 19 nt, Artificial Sequence
  Description of Artificial Sequence: Synthetic oligonucleotide
  Antisense strand to SEQ ID NO: 524421
uauacaacagacggcuaga

SEQ ID NO: 524423 - RNA, 19 nt, Artificial Sequence
  Description of Artificial Sequence: Synthetic oligonucleotide
  Sense strand starting at position 2760 of SEQ ID NO: 317942
ggugcagugccugcuauau

SEQ ID NO: 524424 - RNA, 19 nt, Artificial Sequence
  Description of Artificial Sequence: Synthetic oligonucleotide
  Antisense strand to SEQ ID NO: 524423
auauagcaggcacugcacc

SEQ ID NO: 524425 - RNA, 19 nt, Artificial Sequence
  Description of Artificial Sequence: Synthetic oligonucleotide
  Sense strand starting at position 2782 of SEQ ID NO: 317942
aaacguuggugauccagau

SEQ ID NO: 524426 - RNA, 19 nt, Artificial Sequence
  Description of Artificial Sequence: Synthetic oligonucleotide
  Antisense strand to SEQ ID NO: 524425
aucuggaucaccaacguuu

SEQ ID NO: 524427 - RNA, 19 nt, Artificial Sequence
  Description of Artificial Sequence: Synthetic oligonucleotide
  Sense strand starting at position 2827 of SEQ ID NO: 317942
aguccuuuagaagguuuga

SEQ ID NO: 524428 - RNA, 19 nt, Artificial Sequence
  Description of Artificial Sequence: Synthetic oligonucleotide
  Antisense strand to SEQ ID NO: 524427
ucaaaccuucuaaaggacu

SEQ ID NO: 524429 - RNA, 19 nt, Artificial Sequence
  Description of Artificial Sequence: Synthetic oligonucleotide
  Sense strand starting at position 2843 of SEQ ID NO: 317942
ugacuauaucgaggcuaaa

SEQ ID NO: 524430 - RNA, 19 nt, Artificial Sequence
  Description of Artificial Sequence: Synthetic oligonucleotide
  Antisense strand to SEQ ID NO: 524429
uuuagccucgauauaguca

SEQ ID NO: 524431 - RNA, 19 nt, Artificial Sequence
  Description of Artificial Sequence: Synthetic oligonucleotide
  Sense strand starting at position 2953 of SEQ ID NO: 317942
ccacucuagugagagaaau

SEQ ID NO: 524432 - RNA, 19 nt, Artificial Sequence
  Description of Artificial Sequence: Synthetic oligonucleotide
  Antisense strand to SEQ ID NO: 524431
auuucucucacuagagugg

SEQ ID NO: 524433 - RNA, 19 nt, Artificial Sequence
  Description of Artificial Sequence: Synthetic oligonucleotide
  Sense strand starting at position 2984 of SEQ ID NO: 317942
uggaauggagagugcuuua

SEQ ID NO: 524434 - RNA, 19 nt, Artificial Sequence
  Description of Artificial Sequence: Synthetic oligonucleotide
  Antisense strand to SEQ ID NO: 524433
uaaagcacucuccauucca

SEQ ID NO: 524435 - RNA, 19 nt, Artificial Sequence
  Description of Artificial Sequence: Synthetic oligonucleotide
  Sense strand starting at position 2987 of SEQ ID NO: 317942
aauggagagugcuuuagga

SEQ ID NO: 524436 - RNA, 19 nt, Artificial Sequence
  Description of Artificial Sequence: Synthetic oligonucleotide
  Antisense strand to SEQ ID NO: 524435
uccuaaagcacucuccauu

SEQ ID NO: 524437 - RNA, 19 nt, Artificial Sequence
  Description of Artificial Sequence: Synthetic oligonucleotide
  Sense strand starting at position 2995 of SEQ ID NO: 317942
gugcuuuaggaaggauacu

SEQ ID NO: 524438 - RNA, 19 nt, Artificial Sequence
  Description of Artificial Sequence: Synthetic oligonucleotide
  Antisense strand to SEQ ID NO: 524437
aguauccuuccuaaagcac

SEQ ID NO: 524439 - RNA, 19 nt, Artificial Sequence
  Description of Artificial Sequence: Synthetic oligonucleotide
  Sense strand starting at position 3092 of SEQ ID NO: 317942
gugaaagaguuccuuucug

SEQ ID NO: 524440 - RNA, 19 nt, Artificial Sequence
  Description of Artificial Sequence: Synthetic oligonucleotide
  Antisense strand to SEQ ID NO: 524439
cagaaaggaacucuuucac

SEQ ID NO: 524441 - RNA, 19 nt, Artificial Sequence
  Description of Artificial Sequence: Synthetic oligonucleotide
  Sense strand starting at position 3162 of SEQ ID NO: 317942
agagaaguggcagguguuu

SEQ ID NO: 524442 - RNA, 19 nt, Artificial Sequence
  Description of Artificial Sequence: Synthetic oligonucleotide
  Antisense strand to SEQ ID NO: 524441
aaacaccugccacuucucu

SEQ ID NO: 524443 - RNA, 19 nt, Artificial Sequence
  Description of Artificial Sequence: Synthetic oligonucleotide
  Sense strand starting at position 3245 of SEQ ID NO: 317942
ggcccaguggcuuggagaa

SEQ ID NO: 524444 - RNA, 19 nt, Artificial Sequence
  Description of Artificial Sequence: Synthetic oligonucleotide
  Antisense strand to SEQ ID NO: 524443
uucuccaagccacugggcc

SEQ ID NO: 524445 - RNA, 19 nt, Artificial Sequence
  Description of Artificial Sequence: Synthetic oligonucleotide
  Sense strand starting at position 3419 of SEQ ID NO: 317942
aaugacaguuauguggaau

SEQ ID NO: 524446 - RNA, 19 nt, Artificial Sequence
  Description of Artificial Sequence: Synthetic oligonucleotide
  Antisense strand to SEQ ID NO: 524445
auuccacauaacugucauu

SEQ ID NO: 524447 - RNA, 19 nt, Artificial Sequence
  Description of Artificial Sequence: Synthetic oligonucleotide
  Sense strand starting at position 3420 of SEQ ID NO: 317942
augacaguuauguggaauu

SEQ ID NO: 524448 - RNA, 19 nt, Artificial Sequence
  Description of Artificial Sequence: Synthetic oligonucleotide
  Antisense strand to SEQ ID NO: 524447
aauuccacauaacugucau

SEQ ID NO: 524449 - RNA, 19 nt, Artificial Sequence
  Description of Artificial Sequence: Synthetic oligonucleotide
  Sense strand starting at position 3422 of SEQ ID NO: 317942
gacaguuauguggaauucu

SEQ ID NO: 524450 - RNA, 19 nt, Artificial Sequence
  Description of Artificial Sequence: Synthetic oligonucleotide
  Antisense strand to SEQ ID NO: 524449
agaauuccacauaacuguc

SEQ ID NO: 524451 - RNA, 19 nt, Artificial Sequence
  Description of Artificial Sequence: Synthetic oligonucleotide
  Sense strand starting at position 3493 of SEQ ID NO: 317942
aaaugcauugccugaacga

SEQ ID NO: 524452 - RNA, 19 nt, Artificial Sequence
  Description of Artificial Sequence: Synthetic oligonucleotide
  Antisense strand to SEQ ID NO: 524451
ucguucaggcaaugcauuu

SEQ ID NO: 524453 - RNA, 19 nt, Artificial Sequence
  Description of Artificial Sequence: Synthetic oligonucleotide
  Sense strand starting at position 3644 of SEQ ID NO: 317942
aggcaagaguauuauaaag

SEQ ID NO: 524454 - RNA, 19 nt, Artificial Sequence
  Description of Artificial Sequence: Synthetic oligonucleotide
  Antisense strand to SEQ ID NO: 524453
cuuuauaauacucuugccu

SEQ ID NO: 524455 - RNA, 19 nt, Artificial Sequence
  Description of Artificial Sequence: Synthetic oligonucleotide
  Sense strand starting at position 3708 of SEQ ID NO: 317942
uguggugguaccuaucauu

SEQ ID NO: 524456 - RNA, 19 nt, Artificial Sequence
  Description of Artificial Sequence: Synthetic oligonucleotide
  Antisense strand to SEQ ID NO: 524455
aaugauagguaccaccaca

SEQ ID NO: 524457 - RNA, 19 nt, Artificial Sequence
  Description of Artificial Sequence: Synthetic oligonucleotide
  Sense strand starting at position 3748 of SEQ ID NO: 317942
aggcgugaggaucgcuuaa

SEQ ID NO: 524458 - RNA, 19 nt, Artificial Sequence
  Description of Artificial Sequence: Synthetic oligonucleotide
  Antisense strand to SEQ ID NO: 524457
uuaagcgauccucacgccu

SEQ ID NO: 524459 - RNA, 19 nt, Artificial Sequence
  Description of Artificial Sequence: Synthetic oligonucleotide
  Sense strand starting at position 3772 of SEQ ID NO: 317942
gcuuguuaugauuaugcau

SEQ ID NO: 524460 - RNA, 19 nt, Artificial Sequence
  Description of Artificial Sequence: Synthetic oligonucleotide
  Antisense strand to SEQ ID NO: 524459
augcauaaucauaacaagc

SEQ ID NO: 524461 - RNA, 19 nt, Artificial Sequence
  Description of Artificial Sequence: Synthetic oligonucleotide
  Sense strand starting at position 29 of SEQ ID NO: 317943
uuucuaauuugguagauca

SEQ ID NO: 524462 - RNA, 19 nt, Artificial Sequence
  Description of Artificial Sequence: Synthetic oligonucleotide
  Antisense strand to SEQ ID NO: 524461
ugaucuaccaaauuagaaa

SEQ ID NO: 524463 - RNA, 19 nt, Artificial Sequence
  Description of Artificial Sequence: Synthetic oligonucleotide
  Sense strand starting at position 83 of SEQ ID NO: 317943
aagagauugccacaguauu

SEQ ID NO: 524464 - RNA, 19 nt, Artificial Sequence
  Description of Artificial Sequence: Synthetic oligonucleotide
  Antisense strand to SEQ ID NO: 524463
aauacuguggcaaucucuu

SEQ ID NO: 524465 - RNA, 19 nt, Artificial Sequence
  Description of Artificial Sequence: Synthetic oligonucleotide
  Sense strand starting at position 93 of SEQ ID NO: 317943
cacaguauucuugagggca

SEQ ID NO: 524466 - RNA, 19 nt, Artificial Sequence
  Description of Artificial Sequence: Synthetic oligonucleotide
  Antisense strand to SEQ ID NO: 524465
ugcccucaagaauacugug

SEQ ID NO: 524467 - RNA, 19 nt, Artificial Sequence
  Description of Artificial Sequence: Synthetic oligonucleotide
  Sense strand starting at position 96 of SEQ ID NO: 317943
aguauucuugagggcaaga

SEQ ID NO: 524468 - RNA, 19 nt, Artificial Sequence
  Description of Artificial Sequence: Synthetic oligonucleotide
  Antisense strand to SEQ ID NO: 524467
ucuugcccucaagaauacu

SEQ ID NO: 524469 - RNA, 19 nt, Artificial Sequence
  Description of Artificial Sequence: Synthetic oligonucleotide
  Sense strand starting at position 199 of SEQ ID NO: 317943
ucacuagguucuuccagau

SEQ ID NO: 524470 - RNA, 19 nt, Artificial Sequence
  Description of Artificial Sequence: Synthetic oligonucleotide
  Antisense strand to SEQ ID NO: 524469
aucuggaagaaccuaguga

SEQ ID NO: 524471 - RNA, 19 nt, Artificial Sequence
  Description of Artificial Sequence: Synthetic oligonucleotide
  Sense strand starting at position 203 of SEQ ID NO: 317943
uagguucuuccagauuggu

SEQ ID NO: 524472 - RNA, 19 nt, Artificial Sequence
  Description of Artificial Sequence: Synthetic oligonucleotide
  Antisense strand to SEQ ID NO: 524471
accaaucuggaagaaccua

SEQ ID NO: 524473 - RNA, 19 nt, Artificial Sequence
  Description of Artificial Sequence: Synthetic oligonucleotide
  Sense strand starting at position 206 of SEQ ID NO: 317943
guucuuccagauuggugaa

SEQ ID NO: 524474 - RNA, 19 nt, Artificial Sequence
  Description of Artificial Sequence: Synthetic oligonucleotide
  Antisense strand to SEQ ID NO: 524473
uucaccaaucuggaagaac

SEQ ID NO: 524475 - RNA, 19 nt, Artificial Sequence
  Description of Artificial Sequence: Synthetic oligonucleotide
  Sense strand starting at position 208 of SEQ ID NO: 317943
ucuuccagauuggugaaau

SEQ ID NO: 524476 - RNA, 19 nt, Artificial Sequence
  Description of Artificial Sequence: Synthetic oligonucleotide
  Antisense strand to SEQ ID NO: 524475
auuucaccaaucuggaaga

SEQ ID NO: 524477 - RNA, 19 nt, Artificial Sequence
  Description of Artificial Sequence: Synthetic oligonucleotide
  Sense strand starting at position 627 of SEQ ID NO: 317943
aacauaauuuguuggagac

SEQ ID NO: 524478 - RNA, 19 nt, Artificial Sequence
  Description of Artificial Sequence: Synthetic oligonucleotide
  Antisense strand to SEQ ID NO: 524477
gucuccaacaaauuauguu

SEQ ID NO: 524479 - RNA, 19 nt, Artificial Sequence
  Description of Artificial Sequence: Synthetic oligonucleotide
  Sense strand starting at position 690 of SEQ ID NO: 317943
guucccuucuaagucuaaa

SEQ ID NO: 524480 - RNA, 19 nt, Artificial Sequence
  Description of Artificial Sequence: Synthetic oligonucleotide
  Antisense strand to SEQ ID NO: 524479
uuuagacuuagaagggaac

SEQ ID NO: 524481 - RNA, 19 nt, Artificial Sequence
  Description of Artificial Sequence: Synthetic oligonucleotide
  Sense strand starting at position 841 of SEQ ID NO: 317943
uugucacugguuuagcaau

SEQ ID NO: 524482 - RNA, 19 nt, Artificial Sequence
  Description of Artificial Sequence: Synthetic oligonucleotide
  Antisense strand to SEQ ID NO: 524481
auugcuaaaccagugacaa

SEQ ID NO: 524483 - RNA, 19 nt, Artificial Sequence
  Description of Artificial Sequence: Synthetic oligonucleotide
  Sense strand starting at position 843 of SEQ ID NO: 317943
gucacugguuuagcaauuu

SEQ ID NO: 524484 - RNA, 19 nt, Artificial Sequence
  Description of Artificial Sequence: Synthetic oligonucleotide
  Antisense strand to SEQ ID NO: 524483
aaauugcuaaaccagugac

SEQ ID NO: 524485 - RNA, 19 nt, Artificial Sequence
  Description of Artificial Sequence: Synthetic oligonucleotide
  Sense strand starting at position 1230 of SEQ ID NO: 317943
gaacacagguguuuccaga

SEQ ID NO: 524486 - RNA, 19 nt, Artificial Sequence
  Description of Artificial Sequence: Synthetic oligonucleotide
  Antisense strand to SEQ ID NO: 524485
ucuggaaacaccuguguuc

SEQ ID NO: 524487 - RNA, 19 nt, Artificial Sequence
  Description of Artificial Sequence: Synthetic oligonucleotide
  Sense strand starting at position 1246 of SEQ ID NO: 317943
agaaaucauuucugcaaga

SEQ ID NO: 524488 - RNA, 19 nt, Artificial Sequence
  Description of Artificial Sequence: Synthetic oligonucleotide
  Antisense strand to SEQ ID NO: 524487
ucuugcagaaaugauuucu

SEQ ID NO: 524489 - RNA, 19 nt, Artificial Sequence
  Description of Artificial Sequence: Synthetic oligonucleotide
  Sense strand starting at position 1420 of SEQ ID NO: 317943
uauaaacuccggugaacuu

SEQ ID NO: 524490 - RNA, 19 nt, Artificial Sequence
  Description of Artificial Sequence: Synthetic oligonucleotide
  Antisense strand to SEQ ID NO: 524489
aaguucaccggaguuuaua

SEQ ID NO: 524491 - RNA, 19 nt, Artificial Sequence
  Description of Artificial Sequence: Synthetic oligonucleotide
  Sense strand starting at position 1421 of SEQ ID NO: 317943
auaaacuccggugaacuua

SEQ ID NO: 524492 - RNA, 19 nt, Artificial Sequence
  Description of Artificial Sequence: Synthetic oligonucleotide
  Antisense strand to SEQ ID NO: 524491
uaaguucaccggaguuuau

SEQ ID NO: 524493 - RNA, 19 nt, Artificial Sequence
  Description of Artificial Sequence: Synthetic oligonucleotide
  Sense strand starting at position 3047 of SEQ ID NO: 317943
uaagaaauguuugucuaag

SEQ ID NO: 524494 - RNA, 19 nt, Artificial Sequence
  Description of Artificial Sequence: Synthetic oligonucleotide
  Antisense strand to SEQ ID NO: 524493
cuuagacaaacauuucuua

SEQ ID NO: 524495 - RNA, 19 nt, Artificial Sequence
  Description of Artificial Sequence: Synthetic oligonucleotide
  Sense strand starting at position 3048 of SEQ ID NO: 317943
aagaaauguuugucuaagu

SEQ ID NO: 524496 - RNA, 19 nt, Artificial Sequence
  Description of Artificial Sequence: Synthetic oligonucleotide
  Antisense strand to SEQ ID NO: 524495
acuuagacaaacauuucuu

SEQ ID NO: 524497 - RNA, 19 nt, Artificial Sequence
  Description of Artificial Sequence: Synthetic oligonucleotide
  Sense strand starting at position 3049 of SEQ ID NO: 317943
agaaauguuugucuaaguc

SEQ ID NO: 524498 - RNA, 19 nt, Artificial Sequence
  Description of Artificial Sequence: Synthetic oligonucleotide
  Antisense strand to SEQ ID NO: 524497
gacuuagacaaacauuucu

SEQ ID NO: 524499 - RNA, 19 nt, Artificial Sequence
  Description of Artificial Sequence: Synthetic oligonucleotide
  Sense strand starting at position 3094 of SEQ ID NO: 317943
uucuacaugguuuauagau

SEQ ID NO: 524500 - RNA, 19 nt, Artificial Sequence
  Description of Artificial Sequence: Synthetic oligonucleotide
  Antisense strand to SEQ ID NO: 524499
aucuauaaaccauguagaa

SEQ ID NO: 524501 - RNA, 19 nt, Artificial Sequence
  Description of Artificial Sequence: Synthetic oligonucleotide
  Sense strand starting at position 3096 of SEQ ID NO: 317943
cuacaugguuuauagauuu

SEQ ID NO: 524502 - RNA, 19 nt, Artificial Sequence
  Description of Artificial Sequence: Synthetic oligonucleotide
  Antisense strand to SEQ ID NO: 524501
aaaucuauaaaccauguag

SEQ ID NO: 524503 - RNA, 19 nt, Artificial Sequence
  Description of Artificial Sequence: Synthetic oligonucleotide
  Sense strand starting at position 3155 of SEQ ID NO: 317943
uuguguaugcugcaagaua

SEQ ID NO: 524504 - RNA, 19 nt, Artificial Sequence
  Description of Artificial Sequence: Synthetic oligonucleotide
  Antisense strand to SEQ ID NO: 524503
uaucuugcagcauacacaa

SEQ ID NO: 524505 - RNA, 19 nt, Artificial Sequence
  Description of Artificial Sequence: Synthetic oligonucleotide
  Sense strand starting at position 3170 of SEQ ID NO: 317943
gauagaagucaagguuuau

SEQ ID NO: 524506 - RNA, 19 nt, Artificial Sequence
  Description of Artificial Sequence: Synthetic oligonucleotide
  Antisense strand to SEQ ID NO: 524505
auaaaccuugacuucuauc

SEQ ID NO: 524507 - RNA, 19 nt, Artificial Sequence
  Description of Artificial Sequence: Synthetic oligonucleotide
  Sense strand starting at position 3268 of SEQ ID NO: 317943
uuugcacuuaugugggaaa

SEQ ID NO: 524508 - RNA, 19 nt, Artificial Sequence
  Description of Artificial Sequence: Synthetic oligonucleotide
  Antisense strand to SEQ ID NO: 524507
uuucccacauaagugcaaa

SEQ ID NO: 524509 - RNA, 19 nt, Artificial Sequence
  Description of Artificial Sequence: Synthetic oligonucleotide
  Sense strand starting at position 3270 of SEQ ID NO: 317943
ugcacuuaugugggaaauc

SEQ ID NO: 524510 - RNA, 19 nt, Artificial Sequence
  Description of Artificial Sequence: Synthetic oligonucleotide
  Antisense strand to SEQ ID NO: 524509
gauuucccacauaagugca

SEQ ID NO: 524511 - RNA, 19 nt, Artificial Sequence
  Description of Artificial Sequence: Synthetic oligonucleotide
  Sense strand starting at position 3280 of SEQ ID NO: 317943
ugggaaaucaguuguccau

SEQ ID NO: 524512 - RNA, 19 nt, Artificial Sequence
  Description of Artificial Sequence: Synthetic oligonucleotide
  Antisense strand to SEQ ID NO: 524511
auggacaacugauuuccca

SEQ ID NO: 524513 - RNA, 19 nt, Artificial Sequence
  Description of Artificial Sequence: Synthetic oligonucleotide
  Sense strand starting at position 3282 of SEQ ID NO: 317943
ggaaaucaguuguccaugu

SEQ ID NO: 524514 - RNA, 19 nt, Artificial Sequence
  Description of Artificial Sequence: Synthetic oligonucleotide
  Antisense strand to SEQ ID NO: 524513
acauggacaacugauuucc

SEQ ID NO: 524515 - RNA, 19 nt, Artificial Sequence
  Description of Artificial Sequence: Synthetic oligonucleotide
  Sense strand starting at position 3283 of SEQ ID NO: 317943
gaaaucaguuguccaugua

SEQ ID NO: 524516 - RNA, 19 nt, Artificial Sequence
  Description of Artificial Sequence: Synthetic oligonucleotide
  Antisense strand to SEQ ID NO: 524515
uacauggacaacugauuuc

SEQ ID NO: 524517 - RNA, 19 nt, Artificial Sequence
  Description of Artificial Sequence: Synthetic oligonucleotide
  Sense strand starting at position 3326 of SEQ ID NO: 317943
cuguucuauuucguuaaua

SEQ ID NO: 524518 - RNA, 19 nt, Artificial Sequence
  Description of Artificial Sequence: Synthetic oligonucleotide
  Antisense strand to SEQ ID NO: 524517
uauuaacgaaauagaacag

SEQ ID NO: 524519 - RNA, 19 nt, Artificial Sequence
  Description of Artificial Sequence: Synthetic oligonucleotide
  Sense strand starting at position 3468 of SEQ ID NO: 317943
uugucuauucuagauucuu

SEQ ID NO: 524520 - RNA, 19 nt, Artificial Sequence
  Description of Artificial Sequence: Synthetic oligonucleotide
  Antisense strand to SEQ ID NO: 524519
aagaaucuagaauagacaa

SEQ ID NO: 524521 - RNA, 19 nt, Artificial Sequence
  Description of Artificial Sequence: Synthetic oligonucleotide
  Sense strand starting at position 3507 of SEQ ID NO: 317943
uuagaacaagcuugucaau

SEQ ID NO: 524522 - RNA, 19 nt, Artificial Sequence
  Description of Artificial Sequence: Synthetic oligonucleotide
  Antisense strand to SEQ ID NO: 524521
auugacaagcuuguucuaa

SEQ ID NO: 524523 - RNA, 19 nt, Artificial Sequence
  Description of Artificial Sequence: Synthetic oligonucleotide
  Sense strand starting at position 3509 of SEQ ID NO: 317943
agaacaagcuugucaauau

SEQ ID NO: 524524 - RNA, 19 nt, Artificial Sequence
  Description of Artificial Sequence: Synthetic oligonucleotide
  Antisense strand to SEQ ID NO: 524523
auauugacaagcuuguucu

SEQ ID NO: 524525 - RNA, 19 nt, Artificial Sequence
  Description of Artificial Sequence: Synthetic oligonucleotide
  Sense strand starting at position 3552 of SEQ ID NO: 317943
acugaagauugccuugaau

SEQ ID NO: 524526 - RNA, 19 nt, Artificial Sequence
  Description of Artificial Sequence: Synthetic oligonucleotide
  Antisense strand to SEQ ID NO: 524525
auucaaggcaaucuucagu

SEQ ID NO: 524527 - RNA, 19 nt, Artificial Sequence
  Description of Artificial Sequence: Synthetic oligonucleotide
  Sense strand starting at position 3554 of SEQ ID NO: 317943
ugaagauugccuugaaucu

SEQ ID NO: 524528 - RNA, 19 nt, Artificial Sequence
  Description of Artificial Sequence: Synthetic oligonucleotide
  Antisense strand to SEQ ID NO: 524527
agauucaaggcaaucuuca

SEQ ID NO: 524529 - RNA, 19 nt, Artificial Sequence
  Description of Artificial Sequence: Synthetic oligonucleotide
  Sense strand starting at position 3584 of SEQ ID NO: 317943
uagggaguauuggcaucuu

SEQ ID NO: 524530 - RNA, 19 nt, Artificial Sequence
  Description of Artificial Sequence: Synthetic oligonucleotide
  Antisense strand to SEQ ID NO: 524529
aagaugccaauacucccua

SEQ ID NO: 524531 - RNA, 19 nt, Artificial Sequence
  Description of Artificial Sequence: Synthetic oligonucleotide
  Sense strand starting at position 3610 of SEQ ID NO: 317943
uugugucuucgauaaacau

SEQ ID NO: 524532 - RNA, 19 nt, Artificial Sequence
  Description of Artificial Sequence: Synthetic oligonucleotide
  Antisense strand to SEQ ID NO: 524531
auguuuaucgaagacacaa

SEQ ID NO: 524533 - RNA, 19 nt, Artificial Sequence
  Description of Artificial Sequence: Synthetic oligonucleotide
  Sense strand starting at position 3625 of SEQ ID NO: 317943
acaugauugauauagcgcu

SEQ ID NO: 524534 - RNA, 19 nt, Artificial Sequence
  Description of Artificial Sequence: Synthetic oligonucleotide
  Antisense strand to SEQ ID NO: 524533
agcgcuauaucaaucaugu

SEQ ID NO: 524535 - RNA, 19 nt, Artificial Sequence
  Description of Artificial Sequence: Synthetic oligonucleotide
  Sense strand starting at position 3723 of SEQ ID NO: 317943
ggacuauucuuagauauuu

SEQ ID NO: 524536 - RNA, 19 nt, Artificial Sequence
  Description of Artificial Sequence: Synthetic oligonucleotide
  Antisense strand to SEQ ID NO: 524535
aaauaucuaagaauagucc

SEQ ID NO: 524537 - RNA, 19 nt, Artificial Sequence
  Description of Artificial Sequence: Synthetic oligonucleotide
  Sense strand starting at position 3795 of SEQ ID NO: 317943
auuuguuuguugccaguau

SEQ ID NO: 524538 - RNA, 19 nt, Artificial Sequence
  Description of Artificial Sequence: Synthetic oligonucleotide
  Antisense strand to SEQ ID NO: 524537
auacuggcaacaaacaaau

SEQ ID NO: 524539 - RNA, 19 nt, Artificial Sequence
  Description of Artificial Sequence: Synthetic oligonucleotide
  Sense strand starting at position 3799 of SEQ ID NO: 317943
guuuguugccaguaugaag

SEQ ID NO: 524540 - RNA, 19 nt, Artificial Sequence
  Description of Artificial Sequence: Synthetic oligonucleotide
  Antisense strand to SEQ ID NO: 524539
cuucauacuggcaacaaac

SEQ ID NO: 524541 - RNA, 19 nt, Artificial Sequence
  Description of Artificial Sequence: Synthetic oligonucleotide
  Sense strand starting at position 316 of SEQ ID NO: 317944
gguacauaagccuaagguu

SEQ ID NO: 524542 - RNA, 19 nt, Artificial Sequence
  Description of Artificial Sequence: Synthetic oligonucleotide
  Antisense strand to SEQ ID NO: 524541
aaccuuaggcuuauguacc

SEQ ID NO: 524543 - RNA, 19 nt, Artificial Sequence
  Description of Artificial Sequence: Synthetic oligonucleotide
  Sense strand starting at position 391 of SEQ ID NO: 317944
aguacagaguacuucucaa

SEQ ID NO: 524544 - RNA, 19 nt, Artificial Sequence
  Description of Artificial Sequence: Synthetic oligonucleotide
  Antisense strand to SEQ ID NO: 524543
uugagaaguacucuguacu

SEQ ID NO: 524545 - RNA, 19 nt, Artificial Sequence
  Description of Artificial Sequence: Synthetic oligonucleotide
  Sense strand starting at position 455 of SEQ ID NO: 317944
uuaugcacucauggauaau

SEQ ID NO: 524546 - RNA, 19 nt, Artificial Sequence
  Description of Artificial Sequence: Synthetic oligonucleotide
  Antisense strand to SEQ ID NO: 524545
auuauccaugagugcauaa

SEQ ID NO: 524547 - RNA, 19 nt, Artificial Sequence
  Description of Artificial Sequence: Synthetic oligonucleotide
  Sense strand starting at position 475 of SEQ ID NO: 317944
uccuccuuauguuugagau

SEQ ID NO: 524548 - RNA, 19 nt, Artificial Sequence
  Description of Artificial Sequence: Synthetic oligonucleotide
  Antisense strand to SEQ ID NO: 524547
aucucaaacauaaggagga

SEQ ID NO: 524549 - RNA, 19 nt, Artificial Sequence
  Description of Artificial Sequence: Synthetic oligonucleotide
  Sense strand starting at position 476 of SEQ ID NO: 317944
ccuccuuauguuugagaua

SEQ ID NO: 524550 - RNA, 19 nt, Artificial Sequence
  Description of Artificial Sequence: Synthetic oligonucleotide
  Antisense strand to SEQ ID NO: 524549
uaucucaaacauaaggagg

SEQ ID NO: 524551 - RNA, 19 nt, Artificial Sequence
  Description of Artificial Sequence: Synthetic oligonucleotide
  Sense strand starting at position 615 of SEQ ID NO: 317944
gaaagauggcacugccaca

SEQ ID NO: 524552 - RNA, 19 nt, Artificial Sequence
  Description of Artificial Sequence: Synthetic oligonucleotide
  Antisense strand to SEQ ID NO: 524551
uguggcagugccaucuuuc

SEQ ID NO: 524553 - RNA, 19 nt, Artificial Sequence
  Description of Artificial Sequence: Synthetic oligonucleotide
  Sense strand starting at position 641 of SEQ ID NO: 317944
ccagcagguuauuugcaau

SEQ ID NO: 524554 - RNA, 19 nt, Artificial Sequence
  Description of Artificial Sequence: Synthetic oligonucleotide
  Antisense strand to SEQ ID NO: 524553
auugcaaauaaccugcugg

SEQ ID NO: 524555 - RNA, 19 nt, Artificial Sequence
  Description of Artificial Sequence: Synthetic oligonucleotide
  Sense strand starting at position 654 of SEQ ID NO: 317944
ugcaaucuaccauggaaua

SEQ ID NO: 524556 - RNA, 19 nt, Artificial Sequence
  Description of Artificial Sequence: Synthetic oligonucleotide
  Antisense strand to SEQ ID NO: 524555
uauuccaugguagauugca

SEQ ID NO: 524557 - RNA, 19 nt, Artificial Sequence
  Description of Artificial Sequence: Synthetic oligonucleotide
  Sense strand starting at position 655 of SEQ ID NO: 317944
gcaaucuaccauggaauaa

SEQ ID NO: 524558 - RNA, 19 nt, Artificial Sequence
  Description of Artificial Sequence: Synthetic oligonucleotide
  Antisense strand to SEQ ID NO: 524557
uuauuccaugguagauugc

SEQ ID NO: 524559 - RNA, 19 nt, Artificial Sequence
  Description of Artificial Sequence: Synthetic oligonucleotide
  Sense strand starting at position 759 of SEQ ID NO: 317944
aggucauucuauuucuguu

SEQ ID NO: 524560 - RNA, 19 nt, Artificial Sequence
  Description of Artificial Sequence: Synthetic oligonucleotide
  Antisense strand to SEQ ID NO: 524559
aacagaaauagaaugaccu

SEQ ID NO: 524561 - RNA, 19 nt, Artificial Sequence
  Description of Artificial Sequence: Synthetic oligonucleotide
  Sense strand starting at position 801 of SEQ ID NO: 317944
cucgaugcauuugaagaaa

SEQ ID NO: 524562 - RNA, 19 nt, Artificial Sequence
  Description of Artificial Sequence: Synthetic oligonucleotide
  Antisense strand to SEQ ID NO: 524561
uuucuucaaaugcaucgag

SEQ ID NO: 524563 - RNA, 19 nt, Artificial Sequence
  Description of Artificial Sequence: Synthetic oligonucleotide
  Sense strand starting at position 882 of SEQ ID NO: 317944
uccuauugguccucuugaa

SEQ ID NO: 524564 - RNA, 19 nt, Artificial Sequence
  Description of Artificial Sequence: Synthetic oligonucleotide
  Antisense strand to SEQ ID NO: 524563
uucaagaggaccaauagga

SEQ ID NO: 524565 - RNA, 19 nt, Artificial Sequence
  Description of Artificial Sequence: Synthetic oligonucleotide
  Sense strand starting at position 951 of SEQ ID NO: 317944
aucugaucccagugaaauu

SEQ ID NO: 524566 - RNA, 19 nt, Artificial Sequence
  Description of Artificial Sequence: Synthetic oligonucleotide
  Antisense strand to SEQ ID NO: 524565
aauuucacugggaucagau

SEQ ID NO: 524567 - RNA, 19 nt, Artificial Sequence
  Description of Artificial Sequence: Synthetic oligonucleotide
  Sense strand starting at position 1079 of SEQ ID NO: 317944
cagacaggaagucgucaua

SEQ ID NO: 524568 - RNA, 19 nt, Artificial Sequence
  Description of Artificial Sequence: Synthetic oligonucleotide
  Antisense strand to SEQ ID NO: 524567
uaugacgacuuccugucug

SEQ ID NO: 524569 - RNA, 19 nt, Artificial Sequence
  Description of Artificial Sequence: Synthetic oligonucleotide
  Sense strand starting at position 1082 of SEQ ID NO: 317944
acaggaagucgucauauac

SEQ ID NO: 524570 - RNA, 19 nt, Artificial Sequence
  Description of Artificial Sequence: Synthetic oligonucleotide
  Antisense strand to SEQ ID NO: 524569
guauaugacgacuuccugu

SEQ ID NO: 524571 - RNA, 19 nt, Artificial Sequence
  Description of Artificial Sequence: Synthetic oligonucleotide
  Sense strand starting at position 1116 of SEQ ID NO: 317944
acgagaaugcugggauaga

SEQ ID NO: 524572 - RNA, 19 nt, Artificial Sequence
  Description of Artificial Sequence: Synthetic oligonucleotide
  Antisense strand to SEQ ID NO: 524571
ucuaucccagcauucucgu

SEQ ID NO: 524573 - RNA, 19 nt, Artificial Sequence
  Description of Artificial Sequence: Synthetic oligonucleotide
  Sense strand starting at position 1407 of SEQ ID NO: 317944
uggcccagauucuccaaua

SEQ ID NO: 524574 - RNA, 19 nt, Artificial Sequence
  Description of Artificial Sequence: Synthetic oligonucleotide
  Antisense strand to SEQ ID NO: 524573
uauuggagaaucugggcca

SEQ ID NO: 524575 - RNA, 19 nt, Artificial Sequence
  Description of Artificial Sequence: Synthetic oligonucleotide
  Sense strand starting at position 1408 of SEQ ID NO: 317944
ggcccagauucuccaauaa

SEQ ID NO: 524576 - RNA, 19 nt, Artificial Sequence
  Description of Artificial Sequence: Synthetic oligonucleotide
  Antisense strand to SEQ ID NO: 524575
uuauuggagaaucugggcc

SEQ ID NO: 524577 - RNA, 19 nt, Artificial Sequence
  Description of Artificial Sequence: Synthetic oligonucleotide
  Sense strand starting at position 1634 of SEQ ID NO: 317944
gguucuuguggauaugguu

SEQ ID NO: 524578 - RNA, 19 nt, Artificial Sequence
  Description of Artificial Sequence: Synthetic oligonucleotide
  Antisense strand to SEQ ID NO: 524577
aaccauauccacaagaacc

SEQ ID NO: 524579 - RNA, 19 nt, Artificial Sequence
  Description of Artificial Sequence: Synthetic oligonucleotide
  Sense strand starting at position 1663 of SEQ ID NO: 317944
cgguuucugcuguaauuuc

SEQ ID NO: 524580 - RNA, 19 nt, Artificial Sequence
  Description of Artificial Sequence: Synthetic oligonucleotide
  Antisense strand to SEQ ID NO: 524579
gaaauuacagcagaaaccg

SEQ ID NO: 524581 - RNA, 19 nt, Artificial Sequence
  Description of Artificial Sequence: Synthetic oligonucleotide
  Sense strand starting at position 2068 of SEQ ID NO: 317944
guagguggaguuuaaaguu

SEQ ID NO: 524582 - RNA, 19 nt, Artificial Sequence
  Description of Artificial Sequence: Synthetic oligonucleotide
  Antisense strand to SEQ ID NO: 524581
aacuuuaaacuccaccuac

SEQ ID NO: 524583 - RNA, 19 nt, Artificial Sequence
  Description of Artificial Sequence: Synthetic oligonucleotide
  Sense strand starting at position 2076 of SEQ ID NO: 317944
aguuuaaaguuucccuaac

SEQ ID NO: 524584 - RNA, 19 nt, Artificial Sequence
  Description of Artificial Sequence: Synthetic oligonucleotide
  Antisense strand to SEQ ID NO: 524583
guuagggaaacuuuaaacu

SEQ ID NO: 524585 - RNA, 19 nt, Artificial Sequence
  Description of Artificial Sequence: Synthetic oligonucleotide
  Sense strand starting at position 2077 of SEQ ID NO: 317944
guuuaaaguuucccuaacu

SEQ ID NO: 524586 - RNA, 19 nt, Artificial Sequence
  Description of Artificial Sequence: Synthetic oligonucleotide
  Antisense strand to SEQ ID NO: 524585
aguuagggaaacuuuaaac

SEQ ID NO: 524587 - RNA, 19 nt, Artificial Sequence
  Description of Artificial Sequence: Synthetic oligonucleotide
  Sense strand starting at position 2116 of SEQ ID NO: 317944
gcaauauuucugugcaauu

SEQ ID NO: 524588 - RNA, 19 nt, Artificial Sequence
  Description of Artificial Sequence: Synthetic oligonucleotide
  Antisense strand to SEQ ID NO: 524587
aauugcacagaaauauugc

SEQ ID NO: 524589 - RNA, 19 nt, Artificial Sequence
  Description of Artificial Sequence: Synthetic oligonucleotide
  Sense strand starting at position 2446 of SEQ ID NO: 317944
aggcauaugugcucagaaa

SEQ ID NO: 524590 - RNA, 19 nt, Artificial Sequence
  Description of Artificial Sequence: Synthetic oligonucleotide
  Antisense strand to SEQ ID NO: 524589
uuucugagcacauaugccu

SEQ ID NO: 524591 - RNA, 19 nt, Artificial Sequence
  Description of Artificial Sequence: Synthetic oligonucleotide
  Sense strand starting at position 2447 of SEQ ID NO: 317944
ggcauaugugcucagaaac

SEQ ID NO: 524592 - RNA, 19 nt, Artificial Sequence
  Description of Artificial Sequence: Synthetic oligonucleotide
  Antisense strand to SEQ ID NO: 524591
guuucugagcacauaugcc

SEQ ID NO: 524593 - RNA, 19 nt, Artificial Sequence
  Description of Artificial Sequence: Synthetic oligonucleotide
  Sense strand starting at position 2480 of SEQ ID NO: 317944
acuugagccuucccaaaga

SEQ ID NO: 524594 - RNA, 19 nt, Artificial Sequence
  Description of Artificial Sequence: Synthetic oligonucleotide
  Antisense strand to SEQ ID NO: 524593
ucuuugggaaggcucaagu

SEQ ID NO: 524595 - RNA, 19 nt, Artificial Sequence
  Description of Artificial Sequence: Synthetic oligonucleotide
  Sense strand starting at position 2503 of SEQ ID NO: 317944
cugggaaguugcuuaaaga

SEQ ID NO: 524596 - RNA, 19 nt, Artificial Sequence
  Description of Artificial Sequence: Synthetic oligonucleotide
  Antisense strand to SEQ ID NO: 524595
ucuuuaagcaacuucccag

SEQ ID NO: 524597 - RNA, 19 nt, Artificial Sequence
  Description of Artificial Sequence: Synthetic oligonucleotide
  Sense strand starting at position 3547 of SEQ ID NO: 317944
uuuggaaucccuugaguuu

SEQ ID NO: 524598 - RNA, 19 nt, Artificial Sequence
  Description of Artificial Sequence: Synthetic oligonucleotide
  Antisense strand to SEQ ID NO: 524597
aaacucaagggauuccaaa

SEQ ID NO: 524599 - RNA, 19 nt, Artificial Sequence
  Description of Artificial Sequence: Synthetic oligonucleotide
  Sense strand starting at position 3612 of SEQ ID NO: 317944
cacgcauccgugucuaauu

SEQ ID NO: 524600 - RNA, 19 nt, Artificial Sequence
  Description of Artificial Sequence: Synthetic oligonucleotide
  Antisense strand to SEQ ID NO: 524599
aauuagacacggaugcgug

SEQ ID NO: 524601 - RNA, 19 nt, Artificial Sequence
  Description of Artificial Sequence: Synthetic oligonucleotide
  Sense strand starting at position 3668 of SEQ ID NO: 317944
ugacuucccuguuuggaga

SEQ ID NO: 524602 - RNA, 19 nt, Artificial Sequence
  Description of Artificial Sequence: Synthetic oligonucleotide
  Antisense strand to SEQ ID NO: 524601
ucuccaaacagggaaguca

SEQ ID NO: 524603 - RNA, 19 nt, Artificial Sequence
  Description of Artificial Sequence: Synthetic oligonucleotide
  Sense strand starting at position 3789 of SEQ ID NO: 317944
gagguuuccuggcucagaa

SEQ ID NO: 524604 - RNA, 19 nt, Artificial Sequence
  Description of Artificial Sequence: Synthetic oligonucleotide
  Antisense strand to SEQ ID NO: 524603
uucugagccaggaaaccuc

SEQ ID NO: 524605 - RNA, 19 nt, Artificial Sequence
  Description of Artificial Sequence: Synthetic oligonucleotide
  Sense strand starting at position 3796 of SEQ ID NO: 317944
ccuggcucagaauguuuaa

SEQ ID NO: 524606 - RNA, 19 nt, Artificial Sequence
  Description of Artificial Sequence: Synthetic oligonucleotide
  Antisense strand to SEQ ID NO: 524605
uuaaacauucugagccagg

SEQ ID NO: 524607 - RNA, 19 nt, Artificial Sequence
  Description of Artificial Sequence: Synthetic oligonucleotide
  Sense strand starting at position 3799 of SEQ ID NO: 317944
ggcucagaauguuuaacag

SEQ ID NO: 524608 - RNA, 19 nt, Artificial Sequence
  Description of Artificial Sequence: Synthetic oligonucleotide
  Antisense strand to SEQ ID NO: 524607
cuguuaaacauucugagcc

SEQ ID NO: 524609 - RNA, 19 nt, Artificial Sequence
  Description of Artificial Sequence: Synthetic oligonucleotide
  Sense strand starting at position 3842 of SEQ ID NO: 317944
cuccucguuucugugauuu

SEQ ID NO: 524610 - RNA, 19 nt, Artificial Sequence
  Description of Artificial Sequence: Synthetic oligonucleotide
  Antisense strand to SEQ ID NO: 524609
aaaucacagaaacgaggag

SEQ ID NO: 524611 - RNA, 19 nt, Artificial Sequence
  Description of Artificial Sequence: Synthetic oligonucleotide
  Sense strand starting at position 3915 of SEQ ID NO: 317944
ggaaauuuaugugacacuu

SEQ ID NO: 524612 - RNA, 19 nt, Artificial Sequence
  Description of Artificial Sequence: Synthetic oligonucleotide
  Antisense strand to SEQ ID NO: 524611
aagugucacauaaauuucc

SEQ ID NO: 524613 - RNA, 19 nt, Artificial Sequence
  Description of Artificial Sequence: Synthetic oligonucleotide
  Sense strand starting at position 3925 of SEQ ID NO: 317944
gugacacuucuacagcuuu

SEQ ID NO: 524614 - RNA, 19 nt, Artificial Sequence
  Description of Artificial Sequence: Synthetic oligonucleotide
  Antisense strand to SEQ ID NO: 524613
aaagcuguagaagugucac

SEQ ID NO: 524615 - RNA, 19 nt, Artificial Sequence
  Description of Artificial Sequence: Synthetic oligonucleotide
  Sense strand starting at position 3958 of SEQ ID NO: 317944
guguucgcugcauuaaaca

SEQ ID NO: 524616 - RNA, 19 nt, Artificial Sequence
  Description of Artificial Sequence: Synthetic oligonucleotide
  Antisense strand to SEQ ID NO: 524615
uguuuaaugcagcgaacac

SEQ ID NO: 524617 - RNA, 19 nt, Artificial Sequence
  Description of Artificial Sequence: Synthetic oligonucleotide
  Sense strand starting at position 3982 of SEQ ID NO: 317944
aggaaauucuccuuaaugu

SEQ ID NO: 524618 - RNA, 19 nt, Artificial Sequence
  Description of Artificial Sequence: Synthetic oligonucleotide
  Antisense strand to SEQ ID NO: 524617
acauuaaggagaauuuccu

SEQ ID NO: 524619 - RNA, 19 nt, Artificial Sequence
  Description of Artificial Sequence: Synthetic oligonucleotide
  Sense strand starting at position 3983 of SEQ ID NO: 317944
ggaaauucuccuuaauguu

SEQ ID NO: 524620 - RNA, 19 nt, Artificial Sequence
  Description of Artificial Sequence: Synthetic oligonucleotide
  Antisense strand to SEQ ID NO: 524619
aacauuaaggagaauuucc

SEQ ID NO: 524621 - RNA, 19 nt, Artificial Sequence
  Description of Artificial Sequence: Synthetic oligonucleotide
  Sense strand starting at position 165 of SEQ ID NO: 317945
uggcccagauucuccaaua

SEQ ID NO: 524622 - RNA, 19 nt, Artificial Sequence
  Description of Artificial Sequence: Synthetic oligonucleotide
  Antisense strand to SEQ ID NO: 524621
uauuggagaaucugggcca

SEQ ID NO: 524623 - RNA, 19 nt, Artificial Sequence
  Description of Artificial Sequence: Synthetic oligonucleotide
  Sense strand starting at position 166 of SEQ ID NO: 317945
ggcccagauucuccaauaa

SEQ ID NO: 524624 - RNA, 19 nt, Artificial Sequence
  Description of Artificial Sequence: Synthetic oligonucleotide
  Antisense strand to SEQ ID NO: 524623
uuauuggagaaucugggcc

SEQ ID NO: 524625 - RNA, 19 nt, Artificial Sequence
  Description of Artificial Sequence: Synthetic oligonucleotide
  Sense strand starting at position 392 of SEQ ID NO: 317945
gguucuuguggauaugguu

SEQ ID NO: 524626 - RNA, 19 nt, Artificial Sequence
  Description of Artificial Sequence: Synthetic oligonucleotide
  Antisense strand to SEQ ID NO: 524625
aaccauauccacaagaacc

SEQ ID NO: 524627 - RNA, 19 nt, Artificial Sequence
  Description of Artificial Sequence: Synthetic oligonucleotide
  Sense strand starting at position 421 of SEQ ID NO: 317945
cgguuucugcuguaauuuc

SEQ ID NO: 524628 - RNA, 19 nt, Artificial Sequence
  Description of Artificial Sequence: Synthetic oligonucleotide
  Antisense strand to SEQ ID NO: 524627
gaaauuacagcagaaaccg

SEQ ID NO: 524629 - RNA, 19 nt, Artificial Sequence
  Description of Artificial Sequence: Synthetic oligonucleotide
  Sense strand starting at position 826 of SEQ ID NO: 317945
guagguggaguuuaaaguu

SEQ ID NO: 524630 - RNA, 19 nt, Artificial Sequence
  Description of Artificial Sequence: Synthetic oligonucleotide
  Antisense strand to SEQ ID NO: 524629
aacuuuaaacuccaccuac

SEQ ID NO: 524631 - RNA, 19 nt, Artificial Sequence
  Description of Artificial Sequence: Synthetic oligonucleotide
  Sense strand starting at position 834 of SEQ ID NO: 317945
aguuuaaaguuucccuaac

SEQ ID NO: 524632 - RNA, 19 nt, Artificial Sequence
  Description of Artificial Sequence: Synthetic oligonucleotide
  Antisense strand to SEQ ID NO: 524631
guuagggaaacuuuaaacu

SEQ ID NO: 524633 - RNA, 19 nt, Artificial Sequence
  Description of Artificial Sequence: Synthetic oligonucleotide
  Sense strand starting at position 874 of SEQ ID NO: 317945
gcaauauuucugugcaauu

SEQ ID NO: 524634 - RNA, 19 nt, Artificial Sequence
  Description of Artificial Sequence: Synthetic oligonucleotide
  Antisense strand to SEQ ID NO: 524633
aauugcacagaaauauugc

SEQ ID NO: 524635 - RNA, 19 nt, Artificial Sequence
  Description of Artificial Sequence: Synthetic oligonucleotide
  Sense strand starting at position 1204 of SEQ ID NO: 317945
aggcauaugugcucagaaa

SEQ ID NO: 524636 - RNA, 19 nt, Artificial Sequence
  Description of Artificial Sequence: Synthetic oligonucleotide
  Antisense strand to SEQ ID NO: 524635
uuucugagcacauaugccu

SEQ ID NO: 524637 - RNA, 19 nt, Artificial Sequence
  Description of Artificial Sequence: Synthetic oligonucleotide
  Sense strand starting at position 1205 of SEQ ID NO: 317945
ggcauaugugcucagaaac

SEQ ID NO: 524638 - RNA, 19 nt, Artificial Sequence
  Description of Artificial Sequence: Synthetic oligonucleotide
  Antisense strand to SEQ ID NO: 524637
guuucugagcacauaugcc

SEQ ID NO: 524639 - RNA, 19 nt, Artificial Sequence
  Description of Artificial Sequence: Synthetic oligonucleotide
  Sense strand starting at position 1238 of SEQ ID NO: 317945
acuugagccuucccaaaga

SEQ ID NO: 524640 - RNA, 19 nt, Artificial Sequence
  Description of Artificial Sequence: Synthetic oligonucleotide
  Antisense strand to SEQ ID NO: 524639
ucuuugggaaggcucaagu

SEQ ID NO: 524641 - RNA, 19 nt, Artificial Sequence
  Description of Artificial Sequence: Synthetic oligonucleotide
  Sense strand starting at position 1261 of SEQ ID NO: 317945
cugggaaguugcuuaaaga

SEQ ID NO: 524642 - RNA, 19 nt, Artificial Sequence
  Description of Artificial Sequence: Synthetic oligonucleotide
  Antisense strand to SEQ ID NO: 524641
ucuuuaagcaacuucccag

SEQ ID NO: 524643 - RNA, 19 nt, Artificial Sequence
  Description of Artificial Sequence: Synthetic oligonucleotide
  Sense strand starting at position 2305 of SEQ ID NO: 317945
uuuggaaucccuugaguuu

SEQ ID NO: 524644 - RNA, 19 nt, Artificial Sequence
  Description of Artificial Sequence: Synthetic oligonucleotide
  Antisense strand to SEQ ID NO: 524643
aaacucaagggauuccaaa

SEQ ID NO: 524645 - RNA, 19 nt, Artificial Sequence
  Description of Artificial Sequence: Synthetic oligonucleotide
  Sense strand starting at position 2370 of SEQ ID NO: 317945
cacgcauccgugucuaauu

SEQ ID NO: 524646 - RNA, 19 nt, Artificial Sequence
  Description of Artificial Sequence: Synthetic oligonucleotide
  Antisense strand to SEQ ID NO: 524645
aauuagacacggaugcgug

SEQ ID NO: 524647 - RNA, 19 nt, Artificial Sequence
  Description of Artificial Sequence: Synthetic oligonucleotide
  Sense strand starting at position 2426 of SEQ ID NO: 317945
ugacuucccuguuuggaga

SEQ ID NO: 524648 - RNA, 19 nt, Artificial Sequence
  Description of Artificial Sequence: Synthetic oligonucleotide
  Antisense strand to SEQ ID NO: 524647
ucuccaaacagggaaguca

SEQ ID NO: 524649 - RNA, 19 nt, Artificial Sequence
  Description of Artificial Sequence: Synthetic oligonucleotide
  Sense strand starting at position 2547 of SEQ ID NO: 317945
gagguuuccuggcucagaa

SEQ ID NO: 524650 - RNA, 19 nt, Artificial Sequence
  Description of Artificial Sequence: Synthetic oligonucleotide
  Antisense strand to SEQ ID NO: 524649
uucugagccaggaaaccuc

SEQ ID NO: 524651 - RNA, 19 nt, Artificial Sequence
  Description of Artificial Sequence: Synthetic oligonucleotide
  Sense strand starting at position 2557 of SEQ ID NO: 317945
ggcucagaauguuuaacag

SEQ ID NO: 524652 - RNA, 19 nt, Artificial Sequence
  Description of Artificial Sequence: Synthetic oligonucleotide
  Antisense strand to SEQ ID NO: 524651
cuguuaaacauucugagcc

SEQ ID NO: 524653 - RNA, 19 nt, Artificial Sequence
  Description of Artificial Sequence: Synthetic oligonucleotide
  Sense strand starting at position 2600 of SEQ ID NO: 317945
cuccucguuucugugauuu

SEQ ID NO: 524654 - RNA, 19 nt, Artificial Sequence
  Description of Artificial Sequence: Synthetic oligonucleotide
  Antisense strand to SEQ ID NO: 524653
aaaucacagaaacgaggag

SEQ ID NO: 524655 - RNA, 19 nt, Artificial Sequence
  Description of Artificial Sequence: Synthetic oligonucleotide
  Sense strand starting at position 2673 of SEQ ID NO: 317945
ggaaauuuaugugacacuu

SEQ ID NO: 524656 - RNA, 19 nt, Artificial Sequence
  Description of Artificial Sequence: Synthetic oligonucleotide
  Antisense strand to SEQ ID NO: 524655
aagugucacauaaauuucc

SEQ ID NO: 524657 - RNA, 19 nt, Artificial Sequence
  Description of Artificial Sequence: Synthetic oligonucleotide
  Sense strand starting at position 2683 of SEQ ID NO: 317945
gugacacuucuacagcuuu

SEQ ID NO: 524658 - RNA, 19 nt, Artificial Sequence
  Description of Artificial Sequence: Synthetic oligonucleotide
  Antisense strand to SEQ ID NO: 524657
aaagcuguagaagugucac

SEQ ID NO: 524659 - RNA, 19 nt, Artificial Sequence
  Description of Artificial Sequence: Synthetic oligonucleotide
  Sense strand starting at position 2716 of SEQ ID NO: 317945
guguucgcugcauuaaaca

SEQ ID NO: 524660 - RNA, 19 nt, Artificial Sequence
  Description of Artificial Sequence: Synthetic oligonucleotide
  Antisense strand to SEQ ID NO: 524659
uguuuaaugcagcgaacac

SEQ ID NO: 524661 - RNA, 19 nt, Artificial Sequence
  Description of Artificial Sequence: Synthetic oligonucleotide
  Sense strand starting at position 2740 of SEQ ID NO: 317945
aggaaauucuccuuaaugu

SEQ ID NO: 524662 - RNA, 19 nt, Artificial Sequence
  Description of Artificial Sequence: Synthetic oligonucleotide
  Antisense strand to SEQ ID NO: 524661
acauuaaggagaauuuccu

SEQ ID NO: 524663 - RNA, 19 nt, Artificial Sequence
  Description of Artificial Sequence: Synthetic oligonucleotide
  Sense strand starting at position 2741 of SEQ ID NO: 317945
ggaaauucuccuuaauguu

SEQ ID NO: 524664 - RNA, 19 nt, Artificial Sequence
  Description of Artificial Sequence: Synthetic oligonucleotide
  Antisense strand to SEQ ID NO: 524663
aacauuaaggagaauuucc

SEQ ID NO: 524665 - RNA, 19 nt, Artificial Sequence
  Description of Artificial Sequence: Synthetic oligonucleotide
  Sense strand starting at position 2821 of SEQ ID NO: 317945
gcacucaccgugcaaauuu

SEQ ID NO: 524666 - RNA, 19 nt, Artificial Sequence
  Description of Artificial Sequence: Synthetic oligonucleotide
  Antisense strand to SEQ ID NO: 524665
aaauuugcacggugagugc

SEQ ID NO: 524667 - RNA, 19 nt, Artificial Sequence
  Description of Artificial Sequence: Synthetic oligonucleotide
  Sense strand starting at position 2828 of SEQ ID NO: 317945
ccgugcaaauuucuuugua

SEQ ID NO: 524668 - RNA, 19 nt, Artificial Sequence
  Description of Artificial Sequence: Synthetic oligonucleotide
  Antisense strand to SEQ ID NO: 524667
uacaaagaaauuugcacgg

SEQ ID NO: 524669 - RNA, 19 nt, Artificial Sequence
  Description of Artificial Sequence: Synthetic oligonucleotide
  Sense strand starting at position 2829 of SEQ ID NO: 317945
cgugcaaauuucuuuguag

SEQ ID NO: 524670 - RNA, 19 nt, Artificial Sequence
  Description of Artificial Sequence: Synthetic oligonucleotide
  Antisense strand to SEQ ID NO: 524669
cuacaaagaaauuugcacg

SEQ ID NO: 524671 - RNA, 19 nt, Artificial Sequence
  Description of Artificial Sequence: Synthetic oligonucleotide
  Sense strand starting at position 2830 of SEQ ID NO: 317945
gugcaaauuucuuuguagu

SEQ ID NO: 524672 - RNA, 19 nt, Artificial Sequence
  Description of Artificial Sequence: Synthetic oligonucleotide
  Antisense strand to SEQ ID NO: 524671
acuacaaagaaauuugcac

SEQ ID NO: 524673 - RNA, 19 nt, Artificial Sequence
  Description of Artificial Sequence: Synthetic oligonucleotide
  Sense strand starting at position 2831 of SEQ ID NO: 317945
ugcaaauuucuuuguagug

SEQ ID NO: 524674 - RNA, 19 nt, Artificial Sequence
  Description of Artificial Sequence: Synthetic oligonucleotide
  Antisense strand to SEQ ID NO: 524673
cacuacaaagaaauuugca

SEQ ID NO: 524675 - RNA, 19 nt, Artificial Sequence
  Description of Artificial Sequence: Synthetic oligonucleotide
  Sense strand starting at position 2832 of SEQ ID NO: 317945
gcaaauuucuuuguaguga

SEQ ID NO: 524676 - RNA, 19 nt, Artificial Sequence
  Description of Artificial Sequence: Synthetic oligonucleotide
  Antisense strand to SEQ ID NO: 524675
ucacuacaaagaaauuugc

SEQ ID NO: 524677 - RNA, 19 nt, Artificial Sequence
  Description of Artificial Sequence: Synthetic oligonucleotide
  Sense strand starting at position 2837 of SEQ ID NO: 317945
uuucuuuguagugaggcaa

SEQ ID NO: 524678 - RNA, 19 nt, Artificial Sequence
  Description of Artificial Sequence: Synthetic oligonucleotide
  Antisense strand to SEQ ID NO: 524677
uugccucacuacaaagaaa

SEQ ID NO: 524679 - RNA, 19 nt, Artificial Sequence
  Description of Artificial Sequence: Synthetic oligonucleotide
  Sense strand starting at position 2929 of SEQ ID NO: 317945
cauaaauaugcguauauag

SEQ ID NO: 524680 - RNA, 19 nt, Artificial Sequence
  Description of Artificial Sequence: Synthetic oligonucleotide
  Antisense strand to SEQ ID NO: 524679
cuauauacgcauauuuaug

SEQ ID NO: 524681 - RNA, 19 nt, Artificial Sequence
  Description of Artificial Sequence: Synthetic oligonucleotide
  Sense strand starting at position 2931 of SEQ ID NO: 317945
uaaauaugcguauauagag

SEQ ID NO: 524682 - RNA, 19 nt, Artificial Sequence
  Description of Artificial Sequence: Synthetic oligonucleotide
  Antisense strand to SEQ ID NO: 524681
cucuauauacgcauauuua

SEQ ID NO: 524683 - RNA, 19 nt, Artificial Sequence
  Description of Artificial Sequence: Synthetic oligonucleotide
  Sense strand starting at position 2937 of SEQ ID NO: 317945
ugcguauauagagauauac

SEQ ID NO: 524684 - RNA, 19 nt, Artificial Sequence
  Description of Artificial Sequence: Synthetic oligonucleotide
  Antisense strand to SEQ ID NO: 524683
guauaucucuauauacgca

SEQ ID NO: 524685 - RNA, 19 nt, Artificial Sequence
  Description of Artificial Sequence: Synthetic oligonucleotide
  Sense strand starting at position 3111 of SEQ ID NO: 317945
cuuuguaacaacgggauaa

SEQ ID NO: 524686 - RNA, 19 nt, Artificial Sequence
  Description of Artificial Sequence: Synthetic oligonucleotide
  Antisense strand to SEQ ID NO: 524685
uuaucccguuguuacaaag

SEQ ID NO: 524687 - RNA, 19 nt, Artificial Sequence
  Description of Artificial Sequence: Synthetic oligonucleotide
  Sense strand starting at position 3112 of SEQ ID NO: 317945
uuuguaacaacgggauaaa

SEQ ID NO: 524688 - RNA, 19 nt, Artificial Sequence
  Description of Artificial Sequence: Synthetic oligonucleotide
  Antisense strand to SEQ ID NO: 524687
uuuaucccguuguuacaaa

SEQ ID NO: 524689 - RNA, 19 nt, Artificial Sequence
  Description of Artificial Sequence: Synthetic oligonucleotide
  Sense strand starting at position 3324 of SEQ ID NO: 317945
uuccuaaaugucugucaaa

SEQ ID NO: 524690 - RNA, 19 nt, Artificial Sequence
  Description of Artificial Sequence: Synthetic oligonucleotide
  Antisense strand to SEQ ID NO: 524689
uuugacagacauuuaggaa

SEQ ID NO: 524691 - RNA, 19 nt, Artificial Sequence
  Description of Artificial Sequence: Synthetic oligonucleotide
  Sense strand starting at position 3325 of SEQ ID NO: 317945
uccuaaaugucugucaaau

SEQ ID NO: 524692 - RNA, 19 nt, Artificial Sequence
  Description of Artificial Sequence: Synthetic oligonucleotide
  Antisense strand to SEQ ID NO: 524691
auuugacagacauuuagga

SEQ ID NO: 524693 - RNA, 19 nt, Artificial Sequence
  Description of Artificial Sequence: Synthetic oligonucleotide
  Sense strand starting at position 3359 of SEQ ID NO: 317945
ugucauaggcccuaaagaa

SEQ ID NO: 524694 - RNA, 19 nt, Artificial Sequence
  Description of Artificial Sequence: Synthetic oligonucleotide
  Antisense strand to SEQ ID NO: 524693
uucuuuagggccuaugaca

SEQ ID NO: 524695 - RNA, 19 nt, Artificial Sequence
  Description of Artificial Sequence: Synthetic oligonucleotide
  Sense strand starting at position 3451 of SEQ ID NO: 317945
ggagcugacgucuacuuua

SEQ ID NO: 524696 - RNA, 19 nt, Artificial Sequence
  Description of Artificial Sequence: Synthetic oligonucleotide
  Antisense strand to SEQ ID NO: 524695
uaaaguagacgucagcucc

SEQ ID NO: 524697 - RNA, 19 nt, Artificial Sequence
  Description of Artificial Sequence: Synthetic oligonucleotide
  Sense strand starting at position 3483 of SEQ ID NO: 317945
gcgaauuucugcucaccug

SEQ ID NO: 524698 - RNA, 19 nt, Artificial Sequence
  Description of Artificial Sequence: Synthetic oligonucleotide
  Antisense strand to SEQ ID NO: 524697
caggugagcagaaauucgc

SEQ ID NO: 524699 - RNA, 19 nt, Artificial Sequence
  Description of Artificial Sequence: Synthetic oligonucleotide
  Sense strand starting at position 3939 of SEQ ID NO: 317945
gggaacuuacccuggaucu

SEQ ID NO: 524700 - RNA, 19 nt, Artificial Sequence
  Description of Artificial Sequence: Synthetic oligonucleotide
  Antisense strand to SEQ ID NO: 524699
agauccaggguaaguuccc

SEQ ID NO: 524701 - RNA, 19 nt, Artificial Sequence
  Description of Artificial Sequence: Synthetic oligonucleotide
  Sense strand starting at position 203 of SEQ ID NO: 317946
agacuaucuuguguaucua

SEQ ID NO: 524702 - RNA, 19 nt, Artificial Sequence
  Description of Artificial Sequence: Synthetic oligonucleotide
  Antisense strand to SEQ ID NO: 524701
uagauacacaagauagucu

SEQ ID NO: 524703 - RNA, 19 nt, Artificial Sequence
  Description of Artificial Sequence: Synthetic oligonucleotide
  Sense strand starting at position 234 of SEQ ID NO: 317946
gccucucuugucuaaagaa

SEQ ID NO: 524704 - RNA, 19 nt, Artificial Sequence
  Description of Artificial Sequence: Synthetic oligonucleotide
  Antisense strand to SEQ ID NO: 524703
uucuuuagacaagagaggc

SEQ ID NO: 524705 - RNA, 19 nt, Artificial Sequence
  Description of Artificial Sequence: Synthetic oligonucleotide
  Sense strand starting at position 409 of SEQ ID NO: 317946
uuagauggcuuguccaaag

SEQ ID NO: 524706 - RNA, 19 nt, Artificial Sequence
  Description of Artificial Sequence: Synthetic oligonucleotide
  Antisense strand to SEQ ID NO: 524705
cuuuggacaagccaucuaa

SEQ ID NO: 524707 - RNA, 19 nt, Artificial Sequence
  Description of Artificial Sequence: Synthetic oligonucleotide
  Sense strand starting at position 597 of SEQ ID NO: 317946
auuaguaucuguuugacua

SEQ ID NO: 524708 - RNA, 19 nt, Artificial Sequence
  Description of Artificial Sequence: Synthetic oligonucleotide
  Antisense strand to SEQ ID NO: 524707
uagucaaacagauacuaau

SEQ ID NO: 524709 - RNA, 19 nt, Artificial Sequence
  Description of Artificial Sequence: Synthetic oligonucleotide
  Sense strand starting at position 598 of SEQ ID NO: 317946
uuaguaucuguuugacuaa

SEQ ID NO: 524710 - RNA, 19 nt, Artificial Sequence
  Description of Artificial Sequence: Synthetic oligonucleotide
  Antisense strand to SEQ ID NO: 524709
uuagucaaacagauacuaa

SEQ ID NO: 524711 - RNA, 19 nt, Artificial Sequence
  Description of Artificial Sequence: Synthetic oligonucleotide
  Sense strand starting at position 601 of SEQ ID NO: 317946
guaucuguuugacuaaaua

SEQ ID NO: 524712 - RNA, 19 nt, Artificial Sequence
  Description of Artificial Sequence: Synthetic oligonucleotide
  Antisense strand to SEQ ID NO: 524711
uauuuagucaaacagauac

SEQ ID NO: 524713 - RNA, 19 nt, Artificial Sequence
  Description of Artificial Sequence: Synthetic oligonucleotide
  Sense strand starting at position 804 of SEQ ID NO: 317946
ucagucuaugccuauguaa

SEQ ID NO: 524714 - RNA, 19 nt, Artificial Sequence
  Description of Artificial Sequence: Synthetic oligonucleotide
  Antisense strand to SEQ ID NO: 524713
uuacauaggcauagacuga

SEQ ID NO: 524715 - RNA, 19 nt, Artificial Sequence
  Description of Artificial Sequence: Synthetic oligonucleotide
  Sense strand starting at position 947 of SEQ ID NO: 317946
aacgucuuccuuuagcaga

SEQ ID NO: 524716 - RNA, 19 nt, Artificial Sequence
  Description of Artificial Sequence: Synthetic oligonucleotide
  Antisense strand to SEQ ID NO: 524715
ucugcuaaaggaagacguu

SEQ ID NO: 524717 - RNA, 19 nt, Artificial Sequence
  Description of Artificial Sequence: Synthetic oligonucleotide
  Sense strand starting at position 1168 of SEQ ID NO: 317946
gccagcuuggugucugcaa

SEQ ID NO: 524718 - RNA, 19 nt, Artificial Sequence
  Description of Artificial Sequence: Synthetic oligonucleotide
  Antisense strand to SEQ ID NO: 524717
uugcagacaccaagcuggc

SEQ ID NO: 524719 - RNA, 19 nt, Artificial Sequence
  Description of Artificial Sequence: Synthetic oligonucleotide
  Sense strand starting at position 1521 of SEQ ID NO: 317946
ggccgaaacaccgacuuaa

SEQ ID NO: 524720 - RNA, 19 nt, Artificial Sequence
  Description of Artificial Sequence: Synthetic oligonucleotide
  Antisense strand to SEQ ID NO: 524719
uuaagucgguguuucggcc

SEQ ID NO: 524721 - RNA, 19 nt, Artificial Sequence
  Description of Artificial Sequence: Synthetic oligonucleotide
  Sense strand starting at position 1640 of SEQ ID NO: 317946
gagagaguucuuuaugcug

SEQ ID NO: 524722 - RNA, 19 nt, Artificial Sequence
  Description of Artificial Sequence: Synthetic oligonucleotide
  Antisense strand to SEQ ID NO: 524721
cagcauaaagaacucucuc

SEQ ID NO: 524723 - RNA, 19 nt, Artificial Sequence
  Description of Artificial Sequence: Synthetic oligonucleotide
  Sense strand starting at position 1643 of SEQ ID NO: 317946
agaguucuuuaugcuggau

SEQ ID NO: 524724 - RNA, 19 nt, Artificial Sequence
  Description of Artificial Sequence: Synthetic oligonucleotide
  Antisense strand to SEQ ID NO: 524723
auccagcauaaagaacucu

SEQ ID NO: 524725 - RNA, 19 nt, Artificial Sequence
  Description of Artificial Sequence: Synthetic oligonucleotide
  Sense strand starting at position 1997 of SEQ ID NO: 317946
cgcauauuuccggaguguu

SEQ ID NO: 524726 - RNA, 19 nt, Artificial Sequence
  Description of Artificial Sequence: Synthetic oligonucleotide
  Antisense strand to SEQ ID NO: 524725
aacacuccggaaauaugcg

SEQ ID NO: 524727 - RNA, 19 nt, Artificial Sequence
  Description of Artificial Sequence: Synthetic oligonucleotide
  Sense strand starting at position 2255 of SEQ ID NO: 317946
uggauaagucucuggaccu

SEQ ID NO: 524728 - RNA, 19 nt, Artificial Sequence
  Description of Artificial Sequence: Synthetic oligonucleotide
  Antisense strand to SEQ ID NO: 524727
agguccagagacuuaucca

SEQ ID NO: 524729 - RNA, 19 nt, Artificial Sequence
  Description of Artificial Sequence: Synthetic oligonucleotide
  Sense strand starting at position 2275 of SEQ ID NO: 317946
gccuuugucauuugcgaag

SEQ ID NO: 524730 - RNA, 19 nt, Artificial Sequence
  Description of Artificial Sequence: Synthetic oligonucleotide
  Antisense strand to SEQ ID NO: 524729
cuucgcaaaugacaaaggc

SEQ ID NO: 524731 - RNA, 19 nt, Artificial Sequence
  Description of Artificial Sequence: Synthetic oligonucleotide
  Sense strand starting at position 2400 of SEQ ID NO: 317946
gucaucccuucugugauuu

SEQ ID NO: 524732 - RNA, 19 nt, Artificial Sequence
  Description of Artificial Sequence: Synthetic oligonucleotide
  Antisense strand to SEQ ID NO: 524731
aaaucacagaagggaugac

SEQ ID NO: 524733 - RNA, 19 nt, Artificial Sequence
  Description of Artificial Sequence: Synthetic oligonucleotide
  Sense strand starting at position 2717 of SEQ ID NO: 317946
aaaguuagugugcauuaaa

SEQ ID NO: 524734 - RNA, 19 nt, Artificial Sequence
  Description of Artificial Sequence: Synthetic oligonucleotide
  Antisense strand to SEQ ID NO: 524733
uuuaaugcacacuaacuuu

SEQ ID NO: 524735 - RNA, 19 nt, Artificial Sequence
  Description of Artificial Sequence: Synthetic oligonucleotide
  Sense strand starting at position 2728 of SEQ ID NO: 317946
gcauuaaagccaugugaga

SEQ ID NO: 524736 - RNA, 19 nt, Artificial Sequence
  Description of Artificial Sequence: Synthetic oligonucleotide
  Antisense strand to SEQ ID NO: 524735
ucucacauggcuuuaaugc

SEQ ID NO: 524737 - RNA, 19 nt, Artificial Sequence
  Description of Artificial Sequence: Synthetic oligonucleotide
  Sense strand starting at position 2752 of SEQ ID NO: 317946
uuugacaagacguagcauu

SEQ ID NO: 524738 - RNA, 19 nt, Artificial Sequence
  Description of Artificial Sequence: Synthetic oligonucleotide
  Antisense strand to SEQ ID NO: 524737
aaugcuacgucuugucaaa

SEQ ID NO: 524739 - RNA, 19 nt, Artificial Sequence
  Description of Artificial Sequence: Synthetic oligonucleotide
  Sense strand starting at position 2776 of SEQ ID NO: 317946
ggcuauucugcuggagaag

SEQ ID NO: 524740 - RNA, 19 nt, Artificial Sequence
  Description of Artificial Sequence: Synthetic oligonucleotide
  Antisense strand to SEQ ID NO: 524739
cuucuccagcagaauagcc

SEQ ID NO: 524741 - RNA, 19 nt, Artificial Sequence
  Description of Artificial Sequence: Synthetic oligonucleotide
  Sense strand starting at position 2777 of SEQ ID NO: 317946
gcuauucugcuggagaaga

SEQ ID NO: 524742 - RNA, 19 nt, Artificial Sequence
  Description of Artificial Sequence: Synthetic oligonucleotide
  Antisense strand to SEQ ID NO: 524741
ucuucuccagcagaauagc

SEQ ID NO: 524743 - RNA, 19 nt, Artificial Sequence
  Description of Artificial Sequence: Synthetic oligonucleotide
  Sense strand starting at position 2980 of SEQ ID NO: 317946
ggagcucugguaggacaaa

SEQ ID NO: 524744 - RNA, 19 nt, Artificial Sequence
  Description of Artificial Sequence: Synthetic oligonucleotide
  Antisense strand to SEQ ID NO: 524743
uuuguccuaccagagcucc

SEQ ID NO: 524745 - RNA, 19 nt, Artificial Sequence
  Description of Artificial Sequence: Synthetic oligonucleotide
  Sense strand starting at position 3059 of SEQ ID NO: 317946
uucuuccuguaauugaaga

SEQ ID NO: 524746 - RNA, 19 nt, Artificial Sequence
  Description of Artificial Sequence: Synthetic oligonucleotide
  Antisense strand to SEQ ID NO: 524745
ucuucaauuacaggaagaa

SEQ ID NO: 524747 - RNA, 19 nt, Artificial Sequence
  Description of Artificial Sequence: Synthetic oligonucleotide
  Sense strand starting at position 3334 of SEQ ID NO: 317946
uguagugggaccugaaaug

SEQ ID NO: 524748 - RNA, 19 nt, Artificial Sequence
  Description of Artificial Sequence: Synthetic oligonucleotide
  Antisense strand to SEQ ID NO: 524747
cauuucaggucccacuaca

SEQ ID NO: 524749 - RNA, 19 nt, Artificial Sequence
  Description of Artificial Sequence: Synthetic oligonucleotide
  Sense strand starting at position 3372 of SEQ ID NO: 317946
gguuuccuaccucaaguuu

SEQ ID NO: 524750 - RNA, 19 nt, Artificial Sequence
  Description of Artificial Sequence: Synthetic oligonucleotide
  Antisense strand to SEQ ID NO: 524749
aaacuugagguaggaaacc

SEQ ID NO: 524751 - RNA, 19 nt, Artificial Sequence
  Description of Artificial Sequence: Synthetic oligonucleotide
  Sense strand starting at position 3493 of SEQ ID NO: 317946
ucagguagagcauguuaua

SEQ ID NO: 524752 - RNA, 19 nt, Artificial Sequence
  Description of Artificial Sequence: Synthetic oligonucleotide
  Antisense strand to SEQ ID NO: 524751
uauaacaugcucuaccuga

SEQ ID NO: 524753 - RNA, 19 nt, Artificial Sequence
  Description of Artificial Sequence: Synthetic oligonucleotide
  Sense strand starting at position 3534 of SEQ ID NO: 317946
uuauuuguaccuugauguu

SEQ ID NO: 524754 - RNA, 19 nt, Artificial Sequence
  Description of Artificial Sequence: Synthetic oligonucleotide
  Antisense strand to SEQ ID NO: 524753
aacaucaagguacaaauaa

SEQ ID NO: 524755 - RNA, 19 nt, Artificial Sequence
  Description of Artificial Sequence: Synthetic oligonucleotide
  Sense strand starting at position 3577 of SEQ ID NO: 317946
gaguuaguauuucuccugu

SEQ ID NO: 524756 - RNA, 19 nt, Artificial Sequence
  Description of Artificial Sequence: Synthetic oligonucleotide
  Antisense strand to SEQ ID NO: 524755
acaggagaaauacuaacuc

SEQ ID NO: 524757 - RNA, 19 nt, Artificial Sequence
  Description of Artificial Sequence: Synthetic oligonucleotide
  Sense strand starting at position 3579 of SEQ ID NO: 317946
guuaguauuucuccuguac

SEQ ID NO: 524758 - RNA, 19 nt, Artificial Sequence
  Description of Artificial Sequence: Synthetic oligonucleotide
  Antisense strand to SEQ ID NO: 524757
guacaggagaaauacuaac

SEQ ID NO: 524759 - RNA, 19 nt, Artificial Sequence
  Description of Artificial Sequence: Synthetic oligonucleotide
  Sense strand starting at position 3629 of SEQ ID NO: 317946
caggaaaguuugcccuaca

SEQ ID NO: 524760 - RNA, 19 nt, Artificial Sequence
  Description of Artificial Sequence: Synthetic oligonucleotide
  Antisense strand to SEQ ID NO: 524759
uguagggcaaacuuuccug

SEQ ID NO: 524761 - RNA, 19 nt, Artificial Sequence
  Description of Artificial Sequence: Synthetic oligonucleotide
  Sense strand starting at position 3632 of SEQ ID NO: 317946
gaaaguuugcccuacagua

SEQ ID NO: 524762 - RNA, 19 nt, Artificial Sequence
  Description of Artificial Sequence: Synthetic oligonucleotide
  Antisense strand to SEQ ID NO: 524761
uacuguagggcaaacuuuc

SEQ ID NO: 524763 - RNA, 19 nt, Artificial Sequence
  Description of Artificial Sequence: Synthetic oligonucleotide
  Sense strand starting at position 3723 of SEQ ID NO: 317946
ucauucuuccaugaguucu

SEQ ID NO: 524764 - RNA, 19 nt, Artificial Sequence
  Description of Artificial Sequence: Synthetic oligonucleotide
  Antisense strand to SEQ ID NO: 524763
agaacucauggaagaauga

SEQ ID NO: 524765 - RNA, 19 nt, Artificial Sequence
  Description of Artificial Sequence: Synthetic oligonucleotide
  Sense strand starting at position 3749 of SEQ ID NO: 317946
gcccguguucuuccuugaa

SEQ ID NO: 524766 - RNA, 19 nt, Artificial Sequence
  Description of Artificial Sequence: Synthetic oligonucleotide
  Antisense strand to SEQ ID NO: 524765
uucaaggaagaacacgggc

SEQ ID NO: 524767 - RNA, 19 nt, Artificial Sequence
  Description of Artificial Sequence: Synthetic oligonucleotide
  Sense strand starting at position 3753 of SEQ ID NO: 317946
guguucuuccuugaaauuc

SEQ ID NO: 524768 - RNA, 19 nt, Artificial Sequence
  Description of Artificial Sequence: Synthetic oligonucleotide
  Antisense strand to SEQ ID NO: 524767
gaauuucaaggaagaacac

SEQ ID NO: 524769 - RNA, 19 nt, Artificial Sequence
  Description of Artificial Sequence: Synthetic oligonucleotide
  Sense strand starting at position 3761 of SEQ ID NO: 317946
ccuugaaauuccuuaggua

SEQ ID NO: 524770 - RNA, 19 nt, Artificial Sequence
  Description of Artificial Sequence: Synthetic oligonucleotide
  Antisense strand to SEQ ID NO: 524769
uaccuaaggaauuucaagg

SEQ ID NO: 524771 - RNA, 19 nt, Artificial Sequence
  Description of Artificial Sequence: Synthetic oligonucleotide
  Sense strand starting at position 3762 of SEQ ID NO: 317946
cuugaaauuccuuagguac

SEQ ID NO: 524772 - RNA, 19 nt, Artificial Sequence
  Description of Artificial Sequence: Synthetic oligonucleotide
  Antisense strand to SEQ ID NO: 524771
guaccuaaggaauuucaag

SEQ ID NO: 524773 - RNA, 19 nt, Artificial Sequence
  Description of Artificial Sequence: Synthetic oligonucleotide
  Sense strand starting at position 3841 of SEQ ID NO: 317946
agggauagugguuggaguu

SEQ ID NO: 524774 - RNA, 19 nt, Artificial Sequence
  Description of Artificial Sequence: Synthetic oligonucleotide
  Antisense strand to SEQ ID NO: 524773
aacuccaaccacuaucccu

SEQ ID NO: 524775 - RNA, 19 nt, Artificial Sequence
  Description of Artificial Sequence: Synthetic oligonucleotide
  Sense strand starting at position 3842 of SEQ ID NO: 317946
gggauagugguuggaguuu

SEQ ID NO: 524776 - RNA, 19 nt, Artificial Sequence
  Description of Artificial Sequence: Synthetic oligonucleotide
  Antisense strand to SEQ ID NO: 524775
aaacuccaaccacuauccc

SEQ ID NO: 524777 - RNA, 19 nt, Artificial Sequence
  Description of Artificial Sequence: Synthetic oligonucleotide
  Sense strand starting at position 3855 of SEQ ID NO: 317946
gaguuugcucaggacaggu

SEQ ID NO: 524778 - RNA, 19 nt, Artificial Sequence
  Description of Artificial Sequence: Synthetic oligonucleotide
  Antisense strand to SEQ ID NO: 524777
accuguccugagcaaacuc

SEQ ID NO: 524779 - RNA, 19 nt, Artificial Sequence
  Description of Artificial Sequence: Synthetic oligonucleotide
  Sense strand starting at position 3871 of SEQ ID NO: 317946
gguucauauggcuauggag

SEQ ID NO: 524780 - RNA, 19 nt, Artificial Sequence
  Description of Artificial Sequence: Synthetic oligonucleotide
  Antisense strand to SEQ ID NO: 524779
cuccauagccauaugaacc

SEQ ID NO: 524781 - RNA, 19 nt, Artificial Sequence
  Description of Artificial Sequence: Synthetic oligonucleotide
  Sense strand starting at position 330 of SEQ ID NO: 317947
aaggucaacugacuaguau

SEQ ID NO: 524782 - RNA, 19 nt, Artificial Sequence
  Description of Artificial Sequence: Synthetic oligonucleotide
  Antisense strand to SEQ ID NO: 524781
auacuagucaguugaccuu

SEQ ID NO: 524783 - RNA, 19 nt, Artificial Sequence
  Description of Artificial Sequence: Synthetic oligonucleotide
  Sense strand starting at position 331 of SEQ ID NO: 317947
aggucaacugacuaguauu

SEQ ID NO: 524784 - RNA, 19 nt, Artificial Sequence
  Description of Artificial Sequence: Synthetic oligonucleotide
  Antisense strand to SEQ ID NO: 524783
aauacuagucaguugaccu

SEQ ID NO: 524785 - RNA, 19 nt, Artificial Sequence
  Description of Artificial Sequence: Synthetic oligonucleotide
  Sense strand starting at position 392 of SEQ ID NO: 317947
uccugcuaucagcaaagga

SEQ ID NO: 524786 - RNA, 19 nt, Artificial Sequence
  Description of Artificial Sequence: Synthetic oligonucleotide
  Antisense strand to SEQ ID NO: 524785
uccuuugcugauagcagga

SEQ ID NO: 524787 - RNA, 19 nt, Artificial Sequence
  Description of Artificial Sequence: Synthetic oligonucleotide
  Sense strand starting at position 425 of SEQ ID NO: 317947
uuuaguuucguaguuguua

SEQ ID NO: 524788 - RNA, 19 nt, Artificial Sequence
  Description of Artificial Sequence: Synthetic oligonucleotide
  Antisense strand to SEQ ID NO: 524787
uaacaacuacgaaacuaaa

SEQ ID NO: 524789 - RNA, 19 nt, Artificial Sequence
  Description of Artificial Sequence: Synthetic oligonucleotide
  Sense strand starting at position 540 of SEQ ID NO: 317947
cagagauauuuggauauac

SEQ ID NO: 524790 - RNA, 19 nt, Artificial Sequence
  Description of Artificial Sequence: Synthetic oligonucleotide
  Antisense strand to SEQ ID NO: 524789
guauauccaaauaucucug

SEQ ID NO: 524791 - RNA, 19 nt, Artificial Sequence
  Description of Artificial Sequence: Synthetic oligonucleotide
  Sense strand starting at position 958 of SEQ ID NO: 317947
ggccguaaauuugucaucu

SEQ ID NO: 524792 - RNA, 19 nt, Artificial Sequence
  Description of Artificial Sequence: Synthetic oligonucleotide
  Antisense strand to SEQ ID NO: 524791
agaugacaaauuuacggcc

SEQ ID NO: 524793 - RNA, 19 nt, Artificial Sequence
  Description of Artificial Sequence: Synthetic oligonucleotide
  Sense strand starting at position 959 of SEQ ID NO: 317947
gccguaaauuugucaucuu

SEQ ID NO: 524794 - RNA, 19 nt, Artificial Sequence
  Description of Artificial Sequence: Synthetic oligonucleotide
  Antisense strand to SEQ ID NO: 524793
aagaugacaaauuuacggc

SEQ ID NO: 524795 - RNA, 19 nt, Artificial Sequence
  Description of Artificial Sequence: Synthetic oligonucleotide
  Sense strand starting at position 962 of SEQ ID NO: 317947
guaaauuugucaucuuagu

SEQ ID NO: 524796 - RNA, 19 nt, Artificial Sequence
  Description of Artificial Sequence: Synthetic oligonucleotide
  Antisense strand to SEQ ID NO: 524795
acuaagaugacaaauuuac

SEQ ID NO: 524797 - RNA, 19 nt, Artificial Sequence
  Description of Artificial Sequence: Synthetic oligonucleotide
  Sense strand starting at position 1061 of SEQ ID NO: 317947
cguugauauacacauugga

SEQ ID NO: 524798 - RNA, 19 nt, Artificial Sequence
  Description of Artificial Sequence: Synthetic oligonucleotide
  Antisense strand to SEQ ID NO: 524797
uccaauguguauaucaacg

SEQ ID NO: 524799 - RNA, 19 nt, Artificial Sequence
  Description of Artificial Sequence: Synthetic oligonucleotide
  Sense strand starting at position 1074 of SEQ ID NO: 317947
auuggagagaggugucaau

SEQ ID NO: 524800 - RNA, 19 nt, Artificial Sequence
  Description of Artificial Sequence: Synthetic oligonucleotide
  Antisense strand to SEQ ID NO: 524799
auugacaccucucuccaau

SEQ ID NO: 524801 - RNA, 19 nt, Artificial Sequence
  Description of Artificial Sequence: Synthetic oligonucleotide
  Sense strand starting at position 1083 of SEQ ID NO: 317947
aggugucaauaguccaaau

SEQ ID NO: 524802 - RNA, 19 nt, Artificial Sequence
  Description of Artificial Sequence: Synthetic oligonucleotide
  Antisense strand to SEQ ID NO: 524801
auuuggacuauugacaccu

SEQ ID NO: 524803 - RNA, 19 nt, Artificial Sequence
  Description of Artificial Sequence: Synthetic oligonucleotide
  Sense strand starting at position 1085 of SEQ ID NO: 317947
gugucaauaguccaaauga

SEQ ID NO: 524804 - RNA, 19 nt, Artificial Sequence
  Description of Artificial Sequence: Synthetic oligonucleotide
  Antisense strand to SEQ ID NO: 524803
ucauuuggacuauugacac

SEQ ID NO: 524805 - RNA, 19 nt, Artificial Sequence
  Description of Artificial Sequence: Synthetic oligonucleotide
  Sense strand starting at position 1291 of SEQ ID NO: 317947
ggcacaauguccucuugag

SEQ ID NO: 524806 - RNA, 19 nt, Artificial Sequence
  Description of Artificial Sequence: Synthetic oligonucleotide
  Antisense strand to SEQ ID NO: 524805
cucaagaggacauugugcc

SEQ ID NO: 524807 - RNA, 19 nt, Artificial Sequence
  Description of Artificial Sequence: Synthetic oligonucleotide
  Sense strand starting at position 1299 of SEQ ID NO: 317947
guccucuugagaggguaaa

SEQ ID NO: 524808 - RNA, 19 nt, Artificial Sequence
  Description of Artificial Sequence: Synthetic oligonucleotide
  Antisense strand to SEQ ID NO: 524807
uuuacccucucaagaggac

SEQ ID NO: 524809 - RNA, 19 nt, Artificial Sequence
  Description of Artificial Sequence: Synthetic oligonucleotide
  Sense strand starting at position 1339 of SEQ ID NO: 317947
uugguacagugauccggaa

SEQ ID NO: 524810 - RNA, 19 nt, Artificial Sequence
  Description of Artificial Sequence: Synthetic oligonucleotide
  Antisense strand to SEQ ID NO: 524809
uuccggaucacuguaccaa

SEQ ID NO: 524811 - RNA, 19 nt, Artificial Sequence
  Description of Artificial Sequence: Synthetic oligonucleotide
  Sense strand starting at position 1341 of SEQ ID NO: 317947
gguacagugauccggaauc

SEQ ID NO: 524812 - RNA, 19 nt, Artificial Sequence
  Description of Artificial Sequence: Synthetic oligonucleotide
  Antisense strand to SEQ ID NO: 524811
gauuccggaucacuguacc

SEQ ID NO: 524813 - RNA, 19 nt, Artificial Sequence
  Description of Artificial Sequence: Synthetic oligonucleotide
  Sense strand starting at position 1438 of SEQ ID NO: 317947
ggacauucaggguguccua

SEQ ID NO: 524814 - RNA, 19 nt, Artificial Sequence
  Description of Artificial Sequence: Synthetic oligonucleotide
  Antisense strand to SEQ ID NO: 524813
uaggacacccugaaugucc

SEQ ID NO: 524815 - RNA, 19 nt, Artificial Sequence
  Description of Artificial Sequence: Synthetic oligonucleotide
  Sense strand starting at position 1524 of SEQ ID NO: 317947
gaaggugcuucccugagau

SEQ ID NO: 524816 - RNA, 19 nt, Artificial Sequence
  Description of Artificial Sequence: Synthetic oligonucleotide
  Antisense strand to SEQ ID NO: 524815
aucucagggaagcaccuuc

SEQ ID NO: 524817 - RNA, 19 nt, Artificial Sequence
  Description of Artificial Sequence: Synthetic oligonucleotide
  Sense strand starting at position 1526 of SEQ ID NO: 317947
aggugcuucccugagaugu

SEQ ID NO: 524818 - RNA, 19 nt, Artificial Sequence
  Description of Artificial Sequence: Synthetic oligonucleotide
  Antisense strand to SEQ ID NO: 524817
acaucucagggaagcaccu

SEQ ID NO: 524819 - RNA, 19 nt, Artificial Sequence
  Description of Artificial Sequence: Synthetic oligonucleotide
  Sense strand starting at position 2257 of SEQ ID NO: 317947
agauguucucuccgggauc

SEQ ID NO: 524820 - RNA, 19 nt, Artificial Sequence
  Description of Artificial Sequence: Synthetic oligonucleotide
  Antisense strand to SEQ ID NO: 524819
gaucccggagagaacaucu

SEQ ID NO: 524821 - RNA, 19 nt, Artificial Sequence
  Description of Artificial Sequence: Synthetic oligonucleotide
  Sense strand starting at position 2259 of SEQ ID NO: 317947
auguucucuccgggaucau

SEQ ID NO: 524822 - RNA, 19 nt, Artificial Sequence
  Description of Artificial Sequence: Synthetic oligonucleotide
  Antisense strand to SEQ ID NO: 524821
augaucccggagagaacau

SEQ ID NO: 524823 - RNA, 19 nt, Artificial Sequence
  Description of Artificial Sequence: Synthetic oligonucleotide
  Sense strand starting at position 2260 of SEQ ID NO: 317947
uguucucuccgggaucauu

SEQ ID NO: 524824 - RNA, 19 nt, Artificial Sequence
  Description of Artificial Sequence: Synthetic oligonucleotide
  Antisense strand to SEQ ID NO: 524823
aaugaucccggagagaaca

SEQ ID NO: 524825 - RNA, 19 nt, Artificial Sequence
  Description of Artificial Sequence: Synthetic oligonucleotide
  Sense strand starting at position 2307 of SEQ ID NO: 317947
gcuuguucgauagaccucu

SEQ ID NO: 524826 - RNA, 19 nt, Artificial Sequence
  Description of Artificial Sequence: Synthetic oligonucleotide
  Antisense strand to SEQ ID NO: 524825
agaggucuaucgaacaagc

SEQ ID NO: 524827 - RNA, 19 nt, Artificial Sequence
  Description of Artificial Sequence: Synthetic oligonucleotide
  Sense strand starting at position 2313 of SEQ ID NO: 317947
ucgauagaccucugccacu

SEQ ID NO: 524828 - RNA, 19 nt, Artificial Sequence
  Description of Artificial Sequence: Synthetic oligonucleotide
  Antisense strand to SEQ ID NO: 524827
aguggcagaggucuaucga

SEQ ID NO: 524829 - RNA, 19 nt, Artificial Sequence
  Description of Artificial Sequence: Synthetic oligonucleotide
  Sense strand starting at position 2330 of SEQ ID NO: 317947
cugucuugggcuuaauaac

SEQ ID NO: 524830 - RNA, 19 nt, Artificial Sequence
  Description of Artificial Sequence: Synthetic oligonucleotide
  Antisense strand to SEQ ID NO: 524829
guuauuaagcccaagacag

SEQ ID NO: 524831 - RNA, 19 nt, Artificial Sequence
  Description of Artificial Sequence: Synthetic oligonucleotide
  Sense strand starting at position 2652 of SEQ ID NO: 317947
uuacuuugggcuuacuuua

SEQ ID NO: 524832 - RNA, 19 nt, Artificial Sequence
  Description of Artificial Sequence: Synthetic oligonucleotide
  Antisense strand to SEQ ID NO: 524831
uaaaguaagcccaaaguaa

SEQ ID NO: 524833 - RNA, 19 nt, Artificial Sequence
  Description of Artificial Sequence: Synthetic oligonucleotide
  Sense strand starting at position 2673 of SEQ ID NO: 317947
agugcuuuaagagaacgua

SEQ ID NO: 524834 - RNA, 19 nt, Artificial Sequence
  Description of Artificial Sequence: Synthetic oligonucleotide
  Antisense strand to SEQ ID NO: 524833
uacguucucuuaaagcacu

SEQ ID NO: 524835 - RNA, 19 nt, Artificial Sequence
  Description of Artificial Sequence: Synthetic oligonucleotide
  Sense strand starting at position 2676 of SEQ ID NO: 317947
gcuuuaagagaacguauua

SEQ ID NO: 524836 - RNA, 19 nt, Artificial Sequence
  Description of Artificial Sequence: Synthetic oligonucleotide
  Antisense strand to SEQ ID NO: 524835
uaauacguucucuuaaagc

SEQ ID NO: 524837 - RNA, 19 nt, Artificial Sequence
  Description of Artificial Sequence: Synthetic oligonucleotide
  Sense strand starting at position 2694 of SEQ ID NO: 317947
acaaguuaaucuguuacau

SEQ ID NO: 524838 - RNA, 19 nt, Artificial Sequence
  Description of Artificial Sequence: Synthetic oligonucleotide
  Antisense strand to SEQ ID NO: 524837
auguaacagauuaacuugu

SEQ ID NO: 524839 - RNA, 19 nt, Artificial Sequence
  Description of Artificial Sequence: Synthetic oligonucleotide
  Sense strand starting at position 2706 of SEQ ID NO: 317947
guuacauagaacuggguau

SEQ ID NO: 524840 - RNA, 19 nt, Artificial Sequence
  Description of Artificial Sequence: Synthetic oligonucleotide
  Antisense strand to SEQ ID NO: 524839
auacccaguucuauguaac

SEQ ID NO: 524841 - RNA, 19 nt, Artificial Sequence
  Description of Artificial Sequence: Synthetic oligonucleotide
  Sense strand starting at position 2922 of SEQ ID NO: 317947
acggauuaaccauauggca

SEQ ID NO: 524842 - RNA, 19 nt, Artificial Sequence
  Description of Artificial Sequence: Synthetic oligonucleotide
  Antisense strand to SEQ ID NO: 524841
ugccauaugguuaauccgu

SEQ ID NO: 524843 - RNA, 19 nt, Artificial Sequence
  Description of Artificial Sequence: Synthetic oligonucleotide
  Sense strand starting at position 2962 of SEQ ID NO: 317947
acgauuuacuuugagagca

SEQ ID NO: 524844 - RNA, 19 nt, Artificial Sequence
  Description of Artificial Sequence: Synthetic oligonucleotide
  Antisense strand to SEQ ID NO: 524843
ugcucucaaaguaaaucgu

SEQ ID NO: 524845 - RNA, 19 nt, Artificial Sequence
  Description of Artificial Sequence: Synthetic oligonucleotide
  Sense strand starting at position 3686 of SEQ ID NO: 317947
cggccugcacacuauuaau

SEQ ID NO: 524846 - RNA, 19 nt, Artificial Sequence
  Description of Artificial Sequence: Synthetic oligonucleotide
  Antisense strand to SEQ ID NO: 524845
auuaauagugugcaggccg

SEQ ID NO: 524847 - RNA, 19 nt, Artificial Sequence
  Description of Artificial Sequence: Synthetic oligonucleotide
  Sense strand starting at position 3709 of SEQ ID NO: 317947
ucucaauagugucuuuaac

SEQ ID NO: 524848 - RNA, 19 nt, Artificial Sequence
  Description of Artificial Sequence: Synthetic oligonucleotide
  Antisense strand to SEQ ID NO: 524847
guuaaagacacuauugaga

SEQ ID NO: 524849 - RNA, 19 nt, Artificial Sequence
  Description of Artificial Sequence: Synthetic oligonucleotide
  Sense strand starting at position 3711 of SEQ ID NO: 317947
ucaauagugucuuuaacac

SEQ ID NO: 524850 - RNA, 19 nt, Artificial Sequence
  Description of Artificial Sequence: Synthetic oligonucleotide
  Antisense strand to SEQ ID NO: 524849
guguuaaagacacuauuga

SEQ ID NO: 524851 - RNA, 19 nt, Artificial Sequence
  Description of Artificial Sequence: Synthetic oligonucleotide
  Sense strand starting at position 3743 of SEQ ID NO: 317947
auuauauacugagacugaa

SEQ ID NO: 524852 - RNA, 19 nt, Artificial Sequence
  Description of Artificial Sequence: Synthetic oligonucleotide
  Antisense strand to SEQ ID NO: 524851
uucagucucaguauauaau

SEQ ID NO: 524853 - RNA, 19 nt, Artificial Sequence
  Description of Artificial Sequence: Synthetic oligonucleotide
  Sense strand starting at position 3785 of SEQ ID NO: 317947
uaauguucggagugaucag

SEQ ID NO: 524854 - RNA, 19 nt, Artificial Sequence
  Description of Artificial Sequence: Synthetic oligonucleotide
  Antisense strand to SEQ ID NO: 524853
cugaucacuccgaacauua

SEQ ID NO: 524855 - RNA, 19 nt, Artificial Sequence
  Description of Artificial Sequence: Synthetic oligonucleotide
  Sense strand starting at position 3786 of SEQ ID NO: 317947
aauguucggagugaucagu

SEQ ID NO: 524856 - RNA, 19 nt, Artificial Sequence
  Description of Artificial Sequence: Synthetic oligonucleotide
  Antisense strand to SEQ ID NO: 524855
acugaucacuccgaacauu

SEQ ID NO: 524857 - RNA, 19 nt, Artificial Sequence
  Description of Artificial Sequence: Synthetic oligonucleotide
  Sense strand starting at position 3955 of SEQ ID NO: 317947
uuccgucagucauuugauu

SEQ ID NO: 524858 - RNA, 19 nt, Artificial Sequence
  Description of Artificial Sequence: Synthetic oligonucleotide
  Antisense strand to SEQ ID NO: 524857
aaucaaaugacugacggaa

SEQ ID NO: 524859 - RNA, 19 nt, Artificial Sequence
  Description of Artificial Sequence: Synthetic oligonucleotide
  Sense strand starting at position 3957 of SEQ ID NO: 317947
ccgucagucauuugauugu

SEQ ID NO: 524860 - RNA, 19 nt, Artificial Sequence
  Description of Artificial Sequence: Synthetic oligonucleotide
  Antisense strand to SEQ ID NO: 524859
acaaucaaaugacugacgg

SEQ ID NO: 524861 - RNA, 19 nt, Artificial Sequence
  Description of Artificial Sequence: Synthetic oligonucleotide
  Sense strand starting at position 332 of SEQ ID NO: 317948
aaggucaacugacuaguau

SEQ ID NO: 524862 - RNA, 19 nt, Artificial Sequence
  Description of Artificial Sequence: Synthetic oligonucleotide
  Antisense strand to SEQ ID NO: 524861
auacuagucaguugaccuu

SEQ ID NO: 524863 - RNA, 19 nt, Artificial Sequence
  Description of Artificial Sequence: Synthetic oligonucleotide
  Sense strand starting at position 333 of SEQ ID NO: 317948
aggucaacugacuaguauu

SEQ ID NO: 524864 - RNA, 19 nt, Artificial Sequence
  Description of Artificial Sequence: Synthetic oligonucleotide
  Antisense strand to SEQ ID NO: 524863
aauacuagucaguugaccu

SEQ ID NO: 524865 - RNA, 19 nt, Artificial Sequence
  Description of Artificial Sequence: Synthetic oligonucleotide
  Sense strand starting at position 394 of SEQ ID NO: 317948
uccugcuaucagcaaagga

SEQ ID NO: 524866 - RNA, 19 nt, Artificial Sequence
  Description of Artificial Sequence: Synthetic oligonucleotide
  Antisense strand to SEQ ID NO: 524865
uccuuugcugauagcagga

SEQ ID NO: 524867 - RNA, 19 nt, Artificial Sequence
  Description of Artificial Sequence: Synthetic oligonucleotide
  Sense strand starting at position 427 of SEQ ID NO: 317948
uuuaguuucguaguuguua

SEQ ID NO: 524868 - RNA, 19 nt, Artificial Sequence
  Description of Artificial Sequence: Synthetic oligonucleotide
  Antisense strand to SEQ ID NO: 524867
uaacaacuacgaaacuaaa

SEQ ID NO: 524869 - RNA, 19 nt, Artificial Sequence
  Description of Artificial Sequence: Synthetic oligonucleotide
  Sense strand starting at position 542 of SEQ ID NO: 317948
cagagauauuuggauauac

SEQ ID NO: 524870 - RNA, 19 nt, Artificial Sequence
  Description of Artificial Sequence: Synthetic oligonucleotide
  Antisense strand to SEQ ID NO: 524869
guauauccaaauaucucug

SEQ ID NO: 524871 - RNA, 19 nt, Artificial Sequence
  Description of Artificial Sequence: Synthetic oligonucleotide
  Sense strand starting at position 960 of SEQ ID NO: 317948
ggccguaaauuugucaucu

SEQ ID NO: 524872 - RNA, 19 nt, Artificial Sequence
  Description of Artificial Sequence: Synthetic oligonucleotide
  Antisense strand to SEQ ID NO: 524871
agaugacaaauuuacggcc

SEQ ID NO: 524873 - RNA, 19 nt, Artificial Sequence
  Description of Artificial Sequence: Synthetic oligonucleotide
  Sense strand starting at position 961 of SEQ ID NO: 317948
gccguaaauuugucaucuu

SEQ ID NO: 524874 - RNA, 19 nt, Artificial Sequence
  Description of Artificial Sequence: Synthetic oligonucleotide
  Antisense strand to SEQ ID NO: 524873
aagaugacaaauuuacggc

SEQ ID NO: 524875 - RNA, 19 nt, Artificial Sequence
  Description of Artificial Sequence: Synthetic oligonucleotide
  Sense strand starting at position 964 of SEQ ID NO: 317948
guaaauuugucaucuuagu

SEQ ID NO: 524876 - RNA, 19 nt, Artificial Sequence
  Description of Artificial Sequence: Synthetic oligonucleotide
  Antisense strand to SEQ ID NO: 524875
acuaagaugacaaauuuac

SEQ ID NO: 524877 - RNA, 19 nt, Artificial Sequence
  Description of Artificial Sequence: Synthetic oligonucleotide
  Sense strand starting at position 1063 of SEQ ID NO: 317948
cguugauauacacauugga

SEQ ID NO: 524878 - RNA, 19 nt, Artificial Sequence
  Description of Artificial Sequence: Synthetic oligonucleotide
  Antisense strand to SEQ ID NO: 524877
uccaauguguauaucaacg

SEQ ID NO: 524879 - RNA, 19 nt, Artificial Sequence
  Description of Artificial Sequence: Synthetic oligonucleotide
  Sense strand starting at position 1076 of SEQ ID NO: 317948
auuggagagaggugucaau

SEQ ID NO: 524880 - RNA, 19 nt, Artificial Sequence
  Description of Artificial Sequence: Synthetic oligonucleotide
  Antisense strand to SEQ ID NO: 524879
auugacaccucucuccaau

SEQ ID NO: 524881 - RNA, 19 nt, Artificial Sequence
  Description of Artificial Sequence: Synthetic oligonucleotide
  Sense strand starting at position 1085 of SEQ ID NO: 317948
aggugucaauaguccaaau

SEQ ID NO: 524882 - RNA, 19 nt, Artificial Sequence
  Description of Artificial Sequence: Synthetic oligonucleotide
  Antisense strand to SEQ ID NO: 524881
auuuggacuauugacaccu

SEQ ID NO: 524883 - RNA, 19 nt, Artificial Sequence
  Description of Artificial Sequence: Synthetic oligonucleotide
  Sense strand starting at position 1087 of SEQ ID NO: 317948
gugucaauaguccaaauga

SEQ ID NO: 524884 - RNA, 19 nt, Artificial Sequence
  Description of Artificial Sequence: Synthetic oligonucleotide
  Antisense strand to SEQ ID NO: 524883
ucauuuggacuauugacac

SEQ ID NO: 524885 - RNA, 19 nt, Artificial Sequence
  Description of Artificial Sequence: Synthetic oligonucleotide
  Sense strand starting at position 1293 of SEQ ID NO: 317948
ggcacaauguccucuugag

SEQ ID NO: 524886 - RNA, 19 nt, Artificial Sequence
  Description of Artificial Sequence: Synthetic oligonucleotide
  Antisense strand to SEQ ID NO: 524885
cucaagaggacauugugcc

SEQ ID NO: 524887 - RNA, 19 nt, Artificial Sequence
  Description of Artificial Sequence: Synthetic oligonucleotide
  Sense strand starting at position 1301 of SEQ ID NO: 317948
guccucuugagaggguaaa

SEQ ID NO: 524888 - RNA, 19 nt, Artificial Sequence
  Description of Artificial Sequence: Synthetic oligonucleotide
  Antisense strand to SEQ ID NO: 524887
uuuacccucucaagaggac

SEQ ID NO: 524889 - RNA, 19 nt, Artificial Sequence
  Description of Artificial Sequence: Synthetic oligonucleotide
  Sense strand starting at position 1341 of SEQ ID NO: 317948
uugguacagugauccggaa

SEQ ID NO: 524890 - RNA, 19 nt, Artificial Sequence
  Description of Artificial Sequence: Synthetic oligonucleotide
  Antisense strand to SEQ ID NO: 524889
uuccggaucacuguaccaa

SEQ ID NO: 524891 - RNA, 19 nt, Artificial Sequence
  Description of Artificial Sequence: Synthetic oligonucleotide
  Sense strand starting at position 1343 of SEQ ID NO: 317948
gguacagugauccggaauc

SEQ ID NO: 524892 - RNA, 19 nt, Artificial Sequence
  Description of Artificial Sequence: Synthetic oligonucleotide
  Antisense strand to SEQ ID NO: 524891
gauuccggaucacuguacc

SEQ ID NO: 524893 - RNA, 19 nt, Artificial Sequence
  Description of Artificial Sequence: Synthetic oligonucleotide
  Sense strand starting at position 1440 of SEQ ID NO: 317948
ggacauucaggguguccua

SEQ ID NO: 524894 - RNA, 19 nt, Artificial Sequence
  Description of Artificial Sequence: Synthetic oligonucleotide
  Antisense strand to SEQ ID NO: 524893
uaggacacccugaaugucc

SEQ ID NO: 524895 - RNA, 19 nt, Artificial Sequence
  Description of Artificial Sequence: Synthetic oligonucleotide
  Sense strand starting at position 1526 of SEQ ID NO: 317948
gaaggugcuucccugagau

SEQ ID NO: 524896 - RNA, 19 nt, Artificial Sequence
  Description of Artificial Sequence: Synthetic oligonucleotide
  Antisense strand to SEQ ID NO: 524895
aucucagggaagcaccuuc

SEQ ID NO: 524897 - RNA, 19 nt, Artificial Sequence
  Description of Artificial Sequence: Synthetic oligonucleotide
  Sense strand starting at position 1528 of SEQ ID NO: 317948
aggugcuucccugagaugu

SEQ ID NO: 524898 - RNA, 19 nt, Artificial Sequence
  Description of Artificial Sequence: Synthetic oligonucleotide
  Antisense strand to SEQ ID NO: 524897
acaucucagggaagcaccu

SEQ ID NO: 524899 - RNA, 19 nt, Artificial Sequence
  Description of Artificial Sequence: Synthetic oligonucleotide
  Sense strand starting at position 2259 of SEQ ID NO: 317948
agauguucucuccgggauc

SEQ ID NO: 524900 - RNA, 19 nt, Artificial Sequence
  Description of Artificial Sequence: Synthetic oligonucleotide
  Antisense strand to SEQ ID NO: 524899
gaucccggagagaacaucu

SEQ ID NO: 524901 - RNA, 19 nt, Artificial Sequence
  Description of Artificial Sequence: Synthetic oligonucleotide
  Sense strand starting at position 2261 of SEQ ID NO: 317948
auguucucuccgggaucau

SEQ ID NO: 524902 - RNA, 19 nt, Artificial Sequence
  Description of Artificial Sequence: Synthetic oligonucleotide
  Antisense strand to SEQ ID NO: 524901
augaucccggagagaacau

SEQ ID NO: 524903 - RNA, 19 nt, Artificial Sequence
  Description of Artificial Sequence: Synthetic oligonucleotide
  Sense strand starting at position 2262 of SEQ ID NO: 317948
uguucucuccgggaucauu

SEQ ID NO: 524904 - RNA, 19 nt, Artificial Sequence
  Description of Artificial Sequence: Synthetic oligonucleotide
  Antisense strand to SEQ ID NO: 524903
aaugaucccggagagaaca

SEQ ID NO: 524905 - RNA, 19 nt, Artificial Sequence
  Description of Artificial Sequence: Synthetic oligonucleotide
  Sense strand starting at position 2309 of SEQ ID NO: 317948
gcuuguucgauagaccucu

SEQ ID NO: 524906 - RNA, 19 nt, Artificial Sequence
  Description of Artificial Sequence: Synthetic oligonucleotide
  Antisense strand to SEQ ID NO: 524905
agaggucuaucgaacaagc

SEQ ID NO: 524907 - RNA, 19 nt, Artificial Sequence
  Description of Artificial Sequence: Synthetic oligonucleotide
  Sense strand starting at position 2315 of SEQ ID NO: 317948
ucgauagaccucugccacu

SEQ ID NO: 524908 - RNA, 19 nt, Artificial Sequence
  Description of Artificial Sequence: Synthetic oligonucleotide
  Antisense strand to SEQ ID NO: 524907
aguggcagaggucuaucga

SEQ ID NO: 524909 - RNA, 19 nt, Artificial Sequence
  Description of Artificial Sequence: Synthetic oligonucleotide
  Sense strand starting at position 2332 of SEQ ID NO: 317948
cugucuugggcuuaauaac

SEQ ID NO: 524910 - RNA, 19 nt, Artificial Sequence
  Description of Artificial Sequence: Synthetic oligonucleotide
  Antisense strand to SEQ ID NO: 524909
guuauuaagcccaagacag

SEQ ID NO: 524911 - RNA, 19 nt, Artificial Sequence
  Description of Artificial Sequence: Synthetic oligonucleotide
  Sense strand starting at position 2654 of SEQ ID NO: 317948
uuacuuugggcuuacuuua

SEQ ID NO: 524912 - RNA, 19 nt, Artificial Sequence
  Description of Artificial Sequence: Synthetic oligonucleotide
  Antisense strand to SEQ ID NO: 524911
uaaaguaagcccaaaguaa

SEQ ID NO: 524913 - RNA, 19 nt, Artificial Sequence
  Description of Artificial Sequence: Synthetic oligonucleotide
  Sense strand starting at position 2675 of SEQ ID NO: 317948
agugcuuuaagagaacgua

SEQ ID NO: 524914 - RNA, 19 nt, Artificial Sequence
  Description of Artificial Sequence: Synthetic oligonucleotide
  Antisense strand to SEQ ID NO: 524913
uacguucucuuaaagcacu

SEQ ID NO: 524915 - RNA, 19 nt, Artificial Sequence
  Description of Artificial Sequence: Synthetic oligonucleotide
  Sense strand starting at position 2678 of SEQ ID NO: 317948
gcuuuaagagaacguauua

SEQ ID NO: 524916 - RNA, 19 nt, Artificial Sequence
  Description of Artificial Sequence: Synthetic oligonucleotide
  Antisense strand to SEQ ID NO: 524915
uaauacguucucuuaaagc

SEQ ID NO: 524917 - RNA, 19 nt, Artificial Sequence
  Description of Artificial Sequence: Synthetic oligonucleotide
  Sense strand starting at position 2696 of SEQ ID NO: 317948
acaaguuaaucuguuacau

SEQ ID NO: 524918 - RNA, 19 nt, Artificial Sequence
  Description of Artificial Sequence: Synthetic oligonucleotide
  Antisense strand to SEQ ID NO: 524917
auguaacagauuaacuugu

SEQ ID NO: 524919 - RNA, 19 nt, Artificial Sequence
  Description of Artificial Sequence: Synthetic oligonucleotide
  Sense strand starting at position 2708 of SEQ ID NO: 317948
guuacauagaacuggguau

SEQ ID NO: 524920 - RNA, 19 nt, Artificial Sequence
  Description of Artificial Sequence: Synthetic oligonucleotide
  Antisense strand to SEQ ID NO: 524919
auacccaguucuauguaac

SEQ ID NO: 524921 - RNA, 19 nt, Artificial Sequence
  Description of Artificial Sequence: Synthetic oligonucleotide
  Sense strand starting at position 2924 of SEQ ID NO: 317948
acggauuaaccauauggca

SEQ ID NO: 524922 - RNA, 19 nt, Artificial Sequence
  Description of Artificial Sequence: Synthetic oligonucleotide
  Antisense strand to SEQ ID NO: 524921
ugccauaugguuaauccgu

SEQ ID NO: 524923 - RNA, 19 nt, Artificial Sequence
  Description of Artificial Sequence: Synthetic oligonucleotide
  Sense strand starting at position 2964 of SEQ ID NO: 317948
acgauuuacuuugagagca

SEQ ID NO: 524924 - RNA, 19 nt, Artificial Sequence
  Description of Artificial Sequence: Synthetic oligonucleotide
  Antisense strand to SEQ ID NO: 524923
ugcucucaaaguaaaucgu

SEQ ID NO: 524925 - RNA, 19 nt, Artificial Sequence
  Description of Artificial Sequence: Synthetic oligonucleotide
  Sense strand starting at position 3688 of SEQ ID NO: 317948
cggccugcacacuauuaau

SEQ ID NO: 524926 - RNA, 19 nt, Artificial Sequence
  Description of Artificial Sequence: Synthetic oligonucleotide
  Antisense strand to SEQ ID NO: 524925
auuaauagugugcaggccg

SEQ ID NO: 524927 - RNA, 19 nt, Artificial Sequence
  Description of Artificial Sequence: Synthetic oligonucleotide
  Sense strand starting at position 3711 of SEQ ID NO: 317948
ucucaauagugucuuuaac

SEQ ID NO: 524928 - RNA, 19 nt, Artificial Sequence
  Description of Artificial Sequence: Synthetic oligonucleotide
  Antisense strand to SEQ ID NO: 524927
guuaaagacacuauugaga

SEQ ID NO: 524929 - RNA, 19 nt, Artificial Sequence
  Description of Artificial Sequence: Synthetic oligonucleotide
  Sense strand starting at position 3713 of SEQ ID NO: 317948
ucaauagugucuuuaacac

SEQ ID NO: 524930 - RNA, 19 nt, Artificial Sequence
  Description of Artificial Sequence: Synthetic oligonucleotide
  Antisense strand to SEQ ID NO: 524929
guguuaaagacacuauuga

SEQ ID NO: 524931 - RNA, 19 nt, Artificial Sequence
  Description of Artificial Sequence: Synthetic oligonucleotide
  Sense strand starting at position 3745 of SEQ ID NO: 317948
auuauauacugagacugaa

SEQ ID NO: 524932 - RNA, 19 nt, Artificial Sequence
  Description of Artificial Sequence: Synthetic oligonucleotide
  Antisense strand to SEQ ID NO: 524931
uucagucucaguauauaau

SEQ ID NO: 524933 - RNA, 19 nt, Artificial Sequence
  Description of Artificial Sequence: Synthetic oligonucleotide
  Sense strand starting at position 3787 of SEQ ID NO: 317948
uaauguucggagugaucag

SEQ ID NO: 524934 - RNA, 19 nt, Artificial Sequence
  Description of Artificial Sequence: Synthetic oligonucleotide
  Antisense strand to SEQ ID NO: 524933
cugaucacuccgaacauua

SEQ ID NO: 524935 - RNA, 19 nt, Artificial Sequence
  Description of Artificial Sequence: Synthetic oligonucleotide
  Sense strand starting at position 3788 of SEQ ID NO: 317948
aauguucggagugaucagu

SEQ ID NO: 524936 - RNA, 19 nt, Artificial Sequence
  Description of Artificial Sequence: Synthetic oligonucleotide
  Antisense strand to SEQ ID NO: 524935
acugaucacuccgaacauu

SEQ ID NO: 524937 - RNA, 19 nt, Artificial Sequence
  Description of Artificial Sequence: Synthetic oligonucleotide
  Sense strand starting at position 3957 of SEQ ID NO: 317948
uuccgucagucauuugauu

SEQ ID NO: 524938 - RNA, 19 nt, Artificial Sequence
  Description of Artificial Sequence: Synthetic oligonucleotide
  Antisense strand to SEQ ID NO: 524937
aaucaaaugacugacggaa

SEQ ID NO: 524939 - RNA, 19 nt, Artificial Sequence
  Description of Artificial Sequence: Synthetic oligonucleotide
  Sense strand starting at position 3959 of SEQ ID NO: 317948
ccgucagucauuugauugu

SEQ ID NO: 524940 - RNA, 19 nt, Artificial Sequence
  Description of Artificial Sequence: Synthetic oligonucleotide
  Antisense strand to SEQ ID NO: 524939
acaaucaaaugacugacgg

SEQ ID NO: 524941 - RNA, 19 nt, Artificial Sequence
  Description of Artificial Sequence: Synthetic oligonucleotide
  Sense strand starting at position 83 of SEQ ID NO: 317949
aaguccaguucugugaauu

SEQ ID NO: 524942 - RNA, 19 nt, Artificial Sequence
  Description of Artificial Sequence: Synthetic oligonucleotide
  Antisense strand to SEQ ID NO: 524941
aauucacagaacuggacuu

SEQ ID NO: 524943 - RNA, 19 nt, Artificial Sequence
  Description of Artificial Sequence: Synthetic oligonucleotide
  Sense strand starting at position 84 of SEQ ID NO: 317949
aguccaguucugugaauua

SEQ ID NO: 524944 - RNA, 19 nt, Artificial Sequence
  Description of Artificial Sequence: Synthetic oligonucleotide
  Antisense strand to SEQ ID NO: 524943
uaauucacagaacuggacu

SEQ ID NO: 524945 - RNA, 19 nt, Artificial Sequence
  Description of Artificial Sequence: Synthetic oligonucleotide
  Sense strand starting at position 209 of SEQ ID NO: 317949
gcagcuauccaacagacuu

SEQ ID NO: 524946 - RNA, 19 nt, Artificial Sequence
  Description of Artificial Sequence: Synthetic oligonucleotide
  Antisense strand to SEQ ID NO: 524945
aagucuguuggauagcugc

SEQ ID NO: 524947 - RNA, 19 nt, Artificial Sequence
  Description of Artificial Sequence: Synthetic oligonucleotide
  Sense strand starting at position 957 of SEQ ID NO: 317949
uaggaaacccuuuguccga

SEQ ID NO: 524948 - RNA, 19 nt, Artificial Sequence
  Description of Artificial Sequence: Synthetic oligonucleotide
  Antisense strand to SEQ ID NO: 524947
ucggacaaaggguuuccua

SEQ ID NO: 524949 - RNA, 19 nt, Artificial Sequence
  Description of Artificial Sequence: Synthetic oligonucleotide
  Sense strand starting at position 960 of SEQ ID NO: 317949
gaaacccuuuguccgagaa

SEQ ID NO: 524950 - RNA, 19 nt, Artificial Sequence
  Description of Artificial Sequence: Synthetic oligonucleotide
  Antisense strand to SEQ ID NO: 524949
uucucggacaaaggguuuc

SEQ ID NO: 524951 - RNA, 19 nt, Artificial Sequence
  Description of Artificial Sequence: Synthetic oligonucleotide
  Sense strand starting at position 1400 of SEQ ID NO: 317949
gccggagaugucgagggau

SEQ ID NO: 524952 - RNA, 19 nt, Artificial Sequence
  Description of Artificial Sequence: Synthetic oligonucleotide
  Antisense strand to SEQ ID NO: 524951
aucccucgacaucuccggc

SEQ ID NO: 524953 - RNA, 19 nt, Artificial Sequence
  Description of Artificial Sequence: Synthetic oligonucleotide
  Sense strand starting at position 1402 of SEQ ID NO: 317949
cggagaugucgagggauca

SEQ ID NO: 524954 - RNA, 19 nt, Artificial Sequence
  Description of Artificial Sequence: Synthetic oligonucleotide
  Antisense strand to SEQ ID NO: 524953
ugaucccucgacaucuccg

SEQ ID NO: 524955 - RNA, 19 nt, Artificial Sequence
  Description of Artificial Sequence: Synthetic oligonucleotide
  Sense strand starting at position 1403 of SEQ ID NO: 317949
ggagaugucgagggaucag

SEQ ID NO: 524956 - RNA, 19 nt, Artificial Sequence
  Description of Artificial Sequence: Synthetic oligonucleotide
  Antisense strand to SEQ ID NO: 524955
cugaucccucgacaucucc

SEQ ID NO: 524957 - RNA, 19 nt, Artificial Sequence
  Description of Artificial Sequence: Synthetic oligonucleotide
  Sense strand starting at position 1595 of SEQ ID NO: 317949
auggucuuguccucaauca

SEQ ID NO: 524958 - RNA, 19 nt, Artificial Sequence
  Description of Artificial Sequence: Synthetic oligonucleotide
  Antisense strand to SEQ ID NO: 524957
ugauugaggacaagaccau

SEQ ID NO: 524959 - RNA, 19 nt, Artificial Sequence
  Description of Artificial Sequence: Synthetic oligonucleotide
  Sense strand starting at position 2371 of SEQ ID NO: 317949
gagauuucuucgggaaaga

SEQ ID NO: 524960 - RNA, 19 nt, Artificial Sequence
  Description of Artificial Sequence: Synthetic oligonucleotide
  Antisense strand to SEQ ID NO: 524959
ucuuucccgaagaaaucuc

SEQ ID NO: 524961 - RNA, 19 nt, Artificial Sequence
  Description of Artificial Sequence: Synthetic oligonucleotide
  Sense strand starting at position 2600 of SEQ ID NO: 317949
cuuaauucugguggaggga

SEQ ID NO: 524962 - RNA, 19 nt, Artificial Sequence
  Description of Artificial Sequence: Synthetic oligonucleotide
  Antisense strand to SEQ ID NO: 524961
ucccuccaccagaauuaag

SEQ ID NO: 524963 - RNA, 19 nt, Artificial Sequence
  Description of Artificial Sequence: Synthetic oligonucleotide
  Sense strand starting at position 2688 of SEQ ID NO: 317949
ccuccaacucuguguaacu

SEQ ID NO: 524964 - RNA, 19 nt, Artificial Sequence
  Description of Artificial Sequence: Synthetic oligonucleotide
  Antisense strand to SEQ ID NO: 524963
aguuacacagaguuggagg

SEQ ID NO: 524965 - RNA, 19 nt, Artificial Sequence
  Description of Artificial Sequence: Synthetic oligonucleotide
  Sense strand starting at position 2689 of SEQ ID NO: 317949
cuccaacucuguguaacuu

SEQ ID NO: 524966 - RNA, 19 nt, Artificial Sequence
  Description of Artificial Sequence: Synthetic oligonucleotide
  Antisense strand to SEQ ID NO: 524965
aaguuacacagaguuggag

SEQ ID NO: 524967 - RNA, 19 nt, Artificial Sequence
  Description of Artificial Sequence: Synthetic oligonucleotide
  Sense strand starting at position 2690 of SEQ ID NO: 317949
uccaacucuguguaacuua

SEQ ID NO: 524968 - RNA, 19 nt, Artificial Sequence
  Description of Artificial Sequence: Synthetic oligonucleotide
  Antisense strand to SEQ ID NO: 524967
uaaguuacacagaguugga

SEQ ID NO: 524969 - RNA, 19 nt, Artificial Sequence
  Description of Artificial Sequence: Synthetic oligonucleotide
  Sense strand starting at position 2758 of SEQ ID NO: 317949
ugaacaagcuggguuuauu

SEQ ID NO: 524970 - RNA, 19 nt, Artificial Sequence
  Description of Artificial Sequence: Synthetic oligonucleotide
  Antisense strand to SEQ ID NO: 524969
aauaaacccagcuuguuca

SEQ ID NO: 524971 - RNA, 19 nt, Artificial Sequence
  Description of Artificial Sequence: Synthetic oligonucleotide
  Sense strand starting at position 2816 of SEQ ID NO: 317949
agggccucucgguaagagu

SEQ ID NO: 524972 - RNA, 19 nt, Artificial Sequence
  Description of Artificial Sequence: Synthetic oligonucleotide
  Antisense strand to SEQ ID NO: 524971
acucuuaccgagaggcccu

SEQ ID NO: 524973 - RNA, 19 nt, Artificial Sequence
  Description of Artificial Sequence: Synthetic oligonucleotide
  Sense strand starting at position 2865 of SEQ ID NO: 317949
gugagagcuucacuggauu

SEQ ID NO: 524974 - RNA, 19 nt, Artificial Sequence
  Description of Artificial Sequence: Synthetic oligonucleotide
  Antisense strand to SEQ ID NO: 524973
aauccagugaagcucucac

SEQ ID NO: 524975 - RNA, 19 nt, Artificial Sequence
  Description of Artificial Sequence: Synthetic oligonucleotide
  Sense strand starting at position 2902 of SEQ ID NO: 317949
agggucguuccaugauuga

SEQ ID NO: 524976 - RNA, 19 nt, Artificial Sequence
  Description of Artificial Sequence: Synthetic oligonucleotide
  Antisense strand to SEQ ID NO: 524975
ucaaucauggaacgacccu

SEQ ID NO: 524977 - RNA, 19 nt, Artificial Sequence
  Description of Artificial Sequence: Synthetic oligonucleotide
  Sense strand starting at position 2950 of SEQ ID NO: 317949
ggaauucuagauugaggcu

SEQ ID NO: 524978 - RNA, 19 nt, Artificial Sequence
  Description of Artificial Sequence: Synthetic oligonucleotide
  Antisense strand to SEQ ID NO: 524977
agccucaaucuagaauucc

SEQ ID NO: 524979 - RNA, 19 nt, Artificial Sequence
  Description of Artificial Sequence: Synthetic oligonucleotide
  Sense strand starting at position 2956 of SEQ ID NO: 317949
cuagauugaggcuaaagcu

SEQ ID NO: 524980 - RNA, 19 nt, Artificial Sequence
  Description of Artificial Sequence: Synthetic oligonucleotide
  Antisense strand to SEQ ID NO: 524979
agcuuuagccucaaucuag

SEQ ID NO: 524981 - RNA, 19 nt, Artificial Sequence
  Description of Artificial Sequence: Synthetic oligonucleotide
  Sense strand starting at position 2966 of SEQ ID NO: 317949
gcuaaagcugugcagauaa

SEQ ID NO: 524982 - RNA, 19 nt, Artificial Sequence
  Description of Artificial Sequence: Synthetic oligonucleotide
  Antisense strand to SEQ ID NO: 524981
uuaucugcacagcuuuagc

SEQ ID NO: 524983 - RNA, 19 nt, Artificial Sequence
  Description of Artificial Sequence: Synthetic oligonucleotide
  Sense strand starting at position 3245 of SEQ ID NO: 317949
acuguacccugagugauag

SEQ ID NO: 524984 - RNA, 19 nt, Artificial Sequence
  Description of Artificial Sequence: Synthetic oligonucleotide
  Antisense strand to SEQ ID NO: 524983
cuaucacucaggguacagu

SEQ ID NO: 524985 - RNA, 19 nt, Artificial Sequence
  Description of Artificial Sequence: Synthetic oligonucleotide
  Sense strand starting at position 3246 of SEQ ID NO: 317949
cuguacccugagugauaga

SEQ ID NO: 524986 - RNA, 19 nt, Artificial Sequence
  Description of Artificial Sequence: Synthetic oligonucleotide
  Antisense strand to SEQ ID NO: 524985
ucuaucacucaggguacag

SEQ ID NO: 524987 - RNA, 19 nt, Artificial Sequence
  Description of Artificial Sequence: Synthetic oligonucleotide
  Sense strand starting at position 3360 of SEQ ID NO: 317949
uuuggacaaucaucagguu

SEQ ID NO: 524988 - RNA, 19 nt, Artificial Sequence
  Description of Artificial Sequence: Synthetic oligonucleotide
  Antisense strand to SEQ ID NO: 524987
aaccugaugauuguccaaa

SEQ ID NO: 524989 - RNA, 19 nt, Artificial Sequence
  Description of Artificial Sequence: Synthetic oligonucleotide
  Sense strand starting at position 3392 of SEQ ID NO: 317949
guguuuagaccugauuaua

SEQ ID NO: 524990 - RNA, 19 nt, Artificial Sequence
  Description of Artificial Sequence: Synthetic oligonucleotide
  Antisense strand to SEQ ID NO: 524989
uauaaucaggucuaaacac

SEQ ID NO: 524991 - RNA, 19 nt, Artificial Sequence
  Description of Artificial Sequence: Synthetic oligonucleotide
  Sense strand starting at position 3402 of SEQ ID NO: 317949
cugauuauagaguggucuu

SEQ ID NO: 524992 - RNA, 19 nt, Artificial Sequence
  Description of Artificial Sequence: Synthetic oligonucleotide
  Antisense strand to SEQ ID NO: 524991
aagaccacucuauaaucag

SEQ ID NO: 524993 - RNA, 19 nt, Artificial Sequence
  Description of Artificial Sequence: Synthetic oligonucleotide
  Sense strand starting at position 3405 of SEQ ID NO: 317949
auuauagaguggucuugua

SEQ ID NO: 524994 - RNA, 19 nt, Artificial Sequence
  Description of Artificial Sequence: Synthetic oligonucleotide
  Antisense strand to SEQ ID NO: 524993
uacaagaccacucuauaau

SEQ ID NO: 524995 - RNA, 19 nt, Artificial Sequence
  Description of Artificial Sequence: Synthetic oligonucleotide
  Sense strand starting at position 3415 of SEQ ID NO: 317949
ggucuuguauuugucugga

SEQ ID NO: 524996 - RNA, 19 nt, Artificial Sequence
  Description of Artificial Sequence: Synthetic oligonucleotide
  Antisense strand to SEQ ID NO: 524995
uccagacaaauacaagacc

SEQ ID NO: 524997 - RNA, 19 nt, Artificial Sequence
  Description of Artificial Sequence: Synthetic oligonucleotide
  Sense strand starting at position 3417 of SEQ ID NO: 317949
ucuuguauuugucuggauc

SEQ ID NO: 524998 - RNA, 19 nt, Artificial Sequence
  Description of Artificial Sequence: Synthetic oligonucleotide
  Antisense strand to SEQ ID NO: 524997
gauccagacaaauacaaga

SEQ ID NO: 524999 - RNA, 19 nt, Artificial Sequence
  Description of Artificial Sequence: Synthetic oligonucleotide
  Sense strand starting at position 3418 of SEQ ID NO: 317949
cuuguauuugucuggaucu

SEQ ID NO: 525000 - RNA, 19 nt, Artificial Sequence
  Description of Artificial Sequence: Synthetic oligonucleotide
  Antisense strand to SEQ ID NO: 524999
agauccagacaaauacaag

SEQ ID NO: 525001 - RNA, 19 nt, Artificial Sequence
  Description of Artificial Sequence: Synthetic oligonucleotide
  Sense strand starting at position 3430 of SEQ ID NO: 317949
uggaucuaucauggucaca

SEQ ID NO: 525002 - RNA, 19 nt, Artificial Sequence
  Description of Artificial Sequence: Synthetic oligonucleotide
  Antisense strand to SEQ ID NO: 525001
ugugaccaugauagaucca

SEQ ID NO: 525003 - RNA, 19 nt, Artificial Sequence
  Description of Artificial Sequence: Synthetic oligonucleotide
  Sense strand starting at position 3432 of SEQ ID NO: 317949
gaucuaucauggucacaga

SEQ ID NO: 525004 - RNA, 19 nt, Artificial Sequence
  Description of Artificial Sequence: Synthetic oligonucleotide
  Antisense strand to SEQ ID NO: 525003
ucugugaccaugauagauc

SEQ ID NO: 525005 - RNA, 19 nt, Artificial Sequence
  Description of Artificial Sequence: Synthetic oligonucleotide
  Sense strand starting at position 3446 of SEQ ID NO: 317949
acagaaugaccucgucuga

SEQ ID NO: 525006 - RNA, 19 nt, Artificial Sequence
  Description of Artificial Sequence: Synthetic oligonucleotide
  Antisense strand to SEQ ID NO: 525005
ucagacgaggucauucugu

SEQ ID NO: 525007 - RNA, 19 nt, Artificial Sequence
  Description of Artificial Sequence: Synthetic oligonucleotide
  Sense strand starting at position 3465 of SEQ ID NO: 317949
uguugauguucuuuggaau

SEQ ID NO: 525008 - RNA, 19 nt, Artificial Sequence
  Description of Artificial Sequence: Synthetic oligonucleotide
  Antisense strand to SEQ ID NO: 525007
auuccaaagaacaucaaca

SEQ ID NO: 525009 - RNA, 19 nt, Artificial Sequence
  Description of Artificial Sequence: Synthetic oligonucleotide
  Sense strand starting at position 3466 of SEQ ID NO: 317949
guugauguucuuuggaauu

SEQ ID NO: 525010 - RNA, 19 nt, Artificial Sequence
  Description of Artificial Sequence: Synthetic oligonucleotide
  Antisense strand to SEQ ID NO: 525009
aauuccaaagaacaucaac

SEQ ID NO: 525011 - RNA, 19 nt, Artificial Sequence
  Description of Artificial Sequence: Synthetic oligonucleotide
  Sense strand starting at position 3733 of SEQ ID NO: 317949
gcagguagacuuugaaguu

SEQ ID NO: 525012 - RNA, 19 nt, Artificial Sequence
  Description of Artificial Sequence: Synthetic oligonucleotide
  Antisense strand to SEQ ID NO: 525011
aacuucaaagucuaccugc

SEQ ID NO: 525013 - RNA, 19 nt, Artificial Sequence
  Description of Artificial Sequence: Synthetic oligonucleotide
  Sense strand starting at position 3824 of SEQ ID NO: 317949
aguucuuaccacugucaug

SEQ ID NO: 525014 - RNA, 19 nt, Artificial Sequence
  Description of Artificial Sequence: Synthetic oligonucleotide
  Antisense strand to SEQ ID NO: 525013
caugacagugguaagaacu

SEQ ID NO: 525015 - RNA, 19 nt, Artificial Sequence
  Description of Artificial Sequence: Synthetic oligonucleotide
  Sense strand starting at position 3835 of SEQ ID NO: 317949
cugucaugcuaucugaauu

SEQ ID NO: 525016 - RNA, 19 nt, Artificial Sequence
  Description of Artificial Sequence: Synthetic oligonucleotide
  Antisense strand to SEQ ID NO: 525015
aauucagauagcaugacag

SEQ ID NO: 525017 - RNA, 19 nt, Artificial Sequence
  Description of Artificial Sequence: Synthetic oligonucleotide
  Sense strand starting at position 3959 of SEQ ID NO: 317949
aagacuuaguagcuuagaa

SEQ ID NO: 525018 - RNA, 19 nt, Artificial Sequence
  Description of Artificial Sequence: Synthetic oligonucleotide
  Antisense strand to SEQ ID NO: 525017
uucuaagcuacuaagucuu

SEQ ID NO: 525019 - RNA, 19 nt, Artificial Sequence
  Description of Artificial Sequence: Synthetic oligonucleotide
  Sense strand starting at position 3961 of SEQ ID NO: 317949
gacuuaguagcuuagaaua

SEQ ID NO: 525020 - RNA, 19 nt, Artificial Sequence
  Description of Artificial Sequence: Synthetic oligonucleotide
  Antisense strand to SEQ ID NO: 525019
uauucuaagcuacuaaguc

SEQ ID NO: 525021 - RNA, 19 nt, Artificial Sequence
  Description of Artificial Sequence: Synthetic oligonucleotide
  Sense strand starting at position 138 of SEQ ID NO: 317950
acaaauaaguguucgugag

SEQ ID NO: 525022 - RNA, 19 nt, Artificial Sequence
  Description of Artificial Sequence: Synthetic oligonucleotide
  Antisense strand to SEQ ID NO: 525021
cucacgaacacuuauuugu

SEQ ID NO: 525023 - RNA, 19 nt, Artificial Sequence
  Description of Artificial Sequence: Synthetic oligonucleotide
  Sense strand starting at position 368 of SEQ ID NO: 317950
ccagauguccaucacugau

SEQ ID NO: 525024 - RNA, 19 nt, Artificial Sequence
  Description of Artificial Sequence: Synthetic oligonucleotide
  Antisense strand to SEQ ID NO: 525023
aucagugauggacaucugg

SEQ ID NO: 525025 - RNA, 19 nt, Artificial Sequence
  Description of Artificial Sequence: Synthetic oligonucleotide
  Sense strand starting at position 374 of SEQ ID NO: 317950
guccaucacugauuggaua

SEQ ID NO: 525026 - RNA, 19 nt, Artificial Sequence
  Description of Artificial Sequence: Synthetic oligonucleotide
  Antisense strand to SEQ ID NO: 525025
uauccaaucagugauggac

SEQ ID NO: 525027 - RNA, 19 nt, Artificial Sequence
  Description of Artificial Sequence: Synthetic oligonucleotide
  Sense strand starting at position 375 of SEQ ID NO: 317950
uccaucacugauuggauaa

SEQ ID NO: 525028 - RNA, 19 nt, Artificial Sequence
  Description of Artificial Sequence: Synthetic oligonucleotide
  Antisense strand to SEQ ID NO: 525027
uuauccaaucagugaugga

SEQ ID NO: 525029 - RNA, 19 nt, Artificial Sequence
  Description of Artificial Sequence: Synthetic oligonucleotide
  Sense strand starting at position 612 of SEQ ID NO: 317950
ugcuaaugggucuagggau

SEQ ID NO: 525030 - RNA, 19 nt, Artificial Sequence
  Description of Artificial Sequence: Synthetic oligonucleotide
  Antisense strand to SEQ ID NO: 525029
aucccuagacccauuagca

SEQ ID NO: 525031 - RNA, 19 nt, Artificial Sequence
  Description of Artificial Sequence: Synthetic oligonucleotide
  Sense strand starting at position 624 of SEQ ID NO: 317950
uagggauucuuucugggau

SEQ ID NO: 525032 - RNA, 19 nt, Artificial Sequence
  Description of Artificial Sequence: Synthetic oligonucleotide
  Antisense strand to SEQ ID NO: 525031
aucccagaaagaaucccua

SEQ ID NO: 525033 - RNA, 19 nt, Artificial Sequence
  Description of Artificial Sequence: Synthetic oligonucleotide
  Sense strand starting at position 627 of SEQ ID NO: 317950
ggauucuuucugggauaac

SEQ ID NO: 525034 - RNA, 19 nt, Artificial Sequence
  Description of Artificial Sequence: Synthetic oligonucleotide
  Antisense strand to SEQ ID NO: 525033
guuaucccagaaagaaucc

SEQ ID NO: 525035 - RNA, 19 nt, Artificial Sequence
  Description of Artificial Sequence: Synthetic oligonucleotide
  Sense strand starting at position 639 of SEQ ID NO: 317950
ggauaacgaaauuguugua

SEQ ID NO: 525036 - RNA, 19 nt, Artificial Sequence
  Description of Artificial Sequence: Synthetic oligonucleotide
  Antisense strand to SEQ ID NO: 525035
uacaacaauuucguuaucc

SEQ ID NO: 525037 - RNA, 19 nt, Artificial Sequence
  Description of Artificial Sequence: Synthetic oligonucleotide
  Sense strand starting at position 659 of SEQ ID NO: 317950
aacugauauggugauguuu

SEQ ID NO: 525038 - RNA, 19 nt, Artificial Sequence
  Description of Artificial Sequence: Synthetic oligonucleotide
  Antisense strand to SEQ ID NO: 525037
aaacaucaccauaucaguu

SEQ ID NO: 525039 - RNA, 19 nt, Artificial Sequence
  Description of Artificial Sequence: Synthetic oligonucleotide
  Sense strand starting at position 665 of SEQ ID NO: 317950
uauggugauguuuacacaa

SEQ ID NO: 525040 - RNA, 19 nt, Artificial Sequence
  Description of Artificial Sequence: Synthetic oligonucleotide
  Antisense strand to SEQ ID NO: 525039
uuguguaaacaucaccaua

SEQ ID NO: 525041 - RNA, 19 nt, Artificial Sequence
  Description of Artificial Sequence: Synthetic oligonucleotide
  Sense strand starting at position 734 of SEQ ID NO: 317950
uguauugguacggaaaugu

SEQ ID NO: 525042 - RNA, 19 nt, Artificial Sequence
  Description of Artificial Sequence: Synthetic oligonucleotide
  Antisense strand to SEQ ID NO: 525041
acauuuccguaccaauaca

SEQ ID NO: 525043 - RNA, 19 nt, Artificial Sequence
  Description of Artificial Sequence: Synthetic oligonucleotide
  Sense strand starting at position 749 of SEQ ID NO: 317950
augugaacucaauaaagcu

SEQ ID NO: 525044 - RNA, 19 nt, Artificial Sequence
  Description of Artificial Sequence: Synthetic oligonucleotide
  Antisense strand to SEQ ID NO: 525043
agcuuuauugaguucacau

SEQ ID NO: 525045 - RNA, 19 nt, Artificial Sequence
  Description of Artificial Sequence: Synthetic oligonucleotide
  Sense strand starting at position 782 of SEQ ID NO: 317950
acaccuaaggucuaguaua

SEQ ID NO: 525046 - RNA, 19 nt, Artificial Sequence
  Description of Artificial Sequence: Synthetic oligonucleotide
  Antisense strand to SEQ ID NO: 525045
uauacuagaccuuaggugu

SEQ ID NO: 525047 - RNA, 19 nt, Artificial Sequence
  Description of Artificial Sequence: Synthetic oligonucleotide
  Sense strand starting at position 879 of SEQ ID NO: 317950
gcuugaggcacuuagaauu

SEQ ID NO: 525048 - RNA, 19 nt, Artificial Sequence
  Description of Artificial Sequence: Synthetic oligonucleotide
  Antisense strand to SEQ ID NO: 525047
aauucuaagugccucaagc

SEQ ID NO: 525049 - RNA, 19 nt, Artificial Sequence
  Description of Artificial Sequence: Synthetic oligonucleotide
  Sense strand starting at position 1011 of SEQ ID NO: 317950
cacgaaagauaccugagua

SEQ ID NO: 525050 - RNA, 19 nt, Artificial Sequence
  Description of Artificial Sequence: Synthetic oligonucleotide
  Antisense strand to SEQ ID NO: 525049
uacucagguaucuuucgug

SEQ ID NO: 525051 - RNA, 19 nt, Artificial Sequence
  Description of Artificial Sequence: Synthetic oligonucleotide
  Sense strand starting at position 1012 of SEQ ID NO: 317950
acgaaagauaccugaguaa

SEQ ID NO: 525052 - RNA, 19 nt, Artificial Sequence
  Description of Artificial Sequence: Synthetic oligonucleotide
  Antisense strand to SEQ ID NO: 525051
uuacucagguaucuuucgu

SEQ ID NO: 525053 - RNA, 19 nt, Artificial Sequence
  Description of Artificial Sequence: Synthetic oligonucleotide
  Sense strand starting at position 1133 of SEQ ID NO: 317950
agaagaaucuaauacugag

SEQ ID NO: 525054 - RNA, 19 nt, Artificial Sequence
  Description of Artificial Sequence: Synthetic oligonucleotide
  Antisense strand to SEQ ID NO: 525053
cucaguauuagauucuucu

SEQ ID NO: 525055 - RNA, 19 nt, Artificial Sequence
  Description of Artificial Sequence: Synthetic oligonucleotide
  Sense strand starting at position 1139 of SEQ ID NO: 317950
aucuaauacugagcuaaga

SEQ ID NO: 525056 - RNA, 19 nt, Artificial Sequence
  Description of Artificial Sequence: Synthetic oligonucleotide
  Antisense strand to SEQ ID NO: 525055
ucuuagcucaguauuagau

SEQ ID NO: 525057 - RNA, 19 nt, Artificial Sequence
  Description of Artificial Sequence: Synthetic oligonucleotide
  Sense strand starting at position 1367 of SEQ ID NO: 317950
uguggaaaccgucagaggu

SEQ ID NO: 525058 - RNA, 19 nt, Artificial Sequence
  Description of Artificial Sequence: Synthetic oligonucleotide
  Antisense strand to SEQ ID NO: 525057
accucugacgguuuccaca

SEQ ID NO: 525059 - RNA, 19 nt, Artificial Sequence
  Description of Artificial Sequence: Synthetic oligonucleotide
  Sense strand starting at position 1808 of SEQ ID NO: 317950
agccuuggacuucgaaaca

SEQ ID NO: 525060 - RNA, 19 nt, Artificial Sequence
  Description of Artificial Sequence: Synthetic oligonucleotide
  Antisense strand to SEQ ID NO: 525059
uguuucgaaguccaaggcu

SEQ ID NO: 525061 - RNA, 19 nt, Artificial Sequence
  Description of Artificial Sequence: Synthetic oligonucleotide
  Sense strand starting at position 2338 of SEQ ID NO: 317950
gaggaucucgaacggacua

SEQ ID NO: 525062 - RNA, 19 nt, Artificial Sequence
  Description of Artificial Sequence: Synthetic oligonucleotide
  Antisense strand to SEQ ID NO: 525061
uaguccguucgagauccuc

SEQ ID NO: 525063 - RNA, 19 nt, Artificial Sequence
  Description of Artificial Sequence: Synthetic oligonucleotide
  Sense strand starting at position 2411 of SEQ ID NO: 317950
cugagaagccuuuggucaa

SEQ ID NO: 525064 - RNA, 19 nt, Artificial Sequence
  Description of Artificial Sequence: Synthetic oligonucleotide
  Antisense strand to SEQ ID NO: 525063
uugaccaaaggcuucucag

SEQ ID NO: 525065 - RNA, 19 nt, Artificial Sequence
  Description of Artificial Sequence: Synthetic oligonucleotide
  Sense strand starting at position 2602 of SEQ ID NO: 317950
agcggaaugugacccgaaa

SEQ ID NO: 525066 - RNA, 19 nt, Artificial Sequence
  Description of Artificial Sequence: Synthetic oligonucleotide
  Antisense strand to SEQ ID NO: 525065
uuucgggucacauuccgcu

SEQ ID NO: 525067 - RNA, 19 nt, Artificial Sequence
  Description of Artificial Sequence: Synthetic oligonucleotide
  Sense strand starting at position 2623 of SEQ ID NO: 317950
gacggacuuccugacccau

SEQ ID NO: 525068 - RNA, 19 nt, Artificial Sequence
  Description of Artificial Sequence: Synthetic oligonucleotide
  Antisense strand to SEQ ID NO: 525067
augggucaggaaguccguc

SEQ ID NO: 525069 - RNA, 19 nt, Artificial Sequence
  Description of Artificial Sequence: Synthetic oligonucleotide
  Sense strand starting at position 2764 of SEQ ID NO: 317950
auaguuaaacgcuauuaga

SEQ ID NO: 525070 - RNA, 19 nt, Artificial Sequence
  Description of Artificial Sequence: Synthetic oligonucleotide
  Antisense strand to SEQ ID NO: 525069
ucuaauagcguuuaacuau

SEQ ID NO: 525071 - RNA, 19 nt, Artificial Sequence
  Description of Artificial Sequence: Synthetic oligonucleotide
  Sense strand starting at position 2808 of SEQ ID NO: 317950
cagcuagguccagaaucuu

SEQ ID NO: 525072 - RNA, 19 nt, Artificial Sequence
  Description of Artificial Sequence: Synthetic oligonucleotide
  Antisense strand to SEQ ID NO: 525071
aagauucuggaccuagcug

SEQ ID NO: 525073 - RNA, 19 nt, Artificial Sequence
  Description of Artificial Sequence: Synthetic oligonucleotide
  Sense strand starting at position 2857 of SEQ ID NO: 317950
uuuauuguagcauaucaca

SEQ ID NO: 525074 - RNA, 19 nt, Artificial Sequence
  Description of Artificial Sequence: Synthetic oligonucleotide
  Antisense strand to SEQ ID NO: 525073
ugugauaugcuacaauaaa

SEQ ID NO: 525075 - RNA, 19 nt, Artificial Sequence
  Description of Artificial Sequence: Synthetic oligonucleotide
  Sense strand starting at position 2973 of SEQ ID NO: 317950
gugcuuguugaacaaggaa

SEQ ID NO: 525076 - RNA, 19 nt, Artificial Sequence
  Description of Artificial Sequence: Synthetic oligonucleotide
  Antisense strand to SEQ ID NO: 525075
uuccuuguucaacaagcac

SEQ ID NO: 525077 - RNA, 19 nt, Artificial Sequence
  Description of Artificial Sequence: Synthetic oligonucleotide
  Sense strand starting at position 2986 of SEQ ID NO: 317950
aaggaauaauuggauaaug

SEQ ID NO: 525078 - RNA, 19 nt, Artificial Sequence
  Description of Artificial Sequence: Synthetic oligonucleotide
  Antisense strand to SEQ ID NO: 525077
cauuauccaauuauuccuu

SEQ ID NO: 525079 - RNA, 19 nt, Artificial Sequence
  Description of Artificial Sequence: Synthetic oligonucleotide
  Sense strand starting at position 3003 of SEQ ID NO: 317950
ugguauuguggucauacuu

SEQ ID NO: 525080 - RNA, 19 nt, Artificial Sequence
  Description of Artificial Sequence: Synthetic oligonucleotide
  Antisense strand to SEQ ID NO: 525079
aaguaugaccacaauacca

SEQ ID NO: 525081 - RNA, 19 nt, Artificial Sequence
  Description of Artificial Sequence: Synthetic oligonucleotide
  Sense strand starting at position 3139 of SEQ ID NO: 317950
ggccauaguugcucuauuu

SEQ ID NO: 525082 - RNA, 19 nt, Artificial Sequence
  Description of Artificial Sequence: Synthetic oligonucleotide
  Antisense strand to SEQ ID NO: 525081
aaauagagcaacuauggcc

SEQ ID NO: 525083 - RNA, 19 nt, Artificial Sequence
  Description of Artificial Sequence: Synthetic oligonucleotide
  Sense strand starting at position 3195 of SEQ ID NO: 317950
guccucauaucacugacau

SEQ ID NO: 525084 - RNA, 19 nt, Artificial Sequence
  Description of Artificial Sequence: Synthetic oligonucleotide
  Antisense strand to SEQ ID NO: 525083
augucagugauaugaggac

SEQ ID NO: 525085 - RNA, 19 nt, Artificial Sequence
  Description of Artificial Sequence: Synthetic oligonucleotide
  Sense strand starting at position 3350 of SEQ ID NO: 317950
ggcauuaaauuccuaguau

SEQ ID NO: 525086 - RNA, 19 nt, Artificial Sequence
  Description of Artificial Sequence: Synthetic oligonucleotide
  Antisense strand to SEQ ID NO: 525085
auacuaggaauuuaaugcc

SEQ ID NO: 525087 - RNA, 19 nt, Artificial Sequence
  Description of Artificial Sequence: Synthetic oligonucleotide
  Sense strand starting at position 3359 of SEQ ID NO: 317950
uuccuaguaucacuaaagu

SEQ ID NO: 525088 - RNA, 19 nt, Artificial Sequence
  Description of Artificial Sequence: Synthetic oligonucleotide
  Antisense strand to SEQ ID NO: 525087
acuuuagugauacuaggaa

SEQ ID NO: 525089 - RNA, 19 nt, Artificial Sequence
  Description of Artificial Sequence: Synthetic oligonucleotide
  Sense strand starting at position 3563 of SEQ ID NO: 317950
ucccucucccagugaagaa

SEQ ID NO: 525090 - RNA, 19 nt, Artificial Sequence
  Description of Artificial Sequence: Synthetic oligonucleotide
  Antisense strand to SEQ ID NO: 525089
uucuucacugggagaggga

SEQ ID NO: 525091 - RNA, 19 nt, Artificial Sequence
  Description of Artificial Sequence: Synthetic oligonucleotide
  Sense strand starting at position 3700 of SEQ ID NO: 317950
cugcuuuggagucagaauu

SEQ ID NO: 525092 - RNA, 19 nt, Artificial Sequence
  Description of Artificial Sequence: Synthetic oligonucleotide
  Antisense strand to SEQ ID NO: 525091
aauucugacuccaaagcag

SEQ ID NO: 525093 - RNA, 19 nt, Artificial Sequence
  Description of Artificial Sequence: Synthetic oligonucleotide
  Sense strand starting at position 3724 of SEQ ID NO: 317950
agcagaaaugcuuagguaa

SEQ ID NO: 525094 - RNA, 19 nt, Artificial Sequence
  Description of Artificial Sequence: Synthetic oligonucleotide
  Antisense strand to SEQ ID NO: 525093
uuaccuaagcauuucugcu

SEQ ID NO: 525095 - RNA, 19 nt, Artificial Sequence
  Description of Artificial Sequence: Synthetic oligonucleotide
  Sense strand starting at position 3781 of SEQ ID NO: 317950
gcuugaaugcuauagauuc

SEQ ID NO: 525096 - RNA, 19 nt, Artificial Sequence
  Description of Artificial Sequence: Synthetic oligonucleotide
  Antisense strand to SEQ ID NO: 525095
gaaucuauagcauucaagc

SEQ ID NO: 525097 - RNA, 19 nt, Artificial Sequence
  Description of Artificial Sequence: Synthetic oligonucleotide
  Sense strand starting at position 3814 of SEQ ID NO: 317950
auuguuucucaguaguauc

SEQ ID NO: 525098 - RNA, 19 nt, Artificial Sequence
  Description of Artificial Sequence: Synthetic oligonucleotide
  Antisense strand to SEQ ID NO: 525097
gauacuacugagaaacaau

SEQ ID NO: 525099 - RNA, 19 nt, Artificial Sequence
  Description of Artificial Sequence: Synthetic oligonucleotide
  Sense strand starting at position 3867 of SEQ ID NO: 317950
uguggcuauuaccuacaga

SEQ ID NO: 525100 - RNA, 19 nt, Artificial Sequence
  Description of Artificial Sequence: Synthetic oligonucleotide
  Antisense strand to SEQ ID NO: 525099
ucuguagguaauagccaca

SEQ ID NO: 525101 - RNA, 19 nt, Artificial Sequence
  Description of Artificial Sequence: Synthetic oligonucleotide
  Sense strand starting at position 123 of SEQ ID NO: 317951
cagagaaggucuguguuga

SEQ ID NO: 525102 - RNA, 19 nt, Artificial Sequence
  Description of Artificial Sequence: Synthetic oligonucleotide
  Antisense strand to SEQ ID NO: 525101
ucaacacagaccuucucug

SEQ ID NO: 525103 - RNA, 19 nt, Artificial Sequence
  Description of Artificial Sequence: Synthetic oligonucleotide
  Sense strand starting at position 124 of SEQ ID NO: 317951
agagaaggucuguguugag

SEQ ID NO: 525104 - RNA, 19 nt, Artificial Sequence
  Description of Artificial Sequence: Synthetic oligonucleotide
  Antisense strand to SEQ ID NO: 525103
cucaacacagaccuucucu

SEQ ID NO: 525105 - RNA, 19 nt, Artificial Sequence
  Description of Artificial Sequence: Synthetic oligonucleotide
  Sense strand starting at position 131 of SEQ ID NO: 317951
gucuguguugaggaggaga

SEQ ID NO: 525106 - RNA, 19 nt, Artificial Sequence
  Description of Artificial Sequence: Synthetic oligonucleotide
  Antisense strand to SEQ ID NO: 525105
ucuccuccucaacacagac

SEQ ID NO: 525107 - RNA, 19 nt, Artificial Sequence
  Description of Artificial Sequence: Synthetic oligonucleotide
  Sense strand starting at position 207 of SEQ ID NO: 317951
gagacagagugcuuuccca

SEQ ID NO: 525108 - RNA, 19 nt, Artificial Sequence
  Description of Artificial Sequence: Synthetic oligonucleotide
  Antisense strand to SEQ ID NO: 525107
ugggaaagcacucugucuc

SEQ ID NO: 525109 - RNA, 19 nt, Artificial Sequence
  Description of Artificial Sequence: Synthetic oligonucleotide
  Sense strand starting at position 526 of SEQ ID NO: 317951
ucuggagugccuggugaaa

SEQ ID NO: 525110 - RNA, 19 nt, Artificial Sequence
  Description of Artificial Sequence: Synthetic oligonucleotide
  Antisense strand to SEQ ID NO: 525109
uuucaccaggcacuccaga

SEQ ID NO: 525111 - RNA, 19 nt, Artificial Sequence
  Description of Artificial Sequence: Synthetic oligonucleotide
  Sense strand starting at position 590 of SEQ ID NO: 317951
ggcagaauaugacaucaga

SEQ ID NO: 525112 - RNA, 19 nt, Artificial Sequence
  Description of Artificial Sequence: Synthetic oligonucleotide
  Antisense strand to SEQ ID NO: 525111
ucugaugucauauucugcc

SEQ ID NO: 525113 - RNA, 19 nt, Artificial Sequence
  Description of Artificial Sequence: Synthetic oligonucleotide
  Sense strand starting at position 619 of SEQ ID NO: 317951
accauucuuuggguacauu

SEQ ID NO: 525114 - RNA, 19 nt, Artificial Sequence
  Description of Artificial Sequence: Synthetic oligonucleotide
  Antisense strand to SEQ ID NO: 525113
aauguacccaaagaauggu

SEQ ID NO: 525115 - RNA, 19 nt, Artificial Sequence
  Description of Artificial Sequence: Synthetic oligonucleotide
  Sense strand starting at position 620 of SEQ ID NO: 317951
ccauucuuuggguacauua

SEQ ID NO: 525116 - RNA, 19 nt, Artificial Sequence
  Description of Artificial Sequence: Synthetic oligonucleotide
  Antisense strand to SEQ ID NO: 525115
uaauguacccaaagaaugg

SEQ ID NO: 525117 - RNA, 19 nt, Artificial Sequence
  Description of Artificial Sequence: Synthetic oligonucleotide
  Sense strand starting at position 641 of SEQ ID NO: 317951
ugccacuugcuuugcuaaa

SEQ ID NO: 525118 - RNA, 19 nt, Artificial Sequence
  Description of Artificial Sequence: Synthetic oligonucleotide
  Antisense strand to SEQ ID NO: 525117
uuuagcaaagcaaguggca

SEQ ID NO: 525119 - RNA, 19 nt, Artificial Sequence
  Description of Artificial Sequence: Synthetic oligonucleotide
  Sense strand starting at position 642 of SEQ ID NO: 317951
gccacuugcuuugcuaaau

SEQ ID NO: 525120 - RNA, 19 nt, Artificial Sequence
  Description of Artificial Sequence: Synthetic oligonucleotide
  Antisense strand to SEQ ID NO: 525119
auuuagcaaagcaaguggc

SEQ ID NO: 525121 - RNA, 19 nt, Artificial Sequence
  Description of Artificial Sequence: Synthetic oligonucleotide
  Sense strand starting at position 653 of SEQ ID NO: 317951
ugcuaaaugccuuauaguc

SEQ ID NO: 525122 - RNA, 19 nt, Artificial Sequence
  Description of Artificial Sequence: Synthetic oligonucleotide
  Antisense strand to SEQ ID NO: 525121
gacuauaaggcauuuagca

SEQ ID NO: 525123 - RNA, 19 nt, Artificial Sequence
  Description of Artificial Sequence: Synthetic oligonucleotide
  Sense strand starting at position 781 of SEQ ID NO: 317951
aaggucacauggcuauaau

SEQ ID NO: 525124 - RNA, 19 nt, Artificial Sequence
  Description of Artificial Sequence: Synthetic oligonucleotide
  Antisense strand to SEQ ID NO: 525123
auuauagccaugugaccuu

SEQ ID NO: 525125 - RNA, 19 nt, Artificial Sequence
  Description of Artificial Sequence: Synthetic oligonucleotide
  Sense strand starting at position 782 of SEQ ID NO: 317951
aggucacauggcuauaauu

SEQ ID NO: 525126 - RNA, 19 nt, Artificial Sequence
  Description of Artificial Sequence: Synthetic oligonucleotide
  Antisense strand to SEQ ID NO: 525125
aauuauagccaugugaccu

SEQ ID NO: 525127 - RNA, 19 nt, Artificial Sequence
  Description of Artificial Sequence: Synthetic oligonucleotide
  Sense strand starting at position 784 of SEQ ID NO: 317951
gucacauggcuauaauuac

SEQ ID NO: 525128 - RNA, 19 nt, Artificial Sequence
  Description of Artificial Sequence: Synthetic oligonucleotide
  Antisense strand to SEQ ID NO: 525127
guaauuauagccaugugac

SEQ ID NO: 525129 - RNA, 19 nt, Artificial Sequence
  Description of Artificial Sequence: Synthetic oligonucleotide
  Sense strand starting at position 819 of SEQ ID NO: 317951
accagucugcuugacucua

SEQ ID NO: 525130 - RNA, 19 nt, Artificial Sequence
  Description of Artificial Sequence: Synthetic oligonucleotide
  Antisense strand to SEQ ID NO: 525129
uagagucaagcagacuggu

SEQ ID NO: 525131 - RNA, 19 nt, Artificial Sequence
  Description of Artificial Sequence: Synthetic oligonucleotide
  Sense strand starting at position 879 of SEQ ID NO: 317951
cauuacuggugauauaaga

SEQ ID NO: 525132 - RNA, 19 nt, Artificial Sequence
  Description of Artificial Sequence: Synthetic oligonucleotide
  Antisense strand to SEQ ID NO: 525131
ucuuauaucaccaguaaug

SEQ ID NO: 525133 - RNA, 19 nt, Artificial Sequence
  Description of Artificial Sequence: Synthetic oligonucleotide
  Sense strand starting at position 1312 of SEQ ID NO: 317951
gagggauucugcccuaagg

SEQ ID NO: 525134 - RNA, 19 nt, Artificial Sequence
  Description of Artificial Sequence: Synthetic oligonucleotide
  Antisense strand to SEQ ID NO: 525133
ccuuagggcagaaucccuc

SEQ ID NO: 525135 - RNA, 19 nt, Artificial Sequence
  Description of Artificial Sequence: Synthetic oligonucleotide
  Sense strand starting at position 1314 of SEQ ID NO: 317951
gggauucugcccuaagguu

SEQ ID NO: 525136 - RNA, 19 nt, Artificial Sequence
  Description of Artificial Sequence: Synthetic oligonucleotide
  Antisense strand to SEQ ID NO: 525135
aaccuuagggcagaauccc

SEQ ID NO: 525137 - RNA, 19 nt, Artificial Sequence
  Description of Artificial Sequence: Synthetic oligonucleotide
  Sense strand starting at position 1378 of SEQ ID NO: 317951
gaggguuccuguguguuua

SEQ ID NO: 525138 - RNA, 19 nt, Artificial Sequence
  Description of Artificial Sequence: Synthetic oligonucleotide
  Antisense strand to SEQ ID NO: 525137
uaaacacacaggaacccuc

SEQ ID NO: 525139 - RNA, 19 nt, Artificial Sequence
  Description of Artificial Sequence: Synthetic oligonucleotide
  Sense strand starting at position 1379 of SEQ ID NO: 317951
aggguuccuguguguuuau

SEQ ID NO: 525140 - RNA, 19 nt, Artificial Sequence
  Description of Artificial Sequence: Synthetic oligonucleotide
  Antisense strand to SEQ ID NO: 525139
auaaacacacaggaacccu

SEQ ID NO: 525141 - RNA, 19 nt, Artificial Sequence
  Description of Artificial Sequence: Synthetic oligonucleotide
  Sense strand starting at position 1381 of SEQ ID NO: 317951
gguuccuguguguuuaugu

SEQ ID NO: 525142 - RNA, 19 nt, Artificial Sequence
  Description of Artificial Sequence: Synthetic oligonucleotide
  Antisense strand to SEQ ID NO: 525141
acauaaacacacaggaacc

SEQ ID NO: 525143 - RNA, 19 nt, Artificial Sequence
  Description of Artificial Sequence: Synthetic oligonucleotide
  Sense strand starting at position 1389 of SEQ ID NO: 317951
uguguuuauguggguggga

SEQ ID NO: 525144 - RNA, 19 nt, Artificial Sequence
  Description of Artificial Sequence: Synthetic oligonucleotide
  Antisense strand to SEQ ID NO: 525143
ucccacccacauaaacaca

SEQ ID NO: 525145 - RNA, 19 nt, Artificial Sequence
  Description of Artificial Sequence: Synthetic oligonucleotide
  Sense strand starting at position 1560 of SEQ ID NO: 317951
cgacgaaggugaguguaaa

SEQ ID NO: 525146 - RNA, 19 nt, Artificial Sequence
  Description of Artificial Sequence: Synthetic oligonucleotide
  Antisense strand to SEQ ID NO: 525145
uuuacacucaccuucgucg

SEQ ID NO: 525147 - RNA, 19 nt, Artificial Sequence
  Description of Artificial Sequence: Synthetic oligonucleotide
  Sense strand starting at position 1561 of SEQ ID NO: 317951
gacgaaggugaguguaaau

SEQ ID NO: 525148 - RNA, 19 nt, Artificial Sequence
  Description of Artificial Sequence: Synthetic oligonucleotide
  Antisense strand to SEQ ID NO: 525147
auuuacacucaccuucguc

SEQ ID NO: 525149 - RNA, 19 nt, Artificial Sequence
  Description of Artificial Sequence: Synthetic oligonucleotide
  Sense strand starting at position 1600 of SEQ ID NO: 317951
ccugauguccuccagcaga

SEQ ID NO: 525150 - RNA, 19 nt, Artificial Sequence
  Description of Artificial Sequence: Synthetic oligonucleotide
  Antisense strand to SEQ ID NO: 525149
ucugcuggaggacaucagg

SEQ ID NO: 525151 - RNA, 19 nt, Artificial Sequence
  Description of Artificial Sequence: Synthetic oligonucleotide
  Sense strand starting at position 1792 of SEQ ID NO: 317951
ugagcucuuuccucuguua

SEQ ID NO: 525152 - RNA, 19 nt, Artificial Sequence
  Description of Artificial Sequence: Synthetic oligonucleotide
  Antisense strand to SEQ ID NO: 525151
uaacagaggaaagagcuca

SEQ ID NO: 525153 - RNA, 19 nt, Artificial Sequence
  Description of Artificial Sequence: Synthetic oligonucleotide
  Sense strand starting at position 1794 of SEQ ID NO: 317951
agcucuuuccucuguuacu

SEQ ID NO: 525154 - RNA, 19 nt, Artificial Sequence
  Description of Artificial Sequence: Synthetic oligonucleotide
  Antisense strand to SEQ ID NO: 525153
aguaacagaggaaagagcu

SEQ ID NO: 525155 - RNA, 19 nt, Artificial Sequence
  Description of Artificial Sequence: Synthetic oligonucleotide
  Sense strand starting at position 1795 of SEQ ID NO: 317951
gcucuuuccucuguuacuu

SEQ ID NO: 525156 - RNA, 19 nt, Artificial Sequence
  Description of Artificial Sequence: Synthetic oligonucleotide
  Antisense strand to SEQ ID NO: 525155
aaguaacagaggaaagagc

SEQ ID NO: 525157 - RNA, 19 nt, Artificial Sequence
  Description of Artificial Sequence: Synthetic oligonucleotide
  Sense strand starting at position 2204 of SEQ ID NO: 317951
ccaggcaucugagucaaga

SEQ ID NO: 525158 - RNA, 19 nt, Artificial Sequence
  Description of Artificial Sequence: Synthetic oligonucleotide
  Antisense strand to SEQ ID NO: 525157
ucuugacucagaugccugg

SEQ ID NO: 525159 - RNA, 19 nt, Artificial Sequence
  Description of Artificial Sequence: Synthetic oligonucleotide
  Sense strand starting at position 2228 of SEQ ID NO: 317951
aaguucuauuuguagugua

SEQ ID NO: 525160 - RNA, 19 nt, Artificial Sequence
  Description of Artificial Sequence: Synthetic oligonucleotide
  Antisense strand to SEQ ID NO: 525159
uacacuacaaauagaacuu

SEQ ID NO: 525161 - RNA, 19 nt, Artificial Sequence
  Description of Artificial Sequence: Synthetic oligonucleotide
  Sense strand starting at position 2330 of SEQ ID NO: 317951
agaggaauucaguguguga

SEQ ID NO: 525162 - RNA, 19 nt, Artificial Sequence
  Description of Artificial Sequence: Synthetic oligonucleotide
  Antisense strand to SEQ ID NO: 525161
ucacacacugaauuccucu

SEQ ID NO: 525163 - RNA, 19 nt, Artificial Sequence
  Description of Artificial Sequence: Synthetic oligonucleotide
  Sense strand starting at position 2333 of SEQ ID NO: 317951
ggaauucagugugugacca

SEQ ID NO: 525164 - RNA, 19 nt, Artificial Sequence
  Description of Artificial Sequence: Synthetic oligonucleotide
  Antisense strand to SEQ ID NO: 525163
uggucacacacugaauucc

SEQ ID NO: 525165 - RNA, 19 nt, Artificial Sequence
  Description of Artificial Sequence: Synthetic oligonucleotide
  Sense strand starting at position 2341 of SEQ ID NO: 317951
gugugugaccagggaaacu

SEQ ID NO: 525166 - RNA, 19 nt, Artificial Sequence
  Description of Artificial Sequence: Synthetic oligonucleotide
  Antisense strand to SEQ ID NO: 525165
aguuucccuggucacacac

SEQ ID NO: 525167 - RNA, 19 nt, Artificial Sequence
  Description of Artificial Sequence: Synthetic oligonucleotide
  Sense strand starting at position 2731 of SEQ ID NO: 317951
acugacaccucugcuagua

SEQ ID NO: 525168 - RNA, 19 nt, Artificial Sequence
  Description of Artificial Sequence: Synthetic oligonucleotide
  Antisense strand to SEQ ID NO: 525167
uacuagcagaggugucagu

SEQ ID NO: 525169 - RNA, 19 nt, Artificial Sequence
  Description of Artificial Sequence: Synthetic oligonucleotide
  Sense strand starting at position 2905 of SEQ ID NO: 317951
guaaguccuacagguucua

SEQ ID NO: 525170 - RNA, 19 nt, Artificial Sequence
  Description of Artificial Sequence: Synthetic oligonucleotide
  Antisense strand to SEQ ID NO: 525169
uagaaccuguaggacuuac

SEQ ID NO: 525171 - RNA, 19 nt, Artificial Sequence
  Description of Artificial Sequence: Synthetic oligonucleotide
  Sense strand starting at position 3009 of SEQ ID NO: 317951
uuagacuucuggucuaaua

SEQ ID NO: 525172 - RNA, 19 nt, Artificial Sequence
  Description of Artificial Sequence: Synthetic oligonucleotide
  Antisense strand to SEQ ID NO: 525171
uauuagaccagaagucuaa

SEQ ID NO: 525173 - RNA, 19 nt, Artificial Sequence
  Description of Artificial Sequence: Synthetic oligonucleotide
  Sense strand starting at position 3011 of SEQ ID NO: 317951
agacuucuggucuaauauc

SEQ ID NO: 525174 - RNA, 19 nt, Artificial Sequence
  Description of Artificial Sequence: Synthetic oligonucleotide
  Antisense strand to SEQ ID NO: 525173
gauauuagaccagaagucu

SEQ ID NO: 525175 - RNA, 19 nt, Artificial Sequence
  Description of Artificial Sequence: Synthetic oligonucleotide
  Sense strand starting at position 3077 of SEQ ID NO: 317951
cagcacucagagugaucaa

SEQ ID NO: 525176 - RNA, 19 nt, Artificial Sequence
  Description of Artificial Sequence: Synthetic oligonucleotide
  Antisense strand to SEQ ID NO: 525175
uugaucacucugagugcug

SEQ ID NO: 525177 - RNA, 19 nt, Artificial Sequence
  Description of Artificial Sequence: Synthetic oligonucleotide
  Sense strand starting at position 3278 of SEQ ID NO: 317951
cuuugcuguucccucagua

SEQ ID NO: 525178 - RNA, 19 nt, Artificial Sequence
  Description of Artificial Sequence: Synthetic oligonucleotide
  Antisense strand to SEQ ID NO: 525177
uacugagggaacagcaaag

SEQ ID NO: 525179 - RNA, 19 nt, Artificial Sequence
  Description of Artificial Sequence: Synthetic oligonucleotide
  Sense strand starting at position 3931 of SEQ ID NO: 317951
accaauuaggugcacaaua

SEQ ID NO: 525180 - RNA, 19 nt, Artificial Sequence
  Description of Artificial Sequence: Synthetic oligonucleotide
  Antisense strand to SEQ ID NO: 525179
uauugugcaccuaauuggu

SEQ ID NO: 525181 - RNA, 19 nt, Artificial Sequence
  Description of Artificial Sequence: Synthetic oligonucleotide
  Sense strand starting at position 94 of SEQ ID NO: 317952
aguaaauacugagcaaucu

SEQ ID NO: 525182 - RNA, 19 nt, Artificial Sequence
  Description of Artificial Sequence: Synthetic oligonucleotide
  Antisense strand to SEQ ID NO: 525181
agauugcucaguauuuacu

SEQ ID NO: 525183 - RNA, 19 nt, Artificial Sequence
  Description of Artificial Sequence: Synthetic oligonucleotide
  Sense strand starting at position 182 of SEQ ID NO: 317952
cuuuguguucuacaaggua

SEQ ID NO: 525184 - RNA, 19 nt, Artificial Sequence
  Description of Artificial Sequence: Synthetic oligonucleotide
  Antisense strand to SEQ ID NO: 525183
uaccuuguagaacacaaag

SEQ ID NO: 525185 - RNA, 19 nt, Artificial Sequence
  Description of Artificial Sequence: Synthetic oligonucleotide
  Sense strand starting at position 212 of SEQ ID NO: 317952
ccaaauggccaucgaaaca

SEQ ID NO: 525186 - RNA, 19 nt, Artificial Sequence
  Description of Artificial Sequence: Synthetic oligonucleotide
  Antisense strand to SEQ ID NO: 525185
uguuucgauggccauuugg

SEQ ID NO: 525187 - RNA, 19 nt, Artificial Sequence
  Description of Artificial Sequence: Synthetic oligonucleotide
  Sense strand starting at position 243 of SEQ ID NO: 317952
aggaguugaauugguuaaa

SEQ ID NO: 525188 - RNA, 19 nt, Artificial Sequence
  Description of Artificial Sequence: Synthetic oligonucleotide
  Antisense strand to SEQ ID NO: 525187
uuuaaccaauucaacuccu

SEQ ID NO: 525189 - RNA, 19 nt, Artificial Sequence
  Description of Artificial Sequence: Synthetic oligonucleotide
  Sense strand starting at position 244 of SEQ ID NO: 317952
ggaguugaauugguuaaag

SEQ ID NO: 525190 - RNA, 19 nt, Artificial Sequence
  Description of Artificial Sequence: Synthetic oligonucleotide
  Antisense strand to SEQ ID NO: 525189
cuuuaaccaauucaacucc

SEQ ID NO: 525191 - RNA, 19 nt, Artificial Sequence
  Description of Artificial Sequence: Synthetic oligonucleotide
  Sense strand starting at position 246 of SEQ ID NO: 317952
aguugaauugguuaaaguc

SEQ ID NO: 525192 - RNA, 19 nt, Artificial Sequence
  Description of Artificial Sequence: Synthetic oligonucleotide
  Antisense strand to SEQ ID NO: 525191
gacuuuaaccaauucaacu

SEQ ID NO: 525193 - RNA, 19 nt, Artificial Sequence
  Description of Artificial Sequence: Synthetic oligonucleotide
  Sense strand starting at position 255 of SEQ ID NO: 317952
gguuaaagucguguuguug

SEQ ID NO: 525194 - RNA, 19 nt, Artificial Sequence
  Description of Artificial Sequence: Synthetic oligonucleotide
  Antisense strand to SEQ ID NO: 525193
caacaacacgacuuuaacc

SEQ ID NO: 525195 - RNA, 19 nt, Artificial Sequence
  Description of Artificial Sequence: Synthetic oligonucleotide
  Sense strand starting at position 270 of SEQ ID NO: 317952
guugacagaugcuccauga

SEQ ID NO: 525196 - RNA, 19 nt, Artificial Sequence
  Description of Artificial Sequence: Synthetic oligonucleotide
  Antisense strand to SEQ ID NO: 525195
ucauggagcaucugucaac

SEQ ID NO: 525197 - RNA, 19 nt, Artificial Sequence
  Description of Artificial Sequence: Synthetic oligonucleotide
  Sense strand starting at position 407 of SEQ ID NO: 317952
ugcauugcucuaggaggaa

SEQ ID NO: 525198 - RNA, 19 nt, Artificial Sequence
  Description of Artificial Sequence: Synthetic oligonucleotide
  Antisense strand to SEQ ID NO: 525197
uuccuccuagagcaaugca

SEQ ID NO: 525199 - RNA, 19 nt, Artificial Sequence
  Description of Artificial Sequence: Synthetic oligonucleotide
  Sense strand starting at position 422 of SEQ ID NO: 317952
ggaauuccaccaugucaag

SEQ ID NO: 525200 - RNA, 19 nt, Artificial Sequence
  Description of Artificial Sequence: Synthetic oligonucleotide
  Antisense strand to SEQ ID NO: 525199
cuugacaugguggaauucc

SEQ ID NO: 525201 - RNA, 19 nt, Artificial Sequence
  Description of Artificial Sequence: Synthetic oligonucleotide
  Sense strand starting at position 516 of SEQ ID NO: 317952
uuuggauuugcuugccaac

SEQ ID NO: 525202 - RNA, 19 nt, Artificial Sequence
  Description of Artificial Sequence: Synthetic oligonucleotide
  Antisense strand to SEQ ID NO: 525201
guuggcaagcaaauccaaa

SEQ ID NO: 525203 - RNA, 19 nt, Artificial Sequence
  Description of Artificial Sequence: Synthetic oligonucleotide
  Sense strand starting at position 530 of SEQ ID NO: 317952
ccaacaauuuggugagaag

SEQ ID NO: 525204 - RNA, 19 nt, Artificial Sequence
  Description of Artificial Sequence: Synthetic oligonucleotide
  Antisense strand to SEQ ID NO: 525203
cuucucaccaaauuguugg

SEQ ID NO: 525205 - RNA, 19 nt, Artificial Sequence
  Description of Artificial Sequence: Synthetic oligonucleotide
  Sense strand starting at position 562 of SEQ ID NO: 317952
ucccgagcugcguuaaaua

SEQ ID NO: 525206 - RNA, 19 nt, Artificial Sequence
  Description of Artificial Sequence: Synthetic oligonucleotide
  Antisense strand to SEQ ID NO: 525205
uauuuaacgcagcucggga

SEQ ID NO: 525207 - RNA, 19 nt, Artificial Sequence
  Description of Artificial Sequence: Synthetic oligonucleotide
  Sense strand starting at position 571 of SEQ ID NO: 317952
gcguuaaauacugcugucu

SEQ ID NO: 525208 - RNA, 19 nt, Artificial Sequence
  Description of Artificial Sequence: Synthetic oligonucleotide
  Antisense strand to SEQ ID NO: 525207
agacagcaguauuuaacgc

SEQ ID NO: 525209 - RNA, 19 nt, Artificial Sequence
  Description of Artificial Sequence: Synthetic oligonucleotide
  Sense strand starting at position 616 of SEQ ID NO: 317952
ggcugugcuuuauuuaucu

SEQ ID NO: 525210 - RNA, 19 nt, Artificial Sequence
  Description of Artificial Sequence: Synthetic oligonucleotide
  Antisense strand to SEQ ID NO: 525209
agauaaauaaagcacagcc

SEQ ID NO: 525211 - RNA, 19 nt, Artificial Sequence
  Description of Artificial Sequence: Synthetic oligonucleotide
  Sense strand starting at position 638 of SEQ ID NO: 317952
aaagcagagcuccaguuua

SEQ ID NO: 525212 - RNA, 19 nt, Artificial Sequence
  Description of Artificial Sequence: Synthetic oligonucleotide
  Antisense strand to SEQ ID NO: 525211
uaaacuggagcucugcuuu

SEQ ID NO: 525213 - RNA, 19 nt, Artificial Sequence
  Description of Artificial Sequence: Synthetic oligonucleotide
  Sense strand starting at position 857 of SEQ ID NO: 317952
uccacuucugugggaagaa

SEQ ID NO: 525214 - RNA, 19 nt, Artificial Sequence
  Description of Artificial Sequence: Synthetic oligonucleotide
  Antisense strand to SEQ ID NO: 525213
uucuucccacagaagugga

SEQ ID NO: 525215 - RNA, 19 nt, Artificial Sequence
  Description of Artificial Sequence: Synthetic oligonucleotide
  Sense strand starting at position 1272 of SEQ ID NO: 317952
ccgaaagauucucuuuccu

SEQ ID NO: 525216 - RNA, 19 nt, Artificial Sequence
  Description of Artificial Sequence: Synthetic oligonucleotide
  Antisense strand to SEQ ID NO: 525215
aggaaagagaaucuuucgg

SEQ ID NO: 525217 - RNA, 19 nt, Artificial Sequence
  Description of Artificial Sequence: Synthetic oligonucleotide
  Sense strand starting at position 1380 of SEQ ID NO: 317952
aagggaugauccgcagguu

SEQ ID NO: 525218 - RNA, 19 nt, Artificial Sequence
  Description of Artificial Sequence: Synthetic oligonucleotide
  Antisense strand to SEQ ID NO: 525217
aaccugcggaucaucccuu

SEQ ID NO: 525219 - RNA, 19 nt, Artificial Sequence
  Description of Artificial Sequence: Synthetic oligonucleotide
  Sense strand starting at position 2224 of SEQ ID NO: 317952
ccagaagggaaguguauua

SEQ ID NO: 525220 - RNA, 19 nt, Artificial Sequence
  Description of Artificial Sequence: Synthetic oligonucleotide
  Antisense strand to SEQ ID NO: 525219
uaauacacuucccuucugg

SEQ ID NO: 525221 - RNA, 19 nt, Artificial Sequence
  Description of Artificial Sequence: Synthetic oligonucleotide
  Sense strand starting at position 2630 of SEQ ID NO: 317952
uuuggugggcccuggaaau

SEQ ID NO: 525222 - RNA, 19 nt, Artificial Sequence
  Description of Artificial Sequence: Synthetic oligonucleotide
  Antisense strand to SEQ ID NO: 525221
auuuccagggcccaccaaa

SEQ ID NO: 525223 - RNA, 19 nt, Artificial Sequence
  Description of Artificial Sequence: Synthetic oligonucleotide
  Sense strand starting at position 2771 of SEQ ID NO: 317952
ggcuacgaggaaugguaaa

SEQ ID NO: 525224 - RNA, 19 nt, Artificial Sequence
  Description of Artificial Sequence: Synthetic oligonucleotide
  Antisense strand to SEQ ID NO: 525223
uuuaccauuccucguagcc

SEQ ID NO: 525225 - RNA, 19 nt, Artificial Sequence
  Description of Artificial Sequence: Synthetic oligonucleotide
  Sense strand starting at position 2790 of SEQ ID NO: 317952
cccuaagagcaauguaaag

SEQ ID NO: 525226 - RNA, 19 nt, Artificial Sequence
  Description of Artificial Sequence: Synthetic oligonucleotide
  Antisense strand to SEQ ID NO: 525225
cuuuacauugcucuuaggg

SEQ ID NO: 525227 - RNA, 19 nt, Artificial Sequence
  Description of Artificial Sequence: Synthetic oligonucleotide
  Sense strand starting at position 2801 of SEQ ID NO: 317952
auguaaagucaaugagguc

SEQ ID NO: 525228 - RNA, 19 nt, Artificial Sequence
  Description of Artificial Sequence: Synthetic oligonucleotide
  Antisense strand to SEQ ID NO: 525227
gaccucauugacuuuacau

SEQ ID NO: 525229 - RNA, 19 nt, Artificial Sequence
  Description of Artificial Sequence: Synthetic oligonucleotide
  Sense strand starting at position 2826 of SEQ ID NO: 317952
uugagcucugaguaauaaa

SEQ ID NO: 525230 - RNA, 19 nt, Artificial Sequence
  Description of Artificial Sequence: Synthetic oligonucleotide
  Antisense strand to SEQ ID NO: 525229
uuuauuacucagagcucaa

SEQ ID NO: 525231 - RNA, 19 nt, Artificial Sequence
  Description of Artificial Sequence: Synthetic oligonucleotide
  Sense strand starting at position 2834 of SEQ ID NO: 317952
ugaguaauaaaucgggaac

SEQ ID NO: 525232 - RNA, 19 nt, Artificial Sequence
  Description of Artificial Sequence: Synthetic oligonucleotide
  Antisense strand to SEQ ID NO: 525231
guucccgauuuauuacuca

SEQ ID NO: 525233 - RNA, 19 nt, Artificial Sequence
  Description of Artificial Sequence: Synthetic oligonucleotide
  Sense strand starting at position 2909 of SEQ ID NO: 317952
ugauaaaccucuggaauuu

SEQ ID NO: 525234 - RNA, 19 nt, Artificial Sequence
  Description of Artificial Sequence: Synthetic oligonucleotide
  Antisense strand to SEQ ID NO: 525233
aaauuccagagguuuauca

SEQ ID NO: 525235 - RNA, 19 nt, Artificial Sequence
  Description of Artificial Sequence: Synthetic oligonucleotide
  Sense strand starting at position 2945 of SEQ ID NO: 317952
ugcauuaaacuaggaugaa

SEQ ID NO: 525236 - RNA, 19 nt, Artificial Sequence
  Description of Artificial Sequence: Synthetic oligonucleotide
  Antisense strand to SEQ ID NO: 525235
uucauccuaguuuaaugca

SEQ ID NO: 525237 - RNA, 19 nt, Artificial Sequence
  Description of Artificial Sequence: Synthetic oligonucleotide
  Sense strand starting at position 2967 of SEQ ID NO: 317952
guuuaaauguguuugggaa

SEQ ID NO: 525238 - RNA, 19 nt, Artificial Sequence
  Description of Artificial Sequence: Synthetic oligonucleotide
  Antisense strand to SEQ ID NO: 525237
uucccaaacacauuuaaac

SEQ ID NO: 525239 - RNA, 19 nt, Artificial Sequence
  Description of Artificial Sequence: Synthetic oligonucleotide
  Sense strand starting at position 2968 of SEQ ID NO: 317952
uuuaaauguguuugggaaa

SEQ ID NO: 525240 - RNA, 19 nt, Artificial Sequence
  Description of Artificial Sequence: Synthetic oligonucleotide
  Antisense strand to SEQ ID NO: 525239
uuucccaaacacauuuaaa

SEQ ID NO: 525241 - RNA, 19 nt, Artificial Sequence
  Description of Artificial Sequence: Synthetic oligonucleotide
  Sense strand starting at position 3041 of SEQ ID NO: 317952
aaucacuuuguuugaggga

SEQ ID NO: 525242 - RNA, 19 nt, Artificial Sequence
  Description of Artificial Sequence: Synthetic oligonucleotide
  Antisense strand to SEQ ID NO: 525241
ucccucaaacaaagugauu

SEQ ID NO: 525243 - RNA, 19 nt, Artificial Sequence
  Description of Artificial Sequence: Synthetic oligonucleotide
  Sense strand starting at position 3121 of SEQ ID NO: 317952
ugacccucagcauauguaa

SEQ ID NO: 525244 - RNA, 19 nt, Artificial Sequence
  Description of Artificial Sequence: Synthetic oligonucleotide
  Antisense strand to SEQ ID NO: 525243
uuacauaugcugaggguca

SEQ ID NO: 525245 - RNA, 19 nt, Artificial Sequence
  Description of Artificial Sequence: Synthetic oligonucleotide
  Sense strand starting at position 3132 of SEQ ID NO: 317952
auauguaauccauaacguu

SEQ ID NO: 525246 - RNA, 19 nt, Artificial Sequence
  Description of Artificial Sequence: Synthetic oligonucleotide
  Antisense strand to SEQ ID NO: 525245
aacguuauggauuacauau

SEQ ID NO: 525247 - RNA, 19 nt, Artificial Sequence
  Description of Artificial Sequence: Synthetic oligonucleotide
  Sense strand starting at position 3141 of SEQ ID NO: 317952
ccauaacguuauguuagaa

SEQ ID NO: 525248 - RNA, 19 nt, Artificial Sequence
  Description of Artificial Sequence: Synthetic oligonucleotide
  Antisense strand to SEQ ID NO: 525247
uucuaacauaacguuaugg

SEQ ID NO: 525249 - RNA, 19 nt, Artificial Sequence
  Description of Artificial Sequence: Synthetic oligonucleotide
  Sense strand starting at position 3157 of SEQ ID NO: 317952
gaagucaugcagcacuaaa

SEQ ID NO: 525250 - RNA, 19 nt, Artificial Sequence
  Description of Artificial Sequence: Synthetic oligonucleotide
  Antisense strand to SEQ ID NO: 525249
uuuagugcugcaugacuuc

SEQ ID NO: 525251 - RNA, 19 nt, Artificial Sequence
  Description of Artificial Sequence: Synthetic oligonucleotide
  Sense strand starting at position 3359 of SEQ ID NO: 317952
uuagguagucaguaucaga

SEQ ID NO: 525252 - RNA, 19 nt, Artificial Sequence
  Description of Artificial Sequence: Synthetic oligonucleotide
  Antisense strand to SEQ ID NO: 525251
ucugauacugacuaccuaa

SEQ ID NO: 525253 - RNA, 19 nt, Artificial Sequence
  Description of Artificial Sequence: Synthetic oligonucleotide
  Sense strand starting at position 3414 of SEQ ID NO: 317952
gguaauugccacugagaag

SEQ ID NO: 525254 - RNA, 19 nt, Artificial Sequence
  Description of Artificial Sequence: Synthetic oligonucleotide
  Antisense strand to SEQ ID NO: 525253
cuucucaguggcaauuacc

SEQ ID NO: 525255 - RNA, 19 nt, Artificial Sequence
  Description of Artificial Sequence: Synthetic oligonucleotide
  Sense strand starting at position 3659 of SEQ ID NO: 317952
cucuguaucccucauggga

SEQ ID NO: 525256 - RNA, 19 nt, Artificial Sequence
  Description of Artificial Sequence: Synthetic oligonucleotide
  Antisense strand to SEQ ID NO: 525255
ucccaugagggauacagag

SEQ ID NO: 525257 - RNA, 19 nt, Artificial Sequence
  Description of Artificial Sequence: Synthetic oligonucleotide
  Sense strand starting at position 3667 of SEQ ID NO: 317952
cccucaugggauuguuaag

SEQ ID NO: 525258 - RNA, 19 nt, Artificial Sequence
  Description of Artificial Sequence: Synthetic oligonucleotide
  Antisense strand to SEQ ID NO: 525257
cuuaacaaucccaugaggg

SEQ ID NO: 525259 - RNA, 19 nt, Artificial Sequence
  Description of Artificial Sequence: Synthetic oligonucleotide
  Sense strand starting at position 3691 of SEQ ID NO: 317952
gacggacacuuaguuuaaa

SEQ ID NO: 525260 - RNA, 19 nt, Artificial Sequence
  Description of Artificial Sequence: Synthetic oligonucleotide
  Antisense strand to SEQ ID NO: 525259
uuuaaacuaaguguccguc

SEQ ID NO: 525261 - RNA, 19 nt, Artificial Sequence
  Description of Artificial Sequence: Synthetic oligonucleotide
  Sense strand starting at position 91 of SEQ ID NO: 317953
gcagaaauuaccgacgaca

SEQ ID NO: 525262 - RNA, 19 nt, Artificial Sequence
  Description of Artificial Sequence: Synthetic oligonucleotide
  Antisense strand to SEQ ID NO: 525261
ugucgucgguaauuucugc

SEQ ID NO: 525263 - RNA, 19 nt, Artificial Sequence
  Description of Artificial Sequence: Synthetic oligonucleotide
  Sense strand starting at position 1440 of SEQ ID NO: 317953
gggcggaggcgugauuaaa

SEQ ID NO: 525264 - RNA, 19 nt, Artificial Sequence
  Description of Artificial Sequence: Synthetic oligonucleotide
  Antisense strand to SEQ ID NO: 525263
uuuaaucacgccuccgccc

SEQ ID NO: 525265 - RNA, 19 nt, Artificial Sequence
  Description of Artificial Sequence: Synthetic oligonucleotide
  Sense strand starting at position 1497 of SEQ ID NO: 317953
agcugaaaucuccgggaag

SEQ ID NO: 525266 - RNA, 19 nt, Artificial Sequence
  Description of Artificial Sequence: Synthetic oligonucleotide
  Antisense strand to SEQ ID NO: 525265
cuucccggagauuucagcu

SEQ ID NO: 525267 - RNA, 19 nt, Artificial Sequence
  Description of Artificial Sequence: Synthetic oligonucleotide
  Sense strand starting at position 1628 of SEQ ID NO: 317953
cguggauugcuuuagaaug

SEQ ID NO: 525268 - RNA, 19 nt, Artificial Sequence
  Description of Artificial Sequence: Synthetic oligonucleotide
  Antisense strand to SEQ ID NO: 525267
cauucuaaagcaauccacg

SEQ ID NO: 525269 - RNA, 19 nt, Artificial Sequence
  Description of Artificial Sequence: Synthetic oligonucleotide
  Sense strand starting at position 1668 of SEQ ID NO: 317953
cucugagucccuuaaggac

SEQ ID NO: 525270 - RNA, 19 nt, Artificial Sequence
  Description of Artificial Sequence: Synthetic oligonucleotide
  Antisense strand to SEQ ID NO: 525269
guccuuaagggacucagag

SEQ ID NO: 525271 - RNA, 19 nt, Artificial Sequence
  Description of Artificial Sequence: Synthetic oligonucleotide
  Sense strand starting at position 1754 of SEQ ID NO: 317953
uggaauuguaauggauguu

SEQ ID NO: 525272 - RNA, 19 nt, Artificial Sequence
  Description of Artificial Sequence: Synthetic oligonucleotide
  Antisense strand to SEQ ID NO: 525271
aacauccauuacaauucca

SEQ ID NO: 525273 - RNA, 19 nt, Artificial Sequence
  Description of Artificial Sequence: Synthetic oligonucleotide
  Sense strand starting at position 1755 of SEQ ID NO: 317953
ggaauuguaauggauguuu

SEQ ID NO: 525274 - RNA, 19 nt, Artificial Sequence
  Description of Artificial Sequence: Synthetic oligonucleotide
  Antisense strand to SEQ ID NO: 525273
aaacauccauuacaauucc

SEQ ID NO: 525275 - RNA, 19 nt, Artificial Sequence
  Description of Artificial Sequence: Synthetic oligonucleotide
  Sense strand starting at position 1819 of SEQ ID NO: 317953
uuaccucuucgggagucua

SEQ ID NO: 525276 - RNA, 19 nt, Artificial Sequence
  Description of Artificial Sequence: Synthetic oligonucleotide
  Antisense strand to SEQ ID NO: 525275
uagacucccgaagagguaa

SEQ ID NO: 525277 - RNA, 19 nt, Artificial Sequence
  Description of Artificial Sequence: Synthetic oligonucleotide
  Sense strand starting at position 2331 of SEQ ID NO: 317953
ccgagcauuugucuuagaa

SEQ ID NO: 525278 - RNA, 19 nt, Artificial Sequence
  Description of Artificial Sequence: Synthetic oligonucleotide
  Antisense strand to SEQ ID NO: 525277
uucuaagacaaaugcucgg

SEQ ID NO: 525279 - RNA, 19 nt, Artificial Sequence
  Description of Artificial Sequence: Synthetic oligonucleotide
  Sense strand starting at position 2368 of SEQ ID NO: 317953
auuguuaaguacuuucuca

SEQ ID NO: 525280 - RNA, 19 nt, Artificial Sequence
  Description of Artificial Sequence: Synthetic oligonucleotide
  Antisense strand to SEQ ID NO: 525279
ugagaaaguacuuaacaau

SEQ ID NO: 525281 - RNA, 19 nt, Artificial Sequence
  Description of Artificial Sequence: Synthetic oligonucleotide
  Sense strand starting at position 2451 of SEQ ID NO: 317953
caggaaugucucuggaccu

SEQ ID NO: 525282 - RNA, 19 nt, Artificial Sequence
  Description of Artificial Sequence: Synthetic oligonucleotide
  Antisense strand to SEQ ID NO: 525281
agguccagagacauuccug

SEQ ID NO: 525283 - RNA, 19 nt, Artificial Sequence
  Description of Artificial Sequence: Synthetic oligonucleotide
  Sense strand starting at position 2486 of SEQ ID NO: 317953
uuugaaaugcugcacauau

SEQ ID NO: 525284 - RNA, 19 nt, Artificial Sequence
  Description of Artificial Sequence: Synthetic oligonucleotide
  Antisense strand to SEQ ID NO: 525283
auaugugcagcauuucaaa

SEQ ID NO: 525285 - RNA, 19 nt, Artificial Sequence
  Description of Artificial Sequence: Synthetic oligonucleotide
  Sense strand starting at position 2488 of SEQ ID NO: 317953
ugaaaugcugcacauauca

SEQ ID NO: 525286 - RNA, 19 nt, Artificial Sequence
  Description of Artificial Sequence: Synthetic oligonucleotide
  Antisense strand to SEQ ID NO: 525285
ugauaugugcagcauuuca

SEQ ID NO: 525287 - RNA, 19 nt, Artificial Sequence
  Description of Artificial Sequence: Synthetic oligonucleotide
  Sense strand starting at position 2496 of SEQ ID NO: 317953
ugcacauaucaacggagua

SEQ ID NO: 525288 - RNA, 19 nt, Artificial Sequence
  Description of Artificial Sequence: Synthetic oligonucleotide
  Antisense strand to SEQ ID NO: 525287
uacuccguugauaugugca

SEQ ID NO: 525289 - RNA, 19 nt, Artificial Sequence
  Description of Artificial Sequence: Synthetic oligonucleotide
  Sense strand starting at position 2497 of SEQ ID NO: 317953
gcacauaucaacggaguag

SEQ ID NO: 525290 - RNA, 19 nt, Artificial Sequence
  Description of Artificial Sequence: Synthetic oligonucleotide
  Antisense strand to SEQ ID NO: 525289
cuacuccguugauaugugc

SEQ ID NO: 525291 - RNA, 19 nt, Artificial Sequence
  Description of Artificial Sequence: Synthetic oligonucleotide
  Sense strand starting at position 2573 of SEQ ID NO: 317953
acuugcuccguguugcaaa

SEQ ID NO: 525292 - RNA, 19 nt, Artificial Sequence
  Description of Artificial Sequence: Synthetic oligonucleotide
  Antisense strand to SEQ ID NO: 525291
uuugcaacacggagcaagu

SEQ ID NO: 525293 - RNA, 19 nt, Artificial Sequence
  Description of Artificial Sequence: Synthetic oligonucleotide
  Sense strand starting at position 2762 of SEQ ID NO: 317953
guauauacuuggcuauaca

SEQ ID NO: 525294 - RNA, 19 nt, Artificial Sequence
  Description of Artificial Sequence: Synthetic oligonucleotide
  Antisense strand to SEQ ID NO: 525293
uguauagccaaguauauac

SEQ ID NO: 525295 - RNA, 19 nt, Artificial Sequence
  Description of Artificial Sequence: Synthetic oligonucleotide
  Sense strand starting at position 2789 of SEQ ID NO: 317953
agauuucugucuuugcaau

SEQ ID NO: 525296 - RNA, 19 nt, Artificial Sequence
  Description of Artificial Sequence: Synthetic oligonucleotide
  Antisense strand to SEQ ID NO: 525295
auugcaaagacagaaaucu

SEQ ID NO: 525297 - RNA, 19 nt, Artificial Sequence
  Description of Artificial Sequence: Synthetic oligonucleotide
  Sense strand starting at position 2879 of SEQ ID NO: 317953
cuacuaacguuuguggaga

SEQ ID NO: 525298 - RNA, 19 nt, Artificial Sequence
  Description of Artificial Sequence: Synthetic oligonucleotide
  Antisense strand to SEQ ID NO: 525297
ucuccacaaacguuaguag

SEQ ID NO: 525299 - RNA, 19 nt, Artificial Sequence
  Description of Artificial Sequence: Synthetic oligonucleotide
  Sense strand starting at position 2884 of SEQ ID NO: 317953
aacguuuguggagaggauu

SEQ ID NO: 525300 - RNA, 19 nt, Artificial Sequence
  Description of Artificial Sequence: Synthetic oligonucleotide
  Antisense strand to SEQ ID NO: 525299
aauccucuccacaaacguu

SEQ ID NO: 525301 - RNA, 19 nt, Artificial Sequence
  Description of Artificial Sequence: Synthetic oligonucleotide
  Sense strand starting at position 2947 of SEQ ID NO: 317953
ugccuauacccagaauguu

SEQ ID NO: 525302 - RNA, 19 nt, Artificial Sequence
  Description of Artificial Sequence: Synthetic oligonucleotide
  Antisense strand to SEQ ID NO: 525301
aacauucuggguauaggca

SEQ ID NO: 525303 - RNA, 19 nt, Artificial Sequence
  Description of Artificial Sequence: Synthetic oligonucleotide
  Sense strand starting at position 3076 of SEQ ID NO: 317953
ugguucugugaguaaacuu

SEQ ID NO: 525304 - RNA, 19 nt, Artificial Sequence
  Description of Artificial Sequence: Synthetic oligonucleotide
  Antisense strand to SEQ ID NO: 525303
aaguuuacucacagaacca

SEQ ID NO: 525305 - RNA, 19 nt, Artificial Sequence
  Description of Artificial Sequence: Synthetic oligonucleotide
  Sense strand starting at position 3114 of SEQ ID NO: 317953
uucugugaacaucaaaugu

SEQ ID NO: 525306 - RNA, 19 nt, Artificial Sequence
  Description of Artificial Sequence: Synthetic oligonucleotide
  Antisense strand to SEQ ID NO: 525305
acauuugauguucacagaa

SEQ ID NO: 525307 - RNA, 19 nt, Artificial Sequence
  Description of Artificial Sequence: Synthetic oligonucleotide
  Sense strand starting at position 3281 of SEQ ID NO: 317953
gaaagaugugguuggugaa

SEQ ID NO: 525308 - RNA, 19 nt, Artificial Sequence
  Description of Artificial Sequence: Synthetic oligonucleotide
  Antisense strand to SEQ ID NO: 525307
uucaccaaccacaucuuuc

SEQ ID NO: 525309 - RNA, 19 nt, Artificial Sequence
  Description of Artificial Sequence: Synthetic oligonucleotide
  Sense strand starting at position 3282 of SEQ ID NO: 317953
aaagaugugguuggugaau

SEQ ID NO: 525310 - RNA, 19 nt, Artificial Sequence
  Description of Artificial Sequence: Synthetic oligonucleotide
  Antisense strand to SEQ ID NO: 525309
auucaccaaccacaucuuu

SEQ ID NO: 525311 - RNA, 19 nt, Artificial Sequence
  Description of Artificial Sequence: Synthetic oligonucleotide
  Sense strand starting at position 3287 of SEQ ID NO: 317953
ugugguuggugaauacguu

SEQ ID NO: 525312 - RNA, 19 nt, Artificial Sequence
  Description of Artificial Sequence: Synthetic oligonucleotide
  Antisense strand to SEQ ID NO: 525311
aacguauucaccaaccaca

SEQ ID NO: 525313 - RNA, 19 nt, Artificial Sequence
  Description of Artificial Sequence: Synthetic oligonucleotide
  Sense strand starting at position 3293 of SEQ ID NO: 317953
uggugaauacguuauuaca

SEQ ID NO: 525314 - RNA, 19 nt, Artificial Sequence
  Description of Artificial Sequence: Synthetic oligonucleotide
  Antisense strand to SEQ ID NO: 525313
uguaauaacguauucacca

SEQ ID NO: 525315 - RNA, 19 nt, Artificial Sequence
  Description of Artificial Sequence: Synthetic oligonucleotide
  Sense strand starting at position 3295 of SEQ ID NO: 317953
gugaauacguuauuacaua

SEQ ID NO: 525316 - RNA, 19 nt, Artificial Sequence
  Description of Artificial Sequence: Synthetic oligonucleotide
  Antisense strand to SEQ ID NO: 525315
uauguaauaacguauucac

SEQ ID NO: 525317 - RNA, 19 nt, Artificial Sequence
  Description of Artificial Sequence: Synthetic oligonucleotide
  Sense strand starting at position 3306 of SEQ ID NO: 317953
auuacauauuugcagaaag

SEQ ID NO: 525318 - RNA, 19 nt, Artificial Sequence
  Description of Artificial Sequence: Synthetic oligonucleotide
  Antisense strand to SEQ ID NO: 525317
cuuucugcaaauauguaau

SEQ ID NO: 525319 - RNA, 19 nt, Artificial Sequence
  Description of Artificial Sequence: Synthetic oligonucleotide
  Sense strand starting at position 3350 of SEQ ID NO: 317953
aauagagcuguuugauaca

SEQ ID NO: 525320 - RNA, 19 nt, Artificial Sequence
  Description of Artificial Sequence: Synthetic oligonucleotide
  Antisense strand to SEQ ID NO: 525319
uguaucaaacagcucuauu

SEQ ID NO: 525321 - RNA, 19 nt, Artificial Sequence
  Description of Artificial Sequence: Synthetic oligonucleotide
  Sense strand starting at position 3379 of SEQ ID NO: 317953
guuuguguuaaggaaccca

SEQ ID NO: 525322 - RNA, 19 nt, Artificial Sequence
  Description of Artificial Sequence: Synthetic oligonucleotide
  Antisense strand to SEQ ID NO: 525321
uggguuccuuaacacaaac

SEQ ID NO: 525323 - RNA, 19 nt, Artificial Sequence
  Description of Artificial Sequence: Synthetic oligonucleotide
  Sense strand starting at position 3440 of SEQ ID NO: 317953
uucucugaguucucaccua

SEQ ID NO: 525324 - RNA, 19 nt, Artificial Sequence
  Description of Artificial Sequence: Synthetic oligonucleotide
  Antisense strand to SEQ ID NO: 525323
uaggugagaacucagagaa

SEQ ID NO: 525325 - RNA, 19 nt, Artificial Sequence
  Description of Artificial Sequence: Synthetic oligonucleotide
  Sense strand starting at position 3508 of SEQ ID NO: 317953
aggaaaugcaguugugaaa

SEQ ID NO: 525326 - RNA, 19 nt, Artificial Sequence
  Description of Artificial Sequence: Synthetic oligonucleotide
  Antisense strand to SEQ ID NO: 525325
uuucacaacugcauuuccu

SEQ ID NO: 525327 - RNA, 19 nt, Artificial Sequence
  Description of Artificial Sequence: Synthetic oligonucleotide
  Sense strand starting at position 3515 of SEQ ID NO: 317953
gcaguugugaaagaauaua

SEQ ID NO: 525328 - RNA, 19 nt, Artificial Sequence
  Description of Artificial Sequence: Synthetic oligonucleotide
  Antisense strand to SEQ ID NO: 525327
uauauucuuucacaacugc

SEQ ID NO: 525329 - RNA, 19 nt, Artificial Sequence
  Description of Artificial Sequence: Synthetic oligonucleotide
  Sense strand starting at position 3539 of SEQ ID NO: 317953
aguaaaugaauguggcaaa

SEQ ID NO: 525330 - RNA, 19 nt, Artificial Sequence
  Description of Artificial Sequence: Synthetic oligonucleotide
  Antisense strand to SEQ ID NO: 525329
uuugccacauucauuuacu

SEQ ID NO: 525331 - RNA, 19 nt, Artificial Sequence
  Description of Artificial Sequence: Synthetic oligonucleotide
  Sense strand starting at position 3766 of SEQ ID NO: 317953
caaaccuagguggguaaua

SEQ ID NO: 525332 - RNA, 19 nt, Artificial Sequence
  Description of Artificial Sequence: Synthetic oligonucleotide
  Antisense strand to SEQ ID NO: 525331
uauuacccaccuagguuug

SEQ ID NO: 525333 - RNA, 19 nt, Artificial Sequence
  Description of Artificial Sequence: Synthetic oligonucleotide
  Sense strand starting at position 3767 of SEQ ID NO: 317953
aaaccuagguggguaauaa

SEQ ID NO: 525334 - RNA, 19 nt, Artificial Sequence
  Description of Artificial Sequence: Synthetic oligonucleotide
  Antisense strand to SEQ ID NO: 525333
uuauuacccaccuagguuu

SEQ ID NO: 525335 - RNA, 19 nt, Artificial Sequence
  Description of Artificial Sequence: Synthetic oligonucleotide
  Sense strand starting at position 3886 of SEQ ID NO: 317953
agaggaaucuugguugugu

SEQ ID NO: 525336 - RNA, 19 nt, Artificial Sequence
  Description of Artificial Sequence: Synthetic oligonucleotide
  Antisense strand to SEQ ID NO: 525335
acacaaccaagauuccucu

SEQ ID NO: 525337 - RNA, 19 nt, Artificial Sequence
  Description of Artificial Sequence: Synthetic oligonucleotide
  Sense strand starting at position 3887 of SEQ ID NO: 317953
gaggaaucuugguugugug

SEQ ID NO: 525338 - RNA, 19 nt, Artificial Sequence
  Description of Artificial Sequence: Synthetic oligonucleotide
  Antisense strand to SEQ ID NO: 525337
cacacaaccaagauuccuc

SEQ ID NO: 525339 - RNA, 19 nt, Artificial Sequence
  Description of Artificial Sequence: Synthetic oligonucleotide
  Sense strand starting at position 3897 of SEQ ID NO: 317953
gguugugugccaucuuagu

SEQ ID NO: 525340 - RNA, 19 nt, Artificial Sequence
  Description of Artificial Sequence: Synthetic oligonucleotide
  Antisense strand to SEQ ID NO: 525339
acuaagauggcacacaacc

SEQ ID NO: 525341 - RNA, 19 nt, Artificial Sequence
  Description of Artificial Sequence: Synthetic oligonucleotide
  Sense strand starting at position 11 of SEQ ID NO: 317954
aagaaagucucucugaguc

SEQ ID NO: 525342 - RNA, 19 nt, Artificial Sequence
  Description of Artificial Sequence: Synthetic oligonucleotide
  Antisense strand to SEQ ID NO: 525341
gacucagagagacuuucuu

SEQ ID NO: 525343 - RNA, 19 nt, Artificial Sequence
  Description of Artificial Sequence: Synthetic oligonucleotide
  Sense strand starting at position 382 of SEQ ID NO: 317954
aucgcaucccuguagagaa

SEQ ID NO: 525344 - RNA, 19 nt, Artificial Sequence
  Description of Artificial Sequence: Synthetic oligonucleotide
  Antisense strand to SEQ ID NO: 525343
uucucuacagggaugcgau

SEQ ID NO: 525345 - RNA, 19 nt, Artificial Sequence
  Description of Artificial Sequence: Synthetic oligonucleotide
  Sense strand starting at position 470 of SEQ ID NO: 317954
gauguaacauagcuagaga

SEQ ID NO: 525346 - RNA, 19 nt, Artificial Sequence
  Description of Artificial Sequence: Synthetic oligonucleotide
  Antisense strand to SEQ ID NO: 525345
ucucuagcuauguuacauc

SEQ ID NO: 525347 - RNA, 19 nt, Artificial Sequence
  Description of Artificial Sequence: Synthetic oligonucleotide
  Sense strand starting at position 486 of SEQ ID NO: 317954
agaauaauggaguguuuga

SEQ ID NO: 525348 - RNA, 19 nt, Artificial Sequence
  Description of Artificial Sequence: Synthetic oligonucleotide
  Antisense strand to SEQ ID NO: 525347
ucaaacacuccauuauucu

SEQ ID NO: 525349 - RNA, 19 nt, Artificial Sequence
  Description of Artificial Sequence: Synthetic oligonucleotide
  Sense strand starting at position 553 of SEQ ID NO: 317954
aagugcguacuugauuaaa

SEQ ID NO: 525350 - RNA, 19 nt, Artificial Sequence
  Description of Artificial Sequence: Synthetic oligonucleotide
  Antisense strand to SEQ ID NO: 525349
uuuaaucaaguacgcacuu

SEQ ID NO: 525351 - RNA, 19 nt, Artificial Sequence
  Description of Artificial Sequence: Synthetic oligonucleotide
  Sense strand starting at position 563 of SEQ ID NO: 317954
uugauuaaaugccugaaau

SEQ ID NO: 525352 - RNA, 19 nt, Artificial Sequence
  Description of Artificial Sequence: Synthetic oligonucleotide
  Antisense strand to SEQ ID NO: 525351
auuucaggcauuuaaucaa

SEQ ID NO: 525353 - RNA, 19 nt, Artificial Sequence
  Description of Artificial Sequence: Synthetic oligonucleotide
  Sense strand starting at position 564 of SEQ ID NO: 317954
ugauuaaaugccugaaauu

SEQ ID NO: 525354 - RNA, 19 nt, Artificial Sequence
  Description of Artificial Sequence: Synthetic oligonucleotide
  Antisense strand to SEQ ID NO: 525353
aauuucaggcauuuaauca

SEQ ID NO: 525355 - RNA, 19 nt, Artificial Sequence
  Description of Artificial Sequence: Synthetic oligonucleotide
  Sense strand starting at position 640 of SEQ ID NO: 317954
auaccuuuggcauguaauu

SEQ ID NO: 525356 - RNA, 19 nt, Artificial Sequence
  Description of Artificial Sequence: Synthetic oligonucleotide
  Antisense strand to SEQ ID NO: 525355
aauuacaugccaaagguau

SEQ ID NO: 525357 - RNA, 19 nt, Artificial Sequence
  Description of Artificial Sequence: Synthetic oligonucleotide
  Sense strand starting at position 685 of SEQ ID NO: 317954
gccagagacucuguccauu

SEQ ID NO: 525358 - RNA, 19 nt, Artificial Sequence
  Description of Artificial Sequence: Synthetic oligonucleotide
  Antisense strand to SEQ ID NO: 525357
aauggacagagucucuggc

SEQ ID NO: 525359 - RNA, 19 nt, Artificial Sequence
  Description of Artificial Sequence: Synthetic oligonucleotide
  Sense strand starting at position 740 of SEQ ID NO: 317954
cugaaacgaggaugugaua

SEQ ID NO: 525360 - RNA, 19 nt, Artificial Sequence
  Description of Artificial Sequence: Synthetic oligonucleotide
  Antisense strand to SEQ ID NO: 525359
uaucacauccucguuucag

SEQ ID NO: 525361 - RNA, 19 nt, Artificial Sequence
  Description of Artificial Sequence: Synthetic oligonucleotide
  Sense strand starting at position 784 of SEQ ID NO: 317954
aaguaauccgagugaccau

SEQ ID NO: 525362 - RNA, 19 nt, Artificial Sequence
  Description of Artificial Sequence: Synthetic oligonucleotide
  Antisense strand to SEQ ID NO: 525361
auggucacucggauuacuu

SEQ ID NO: 525363 - RNA, 19 nt, Artificial Sequence
  Description of Artificial Sequence: Synthetic oligonucleotide
  Sense strand starting at position 1303 of SEQ ID NO: 317954
guuccagugcuaucugcuu

SEQ ID NO: 525364 - RNA, 19 nt, Artificial Sequence
  Description of Artificial Sequence: Synthetic oligonucleotide
  Antisense strand to SEQ ID NO: 525363
aagcagauagcacuggaac

SEQ ID NO: 525365 - RNA, 19 nt, Artificial Sequence
  Description of Artificial Sequence: Synthetic oligonucleotide
  Sense strand starting at position 1310 of SEQ ID NO: 317954
ugcuaucugcuugaaacau

SEQ ID NO: 525366 - RNA, 19 nt, Artificial Sequence
  Description of Artificial Sequence: Synthetic oligonucleotide
  Antisense strand to SEQ ID NO: 525365
auguuucaagcagauagca

SEQ ID NO: 525367 - RNA, 19 nt, Artificial Sequence
  Description of Artificial Sequence: Synthetic oligonucleotide
  Sense strand starting at position 1428 of SEQ ID NO: 317954
cucuguuucccagaucaga

SEQ ID NO: 525368 - RNA, 19 nt, Artificial Sequence
  Description of Artificial Sequence: Synthetic oligonucleotide
  Antisense strand to SEQ ID NO: 525367
ucugaucugggaaacagag

SEQ ID NO: 525369 - RNA, 19 nt, Artificial Sequence
  Description of Artificial Sequence: Synthetic oligonucleotide
  Sense strand starting at position 1441 of SEQ ID NO: 317954
aucagaugcccugauucuu

SEQ ID NO: 525370 - RNA, 19 nt, Artificial Sequence
  Description of Artificial Sequence: Synthetic oligonucleotide
  Antisense strand to SEQ ID NO: 525369
aagaaucagggcaucugau

SEQ ID NO: 525371 - RNA, 19 nt, Artificial Sequence
  Description of Artificial Sequence: Synthetic oligonucleotide
  Sense strand starting at position 1730 of SEQ ID NO: 317954
ccaagaaugucagccucua

SEQ ID NO: 525372 - RNA, 19 nt, Artificial Sequence
  Description of Artificial Sequence: Synthetic oligonucleotide
  Antisense strand to SEQ ID NO: 525371
uagaggcugacauucuugg

SEQ ID NO: 525373 - RNA, 19 nt, Artificial Sequence
  Description of Artificial Sequence: Synthetic oligonucleotide
  Sense strand starting at position 1973 of SEQ ID NO: 317954
ggcaaaugugugagccgaa

SEQ ID NO: 525374 - RNA, 19 nt, Artificial Sequence
  Description of Artificial Sequence: Synthetic oligonucleotide
  Antisense strand to SEQ ID NO: 525373
uucggcucacacauuugcc

SEQ ID NO: 525375 - RNA, 19 nt, Artificial Sequence
  Description of Artificial Sequence: Synthetic oligonucleotide
  Sense strand starting at position 2036 of SEQ ID NO: 317954
cugaguugccagggaaaca

SEQ ID NO: 525376 - RNA, 19 nt, Artificial Sequence
  Description of Artificial Sequence: Synthetic oligonucleotide
  Antisense strand to SEQ ID NO: 525375
uguuucccuggcaacucag

SEQ ID NO: 525377 - RNA, 19 nt, Artificial Sequence
  Description of Artificial Sequence: Synthetic oligonucleotide
  Sense strand starting at position 2402 of SEQ ID NO: 317954
uggacauccucuuuagacu

SEQ ID NO: 525378 - RNA, 19 nt, Artificial Sequence
  Description of Artificial Sequence: Synthetic oligonucleotide
  Antisense strand to SEQ ID NO: 525377
agucuaaagaggaugucca

SEQ ID NO: 525379 - RNA, 19 nt, Artificial Sequence
  Description of Artificial Sequence: Synthetic oligonucleotide
  Sense strand starting at position 2446 of SEQ ID NO: 317954
gagggagcugucuggacaa

SEQ ID NO: 525380 - RNA, 19 nt, Artificial Sequence
  Description of Artificial Sequence: Synthetic oligonucleotide
  Antisense strand to SEQ ID NO: 525379
uuguccagacagcucccuc

SEQ ID NO: 525381 - RNA, 19 nt, Artificial Sequence
  Description of Artificial Sequence: Synthetic oligonucleotide
  Sense strand starting at position 2448 of SEQ ID NO: 317954
gggagcugucuggacaaau

SEQ ID NO: 525382 - RNA, 19 nt, Artificial Sequence
  Description of Artificial Sequence: Synthetic oligonucleotide
  Antisense strand to SEQ ID NO: 525381
auuuguccagacagcuccc

SEQ ID NO: 525383 - RNA, 19 nt, Artificial Sequence
  Description of Artificial Sequence: Synthetic oligonucleotide
  Sense strand starting at position 2512 of SEQ ID NO: 317954
uggaucaagagcugucuuu

SEQ ID NO: 525384 - RNA, 19 nt, Artificial Sequence
  Description of Artificial Sequence: Synthetic oligonucleotide
  Antisense strand to SEQ ID NO: 525383
aaagacagcucuugaucca

SEQ ID NO: 525385 - RNA, 19 nt, Artificial Sequence
  Description of Artificial Sequence: Synthetic oligonucleotide
  Sense strand starting at position 2518 of SEQ ID NO: 317954
aagagcugucuuugaagaa

SEQ ID NO: 525386 - RNA, 19 nt, Artificial Sequence
  Description of Artificial Sequence: Synthetic oligonucleotide
  Antisense strand to SEQ ID NO: 525385
uucuucaaagacagcucuu

SEQ ID NO: 525387 - RNA, 19 nt, Artificial Sequence
  Description of Artificial Sequence: Synthetic oligonucleotide
  Sense strand starting at position 2522 of SEQ ID NO: 317954
gcugucuuugaagaaacca

SEQ ID NO: 525388 - RNA, 19 nt, Artificial Sequence
  Description of Artificial Sequence: Synthetic oligonucleotide
  Antisense strand to SEQ ID NO: 525387
ugguuucuucaaagacagc

SEQ ID NO: 525389 - RNA, 19 nt, Artificial Sequence
  Description of Artificial Sequence: Synthetic oligonucleotide
  Sense strand starting at position 2721 of SEQ ID NO: 317954
cuagaaauaugcucuccag

SEQ ID NO: 525390 - RNA, 19 nt, Artificial Sequence
  Description of Artificial Sequence: Synthetic oligonucleotide
  Antisense strand to SEQ ID NO: 525389
cuggagagcauauuucuag

SEQ ID NO: 525391 - RNA, 19 nt, Artificial Sequence
  Description of Artificial Sequence: Synthetic oligonucleotide
  Sense strand starting at position 2842 of SEQ ID NO: 317954
gugccuucugaagggauga

SEQ ID NO: 525392 - RNA, 19 nt, Artificial Sequence
  Description of Artificial Sequence: Synthetic oligonucleotide
  Antisense strand to SEQ ID NO: 525391
ucaucccuucagaaggcac

SEQ ID NO: 525393 - RNA, 19 nt, Artificial Sequence
  Description of Artificial Sequence: Synthetic oligonucleotide
  Sense strand starting at position 2894 of SEQ ID NO: 317954
gagcuagaggcucaaucau

SEQ ID NO: 525394 - RNA, 19 nt, Artificial Sequence
  Description of Artificial Sequence: Synthetic oligonucleotide
  Antisense strand to SEQ ID NO: 525393
augauugagccucuagcuc

SEQ ID NO: 525395 - RNA, 19 nt, Artificial Sequence
  Description of Artificial Sequence: Synthetic oligonucleotide
  Sense strand starting at position 2975 of SEQ ID NO: 317954
uugauuucuugagacccua

SEQ ID NO: 525396 - RNA, 19 nt, Artificial Sequence
  Description of Artificial Sequence: Synthetic oligonucleotide
  Antisense strand to SEQ ID NO: 525395
uagggucucaagaaaucaa

SEQ ID NO: 525397 - RNA, 19 nt, Artificial Sequence
  Description of Artificial Sequence: Synthetic oligonucleotide
  Sense strand starting at position 3154 of SEQ ID NO: 317954
aucauuaugcuagauguag

SEQ ID NO: 525398 - RNA, 19 nt, Artificial Sequence
  Description of Artificial Sequence: Synthetic oligonucleotide
  Antisense strand to SEQ ID NO: 525397
cuacaucuagcauaaugau

SEQ ID NO: 525399 - RNA, 19 nt, Artificial Sequence
  Description of Artificial Sequence: Synthetic oligonucleotide
  Sense strand starting at position 3165 of SEQ ID NO: 317954
agauguaguaugcauguua

SEQ ID NO: 525400 - RNA, 19 nt, Artificial Sequence
  Description of Artificial Sequence: Synthetic oligonucleotide
  Antisense strand to SEQ ID NO: 525399
uaacaugcauacuacaucu

SEQ ID NO: 525401 - RNA, 19 nt, Artificial Sequence
  Description of Artificial Sequence: Synthetic oligonucleotide
  Sense strand starting at position 3277 of SEQ ID NO: 317954
gugguacccuuaguuaaag

SEQ ID NO: 525402 - RNA, 19 nt, Artificial Sequence
  Description of Artificial Sequence: Synthetic oligonucleotide
  Antisense strand to SEQ ID NO: 525401
cuuuaacuaaggguaccac

SEQ ID NO: 525403 - RNA, 19 nt, Artificial Sequence
  Description of Artificial Sequence: Synthetic oligonucleotide
  Sense strand starting at position 3278 of SEQ ID NO: 317954
ugguacccuuaguuaaagu

SEQ ID NO: 525404 - RNA, 19 nt, Artificial Sequence
  Description of Artificial Sequence: Synthetic oligonucleotide
  Antisense strand to SEQ ID NO: 525403
acuuuaacuaaggguacca

SEQ ID NO: 525405 - RNA, 19 nt, Artificial Sequence
  Description of Artificial Sequence: Synthetic oligonucleotide
  Sense strand starting at position 3288 of SEQ ID NO: 317954
aguuaaaguccucauugug

SEQ ID NO: 525406 - RNA, 19 nt, Artificial Sequence
  Description of Artificial Sequence: Synthetic oligonucleotide
  Antisense strand to SEQ ID NO: 525405
cacaaugaggacuuuaacu

SEQ ID NO: 525407 - RNA, 19 nt, Artificial Sequence
  Description of Artificial Sequence: Synthetic oligonucleotide
  Sense strand starting at position 3481 of SEQ ID NO: 317954
aaucaaauguguccaagug

SEQ ID NO: 525408 - RNA, 19 nt, Artificial Sequence
  Description of Artificial Sequence: Synthetic oligonucleotide
  Antisense strand to SEQ ID NO: 525407
cacuuggacacauuugauu

SEQ ID NO: 525409 - RNA, 19 nt, Artificial Sequence
  Description of Artificial Sequence: Synthetic oligonucleotide
  Sense strand starting at position 3482 of SEQ ID NO: 317954
aucaaauguguccaagugu

SEQ ID NO: 525410 - RNA, 19 nt, Artificial Sequence
  Description of Artificial Sequence: Synthetic oligonucleotide
  Antisense strand to SEQ ID NO: 525409
acacuuggacacauuugau

SEQ ID NO: 525411 - RNA, 19 nt, Artificial Sequence
  Description of Artificial Sequence: Synthetic oligonucleotide
  Sense strand starting at position 3574 of SEQ ID NO: 317954
gugaaacccuguuuaaaca

SEQ ID NO: 525412 - RNA, 19 nt, Artificial Sequence
  Description of Artificial Sequence: Synthetic oligonucleotide
  Antisense strand to SEQ ID NO: 525411
uguuuaaacaggguuucac

SEQ ID NO: 525413 - RNA, 19 nt, Artificial Sequence
  Description of Artificial Sequence: Synthetic oligonucleotide
  Sense strand starting at position 3701 of SEQ ID NO: 317954
uccaaauacugggaaauaa

SEQ ID NO: 525414 - RNA, 19 nt, Artificial Sequence
  Description of Artificial Sequence: Synthetic oligonucleotide
  Antisense strand to SEQ ID NO: 525413
uuauuucccaguauuugga

SEQ ID NO: 525415 - RNA, 19 nt, Artificial Sequence
  Description of Artificial Sequence: Synthetic oligonucleotide
  Sense strand starting at position 3711 of SEQ ID NO: 317954
gggaaauaauccucaguua

SEQ ID NO: 525416 - RNA, 19 nt, Artificial Sequence
  Description of Artificial Sequence: Synthetic oligonucleotide
  Antisense strand to SEQ ID NO: 525415
uaacugaggauuauuuccc

SEQ ID NO: 525417 - RNA, 19 nt, Artificial Sequence
  Description of Artificial Sequence: Synthetic oligonucleotide
  Sense strand starting at position 3818 of SEQ ID NO: 317954
uucuguuacuaucuagauu

SEQ ID NO: 525418 - RNA, 19 nt, Artificial Sequence
  Description of Artificial Sequence: Synthetic oligonucleotide
  Antisense strand to SEQ ID NO: 525417
aaucuagauaguaacagaa

SEQ ID NO: 525419 - RNA, 19 nt, Artificial Sequence
  Description of Artificial Sequence: Synthetic oligonucleotide
  Sense strand starting at position 3929 of SEQ ID NO: 317954
gggacuuugcaaugaccua

SEQ ID NO: 525420 - RNA, 19 nt, Artificial Sequence
  Description of Artificial Sequence: Synthetic oligonucleotide
  Antisense strand to SEQ ID NO: 525419
uaggucauugcaaaguccc

SEQ ID NO: 525421 - RNA, 19 nt, Artificial Sequence
  Description of Artificial Sequence: Synthetic oligonucleotide
  Sense strand starting at position 169 of SEQ ID NO: 317955
uguuaaagguaacuacuaa

SEQ ID NO: 525422 - RNA, 19 nt, Artificial Sequence
  Description of Artificial Sequence: Synthetic oligonucleotide
  Antisense strand to SEQ ID NO: 525421
uuaguaguuaccuuuaaca

SEQ ID NO: 525423 - RNA, 19 nt, Artificial Sequence
  Description of Artificial Sequence: Synthetic oligonucleotide
  Sense strand starting at position 571 of SEQ ID NO: 317955
cucagaauuagguggccaa

SEQ ID NO: 525424 - RNA, 19 nt, Artificial Sequence
  Description of Artificial Sequence: Synthetic oligonucleotide
  Antisense strand to SEQ ID NO: 525423
uuggccaccuaauucugag

SEQ ID NO: 525425 - RNA, 19 nt, Artificial Sequence
  Description of Artificial Sequence: Synthetic oligonucleotide
  Sense strand starting at position 572 of SEQ ID NO: 317955
ucagaauuagguggccaaa

SEQ ID NO: 525426 - RNA, 19 nt, Artificial Sequence
  Description of Artificial Sequence: Synthetic oligonucleotide
  Antisense strand to SEQ ID NO: 525425
uuuggccaccuaauucuga

SEQ ID NO: 525427 - RNA, 19 nt, Artificial Sequence
  Description of Artificial Sequence: Synthetic oligonucleotide
  Sense strand starting at position 630 of SEQ ID NO: 317955
gugcuaaauuuacuagcua

SEQ ID NO: 525428 - RNA, 19 nt, Artificial Sequence
  Description of Artificial Sequence: Synthetic oligonucleotide
  Antisense strand to SEQ ID NO: 525427
uagcuaguaaauuuagcac

SEQ ID NO: 525429 - RNA, 19 nt, Artificial Sequence
  Description of Artificial Sequence: Synthetic oligonucleotide
  Sense strand starting at position 669 of SEQ ID NO: 317955
ucugcacucugauuacaag

SEQ ID NO: 525430 - RNA, 19 nt, Artificial Sequence
  Description of Artificial Sequence: Synthetic oligonucleotide
  Antisense strand to SEQ ID NO: 525429
cuuguaaucagagugcaga

SEQ ID NO: 525431 - RNA, 19 nt, Artificial Sequence
  Description of Artificial Sequence: Synthetic oligonucleotide
  Sense strand starting at position 670 of SEQ ID NO: 317955
cugcacucugauuacaaga

SEQ ID NO: 525432 - RNA, 19 nt, Artificial Sequence
  Description of Artificial Sequence: Synthetic oligonucleotide
  Antisense strand to SEQ ID NO: 525431
ucuuguaaucagagugcag

SEQ ID NO: 525433 - RNA, 19 nt, Artificial Sequence
  Description of Artificial Sequence: Synthetic oligonucleotide
  Sense strand starting at position 1101 of SEQ ID NO: 317955
ucagauaaaguaggucuaa

SEQ ID NO: 525434 - RNA, 19 nt, Artificial Sequence
  Description of Artificial Sequence: Synthetic oligonucleotide
  Antisense strand to SEQ ID NO: 525433
uuagaccuacuuuaucuga

SEQ ID NO: 525435 - RNA, 19 nt, Artificial Sequence
  Description of Artificial Sequence: Synthetic oligonucleotide
  Sense strand starting at position 1152 of SEQ ID NO: 317955
gccacauaauaaguggauu

SEQ ID NO: 525436 - RNA, 19 nt, Artificial Sequence
  Description of Artificial Sequence: Synthetic oligonucleotide
  Antisense strand to SEQ ID NO: 525435
aauccacuuauuauguggc

SEQ ID NO: 525437 - RNA, 19 nt, Artificial Sequence
  Description of Artificial Sequence: Synthetic oligonucleotide
  Sense strand starting at position 1280 of SEQ ID NO: 317955
gcaauuauggugggagauu

SEQ ID NO: 525438 - RNA, 19 nt, Artificial Sequence
  Description of Artificial Sequence: Synthetic oligonucleotide
  Antisense strand to SEQ ID NO: 525437
aaucucccaccauaauugc

SEQ ID NO: 525439 - RNA, 19 nt, Artificial Sequence
  Description of Artificial Sequence: Synthetic oligonucleotide
  Sense strand starting at position 1383 of SEQ ID NO: 317955
cuuaauugaugaguguaua

SEQ ID NO: 525440 - RNA, 19 nt, Artificial Sequence
  Description of Artificial Sequence: Synthetic oligonucleotide
  Antisense strand to SEQ ID NO: 525439
uauacacucaucaauuaag

SEQ ID NO: 525441 - RNA, 19 nt, Artificial Sequence
  Description of Artificial Sequence: Synthetic oligonucleotide
  Sense strand starting at position 1473 of SEQ ID NO: 317955
gaccauguaccaggucaua

SEQ ID NO: 525442 - RNA, 19 nt, Artificial Sequence
  Description of Artificial Sequence: Synthetic oligonucleotide
  Antisense strand to SEQ ID NO: 525441
uaugaccugguacaugguc

SEQ ID NO: 525443 - RNA, 19 nt, Artificial Sequence
  Description of Artificial Sequence: Synthetic oligonucleotide
  Sense strand starting at position 1531 of SEQ ID NO: 317955
acuauucuuugggcagaau

SEQ ID NO: 525444 - RNA, 19 nt, Artificial Sequence
  Description of Artificial Sequence: Synthetic oligonucleotide
  Antisense strand to SEQ ID NO: 525443
auucugcccaaagaauagu

SEQ ID NO: 525445 - RNA, 19 nt, Artificial Sequence
  Description of Artificial Sequence: Synthetic oligonucleotide
  Sense strand starting at position 1532 of SEQ ID NO: 317955
cuauucuuugggcagaaua

SEQ ID NO: 525446 - RNA, 19 nt, Artificial Sequence
  Description of Artificial Sequence: Synthetic oligonucleotide
  Antisense strand to SEQ ID NO: 525445
uauucugcccaaagaauag

SEQ ID NO: 525447 - RNA, 19 nt, Artificial Sequence
  Description of Artificial Sequence: Synthetic oligonucleotide
  Sense strand starting at position 1782 of SEQ ID NO: 317955
uagaucuuugacuggguca

SEQ ID NO: 525448 - RNA, 19 nt, Artificial Sequence
  Description of Artificial Sequence: Synthetic oligonucleotide
  Antisense strand to SEQ ID NO: 525447
ugacccagucaaagaucua

SEQ ID NO: 525449 - RNA, 19 nt, Artificial Sequence
  Description of Artificial Sequence: Synthetic oligonucleotide
  Sense strand starting at position 1783 of SEQ ID NO: 317955
agaucuuugacugggucau

SEQ ID NO: 525450 - RNA, 19 nt, Artificial Sequence
  Description of Artificial Sequence: Synthetic oligonucleotide
  Antisense strand to SEQ ID NO: 525449
augacccagucaaagaucu

SEQ ID NO: 525451 - RNA, 19 nt, Artificial Sequence
  Description of Artificial Sequence: Synthetic oligonucleotide
  Sense strand starting at position 1784 of SEQ ID NO: 317955
gaucuuugacugggucauu

SEQ ID NO: 525452 - RNA, 19 nt, Artificial Sequence
  Description of Artificial Sequence: Synthetic oligonucleotide
  Antisense strand to SEQ ID NO: 525451
aaugacccagucaaagauc

SEQ ID NO: 525453 - RNA, 19 nt, Artificial Sequence
  Description of Artificial Sequence: Synthetic oligonucleotide
  Sense strand starting at position 1787 of SEQ ID NO: 317955
cuuugacugggucauugau

SEQ ID NO: 525454 - RNA, 19 nt, Artificial Sequence
  Description of Artificial Sequence: Synthetic oligonucleotide
  Antisense strand to SEQ ID NO: 525453
aucaaugacccagucaaag

SEQ ID NO: 525455 - RNA, 19 nt, Artificial Sequence
  Description of Artificial Sequence: Synthetic oligonucleotide
  Sense strand starting at position 2112 of SEQ ID NO: 317955
ucggauauuuccuccucga

SEQ ID NO: 525456 - RNA, 19 nt, Artificial Sequence
  Description of Artificial Sequence: Synthetic oligonucleotide
  Antisense strand to SEQ ID NO: 525455
ucgaggaggaaauauccga

SEQ ID NO: 525457 - RNA, 19 nt, Artificial Sequence
  Description of Artificial Sequence: Synthetic oligonucleotide
  Sense strand starting at position 2115 of SEQ ID NO: 317955
gauauuuccuccucgagca

SEQ ID NO: 525458 - RNA, 19 nt, Artificial Sequence
  Description of Artificial Sequence: Synthetic oligonucleotide
  Antisense strand to SEQ ID NO: 525457
ugcucgaggaggaaauauc

SEQ ID NO: 525459 - RNA, 19 nt, Artificial Sequence
  Description of Artificial Sequence: Synthetic oligonucleotide
  Sense strand starting at position 2317 of SEQ ID NO: 317955
cccauugcucugggacaaa

SEQ ID NO: 525460 - RNA, 19 nt, Artificial Sequence
  Description of Artificial Sequence: Synthetic oligonucleotide
  Antisense strand to SEQ ID NO: 525459
uuugucccagagcaauggg

SEQ ID NO: 525461 - RNA, 19 nt, Artificial Sequence
  Description of Artificial Sequence: Synthetic oligonucleotide
  Sense strand starting at position 2584 of SEQ ID NO: 317955
ccugucuucccugaacuga

SEQ ID NO: 525462 - RNA, 19 nt, Artificial Sequence
  Description of Artificial Sequence: Synthetic oligonucleotide
  Antisense strand to SEQ ID NO: 525461
ucaguucagggaagacagg

SEQ ID NO: 525463 - RNA, 19 nt, Artificial Sequence
  Description of Artificial Sequence: Synthetic oligonucleotide
  Sense strand starting at position 2658 of SEQ ID NO: 317955
accaguguuuaauuacaca

SEQ ID NO: 525464 - RNA, 19 nt, Artificial Sequence
  Description of Artificial Sequence: Synthetic oligonucleotide
  Antisense strand to SEQ ID NO: 525463
uguguaauuaaacacuggu

SEQ ID NO: 525465 - RNA, 19 nt, Artificial Sequence
  Description of Artificial Sequence: Synthetic oligonucleotide
  Sense strand starting at position 2716 of SEQ ID NO: 317955
gacugucagcuccaugaua

SEQ ID NO: 525466 - RNA, 19 nt, Artificial Sequence
  Description of Artificial Sequence: Synthetic oligonucleotide
  Antisense strand to SEQ ID NO: 525465
uaucauggagcugacaguc

SEQ ID NO: 525467 - RNA, 19 nt, Artificial Sequence
  Description of Artificial Sequence: Synthetic oligonucleotide
  Sense strand starting at position 2798 of SEQ ID NO: 317955
augggcauuugauaaacau

SEQ ID NO: 525468 - RNA, 19 nt, Artificial Sequence
  Description of Artificial Sequence: Synthetic oligonucleotide
  Antisense strand to SEQ ID NO: 525467
auguuuaucaaaugcccau

SEQ ID NO: 525469 - RNA, 19 nt, Artificial Sequence
  Description of Artificial Sequence: Synthetic oligonucleotide
  Sense strand starting at position 2815 of SEQ ID NO: 317955
aucuguugaaugggcaaau

SEQ ID NO: 525470 - RNA, 19 nt, Artificial Sequence
  Description of Artificial Sequence: Synthetic oligonucleotide
  Antisense strand to SEQ ID NO: 525469
auuugcccauucaacagau

SEQ ID NO: 525471 - RNA, 19 nt, Artificial Sequence
  Description of Artificial Sequence: Synthetic oligonucleotide
  Sense strand starting at position 2825 of SEQ ID NO: 317955
ugggcaaaugaauguaauu

SEQ ID NO: 525472 - RNA, 19 nt, Artificial Sequence
  Description of Artificial Sequence: Synthetic oligonucleotide
  Antisense strand to SEQ ID NO: 525471
aauuacauucauuugccca

SEQ ID NO: 525473 - RNA, 19 nt, Artificial Sequence
  Description of Artificial Sequence: Synthetic oligonucleotide
  Sense strand starting at position 2838 of SEQ ID NO: 317955
guaauuuaacuacguuuac

SEQ ID NO: 525474 - RNA, 19 nt, Artificial Sequence
  Description of Artificial Sequence: Synthetic oligonucleotide
  Antisense strand to SEQ ID NO: 525473
guaaacguaguuaaauuac

SEQ ID NO: 525475 - RNA, 19 nt, Artificial Sequence
  Description of Artificial Sequence: Synthetic oligonucleotide
  Sense strand starting at position 2935 of SEQ ID NO: 317955
auaccuaugcauuauuagu

SEQ ID NO: 525476 - RNA, 19 nt, Artificial Sequence
  Description of Artificial Sequence: Synthetic oligonucleotide
  Antisense strand to SEQ ID NO: 525475
acuaauaaugcauagguau

SEQ ID NO: 525477 - RNA, 19 nt, Artificial Sequence
  Description of Artificial Sequence: Synthetic oligonucleotide
  Sense strand starting at position 3026 of SEQ ID NO: 317955
accuaauuagcaggugaug

SEQ ID NO: 525478 - RNA, 19 nt, Artificial Sequence
  Description of Artificial Sequence: Synthetic oligonucleotide
  Antisense strand to SEQ ID NO: 525477
caucaccugcuaauuaggu

SEQ ID NO: 525479 - RNA, 19 nt, Artificial Sequence
  Description of Artificial Sequence: Synthetic oligonucleotide
  Sense strand starting at position 3038 of SEQ ID NO: 317955
ggugauguccuauagguau

SEQ ID NO: 525480 - RNA, 19 nt, Artificial Sequence
  Description of Artificial Sequence: Synthetic oligonucleotide
  Antisense strand to SEQ ID NO: 525479
auaccuauaggacaucacc

SEQ ID NO: 525481 - RNA, 19 nt, Artificial Sequence
  Description of Artificial Sequence: Synthetic oligonucleotide
  Sense strand starting at position 3070 of SEQ ID NO: 317955
aagccaagagucuaaaugu

SEQ ID NO: 525482 - RNA, 19 nt, Artificial Sequence
  Description of Artificial Sequence: Synthetic oligonucleotide
  Antisense strand to SEQ ID NO: 525481
acauuuagacucuuggcuu

SEQ ID NO: 525483 - RNA, 19 nt, Artificial Sequence
  Description of Artificial Sequence: Synthetic oligonucleotide
  Sense strand starting at position 3368 of SEQ ID NO: 317955
aaggaaaguuugccgaaga

SEQ ID NO: 525484 - RNA, 19 nt, Artificial Sequence
  Description of Artificial Sequence: Synthetic oligonucleotide
  Antisense strand to SEQ ID NO: 525483
ucuucggcaaacuuuccuu

SEQ ID NO: 525485 - RNA, 19 nt, Artificial Sequence
  Description of Artificial Sequence: Synthetic oligonucleotide
  Sense strand starting at position 3524 of SEQ ID NO: 317955
guuccaugagcugaaaucu

SEQ ID NO: 525486 - RNA, 19 nt, Artificial Sequence
  Description of Artificial Sequence: Synthetic oligonucleotide
  Antisense strand to SEQ ID NO: 525485
agauuucagcucauggaac

SEQ ID NO: 525487 - RNA, 19 nt, Artificial Sequence
  Description of Artificial Sequence: Synthetic oligonucleotide
  Sense strand starting at position 3805 of SEQ ID NO: 317955
uuugaauccugguuggaca

SEQ ID NO: 525488 - RNA, 19 nt, Artificial Sequence
  Description of Artificial Sequence: Synthetic oligonucleotide
  Antisense strand to SEQ ID NO: 525487
uguccaaccaggauucaaa

SEQ ID NO: 525489 - RNA, 19 nt, Artificial Sequence
  Description of Artificial Sequence: Synthetic oligonucleotide
  Sense strand starting at position 3816 of SEQ ID NO: 317955
guuggacacucacuaguaa

SEQ ID NO: 525490 - RNA, 19 nt, Artificial Sequence
  Description of Artificial Sequence: Synthetic oligonucleotide
  Antisense strand to SEQ ID NO: 525489
uuacuagugaguguccaac

SEQ ID NO: 525491 - RNA, 19 nt, Artificial Sequence
  Description of Artificial Sequence: Synthetic oligonucleotide
  Sense strand starting at position 3900 of SEQ ID NO: 317955
ugaacagagucacuguaau

SEQ ID NO: 525492 - RNA, 19 nt, Artificial Sequence
  Description of Artificial Sequence: Synthetic oligonucleotide
  Antisense strand to SEQ ID NO: 525491
auuacagugacucuguuca

SEQ ID NO: 525493 - RNA, 19 nt, Artificial Sequence
  Description of Artificial Sequence: Synthetic oligonucleotide
  Sense strand starting at position 3930 of SEQ ID NO: 317955
agaacuuguaagcauucga

SEQ ID NO: 525494 - RNA, 19 nt, Artificial Sequence
  Description of Artificial Sequence: Synthetic oligonucleotide
  Antisense strand to SEQ ID NO: 525493
ucgaaugcuuacaaguucu

SEQ ID NO: 525495 - RNA, 19 nt, Artificial Sequence
  Description of Artificial Sequence: Synthetic oligonucleotide
  Sense strand starting at position 3937 of SEQ ID NO: 317955
guaagcauucgauagauau

SEQ ID NO: 525496 - RNA, 19 nt, Artificial Sequence
  Description of Artificial Sequence: Synthetic oligonucleotide
  Antisense strand to SEQ ID NO: 525495
auaucuaucgaaugcuuac

SEQ ID NO: 525497 - RNA, 19 nt, Artificial Sequence
  Description of Artificial Sequence: Synthetic oligonucleotide
  Sense strand starting at position 3947 of SEQ ID NO: 317955
gauagauauuagcuugacu

SEQ ID NO: 525498 - RNA, 19 nt, Artificial Sequence
  Description of Artificial Sequence: Synthetic oligonucleotide
  Antisense strand to SEQ ID NO: 525497
agucaagcuaauaucuauc

SEQ ID NO: 525499 - RNA, 19 nt, Artificial Sequence
  Description of Artificial Sequence: Synthetic oligonucleotide
  Sense strand starting at position 3950 of SEQ ID NO: 317955
agauauuagcuugacuauc

SEQ ID NO: 525500 - RNA, 19 nt, Artificial Sequence
  Description of Artificial Sequence: Synthetic oligonucleotide
  Antisense strand to SEQ ID NO: 525499
gauagucaagcuaauaucu

SEQ ID NO: 525501 - RNA, 19 nt, Artificial Sequence
  Description of Artificial Sequence: Synthetic oligonucleotide
  Sense strand starting at position 129 of SEQ ID NO: 317956
augagaacuucugucacua

SEQ ID NO: 525502 - RNA, 19 nt, Artificial Sequence
  Description of Artificial Sequence: Synthetic oligonucleotide
  Antisense strand to SEQ ID NO: 525501
uagugacagaaguucucau

SEQ ID NO: 525503 - RNA, 19 nt, Artificial Sequence
  Description of Artificial Sequence: Synthetic oligonucleotide
  Sense strand starting at position 179 of SEQ ID NO: 317956
cugcuaucagaugagcuuu

SEQ ID NO: 525504 - RNA, 19 nt, Artificial Sequence
  Description of Artificial Sequence: Synthetic oligonucleotide
  Antisense strand to SEQ ID NO: 525503
aaagcucaucugauagcag

SEQ ID NO: 525505 - RNA, 19 nt, Artificial Sequence
  Description of Artificial Sequence: Synthetic oligonucleotide
  Sense strand starting at position 185 of SEQ ID NO: 317956
ucagaugagcuuugaguca

SEQ ID NO: 525506 - RNA, 19 nt, Artificial Sequence
  Description of Artificial Sequence: Synthetic oligonucleotide
  Antisense strand to SEQ ID NO: 525505
ugacucaaagcucaucuga

SEQ ID NO: 525507 - RNA, 19 nt, Artificial Sequence
  Description of Artificial Sequence: Synthetic oligonucleotide
  Sense strand starting at position 271 of SEQ ID NO: 317956
cccuuuguccugggaugag

SEQ ID NO: 525508 - RNA, 19 nt, Artificial Sequence
  Description of Artificial Sequence: Synthetic oligonucleotide
  Antisense strand to SEQ ID NO: 525507
cucaucccaggacaaaggg

SEQ ID NO: 525509 - RNA, 19 nt, Artificial Sequence
  Description of Artificial Sequence: Synthetic oligonucleotide
  Sense strand starting at position 394 of SEQ ID NO: 317956
acauucguucuaugagauu

SEQ ID NO: 525510 - RNA, 19 nt, Artificial Sequence
  Description of Artificial Sequence: Synthetic oligonucleotide
  Antisense strand to SEQ ID NO: 525509
aaucucauagaacgaaugu

SEQ ID NO: 525511 - RNA, 19 nt, Artificial Sequence
  Description of Artificial Sequence: Synthetic oligonucleotide
  Sense strand starting at position 400 of SEQ ID NO: 317956
guucuaugagauugacccu

SEQ ID NO: 525512 - RNA, 19 nt, Artificial Sequence
  Description of Artificial Sequence: Synthetic oligonucleotide
  Antisense strand to SEQ ID NO: 525511
agggucaaucucauagaac

SEQ ID NO: 525513 - RNA, 19 nt, Artificial Sequence
  Description of Artificial Sequence: Synthetic oligonucleotide
  Sense strand starting at position 417 of SEQ ID NO: 317956
cugagauucuagcuagaac

SEQ ID NO: 525514 - RNA, 19 nt, Artificial Sequence
  Description of Artificial Sequence: Synthetic oligonucleotide
  Antisense strand to SEQ ID NO: 525513
guucuagcuagaaucucag

SEQ ID NO: 525515 - RNA, 19 nt, Artificial Sequence
  Description of Artificial Sequence: Synthetic oligonucleotide
  Sense strand starting at position 523 of SEQ ID NO: 317956
gcaggucuuccuggaaaca

SEQ ID NO: 525516 - RNA, 19 nt, Artificial Sequence
  Description of Artificial Sequence: Synthetic oligonucleotide
  Antisense strand to SEQ ID NO: 525515
uguuuccaggaagaccugc

SEQ ID NO: 525517 - RNA, 19 nt, Artificial Sequence
  Description of Artificial Sequence: Synthetic oligonucleotide
  Sense strand starting at position 639 of SEQ ID NO: 317956
ucaggcacaugaguuaaua

SEQ ID NO: 525518 - RNA, 19 nt, Artificial Sequence
  Description of Artificial Sequence: Synthetic oligonucleotide
  Antisense strand to SEQ ID NO: 525517
uauuaacucaugugccuga

SEQ ID NO: 525519 - RNA, 19 nt, Artificial Sequence
  Description of Artificial Sequence: Synthetic oligonucleotide
  Sense strand starting at position 698 of SEQ ID NO: 317956
ucaguccaugguuacuaaa

SEQ ID NO: 525520 - RNA, 19 nt, Artificial Sequence
  Description of Artificial Sequence: Synthetic oligonucleotide
  Antisense strand to SEQ ID NO: 525519
uuuaguaaccauggacuga

SEQ ID NO: 525521 - RNA, 19 nt, Artificial Sequence
  Description of Artificial Sequence: Synthetic oligonucleotide
  Sense strand starting at position 880 of SEQ ID NO: 317956
auagguacauguucuauga

SEQ ID NO: 525522 - RNA, 19 nt, Artificial Sequence
  Description of Artificial Sequence: Synthetic oligonucleotide
  Antisense strand to SEQ ID NO: 525521
ucauagaacauguaccuau

SEQ ID NO: 525523 - RNA, 19 nt, Artificial Sequence
  Description of Artificial Sequence: Synthetic oligonucleotide
  Sense strand starting at position 884 of SEQ ID NO: 317956
guacauguucuaugaggag

SEQ ID NO: 525524 - RNA, 19 nt, Artificial Sequence
  Description of Artificial Sequence: Synthetic oligonucleotide
  Antisense strand to SEQ ID NO: 525523
cuccucauagaacauguac

SEQ ID NO: 525525 - RNA, 19 nt, Artificial Sequence
  Description of Artificial Sequence: Synthetic oligonucleotide
  Sense strand starting at position 890 of SEQ ID NO: 317956
guucuaugaggaggcauua

SEQ ID NO: 525526 - RNA, 19 nt, Artificial Sequence
  Description of Artificial Sequence: Synthetic oligonucleotide
  Antisense strand to SEQ ID NO: 525525
uaaugccuccucauagaac

SEQ ID NO: 525527 - RNA, 19 nt, Artificial Sequence
  Description of Artificial Sequence: Synthetic oligonucleotide
  Sense strand starting at position 951 of SEQ ID NO: 317956
ucugaagucuguguacaga

SEQ ID NO: 525528 - RNA, 19 nt, Artificial Sequence
  Description of Artificial Sequence: Synthetic oligonucleotide
  Antisense strand to SEQ ID NO: 525527
ucuguacacagacuucaga

SEQ ID NO: 525529 - RNA, 19 nt, Artificial Sequence
  Description of Artificial Sequence: Synthetic oligonucleotide
  Sense strand starting at position 1025 of SEQ ID NO: 317956
acucuugaaucuguuaagu

SEQ ID NO: 525530 - RNA, 19 nt, Artificial Sequence
  Description of Artificial Sequence: Synthetic oligonucleotide
  Antisense strand to SEQ ID NO: 525529
acuuaacagauucaagagu

SEQ ID NO: 525531 - RNA, 19 nt, Artificial Sequence
  Description of Artificial Sequence: Synthetic oligonucleotide
  Sense strand starting at position 1048 of SEQ ID NO: 317956
uuugcagggcucuaagaaa

SEQ ID NO: 525532 - RNA, 19 nt, Artificial Sequence
  Description of Artificial Sequence: Synthetic oligonucleotide
  Antisense strand to SEQ ID NO: 525531
uuucuuagagcccugcaaa

SEQ ID NO: 525533 - RNA, 19 nt, Artificial Sequence
  Description of Artificial Sequence: Synthetic oligonucleotide
  Sense strand starting at position 1227 of SEQ ID NO: 317956
ggauuugucuaaugauuuc

SEQ ID NO: 525534 - RNA, 19 nt, Artificial Sequence
  Description of Artificial Sequence: Synthetic oligonucleotide
  Antisense strand to SEQ ID NO: 525533
gaaaucauuagacaaaucc

SEQ ID NO: 525535 - RNA, 19 nt, Artificial Sequence
  Description of Artificial Sequence: Synthetic oligonucleotide
  Sense strand starting at position 1332 of SEQ ID NO: 317956
caguucuuucugggaguga

SEQ ID NO: 525536 - RNA, 19 nt, Artificial Sequence
  Description of Artificial Sequence: Synthetic oligonucleotide
  Antisense strand to SEQ ID NO: 525535
ucacucccagaaagaacug

SEQ ID NO: 525537 - RNA, 19 nt, Artificial Sequence
  Description of Artificial Sequence: Synthetic oligonucleotide
  Sense strand starting at position 1348 of SEQ ID NO: 317956
ugaauuggccuuugaauga

SEQ ID NO: 525538 - RNA, 19 nt, Artificial Sequence
  Description of Artificial Sequence: Synthetic oligonucleotide
  Antisense strand to SEQ ID NO: 525537
ucauucaaaggccaauuca

SEQ ID NO: 525539 - RNA, 19 nt, Artificial Sequence
  Description of Artificial Sequence: Synthetic oligonucleotide
  Sense strand starting at position 1352 of SEQ ID NO: 317956
uuggccuuugaaugagaga

SEQ ID NO: 525540 - RNA, 19 nt, Artificial Sequence
  Description of Artificial Sequence: Synthetic oligonucleotide
  Antisense strand to SEQ ID NO: 525539
ucucucauucaaaggccaa

SEQ ID NO: 525541 - RNA, 19 nt, Artificial Sequence
  Description of Artificial Sequence: Synthetic oligonucleotide
  Sense strand starting at position 1502 of SEQ ID NO: 317956
gcagaaagucuguagcaau

SEQ ID NO: 525542 - RNA, 19 nt, Artificial Sequence
  Description of Artificial Sequence: Synthetic oligonucleotide
  Antisense strand to SEQ ID NO: 525541
auugcuacagacuuucugc

SEQ ID NO: 525543 - RNA, 19 nt, Artificial Sequence
  Description of Artificial Sequence: Synthetic oligonucleotide
  Sense strand starting at position 1680 of SEQ ID NO: 317956
aagggaguguccucccaga

SEQ ID NO: 525544 - RNA, 19 nt, Artificial Sequence
  Description of Artificial Sequence: Synthetic oligonucleotide
  Antisense strand to SEQ ID NO: 525543
ucugggaggacacucccuu

SEQ ID NO: 525545 - RNA, 19 nt, Artificial Sequence
  Description of Artificial Sequence: Synthetic oligonucleotide
  Sense strand starting at position 1939 of SEQ ID NO: 317956
cugguaugcccacagaaag

SEQ ID NO: 525546 - RNA, 19 nt, Artificial Sequence
  Description of Artificial Sequence: Synthetic oligonucleotide
  Antisense strand to SEQ ID NO: 525545
cuuucugugggcauaccag

SEQ ID NO: 525547 - RNA, 19 nt, Artificial Sequence
  Description of Artificial Sequence: Synthetic oligonucleotide
  Sense strand starting at position 2292 of SEQ ID NO: 317956
gaguauuucugagucuggu

SEQ ID NO: 525548 - RNA, 19 nt, Artificial Sequence
  Description of Artificial Sequence: Synthetic oligonucleotide
  Antisense strand to SEQ ID NO: 525547
accagacucagaaauacuc

SEQ ID NO: 525549 - RNA, 19 nt, Artificial Sequence
  Description of Artificial Sequence: Synthetic oligonucleotide
  Sense strand starting at position 2317 of SEQ ID NO: 317956
gucacacagucaucauaca

SEQ ID NO: 525550 - RNA, 19 nt, Artificial Sequence
  Description of Artificial Sequence: Synthetic oligonucleotide
  Antisense strand to SEQ ID NO: 525549
uguaugaugacugugugac

SEQ ID NO: 525551 - RNA, 19 nt, Artificial Sequence
  Description of Artificial Sequence: Synthetic oligonucleotide
  Sense strand starting at position 2619 of SEQ ID NO: 317956
guuauuuacugggcucuuu

SEQ ID NO: 525552 - RNA, 19 nt, Artificial Sequence
  Description of Artificial Sequence: Synthetic oligonucleotide
  Antisense strand to SEQ ID NO: 525551
aaagagcccaguaaauaac

SEQ ID NO: 525553 - RNA, 19 nt, Artificial Sequence
  Description of Artificial Sequence: Synthetic oligonucleotide
  Sense strand starting at position 2661 of SEQ ID NO: 317956
ggaguacuucugcauucuu

SEQ ID NO: 525554 - RNA, 19 nt, Artificial Sequence
  Description of Artificial Sequence: Synthetic oligonucleotide
  Antisense strand to SEQ ID NO: 525553
aagaaugcagaaguacucc

SEQ ID NO: 525555 - RNA, 19 nt, Artificial Sequence
  Description of Artificial Sequence: Synthetic oligonucleotide
  Sense strand starting at position 2702 of SEQ ID NO: 317956
cugccaggaggguaagauu

SEQ ID NO: 525556 - RNA, 19 nt, Artificial Sequence
  Description of Artificial Sequence: Synthetic oligonucleotide
  Antisense strand to SEQ ID NO: 525555
aaucuuacccuccuggcag

SEQ ID NO: 525557 - RNA, 19 nt, Artificial Sequence
  Description of Artificial Sequence: Synthetic oligonucleotide
  Sense strand starting at position 2710 of SEQ ID NO: 317956
aggguaagauugcuccuau

SEQ ID NO: 525558 - RNA, 19 nt, Artificial Sequence
  Description of Artificial Sequence: Synthetic oligonucleotide
  Antisense strand to SEQ ID NO: 525557
auaggagcaaucuuacccu

SEQ ID NO: 525559 - RNA, 19 nt, Artificial Sequence
  Description of Artificial Sequence: Synthetic oligonucleotide
  Sense strand starting at position 2711 of SEQ ID NO: 317956
ggguaagauugcuccuauu

SEQ ID NO: 525560 - RNA, 19 nt, Artificial Sequence
  Description of Artificial Sequence: Synthetic oligonucleotide
  Antisense strand to SEQ ID NO: 525559
aauaggagcaaucuuaccc

SEQ ID NO: 525561 - RNA, 19 nt, Artificial Sequence
  Description of Artificial Sequence: Synthetic oligonucleotide
  Sense strand starting at position 2728 of SEQ ID NO: 317956
uuugauauccagggaagcu

SEQ ID NO: 525562 - RNA, 19 nt, Artificial Sequence
  Description of Artificial Sequence: Synthetic oligonucleotide
  Antisense strand to SEQ ID NO: 525561
agcuucccuggauaucaaa

SEQ ID NO: 525563 - RNA, 19 nt, Artificial Sequence
  Description of Artificial Sequence: Synthetic oligonucleotide
  Sense strand starting at position 2753 of SEQ ID NO: 317956
uggaaaggcuccucaccua

SEQ ID NO: 525564 - RNA, 19 nt, Artificial Sequence
  Description of Artificial Sequence: Synthetic oligonucleotide
  Antisense strand to SEQ ID NO: 525563
uaggugaggagccuuucca

SEQ ID NO: 525565 - RNA, 19 nt, Artificial Sequence
  Description of Artificial Sequence: Synthetic oligonucleotide
  Sense strand starting at position 2769 of SEQ ID NO: 317956
cuaagcuuuggagagggua

SEQ ID NO: 525566 - RNA, 19 nt, Artificial Sequence
  Description of Artificial Sequence: Synthetic oligonucleotide
  Antisense strand to SEQ ID NO: 525565
uacccucuccaaagcuuag

SEQ ID NO: 525567 - RNA, 19 nt, Artificial Sequence
  Description of Artificial Sequence: Synthetic oligonucleotide
  Sense strand starting at position 2838 of SEQ ID NO: 317956
ccgucuccugaagauguga

SEQ ID NO: 525568 - RNA, 19 nt, Artificial Sequence
  Description of Artificial Sequence: Synthetic oligonucleotide
  Antisense strand to SEQ ID NO: 525567
ucacaucuucaggagacgg

SEQ ID NO: 525569 - RNA, 19 nt, Artificial Sequence
  Description of Artificial Sequence: Synthetic oligonucleotide
  Sense strand starting at position 2840 of SEQ ID NO: 317956
gucuccugaagaugugaau

SEQ ID NO: 525570 - RNA, 19 nt, Artificial Sequence
  Description of Artificial Sequence: Synthetic oligonucleotide
  Antisense strand to SEQ ID NO: 525569
auucacaucuucaggagac

SEQ ID NO: 525571 - RNA, 19 nt, Artificial Sequence
  Description of Artificial Sequence: Synthetic oligonucleotide
  Sense strand starting at position 2847 of SEQ ID NO: 317956
gaagaugugaaucguugac

SEQ ID NO: 525572 - RNA, 19 nt, Artificial Sequence
  Description of Artificial Sequence: Synthetic oligonucleotide
  Antisense strand to SEQ ID NO: 525571
gucaacgauucacaucuuc

SEQ ID NO: 525573 - RNA, 19 nt, Artificial Sequence
  Description of Artificial Sequence: Synthetic oligonucleotide
  Sense strand starting at position 2849 of SEQ ID NO: 317956
agaugugaaucguugacau

SEQ ID NO: 525574 - RNA, 19 nt, Artificial Sequence
  Description of Artificial Sequence: Synthetic oligonucleotide
  Antisense strand to SEQ ID NO: 525573
augucaacgauucacaucu

SEQ ID NO: 525575 - RNA, 19 nt, Artificial Sequence
  Description of Artificial Sequence: Synthetic oligonucleotide
  Sense strand starting at position 3261 of SEQ ID NO: 317956
cugcaaggcuuuccaaaga

SEQ ID NO: 525576 - RNA, 19 nt, Artificial Sequence
  Description of Artificial Sequence: Synthetic oligonucleotide
  Antisense strand to SEQ ID NO: 525575
ucuuuggaaagccuugcag

SEQ ID NO: 525577 - RNA, 19 nt, Artificial Sequence
  Description of Artificial Sequence: Synthetic oligonucleotide
  Sense strand starting at position 3303 of SEQ ID NO: 317956
uuuagacaaucaguuaguu

SEQ ID NO: 525578 - RNA, 19 nt, Artificial Sequence
  Description of Artificial Sequence: Synthetic oligonucleotide
  Antisense strand to SEQ ID NO: 525577
aacuaacugauugucuaaa

SEQ ID NO: 525579 - RNA, 19 nt, Artificial Sequence
  Description of Artificial Sequence: Synthetic oligonucleotide
  Sense strand starting at position 3312 of SEQ ID NO: 317956
ucaguuaguucuccauuuc

SEQ ID NO: 525580 - RNA, 19 nt, Artificial Sequence
  Description of Artificial Sequence: Synthetic oligonucleotide
  Antisense strand to SEQ ID NO: 525579
gaaauggagaacuaacuga

SEQ ID NO: 525581 - RNA, 19 nt, Artificial Sequence
  Description of Artificial Sequence: Synthetic oligonucleotide
  Sense strand starting at position 370 of SEQ ID NO: 317957
acuucuuucuugcuugaga

SEQ ID NO: 525582 - RNA, 19 nt, Artificial Sequence
  Description of Artificial Sequence: Synthetic oligonucleotide
  Antisense strand to SEQ ID NO: 525581
ucucaagcaagaaagaagu

SEQ ID NO: 525583 - RNA, 19 nt, Artificial Sequence
  Description of Artificial Sequence: Synthetic oligonucleotide
  Sense strand starting at position 411 of SEQ ID NO: 317957
cuggaucucuuuccuguaa

SEQ ID NO: 525584 - RNA, 19 nt, Artificial Sequence
  Description of Artificial Sequence: Synthetic oligonucleotide
  Antisense strand to SEQ ID NO: 525583
uuacaggaaagagauccag

SEQ ID NO: 525585 - RNA, 19 nt, Artificial Sequence
  Description of Artificial Sequence: Synthetic oligonucleotide
  Sense strand starting at position 470 of SEQ ID NO: 317957
gaaugcaugucaccuaagu

SEQ ID NO: 525586 - RNA, 19 nt, Artificial Sequence
  Description of Artificial Sequence: Synthetic oligonucleotide
  Antisense strand to SEQ ID NO: 525585
acuuaggugacaugcauuc

SEQ ID NO: 525587 - RNA, 19 nt, Artificial Sequence
  Description of Artificial Sequence: Synthetic oligonucleotide
  Sense strand starting at position 528 of SEQ ID NO: 317957
guagauacggcauauggau

SEQ ID NO: 525588 - RNA, 19 nt, Artificial Sequence
  Description of Artificial Sequence: Synthetic oligonucleotide
  Antisense strand to SEQ ID NO: 525587
auccauaugccguaucuac

SEQ ID NO: 525589 - RNA, 19 nt, Artificial Sequence
  Description of Artificial Sequence: Synthetic oligonucleotide
  Sense strand starting at position 567 of SEQ ID NO: 317957
gaauguuaucaucauggcu

SEQ ID NO: 525590 - RNA, 19 nt, Artificial Sequence
  Description of Artificial Sequence: Synthetic oligonucleotide
  Antisense strand to SEQ ID NO: 525589
agccaugaugauaacauuc

SEQ ID NO: 525591 - RNA, 19 nt, Artificial Sequence
  Description of Artificial Sequence: Synthetic oligonucleotide
  Sense strand starting at position 589 of SEQ ID NO: 317957
gcuacucaccuguaaaguc

SEQ ID NO: 525592 - RNA, 19 nt, Artificial Sequence
  Description of Artificial Sequence: Synthetic oligonucleotide
  Antisense strand to SEQ ID NO: 525591
gacuuuacaggugaguagc

SEQ ID NO: 525593 - RNA, 19 nt, Artificial Sequence
  Description of Artificial Sequence: Synthetic oligonucleotide
  Sense strand starting at position 621 of SEQ ID NO: 317957
agauauggcuuccuugauc

SEQ ID NO: 525594 - RNA, 19 nt, Artificial Sequence
  Description of Artificial Sequence: Synthetic oligonucleotide
  Antisense strand to SEQ ID NO: 525593
gaucaaggaagccauaucu

SEQ ID NO: 525595 - RNA, 19 nt, Artificial Sequence
  Description of Artificial Sequence: Synthetic oligonucleotide
  Sense strand starting at position 632 of SEQ ID NO: 317957
ccuugauccuuugcagaac

SEQ ID NO: 525596 - RNA, 19 nt, Artificial Sequence
  Description of Artificial Sequence: Synthetic oligonucleotide
  Antisense strand to SEQ ID NO: 525595
guucugcaaaggaucaagg

SEQ ID NO: 525597 - RNA, 19 nt, Artificial Sequence
  Description of Artificial Sequence: Synthetic oligonucleotide
  Sense strand starting at position 728 of SEQ ID NO: 317957
auacuaaguuugcuuugga

SEQ ID NO: 525598 - RNA, 19 nt, Artificial Sequence
  Description of Artificial Sequence: Synthetic oligonucleotide
  Antisense strand to SEQ ID NO: 525597
uccaaagcaaacuuaguau

SEQ ID NO: 525599 - RNA, 19 nt, Artificial Sequence
  Description of Artificial Sequence: Synthetic oligonucleotide
  Sense strand starting at position 729 of SEQ ID NO: 317957
uacuaaguuugcuuuggau

SEQ ID NO: 525600 - RNA, 19 nt, Artificial Sequence
  Description of Artificial Sequence: Synthetic oligonucleotide
  Antisense strand to SEQ ID NO: 525599
auccaaagcaaacuuagua

SEQ ID NO: 525601 - RNA, 19 nt, Artificial Sequence
  Description of Artificial Sequence: Synthetic oligonucleotide
  Sense strand starting at position 803 of SEQ ID NO: 317957
aagaaagucucucugaguc

SEQ ID NO: 525602 - RNA, 19 nt, Artificial Sequence
  Description of Artificial Sequence: Synthetic oligonucleotide
  Antisense strand to SEQ ID NO: 525601
gacucagagagacuuucuu

SEQ ID NO: 525603 - RNA, 19 nt, Artificial Sequence
  Description of Artificial Sequence: Synthetic oligonucleotide
  Sense strand starting at position 1174 of SEQ ID NO: 317957
aucgcaucccuguagagaa

SEQ ID NO: 525604 - RNA, 19 nt, Artificial Sequence
  Description of Artificial Sequence: Synthetic oligonucleotide
  Antisense strand to SEQ ID NO: 525603
uucucuacagggaugcgau

SEQ ID NO: 525605 - RNA, 19 nt, Artificial Sequence
  Description of Artificial Sequence: Synthetic oligonucleotide
  Sense strand starting at position 1262 of SEQ ID NO: 317957
gauguaacauagcuagaga

SEQ ID NO: 525606 - RNA, 19 nt, Artificial Sequence
  Description of Artificial Sequence: Synthetic oligonucleotide
  Antisense strand to SEQ ID NO: 525605
ucucuagcuauguuacauc

SEQ ID NO: 525607 - RNA, 19 nt, Artificial Sequence
  Description of Artificial Sequence: Synthetic oligonucleotide
  Sense strand starting at position 1278 of SEQ ID NO: 317957
agaauaauggaguguuuga

SEQ ID NO: 525608 - RNA, 19 nt, Artificial Sequence
  Description of Artificial Sequence: Synthetic oligonucleotide
  Antisense strand to SEQ ID NO: 525607
ucaaacacuccauuauucu

SEQ ID NO: 525609 - RNA, 19 nt, Artificial Sequence
  Description of Artificial Sequence: Synthetic oligonucleotide
  Sense strand starting at position 1345 of SEQ ID NO: 317957
aagugcguacuugauuaaa

SEQ ID NO: 525610 - RNA, 19 nt, Artificial Sequence
  Description of Artificial Sequence: Synthetic oligonucleotide
  Antisense strand to SEQ ID NO: 525609
uuuaaucaaguacgcacuu

SEQ ID NO: 525611 - RNA, 19 nt, Artificial Sequence
  Description of Artificial Sequence: Synthetic oligonucleotide
  Sense strand starting at position 1355 of SEQ ID NO: 317957
uugauuaaaugccugaaau

SEQ ID NO: 525612 - RNA, 19 nt, Artificial Sequence
  Description of Artificial Sequence: Synthetic oligonucleotide
  Antisense strand to SEQ ID NO: 525611
auuucaggcauuuaaucaa

SEQ ID NO: 525613 - RNA, 19 nt, Artificial Sequence
  Description of Artificial Sequence: Synthetic oligonucleotide
  Sense strand starting at position 1356 of SEQ ID NO: 317957
ugauuaaaugccugaaauu

SEQ ID NO: 525614 - RNA, 19 nt, Artificial Sequence
  Description of Artificial Sequence: Synthetic oligonucleotide
  Antisense strand to SEQ ID NO: 525613
aauuucaggcauuuaauca

SEQ ID NO: 525615 - RNA, 19 nt, Artificial Sequence
  Description of Artificial Sequence: Synthetic oligonucleotide
  Sense strand starting at position 1432 of SEQ ID NO: 317957
auaccuuuggcauguaauu

SEQ ID NO: 525616 - RNA, 19 nt, Artificial Sequence
  Description of Artificial Sequence: Synthetic oligonucleotide
  Antisense strand to SEQ ID NO: 525615
aauuacaugccaaagguau

SEQ ID NO: 525617 - RNA, 19 nt, Artificial Sequence
  Description of Artificial Sequence: Synthetic oligonucleotide
  Sense strand starting at position 1477 of SEQ ID NO: 317957
gccagagacucuguccauu

SEQ ID NO: 525618 - RNA, 19 nt, Artificial Sequence
  Description of Artificial Sequence: Synthetic oligonucleotide
  Antisense strand to SEQ ID NO: 525617
aauggacagagucucuggc

SEQ ID NO: 525619 - RNA, 19 nt, Artificial Sequence
  Description of Artificial Sequence: Synthetic oligonucleotide
  Sense strand starting at position 1532 of SEQ ID NO: 317957
cugaaacgaggaugugaua

SEQ ID NO: 525620 - RNA, 19 nt, Artificial Sequence
  Description of Artificial Sequence: Synthetic oligonucleotide
  Antisense strand to SEQ ID NO: 525619
uaucacauccucguuucag

SEQ ID NO: 525621 - RNA, 19 nt, Artificial Sequence
  Description of Artificial Sequence: Synthetic oligonucleotide
  Sense strand starting at position 1576 of SEQ ID NO: 317957
aaguaauccgagugaccau

SEQ ID NO: 525622 - RNA, 19 nt, Artificial Sequence
  Description of Artificial Sequence: Synthetic oligonucleotide
  Antisense strand to SEQ ID NO: 525621
auggucacucggauuacuu

SEQ ID NO: 525623 - RNA, 19 nt, Artificial Sequence
  Description of Artificial Sequence: Synthetic oligonucleotide
  Sense strand starting at position 2095 of SEQ ID NO: 317957
guuccagugcuaucugcuu

SEQ ID NO: 525624 - RNA, 19 nt, Artificial Sequence
  Description of Artificial Sequence: Synthetic oligonucleotide
  Antisense strand to SEQ ID NO: 525623
aagcagauagcacuggaac

SEQ ID NO: 525625 - RNA, 19 nt, Artificial Sequence
  Description of Artificial Sequence: Synthetic oligonucleotide
  Sense strand starting at position 2102 of SEQ ID NO: 317957
ugcuaucugcuugaaacau

SEQ ID NO: 525626 - RNA, 19 nt, Artificial Sequence
  Description of Artificial Sequence: Synthetic oligonucleotide
  Antisense strand to SEQ ID NO: 525625
auguuucaagcagauagca

SEQ ID NO: 525627 - RNA, 19 nt, Artificial Sequence
  Description of Artificial Sequence: Synthetic oligonucleotide
  Sense strand starting at position 2220 of SEQ ID NO: 317957
cucuguuucccagaucaga

SEQ ID NO: 525628 - RNA, 19 nt, Artificial Sequence
  Description of Artificial Sequence: Synthetic oligonucleotide
  Antisense strand to SEQ ID NO: 525627
ucugaucugggaaacagag

SEQ ID NO: 525629 - RNA, 19 nt, Artificial Sequence
  Description of Artificial Sequence: Synthetic oligonucleotide
  Sense strand starting at position 2233 of SEQ ID NO: 317957
aucagaugcccugauucuu

SEQ ID NO: 525630 - RNA, 19 nt, Artificial Sequence
  Description of Artificial Sequence: Synthetic oligonucleotide
  Antisense strand to SEQ ID NO: 525629
aagaaucagggcaucugau

SEQ ID NO: 525631 - RNA, 19 nt, Artificial Sequence
  Description of Artificial Sequence: Synthetic oligonucleotide
  Sense strand starting at position 2522 of SEQ ID NO: 317957
ccaagaaugucagccucua

SEQ ID NO: 525632 - RNA, 19 nt, Artificial Sequence
  Description of Artificial Sequence: Synthetic oligonucleotide
  Antisense strand to SEQ ID NO: 525631
uagaggcugacauucuugg

SEQ ID NO: 525633 - RNA, 19 nt, Artificial Sequence
  Description of Artificial Sequence: Synthetic oligonucleotide
  Sense strand starting at position 2765 of SEQ ID NO: 317957
ggcaaaugugugagccgaa

SEQ ID NO: 525634 - RNA, 19 nt, Artificial Sequence
  Description of Artificial Sequence: Synthetic oligonucleotide
  Antisense strand to SEQ ID NO: 525633
uucggcucacacauuugcc

SEQ ID NO: 525635 - RNA, 19 nt, Artificial Sequence
  Description of Artificial Sequence: Synthetic oligonucleotide
  Sense strand starting at position 2828 of SEQ ID NO: 317957
cugaguugccagggaaaca

SEQ ID NO: 525636 - RNA, 19 nt, Artificial Sequence
  Description of Artificial Sequence: Synthetic oligonucleotide
  Antisense strand to SEQ ID NO: 525635
uguuucccuggcaacucag

SEQ ID NO: 525637 - RNA, 19 nt, Artificial Sequence
  Description of Artificial Sequence: Synthetic oligonucleotide
  Sense strand starting at position 3194 of SEQ ID NO: 317957
uggacauccucuuuagacu

SEQ ID NO: 525638 - RNA, 19 nt, Artificial Sequence
  Description of Artificial Sequence: Synthetic oligonucleotide
  Antisense strand to SEQ ID NO: 525637
agucuaaagaggaugucca

SEQ ID NO: 525639 - RNA, 19 nt, Artificial Sequence
  Description of Artificial Sequence: Synthetic oligonucleotide
  Sense strand starting at position 3238 of SEQ ID NO: 317957
gagggagcugucuggacaa

SEQ ID NO: 525640 - RNA, 19 nt, Artificial Sequence
  Description of Artificial Sequence: Synthetic oligonucleotide
  Antisense strand to SEQ ID NO: 525639
uuguccagacagcucccuc

SEQ ID NO: 525641 - RNA, 19 nt, Artificial Sequence
  Description of Artificial Sequence: Synthetic oligonucleotide
  Sense strand starting at position 3240 of SEQ ID NO: 317957
gggagcugucuggacaaau

SEQ ID NO: 525642 - RNA, 19 nt, Artificial Sequence
  Description of Artificial Sequence: Synthetic oligonucleotide
  Antisense strand to SEQ ID NO: 525641
auuuguccagacagcuccc

SEQ ID NO: 525643 - RNA, 19 nt, Artificial Sequence
  Description of Artificial Sequence: Synthetic oligonucleotide
  Sense strand starting at position 3304 of SEQ ID NO: 317957
uggaucaagagcugucuuu

SEQ ID NO: 525644 - RNA, 19 nt, Artificial Sequence
  Description of Artificial Sequence: Synthetic oligonucleotide
  Antisense strand to SEQ ID NO: 525643
aaagacagcucuugaucca

SEQ ID NO: 525645 - RNA, 19 nt, Artificial Sequence
  Description of Artificial Sequence: Synthetic oligonucleotide
  Sense strand starting at position 3310 of SEQ ID NO: 317957
aagagcugucuuugaagaa

SEQ ID NO: 525646 - RNA, 19 nt, Artificial Sequence
  Description of Artificial Sequence: Synthetic oligonucleotide
  Antisense strand to SEQ ID NO: 525645
uucuucaaagacagcucuu

SEQ ID NO: 525647 - RNA, 19 nt, Artificial Sequence
  Description of Artificial Sequence: Synthetic oligonucleotide
  Sense strand starting at position 3314 of SEQ ID NO: 317957
gcugucuuugaagaaacca

SEQ ID NO: 525648 - RNA, 19 nt, Artificial Sequence
  Description of Artificial Sequence: Synthetic oligonucleotide
  Antisense strand to SEQ ID NO: 525647
ugguuucuucaaagacagc

SEQ ID NO: 525649 - RNA, 19 nt, Artificial Sequence
  Description of Artificial Sequence: Synthetic oligonucleotide
  Sense strand starting at position 3513 of SEQ ID NO: 317957
cuagaaauaugcucuccag

SEQ ID NO: 525650 - RNA, 19 nt, Artificial Sequence
  Description of Artificial Sequence: Synthetic oligonucleotide
  Antisense strand to SEQ ID NO: 525649
cuggagagcauauuucuag

SEQ ID NO: 525651 - RNA, 19 nt, Artificial Sequence
  Description of Artificial Sequence: Synthetic oligonucleotide
  Sense strand starting at position 3634 of SEQ ID NO: 317957
gugccuucugaagggauga

SEQ ID NO: 525652 - RNA, 19 nt, Artificial Sequence
  Description of Artificial Sequence: Synthetic oligonucleotide
  Antisense strand to SEQ ID NO: 525651
ucaucccuucagaaggcac

SEQ ID NO: 525653 - RNA, 19 nt, Artificial Sequence
  Description of Artificial Sequence: Synthetic oligonucleotide
  Sense strand starting at position 3686 of SEQ ID NO: 317957
gagcuagaggcucaaucau

SEQ ID NO: 525654 - RNA, 19 nt, Artificial Sequence
  Description of Artificial Sequence: Synthetic oligonucleotide
  Antisense strand to SEQ ID NO: 525653
augauugagccucuagcuc

SEQ ID NO: 525655 - RNA, 19 nt, Artificial Sequence
  Description of Artificial Sequence: Synthetic oligonucleotide
  Sense strand starting at position 3767 of SEQ ID NO: 317957
uugauuucuugagacccua

SEQ ID NO: 525656 - RNA, 19 nt, Artificial Sequence
  Description of Artificial Sequence: Synthetic oligonucleotide
  Antisense strand to SEQ ID NO: 525655
uagggucucaagaaaucaa

SEQ ID NO: 525657 - RNA, 19 nt, Artificial Sequence
  Description of Artificial Sequence: Synthetic oligonucleotide
  Sense strand starting at position 3946 of SEQ ID NO: 317957
aucauuaugcuagauguag

SEQ ID NO: 525658 - RNA, 19 nt, Artificial Sequence
  Description of Artificial Sequence: Synthetic oligonucleotide
  Antisense strand to SEQ ID NO: 525657
cuacaucuagcauaaugau

SEQ ID NO: 525659 - RNA, 19 nt, Artificial Sequence
  Description of Artificial Sequence: Synthetic oligonucleotide
  Sense strand starting at position 3957 of SEQ ID NO: 317957
agauguaguaugcauguua

SEQ ID NO: 525660 - RNA, 19 nt, Artificial Sequence
  Description of Artificial Sequence: Synthetic oligonucleotide
  Antisense strand to SEQ ID NO: 525659
uaacaugcauacuacaucu

SEQ ID NO: 525661 - RNA, 19 nt, Artificial Sequence
  Description of Artificial Sequence: Synthetic oligonucleotide
  Sense strand starting at position 56 of SEQ ID NO: 317958
ggguaauguccugaucaag

SEQ ID NO: 525662 - RNA, 19 nt, Artificial Sequence
  Description of Artificial Sequence: Synthetic oligonucleotide
  Antisense strand to SEQ ID NO: 525661
cuugaucaggacauuaccc

SEQ ID NO: 525663 - RNA, 19 nt, Artificial Sequence
  Description of Artificial Sequence: Synthetic oligonucleotide
  Sense strand starting at position 260 of SEQ ID NO: 317958
cuugaugaucuggguaaag

SEQ ID NO: 525664 - RNA, 19 nt, Artificial Sequence
  Description of Artificial Sequence: Synthetic oligonucleotide
  Antisense strand to SEQ ID NO: 525663
cuuuacccagaucaucaag

SEQ ID NO: 525665 - RNA, 19 nt, Artificial Sequence
  Description of Artificial Sequence: Synthetic oligonucleotide
  Sense strand starting at position 297 of SEQ ID NO: 317958
acgguaugccaagagugaa

SEQ ID NO: 525666 - RNA, 19 nt, Artificial Sequence
  Description of Artificial Sequence: Synthetic oligonucleotide
  Antisense strand to SEQ ID NO: 525665
uucacucuuggcauaccgu

SEQ ID NO: 525667 - RNA, 19 nt, Artificial Sequence
  Description of Artificial Sequence: Synthetic oligonucleotide
  Sense strand starting at position 463 of SEQ ID NO: 317958
gaaauauguuuggcuggga

SEQ ID NO: 525668 - RNA, 19 nt, Artificial Sequence
  Description of Artificial Sequence: Synthetic oligonucleotide
  Antisense strand to SEQ ID NO: 525667
ucccagccaaacauauuuc

SEQ ID NO: 525669 - RNA, 19 nt, Artificial Sequence
  Description of Artificial Sequence: Synthetic oligonucleotide
  Sense strand starting at position 581 of SEQ ID NO: 317958
uuguguacacaacaucaau

SEQ ID NO: 525670 - RNA, 19 nt, Artificial Sequence
  Description of Artificial Sequence: Synthetic oligonucleotide
  Antisense strand to SEQ ID NO: 525669
auugauguuguguacacaa

SEQ ID NO: 525671 - RNA, 19 nt, Artificial Sequence
  Description of Artificial Sequence: Synthetic oligonucleotide
  Sense strand starting at position 612 of SEQ ID NO: 317958
uagccuagaguauggaaua

SEQ ID NO: 525672 - RNA, 19 nt, Artificial Sequence
  Description of Artificial Sequence: Synthetic oligonucleotide
  Antisense strand to SEQ ID NO: 525671
uauuccauacucuaggcua

SEQ ID NO: 525673 - RNA, 19 nt, Artificial Sequence
  Description of Artificial Sequence: Synthetic oligonucleotide
  Sense strand starting at position 658 of SEQ ID NO: 317958
cugauuagguuagucauua

SEQ ID NO: 525674 - RNA, 19 nt, Artificial Sequence
  Description of Artificial Sequence: Synthetic oligonucleotide
  Antisense strand to SEQ ID NO: 525673
uaaugacuaaccuaaucag

SEQ ID NO: 525675 - RNA, 19 nt, Artificial Sequence
  Description of Artificial Sequence: Synthetic oligonucleotide
  Sense strand starting at position 700 of SEQ ID NO: 317958
gcuuaccagcuagaaauau

SEQ ID NO: 525676 - RNA, 19 nt, Artificial Sequence
  Description of Artificial Sequence: Synthetic oligonucleotide
  Antisense strand to SEQ ID NO: 525675
auauuucuagcugguaagc

SEQ ID NO: 525677 - RNA, 19 nt, Artificial Sequence
  Description of Artificial Sequence: Synthetic oligonucleotide
  Sense strand starting at position 873 of SEQ ID NO: 317958
gugauauaauucucccuug

SEQ ID NO: 525678 - RNA, 19 nt, Artificial Sequence
  Description of Artificial Sequence: Synthetic oligonucleotide
  Antisense strand to SEQ ID NO: 525677
caagggagaauuauaucac

SEQ ID NO: 525679 - RNA, 19 nt, Artificial Sequence
  Description of Artificial Sequence: Synthetic oligonucleotide
  Sense strand starting at position 876 of SEQ ID NO: 317958
auauaauucucccuugagg

SEQ ID NO: 525680 - RNA, 19 nt, Artificial Sequence
  Description of Artificial Sequence: Synthetic oligonucleotide
  Antisense strand to SEQ ID NO: 525679
ccucaagggagaauuauau

SEQ ID NO: 525681 - RNA, 19 nt, Artificial Sequence
  Description of Artificial Sequence: Synthetic oligonucleotide
  Sense strand starting at position 878 of SEQ ID NO: 317958
auaauucucccuugaggaa

SEQ ID NO: 525682 - RNA, 19 nt, Artificial Sequence
  Description of Artificial Sequence: Synthetic oligonucleotide
  Antisense strand to SEQ ID NO: 525681
uuccucaagggagaauuau

SEQ ID NO: 525683 - RNA, 19 nt, Artificial Sequence
  Description of Artificial Sequence: Synthetic oligonucleotide
  Sense strand starting at position 898 of SEQ ID NO: 317958
gggcuaaaucaaggucaua

SEQ ID NO: 525684 - RNA, 19 nt, Artificial Sequence
  Description of Artificial Sequence: Synthetic oligonucleotide
  Antisense strand to SEQ ID NO: 525683
uaugaccuugauuuagccc

SEQ ID NO: 525685 - RNA, 19 nt, Artificial Sequence
  Description of Artificial Sequence: Synthetic oligonucleotide
  Sense strand starting at position 1046 of SEQ ID NO: 317958
gggugcuaacaguaaagau

SEQ ID NO: 525686 - RNA, 19 nt, Artificial Sequence
  Description of Artificial Sequence: Synthetic oligonucleotide
  Antisense strand to SEQ ID NO: 525685
aucuuuacuguuagcaccc

SEQ ID NO: 525687 - RNA, 19 nt, Artificial Sequence
  Description of Artificial Sequence: Synthetic oligonucleotide
  Sense strand starting at position 1110 of SEQ ID NO: 317958
cuacaaggagcauguauua

SEQ ID NO: 525688 - RNA, 19 nt, Artificial Sequence
  Description of Artificial Sequence: Synthetic oligonucleotide
  Antisense strand to SEQ ID NO: 525687
uaauacaugcuccuuguag

SEQ ID NO: 525689 - RNA, 19 nt, Artificial Sequence
  Description of Artificial Sequence: Synthetic oligonucleotide
  Sense strand starting at position 1117 of SEQ ID NO: 317958
gagcauguauuauuuguau

SEQ ID NO: 525690 - RNA, 19 nt, Artificial Sequence
  Description of Artificial Sequence: Synthetic oligonucleotide
  Antisense strand to SEQ ID NO: 525689
auacaaauaauacaugcuc

SEQ ID NO: 525691 - RNA, 19 nt, Artificial Sequence
  Description of Artificial Sequence: Synthetic oligonucleotide
  Sense strand starting at position 1205 of SEQ ID NO: 317958
gaggcaauacccugaguua

SEQ ID NO: 525692 - RNA, 19 nt, Artificial Sequence
  Description of Artificial Sequence: Synthetic oligonucleotide
  Antisense strand to SEQ ID NO: 525691
uaacucaggguauugccuc

SEQ ID NO: 525693 - RNA, 19 nt, Artificial Sequence
  Description of Artificial Sequence: Synthetic oligonucleotide
  Sense strand starting at position 1206 of SEQ ID NO: 317958
aggcaauacccugaguuac

SEQ ID NO: 525694 - RNA, 19 nt, Artificial Sequence
  Description of Artificial Sequence: Synthetic oligonucleotide
  Antisense strand to SEQ ID NO: 525693
guaacucaggguauugccu

SEQ ID NO: 525695 - RNA, 19 nt, Artificial Sequence
  Description of Artificial Sequence: Synthetic oligonucleotide
  Sense strand starting at position 1217 of SEQ ID NO: 317958
ugaguuacuggcuaaaguu

SEQ ID NO: 525696 - RNA, 19 nt, Artificial Sequence
  Description of Artificial Sequence: Synthetic oligonucleotide
  Antisense strand to SEQ ID NO: 525695
aacuuuagccaguaacuca

SEQ ID NO: 525697 - RNA, 19 nt, Artificial Sequence
  Description of Artificial Sequence: Synthetic oligonucleotide
  Sense strand starting at position 1349 of SEQ ID NO: 317958
agaggugaccgcuaaggaa

SEQ ID NO: 525698 - RNA, 19 nt, Artificial Sequence
  Description of Artificial Sequence: Synthetic oligonucleotide
  Antisense strand to SEQ ID NO: 525697
uuccuuagcggucaccucu

SEQ ID NO: 525699 - RNA, 19 nt, Artificial Sequence
  Description of Artificial Sequence: Synthetic oligonucleotide
  Sense strand starting at position 1372 of SEQ ID NO: 317958
gcuuccuuccgaucgcuua

SEQ ID NO: 525700 - RNA, 19 nt, Artificial Sequence
  Description of Artificial Sequence: Synthetic oligonucleotide
  Antisense strand to SEQ ID NO: 525699
uaagcgaucggaaggaagc

SEQ ID NO: 525701 - RNA, 19 nt, Artificial Sequence
  Description of Artificial Sequence: Synthetic oligonucleotide
  Sense strand starting at position 1386 of SEQ ID NO: 317958
gcuuauuaugcacagaaca

SEQ ID NO: 525702 - RNA, 19 nt, Artificial Sequence
  Description of Artificial Sequence: Synthetic oligonucleotide
  Antisense strand to SEQ ID NO: 525701
uguucugugcauaauaagc

SEQ ID NO: 525703 - RNA, 19 nt, Artificial Sequence
  Description of Artificial Sequence: Synthetic oligonucleotide
  Sense strand starting at position 1446 of SEQ ID NO: 317958
acagacucuuaguuauagu

SEQ ID NO: 525704 - RNA, 19 nt, Artificial Sequence
  Description of Artificial Sequence: Synthetic oligonucleotide
  Antisense strand to SEQ ID NO: 525703
acuauaacuaagagucugu

SEQ ID NO: 525705 - RNA, 19 nt, Artificial Sequence
  Description of Artificial Sequence: Synthetic oligonucleotide
  Sense strand starting at position 1510 of SEQ ID NO: 317958
ugggaucuuagccaaguca

SEQ ID NO: 525706 - RNA, 19 nt, Artificial Sequence
  Description of Artificial Sequence: Synthetic oligonucleotide
  Antisense strand to SEQ ID NO: 525705
ugacuuggcuaagauccca

SEQ ID NO: 525707 - RNA, 19 nt, Artificial Sequence
  Description of Artificial Sequence: Synthetic oligonucleotide
  Sense strand starting at position 1559 of SEQ ID NO: 317958
cuaaacugauagguuuauu

SEQ ID NO: 525708 - RNA, 19 nt, Artificial Sequence
  Description of Artificial Sequence: Synthetic oligonucleotide
  Antisense strand to SEQ ID NO: 525707
aauaaaccuaucaguuuag

SEQ ID NO: 525709 - RNA, 19 nt, Artificial Sequence
  Description of Artificial Sequence: Synthetic oligonucleotide
  Sense strand starting at position 1564 of SEQ ID NO: 317958
cugauagguuuauuaugag

SEQ ID NO: 525710 - RNA, 19 nt, Artificial Sequence
  Description of Artificial Sequence: Synthetic oligonucleotide
  Antisense strand to SEQ ID NO: 525709
cucauaauaaaccuaucag

SEQ ID NO: 525711 - RNA, 19 nt, Artificial Sequence
  Description of Artificial Sequence: Synthetic oligonucleotide
  Sense strand starting at position 1570 of SEQ ID NO: 317958
gguuuauuaugaguaugaa

SEQ ID NO: 525712 - RNA, 19 nt, Artificial Sequence
  Description of Artificial Sequence: Synthetic oligonucleotide
  Antisense strand to SEQ ID NO: 525711
uucauacucauaauaaacc

SEQ ID NO: 525713 - RNA, 19 nt, Artificial Sequence
  Description of Artificial Sequence: Synthetic oligonucleotide
  Sense strand starting at position 1852 of SEQ ID NO: 317958
cccuucuuugagcagugaa

SEQ ID NO: 525714 - RNA, 19 nt, Artificial Sequence
  Description of Artificial Sequence: Synthetic oligonucleotide
  Antisense strand to SEQ ID NO: 525713
uucacugcucaaagaaggg

SEQ ID NO: 525715 - RNA, 19 nt, Artificial Sequence
  Description of Artificial Sequence: Synthetic oligonucleotide
  Sense strand starting at position 2513 of SEQ ID NO: 317958
auaguagacccucagcaaa

SEQ ID NO: 525716 - RNA, 19 nt, Artificial Sequence
  Description of Artificial Sequence: Synthetic oligonucleotide
  Antisense strand to SEQ ID NO: 525715
uuugcugagggucuacuau

SEQ ID NO: 525717 - RNA, 19 nt, Artificial Sequence
  Description of Artificial Sequence: Synthetic oligonucleotide
  Sense strand starting at position 2593 of SEQ ID NO: 317958
gguagcuccacuuggagaa

SEQ ID NO: 525718 - RNA, 19 nt, Artificial Sequence
  Description of Artificial Sequence: Synthetic oligonucleotide
  Antisense strand to SEQ ID NO: 525717
uucuccaaguggagcuacc

SEQ ID NO: 525719 - RNA, 19 nt, Artificial Sequence
  Description of Artificial Sequence: Synthetic oligonucleotide
  Sense strand starting at position 2686 of SEQ ID NO: 317958
aggcuuuggcaaggaagaa

SEQ ID NO: 525720 - RNA, 19 nt, Artificial Sequence
  Description of Artificial Sequence: Synthetic oligonucleotide
  Antisense strand to SEQ ID NO: 525719
uucuuccuugccaaagccu

SEQ ID NO: 525721 - RNA, 19 nt, Artificial Sequence
  Description of Artificial Sequence: Synthetic oligonucleotide
  Sense strand starting at position 2751 of SEQ ID NO: 317958
ucuugaaaugggugaguaa

SEQ ID NO: 525722 - RNA, 19 nt, Artificial Sequence
  Description of Artificial Sequence: Synthetic oligonucleotide
  Antisense strand to SEQ ID NO: 525721
uuacucacccauuucaaga

SEQ ID NO: 525723 - RNA, 19 nt, Artificial Sequence
  Description of Artificial Sequence: Synthetic oligonucleotide
  Sense strand starting at position 2849 of SEQ ID NO: 317958
ggcauuacucauggugaag

SEQ ID NO: 525724 - RNA, 19 nt, Artificial Sequence
  Description of Artificial Sequence: Synthetic oligonucleotide
  Antisense strand to SEQ ID NO: 525723
cuucaccaugaguaaugcc

SEQ ID NO: 525725 - RNA, 19 nt, Artificial Sequence
  Description of Artificial Sequence: Synthetic oligonucleotide
  Sense strand starting at position 2900 of SEQ ID NO: 317958
agcacaauggagugaguau

SEQ ID NO: 525726 - RNA, 19 nt, Artificial Sequence
  Description of Artificial Sequence: Synthetic oligonucleotide
  Antisense strand to SEQ ID NO: 525725
auacucacuccauugugcu

SEQ ID NO: 525727 - RNA, 19 nt, Artificial Sequence
  Description of Artificial Sequence: Synthetic oligonucleotide
  Sense strand starting at position 2901 of SEQ ID NO: 317958
gcacaauggagugaguauu

SEQ ID NO: 525728 - RNA, 19 nt, Artificial Sequence
  Description of Artificial Sequence: Synthetic oligonucleotide
  Antisense strand to SEQ ID NO: 525727
aauacucacuccauugugc

SEQ ID NO: 525729 - RNA, 19 nt, Artificial Sequence
  Description of Artificial Sequence: Synthetic oligonucleotide
  Sense strand starting at position 2907 of SEQ ID NO: 317958
uggagugaguauucccuga

SEQ ID NO: 525730 - RNA, 19 nt, Artificial Sequence
  Description of Artificial Sequence: Synthetic oligonucleotide
  Antisense strand to SEQ ID NO: 525729
ucagggaauacucacucca

SEQ ID NO: 525731 - RNA, 19 nt, Artificial Sequence
  Description of Artificial Sequence: Synthetic oligonucleotide
  Sense strand starting at position 2909 of SEQ ID NO: 317958
gagugaguauucccugaug

SEQ ID NO: 525732 - RNA, 19 nt, Artificial Sequence
  Description of Artificial Sequence: Synthetic oligonucleotide
  Antisense strand to SEQ ID NO: 525731
caucagggaauacucacuc

SEQ ID NO: 525733 - RNA, 19 nt, Artificial Sequence
  Description of Artificial Sequence: Synthetic oligonucleotide
  Sense strand starting at position 3107 of SEQ ID NO: 317958
ucaauauuggaagguggua

SEQ ID NO: 525734 - RNA, 19 nt, Artificial Sequence
  Description of Artificial Sequence: Synthetic oligonucleotide
  Antisense strand to SEQ ID NO: 525733
uaccaccuuccaauauuga

SEQ ID NO: 525735 - RNA, 19 nt, Artificial Sequence
  Description of Artificial Sequence: Synthetic oligonucleotide
  Sense strand starting at position 3134 of SEQ ID NO: 317958
ggaugagaaccugggcuuu

SEQ ID NO: 525736 - RNA, 19 nt, Artificial Sequence
  Description of Artificial Sequence: Synthetic oligonucleotide
  Antisense strand to SEQ ID NO: 525735
aaagcccagguucucaucc

SEQ ID NO: 525737 - RNA, 19 nt, Artificial Sequence
  Description of Artificial Sequence: Synthetic oligonucleotide
  Sense strand starting at position 3375 of SEQ ID NO: 317958
cugucauugacagaguugu

SEQ ID NO: 525738 - RNA, 19 nt, Artificial Sequence
  Description of Artificial Sequence: Synthetic oligonucleotide
  Antisense strand to SEQ ID NO: 525737
acaacucugucaaugacag

SEQ ID NO: 525739 - RNA, 19 nt, Artificial Sequence
  Description of Artificial Sequence: Synthetic oligonucleotide
  Sense strand starting at position 3512 of SEQ ID NO: 317958
ugauauucuccugagcuca

SEQ ID NO: 525740 - RNA, 19 nt, Artificial Sequence
  Description of Artificial Sequence: Synthetic oligonucleotide
  Antisense strand to SEQ ID NO: 525739
ugagcucaggagaauauca

SEQ ID NO: 525741 - RNA, 19 nt, Artificial Sequence
  Description of Artificial Sequence: Synthetic oligonucleotide
  Sense strand starting at position 92 of SEQ ID NO: 317959
uguugugcuaaugauggaa

SEQ ID NO: 525742 - RNA, 19 nt, Artificial Sequence
  Description of Artificial Sequence: Synthetic oligonucleotide
  Antisense strand to SEQ ID NO: 525741
uuccaucauuagcacaaca

SEQ ID NO: 525743 - RNA, 19 nt, Artificial Sequence
  Description of Artificial Sequence: Synthetic oligonucleotide
  Sense strand starting at position 351 of SEQ ID NO: 317959
gcagaucacgugaguugug

SEQ ID NO: 525744 - RNA, 19 nt, Artificial Sequence
  Description of Artificial Sequence: Synthetic oligonucleotide
  Antisense strand to SEQ ID NO: 525743
cacaacucacgugaucugc

SEQ ID NO: 525745 - RNA, 19 nt, Artificial Sequence
  Description of Artificial Sequence: Synthetic oligonucleotide
  Sense strand starting at position 368 of SEQ ID NO: 317959
uguaucaugccugacacaa

SEQ ID NO: 525746 - RNA, 19 nt, Artificial Sequence
  Description of Artificial Sequence: Synthetic oligonucleotide
  Antisense strand to SEQ ID NO: 525745
uugugucaggcaugauaca

SEQ ID NO: 525747 - RNA, 19 nt, Artificial Sequence
  Description of Artificial Sequence: Synthetic oligonucleotide
  Sense strand starting at position 406 of SEQ ID NO: 317959
gcuaauuugcagugaauau

SEQ ID NO: 525748 - RNA, 19 nt, Artificial Sequence
  Description of Artificial Sequence: Synthetic oligonucleotide
  Antisense strand to SEQ ID NO: 525747
auauucacugcaaauuagc

SEQ ID NO: 525749 - RNA, 19 nt, Artificial Sequence
  Description of Artificial Sequence: Synthetic oligonucleotide
  Sense strand starting at position 417 of SEQ ID NO: 317959
gugaauauugcuuauguau

SEQ ID NO: 525750 - RNA, 19 nt, Artificial Sequence
  Description of Artificial Sequence: Synthetic oligonucleotide
  Antisense strand to SEQ ID NO: 525749
auacauaagcaauauucac

SEQ ID NO: 525751 - RNA, 19 nt, Artificial Sequence
  Description of Artificial Sequence: Synthetic oligonucleotide
  Sense strand starting at position 424 of SEQ ID NO: 317959
uugcuuauguaugcuauuu

SEQ ID NO: 525752 - RNA, 19 nt, Artificial Sequence
  Description of Artificial Sequence: Synthetic oligonucleotide
  Antisense strand to SEQ ID NO: 525751
aaauagcauacauaagcaa

SEQ ID NO: 525753 - RNA, 19 nt, Artificial Sequence
  Description of Artificial Sequence: Synthetic oligonucleotide
  Sense strand starting at position 707 of SEQ ID NO: 317959
cagcgaaguggucauuugu

SEQ ID NO: 525754 - RNA, 19 nt, Artificial Sequence
  Description of Artificial Sequence: Synthetic oligonucleotide
  Antisense strand to SEQ ID NO: 525753
acaaaugaccacuucgcug

SEQ ID NO: 525755 - RNA, 19 nt, Artificial Sequence
  Description of Artificial Sequence: Synthetic oligonucleotide
  Sense strand starting at position 714 of SEQ ID NO: 317959
guggucauuuguucuuaga

SEQ ID NO: 525756 - RNA, 19 nt, Artificial Sequence
  Description of Artificial Sequence: Synthetic oligonucleotide
  Antisense strand to SEQ ID NO: 525755
ucuaagaacaaaugaccac

SEQ ID NO: 525757 - RNA, 19 nt, Artificial Sequence
  Description of Artificial Sequence: Synthetic oligonucleotide
  Sense strand starting at position 716 of SEQ ID NO: 317959
ggucauuuguucuuagagc

SEQ ID NO: 525758 - RNA, 19 nt, Artificial Sequence
  Description of Artificial Sequence: Synthetic oligonucleotide
  Antisense strand to SEQ ID NO: 525757
gcucuaagaacaaaugacc

SEQ ID NO: 525759 - RNA, 19 nt, Artificial Sequence
  Description of Artificial Sequence: Synthetic oligonucleotide
  Sense strand starting at position 745 of SEQ ID NO: 317959
uggugcaugguccaugaau

SEQ ID NO: 525760 - RNA, 19 nt, Artificial Sequence
  Description of Artificial Sequence: Synthetic oligonucleotide
  Antisense strand to SEQ ID NO: 525759
auucauggaccaugcacca

SEQ ID NO: 525761 - RNA, 19 nt, Artificial Sequence
  Description of Artificial Sequence: Synthetic oligonucleotide
  Sense strand starting at position 780 of SEQ ID NO: 317959
uguauaaaccaucauguca

SEQ ID NO: 525762 - RNA, 19 nt, Artificial Sequence
  Description of Artificial Sequence: Synthetic oligonucleotide
  Antisense strand to SEQ ID NO: 525761
ugacaugaugguuuauaca

SEQ ID NO: 525763 - RNA, 19 nt, Artificial Sequence
  Description of Artificial Sequence: Synthetic oligonucleotide
  Sense strand starting at position 791 of SEQ ID NO: 317959
ucaugucaaagugaguguu

SEQ ID NO: 525764 - RNA, 19 nt, Artificial Sequence
  Description of Artificial Sequence: Synthetic oligonucleotide
  Antisense strand to SEQ ID NO: 525763
aacacucacuuugacauga

SEQ ID NO: 525765 - RNA, 19 nt, Artificial Sequence
  Description of Artificial Sequence: Synthetic oligonucleotide
  Sense strand starting at position 884 of SEQ ID NO: 317959
uucucuugauuuguggcaa

SEQ ID NO: 525766 - RNA, 19 nt, Artificial Sequence
  Description of Artificial Sequence: Synthetic oligonucleotide
  Antisense strand to SEQ ID NO: 525765
uugccacaaaucaagagaa

SEQ ID NO: 525767 - RNA, 19 nt, Artificial Sequence
  Description of Artificial Sequence: Synthetic oligonucleotide
  Sense strand starting at position 913 of SEQ ID NO: 317959
ugagauugcugacccucua

SEQ ID NO: 525768 - RNA, 19 nt, Artificial Sequence
  Description of Artificial Sequence: Synthetic oligonucleotide
  Antisense strand to SEQ ID NO: 525767
uagagggucagcaaucuca

SEQ ID NO: 525769 - RNA, 19 nt, Artificial Sequence
  Description of Artificial Sequence: Synthetic oligonucleotide
  Sense strand starting at position 1138 of SEQ ID NO: 317959
ugucaacaccucugagaac

SEQ ID NO: 525770 - RNA, 19 nt, Artificial Sequence
  Description of Artificial Sequence: Synthetic oligonucleotide
  Antisense strand to SEQ ID NO: 525769
guucucagagguguugaca

SEQ ID NO: 525771 - RNA, 19 nt, Artificial Sequence
  Description of Artificial Sequence: Synthetic oligonucleotide
  Sense strand starting at position 1222 of SEQ ID NO: 317959
uucuauaaggucuggagaa

SEQ ID NO: 525772 - RNA, 19 nt, Artificial Sequence
  Description of Artificial Sequence: Synthetic oligonucleotide
  Antisense strand to SEQ ID NO: 525771
uucuccagaccuuauagaa

SEQ ID NO: 525773 - RNA, 19 nt, Artificial Sequence
  Description of Artificial Sequence: Synthetic oligonucleotide
  Sense strand starting at position 1323 of SEQ ID NO: 317959
acgauuaugaacugggauu

SEQ ID NO: 525774 - RNA, 19 nt, Artificial Sequence
  Description of Artificial Sequence: Synthetic oligonucleotide
  Antisense strand to SEQ ID NO: 525773
aaucccaguucauaaucgu

SEQ ID NO: 525775 - RNA, 19 nt, Artificial Sequence
  Description of Artificial Sequence: Synthetic oligonucleotide
  Sense strand starting at position 1370 of SEQ ID NO: 317959
ccaggagagucaguugacu

SEQ ID NO: 525776 - RNA, 19 nt, Artificial Sequence
  Description of Artificial Sequence: Synthetic oligonucleotide
  Antisense strand to SEQ ID NO: 525775
agucaacugacucuccugg

SEQ ID NO: 525777 - RNA, 19 nt, Artificial Sequence
  Description of Artificial Sequence: Synthetic oligonucleotide
  Sense strand starting at position 1372 of SEQ ID NO: 317959
aggagagucaguugacuug

SEQ ID NO: 525778 - RNA, 19 nt, Artificial Sequence
  Description of Artificial Sequence: Synthetic oligonucleotide
  Antisense strand to SEQ ID NO: 525777
caagucaacugacucuccu

SEQ ID NO: 525779 - RNA, 19 nt, Artificial Sequence
  Description of Artificial Sequence: Synthetic oligonucleotide
  Sense strand starting at position 1375 of SEQ ID NO: 317959
agagucaguugacuugaaa

SEQ ID NO: 525780 - RNA, 19 nt, Artificial Sequence
  Description of Artificial Sequence: Synthetic oligonucleotide
  Antisense strand to SEQ ID NO: 525779
uuucaagucaacugacucu

SEQ ID NO: 525781 - RNA, 19 nt, Artificial Sequence
  Description of Artificial Sequence: Synthetic oligonucleotide
  Sense strand starting at position 1401 of SEQ ID NO: 317959
cacaucucugugcaggauu

SEQ ID NO: 525782 - RNA, 19 nt, Artificial Sequence
  Description of Artificial Sequence: Synthetic oligonucleotide
  Antisense strand to SEQ ID NO: 525781
aauccugcacagagaugug

SEQ ID NO: 525783 - RNA, 19 nt, Artificial Sequence
  Description of Artificial Sequence: Synthetic oligonucleotide
  Sense strand starting at position 1586 of SEQ ID NO: 317959
auaggacacguuuggguaa

SEQ ID NO: 525784 - RNA, 19 nt, Artificial Sequence
  Description of Artificial Sequence: Synthetic oligonucleotide
  Antisense strand to SEQ ID NO: 525783
uuacccaaacguguccuau

SEQ ID NO: 525785 - RNA, 19 nt, Artificial Sequence
  Description of Artificial Sequence: Synthetic oligonucleotide
  Sense strand starting at position 1676 of SEQ ID NO: 317959
ugugucaugccugaauaga

SEQ ID NO: 525786 - RNA, 19 nt, Artificial Sequence
  Description of Artificial Sequence: Synthetic oligonucleotide
  Antisense strand to SEQ ID NO: 525785
ucuauucaggcaugacaca

SEQ ID NO: 525787 - RNA, 19 nt, Artificial Sequence
  Description of Artificial Sequence: Synthetic oligonucleotide
  Sense strand starting at position 1879 of SEQ ID NO: 317959
agaggaguuugggcuucuu

SEQ ID NO: 525788 - RNA, 19 nt, Artificial Sequence
  Description of Artificial Sequence: Synthetic oligonucleotide
  Antisense strand to SEQ ID NO: 525787
aagaagcccaaacuccucu

SEQ ID NO: 525789 - RNA, 19 nt, Artificial Sequence
  Description of Artificial Sequence: Synthetic oligonucleotide
  Sense strand starting at position 1914 of SEQ ID NO: 317959
agauuaaacuucucgguca

SEQ ID NO: 525790 - RNA, 19 nt, Artificial Sequence
  Description of Artificial Sequence: Synthetic oligonucleotide
  Antisense strand to SEQ ID NO: 525789
ugaccgagaaguuuaaucu

SEQ ID NO: 525791 - RNA, 19 nt, Artificial Sequence
  Description of Artificial Sequence: Synthetic oligonucleotide
  Sense strand starting at position 1982 of SEQ ID NO: 317959
gcuuguggcgcuuucaaga

SEQ ID NO: 525792 - RNA, 19 nt, Artificial Sequence
  Description of Artificial Sequence: Synthetic oligonucleotide
  Antisense strand to SEQ ID NO: 525791
ucuugaaagcgccacaagc

SEQ ID NO: 525793 - RNA, 19 nt, Artificial Sequence
  Description of Artificial Sequence: Synthetic oligonucleotide
  Sense strand starting at position 2987 of SEQ ID NO: 317959
ggaagugcuggugacucua

SEQ ID NO: 525794 - RNA, 19 nt, Artificial Sequence
  Description of Artificial Sequence: Synthetic oligonucleotide
  Antisense strand to SEQ ID NO: 525793
uagagucaccagcacuucc

SEQ ID NO: 525795 - RNA, 19 nt, Artificial Sequence
  Description of Artificial Sequence: Synthetic oligonucleotide
  Sense strand starting at position 2989 of SEQ ID NO: 317959
aagugcuggugacucuaaa

SEQ ID NO: 525796 - RNA, 19 nt, Artificial Sequence
  Description of Artificial Sequence: Synthetic oligonucleotide
  Antisense strand to SEQ ID NO: 525795
uuuagagucaccagcacuu

SEQ ID NO: 525797 - RNA, 19 nt, Artificial Sequence
  Description of Artificial Sequence: Synthetic oligonucleotide
  Sense strand starting at position 3038 of SEQ ID NO: 317959
aggaaacuaacgugugaac

SEQ ID NO: 525798 - RNA, 19 nt, Artificial Sequence
  Description of Artificial Sequence: Synthetic oligonucleotide
  Antisense strand to SEQ ID NO: 525797
guucacacguuaguuuccu

SEQ ID NO: 525799 - RNA, 19 nt, Artificial Sequence
  Description of Artificial Sequence: Synthetic oligonucleotide
  Sense strand starting at position 3040 of SEQ ID NO: 317959
gaaacuaacgugugaacug

SEQ ID NO: 525800 - RNA, 19 nt, Artificial Sequence
  Description of Artificial Sequence: Synthetic oligonucleotide
  Antisense strand to SEQ ID NO: 525799
caguucacacguuaguuuc

SEQ ID NO: 525801 - RNA, 19 nt, Artificial Sequence
  Description of Artificial Sequence: Synthetic oligonucleotide
  Sense strand starting at position 3373 of SEQ ID NO: 317959
uuuguaagugugaguagug

SEQ ID NO: 525802 - RNA, 19 nt, Artificial Sequence
  Description of Artificial Sequence: Synthetic oligonucleotide
  Antisense strand to SEQ ID NO: 525801
cacuacucacacuuacaaa

SEQ ID NO: 525803 - RNA, 19 nt, Artificial Sequence
  Description of Artificial Sequence: Synthetic oligonucleotide
  Sense strand starting at position 3387 of SEQ ID NO: 317959
uagugaaugugaucaucaa

SEQ ID NO: 525804 - RNA, 19 nt, Artificial Sequence
  Description of Artificial Sequence: Synthetic oligonucleotide
  Antisense strand to SEQ ID NO: 525803
uugaugaucacauucacua

SEQ ID NO: 525805 - RNA, 19 nt, Artificial Sequence
  Description of Artificial Sequence: Synthetic oligonucleotide
  Sense strand starting at position 3415 of SEQ ID NO: 317959
auuaucaaguggucuuaga

SEQ ID NO: 525806 - RNA, 19 nt, Artificial Sequence
  Description of Artificial Sequence: Synthetic oligonucleotide
  Antisense strand to SEQ ID NO: 525805
ucuaagaccacuugauaau

SEQ ID NO: 525807 - RNA, 19 nt, Artificial Sequence
  Description of Artificial Sequence: Synthetic oligonucleotide
  Sense strand starting at position 3495 of SEQ ID NO: 317959
accauaaucccuugaagug

SEQ ID NO: 525808 - RNA, 19 nt, Artificial Sequence
  Description of Artificial Sequence: Synthetic oligonucleotide
  Antisense strand to SEQ ID NO: 525807
cacuucaagggauuauggu

SEQ ID NO: 525809 - RNA, 19 nt, Artificial Sequence
  Description of Artificial Sequence: Synthetic oligonucleotide
  Sense strand starting at position 3643 of SEQ ID NO: 317959
ugcccuugaucaccaugaa

SEQ ID NO: 525810 - RNA, 19 nt, Artificial Sequence
  Description of Artificial Sequence: Synthetic oligonucleotide
  Antisense strand to SEQ ID NO: 525809
uucauggugaucaagggca

SEQ ID NO: 525811 - RNA, 19 nt, Artificial Sequence
  Description of Artificial Sequence: Synthetic oligonucleotide
  Sense strand starting at position 3644 of SEQ ID NO: 317959
gcccuugaucaccaugaaa

SEQ ID NO: 525812 - RNA, 19 nt, Artificial Sequence
  Description of Artificial Sequence: Synthetic oligonucleotide
  Antisense strand to SEQ ID NO: 525811
uuucauggugaucaagggc

SEQ ID NO: 525813 - RNA, 19 nt, Artificial Sequence
  Description of Artificial Sequence: Synthetic oligonucleotide
  Sense strand starting at position 3662 of SEQ ID NO: 317959
aagguuuagugacuuuauc

SEQ ID NO: 525814 - RNA, 19 nt, Artificial Sequence
  Description of Artificial Sequence: Synthetic oligonucleotide
  Antisense strand to SEQ ID NO: 525813
gauaaagucacuaaaccuu

SEQ ID NO: 525815 - RNA, 19 nt, Artificial Sequence
  Description of Artificial Sequence: Synthetic oligonucleotide
  Sense strand starting at position 3671 of SEQ ID NO: 317959
ugacuuuauccacacuagu

SEQ ID NO: 525816 - RNA, 19 nt, Artificial Sequence
  Description of Artificial Sequence: Synthetic oligonucleotide
  Antisense strand to SEQ ID NO: 525815
acuaguguggauaaaguca

SEQ ID NO: 525817 - RNA, 19 nt, Artificial Sequence
  Description of Artificial Sequence: Synthetic oligonucleotide
  Sense strand starting at position 3819 of SEQ ID NO: 317959
ccaugccaucugugaaaca

SEQ ID NO: 525818 - RNA, 19 nt, Artificial Sequence
  Description of Artificial Sequence: Synthetic oligonucleotide
  Antisense strand to SEQ ID NO: 525817
uguuucacagauggcaugg

SEQ ID NO: 525819 - RNA, 19 nt, Artificial Sequence
  Description of Artificial Sequence: Synthetic oligonucleotide
  Sense strand starting at position 3885 of SEQ ID NO: 317959
cuucgugagcaucauggaa

SEQ ID NO: 525820 - RNA, 19 nt, Artificial Sequence
  Description of Artificial Sequence: Synthetic oligonucleotide
  Antisense strand to SEQ ID NO: 525819
uuccaugaugcucacgaag

SEQ ID NO: 525821 - RNA, 19 nt, Artificial Sequence
  Description of Artificial Sequence: Synthetic oligonucleotide
  Sense strand starting at position 7 of SEQ ID NO: 317960
gguacuuaauaucuuuagu

SEQ ID NO: 525822 - RNA, 19 nt, Artificial Sequence
  Description of Artificial Sequence: Synthetic oligonucleotide
  Antisense strand to SEQ ID NO: 525821
acuaaagauauuaaguacc

SEQ ID NO: 525823 - RNA, 19 nt, Artificial Sequence
  Description of Artificial Sequence: Synthetic oligonucleotide
  Sense strand starting at position 215 of SEQ ID NO: 317960
gcuaaauucuggucaacug

SEQ ID NO: 525824 - RNA, 19 nt, Artificial Sequence
  Description of Artificial Sequence: Synthetic oligonucleotide
  Antisense strand to SEQ ID NO: 525823
caguugaccagaauuuagc

SEQ ID NO: 525825 - RNA, 19 nt, Artificial Sequence
  Description of Artificial Sequence: Synthetic oligonucleotide
  Sense strand starting at position 216 of SEQ ID NO: 317960
cuaaauucuggucaacugu

SEQ ID NO: 525826 - RNA, 19 nt, Artificial Sequence
  Description of Artificial Sequence: Synthetic oligonucleotide
  Antisense strand to SEQ ID NO: 525825
acaguugaccagaauuuag

SEQ ID NO: 525827 - RNA, 19 nt, Artificial Sequence
  Description of Artificial Sequence: Synthetic oligonucleotide
  Sense strand starting at position 273 of SEQ ID NO: 317960
ucuugaaauguuugacuga

SEQ ID NO: 525828 - RNA, 19 nt, Artificial Sequence
  Description of Artificial Sequence: Synthetic oligonucleotide
  Antisense strand to SEQ ID NO: 525827
ucagucaaacauuucaaga

SEQ ID NO: 525829 - RNA, 19 nt, Artificial Sequence
  Description of Artificial Sequence: Synthetic oligonucleotide
  Sense strand starting at position 322 of SEQ ID NO: 317960
ugcuuagaauuccugaaca

SEQ ID NO: 525830 - RNA, 19 nt, Artificial Sequence
  Description of Artificial Sequence: Synthetic oligonucleotide
  Antisense strand to SEQ ID NO: 525829
uguucaggaauucuaagca

SEQ ID NO: 525831 - RNA, 19 nt, Artificial Sequence
  Description of Artificial Sequence: Synthetic oligonucleotide
  Sense strand starting at position 364 of SEQ ID NO: 317960
aaaggugacuuggaauuua

SEQ ID NO: 525832 - RNA, 19 nt, Artificial Sequence
  Description of Artificial Sequence: Synthetic oligonucleotide
  Antisense strand to SEQ ID NO: 525831
uaaauuccaagucaccuuu

SEQ ID NO: 525833 - RNA, 19 nt, Artificial Sequence
  Description of Artificial Sequence: Synthetic oligonucleotide
  Sense strand starting at position 378 of SEQ ID NO: 317960
auuuaccauugagauaaug

SEQ ID NO: 525834 - RNA, 19 nt, Artificial Sequence
  Description of Artificial Sequence: Synthetic oligonucleotide
  Antisense strand to SEQ ID NO: 525833
cauuaucucaaugguaaau

SEQ ID NO: 525835 - RNA, 19 nt, Artificial Sequence
  Description of Artificial Sequence: Synthetic oligonucleotide
  Sense strand starting at position 394 of SEQ ID NO: 317960
augccaaauggucacuaaa

SEQ ID NO: 525836 - RNA, 19 nt, Artificial Sequence
  Description of Artificial Sequence: Synthetic oligonucleotide
  Antisense strand to SEQ ID NO: 525835
uuuagugaccauuuggcau

SEQ ID NO: 525837 - RNA, 19 nt, Artificial Sequence
  Description of Artificial Sequence: Synthetic oligonucleotide
  Sense strand starting at position 396 of SEQ ID NO: 317960
gccaaauggucacuaaaga

SEQ ID NO: 525838 - RNA, 19 nt, Artificial Sequence
  Description of Artificial Sequence: Synthetic oligonucleotide
  Antisense strand to SEQ ID NO: 525837
ucuuuagugaccauuuggc

SEQ ID NO: 525839 - RNA, 19 nt, Artificial Sequence
  Description of Artificial Sequence: Synthetic oligonucleotide
  Sense strand starting at position 502 of SEQ ID NO: 317960
gucucaccacuugaaagua

SEQ ID NO: 525840 - RNA, 19 nt, Artificial Sequence
  Description of Artificial Sequence: Synthetic oligonucleotide
  Antisense strand to SEQ ID NO: 525839
uacuuucaaguggugagac

SEQ ID NO: 525841 - RNA, 19 nt, Artificial Sequence
  Description of Artificial Sequence: Synthetic oligonucleotide
  Sense strand starting at position 732 of SEQ ID NO: 317960
aaugucacacugugggaua

SEQ ID NO: 525842 - RNA, 19 nt, Artificial Sequence
  Description of Artificial Sequence: Synthetic oligonucleotide
  Antisense strand to SEQ ID NO: 525841
uaucccacagugugacauu

SEQ ID NO: 525843 - RNA, 19 nt, Artificial Sequence
  Description of Artificial Sequence: Synthetic oligonucleotide
  Sense strand starting at position 734 of SEQ ID NO: 317960
ugucacacugugggauaaa

SEQ ID NO: 525844 - RNA, 19 nt, Artificial Sequence
  Description of Artificial Sequence: Synthetic oligonucleotide
  Antisense strand to SEQ ID NO: 525843
uuuaucccacagugugaca

SEQ ID NO: 525845 - RNA, 19 nt, Artificial Sequence
  Description of Artificial Sequence: Synthetic oligonucleotide
  Sense strand starting at position 837 of SEQ ID NO: 317960
agucccagauguuuacaau

SEQ ID NO: 525846 - RNA, 19 nt, Artificial Sequence
  Description of Artificial Sequence: Synthetic oligonucleotide
  Antisense strand to SEQ ID NO: 525845
auuguaaacaucugggacu

SEQ ID NO: 525847 - RNA, 19 nt, Artificial Sequence
  Description of Artificial Sequence: Synthetic oligonucleotide
  Sense strand starting at position 838 of SEQ ID NO: 317960
gucccagauguuuacaaug

SEQ ID NO: 525848 - RNA, 19 nt, Artificial Sequence
  Description of Artificial Sequence: Synthetic oligonucleotide
  Antisense strand to SEQ ID NO: 525847
cauuguaaacaucugggac

SEQ ID NO: 525849 - RNA, 19 nt, Artificial Sequence
  Description of Artificial Sequence: Synthetic oligonucleotide
  Sense strand starting at position 947 of SEQ ID NO: 317960
agacaugagcaucauguua

SEQ ID NO: 525850 - RNA, 19 nt, Artificial Sequence
  Description of Artificial Sequence: Synthetic oligonucleotide
  Antisense strand to SEQ ID NO: 525849
uaacaugaugcucaugucu

SEQ ID NO: 525851 - RNA, 19 nt, Artificial Sequence
  Description of Artificial Sequence: Synthetic oligonucleotide
  Sense strand starting at position 1108 of SEQ ID NO: 317960
cgcucauaucuagagguag

SEQ ID NO: 525852 - RNA, 19 nt, Artificial Sequence
  Description of Artificial Sequence: Synthetic oligonucleotide
  Antisense strand to SEQ ID NO: 525851
cuaccucuagauaugagcg

SEQ ID NO: 525853 - RNA, 19 nt, Artificial Sequence
  Description of Artificial Sequence: Synthetic oligonucleotide
  Sense strand starting at position 1110 of SEQ ID NO: 317960
cucauaucuagagguagug

SEQ ID NO: 525854 - RNA, 19 nt, Artificial Sequence
  Description of Artificial Sequence: Synthetic oligonucleotide
  Antisense strand to SEQ ID NO: 525853
cacuaccucuagauaugag

SEQ ID NO: 525855 - RNA, 19 nt, Artificial Sequence
  Description of Artificial Sequence: Synthetic oligonucleotide
  Sense strand starting at position 1201 of SEQ ID NO: 317960
uauaauugacagcggauaa

SEQ ID NO: 525856 - RNA, 19 nt, Artificial Sequence
  Description of Artificial Sequence: Synthetic oligonucleotide
  Antisense strand to SEQ ID NO: 525855
uuauccgcugucaauuaua

SEQ ID NO: 525857 - RNA, 19 nt, Artificial Sequence
  Description of Artificial Sequence: Synthetic oligonucleotide
  Sense strand starting at position 1286 of SEQ ID NO: 317960
guguuuacuugagccauuu

SEQ ID NO: 525858 - RNA, 19 nt, Artificial Sequence
  Description of Artificial Sequence: Synthetic oligonucleotide
  Antisense strand to SEQ ID NO: 525857
aaauggcucaaguaaacac

SEQ ID NO: 525859 - RNA, 19 nt, Artificial Sequence
  Description of Artificial Sequence: Synthetic oligonucleotide
  Sense strand starting at position 1654 of SEQ ID NO: 317960
ggagcaugcauuuguuacu

SEQ ID NO: 525860 - RNA, 19 nt, Artificial Sequence
  Description of Artificial Sequence: Synthetic oligonucleotide
  Antisense strand to SEQ ID NO: 525859
aguaacaaaugcaugcucc

SEQ ID NO: 525861 - RNA, 19 nt, Artificial Sequence
  Description of Artificial Sequence: Synthetic oligonucleotide
  Sense strand starting at position 1655 of SEQ ID NO: 317960
gagcaugcauuuguuacuu

SEQ ID NO: 525862 - RNA, 19 nt, Artificial Sequence
  Description of Artificial Sequence: Synthetic oligonucleotide
  Antisense strand to SEQ ID NO: 525861
aaguaacaaaugcaugcuc

SEQ ID NO: 525863 - RNA, 19 nt, Artificial Sequence
  Description of Artificial Sequence: Synthetic oligonucleotide
  Sense strand starting at position 1729 of SEQ ID NO: 317960
uugagaaaguacuugguga

SEQ ID NO: 525864 - RNA, 19 nt, Artificial Sequence
  Description of Artificial Sequence: Synthetic oligonucleotide
  Antisense strand to SEQ ID NO: 525863
ucaccaaguacuuucucaa

SEQ ID NO: 525865 - RNA, 19 nt, Artificial Sequence
  Description of Artificial Sequence: Synthetic oligonucleotide
  Sense strand starting at position 1730 of SEQ ID NO: 317960
ugagaaaguacuuggugaa

SEQ ID NO: 525866 - RNA, 19 nt, Artificial Sequence
  Description of Artificial Sequence: Synthetic oligonucleotide
  Antisense strand to SEQ ID NO: 525865
uucaccaaguacuuucuca

SEQ ID NO: 525867 - RNA, 19 nt, Artificial Sequence
  Description of Artificial Sequence: Synthetic oligonucleotide
  Sense strand starting at position 1768 of SEQ ID NO: 317960
cggacaucuccuugaaggu

SEQ ID NO: 525868 - RNA, 19 nt, Artificial Sequence
  Description of Artificial Sequence: Synthetic oligonucleotide
  Antisense strand to SEQ ID NO: 525867
accuucaaggagauguccg

SEQ ID NO: 525869 - RNA, 19 nt, Artificial Sequence
  Description of Artificial Sequence: Synthetic oligonucleotide
  Sense strand starting at position 2009 of SEQ ID NO: 317960
aacucucggcacuggaaau

SEQ ID NO: 525870 - RNA, 19 nt, Artificial Sequence
  Description of Artificial Sequence: Synthetic oligonucleotide
  Antisense strand to SEQ ID NO: 525869
auuuccagugccgagaguu

SEQ ID NO: 525871 - RNA, 19 nt, Artificial Sequence
  Description of Artificial Sequence: Synthetic oligonucleotide
  Sense strand starting at position 2019 of SEQ ID NO: 317960
acuggaaauugucucauca

SEQ ID NO: 525872 - RNA, 19 nt, Artificial Sequence
  Description of Artificial Sequence: Synthetic oligonucleotide
  Antisense strand to SEQ ID NO: 525871
ugaugagacaauuuccagu

SEQ ID NO: 525873 - RNA, 19 nt, Artificial Sequence
  Description of Artificial Sequence: Synthetic oligonucleotide
  Sense strand starting at position 2023 of SEQ ID NO: 317960
gaaauugucucaucagaag

SEQ ID NO: 525874 - RNA, 19 nt, Artificial Sequence
  Description of Artificial Sequence: Synthetic oligonucleotide
  Antisense strand to SEQ ID NO: 525873
cuucugaugagacaauuuc

SEQ ID NO: 525875 - RNA, 19 nt, Artificial Sequence
  Description of Artificial Sequence: Synthetic oligonucleotide
  Sense strand starting at position 2029 of SEQ ID NO: 317960
gucucaucagaaggaacau

SEQ ID NO: 525876 - RNA, 19 nt, Artificial Sequence
  Description of Artificial Sequence: Synthetic oligonucleotide
  Antisense strand to SEQ ID NO: 525875
auguuccuucugaugagac

SEQ ID NO: 525877 - RNA, 19 nt, Artificial Sequence
  Description of Artificial Sequence: Synthetic oligonucleotide
  Sense strand starting at position 2510 of SEQ ID NO: 317960
acaaguauaucccuuugga

SEQ ID NO: 525878 - RNA, 19 nt, Artificial Sequence
  Description of Artificial Sequence: Synthetic oligonucleotide
  Antisense strand to SEQ ID NO: 525877
uccaaagggauauacuugu

SEQ ID NO: 525879 - RNA, 19 nt, Artificial Sequence
  Description of Artificial Sequence: Synthetic oligonucleotide
  Sense strand starting at position 2714 of SEQ ID NO: 317960
gguugaagccuggagucua

SEQ ID NO: 525880 - RNA, 19 nt, Artificial Sequence
  Description of Artificial Sequence: Synthetic oligonucleotide
  Antisense strand to SEQ ID NO: 525879
uagacuccaggcuucaacc

SEQ ID NO: 525881 - RNA, 19 nt, Artificial Sequence
  Description of Artificial Sequence: Synthetic oligonucleotide
  Sense strand starting at position 2732 of SEQ ID NO: 317960
aaaugucagugauucuaag

SEQ ID NO: 525882 - RNA, 19 nt, Artificial Sequence
  Description of Artificial Sequence: Synthetic oligonucleotide
  Antisense strand to SEQ ID NO: 525881
cuuagaaucacugacauuu

SEQ ID NO: 525883 - RNA, 19 nt, Artificial Sequence
  Description of Artificial Sequence: Synthetic oligonucleotide
  Sense strand starting at position 2738 of SEQ ID NO: 317960
cagugauucuaagccagag

SEQ ID NO: 525884 - RNA, 19 nt, Artificial Sequence
  Description of Artificial Sequence: Synthetic oligonucleotide
  Antisense strand to SEQ ID NO: 525883
cucuggcuuagaaucacug

SEQ ID NO: 525885 - RNA, 19 nt, Artificial Sequence
  Description of Artificial Sequence: Synthetic oligonucleotide
  Sense strand starting at position 2740 of SEQ ID NO: 317960
gugauucuaagccagaggu

SEQ ID NO: 525886 - RNA, 19 nt, Artificial Sequence
  Description of Artificial Sequence: Synthetic oligonucleotide
  Antisense strand to SEQ ID NO: 525885
accucuggcuuagaaucac

SEQ ID NO: 525887 - RNA, 19 nt, Artificial Sequence
  Description of Artificial Sequence: Synthetic oligonucleotide
  Sense strand starting at position 3072 of SEQ ID NO: 317960
guaucuucccgcuuuccga

SEQ ID NO: 525888 - RNA, 19 nt, Artificial Sequence
  Description of Artificial Sequence: Synthetic oligonucleotide
  Antisense strand to SEQ ID NO: 525887
ucggaaagcgggaagauac

SEQ ID NO: 525889 - RNA, 19 nt, Artificial Sequence
  Description of Artificial Sequence: Synthetic oligonucleotide
  Sense strand starting at position 3281 of SEQ ID NO: 317960
gcagaagaugcugaggauu

SEQ ID NO: 525890 - RNA, 19 nt, Artificial Sequence
  Description of Artificial Sequence: Synthetic oligonucleotide
  Antisense strand to SEQ ID NO: 525889
aauccucagcaucuucugc

SEQ ID NO: 525891 - RNA, 19 nt, Artificial Sequence
  Description of Artificial Sequence: Synthetic oligonucleotide
  Sense strand starting at position 3319 of SEQ ID NO: 317960
agguuauaaacuggucaga

SEQ ID NO: 525892 - RNA, 19 nt, Artificial Sequence
  Description of Artificial Sequence: Synthetic oligonucleotide
  Antisense strand to SEQ ID NO: 525891
ucugaccaguuuauaaccu

SEQ ID NO: 525893 - RNA, 19 nt, Artificial Sequence
  Description of Artificial Sequence: Synthetic oligonucleotide
  Sense strand starting at position 3321 of SEQ ID NO: 317960
guuauaaacuggucagaac

SEQ ID NO: 525894 - RNA, 19 nt, Artificial Sequence
  Description of Artificial Sequence: Synthetic oligonucleotide
  Antisense strand to SEQ ID NO: 525893
guucugaccaguuuauaac

SEQ ID NO: 525895 - RNA, 19 nt, Artificial Sequence
  Description of Artificial Sequence: Synthetic oligonucleotide
  Sense strand starting at position 3399 of SEQ ID NO: 317960
gaggucuccucuuuaauga

SEQ ID NO: 525896 - RNA, 19 nt, Artificial Sequence
  Description of Artificial Sequence: Synthetic oligonucleotide
  Antisense strand to SEQ ID NO: 525895
ucauuaaagaggagaccuc

SEQ ID NO: 525897 - RNA, 19 nt, Artificial Sequence
  Description of Artificial Sequence: Synthetic oligonucleotide
  Sense strand starting at position 3400 of SEQ ID NO: 317960
aggucuccucuuuaaugaa

SEQ ID NO: 525898 - RNA, 19 nt, Artificial Sequence
  Description of Artificial Sequence: Synthetic oligonucleotide
  Antisense strand to SEQ ID NO: 525897
uucauuaaagaggagaccu

SEQ ID NO: 525899 - RNA, 19 nt, Artificial Sequence
  Description of Artificial Sequence: Synthetic oligonucleotide
  Sense strand starting at position 3890 of SEQ ID NO: 317960
cuaagaaaccuuugccaag

SEQ ID NO: 525900 - RNA, 19 nt, Artificial Sequence
  Description of Artificial Sequence: Synthetic oligonucleotide
  Antisense strand to SEQ ID NO: 525899
cuuggcaaagguuucuuag

SEQ ID NO: 525901 - RNA, 19 nt, Artificial Sequence
  Description of Artificial Sequence: Synthetic oligonucleotide
  Sense strand starting at position 494 of SEQ ID NO: 317961
cugaaagcugcugaaguaa

SEQ ID NO: 525902 - RNA, 19 nt, Artificial Sequence
  Description of Artificial Sequence: Synthetic oligonucleotide
  Antisense strand to SEQ ID NO: 525901
uuacuucagcagcuuucag

SEQ ID NO: 525903 - RNA, 19 nt, Artificial Sequence
  Description of Artificial Sequence: Synthetic oligonucleotide
  Sense strand starting at position 738 of SEQ ID NO: 317961
gugugucucagugcugcaa

SEQ ID NO: 525904 - RNA, 19 nt, Artificial Sequence
  Description of Artificial Sequence: Synthetic oligonucleotide
  Antisense strand to SEQ ID NO: 525903
uugcagcacugagacacac

SEQ ID NO: 525905 - RNA, 19 nt, Artificial Sequence
  Description of Artificial Sequence: Synthetic oligonucleotide
  Sense strand starting at position 809 of SEQ ID NO: 317961
gaaauccacucggcugaaa

SEQ ID NO: 525906 - RNA, 19 nt, Artificial Sequence
  Description of Artificial Sequence: Synthetic oligonucleotide
  Antisense strand to SEQ ID NO: 525905
uuucagccgaguggauuuc

SEQ ID NO: 525907 - RNA, 19 nt, Artificial Sequence
  Description of Artificial Sequence: Synthetic oligonucleotide
  Sense strand starting at position 811 of SEQ ID NO: 317961
aauccacucggcugaaagu

SEQ ID NO: 525908 - RNA, 19 nt, Artificial Sequence
  Description of Artificial Sequence: Synthetic oligonucleotide
  Antisense strand to SEQ ID NO: 525907
acuuucagccgaguggauu

SEQ ID NO: 525909 - RNA, 19 nt, Artificial Sequence
  Description of Artificial Sequence: Synthetic oligonucleotide
  Sense strand starting at position 911 of SEQ ID NO: 317961
gggucuuagagcuggguau

SEQ ID NO: 525910 - RNA, 19 nt, Artificial Sequence
  Description of Artificial Sequence: Synthetic oligonucleotide
  Antisense strand to SEQ ID NO: 525909
auacccagcucuaagaccc

SEQ ID NO: 525911 - RNA, 19 nt, Artificial Sequence
  Description of Artificial Sequence: Synthetic oligonucleotide
  Sense strand starting at position 912 of SEQ ID NO: 317961
ggucuuagagcuggguaua

SEQ ID NO: 525912 - RNA, 19 nt, Artificial Sequence
  Description of Artificial Sequence: Synthetic oligonucleotide
  Antisense strand to SEQ ID NO: 525911
uauacccagcucuaagacc

SEQ ID NO: 525913 - RNA, 19 nt, Artificial Sequence
  Description of Artificial Sequence: Synthetic oligonucleotide
  Sense strand starting at position 913 of SEQ ID NO: 317961
gucuuagagcuggguauau

SEQ ID NO: 525914 - RNA, 19 nt, Artificial Sequence
  Description of Artificial Sequence: Synthetic oligonucleotide
  Antisense strand to SEQ ID NO: 525913
auauacccagcucuaagac

SEQ ID NO: 525915 - RNA, 19 nt, Artificial Sequence
  Description of Artificial Sequence: Synthetic oligonucleotide
  Sense strand starting at position 2393 of SEQ ID NO: 317961
gcgcaaacguugcccaaau

SEQ ID NO: 525916 - RNA, 19 nt, Artificial Sequence
  Description of Artificial Sequence: Synthetic oligonucleotide
  Antisense strand to SEQ ID NO: 525915
auuugggcaacguuugcgc

SEQ ID NO: 525917 - RNA, 19 nt, Artificial Sequence
  Description of Artificial Sequence: Synthetic oligonucleotide
  Sense strand starting at position 2394 of SEQ ID NO: 317961
cgcaaacguugcccaaauu

SEQ ID NO: 525918 - RNA, 19 nt, Artificial Sequence
  Description of Artificial Sequence: Synthetic oligonucleotide
  Antisense strand to SEQ ID NO: 525917
aauuugggcaacguuugcg

SEQ ID NO: 525919 - RNA, 19 nt, Artificial Sequence
  Description of Artificial Sequence: Synthetic oligonucleotide
  Sense strand starting at position 2937 of SEQ ID NO: 317961
ggcagcuucguuccuuuaa

SEQ ID NO: 525920 - RNA, 19 nt, Artificial Sequence
  Description of Artificial Sequence: Synthetic oligonucleotide
  Antisense strand to SEQ ID NO: 525919
uuaaaggaacgaagcugcc

SEQ ID NO: 525921 - RNA, 19 nt, Artificial Sequence
  Description of Artificial Sequence: Synthetic oligonucleotide
  Sense strand starting at position 3041 of SEQ ID NO: 317961
guagguguucuugucacgu

SEQ ID NO: 525922 - RNA, 19 nt, Artificial Sequence
  Description of Artificial Sequence: Synthetic oligonucleotide
  Antisense strand to SEQ ID NO: 525921
acgugacaagaacaccuac

SEQ ID NO: 525923 - RNA, 19 nt, Artificial Sequence
  Description of Artificial Sequence: Synthetic oligonucleotide
  Sense strand starting at position 3097 of SEQ ID NO: 317961
cugcuugagccugaugcua

SEQ ID NO: 525924 - RNA, 19 nt, Artificial Sequence
  Description of Artificial Sequence: Synthetic oligonucleotide
  Antisense strand to SEQ ID NO: 525923
uagcaucaggcucaagcag

SEQ ID NO: 525925 - RNA, 19 nt, Artificial Sequence
  Description of Artificial Sequence: Synthetic oligonucleotide
  Sense strand starting at position 3175 of SEQ ID NO: 317961
ucuggacuauuugguuaaa

SEQ ID NO: 525926 - RNA, 19 nt, Artificial Sequence
  Description of Artificial Sequence: Synthetic oligonucleotide
  Antisense strand to SEQ ID NO: 525925
uuuaaccaaauaguccaga

SEQ ID NO: 525927 - RNA, 19 nt, Artificial Sequence
  Description of Artificial Sequence: Synthetic oligonucleotide
  Sense strand starting at position 3188 of SEQ ID NO: 317961
guuaaagccuccuugcguu

SEQ ID NO: 525928 - RNA, 19 nt, Artificial Sequence
  Description of Artificial Sequence: Synthetic oligonucleotide
  Antisense strand to SEQ ID NO: 525927
aacgcaaggaggcuuuaac

SEQ ID NO: 525929 - RNA, 19 nt, Artificial Sequence
  Description of Artificial Sequence: Synthetic oligonucleotide
  Sense strand starting at position 3200 of SEQ ID NO: 317961
uugcguuggcaaugguuga

SEQ ID NO: 525930 - RNA, 19 nt, Artificial Sequence
  Description of Artificial Sequence: Synthetic oligonucleotide
  Antisense strand to SEQ ID NO: 525929
ucaaccauugccaacgcaa

SEQ ID NO: 525931 - RNA, 19 nt, Artificial Sequence
  Description of Artificial Sequence: Synthetic oligonucleotide
  Sense strand starting at position 3259 of SEQ ID NO: 317961
gugcuauuugcugaagcca

SEQ ID NO: 525932 - RNA, 19 nt, Artificial Sequence
  Description of Artificial Sequence: Synthetic oligonucleotide
  Antisense strand to SEQ ID NO: 525931
uggcuucagcaaauagcac

SEQ ID NO: 525933 - RNA, 19 nt, Artificial Sequence
  Description of Artificial Sequence: Synthetic oligonucleotide
  Sense strand starting at position 3267 of SEQ ID NO: 317961
ugcugaagccaugacuaua

SEQ ID NO: 525934 - RNA, 19 nt, Artificial Sequence
  Description of Artificial Sequence: Synthetic oligonucleotide
  Antisense strand to SEQ ID NO: 525933
uauagucauggcuucagca

SEQ ID NO: 525935 - RNA, 19 nt, Artificial Sequence
  Description of Artificial Sequence: Synthetic oligonucleotide
  Sense strand starting at position 3471 of SEQ ID NO: 317961
agacauucugauugccaga

SEQ ID NO: 525936 - RNA, 19 nt, Artificial Sequence
  Description of Artificial Sequence: Synthetic oligonucleotide
  Antisense strand to SEQ ID NO: 525935
ucuggcaaucagaaugucu

SEQ ID NO: 525937 - RNA, 19 nt, Artificial Sequence
  Description of Artificial Sequence: Synthetic oligonucleotide
  Sense strand starting at position 3496 of SEQ ID NO: 317961
cuugcagaguuacucguaa

SEQ ID NO: 525938 - RNA, 19 nt, Artificial Sequence
  Description of Artificial Sequence: Synthetic oligonucleotide
  Antisense strand to SEQ ID NO: 525937
uuacgaguaacucugcaag

SEQ ID NO: 525939 - RNA, 19 nt, Artificial Sequence
  Description of Artificial Sequence: Synthetic oligonucleotide
  Sense strand starting at position 3498 of SEQ ID NO: 317961
ugcagaguuacucguaacu

SEQ ID NO: 525940 - RNA, 19 nt, Artificial Sequence
  Description of Artificial Sequence: Synthetic oligonucleotide
  Antisense strand to SEQ ID NO: 525939
aguuacgaguaacucugca

SEQ ID NO: 525941 - RNA, 19 nt, Artificial Sequence
  Description of Artificial Sequence: Synthetic oligonucleotide
  Sense strand starting at position 3507 of SEQ ID NO: 317961
acucguaacuucccaaguu

SEQ ID NO: 525942 - RNA, 19 nt, Artificial Sequence
  Description of Artificial Sequence: Synthetic oligonucleotide
  Antisense strand to SEQ ID NO: 525941
aacuugggaaguuacgagu

SEQ ID NO: 525943 - RNA, 19 nt, Artificial Sequence
  Description of Artificial Sequence: Synthetic oligonucleotide
  Sense strand starting at position 3535 of SEQ ID NO: 317961
augaaucgaucccaagaua

SEQ ID NO: 525944 - RNA, 19 nt, Artificial Sequence
  Description of Artificial Sequence: Synthetic oligonucleotide
  Antisense strand to SEQ ID NO: 525943
uaucuugggaucgauucau

SEQ ID NO: 525945 - RNA, 19 nt, Artificial Sequence
  Description of Artificial Sequence: Synthetic oligonucleotide
  Sense strand starting at position 3598 of SEQ ID NO: 317961
caccgaugacccgagucau

SEQ ID NO: 525946 - RNA, 19 nt, Artificial Sequence
  Description of Artificial Sequence: Synthetic oligonucleotide
  Antisense strand to SEQ ID NO: 525945
augacucgggucaucggug

SEQ ID NO: 525947 - RNA, 19 nt, Artificial Sequence
  Description of Artificial Sequence: Synthetic oligonucleotide
  Sense strand starting at position 3610 of SEQ ID NO: 317961
gagucauugccgccgucuu

SEQ ID NO: 525948 - RNA, 19 nt, Artificial Sequence
  Description of Artificial Sequence: Synthetic oligonucleotide
  Antisense strand to SEQ ID NO: 525947
aagacggcggcaaugacuc

SEQ ID NO: 525949 - RNA, 19 nt, Artificial Sequence
  Description of Artificial Sequence: Synthetic oligonucleotide
  Sense strand starting at position 3626 of SEQ ID NO: 317961
cuuugaucuugcuuuauag

SEQ ID NO: 525950 - RNA, 19 nt, Artificial Sequence
  Description of Artificial Sequence: Synthetic oligonucleotide
  Antisense strand to SEQ ID NO: 525949
cuauaaagcaagaucaaag

SEQ ID NO: 525951 - RNA, 19 nt, Artificial Sequence
  Description of Artificial Sequence: Synthetic oligonucleotide
  Sense strand starting at position 3628 of SEQ ID NO: 317961
uugaucuugcuuuauagga

SEQ ID NO: 525952 - RNA, 19 nt, Artificial Sequence
  Description of Artificial Sequence: Synthetic oligonucleotide
  Antisense strand to SEQ ID NO: 525951
uccuauaaagcaagaucaa

SEQ ID NO: 525953 - RNA, 19 nt, Artificial Sequence
  Description of Artificial Sequence: Synthetic oligonucleotide
  Sense strand starting at position 3630 of SEQ ID NO: 317961
gaucuugcuuuauaggaag

SEQ ID NO: 525954 - RNA, 19 nt, Artificial Sequence
  Description of Artificial Sequence: Synthetic oligonucleotide
  Antisense strand to SEQ ID NO: 525953
cuuccuauaaagcaagauc

SEQ ID NO: 525955 - RNA, 19 nt, Artificial Sequence
  Description of Artificial Sequence: Synthetic oligonucleotide
  Sense strand starting at position 3696 of SEQ ID NO: 317961
gaaguaucuccuggcuaag

SEQ ID NO: 525956 - RNA, 19 nt, Artificial Sequence
  Description of Artificial Sequence: Synthetic oligonucleotide
  Antisense strand to SEQ ID NO: 525955
cuuagccaggagauacuuc

SEQ ID NO: 525957 - RNA, 19 nt, Artificial Sequence
  Description of Artificial Sequence: Synthetic oligonucleotide
  Sense strand starting at position 3698 of SEQ ID NO: 317961
aguaucuccuggcuaagaa

SEQ ID NO: 525958 - RNA, 19 nt, Artificial Sequence
  Description of Artificial Sequence: Synthetic oligonucleotide
  Antisense strand to SEQ ID NO: 525957
uucuuagccaggagauacu

SEQ ID NO: 525959 - RNA, 19 nt, Artificial Sequence
  Description of Artificial Sequence: Synthetic oligonucleotide
  Sense strand starting at position 3699 of SEQ ID NO: 317961
guaucuccuggcuaagaau

SEQ ID NO: 525960 - RNA, 19 nt, Artificial Sequence
  Description of Artificial Sequence: Synthetic oligonucleotide
  Antisense strand to SEQ ID NO: 525959
auucuuagccaggagauac

SEQ ID NO: 525961 - RNA, 19 nt, Artificial Sequence
  Description of Artificial Sequence: Synthetic oligonucleotide
  Sense strand starting at position 3750 of SEQ ID NO: 317961
uuuauuacuugugaaugga

SEQ ID NO: 525962 - RNA, 19 nt, Artificial Sequence
  Description of Artificial Sequence: Synthetic oligonucleotide
  Antisense strand to SEQ ID NO: 525961
uccauucacaaguaauaaa

SEQ ID NO: 525963 - RNA, 19 nt, Artificial Sequence
  Description of Artificial Sequence: Synthetic oligonucleotide
  Sense strand starting at position 3753 of SEQ ID NO: 317961
auuacuugugaauggaaug

SEQ ID NO: 525964 - RNA, 19 nt, Artificial Sequence
  Description of Artificial Sequence: Synthetic oligonucleotide
  Antisense strand to SEQ ID NO: 525963
cauuccauucacaaguaau

SEQ ID NO: 525965 - RNA, 19 nt, Artificial Sequence
  Description of Artificial Sequence: Synthetic oligonucleotide
  Sense strand starting at position 3759 of SEQ ID NO: 317961
ugugaauggaauggguaua

SEQ ID NO: 525966 - RNA, 19 nt, Artificial Sequence
  Description of Artificial Sequence: Synthetic oligonucleotide
  Antisense strand to SEQ ID NO: 525965
uauacccauuccauucaca

SEQ ID NO: 525967 - RNA, 19 nt, Artificial Sequence
  Description of Artificial Sequence: Synthetic oligonucleotide
  Sense strand starting at position 3760 of SEQ ID NO: 317961
gugaauggaauggguauau

SEQ ID NO: 525968 - RNA, 19 nt, Artificial Sequence
  Description of Artificial Sequence: Synthetic oligonucleotide
  Antisense strand to SEQ ID NO: 525967
auauacccauuccauucac

SEQ ID NO: 525969 - RNA, 19 nt, Artificial Sequence
  Description of Artificial Sequence: Synthetic oligonucleotide
  Sense strand starting at position 3885 of SEQ ID NO: 317961
agagaacaguucugaguaa

SEQ ID NO: 525970 - RNA, 19 nt, Artificial Sequence
  Description of Artificial Sequence: Synthetic oligonucleotide
  Antisense strand to SEQ ID NO: 525969
uuacucagaacuguucucu

SEQ ID NO: 525971 - RNA, 19 nt, Artificial Sequence
  Description of Artificial Sequence: Synthetic oligonucleotide
  Sense strand starting at position 3886 of SEQ ID NO: 317961
gagaacaguucugaguaag

SEQ ID NO: 525972 - RNA, 19 nt, Artificial Sequence
  Description of Artificial Sequence: Synthetic oligonucleotide
  Antisense strand to SEQ ID NO: 525971
cuuacucagaacuguucuc

SEQ ID NO: 525973 - RNA, 19 nt, Artificial Sequence
  Description of Artificial Sequence: Synthetic oligonucleotide
  Sense strand starting at position 3892 of SEQ ID NO: 317961
aguucugaguaagagcaua

SEQ ID NO: 525974 - RNA, 19 nt, Artificial Sequence
  Description of Artificial Sequence: Synthetic oligonucleotide
  Antisense strand to SEQ ID NO: 525973
uaugcucuuacucagaacu

SEQ ID NO: 525975 - RNA, 19 nt, Artificial Sequence
  Description of Artificial Sequence: Synthetic oligonucleotide
  Sense strand starting at position 3905 of SEQ ID NO: 317961
agcauaaacucaggaguca

SEQ ID NO: 525976 - RNA, 19 nt, Artificial Sequence
  Description of Artificial Sequence: Synthetic oligonucleotide
  Antisense strand to SEQ ID NO: 525975
ugacuccugaguuuaugcu

SEQ ID NO: 525977 - RNA, 19 nt, Artificial Sequence
  Description of Artificial Sequence: Synthetic oligonucleotide
  Sense strand starting at position 3973 of SEQ ID NO: 317961
caagcaacgguuugagauu

SEQ ID NO: 525978 - RNA, 19 nt, Artificial Sequence
  Description of Artificial Sequence: Synthetic oligonucleotide
  Antisense strand to SEQ ID NO: 525977
aaucucaaaccguugcuug

SEQ ID NO: 525979 - RNA, 19 nt, Artificial Sequence
  Description of Artificial Sequence: Synthetic oligonucleotide
  Sense strand starting at position 3982 of SEQ ID NO: 317961
guuugagauucugcuuccu

SEQ ID NO: 525980 - RNA, 19 nt, Artificial Sequence
  Description of Artificial Sequence: Synthetic oligonucleotide
  Antisense strand to SEQ ID NO: 525979
aggaagcagaaucucaaac

SEQ ID NO: 525981 - RNA, 19 nt, Artificial Sequence
  Description of Artificial Sequence: Synthetic oligonucleotide
  Sense strand starting at position 2 of SEQ ID NO: 317962
gcuuacuauccucauagga

SEQ ID NO: 525982 - RNA, 19 nt, Artificial Sequence
  Description of Artificial Sequence: Synthetic oligonucleotide
  Antisense strand to SEQ ID NO: 525981
uccuaugaggauaguaagc

SEQ ID NO: 525983 - RNA, 19 nt, Artificial Sequence
  Description of Artificial Sequence: Synthetic oligonucleotide
  Sense strand starting at position 160 of SEQ ID NO: 317962
acugucaggcugugaugua

SEQ ID NO: 525984 - RNA, 19 nt, Artificial Sequence
  Description of Artificial Sequence: Synthetic oligonucleotide
  Antisense strand to SEQ ID NO: 525983
uacaucacagccugacagu

SEQ ID NO: 525985 - RNA, 19 nt, Artificial Sequence
  Description of Artificial Sequence: Synthetic oligonucleotide
  Sense strand starting at position 256 of SEQ ID NO: 317962
gagucucagcugggacaaa

SEQ ID NO: 525986 - RNA, 19 nt, Artificial Sequence
  Description of Artificial Sequence: Synthetic oligonucleotide
  Antisense strand to SEQ ID NO: 525985
uuugucccagcugagacuc

SEQ ID NO: 525987 - RNA, 19 nt, Artificial Sequence
  Description of Artificial Sequence: Synthetic oligonucleotide
  Sense strand starting at position 857 of SEQ ID NO: 317962
gcaagucugccaugucaug

SEQ ID NO: 525988 - RNA, 19 nt, Artificial Sequence
  Description of Artificial Sequence: Synthetic oligonucleotide
  Antisense strand to SEQ ID NO: 525987
caugacauggcagacuugc

SEQ ID NO: 525989 - RNA, 19 nt, Artificial Sequence
  Description of Artificial Sequence: Synthetic oligonucleotide
  Sense strand starting at position 955 of SEQ ID NO: 317962
cugccuaucucuuugguca

SEQ ID NO: 525990 - RNA, 19 nt, Artificial Sequence
  Description of Artificial Sequence: Synthetic oligonucleotide
  Antisense strand to SEQ ID NO: 525989
ugaccaaagagauaggcag

SEQ ID NO: 525991 - RNA, 19 nt, Artificial Sequence
  Description of Artificial Sequence: Synthetic oligonucleotide
  Sense strand starting at position 1122 of SEQ ID NO: 317962
gucggauccuccuugguaa

SEQ ID NO: 525992 - RNA, 19 nt, Artificial Sequence
  Description of Artificial Sequence: Synthetic oligonucleotide
  Antisense strand to SEQ ID NO: 525991
uuaccaaggaggauccgac

SEQ ID NO: 525993 - RNA, 19 nt, Artificial Sequence
  Description of Artificial Sequence: Synthetic oligonucleotide
  Sense strand starting at position 1123 of SEQ ID NO: 317962
ucggauccuccuugguaaa

SEQ ID NO: 525994 - RNA, 19 nt, Artificial Sequence
  Description of Artificial Sequence: Synthetic oligonucleotide
  Antisense strand to SEQ ID NO: 525993
uuuaccaaggaggauccga

SEQ ID NO: 525995 - RNA, 19 nt, Artificial Sequence
  Description of Artificial Sequence: Synthetic oligonucleotide
  Sense strand starting at position 1169 of SEQ ID NO: 317962
gagggcagcucuuugggua

SEQ ID NO: 525996 - RNA, 19 nt, Artificial Sequence
  Description of Artificial Sequence: Synthetic oligonucleotide
  Antisense strand to SEQ ID NO: 525995
uacccaaagagcugcccuc

SEQ ID NO: 525997 - RNA, 19 nt, Artificial Sequence
  Description of Artificial Sequence: Synthetic oligonucleotide
  Sense strand starting at position 1173 of SEQ ID NO: 317962
gcagcucuuuggguacaca

SEQ ID NO: 525998 - RNA, 19 nt, Artificial Sequence
  Description of Artificial Sequence: Synthetic oligonucleotide
  Antisense strand to SEQ ID NO: 525997
uguguacccaaagagcugc

SEQ ID NO: 525999 - RNA, 19 nt, Artificial Sequence
  Description of Artificial Sequence: Synthetic oligonucleotide
  Sense strand starting at position 1239 of SEQ ID NO: 317962
ccaggcugcccugauauca

SEQ ID NO: 526000 - RNA, 19 nt, Artificial Sequence
  Description of Artificial Sequence: Synthetic oligonucleotide
  Antisense strand to SEQ ID NO: 525999
ugauaucagggcagccugg

SEQ ID NO: 526001 - RNA, 19 nt, Artificial Sequence
  Description of Artificial Sequence: Synthetic oligonucleotide
  Sense strand starting at position 1394 of SEQ ID NO: 317962
gcacuaagugacugaacuu

SEQ ID NO: 526002 - RNA, 19 nt, Artificial Sequence
  Description of Artificial Sequence: Synthetic oligonucleotide
  Antisense strand to SEQ ID NO: 526001
aaguucagucacuuagugc

SEQ ID NO: 526003 - RNA, 19 nt, Artificial Sequence
  Description of Artificial Sequence: Synthetic oligonucleotide
  Sense strand starting at position 1567 of SEQ ID NO: 317962
cucggugggcaaugaguaa

SEQ ID NO: 526004 - RNA, 19 nt, Artificial Sequence
  Description of Artificial Sequence: Synthetic oligonucleotide
  Antisense strand to SEQ ID NO: 526003
uuacucauugcccaccgag

SEQ ID NO: 526005 - RNA, 19 nt, Artificial Sequence
  Description of Artificial Sequence: Synthetic oligonucleotide
  Sense strand starting at position 2440 of SEQ ID NO: 317962
ucauuuguucccugcgcaa

SEQ ID NO: 526006 - RNA, 19 nt, Artificial Sequence
  Description of Artificial Sequence: Synthetic oligonucleotide
  Antisense strand to SEQ ID NO: 526005
uugcgcagggaacaaauga

SEQ ID NO: 526007 - RNA, 19 nt, Artificial Sequence
  Description of Artificial Sequence: Synthetic oligonucleotide
  Sense strand starting at position 2454 of SEQ ID NO: 317962
cgcaaccugcggagugaua

SEQ ID NO: 526008 - RNA, 19 nt, Artificial Sequence
  Description of Artificial Sequence: Synthetic oligonucleotide
  Antisense strand to SEQ ID NO: 526007
uaucacuccgcagguugcg

SEQ ID NO: 526009 - RNA, 19 nt, Artificial Sequence
  Description of Artificial Sequence: Synthetic oligonucleotide
  Sense strand starting at position 2625 of SEQ ID NO: 317962
uggcccuuggucugguuaa

SEQ ID NO: 526010 - RNA, 19 nt, Artificial Sequence
  Description of Artificial Sequence: Synthetic oligonucleotide
  Antisense strand to SEQ ID NO: 526009
uuaaccagaccaagggcca

SEQ ID NO: 526011 - RNA, 19 nt, Artificial Sequence
  Description of Artificial Sequence: Synthetic oligonucleotide
  Sense strand starting at position 2688 of SEQ ID NO: 317962
cuugcaagcuccucuuaga

SEQ ID NO: 526012 - RNA, 19 nt, Artificial Sequence
  Description of Artificial Sequence: Synthetic oligonucleotide
  Antisense strand to SEQ ID NO: 526011
ucuaagaggagcuugcaag

SEQ ID NO: 526013 - RNA, 19 nt, Artificial Sequence
  Description of Artificial Sequence: Synthetic oligonucleotide
  Sense strand starting at position 2709 of SEQ ID NO: 317962
acgucucuacugugaggau

SEQ ID NO: 526014 - RNA, 19 nt, Artificial Sequence
  Description of Artificial Sequence: Synthetic oligonucleotide
  Antisense strand to SEQ ID NO: 526013
auccucacaguagagacgu

SEQ ID NO: 526015 - RNA, 19 nt, Artificial Sequence
  Description of Artificial Sequence: Synthetic oligonucleotide
  Sense strand starting at position 2742 of SEQ ID NO: 317962
ggugaagugguucagagca

SEQ ID NO: 526016 - RNA, 19 nt, Artificial Sequence
  Description of Artificial Sequence: Synthetic oligonucleotide
  Antisense strand to SEQ ID NO: 526015
ugcucugaaccacuucacc

SEQ ID NO: 526017 - RNA, 19 nt, Artificial Sequence
  Description of Artificial Sequence: Synthetic oligonucleotide
  Sense strand starting at position 2885 of SEQ ID NO: 317962
guagacauguuagcaguau

SEQ ID NO: 526018 - RNA, 19 nt, Artificial Sequence
  Description of Artificial Sequence: Synthetic oligonucleotide
  Antisense strand to SEQ ID NO: 526017
auacugcuaacaugucuac

SEQ ID NO: 526019 - RNA, 19 nt, Artificial Sequence
  Description of Artificial Sequence: Synthetic oligonucleotide
  Sense strand starting at position 2889 of SEQ ID NO: 317962
acauguuagcaguaugugu

SEQ ID NO: 526020 - RNA, 19 nt, Artificial Sequence
  Description of Artificial Sequence: Synthetic oligonucleotide
  Antisense strand to SEQ ID NO: 526019
acacauacugcuaacaugu

SEQ ID NO: 526021 - RNA, 19 nt, Artificial Sequence
  Description of Artificial Sequence: Synthetic oligonucleotide
  Sense strand starting at position 2891 of SEQ ID NO: 317962
auguuagcaguauguguaa

SEQ ID NO: 526022 - RNA, 19 nt, Artificial Sequence
  Description of Artificial Sequence: Synthetic oligonucleotide
  Antisense strand to SEQ ID NO: 526021
uuacacauacugcuaacau

SEQ ID NO: 526023 - RNA, 19 nt, Artificial Sequence
  Description of Artificial Sequence: Synthetic oligonucleotide
  Sense strand starting at position 2931 of SEQ ID NO: 317962
uuguaauacuagcuguaau

SEQ ID NO: 526024 - RNA, 19 nt, Artificial Sequence
  Description of Artificial Sequence: Synthetic oligonucleotide
  Antisense strand to SEQ ID NO: 526023
auuacagcuaguauuacaa

SEQ ID NO: 526025 - RNA, 19 nt, Artificial Sequence
  Description of Artificial Sequence: Synthetic oligonucleotide
  Sense strand starting at position 2945 of SEQ ID NO: 317962
guaauuauuuaggaccugu

SEQ ID NO: 526026 - RNA, 19 nt, Artificial Sequence
  Description of Artificial Sequence: Synthetic oligonucleotide
  Antisense strand to SEQ ID NO: 526025
acagguccuaaauaauuac

SEQ ID NO: 526027 - RNA, 19 nt, Artificial Sequence
  Description of Artificial Sequence: Synthetic oligonucleotide
  Sense strand starting at position 2971 of SEQ ID NO: 317962
ucagcacgcuugccagaau

SEQ ID NO: 526028 - RNA, 19 nt, Artificial Sequence
  Description of Artificial Sequence: Synthetic oligonucleotide
  Antisense strand to SEQ ID NO: 526027
auucuggcaagcgugcuga

SEQ ID NO: 526029 - RNA, 19 nt, Artificial Sequence
  Description of Artificial Sequence: Synthetic oligonucleotide
  Sense strand starting at position 2974 of SEQ ID NO: 317962
gcacgcuugccagaauugu

SEQ ID NO: 526030 - RNA, 19 nt, Artificial Sequence
  Description of Artificial Sequence: Synthetic oligonucleotide
  Antisense strand to SEQ ID NO: 526029
acaauucuggcaagcgugc

SEQ ID NO: 526031 - RNA, 19 nt, Artificial Sequence
  Description of Artificial Sequence: Synthetic oligonucleotide
  Sense strand starting at position 2995 of SEQ ID NO: 317962
cugaacaguuaauuaugua

SEQ ID NO: 526032 - RNA, 19 nt, Artificial Sequence
  Description of Artificial Sequence: Synthetic oligonucleotide
  Antisense strand to SEQ ID NO: 526031
uacauaauuaacuguucag

SEQ ID NO: 526033 - RNA, 19 nt, Artificial Sequence
  Description of Artificial Sequence: Synthetic oligonucleotide
  Sense strand starting at position 3010 of SEQ ID NO: 317962
uguaaauagcuguggaaug

SEQ ID NO: 526034 - RNA, 19 nt, Artificial Sequence
  Description of Artificial Sequence: Synthetic oligonucleotide
  Antisense strand to SEQ ID NO: 526033
cauuccacagcuauuuaca

SEQ ID NO: 526035 - RNA, 19 nt, Artificial Sequence
  Description of Artificial Sequence: Synthetic oligonucleotide
  Sense strand starting at position 3054 of SEQ ID NO: 317962
aguucuaguuacuaggaga

SEQ ID NO: 526036 - RNA, 19 nt, Artificial Sequence
  Description of Artificial Sequence: Synthetic oligonucleotide
  Antisense strand to SEQ ID NO: 526035
ucuccuaguaacuagaacu

SEQ ID NO: 526037 - RNA, 19 nt, Artificial Sequence
  Description of Artificial Sequence: Synthetic oligonucleotide
  Sense strand starting at position 3153 of SEQ ID NO: 317962
gaggaacuguguccucaga

SEQ ID NO: 526038 - RNA, 19 nt, Artificial Sequence
  Description of Artificial Sequence: Synthetic oligonucleotide
  Antisense strand to SEQ ID NO: 526037
ucugaggacacaguuccuc

SEQ ID NO: 526039 - RNA, 19 nt, Artificial Sequence
  Description of Artificial Sequence: Synthetic oligonucleotide
  Sense strand starting at position 3189 of SEQ ID NO: 317962
aagugucuggcauacagua

SEQ ID NO: 526040 - RNA, 19 nt, Artificial Sequence
  Description of Artificial Sequence: Synthetic oligonucleotide
  Antisense strand to SEQ ID NO: 526039
uacuguaugccagacacuu

SEQ ID NO: 526041 - RNA, 19 nt, Artificial Sequence
  Description of Artificial Sequence: Synthetic oligonucleotide
  Sense strand starting at position 3242 of SEQ ID NO: 317962
auguuugccucaccuguaa

SEQ ID NO: 526042 - RNA, 19 nt, Artificial Sequence
  Description of Artificial Sequence: Synthetic oligonucleotide
  Antisense strand to SEQ ID NO: 526041
uuacaggugaggcaaacau

SEQ ID NO: 526043 - RNA, 19 nt, Artificial Sequence
  Description of Artificial Sequence: Synthetic oligonucleotide
  Sense strand starting at position 3311 of SEQ ID NO: 317962
gccucugaucucugcccau

SEQ ID NO: 526044 - RNA, 19 nt, Artificial Sequence
  Description of Artificial Sequence: Synthetic oligonucleotide
  Antisense strand to SEQ ID NO: 526043
augggcagagaucagaggc

SEQ ID NO: 526045 - RNA, 19 nt, Artificial Sequence
  Description of Artificial Sequence: Synthetic oligonucleotide
  Sense strand starting at position 3563 of SEQ ID NO: 317962
uaguguagacccugucuua

SEQ ID NO: 526046 - RNA, 19 nt, Artificial Sequence
  Description of Artificial Sequence: Synthetic oligonucleotide
  Antisense strand to SEQ ID NO: 526045
uaagacagggucuacacua

SEQ ID NO: 526047 - RNA, 19 nt, Artificial Sequence
  Description of Artificial Sequence: Synthetic oligonucleotide
  Sense strand starting at position 3566 of SEQ ID NO: 317962
uguagacccugucuuaaga

SEQ ID NO: 526048 - RNA, 19 nt, Artificial Sequence
  Description of Artificial Sequence: Synthetic oligonucleotide
  Antisense strand to SEQ ID NO: 526047
ucuuaagacagggucuaca

SEQ ID NO: 526049 - RNA, 19 nt, Artificial Sequence
  Description of Artificial Sequence: Synthetic oligonucleotide
  Sense strand starting at position 3598 of SEQ ID NO: 317962
cucauuguuacgcaggcaa

SEQ ID NO: 526050 - RNA, 19 nt, Artificial Sequence
  Description of Artificial Sequence: Synthetic oligonucleotide
  Antisense strand to SEQ ID NO: 526049
uugccugcguaacaaugag

SEQ ID NO: 526051 - RNA, 19 nt, Artificial Sequence
  Description of Artificial Sequence: Synthetic oligonucleotide
  Sense strand starting at position 3600 of SEQ ID NO: 317962
cauuguuacgcaggcaagu

SEQ ID NO: 526052 - RNA, 19 nt, Artificial Sequence
  Description of Artificial Sequence: Synthetic oligonucleotide
  Antisense strand to SEQ ID NO: 526051
acuugccugcguaacaaug

SEQ ID NO: 526053 - RNA, 19 nt, Artificial Sequence
  Description of Artificial Sequence: Synthetic oligonucleotide
  Sense strand starting at position 3646 of SEQ ID NO: 317962
gggauaguggcauaucuuu

SEQ ID NO: 526054 - RNA, 19 nt, Artificial Sequence
  Description of Artificial Sequence: Synthetic oligonucleotide
  Antisense strand to SEQ ID NO: 526053
aaagauaugccacuauccc

SEQ ID NO: 526055 - RNA, 19 nt, Artificial Sequence
  Description of Artificial Sequence: Synthetic oligonucleotide
  Sense strand starting at position 3651 of SEQ ID NO: 317962
aguggcauaucuuugcaua

SEQ ID NO: 526056 - RNA, 19 nt, Artificial Sequence
  Description of Artificial Sequence: Synthetic oligonucleotide
  Antisense strand to SEQ ID NO: 526055
uaugcaaagauaugccacu

SEQ ID NO: 526057 - RNA, 19 nt, Artificial Sequence
  Description of Artificial Sequence: Synthetic oligonucleotide
  Sense strand starting at position 3652 of SEQ ID NO: 317962
guggcauaucuuugcauaa

SEQ ID NO: 526058 - RNA, 19 nt, Artificial Sequence
  Description of Artificial Sequence: Synthetic oligonucleotide
  Antisense strand to SEQ ID NO: 526057
uuaugcaaagauaugccac

SEQ ID NO: 526059 - RNA, 19 nt, Artificial Sequence
  Description of Artificial Sequence: Synthetic oligonucleotide
  Sense strand starting at position 3653 of SEQ ID NO: 317962
uggcauaucuuugcauaac

SEQ ID NO: 526060 - RNA, 19 nt, Artificial Sequence
  Description of Artificial Sequence: Synthetic oligonucleotide
  Antisense strand to SEQ ID NO: 526059
guuaugcaaagauaugcca

SEQ ID NO: 526061 - RNA, 19 nt, Artificial Sequence
  Description of Artificial Sequence: Synthetic oligonucleotide
  Sense strand starting at position 108 of SEQ ID NO: 317963
acccuugccuucucugaga

SEQ ID NO: 526062 - RNA, 19 nt, Artificial Sequence
  Description of Artificial Sequence: Synthetic oligonucleotide
  Antisense strand to SEQ ID NO: 526061
ucucagagaaggcaagggu

SEQ ID NO: 526063 - RNA, 19 nt, Artificial Sequence
  Description of Artificial Sequence: Synthetic oligonucleotide
  Sense strand starting at position 204 of SEQ ID NO: 317963
ccaaccagucagugauucu

SEQ ID NO: 526064 - RNA, 19 nt, Artificial Sequence
  Description of Artificial Sequence: Synthetic oligonucleotide
  Antisense strand to SEQ ID NO: 526063
agaaucacugacugguugg

SEQ ID NO: 526065 - RNA, 19 nt, Artificial Sequence
  Description of Artificial Sequence: Synthetic oligonucleotide
  Sense strand starting at position 211 of SEQ ID NO: 317963
gucagugauucuucucccu

SEQ ID NO: 526066 - RNA, 19 nt, Artificial Sequence
  Description of Artificial Sequence: Synthetic oligonucleotide
  Antisense strand to SEQ ID NO: 526065
agggagaagaaucacugac

SEQ ID NO: 526067 - RNA, 19 nt, Artificial Sequence
  Description of Artificial Sequence: Synthetic oligonucleotide
  Sense strand starting at position 214 of SEQ ID NO: 317963
agugauucuucucccuuua

SEQ ID NO: 526068 - RNA, 19 nt, Artificial Sequence
  Description of Artificial Sequence: Synthetic oligonucleotide
  Antisense strand to SEQ ID NO: 526067
uaaagggagaagaaucacu

SEQ ID NO: 526069 - RNA, 19 nt, Artificial Sequence
  Description of Artificial Sequence: Synthetic oligonucleotide
  Sense strand starting at position 262 of SEQ ID NO: 317963
agucacuugccagagagua

SEQ ID NO: 526070 - RNA, 19 nt, Artificial Sequence
  Description of Artificial Sequence: Synthetic oligonucleotide
  Antisense strand to SEQ ID NO: 526069
uacucucuggcaagugacu

SEQ ID NO: 526071 - RNA, 19 nt, Artificial Sequence
  Description of Artificial Sequence: Synthetic oligonucleotide
  Sense strand starting at position 355 of SEQ ID NO: 317963
ucgauugauuuauagguau

SEQ ID NO: 526072 - RNA, 19 nt, Artificial Sequence
  Description of Artificial Sequence: Synthetic oligonucleotide
  Antisense strand to SEQ ID NO: 526071
auaccuauaaaucaaucga

SEQ ID NO: 526073 - RNA, 19 nt, Artificial Sequence
  Description of Artificial Sequence: Synthetic oligonucleotide
  Sense strand starting at position 361 of SEQ ID NO: 317963
gauuuauagguaugcuugu

SEQ ID NO: 526074 - RNA, 19 nt, Artificial Sequence
  Description of Artificial Sequence: Synthetic oligonucleotide
  Antisense strand to SEQ ID NO: 526073
acaagcauaccuauaaauc

SEQ ID NO: 526075 - RNA, 19 nt, Artificial Sequence
  Description of Artificial Sequence: Synthetic oligonucleotide
  Sense strand starting at position 362 of SEQ ID NO: 317963
auuuauagguaugcuugua

SEQ ID NO: 526076 - RNA, 19 nt, Artificial Sequence
  Description of Artificial Sequence: Synthetic oligonucleotide
  Antisense strand to SEQ ID NO: 526075
uacaagcauaccuauaaau

SEQ ID NO: 526077 - RNA, 19 nt, Artificial Sequence
  Description of Artificial Sequence: Synthetic oligonucleotide
  Sense strand starting at position 434 of SEQ ID NO: 317963
cccagagacucacccgaau

SEQ ID NO: 526078 - RNA, 19 nt, Artificial Sequence
  Description of Artificial Sequence: Synthetic oligonucleotide
  Antisense strand to SEQ ID NO: 526077
auucgggugagucucuggg

SEQ ID NO: 526079 - RNA, 19 nt, Artificial Sequence
  Description of Artificial Sequence: Synthetic oligonucleotide
  Sense strand starting at position 635 of SEQ ID NO: 317963
cuagaaugaccguguguuc

SEQ ID NO: 526080 - RNA, 19 nt, Artificial Sequence
  Description of Artificial Sequence: Synthetic oligonucleotide
  Antisense strand to SEQ ID NO: 526079
gaacacacggucauucuag

SEQ ID NO: 526081 - RNA, 19 nt, Artificial Sequence
  Description of Artificial Sequence: Synthetic oligonucleotide
  Sense strand starting at position 642 of SEQ ID NO: 317963
gaccguguguucccacaca

SEQ ID NO: 526082 - RNA, 19 nt, Artificial Sequence
  Description of Artificial Sequence: Synthetic oligonucleotide
  Antisense strand to SEQ ID NO: 526081
ugugugggaacacacgguc

SEQ ID NO: 526083 - RNA, 19 nt, Artificial Sequence
  Description of Artificial Sequence: Synthetic oligonucleotide
  Sense strand starting at position 664 of SEQ ID NO: 317963
cuccucuucucagugauca

SEQ ID NO: 526084 - RNA, 19 nt, Artificial Sequence
  Description of Artificial Sequence: Synthetic oligonucleotide
  Antisense strand to SEQ ID NO: 526083
ugaucacugagaagaggag

SEQ ID NO: 526085 - RNA, 19 nt, Artificial Sequence
  Description of Artificial Sequence: Synthetic oligonucleotide
  Sense strand starting at position 665 of SEQ ID NO: 317963
uccucuucucagugaucag

SEQ ID NO: 526086 - RNA, 19 nt, Artificial Sequence
  Description of Artificial Sequence: Synthetic oligonucleotide
  Antisense strand to SEQ ID NO: 526085
cugaucacugagaagagga

SEQ ID NO: 526087 - RNA, 19 nt, Artificial Sequence
  Description of Artificial Sequence: Synthetic oligonucleotide
  Sense strand starting at position 668 of SEQ ID NO: 317963
ucuucucagugaucagaug

SEQ ID NO: 526088 - RNA, 19 nt, Artificial Sequence
  Description of Artificial Sequence: Synthetic oligonucleotide
  Antisense strand to SEQ ID NO: 526087
caucugaucacugagaaga

SEQ ID NO: 526089 - RNA, 19 nt, Artificial Sequence
  Description of Artificial Sequence: Synthetic oligonucleotide
  Sense strand starting at position 881 of SEQ ID NO: 317963
cugcuagagucucuuacca

SEQ ID NO: 526090 - RNA, 19 nt, Artificial Sequence
  Description of Artificial Sequence: Synthetic oligonucleotide
  Antisense strand to SEQ ID NO: 526089
ugguaagagacucuagcag

SEQ ID NO: 526091 - RNA, 19 nt, Artificial Sequence
  Description of Artificial Sequence: Synthetic oligonucleotide
  Sense strand starting at position 1209 of SEQ ID NO: 317963
gcagccuccuguguacaaa

SEQ ID NO: 526092 - RNA, 19 nt, Artificial Sequence
  Description of Artificial Sequence: Synthetic oligonucleotide
  Antisense strand to SEQ ID NO: 526091
uuuguacacaggaggcugc

SEQ ID NO: 526093 - RNA, 19 nt, Artificial Sequence
  Description of Artificial Sequence: Synthetic oligonucleotide
  Sense strand starting at position 1212 of SEQ ID NO: 317963
gccuccuguguacaaagaa

SEQ ID NO: 526094 - RNA, 19 nt, Artificial Sequence
  Description of Artificial Sequence: Synthetic oligonucleotide
  Antisense strand to SEQ ID NO: 526093
uucuuuguacacaggaggc

SEQ ID NO: 526095 - RNA, 19 nt, Artificial Sequence
  Description of Artificial Sequence: Synthetic oligonucleotide
  Sense strand starting at position 1330 of SEQ ID NO: 317963
gggcaaaugccacacucuu

SEQ ID NO: 526096 - RNA, 19 nt, Artificial Sequence
  Description of Artificial Sequence: Synthetic oligonucleotide
  Antisense strand to SEQ ID NO: 526095
aagaguguggcauuugccc

SEQ ID NO: 526097 - RNA, 19 nt, Artificial Sequence
  Description of Artificial Sequence: Synthetic oligonucleotide
  Sense strand starting at position 1653 of SEQ ID NO: 317963
gccaguccucucucgcaga

SEQ ID NO: 526098 - RNA, 19 nt, Artificial Sequence
  Description of Artificial Sequence: Synthetic oligonucleotide
  Antisense strand to SEQ ID NO: 526097
ucugcgagagaggacuggc

SEQ ID NO: 526099 - RNA, 19 nt, Artificial Sequence
  Description of Artificial Sequence: Synthetic oligonucleotide
  Sense strand starting at position 1666 of SEQ ID NO: 317963
cgcagacacagugauagau

SEQ ID NO: 526100 - RNA, 19 nt, Artificial Sequence
  Description of Artificial Sequence: Synthetic oligonucleotide
  Antisense strand to SEQ ID NO: 526099
aucuaucacugugucugcg

SEQ ID NO: 526101 - RNA, 19 nt, Artificial Sequence
  Description of Artificial Sequence: Synthetic oligonucleotide
  Sense strand starting at position 1682 of SEQ ID NO: 317963
gaugaaugcuugcuggaag

SEQ ID NO: 526102 - RNA, 19 nt, Artificial Sequence
  Description of Artificial Sequence: Synthetic oligonucleotide
  Antisense strand to SEQ ID NO: 526101
cuuccagcaagcauucauc

SEQ ID NO: 526103 - RNA, 19 nt, Artificial Sequence
  Description of Artificial Sequence: Synthetic oligonucleotide
  Sense strand starting at position 1710 of SEQ ID NO: 317963
gacugagucucagugguug

SEQ ID NO: 526104 - RNA, 19 nt, Artificial Sequence
  Description of Artificial Sequence: Synthetic oligonucleotide
  Antisense strand to SEQ ID NO: 526103
caaccacugagacucaguc

SEQ ID NO: 526105 - RNA, 19 nt, Artificial Sequence
  Description of Artificial Sequence: Synthetic oligonucleotide
  Sense strand starting at position 2143 of SEQ ID NO: 317963
uggaaccagcucuguagua

SEQ ID NO: 526106 - RNA, 19 nt, Artificial Sequence
  Description of Artificial Sequence: Synthetic oligonucleotide
  Antisense strand to SEQ ID NO: 526105
uacuacagagcugguucca

SEQ ID NO: 526107 - RNA, 19 nt, Artificial Sequence
  Description of Artificial Sequence: Synthetic oligonucleotide
  Sense strand starting at position 2318 of SEQ ID NO: 317963
gcaugcucucggcacacau

SEQ ID NO: 526108 - RNA, 19 nt, Artificial Sequence
  Description of Artificial Sequence: Synthetic oligonucleotide
  Antisense strand to SEQ ID NO: 526107
augugugccgagagcaugc

SEQ ID NO: 526109 - RNA, 19 nt, Artificial Sequence
  Description of Artificial Sequence: Synthetic oligonucleotide
  Sense strand starting at position 2358 of SEQ ID NO: 317963
augaauugauugcagaaga

SEQ ID NO: 526110 - RNA, 19 nt, Artificial Sequence
  Description of Artificial Sequence: Synthetic oligonucleotide
  Antisense strand to SEQ ID NO: 526109
ucuucugcaaucaauucau

SEQ ID NO: 526111 - RNA, 19 nt, Artificial Sequence
  Description of Artificial Sequence: Synthetic oligonucleotide
  Sense strand starting at position 2532 of SEQ ID NO: 317963
ccuggauaccucugcuugu

SEQ ID NO: 526112 - RNA, 19 nt, Artificial Sequence
  Description of Artificial Sequence: Synthetic oligonucleotide
  Antisense strand to SEQ ID NO: 526111
acaagcagagguauccagg

SEQ ID NO: 526113 - RNA, 19 nt, Artificial Sequence
  Description of Artificial Sequence: Synthetic oligonucleotide
  Sense strand starting at position 2533 of SEQ ID NO: 317963
cuggauaccucugcuuguu

SEQ ID NO: 526114 - RNA, 19 nt, Artificial Sequence
  Description of Artificial Sequence: Synthetic oligonucleotide
  Antisense strand to SEQ ID NO: 526113
aacaagcagagguauccag

SEQ ID NO: 526115 - RNA, 19 nt, Artificial Sequence
  Description of Artificial Sequence: Synthetic oligonucleotide
  Sense strand starting at position 2535 of SEQ ID NO: 317963
ggauaccucugcuuguuau

SEQ ID NO: 526116 - RNA, 19 nt, Artificial Sequence
  Description of Artificial Sequence: Synthetic oligonucleotide
  Antisense strand to SEQ ID NO: 526115
auaacaagcagagguaucc

SEQ ID NO: 526117 - RNA, 19 nt, Artificial Sequence
  Description of Artificial Sequence: Synthetic oligonucleotide
  Sense strand starting at position 2536 of SEQ ID NO: 317963
gauaccucugcuuguuaug

SEQ ID NO: 526118 - RNA, 19 nt, Artificial Sequence
  Description of Artificial Sequence: Synthetic oligonucleotide
  Antisense strand to SEQ ID NO: 526117
cauaacaagcagagguauc

SEQ ID NO: 526119 - RNA, 19 nt, Artificial Sequence
  Description of Artificial Sequence: Synthetic oligonucleotide
  Sense strand starting at position 2650 of SEQ ID NO: 317963
cuuguaauuccuugucucu

SEQ ID NO: 526120 - RNA, 19 nt, Artificial Sequence
  Description of Artificial Sequence: Synthetic oligonucleotide
  Antisense strand to SEQ ID NO: 526119
agagacaaggaauuacaag

SEQ ID NO: 526121 - RNA, 19 nt, Artificial Sequence
  Description of Artificial Sequence: Synthetic oligonucleotide
  Sense strand starting at position 2652 of SEQ ID NO: 317963
uguaauuccuugucucugu

SEQ ID NO: 526122 - RNA, 19 nt, Artificial Sequence
  Description of Artificial Sequence: Synthetic oligonucleotide
  Antisense strand to SEQ ID NO: 526121
acagagacaaggaauuaca

SEQ ID NO: 526123 - RNA, 19 nt, Artificial Sequence
  Description of Artificial Sequence: Synthetic oligonucleotide
  Sense strand starting at position 2680 of SEQ ID NO: 317963
gcuuacuauccucauagga

SEQ ID NO: 526124 - RNA, 19 nt, Artificial Sequence
  Description of Artificial Sequence: Synthetic oligonucleotide
  Antisense strand to SEQ ID NO: 526123
uccuaugaggauaguaagc

SEQ ID NO: 526125 - RNA, 19 nt, Artificial Sequence
  Description of Artificial Sequence: Synthetic oligonucleotide
  Sense strand starting at position 2838 of SEQ ID NO: 317963
acugucaggcugugaugua

SEQ ID NO: 526126 - RNA, 19 nt, Artificial Sequence
  Description of Artificial Sequence: Synthetic oligonucleotide
  Antisense strand to SEQ ID NO: 526125
uacaucacagccugacagu

SEQ ID NO: 526127 - RNA, 19 nt, Artificial Sequence
  Description of Artificial Sequence: Synthetic oligonucleotide
  Sense strand starting at position 2934 of SEQ ID NO: 317963
gagucucagcugggacaaa

SEQ ID NO: 526128 - RNA, 19 nt, Artificial Sequence
  Description of Artificial Sequence: Synthetic oligonucleotide
  Antisense strand to SEQ ID NO: 526127
uuugucccagcugagacuc

SEQ ID NO: 526129 - RNA, 19 nt, Artificial Sequence
  Description of Artificial Sequence: Synthetic oligonucleotide
  Sense strand starting at position 3633 of SEQ ID NO: 317963
cugccuaucucuuugguca

SEQ ID NO: 526130 - RNA, 19 nt, Artificial Sequence
  Description of Artificial Sequence: Synthetic oligonucleotide
  Antisense strand to SEQ ID NO: 526129
ugaccaaagagauaggcag

SEQ ID NO: 526131 - RNA, 19 nt, Artificial Sequence
  Description of Artificial Sequence: Synthetic oligonucleotide
  Sense strand starting at position 3800 of SEQ ID NO: 317963
gucggauccuccuugguaa

SEQ ID NO: 526132 - RNA, 19 nt, Artificial Sequence
  Description of Artificial Sequence: Synthetic oligonucleotide
  Antisense strand to SEQ ID NO: 526131
uuaccaaggaggauccgac

SEQ ID NO: 526133 - RNA, 19 nt, Artificial Sequence
  Description of Artificial Sequence: Synthetic oligonucleotide
  Sense strand starting at position 3801 of SEQ ID NO: 317963
ucggauccuccuugguaaa

SEQ ID NO: 526134 - RNA, 19 nt, Artificial Sequence
  Description of Artificial Sequence: Synthetic oligonucleotide
  Antisense strand to SEQ ID NO: 526133
uuuaccaaggaggauccga

SEQ ID NO: 526135 - RNA, 19 nt, Artificial Sequence
  Description of Artificial Sequence: Synthetic oligonucleotide
  Sense strand starting at position 3847 of SEQ ID NO: 317963
gagggcagcucuuugggua

SEQ ID NO: 526136 - RNA, 19 nt, Artificial Sequence
  Description of Artificial Sequence: Synthetic oligonucleotide
  Antisense strand to SEQ ID NO: 526135
uacccaaagagcugcccuc

SEQ ID NO: 526137 - RNA, 19 nt, Artificial Sequence
  Description of Artificial Sequence: Synthetic oligonucleotide
  Sense strand starting at position 3851 of SEQ ID NO: 317963
gcagcucuuuggguacaca

SEQ ID NO: 526138 - RNA, 19 nt, Artificial Sequence
  Description of Artificial Sequence: Synthetic oligonucleotide
  Antisense strand to SEQ ID NO: 526137
uguguacccaaagagcugc

SEQ ID NO: 526139 - RNA, 19 nt, Artificial Sequence
  Description of Artificial Sequence: Synthetic oligonucleotide
  Sense strand starting at position 3917 of SEQ ID NO: 317963
ccaggcugcccugauauca

SEQ ID NO: 526140 - RNA, 19 nt, Artificial Sequence
  Description of Artificial Sequence: Synthetic oligonucleotide
  Antisense strand to SEQ ID NO: 526139
ugauaucagggcagccugg

SEQ ID NO: 526141 - RNA, 19 nt, Artificial Sequence
  Description of Artificial Sequence: Synthetic oligonucleotide
  Sense strand starting at position 214 of SEQ ID NO: 317964
cuacuuacugcagggaaua

SEQ ID NO: 526142 - RNA, 19 nt, Artificial Sequence
  Description of Artificial Sequence: Synthetic oligonucleotide
  Antisense strand to SEQ ID NO: 526141
uauucccugcaguaaguag

SEQ ID NO: 526143 - RNA, 19 nt, Artificial Sequence
  Description of Artificial Sequence: Synthetic oligonucleotide
  Sense strand starting at position 227 of SEQ ID NO: 317964
ggaauagcuuccucacccu

SEQ ID NO: 526144 - RNA, 19 nt, Artificial Sequence
  Description of Artificial Sequence: Synthetic oligonucleotide
  Antisense strand to SEQ ID NO: 526143
agggugaggaagcuauucc

SEQ ID NO: 526145 - RNA, 19 nt, Artificial Sequence
  Description of Artificial Sequence: Synthetic oligonucleotide
  Sense strand starting at position 306 of SEQ ID NO: 317964
uccuuauaccugcagaaug

SEQ ID NO: 526146 - RNA, 19 nt, Artificial Sequence
  Description of Artificial Sequence: Synthetic oligonucleotide
  Antisense strand to SEQ ID NO: 526145
cauucugcagguauaagga

SEQ ID NO: 526147 - RNA, 19 nt, Artificial Sequence
  Description of Artificial Sequence: Synthetic oligonucleotide
  Sense strand starting at position 308 of SEQ ID NO: 317964
cuuauaccugcagaauguu

SEQ ID NO: 526148 - RNA, 19 nt, Artificial Sequence
  Description of Artificial Sequence: Synthetic oligonucleotide
  Antisense strand to SEQ ID NO: 526147
aacauucugcagguauaag

SEQ ID NO: 526149 - RNA, 19 nt, Artificial Sequence
  Description of Artificial Sequence: Synthetic oligonucleotide
  Sense strand starting at position 316 of SEQ ID NO: 317964
ugcagaauguucccuggau

SEQ ID NO: 526150 - RNA, 19 nt, Artificial Sequence
  Description of Artificial Sequence: Synthetic oligonucleotide
  Antisense strand to SEQ ID NO: 526149
auccagggaacauucugca

SEQ ID NO: 526151 - RNA, 19 nt, Artificial Sequence
  Description of Artificial Sequence: Synthetic oligonucleotide
  Sense strand starting at position 317 of SEQ ID NO: 317964
gcagaauguucccuggauc

SEQ ID NO: 526152 - RNA, 19 nt, Artificial Sequence
  Description of Artificial Sequence: Synthetic oligonucleotide
  Antisense strand to SEQ ID NO: 526151
gauccagggaacauucugc

SEQ ID NO: 526153 - RNA, 19 nt, Artificial Sequence
  Description of Artificial Sequence: Synthetic oligonucleotide
  Sense strand starting at position 320 of SEQ ID NO: 317964
gaauguucccuggaucccu

SEQ ID NO: 526154 - RNA, 19 nt, Artificial Sequence
  Description of Artificial Sequence: Synthetic oligonucleotide
  Antisense strand to SEQ ID NO: 526153
agggauccagggaacauuc

SEQ ID NO: 526155 - RNA, 19 nt, Artificial Sequence
  Description of Artificial Sequence: Synthetic oligonucleotide
  Sense strand starting at position 447 of SEQ ID NO: 317964
ccaugucuccuccaggaua

SEQ ID NO: 526156 - RNA, 19 nt, Artificial Sequence
  Description of Artificial Sequence: Synthetic oligonucleotide
  Antisense strand to SEQ ID NO: 526155
uauccuggaggagacaugg

SEQ ID NO: 526157 - RNA, 19 nt, Artificial Sequence
  Description of Artificial Sequence: Synthetic oligonucleotide
  Sense strand starting at position 449 of SEQ ID NO: 317964
augucuccuccaggauaag

SEQ ID NO: 526158 - RNA, 19 nt, Artificial Sequence
  Description of Artificial Sequence: Synthetic oligonucleotide
  Antisense strand to SEQ ID NO: 526157
cuuauccuggaggagacau

SEQ ID NO: 526159 - RNA, 19 nt, Artificial Sequence
  Description of Artificial Sequence: Synthetic oligonucleotide
  Sense strand starting at position 606 of SEQ ID NO: 317964
cucggaggcccagauagau

SEQ ID NO: 526160 - RNA, 19 nt, Artificial Sequence
  Description of Artificial Sequence: Synthetic oligonucleotide
  Antisense strand to SEQ ID NO: 526159
aucuaucugggccuccgag

SEQ ID NO: 526161 - RNA, 19 nt, Artificial Sequence
  Description of Artificial Sequence: Synthetic oligonucleotide
  Sense strand starting at position 759 of SEQ ID NO: 317964
ggaagugacacauguccuu

SEQ ID NO: 526162 - RNA, 19 nt, Artificial Sequence
  Description of Artificial Sequence: Synthetic oligonucleotide
  Antisense strand to SEQ ID NO: 526161
aaggacaugugucacuucc

SEQ ID NO: 526163 - RNA, 19 nt, Artificial Sequence
  Description of Artificial Sequence: Synthetic oligonucleotide
  Sense strand starting at position 765 of SEQ ID NO: 317964
gacacauguccuuggucua

SEQ ID NO: 526164 - RNA, 19 nt, Artificial Sequence
  Description of Artificial Sequence: Synthetic oligonucleotide
  Antisense strand to SEQ ID NO: 526163
uagaccaaggacauguguc

SEQ ID NO: 526165 - RNA, 19 nt, Artificial Sequence
  Description of Artificial Sequence: Synthetic oligonucleotide
  Sense strand starting at position 766 of SEQ ID NO: 317964
acacauguccuuggucuaa

SEQ ID NO: 526166 - RNA, 19 nt, Artificial Sequence
  Description of Artificial Sequence: Synthetic oligonucleotide
  Antisense strand to SEQ ID NO: 526165
uuagaccaaggacaugugu

SEQ ID NO: 526167 - RNA, 19 nt, Artificial Sequence
  Description of Artificial Sequence: Synthetic oligonucleotide
  Sense strand starting at position 778 of SEQ ID NO: 317964
ggucuaagcuucuccaugu

SEQ ID NO: 526168 - RNA, 19 nt, Artificial Sequence
  Description of Artificial Sequence: Synthetic oligonucleotide
  Antisense strand to SEQ ID NO: 526167
acauggagaagcuuagacc

SEQ ID NO: 526169 - RNA, 19 nt, Artificial Sequence
  Description of Artificial Sequence: Synthetic oligonucleotide
  Sense strand starting at position 807 of SEQ ID NO: 317964
ucugacacucccugugaga

SEQ ID NO: 526170 - RNA, 19 nt, Artificial Sequence
  Description of Artificial Sequence: Synthetic oligonucleotide
  Antisense strand to SEQ ID NO: 526169
ucucacagggagugucaga

SEQ ID NO: 526171 - RNA, 19 nt, Artificial Sequence
  Description of Artificial Sequence: Synthetic oligonucleotide
  Sense strand starting at position 809 of SEQ ID NO: 317964
ugacacucccugugagaau

SEQ ID NO: 526172 - RNA, 19 nt, Artificial Sequence
  Description of Artificial Sequence: Synthetic oligonucleotide
  Antisense strand to SEQ ID NO: 526171
auucucacagggaguguca

SEQ ID NO: 526173 - RNA, 19 nt, Artificial Sequence
  Description of Artificial Sequence: Synthetic oligonucleotide
  Sense strand starting at position 853 of SEQ ID NO: 317964
auuccuauggcgugcagaa

SEQ ID NO: 526174 - RNA, 19 nt, Artificial Sequence
  Description of Artificial Sequence: Synthetic oligonucleotide
  Antisense strand to SEQ ID NO: 526173
uucugcacgccauaggaau

SEQ ID NO: 526175 - RNA, 19 nt, Artificial Sequence
  Description of Artificial Sequence: Synthetic oligonucleotide
  Sense strand starting at position 855 of SEQ ID NO: 317964
uccuauggcgugcagaaau

SEQ ID NO: 526176 - RNA, 19 nt, Artificial Sequence
  Description of Artificial Sequence: Synthetic oligonucleotide
  Antisense strand to SEQ ID NO: 526175
auuucugcacgccauagga

SEQ ID NO: 526177 - RNA, 19 nt, Artificial Sequence
  Description of Artificial Sequence: Synthetic oligonucleotide
  Sense strand starting at position 1248 of SEQ ID NO: 317964
ccgcgauucgccuccucaa

SEQ ID NO: 526178 - RNA, 19 nt, Artificial Sequence
  Description of Artificial Sequence: Synthetic oligonucleotide
  Antisense strand to SEQ ID NO: 526177
uugaggaggcgaaucgcgg

SEQ ID NO: 526179 - RNA, 19 nt, Artificial Sequence
  Description of Artificial Sequence: Synthetic oligonucleotide
  Sense strand starting at position 1251 of SEQ ID NO: 317964
cgauucgccuccucaagau

SEQ ID NO: 526180 - RNA, 19 nt, Artificial Sequence
  Description of Artificial Sequence: Synthetic oligonucleotide
  Antisense strand to SEQ ID NO: 526179
aucuugaggaggcgaaucg

SEQ ID NO: 526181 - RNA, 19 nt, Artificial Sequence
  Description of Artificial Sequence: Synthetic oligonucleotide
  Sense strand starting at position 1260 of SEQ ID NO: 317964
uccucaagauucgucucaa

SEQ ID NO: 526182 - RNA, 19 nt, Artificial Sequence
  Description of Artificial Sequence: Synthetic oligonucleotide
  Antisense strand to SEQ ID NO: 526181
uugagacgaaucuugagga

SEQ ID NO: 526183 - RNA, 19 nt, Artificial Sequence
  Description of Artificial Sequence: Synthetic oligonucleotide
  Sense strand starting at position 1261 of SEQ ID NO: 317964
ccucaagauucgucucaag

SEQ ID NO: 526184 - RNA, 19 nt, Artificial Sequence
  Description of Artificial Sequence: Synthetic oligonucleotide
  Antisense strand to SEQ ID NO: 526183
cuugagacgaaucuugagg

SEQ ID NO: 526185 - RNA, 19 nt, Artificial Sequence
  Description of Artificial Sequence: Synthetic oligonucleotide
  Sense strand starting at position 2269 of SEQ ID NO: 317964
cuuucuuuccaucgguaaa

SEQ ID NO: 526186 - RNA, 19 nt, Artificial Sequence
  Description of Artificial Sequence: Synthetic oligonucleotide
  Antisense strand to SEQ ID NO: 526185
uuuaccgauggaaagaaag

SEQ ID NO: 526187 - RNA, 19 nt, Artificial Sequence
  Description of Artificial Sequence: Synthetic oligonucleotide
  Sense strand starting at position 2575 of SEQ ID NO: 317964
acccguucagcaguguuua

SEQ ID NO: 526188 - RNA, 19 nt, Artificial Sequence
  Description of Artificial Sequence: Synthetic oligonucleotide
  Antisense strand to SEQ ID NO: 526187
uaaacacugcugaacgggu

SEQ ID NO: 526189 - RNA, 19 nt, Artificial Sequence
  Description of Artificial Sequence: Synthetic oligonucleotide
  Sense strand starting at position 2583 of SEQ ID NO: 317964
agcaguguuuaccugcaca

SEQ ID NO: 526190 - RNA, 19 nt, Artificial Sequence
  Description of Artificial Sequence: Synthetic oligonucleotide
  Antisense strand to SEQ ID NO: 526189
ugugcagguaaacacugcu

SEQ ID NO: 526191 - RNA, 19 nt, Artificial Sequence
  Description of Artificial Sequence: Synthetic oligonucleotide
  Sense strand starting at position 2681 of SEQ ID NO: 317964
gccuccuagcuuuagaacu

SEQ ID NO: 526192 - RNA, 19 nt, Artificial Sequence
  Description of Artificial Sequence: Synthetic oligonucleotide
  Antisense strand to SEQ ID NO: 526191
aguucuaaagcuaggaggc

SEQ ID NO: 526193 - RNA, 19 nt, Artificial Sequence
  Description of Artificial Sequence: Synthetic oligonucleotide
  Sense strand starting at position 2815 of SEQ ID NO: 317964
ucaguuugucucuagaauu

SEQ ID NO: 526194 - RNA, 19 nt, Artificial Sequence
  Description of Artificial Sequence: Synthetic oligonucleotide
  Antisense strand to SEQ ID NO: 526193
aauucuagagacaaacuga

SEQ ID NO: 526195 - RNA, 19 nt, Artificial Sequence
  Description of Artificial Sequence: Synthetic oligonucleotide
  Sense strand starting at position 2990 of SEQ ID NO: 317964
cucuccaauccagguaaga

SEQ ID NO: 526196 - RNA, 19 nt, Artificial Sequence
  Description of Artificial Sequence: Synthetic oligonucleotide
  Antisense strand to SEQ ID NO: 526195
ucuuaccuggauuggagag

SEQ ID NO: 526197 - RNA, 19 nt, Artificial Sequence
  Description of Artificial Sequence: Synthetic oligonucleotide
  Sense strand starting at position 2999 of SEQ ID NO: 317964
ccagguaagaaguggcuau

SEQ ID NO: 526198 - RNA, 19 nt, Artificial Sequence
  Description of Artificial Sequence: Synthetic oligonucleotide
  Antisense strand to SEQ ID NO: 526197
auagccacuucuuaccugg

SEQ ID NO: 526199 - RNA, 19 nt, Artificial Sequence
  Description of Artificial Sequence: Synthetic oligonucleotide
  Sense strand starting at position 3003 of SEQ ID NO: 317964
guaagaaguggcuauauua

SEQ ID NO: 526200 - RNA, 19 nt, Artificial Sequence
  Description of Artificial Sequence: Synthetic oligonucleotide
  Antisense strand to SEQ ID NO: 526199
uaauauagccacuucuuac

SEQ ID NO: 526201 - RNA, 19 nt, Artificial Sequence
  Description of Artificial Sequence: Synthetic oligonucleotide
  Sense strand starting at position 3014 of SEQ ID NO: 317964
cuauauuauuaagcuggaa

SEQ ID NO: 526202 - RNA, 19 nt, Artificial Sequence
  Description of Artificial Sequence: Synthetic oligonucleotide
  Antisense strand to SEQ ID NO: 526201
uuccagcuuaauaauauag

SEQ ID NO: 526203 - RNA, 19 nt, Artificial Sequence
  Description of Artificial Sequence: Synthetic oligonucleotide
  Sense strand starting at position 3032 of SEQ ID NO: 317964
aucacaaaucagugcggau

SEQ ID NO: 526204 - RNA, 19 nt, Artificial Sequence
  Description of Artificial Sequence: Synthetic oligonucleotide
  Antisense strand to SEQ ID NO: 526203
auccgcacugauuugugau

SEQ ID NO: 526205 - RNA, 19 nt, Artificial Sequence
  Description of Artificial Sequence: Synthetic oligonucleotide
  Sense strand starting at position 3045 of SEQ ID NO: 317964
gcggauaguguagauaauu

SEQ ID NO: 526206 - RNA, 19 nt, Artificial Sequence
  Description of Artificial Sequence: Synthetic oligonucleotide
  Antisense strand to SEQ ID NO: 526205
aauuaucuacacuauccgc

SEQ ID NO: 526207 - RNA, 19 nt, Artificial Sequence
  Description of Artificial Sequence: Synthetic oligonucleotide
  Sense strand starting at position 3089 of SEQ ID NO: 317964
guaaccaagcgauacauga

SEQ ID NO: 526208 - RNA, 19 nt, Artificial Sequence
  Description of Artificial Sequence: Synthetic oligonucleotide
  Antisense strand to SEQ ID NO: 526207
ucauguaucgcuugguuac

SEQ ID NO: 526209 - RNA, 19 nt, Artificial Sequence
  Description of Artificial Sequence: Synthetic oligonucleotide
  Sense strand starting at position 3093 of SEQ ID NO: 317964
ccaagcgauacaugaaguu

SEQ ID NO: 526210 - RNA, 19 nt, Artificial Sequence
  Description of Artificial Sequence: Synthetic oligonucleotide
  Antisense strand to SEQ ID NO: 526209
aacuucauguaucgcuugg

SEQ ID NO: 526211 - RNA, 19 nt, Artificial Sequence
  Description of Artificial Sequence: Synthetic oligonucleotide
  Sense strand starting at position 3147 of SEQ ID NO: 317964
uuugaaagauuaugagaug

SEQ ID NO: 526212 - RNA, 19 nt, Artificial Sequence
  Description of Artificial Sequence: Synthetic oligonucleotide
  Antisense strand to SEQ ID NO: 526211
caucucauaaucuuucaaa

SEQ ID NO: 526213 - RNA, 19 nt, Artificial Sequence
  Description of Artificial Sequence: Synthetic oligonucleotide
  Sense strand starting at position 3148 of SEQ ID NO: 317964
uugaaagauuaugagaugu

SEQ ID NO: 526214 - RNA, 19 nt, Artificial Sequence
  Description of Artificial Sequence: Synthetic oligonucleotide
  Antisense strand to SEQ ID NO: 526213
acaucucauaaucuuucaa

SEQ ID NO: 526215 - RNA, 19 nt, Artificial Sequence
  Description of Artificial Sequence: Synthetic oligonucleotide
  Sense strand starting at position 3150 of SEQ ID NO: 317964
gaaagauuaugagauguaa

SEQ ID NO: 526216 - RNA, 19 nt, Artificial Sequence
  Description of Artificial Sequence: Synthetic oligonucleotide
  Antisense strand to SEQ ID NO: 526215
uuacaucucauaaucuuuc

SEQ ID NO: 526217 - RNA, 19 nt, Artificial Sequence
  Description of Artificial Sequence: Synthetic oligonucleotide
  Sense strand starting at position 3226 of SEQ ID NO: 317964
acaaauaccuguguuucca

SEQ ID NO: 526218 - RNA, 19 nt, Artificial Sequence
  Description of Artificial Sequence: Synthetic oligonucleotide
  Antisense strand to SEQ ID NO: 526217
uggaaacacagguauuugu

SEQ ID NO: 526219 - RNA, 19 nt, Artificial Sequence
  Description of Artificial Sequence: Synthetic oligonucleotide
  Sense strand starting at position 3790 of SEQ ID NO: 317964
gugacaugauaucugcuca

SEQ ID NO: 526220 - RNA, 19 nt, Artificial Sequence
  Description of Artificial Sequence: Synthetic oligonucleotide
  Antisense strand to SEQ ID NO: 526219
ugagcagauaucaugucac

SEQ ID NO: 526221 - RNA, 19 nt, Artificial Sequence
  Description of Artificial Sequence: Synthetic oligonucleotide
  Sense strand starting at position 284 of SEQ ID NO: 317965
ugagcucagugaucuagaa

SEQ ID NO: 526222 - RNA, 19 nt, Artificial Sequence
  Description of Artificial Sequence: Synthetic oligonucleotide
  Antisense strand to SEQ ID NO: 526221
uucuagaucacugagcuca

SEQ ID NO: 526223 - RNA, 19 nt, Artificial Sequence
  Description of Artificial Sequence: Synthetic oligonucleotide
  Sense strand starting at position 342 of SEQ ID NO: 317965
gcccauggugaguggaaau

SEQ ID NO: 526224 - RNA, 19 nt, Artificial Sequence
  Description of Artificial Sequence: Synthetic oligonucleotide
  Antisense strand to SEQ ID NO: 526223
auuuccacucaccaugggc

SEQ ID NO: 526225 - RNA, 19 nt, Artificial Sequence
  Description of Artificial Sequence: Synthetic oligonucleotide
  Sense strand starting at position 523 of SEQ ID NO: 317965
uaugaauguuaaucauggu

SEQ ID NO: 526226 - RNA, 19 nt, Artificial Sequence
  Description of Artificial Sequence: Synthetic oligonucleotide
  Antisense strand to SEQ ID NO: 526225
accaugauuaacauucaua

SEQ ID NO: 526227 - RNA, 19 nt, Artificial Sequence
  Description of Artificial Sequence: Synthetic oligonucleotide
  Sense strand starting at position 575 of SEQ ID NO: 317965
cuugucaugcuagaugauu

SEQ ID NO: 526228 - RNA, 19 nt, Artificial Sequence
  Description of Artificial Sequence: Synthetic oligonucleotide
  Antisense strand to SEQ ID NO: 526227
aaucaucuagcaugacaag

SEQ ID NO: 526229 - RNA, 19 nt, Artificial Sequence
  Description of Artificial Sequence: Synthetic oligonucleotide
  Sense strand starting at position 745 of SEQ ID NO: 317965
gguuuaguuacagacguua

SEQ ID NO: 526230 - RNA, 19 nt, Artificial Sequence
  Description of Artificial Sequence: Synthetic oligonucleotide
  Antisense strand to SEQ ID NO: 526229
uaacgucuguaacuaaacc

SEQ ID NO: 526231 - RNA, 19 nt, Artificial Sequence
  Description of Artificial Sequence: Synthetic oligonucleotide
  Sense strand starting at position 1034 of SEQ ID NO: 317965
guugcagugacauaguaaa

SEQ ID NO: 526232 - RNA, 19 nt, Artificial Sequence
  Description of Artificial Sequence: Synthetic oligonucleotide
  Antisense strand to SEQ ID NO: 526231
uuuacuaugucacugcaac

SEQ ID NO: 526233 - RNA, 19 nt, Artificial Sequence
  Description of Artificial Sequence: Synthetic oligonucleotide
  Sense strand starting at position 1186 of SEQ ID NO: 317965
cagaaaggugcacagcauu

SEQ ID NO: 526234 - RNA, 19 nt, Artificial Sequence
  Description of Artificial Sequence: Synthetic oligonucleotide
  Antisense strand to SEQ ID NO: 526233
aaugcugugcaccuuucug

SEQ ID NO: 526235 - RNA, 19 nt, Artificial Sequence
  Description of Artificial Sequence: Synthetic oligonucleotide
  Sense strand starting at position 1270 of SEQ ID NO: 317965
ugaauagugucuuucuaug

SEQ ID NO: 526236 - RNA, 19 nt, Artificial Sequence
  Description of Artificial Sequence: Synthetic oligonucleotide
  Antisense strand to SEQ ID NO: 526235
cauagaaagacacuauuca

SEQ ID NO: 526237 - RNA, 19 nt, Artificial Sequence
  Description of Artificial Sequence: Synthetic oligonucleotide
  Sense strand starting at position 1282 of SEQ ID NO: 317965
uucuauguggcugaauauu

SEQ ID NO: 526238 - RNA, 19 nt, Artificial Sequence
  Description of Artificial Sequence: Synthetic oligonucleotide
  Antisense strand to SEQ ID NO: 526237
aauauucagccacauagaa

SEQ ID NO: 526239 - RNA, 19 nt, Artificial Sequence
  Description of Artificial Sequence: Synthetic oligonucleotide
  Sense strand starting at position 1381 of SEQ ID NO: 317965
gaauguuuauguuuccuag

SEQ ID NO: 526240 - RNA, 19 nt, Artificial Sequence
  Description of Artificial Sequence: Synthetic oligonucleotide
  Antisense strand to SEQ ID NO: 526239
cuaggaaacauaaacauuc

SEQ ID NO: 526241 - RNA, 19 nt, Artificial Sequence
  Description of Artificial Sequence: Synthetic oligonucleotide
  Sense strand starting at position 1452 of SEQ ID NO: 317965
cacuuucgaccacgaugaa

SEQ ID NO: 526242 - RNA, 19 nt, Artificial Sequence
  Description of Artificial Sequence: Synthetic oligonucleotide
  Antisense strand to SEQ ID NO: 526241
uucaucguggucgaaagug

SEQ ID NO: 526243 - RNA, 19 nt, Artificial Sequence
  Description of Artificial Sequence: Synthetic oligonucleotide
  Sense strand starting at position 1453 of SEQ ID NO: 317965
acuuucgaccacgaugaaa

SEQ ID NO: 526244 - RNA, 19 nt, Artificial Sequence
  Description of Artificial Sequence: Synthetic oligonucleotide
  Antisense strand to SEQ ID NO: 526243
uuucaucguggucgaaagu

SEQ ID NO: 526245 - RNA, 19 nt, Artificial Sequence
  Description of Artificial Sequence: Synthetic oligonucleotide
  Sense strand starting at position 1509 of SEQ ID NO: 317965
ccuuuccaucaggaguaau

SEQ ID NO: 526246 - RNA, 19 nt, Artificial Sequence
  Description of Artificial Sequence: Synthetic oligonucleotide
  Antisense strand to SEQ ID NO: 526245
auuacuccugauggaaagg

SEQ ID NO: 526247 - RNA, 19 nt, Artificial Sequence
  Description of Artificial Sequence: Synthetic oligonucleotide
  Sense strand starting at position 1581 of SEQ ID NO: 317965
acuagcugucuguacagau

SEQ ID NO: 526248 - RNA, 19 nt, Artificial Sequence
  Description of Artificial Sequence: Synthetic oligonucleotide
  Antisense strand to SEQ ID NO: 526247
aucuguacagacagcuagu

SEQ ID NO: 526249 - RNA, 19 nt, Artificial Sequence
  Description of Artificial Sequence: Synthetic oligonucleotide
  Sense strand starting at position 1585 of SEQ ID NO: 317965
gcugucuguacagauggaa

SEQ ID NO: 526250 - RNA, 19 nt, Artificial Sequence
  Description of Artificial Sequence: Synthetic oligonucleotide
  Antisense strand to SEQ ID NO: 526249
uuccaucuguacagacagc

SEQ ID NO: 526251 - RNA, 19 nt, Artificial Sequence
  Description of Artificial Sequence: Synthetic oligonucleotide
  Sense strand starting at position 1588 of SEQ ID NO: 317965
gucuguacagauggaauua

SEQ ID NO: 526252 - RNA, 19 nt, Artificial Sequence
  Description of Artificial Sequence: Synthetic oligonucleotide
  Antisense strand to SEQ ID NO: 526251
uaauuccaucuguacagac

SEQ ID NO: 526253 - RNA, 19 nt, Artificial Sequence
  Description of Artificial Sequence: Synthetic oligonucleotide
  Sense strand starting at position 1600 of SEQ ID NO: 317965
ggaauuaccucagcagaca

SEQ ID NO: 526254 - RNA, 19 nt, Artificial Sequence
  Description of Artificial Sequence: Synthetic oligonucleotide
  Antisense strand to SEQ ID NO: 526253
ugucugcugagguaauucc

SEQ ID NO: 526255 - RNA, 19 nt, Artificial Sequence
  Description of Artificial Sequence: Synthetic oligonucleotide
  Sense strand starting at position 1675 of SEQ ID NO: 317965
ccgucucccuuauugauuu

SEQ ID NO: 526256 - RNA, 19 nt, Artificial Sequence
  Description of Artificial Sequence: Synthetic oligonucleotide
  Antisense strand to SEQ ID NO: 526255
aaaucaauaagggagacgg

SEQ ID NO: 526257 - RNA, 19 nt, Artificial Sequence
  Description of Artificial Sequence: Synthetic oligonucleotide
  Sense strand starting at position 1807 of SEQ ID NO: 317965
cuauaugucuuaccugaug

SEQ ID NO: 526258 - RNA, 19 nt, Artificial Sequence
  Description of Artificial Sequence: Synthetic oligonucleotide
  Antisense strand to SEQ ID NO: 526257
caucagguaagacauauag

SEQ ID NO: 526259 - RNA, 19 nt, Artificial Sequence
  Description of Artificial Sequence: Synthetic oligonucleotide
  Sense strand starting at position 1858 of SEQ ID NO: 317965
cgaggugcaguagauuaaa

SEQ ID NO: 526260 - RNA, 19 nt, Artificial Sequence
  Description of Artificial Sequence: Synthetic oligonucleotide
  Antisense strand to SEQ ID NO: 526259
uuuaaucuacugcaccucg

SEQ ID NO: 526261 - RNA, 19 nt, Artificial Sequence
  Description of Artificial Sequence: Synthetic oligonucleotide
  Sense strand starting at position 1867 of SEQ ID NO: 317965
guagauuaaagcugagaga

SEQ ID NO: 526262 - RNA, 19 nt, Artificial Sequence
  Description of Artificial Sequence: Synthetic oligonucleotide
  Antisense strand to SEQ ID NO: 526261
ucucucagcuuuaaucuac

SEQ ID NO: 526263 - RNA, 19 nt, Artificial Sequence
  Description of Artificial Sequence: Synthetic oligonucleotide
  Sense strand starting at position 2083 of SEQ ID NO: 317965
cucauuccuuuggcugaaa

SEQ ID NO: 526264 - RNA, 19 nt, Artificial Sequence
  Description of Artificial Sequence: Synthetic oligonucleotide
  Antisense strand to SEQ ID NO: 526263
uuucagccaaaggaaugag

SEQ ID NO: 526265 - RNA, 19 nt, Artificial Sequence
  Description of Artificial Sequence: Synthetic oligonucleotide
  Sense strand starting at position 2372 of SEQ ID NO: 317965
gccauuacauaguuauaug

SEQ ID NO: 526266 - RNA, 19 nt, Artificial Sequence
  Description of Artificial Sequence: Synthetic oligonucleotide
  Antisense strand to SEQ ID NO: 526265
cauauaacuauguaauggc

SEQ ID NO: 526267 - RNA, 19 nt, Artificial Sequence
  Description of Artificial Sequence: Synthetic oligonucleotide
  Sense strand starting at position 2557 of SEQ ID NO: 317965
cacucucacuggguugaau

SEQ ID NO: 526268 - RNA, 19 nt, Artificial Sequence
  Description of Artificial Sequence: Synthetic oligonucleotide
  Antisense strand to SEQ ID NO: 526267
auucaacccagugagagug

SEQ ID NO: 526269 - RNA, 19 nt, Artificial Sequence
  Description of Artificial Sequence: Synthetic oligonucleotide
  Sense strand starting at position 2559 of SEQ ID NO: 317965
cucucacuggguugaauaa

SEQ ID NO: 526270 - RNA, 19 nt, Artificial Sequence
  Description of Artificial Sequence: Synthetic oligonucleotide
  Antisense strand to SEQ ID NO: 526269
uuauucaacccagugagag

SEQ ID NO: 526271 - RNA, 19 nt, Artificial Sequence
  Description of Artificial Sequence: Synthetic oligonucleotide
  Sense strand starting at position 2632 of SEQ ID NO: 317965
aauagagccuucguagaua

SEQ ID NO: 526272 - RNA, 19 nt, Artificial Sequence
  Description of Artificial Sequence: Synthetic oligonucleotide
  Antisense strand to SEQ ID NO: 526271
uaucuacgaaggcucuauu

SEQ ID NO: 526273 - RNA, 19 nt, Artificial Sequence
  Description of Artificial Sequence: Synthetic oligonucleotide
  Sense strand starting at position 2635 of SEQ ID NO: 317965
agagccuucguagauauaa

SEQ ID NO: 526274 - RNA, 19 nt, Artificial Sequence
  Description of Artificial Sequence: Synthetic oligonucleotide
  Antisense strand to SEQ ID NO: 526273
uuauaucuacgaaggcucu

SEQ ID NO: 526275 - RNA, 19 nt, Artificial Sequence
  Description of Artificial Sequence: Synthetic oligonucleotide
  Sense strand starting at position 2712 of SEQ ID NO: 317965
ugacuaaugucuuuguaag

SEQ ID NO: 526276 - RNA, 19 nt, Artificial Sequence
  Description of Artificial Sequence: Synthetic oligonucleotide
  Antisense strand to SEQ ID NO: 526275
cuuacaaagacauuaguca

SEQ ID NO: 526277 - RNA, 19 nt, Artificial Sequence
  Description of Artificial Sequence: Synthetic oligonucleotide
  Sense strand starting at position 2713 of SEQ ID NO: 317965
gacuaaugucuuuguaaga

SEQ ID NO: 526278 - RNA, 19 nt, Artificial Sequence
  Description of Artificial Sequence: Synthetic oligonucleotide
  Antisense strand to SEQ ID NO: 526277
ucuuacaaagacauuaguc

SEQ ID NO: 526279 - RNA, 19 nt, Artificial Sequence
  Description of Artificial Sequence: Synthetic oligonucleotide
  Sense strand starting at position 2714 of SEQ ID NO: 317965
acuaaugucuuuguaagag

SEQ ID NO: 526280 - RNA, 19 nt, Artificial Sequence
  Description of Artificial Sequence: Synthetic oligonucleotide
  Antisense strand to SEQ ID NO: 526279
cucuuacaaagacauuagu

SEQ ID NO: 526281 - RNA, 19 nt, Artificial Sequence
  Description of Artificial Sequence: Synthetic oligonucleotide
  Sense strand starting at position 2884 of SEQ ID NO: 317965
cugcgagagccuugauuuc

SEQ ID NO: 526282 - RNA, 19 nt, Artificial Sequence
  Description of Artificial Sequence: Synthetic oligonucleotide
  Antisense strand to SEQ ID NO: 526281
gaaaucaaggcucucgcag

SEQ ID NO: 526283 - RNA, 19 nt, Artificial Sequence
  Description of Artificial Sequence: Synthetic oligonucleotide
  Sense strand starting at position 3087 of SEQ ID NO: 317965
uggaguugacgccagaaau

SEQ ID NO: 526284 - RNA, 19 nt, Artificial Sequence
  Description of Artificial Sequence: Synthetic oligonucleotide
  Antisense strand to SEQ ID NO: 526283
auuucuggcgucaacucca

SEQ ID NO: 526285 - RNA, 19 nt, Artificial Sequence
  Description of Artificial Sequence: Synthetic oligonucleotide
  Sense strand starting at position 3115 of SEQ ID NO: 317965
uugcuacuccuggauugaa

SEQ ID NO: 526286 - RNA, 19 nt, Artificial Sequence
  Description of Artificial Sequence: Synthetic oligonucleotide
  Antisense strand to SEQ ID NO: 526285
uucaauccaggaguagcaa

SEQ ID NO: 526287 - RNA, 19 nt, Artificial Sequence
  Description of Artificial Sequence: Synthetic oligonucleotide
  Sense strand starting at position 3280 of SEQ ID NO: 317965
gggugugucuggaauagag

SEQ ID NO: 526288 - RNA, 19 nt, Artificial Sequence
  Description of Artificial Sequence: Synthetic oligonucleotide
  Antisense strand to SEQ ID NO: 526287
cucuauuccagacacaccc

SEQ ID NO: 526289 - RNA, 19 nt, Artificial Sequence
  Description of Artificial Sequence: Synthetic oligonucleotide
  Sense strand starting at position 3299 of SEQ ID NO: 317965
gguggaaaguagcucagau

SEQ ID NO: 526290 - RNA, 19 nt, Artificial Sequence
  Description of Artificial Sequence: Synthetic oligonucleotide
  Antisense strand to SEQ ID NO: 526289
aucugagcuacuuuccacc

SEQ ID NO: 526291 - RNA, 19 nt, Artificial Sequence
  Description of Artificial Sequence: Synthetic oligonucleotide
  Sense strand starting at position 3379 of SEQ ID NO: 317965
uugguucuuggccaaagua

SEQ ID NO: 526292 - RNA, 19 nt, Artificial Sequence
  Description of Artificial Sequence: Synthetic oligonucleotide
  Antisense strand to SEQ ID NO: 526291
uacuuuggccaagaaccaa

SEQ ID NO: 526293 - RNA, 19 nt, Artificial Sequence
  Description of Artificial Sequence: Synthetic oligonucleotide
  Sense strand starting at position 3400 of SEQ ID NO: 317965
caaguuaacccaugaaggu

SEQ ID NO: 526294 - RNA, 19 nt, Artificial Sequence
  Description of Artificial Sequence: Synthetic oligonucleotide
  Antisense strand to SEQ ID NO: 526293
accuucauggguuaacuug

SEQ ID NO: 526295 - RNA, 19 nt, Artificial Sequence
  Description of Artificial Sequence: Synthetic oligonucleotide
  Sense strand starting at position 3413 of SEQ ID NO: 317965
gaaggucucuuucugauuc

SEQ ID NO: 526296 - RNA, 19 nt, Artificial Sequence
  Description of Artificial Sequence: Synthetic oligonucleotide
  Antisense strand to SEQ ID NO: 526295
gaaucagaaagagaccuuc

SEQ ID NO: 526297 - RNA, 19 nt, Artificial Sequence
  Description of Artificial Sequence: Synthetic oligonucleotide
  Sense strand starting at position 3683 of SEQ ID NO: 317965
aguguuccuugaucagaaa

SEQ ID NO: 526298 - RNA, 19 nt, Artificial Sequence
  Description of Artificial Sequence: Synthetic oligonucleotide
  Antisense strand to SEQ ID NO: 526297
uuucugaucaaggaacacu

SEQ ID NO: 526299 - RNA, 19 nt, Artificial Sequence
  Description of Artificial Sequence: Synthetic oligonucleotide
  Sense strand starting at position 3684 of SEQ ID NO: 317965
guguuccuugaucagaaag

SEQ ID NO: 526300 - RNA, 19 nt, Artificial Sequence
  Description of Artificial Sequence: Synthetic oligonucleotide
  Antisense strand to SEQ ID NO: 526299
cuuucugaucaaggaacac

SEQ ID NO: 526301 - RNA, 19 nt, Artificial Sequence
  Description of Artificial Sequence: Synthetic oligonucleotide
  Sense strand starting at position 34 of SEQ ID NO: 317966
agauaugccuauucuguuu

SEQ ID NO: 526302 - RNA, 19 nt, Artificial Sequence
  Description of Artificial Sequence: Synthetic oligonucleotide
  Antisense strand to SEQ ID NO: 526301
aaacagaauaggcauaucu

SEQ ID NO: 526303 - RNA, 19 nt, Artificial Sequence
  Description of Artificial Sequence: Synthetic oligonucleotide
  Sense strand starting at position 116 of SEQ ID NO: 317966
ugcaguuauugggcuuaca

SEQ ID NO: 526304 - RNA, 19 nt, Artificial Sequence
  Description of Artificial Sequence: Synthetic oligonucleotide
  Antisense strand to SEQ ID NO: 526303
uguaagcccaauaacugca

SEQ ID NO: 526305 - RNA, 19 nt, Artificial Sequence
  Description of Artificial Sequence: Synthetic oligonucleotide
  Sense strand starting at position 119 of SEQ ID NO: 317966
aguuauugggcuuacagau

SEQ ID NO: 526306 - RNA, 19 nt, Artificial Sequence
  Description of Artificial Sequence: Synthetic oligonucleotide
  Antisense strand to SEQ ID NO: 526305
aucuguaagcccaauaacu

SEQ ID NO: 526307 - RNA, 19 nt, Artificial Sequence
  Description of Artificial Sequence: Synthetic oligonucleotide
  Sense strand starting at position 161 of SEQ ID NO: 317966
guauauaguuaucugcacu

SEQ ID NO: 526308 - RNA, 19 nt, Artificial Sequence
  Description of Artificial Sequence: Synthetic oligonucleotide
  Antisense strand to SEQ ID NO: 526307
agugcagauaacuauauac

SEQ ID NO: 526309 - RNA, 19 nt, Artificial Sequence
  Description of Artificial Sequence: Synthetic oligonucleotide
  Sense strand starting at position 197 of SEQ ID NO: 317966
guaagauugcugugaaaca

SEQ ID NO: 526310 - RNA, 19 nt, Artificial Sequence
  Description of Artificial Sequence: Synthetic oligonucleotide
  Antisense strand to SEQ ID NO: 526309
uguuucacagcaaucuuac

SEQ ID NO: 526311 - RNA, 19 nt, Artificial Sequence
  Description of Artificial Sequence: Synthetic oligonucleotide
  Sense strand starting at position 224 of SEQ ID NO: 317966
gauaacugaugagaaaguu

SEQ ID NO: 526312 - RNA, 19 nt, Artificial Sequence
  Description of Artificial Sequence: Synthetic oligonucleotide
  Antisense strand to SEQ ID NO: 526311
aacuuucucaucaguuauc

SEQ ID NO: 526313 - RNA, 19 nt, Artificial Sequence
  Description of Artificial Sequence: Synthetic oligonucleotide
  Sense strand starting at position 232 of SEQ ID NO: 317966
augagaaaguucuuuggua

SEQ ID NO: 526314 - RNA, 19 nt, Artificial Sequence
  Description of Artificial Sequence: Synthetic oligonucleotide
  Antisense strand to SEQ ID NO: 526313
uaccaaagaacuuucucau

SEQ ID NO: 526315 - RNA, 19 nt, Artificial Sequence
  Description of Artificial Sequence: Synthetic oligonucleotide
  Sense strand starting at position 233 of SEQ ID NO: 317966
ugagaaaguucuuugguaa

SEQ ID NO: 526316 - RNA, 19 nt, Artificial Sequence
  Description of Artificial Sequence: Synthetic oligonucleotide
  Antisense strand to SEQ ID NO: 526315
uuaccaaagaacuuucuca

SEQ ID NO: 526317 - RNA, 19 nt, Artificial Sequence
  Description of Artificial Sequence: Synthetic oligonucleotide
  Sense strand starting at position 234 of SEQ ID NO: 317966
gagaaaguucuuugguaac

SEQ ID NO: 526318 - RNA, 19 nt, Artificial Sequence
  Description of Artificial Sequence: Synthetic oligonucleotide
  Antisense strand to SEQ ID NO: 526317
guuaccaaagaacuuucuc

SEQ ID NO: 526319 - RNA, 19 nt, Artificial Sequence
  Description of Artificial Sequence: Synthetic oligonucleotide
  Sense strand starting at position 236 of SEQ ID NO: 317966
gaaaguucuuugguaacug

SEQ ID NO: 526320 - RNA, 19 nt, Artificial Sequence
  Description of Artificial Sequence: Synthetic oligonucleotide
  Antisense strand to SEQ ID NO: 526319
caguuaccaaagaacuuuc

SEQ ID NO: 526321 - RNA, 19 nt, Artificial Sequence
  Description of Artificial Sequence: Synthetic oligonucleotide
  Sense strand starting at position 240 of SEQ ID NO: 317966
guucuuugguaacuguaaa

SEQ ID NO: 526322 - RNA, 19 nt, Artificial Sequence
  Description of Artificial Sequence: Synthetic oligonucleotide
  Antisense strand to SEQ ID NO: 526321
uuuacaguuaccaaagaac

SEQ ID NO: 526323 - RNA, 19 nt, Artificial Sequence
  Description of Artificial Sequence: Synthetic oligonucleotide
  Sense strand starting at position 322 of SEQ ID NO: 317966
ucauaugagugacuugaga

SEQ ID NO: 526324 - RNA, 19 nt, Artificial Sequence
  Description of Artificial Sequence: Synthetic oligonucleotide
  Antisense strand to SEQ ID NO: 526323
ucucaagucacucauauga

SEQ ID NO: 526325 - RNA, 19 nt, Artificial Sequence
  Description of Artificial Sequence: Synthetic oligonucleotide
  Sense strand starting at position 333 of SEQ ID NO: 317966
acuugagagccuuguaaac

SEQ ID NO: 526326 - RNA, 19 nt, Artificial Sequence
  Description of Artificial Sequence: Synthetic oligonucleotide
  Antisense strand to SEQ ID NO: 526325
guuuacaaggcucucaagu

SEQ ID NO: 526327 - RNA, 19 nt, Artificial Sequence
  Description of Artificial Sequence: Synthetic oligonucleotide
  Sense strand starting at position 364 of SEQ ID NO: 317966
agucaaucuuuguccagaa

SEQ ID NO: 526328 - RNA, 19 nt, Artificial Sequence
  Description of Artificial Sequence: Synthetic oligonucleotide
  Antisense strand to SEQ ID NO: 526327
uucuggacaaagauugacu

SEQ ID NO: 526329 - RNA, 19 nt, Artificial Sequence
  Description of Artificial Sequence: Synthetic oligonucleotide
  Sense strand starting at position 365 of SEQ ID NO: 317966
gucaaucuuuguccagaaa

SEQ ID NO: 526330 - RNA, 19 nt, Artificial Sequence
  Description of Artificial Sequence: Synthetic oligonucleotide
  Antisense strand to SEQ ID NO: 526329
uuucuggacaaagauugac

SEQ ID NO: 526331 - RNA, 19 nt, Artificial Sequence
  Description of Artificial Sequence: Synthetic oligonucleotide
  Sense strand starting at position 427 of SEQ ID NO: 317966
aucggaaccuguuuccuau

SEQ ID NO: 526332 - RNA, 19 nt, Artificial Sequence
  Description of Artificial Sequence: Synthetic oligonucleotide
  Antisense strand to SEQ ID NO: 526331
auaggaaacagguuccgau

SEQ ID NO: 526333 - RNA, 19 nt, Artificial Sequence
  Description of Artificial Sequence: Synthetic oligonucleotide
  Sense strand starting at position 440 of SEQ ID NO: 317966
uccuauugucgcuugaguu

SEQ ID NO: 526334 - RNA, 19 nt, Artificial Sequence
  Description of Artificial Sequence: Synthetic oligonucleotide
  Antisense strand to SEQ ID NO: 526333
aacucaagcgacaauagga

SEQ ID NO: 526335 - RNA, 19 nt, Artificial Sequence
  Description of Artificial Sequence: Synthetic oligonucleotide
  Sense strand starting at position 446 of SEQ ID NO: 317966
ugucgcuugaguuacuaga

SEQ ID NO: 526336 - RNA, 19 nt, Artificial Sequence
  Description of Artificial Sequence: Synthetic oligonucleotide
  Antisense strand to SEQ ID NO: 526335
ucuaguaacucaagcgaca

SEQ ID NO: 526337 - RNA, 19 nt, Artificial Sequence
  Description of Artificial Sequence: Synthetic oligonucleotide
  Sense strand starting at position 448 of SEQ ID NO: 317966
ucgcuugaguuacuagaug

SEQ ID NO: 526338 - RNA, 19 nt, Artificial Sequence
  Description of Artificial Sequence: Synthetic oligonucleotide
  Antisense strand to SEQ ID NO: 526337
caucuaguaacucaagcga

SEQ ID NO: 526339 - RNA, 19 nt, Artificial Sequence
  Description of Artificial Sequence: Synthetic oligonucleotide
  Sense strand starting at position 453 of SEQ ID NO: 317966
ugaguuacuagauggcuca

SEQ ID NO: 526340 - RNA, 19 nt, Artificial Sequence
  Description of Artificial Sequence: Synthetic oligonucleotide
  Antisense strand to SEQ ID NO: 526339
ugagccaucuaguaacuca

SEQ ID NO: 526341 - RNA, 19 nt, Artificial Sequence
  Description of Artificial Sequence: Synthetic oligonucleotide
  Sense strand starting at position 454 of SEQ ID NO: 317966
gaguuacuagauggcucaa

SEQ ID NO: 526342 - RNA, 19 nt, Artificial Sequence
  Description of Artificial Sequence: Synthetic oligonucleotide
  Antisense strand to SEQ ID NO: 526341
uugagccaucuaguaacuc

SEQ ID NO: 526343 - RNA, 19 nt, Artificial Sequence
  Description of Artificial Sequence: Synthetic oligonucleotide
  Sense strand starting at position 542 of SEQ ID NO: 317966
agaugagcaugacacauuu

SEQ ID NO: 526344 - RNA, 19 nt, Artificial Sequence
  Description of Artificial Sequence: Synthetic oligonucleotide
  Antisense strand to SEQ ID NO: 526343
aaaugugucaugcucaucu

SEQ ID NO: 526345 - RNA, 19 nt, Artificial Sequence
  Description of Artificial Sequence: Synthetic oligonucleotide
  Sense strand starting at position 684 of SEQ ID NO: 317966
uucuuaaaccaguguggca

SEQ ID NO: 526346 - RNA, 19 nt, Artificial Sequence
  Description of Artificial Sequence: Synthetic oligonucleotide
  Antisense strand to SEQ ID NO: 526345
ugccacacugguuuaagaa

SEQ ID NO: 526347 - RNA, 19 nt, Artificial Sequence
  Description of Artificial Sequence: Synthetic oligonucleotide
  Sense strand starting at position 836 of SEQ ID NO: 317966
cuaguuauauuugcaaguu

SEQ ID NO: 526348 - RNA, 19 nt, Artificial Sequence
  Description of Artificial Sequence: Synthetic oligonucleotide
  Antisense strand to SEQ ID NO: 526347
aacuugcaaauauaacuag

SEQ ID NO: 526349 - RNA, 19 nt, Artificial Sequence
  Description of Artificial Sequence: Synthetic oligonucleotide
  Sense strand starting at position 886 of SEQ ID NO: 317966
gacauaaucuccucaggug

SEQ ID NO: 526350 - RNA, 19 nt, Artificial Sequence
  Description of Artificial Sequence: Synthetic oligonucleotide
  Antisense strand to SEQ ID NO: 526349
caccugaggagauuauguc

SEQ ID NO: 526351 - RNA, 19 nt, Artificial Sequence
  Description of Artificial Sequence: Synthetic oligonucleotide
  Sense strand starting at position 1938 of SEQ ID NO: 317966
gggcgccucagucauauga

SEQ ID NO: 526352 - RNA, 19 nt, Artificial Sequence
  Description of Artificial Sequence: Synthetic oligonucleotide
  Antisense strand to SEQ ID NO: 526351
ucauaugacugaggcgccc

SEQ ID NO: 526353 - RNA, 19 nt, Artificial Sequence
  Description of Artificial Sequence: Synthetic oligonucleotide
  Sense strand starting at position 2311 of SEQ ID NO: 317966
cacagaguugcguagggaa

SEQ ID NO: 526354 - RNA, 19 nt, Artificial Sequence
  Description of Artificial Sequence: Synthetic oligonucleotide
  Antisense strand to SEQ ID NO: 526353
uucccuacgcaacucugug

SEQ ID NO: 526355 - RNA, 19 nt, Artificial Sequence
  Description of Artificial Sequence: Synthetic oligonucleotide
  Sense strand starting at position 2674 of SEQ ID NO: 317966
gggaauuagucucuuggaa

SEQ ID NO: 526356 - RNA, 19 nt, Artificial Sequence
  Description of Artificial Sequence: Synthetic oligonucleotide
  Antisense strand to SEQ ID NO: 526355
uuccaagagacuaauuccc

SEQ ID NO: 526357 - RNA, 19 nt, Artificial Sequence
  Description of Artificial Sequence: Synthetic oligonucleotide
  Sense strand starting at position 2837 of SEQ ID NO: 317966
cuaucuuaauguuuaggua

SEQ ID NO: 526358 - RNA, 19 nt, Artificial Sequence
  Description of Artificial Sequence: Synthetic oligonucleotide
  Antisense strand to SEQ ID NO: 526357
uaccuaaacauuaagauag

SEQ ID NO: 526359 - RNA, 19 nt, Artificial Sequence
  Description of Artificial Sequence: Synthetic oligonucleotide
  Sense strand starting at position 2841 of SEQ ID NO: 317966
cuuaauguuuagguaugaa

SEQ ID NO: 526360 - RNA, 19 nt, Artificial Sequence
  Description of Artificial Sequence: Synthetic oligonucleotide
  Antisense strand to SEQ ID NO: 526359
uucauaccuaaacauuaag

SEQ ID NO: 526361 - RNA, 19 nt, Artificial Sequence
  Description of Artificial Sequence: Synthetic oligonucleotide
  Sense strand starting at position 2844 of SEQ ID NO: 317966
aauguuuagguaugaagac

SEQ ID NO: 526362 - RNA, 19 nt, Artificial Sequence
  Description of Artificial Sequence: Synthetic oligonucleotide
  Antisense strand to SEQ ID NO: 526361
gucuucauaccuaaacauu

SEQ ID NO: 526363 - RNA, 19 nt, Artificial Sequence
  Description of Artificial Sequence: Synthetic oligonucleotide
  Sense strand starting at position 2975 of SEQ ID NO: 317966
auaucagaguuuguaucaa

SEQ ID NO: 526364 - RNA, 19 nt, Artificial Sequence
  Description of Artificial Sequence: Synthetic oligonucleotide
  Antisense strand to SEQ ID NO: 526363
uugauacaaacucugauau

SEQ ID NO: 526365 - RNA, 19 nt, Artificial Sequence
  Description of Artificial Sequence: Synthetic oligonucleotide
  Sense strand starting at position 3056 of SEQ ID NO: 317966
gcucguacaaugggaugua

SEQ ID NO: 526366 - RNA, 19 nt, Artificial Sequence
  Description of Artificial Sequence: Synthetic oligonucleotide
  Antisense strand to SEQ ID NO: 526365
uacaucccauuguacgagc

SEQ ID NO: 526367 - RNA, 19 nt, Artificial Sequence
  Description of Artificial Sequence: Synthetic oligonucleotide
  Sense strand starting at position 3059 of SEQ ID NO: 317966
cguacaaugggauguaauc

SEQ ID NO: 526368 - RNA, 19 nt, Artificial Sequence
  Description of Artificial Sequence: Synthetic oligonucleotide
  Antisense strand to SEQ ID NO: 526367
gauuacaucccauuguacg

SEQ ID NO: 526369 - RNA, 19 nt, Artificial Sequence
  Description of Artificial Sequence: Synthetic oligonucleotide
  Sense strand starting at position 3814 of SEQ ID NO: 317966
gcuagaguuuaugcucuaa

SEQ ID NO: 526370 - RNA, 19 nt, Artificial Sequence
  Description of Artificial Sequence: Synthetic oligonucleotide
  Antisense strand to SEQ ID NO: 526369
uuagagcauaaacucuagc

SEQ ID NO: 526371 - RNA, 19 nt, Artificial Sequence
  Description of Artificial Sequence: Synthetic oligonucleotide
  Sense strand starting at position 3826 of SEQ ID NO: 317966
gcucuaaauaagggucuga

SEQ ID NO: 526372 - RNA, 19 nt, Artificial Sequence
  Description of Artificial Sequence: Synthetic oligonucleotide
  Antisense strand to SEQ ID NO: 526371
ucagacccuuauuuagagc

SEQ ID NO: 526373 - RNA, 19 nt, Artificial Sequence
  Description of Artificial Sequence: Synthetic oligonucleotide
  Sense strand starting at position 3831 of SEQ ID NO: 317966
aaauaagggucugaagaua

SEQ ID NO: 526374 - RNA, 19 nt, Artificial Sequence
  Description of Artificial Sequence: Synthetic oligonucleotide
  Antisense strand to SEQ ID NO: 526373
uaucuucagacccuuauuu

SEQ ID NO: 526375 - RNA, 19 nt, Artificial Sequence
  Description of Artificial Sequence: Synthetic oligonucleotide
  Sense strand starting at position 3881 of SEQ ID NO: 317966
auaucucuuugagaauuug

SEQ ID NO: 526376 - RNA, 19 nt, Artificial Sequence
  Description of Artificial Sequence: Synthetic oligonucleotide
  Antisense strand to SEQ ID NO: 526375
caaauucucaaagagauau

SEQ ID NO: 526377 - RNA, 19 nt, Artificial Sequence
  Description of Artificial Sequence: Synthetic oligonucleotide
  Sense strand starting at position 3889 of SEQ ID NO: 317966
uugagaauuugucaacaac

SEQ ID NO: 526378 - RNA, 19 nt, Artificial Sequence
  Description of Artificial Sequence: Synthetic oligonucleotide
  Antisense strand to SEQ ID NO: 526377
guuguugacaaauucucaa

SEQ ID NO: 526379 - RNA, 19 nt, Artificial Sequence
  Description of Artificial Sequence: Synthetic oligonucleotide
  Sense strand starting at position 3945 of SEQ ID NO: 317966
agcacuauuuauugaugau

SEQ ID NO: 526380 - RNA, 19 nt, Artificial Sequence
  Description of Artificial Sequence: Synthetic oligonucleotide
  Antisense strand to SEQ ID NO: 526379
aucaucaauaaauagugcu

SEQ ID NO: 526381 - RNA, 19 nt, Artificial Sequence
  Description of Artificial Sequence: Synthetic oligonucleotide
  Sense strand starting at position 229 of SEQ ID NO: 317967
gucggcuuugcauaaauag

SEQ ID NO: 526382 - RNA, 19 nt, Artificial Sequence
  Description of Artificial Sequence: Synthetic oligonucleotide
  Antisense strand to SEQ ID NO: 526381
cuauuuaugcaaagccgac

SEQ ID NO: 526383 - RNA, 19 nt, Artificial Sequence
  Description of Artificial Sequence: Synthetic oligonucleotide
  Sense strand starting at position 297 of SEQ ID NO: 317967
cgagaauucgcagcggcga

SEQ ID NO: 526384 - RNA, 19 nt, Artificial Sequence
  Description of Artificial Sequence: Synthetic oligonucleotide
  Antisense strand to SEQ ID NO: 526383
ucgccgcugcgaauucucg

SEQ ID NO: 526385 - RNA, 19 nt, Artificial Sequence
  Description of Artificial Sequence: Synthetic oligonucleotide
  Sense strand starting at position 424 of SEQ ID NO: 317967
cuaacauagcguuauuaac

SEQ ID NO: 526386 - RNA, 19 nt, Artificial Sequence
  Description of Artificial Sequence: Synthetic oligonucleotide
  Antisense strand to SEQ ID NO: 526385
guuaauaacgcuauguuag

SEQ ID NO: 526387 - RNA, 19 nt, Artificial Sequence
  Description of Artificial Sequence: Synthetic oligonucleotide
  Sense strand starting at position 457 of SEQ ID NO: 317967
gcaguaaaguucucgacac

SEQ ID NO: 526388 - RNA, 19 nt, Artificial Sequence
  Description of Artificial Sequence: Synthetic oligonucleotide
  Antisense strand to SEQ ID NO: 526387
gugucgagaacuuuacugc

SEQ ID NO: 526389 - RNA, 19 nt, Artificial Sequence
  Description of Artificial Sequence: Synthetic oligonucleotide
  Sense strand starting at position 459 of SEQ ID NO: 317967
aguaaaguucucgacacug

SEQ ID NO: 526390 - RNA, 19 nt, Artificial Sequence
  Description of Artificial Sequence: Synthetic oligonucleotide
  Antisense strand to SEQ ID NO: 526389
cagugucgagaacuuuacu

SEQ ID NO: 526391 - RNA, 19 nt, Artificial Sequence
  Description of Artificial Sequence: Synthetic oligonucleotide
  Sense strand starting at position 461 of SEQ ID NO: 317967
uaaaguucucgacacugga

SEQ ID NO: 526392 - RNA, 19 nt, Artificial Sequence
  Description of Artificial Sequence: Synthetic oligonucleotide
  Antisense strand to SEQ ID NO: 526391
uccagugucgagaacuuua

SEQ ID NO: 526393 - RNA, 19 nt, Artificial Sequence
  Description of Artificial Sequence: Synthetic oligonucleotide
  Sense strand starting at position 734 of SEQ ID NO: 317967
ugaugcucucgauggagaa

SEQ ID NO: 526394 - RNA, 19 nt, Artificial Sequence
  Description of Artificial Sequence: Synthetic oligonucleotide
  Antisense strand to SEQ ID NO: 526393
uucuccaucgagagcauca

SEQ ID NO: 526395 - RNA, 19 nt, Artificial Sequence
  Description of Artificial Sequence: Synthetic oligonucleotide
  Sense strand starting at position 1379 of SEQ ID NO: 317967
cacagaucucgcucagcgu

SEQ ID NO: 526396 - RNA, 19 nt, Artificial Sequence
  Description of Artificial Sequence: Synthetic oligonucleotide
  Antisense strand to SEQ ID NO: 526395
acgcugagcgagaucugug

SEQ ID NO: 526397 - RNA, 19 nt, Artificial Sequence
  Description of Artificial Sequence: Synthetic oligonucleotide
  Sense strand starting at position 1431 of SEQ ID NO: 317967
agugaugagcgcgauauac

SEQ ID NO: 526398 - RNA, 19 nt, Artificial Sequence
  Description of Artificial Sequence: Synthetic oligonucleotide
  Antisense strand to SEQ ID NO: 526397
guauaucgcgcucaucacu

SEQ ID NO: 526399 - RNA, 19 nt, Artificial Sequence
  Description of Artificial Sequence: Synthetic oligonucleotide
  Sense strand starting at position 1818 of SEQ ID NO: 317967
cucagugcucagggucaua

SEQ ID NO: 526400 - RNA, 19 nt, Artificial Sequence
  Description of Artificial Sequence: Synthetic oligonucleotide
  Antisense strand to SEQ ID NO: 526399
uaugacccugagcacugag

SEQ ID NO: 526401 - RNA, 19 nt, Artificial Sequence
  Description of Artificial Sequence: Synthetic oligonucleotide
  Sense strand starting at position 2207 of SEQ ID NO: 317967
gugagagucuaagaacaga

SEQ ID NO: 526402 - RNA, 19 nt, Artificial Sequence
  Description of Artificial Sequence: Synthetic oligonucleotide
  Antisense strand to SEQ ID NO: 526401
ucuguucuuagacucucac

SEQ ID NO: 526403 - RNA, 19 nt, Artificial Sequence
  Description of Artificial Sequence: Synthetic oligonucleotide
  Sense strand starting at position 2261 of SEQ ID NO: 317967
ggaccuuccucggcuuaua

SEQ ID NO: 526404 - RNA, 19 nt, Artificial Sequence
  Description of Artificial Sequence: Synthetic oligonucleotide
  Antisense strand to SEQ ID NO: 526403
uauaagccgaggaaggucc

SEQ ID NO: 526405 - RNA, 19 nt, Artificial Sequence
  Description of Artificial Sequence: Synthetic oligonucleotide
  Sense strand starting at position 2352 of SEQ ID NO: 317967
agcccuucucgggagagaa

SEQ ID NO: 526406 - RNA, 19 nt, Artificial Sequence
  Description of Artificial Sequence: Synthetic oligonucleotide
  Antisense strand to SEQ ID NO: 526405
uucucucccgagaagggcu

SEQ ID NO: 526407 - RNA, 19 nt, Artificial Sequence
  Description of Artificial Sequence: Synthetic oligonucleotide
  Sense strand starting at position 2428 of SEQ ID NO: 317967
acuauuucuugccaaagag

SEQ ID NO: 526408 - RNA, 19 nt, Artificial Sequence
  Description of Artificial Sequence: Synthetic oligonucleotide
  Antisense strand to SEQ ID NO: 526407
cucuuuggcaagaaauagu

SEQ ID NO: 526409 - RNA, 19 nt, Artificial Sequence
  Description of Artificial Sequence: Synthetic oligonucleotide
  Sense strand starting at position 2444 of SEQ ID NO: 317967
gaggcugaugcccgaauua

SEQ ID NO: 526410 - RNA, 19 nt, Artificial Sequence
  Description of Artificial Sequence: Synthetic oligonucleotide
  Antisense strand to SEQ ID NO: 526409
uaauucgggcaucagccuc

SEQ ID NO: 526411 - RNA, 19 nt, Artificial Sequence
  Description of Artificial Sequence: Synthetic oligonucleotide
  Sense strand starting at position 2493 of SEQ ID NO: 317967
gaguuagacuucccagccu

SEQ ID NO: 526412 - RNA, 19 nt, Artificial Sequence
  Description of Artificial Sequence: Synthetic oligonucleotide
  Antisense strand to SEQ ID NO: 526411
aggcugggaagucuaacuc

SEQ ID NO: 526413 - RNA, 19 nt, Artificial Sequence
  Description of Artificial Sequence: Synthetic oligonucleotide
  Sense strand starting at position 2727 of SEQ ID NO: 317967
gcacgauaauaauuguuua

SEQ ID NO: 526414 - RNA, 19 nt, Artificial Sequence
  Description of Artificial Sequence: Synthetic oligonucleotide
  Antisense strand to SEQ ID NO: 526413
uaaacaauuauuaucgugc

SEQ ID NO: 526415 - RNA, 19 nt, Artificial Sequence
  Description of Artificial Sequence: Synthetic oligonucleotide
  Sense strand starting at position 2738 of SEQ ID NO: 317967
auuguuuauugacccuuua

SEQ ID NO: 526416 - RNA, 19 nt, Artificial Sequence
  Description of Artificial Sequence: Synthetic oligonucleotide
  Antisense strand to SEQ ID NO: 526415
uaaagggucaauaaacaau

SEQ ID NO: 526417 - RNA, 19 nt, Artificial Sequence
  Description of Artificial Sequence: Synthetic oligonucleotide
  Sense strand starting at position 2837 of SEQ ID NO: 317967
cucacuucucugcgauuga

SEQ ID NO: 526418 - RNA, 19 nt, Artificial Sequence
  Description of Artificial Sequence: Synthetic oligonucleotide
  Antisense strand to SEQ ID NO: 526417
ucaaucgcagagaagugag

SEQ ID NO: 526419 - RNA, 19 nt, Artificial Sequence
  Description of Artificial Sequence: Synthetic oligonucleotide
  Sense strand starting at position 2852 of SEQ ID NO: 317967
uugaaugcccuagagacuu

SEQ ID NO: 526420 - RNA, 19 nt, Artificial Sequence
  Description of Artificial Sequence: Synthetic oligonucleotide
  Antisense strand to SEQ ID NO: 526419
aagucucuagggcauucaa

SEQ ID NO: 526421 - RNA, 19 nt, Artificial Sequence
  Description of Artificial Sequence: Synthetic oligonucleotide
  Sense strand starting at position 2858 of SEQ ID NO: 317967
gcccuagagacuugacagu

SEQ ID NO: 526422 - RNA, 19 nt, Artificial Sequence
  Description of Artificial Sequence: Synthetic oligonucleotide
  Antisense strand to SEQ ID NO: 526421
acugucaagucucuagggc

SEQ ID NO: 526423 - RNA, 19 nt, Artificial Sequence
  Description of Artificial Sequence: Synthetic oligonucleotide
  Sense strand starting at position 2894 of SEQ ID NO: 317967
augagacgaucugacaaau

SEQ ID NO: 526424 - RNA, 19 nt, Artificial Sequence
  Description of Artificial Sequence: Synthetic oligonucleotide
  Antisense strand to SEQ ID NO: 526423
auuugucagaucgucucau

SEQ ID NO: 526425 - RNA, 19 nt, Artificial Sequence
  Description of Artificial Sequence: Synthetic oligonucleotide
  Sense strand starting at position 2900 of SEQ ID NO: 317967
cgaucugacaaaugucaug

SEQ ID NO: 526426 - RNA, 19 nt, Artificial Sequence
  Description of Artificial Sequence: Synthetic oligonucleotide
  Antisense strand to SEQ ID NO: 526425
caugacauuugucagaucg

SEQ ID NO: 526427 - RNA, 19 nt, Artificial Sequence
  Description of Artificial Sequence: Synthetic oligonucleotide
  Sense strand starting at position 3254 of SEQ ID NO: 317967
gcuauauaguucucaguag

SEQ ID NO: 526428 - RNA, 19 nt, Artificial Sequence
  Description of Artificial Sequence: Synthetic oligonucleotide
  Antisense strand to SEQ ID NO: 526427
cuacugagaacuauauagc

SEQ ID NO: 526429 - RNA, 19 nt, Artificial Sequence
  Description of Artificial Sequence: Synthetic oligonucleotide
  Sense strand starting at position 3260 of SEQ ID NO: 317967
uaguucucaguaggaggaa

SEQ ID NO: 526430 - RNA, 19 nt, Artificial Sequence
  Description of Artificial Sequence: Synthetic oligonucleotide
  Antisense strand to SEQ ID NO: 526429
uuccuccuacugagaacua

SEQ ID NO: 526431 - RNA, 19 nt, Artificial Sequence
  Description of Artificial Sequence: Synthetic oligonucleotide
  Sense strand starting at position 3272 of SEQ ID NO: 317967
ggaggaacauucuagucag

SEQ ID NO: 526432 - RNA, 19 nt, Artificial Sequence
  Description of Artificial Sequence: Synthetic oligonucleotide
  Antisense strand to SEQ ID NO: 526431
cugacuagaauguuccucc

SEQ ID NO: 526433 - RNA, 19 nt, Artificial Sequence
  Description of Artificial Sequence: Synthetic oligonucleotide
  Sense strand starting at position 3275 of SEQ ID NO: 317967
ggaacauucuagucagcac

SEQ ID NO: 526434 - RNA, 19 nt, Artificial Sequence
  Description of Artificial Sequence: Synthetic oligonucleotide
  Antisense strand to SEQ ID NO: 526433
gugcugacuagaauguucc

SEQ ID NO: 526435 - RNA, 19 nt, Artificial Sequence
  Description of Artificial Sequence: Synthetic oligonucleotide
  Sense strand starting at position 3342 of SEQ ID NO: 317967
ucuacugaggcuuauuaau

SEQ ID NO: 526436 - RNA, 19 nt, Artificial Sequence
  Description of Artificial Sequence: Synthetic oligonucleotide
  Antisense strand to SEQ ID NO: 526435
auuaauaagccucaguaga

SEQ ID NO: 526437 - RNA, 19 nt, Artificial Sequence
  Description of Artificial Sequence: Synthetic oligonucleotide
  Sense strand starting at position 3376 of SEQ ID NO: 317967
agaugacuuuaagauaaac

SEQ ID NO: 526438 - RNA, 19 nt, Artificial Sequence
  Description of Artificial Sequence: Synthetic oligonucleotide
  Antisense strand to SEQ ID NO: 526437
guuuaucuuaaagucaucu

SEQ ID NO: 526439 - RNA, 19 nt, Artificial Sequence
  Description of Artificial Sequence: Synthetic oligonucleotide
  Sense strand starting at position 3431 of SEQ ID NO: 317967
uguuaauccuuucugguga

SEQ ID NO: 526440 - RNA, 19 nt, Artificial Sequence
  Description of Artificial Sequence: Synthetic oligonucleotide
  Antisense strand to SEQ ID NO: 526439
ucaccagaaaggauuaaca

SEQ ID NO: 526441 - RNA, 19 nt, Artificial Sequence
  Description of Artificial Sequence: Synthetic oligonucleotide
  Sense strand starting at position 3470 of SEQ ID NO: 317967
gauuaaaguuccgcucaau

SEQ ID NO: 526442 - RNA, 19 nt, Artificial Sequence
  Description of Artificial Sequence: Synthetic oligonucleotide
  Antisense strand to SEQ ID NO: 526441
auugagcggaacuuuaauc

SEQ ID NO: 526443 - RNA, 19 nt, Artificial Sequence
  Description of Artificial Sequence: Synthetic oligonucleotide
  Sense strand starting at position 3600 of SEQ ID NO: 317967
auccuaauaguuuguugaa

SEQ ID NO: 526444 - RNA, 19 nt, Artificial Sequence
  Description of Artificial Sequence: Synthetic oligonucleotide
  Antisense strand to SEQ ID NO: 526443
uucaacaaacuauuaggau

SEQ ID NO: 526445 - RNA, 19 nt, Artificial Sequence
  Description of Artificial Sequence: Synthetic oligonucleotide
  Sense strand starting at position 3601 of SEQ ID NO: 317967
uccuaauaguuuguugaau

SEQ ID NO: 526446 - RNA, 19 nt, Artificial Sequence
  Description of Artificial Sequence: Synthetic oligonucleotide
  Antisense strand to SEQ ID NO: 526445
auucaacaaacuauuagga

SEQ ID NO: 526447 - RNA, 19 nt, Artificial Sequence
  Description of Artificial Sequence: Synthetic oligonucleotide
  Sense strand starting at position 3602 of SEQ ID NO: 317967
ccuaauaguuuguugaauu

SEQ ID NO: 526448 - RNA, 19 nt, Artificial Sequence
  Description of Artificial Sequence: Synthetic oligonucleotide
  Antisense strand to SEQ ID NO: 526447
aauucaacaaacuauuagg

SEQ ID NO: 526449 - RNA, 19 nt, Artificial Sequence
  Description of Artificial Sequence: Synthetic oligonucleotide
  Sense strand starting at position 3763 of SEQ ID NO: 317967
ucagcugcccuuguguaua

SEQ ID NO: 526450 - RNA, 19 nt, Artificial Sequence
  Description of Artificial Sequence: Synthetic oligonucleotide
  Antisense strand to SEQ ID NO: 526449
uauacacaagggcagcuga

SEQ ID NO: 526451 - RNA, 19 nt, Artificial Sequence
  Description of Artificial Sequence: Synthetic oligonucleotide
  Sense strand starting at position 3768 of SEQ ID NO: 317967
ugcccuuguguauaucauu

SEQ ID NO: 526452 - RNA, 19 nt, Artificial Sequence
  Description of Artificial Sequence: Synthetic oligonucleotide
  Antisense strand to SEQ ID NO: 526451
aaugauauacacaagggca

SEQ ID NO: 526453 - RNA, 19 nt, Artificial Sequence
  Description of Artificial Sequence: Synthetic oligonucleotide
  Sense strand starting at position 3813 of SEQ ID NO: 317967
ugaaacgugucauuacuac

SEQ ID NO: 526454 - RNA, 19 nt, Artificial Sequence
  Description of Artificial Sequence: Synthetic oligonucleotide
  Antisense strand to SEQ ID NO: 526453
guaguaaugacacguuuca

SEQ ID NO: 526455 - RNA, 19 nt, Artificial Sequence
  Description of Artificial Sequence: Synthetic oligonucleotide
  Sense strand starting at position 3955 of SEQ ID NO: 317967
aucauaggucuuugaacaa

SEQ ID NO: 526456 - RNA, 19 nt, Artificial Sequence
  Description of Artificial Sequence: Synthetic oligonucleotide
  Antisense strand to SEQ ID NO: 526455
uuguucaaagaccuaugau

SEQ ID NO: 526457 - RNA, 19 nt, Artificial Sequence
  Description of Artificial Sequence: Synthetic oligonucleotide
  Sense strand starting at position 3967 of SEQ ID NO: 317967
ugaacaaucuaugagaaag

SEQ ID NO: 526458 - RNA, 19 nt, Artificial Sequence
  Description of Artificial Sequence: Synthetic oligonucleotide
  Antisense strand to SEQ ID NO: 526457
cuuucucauagauuguuca

SEQ ID NO: 526459 - RNA, 19 nt, Artificial Sequence
  Description of Artificial Sequence: Synthetic oligonucleotide
  Sense strand starting at position 3977 of SEQ ID NO: 317967
augagaaagccucgacguu

SEQ ID NO: 526460 - RNA, 19 nt, Artificial Sequence
  Description of Artificial Sequence: Synthetic oligonucleotide
  Antisense strand to SEQ ID NO: 526459
aacgucgaggcuuucucau

SEQ ID NO: 526461 - RNA, 19 nt, Artificial Sequence
  Description of Artificial Sequence: Synthetic oligonucleotide
  Sense strand starting at position 96 of SEQ ID NO: 317968
cauuaaggaguuugcaaug

SEQ ID NO: 526462 - RNA, 19 nt, Artificial Sequence
  Description of Artificial Sequence: Synthetic oligonucleotide
  Antisense strand to SEQ ID NO: 526461
cauugcaaacuccuuaaug

SEQ ID NO: 526463 - RNA, 19 nt, Artificial Sequence
  Description of Artificial Sequence: Synthetic oligonucleotide
  Sense strand starting at position 101 of SEQ ID NO: 317968
aggaguuugcaauguaggu

SEQ ID NO: 526464 - RNA, 19 nt, Artificial Sequence
  Description of Artificial Sequence: Synthetic oligonucleotide
  Antisense strand to SEQ ID NO: 526463
accuacauugcaaacuccu

SEQ ID NO: 526465 - RNA, 19 nt, Artificial Sequence
  Description of Artificial Sequence: Synthetic oligonucleotide
  Sense strand starting at position 110 of SEQ ID NO: 317968
caauguaggucucuuuaag

SEQ ID NO: 526466 - RNA, 19 nt, Artificial Sequence
  Description of Artificial Sequence: Synthetic oligonucleotide
  Antisense strand to SEQ ID NO: 526465
cuuaaagagaccuacauug

SEQ ID NO: 526467 - RNA, 19 nt, Artificial Sequence
  Description of Artificial Sequence: Synthetic oligonucleotide
  Sense strand starting at position 116 of SEQ ID NO: 317968
aggucucuuuaagaaggau

SEQ ID NO: 526468 - RNA, 19 nt, Artificial Sequence
  Description of Artificial Sequence: Synthetic oligonucleotide
  Antisense strand to SEQ ID NO: 526467
auccuucuuaaagagaccu

SEQ ID NO: 526469 - RNA, 19 nt, Artificial Sequence
  Description of Artificial Sequence: Synthetic oligonucleotide
  Sense strand starting at position 148 of SEQ ID NO: 317968
cagggaugcugagggauuu

SEQ ID NO: 526470 - RNA, 19 nt, Artificial Sequence
  Description of Artificial Sequence: Synthetic oligonucleotide
  Antisense strand to SEQ ID NO: 526469
aaaucccucagcaucccug

SEQ ID NO: 526471 - RNA, 19 nt, Artificial Sequence
  Description of Artificial Sequence: Synthetic oligonucleotide
  Sense strand starting at position 276 of SEQ ID NO: 317968
uggcuuugcuccucacuga

SEQ ID NO: 526472 - RNA, 19 nt, Artificial Sequence
  Description of Artificial Sequence: Synthetic oligonucleotide
  Antisense strand to SEQ ID NO: 526471
ucagugaggagcaaagcca

SEQ ID NO: 526473 - RNA, 19 nt, Artificial Sequence
  Description of Artificial Sequence: Synthetic oligonucleotide
  Sense strand starting at position 603 of SEQ ID NO: 317968
ggacuuuaauucugggaaa

SEQ ID NO: 526474 - RNA, 19 nt, Artificial Sequence
  Description of Artificial Sequence: Synthetic oligonucleotide
  Antisense strand to SEQ ID NO: 526473
uuucccagaauuaaagucc

SEQ ID NO: 526475 - RNA, 19 nt, Artificial Sequence
  Description of Artificial Sequence: Synthetic oligonucleotide
  Sense strand starting at position 606 of SEQ ID NO: 317968
cuuuaauucugggaaaugg

SEQ ID NO: 526476 - RNA, 19 nt, Artificial Sequence
  Description of Artificial Sequence: Synthetic oligonucleotide
  Antisense strand to SEQ ID NO: 526475
ccauuucccagaauuaaag

SEQ ID NO: 526477 - RNA, 19 nt, Artificial Sequence
  Description of Artificial Sequence: Synthetic oligonucleotide
  Sense strand starting at position 614 of SEQ ID NO: 317968
cugggaaauggaugcauga

SEQ ID NO: 526478 - RNA, 19 nt, Artificial Sequence
  Description of Artificial Sequence: Synthetic oligonucleotide
  Antisense strand to SEQ ID NO: 526477
ucaugcauccauuucccag

SEQ ID NO: 526479 - RNA, 19 nt, Artificial Sequence
  Description of Artificial Sequence: Synthetic oligonucleotide
  Sense strand starting at position 669 of SEQ ID NO: 317968
uuagaaaugcaucguugaa

SEQ ID NO: 526480 - RNA, 19 nt, Artificial Sequence
  Description of Artificial Sequence: Synthetic oligonucleotide
  Antisense strand to SEQ ID NO: 526479
uucaacgaugcauuucuaa

SEQ ID NO: 526481 - RNA, 19 nt, Artificial Sequence
  Description of Artificial Sequence: Synthetic oligonucleotide
  Sense strand starting at position 764 of SEQ ID NO: 317968
ugucaccucugaguguuau

SEQ ID NO: 526482 - RNA, 19 nt, Artificial Sequence
  Description of Artificial Sequence: Synthetic oligonucleotide
  Antisense strand to SEQ ID NO: 526481
auaacacucagaggugaca

SEQ ID NO: 526483 - RNA, 19 nt, Artificial Sequence
  Description of Artificial Sequence: Synthetic oligonucleotide
  Sense strand starting at position 765 of SEQ ID NO: 317968
gucaccucugaguguuauu

SEQ ID NO: 526484 - RNA, 19 nt, Artificial Sequence
  Description of Artificial Sequence: Synthetic oligonucleotide
  Antisense strand to SEQ ID NO: 526483
aauaacacucagaggugac

SEQ ID NO: 526485 - RNA, 19 nt, Artificial Sequence
  Description of Artificial Sequence: Synthetic oligonucleotide
  Sense strand starting at position 828 of SEQ ID NO: 317968
gugucuucggguuaaagga

SEQ ID NO: 526486 - RNA, 19 nt, Artificial Sequence
  Description of Artificial Sequence: Synthetic oligonucleotide
  Antisense strand to SEQ ID NO: 526485
uccuuuaacccgaagacac

SEQ ID NO: 526487 - RNA, 19 nt, Artificial Sequence
  Description of Artificial Sequence: Synthetic oligonucleotide
  Sense strand starting at position 841 of SEQ ID NO: 317968
aaaggagguuaccuaagua

SEQ ID NO: 526488 - RNA, 19 nt, Artificial Sequence
  Description of Artificial Sequence: Synthetic oligonucleotide
  Antisense strand to SEQ ID NO: 526487
uacuuagguaaccuccuuu

SEQ ID NO: 526489 - RNA, 19 nt, Artificial Sequence
  Description of Artificial Sequence: Synthetic oligonucleotide
  Sense strand starting at position 845 of SEQ ID NO: 317968
gagguuaccuaaguagaaa

SEQ ID NO: 526490 - RNA, 19 nt, Artificial Sequence
  Description of Artificial Sequence: Synthetic oligonucleotide
  Antisense strand to SEQ ID NO: 526489
uuucuacuuagguaaccuc

SEQ ID NO: 526491 - RNA, 19 nt, Artificial Sequence
  Description of Artificial Sequence: Synthetic oligonucleotide
  Sense strand starting at position 883 of SEQ ID NO: 317968
ggccauuaguggcuguuua

SEQ ID NO: 526492 - RNA, 19 nt, Artificial Sequence
  Description of Artificial Sequence: Synthetic oligonucleotide
  Antisense strand to SEQ ID NO: 526491
uaaacagccacuaauggcc

SEQ ID NO: 526493 - RNA, 19 nt, Artificial Sequence
  Description of Artificial Sequence: Synthetic oligonucleotide
  Sense strand starting at position 884 of SEQ ID NO: 317968
gccauuaguggcuguuuaa

SEQ ID NO: 526494 - RNA, 19 nt, Artificial Sequence
  Description of Artificial Sequence: Synthetic oligonucleotide
  Antisense strand to SEQ ID NO: 526493
uuaaacagccacuaauggc

SEQ ID NO: 526495 - RNA, 19 nt, Artificial Sequence
  Description of Artificial Sequence: Synthetic oligonucleotide
  Sense strand starting at position 893 of SEQ ID NO: 317968
ggcuguuuaacccagguca

SEQ ID NO: 526496 - RNA, 19 nt, Artificial Sequence
  Description of Artificial Sequence: Synthetic oligonucleotide
  Antisense strand to SEQ ID NO: 526495
ugaccuggguuaaacagcc

SEQ ID NO: 526497 - RNA, 19 nt, Artificial Sequence
  Description of Artificial Sequence: Synthetic oligonucleotide
  Sense strand starting at position 895 of SEQ ID NO: 317968
cuguuuaacccaggucaga

SEQ ID NO: 526498 - RNA, 19 nt, Artificial Sequence
  Description of Artificial Sequence: Synthetic oligonucleotide
  Antisense strand to SEQ ID NO: 526497
ucugaccuggguuaaacag

SEQ ID NO: 526499 - RNA, 19 nt, Artificial Sequence
  Description of Artificial Sequence: Synthetic oligonucleotide
  Sense strand starting at position 997 of SEQ ID NO: 317968
gcuggagaugcagaugaau

SEQ ID NO: 526500 - RNA, 19 nt, Artificial Sequence
  Description of Artificial Sequence: Synthetic oligonucleotide
  Antisense strand to SEQ ID NO: 526499
auucaucugcaucuccagc

SEQ ID NO: 526501 - RNA, 19 nt, Artificial Sequence
  Description of Artificial Sequence: Synthetic oligonucleotide
  Sense strand starting at position 1017 of SEQ ID NO: 317968
guaauuacugcaggcgauu

SEQ ID NO: 526502 - RNA, 19 nt, Artificial Sequence
  Description of Artificial Sequence: Synthetic oligonucleotide
  Antisense strand to SEQ ID NO: 526501
aaucgccugcaguaauuac

SEQ ID NO: 526503 - RNA, 19 nt, Artificial Sequence
  Description of Artificial Sequence: Synthetic oligonucleotide
  Sense strand starting at position 1031 of SEQ ID NO: 317968
cgauuaagcgcuugauaac

SEQ ID NO: 526504 - RNA, 19 nt, Artificial Sequence
  Description of Artificial Sequence: Synthetic oligonucleotide
  Antisense strand to SEQ ID NO: 526503
guuaucaagcgcuuaaucg

SEQ ID NO: 526505 - RNA, 19 nt, Artificial Sequence
  Description of Artificial Sequence: Synthetic oligonucleotide
  Sense strand starting at position 1032 of SEQ ID NO: 317968
gauuaagcgcuugauaaca

SEQ ID NO: 526506 - RNA, 19 nt, Artificial Sequence
  Description of Artificial Sequence: Synthetic oligonucleotide
  Antisense strand to SEQ ID NO: 526505
uguuaucaagcgcuuaauc

SEQ ID NO: 526507 - RNA, 19 nt, Artificial Sequence
  Description of Artificial Sequence: Synthetic oligonucleotide
  Sense strand starting at position 1058 of SEQ ID NO: 317968
ccuuguguacauuaucuca

SEQ ID NO: 526508 - RNA, 19 nt, Artificial Sequence
  Description of Artificial Sequence: Synthetic oligonucleotide
  Antisense strand to SEQ ID NO: 526507
ugagauaauguacacaagg

SEQ ID NO: 526509 - RNA, 19 nt, Artificial Sequence
  Description of Artificial Sequence: Synthetic oligonucleotide
  Sense strand starting at position 1148 of SEQ ID NO: 317968
ugaggucuaaccugccaga

SEQ ID NO: 526510 - RNA, 19 nt, Artificial Sequence
  Description of Artificial Sequence: Synthetic oligonucleotide
  Antisense strand to SEQ ID NO: 526509
ucuggcagguuagaccuca

SEQ ID NO: 526511 - RNA, 19 nt, Artificial Sequence
  Description of Artificial Sequence: Synthetic oligonucleotide
  Sense strand starting at position 1299 of SEQ ID NO: 317968
gucagaacuuucuagaaug

SEQ ID NO: 526512 - RNA, 19 nt, Artificial Sequence
  Description of Artificial Sequence: Synthetic oligonucleotide
  Antisense strand to SEQ ID NO: 526511
cauucuagaaaguucugac

SEQ ID NO: 526513 - RNA, 19 nt, Artificial Sequence
  Description of Artificial Sequence: Synthetic oligonucleotide
  Sense strand starting at position 2784 of SEQ ID NO: 317968
gggacacuuuaucagaaac

SEQ ID NO: 526514 - RNA, 19 nt, Artificial Sequence
  Description of Artificial Sequence: Synthetic oligonucleotide
  Antisense strand to SEQ ID NO: 526513
guuucugauaaaguguccc

SEQ ID NO: 526515 - RNA, 19 nt, Artificial Sequence
  Description of Artificial Sequence: Synthetic oligonucleotide
  Sense strand starting at position 3251 of SEQ ID NO: 317968
gcuccucucugauccaaag

SEQ ID NO: 526516 - RNA, 19 nt, Artificial Sequence
  Description of Artificial Sequence: Synthetic oligonucleotide
  Antisense strand to SEQ ID NO: 526515
cuuuggaucagagaggagc

SEQ ID NO: 526517 - RNA, 19 nt, Artificial Sequence
  Description of Artificial Sequence: Synthetic oligonucleotide
  Sense strand starting at position 3570 of SEQ ID NO: 317968
agcugagacuucucucugu

SEQ ID NO: 526518 - RNA, 19 nt, Artificial Sequence
  Description of Artificial Sequence: Synthetic oligonucleotide
  Antisense strand to SEQ ID NO: 526517
acagagagaagucucagcu

SEQ ID NO: 526519 - RNA, 19 nt, Artificial Sequence
  Description of Artificial Sequence: Synthetic oligonucleotide
  Sense strand starting at position 3573 of SEQ ID NO: 317968
ugagacuucucucugugau

SEQ ID NO: 526520 - RNA, 19 nt, Artificial Sequence
  Description of Artificial Sequence: Synthetic oligonucleotide
  Antisense strand to SEQ ID NO: 526519
aucacagagagaagucuca

SEQ ID NO: 526521 - RNA, 19 nt, Artificial Sequence
  Description of Artificial Sequence: Synthetic oligonucleotide
  Sense strand starting at position 3574 of SEQ ID NO: 317968
gagacuucucucugugaug

SEQ ID NO: 526522 - RNA, 19 nt, Artificial Sequence
  Description of Artificial Sequence: Synthetic oligonucleotide
  Antisense strand to SEQ ID NO: 526521
caucacagagagaagucuc

SEQ ID NO: 526523 - RNA, 19 nt, Artificial Sequence
  Description of Artificial Sequence: Synthetic oligonucleotide
  Sense strand starting at position 3575 of SEQ ID NO: 317968
agacuucucucugugauga

SEQ ID NO: 526524 - RNA, 19 nt, Artificial Sequence
  Description of Artificial Sequence: Synthetic oligonucleotide
  Antisense strand to SEQ ID NO: 526523
ucaucacagagagaagucu

SEQ ID NO: 526525 - RNA, 19 nt, Artificial Sequence
  Description of Artificial Sequence: Synthetic oligonucleotide
  Sense strand starting at position 3576 of SEQ ID NO: 317968
gacuucucucugugaugaa

SEQ ID NO: 526526 - RNA, 19 nt, Artificial Sequence
  Description of Artificial Sequence: Synthetic oligonucleotide
  Antisense strand to SEQ ID NO: 526525
uucaucacagagagaaguc

SEQ ID NO: 526527 - RNA, 19 nt, Artificial Sequence
  Description of Artificial Sequence: Synthetic oligonucleotide
  Sense strand starting at position 3716 of SEQ ID NO: 317968
gaaagaggucacugacugu

SEQ ID NO: 526528 - RNA, 19 nt, Artificial Sequence
  Description of Artificial Sequence: Synthetic oligonucleotide
  Antisense strand to SEQ ID NO: 526527
acagucagugaccucuuuc

SEQ ID NO: 526529 - RNA, 19 nt, Artificial Sequence
  Description of Artificial Sequence: Synthetic oligonucleotide
  Sense strand starting at position 3849 of SEQ ID NO: 317968
cauauuggugcccagagga

SEQ ID NO: 526530 - RNA, 19 nt, Artificial Sequence
  Description of Artificial Sequence: Synthetic oligonucleotide
  Antisense strand to SEQ ID NO: 526529
uccucugggcaccaauaug

SEQ ID NO: 526531 - RNA, 19 nt, Artificial Sequence
  Description of Artificial Sequence: Synthetic oligonucleotide
  Sense strand starting at position 3863 of SEQ ID NO: 317968
gaggaugaguuccagguaa

SEQ ID NO: 526532 - RNA, 19 nt, Artificial Sequence
  Description of Artificial Sequence: Synthetic oligonucleotide
  Antisense strand to SEQ ID NO: 526531
uuaccuggaacucauccuc

SEQ ID NO: 526533 - RNA, 19 nt, Artificial Sequence
  Description of Artificial Sequence: Synthetic oligonucleotide
  Sense strand starting at position 3865 of SEQ ID NO: 317968
ggaugaguuccagguaacu

SEQ ID NO: 526534 - RNA, 19 nt, Artificial Sequence
  Description of Artificial Sequence: Synthetic oligonucleotide
  Antisense strand to SEQ ID NO: 526533
aguuaccuggaacucaucc

SEQ ID NO: 526535 - RNA, 19 nt, Artificial Sequence
  Description of Artificial Sequence: Synthetic oligonucleotide
  Sense strand starting at position 3884 of SEQ ID NO: 317968
ggguaggaguggucauguu

SEQ ID NO: 526536 - RNA, 19 nt, Artificial Sequence
  Description of Artificial Sequence: Synthetic oligonucleotide
  Antisense strand to SEQ ID NO: 526535
aacaugaccacuccuaccc

SEQ ID NO: 526537 - RNA, 19 nt, Artificial Sequence
  Description of Artificial Sequence: Synthetic oligonucleotide
  Sense strand starting at position 3896 of SEQ ID NO: 317968
ucauguuaggcccagagga

SEQ ID NO: 526538 - RNA, 19 nt, Artificial Sequence
  Description of Artificial Sequence: Synthetic oligonucleotide
  Antisense strand to SEQ ID NO: 526537
uccucugggccuaacauga

SEQ ID NO: 526539 - RNA, 19 nt, Artificial Sequence
  Description of Artificial Sequence: Synthetic oligonucleotide
  Sense strand starting at position 3942 of SEQ ID NO: 317968
aaaugugacucucugaaag

SEQ ID NO: 526540 - RNA, 19 nt, Artificial Sequence
  Description of Artificial Sequence: Synthetic oligonucleotide
  Antisense strand to SEQ ID NO: 526539
cuuucagagagucacauuu

SEQ ID NO: 526541 - RNA, 19 nt, Artificial Sequence
  Description of Artificial Sequence: Synthetic oligonucleotide
  Sense strand starting at position 17 of SEQ ID NO: 317969
aggaauuauuugugacagg

SEQ ID NO: 526542 - RNA, 19 nt, Artificial Sequence
  Description of Artificial Sequence: Synthetic oligonucleotide
  Antisense strand to SEQ ID NO: 526541
ccugucacaaauaauuccu

SEQ ID NO: 526543 - RNA, 19 nt, Artificial Sequence
  Description of Artificial Sequence: Synthetic oligonucleotide
  Sense strand starting at position 422 of SEQ ID NO: 317969
ggcagagccucuccucuaa

SEQ ID NO: 526544 - RNA, 19 nt, Artificial Sequence
  Description of Artificial Sequence: Synthetic oligonucleotide
  Antisense strand to SEQ ID NO: 526543
uuagaggagaggcucugcc

SEQ ID NO: 526545 - RNA, 19 nt, Artificial Sequence
  Description of Artificial Sequence: Synthetic oligonucleotide
  Sense strand starting at position 495 of SEQ ID NO: 317969
ggcaguuuacaacauacuu

SEQ ID NO: 526546 - RNA, 19 nt, Artificial Sequence
  Description of Artificial Sequence: Synthetic oligonucleotide
  Antisense strand to SEQ ID NO: 526545
aaguauguuguaaacugcc

SEQ ID NO: 526547 - RNA, 19 nt, Artificial Sequence
  Description of Artificial Sequence: Synthetic oligonucleotide
  Sense strand starting at position 515 of SEQ ID NO: 317969
aaauguuaacgcugaagca

SEQ ID NO: 526548 - RNA, 19 nt, Artificial Sequence
  Description of Artificial Sequence: Synthetic oligonucleotide
  Antisense strand to SEQ ID NO: 526547
ugcuucagcguuaacauuu

SEQ ID NO: 526549 - RNA, 19 nt, Artificial Sequence
  Description of Artificial Sequence: Synthetic oligonucleotide
  Sense strand starting at position 537 of SEQ ID NO: 317969
aaaguaaugccuuaaggug

SEQ ID NO: 526550 - RNA, 19 nt, Artificial Sequence
  Description of Artificial Sequence: Synthetic oligonucleotide
  Antisense strand to SEQ ID NO: 526549
caccuuaaggcauuacuuu

SEQ ID NO: 526551 - RNA, 19 nt, Artificial Sequence
  Description of Artificial Sequence: Synthetic oligonucleotide
  Sense strand starting at position 626 of SEQ ID NO: 317969
gcaagugauuucucccucu

SEQ ID NO: 526552 - RNA, 19 nt, Artificial Sequence
  Description of Artificial Sequence: Synthetic oligonucleotide
  Antisense strand to SEQ ID NO: 526551
agagggagaaaucacuugc

SEQ ID NO: 526553 - RNA, 19 nt, Artificial Sequence
  Description of Artificial Sequence: Synthetic oligonucleotide
  Sense strand starting at position 659 of SEQ ID NO: 317969
guucggauuugggucgaga

SEQ ID NO: 526554 - RNA, 19 nt, Artificial Sequence
  Description of Artificial Sequence: Synthetic oligonucleotide
  Antisense strand to SEQ ID NO: 526553
ucucgacccaaauccgaac

SEQ ID NO: 526555 - RNA, 19 nt, Artificial Sequence
  Description of Artificial Sequence: Synthetic oligonucleotide
  Sense strand starting at position 673 of SEQ ID NO: 317969
cgagaagacuucucaugaa

SEQ ID NO: 526556 - RNA, 19 nt, Artificial Sequence
  Description of Artificial Sequence: Synthetic oligonucleotide
  Antisense strand to SEQ ID NO: 526555
uucaugagaagucuucucg

SEQ ID NO: 526557 - RNA, 19 nt, Artificial Sequence
  Description of Artificial Sequence: Synthetic oligonucleotide
  Sense strand starting at position 868 of SEQ ID NO: 317969
agcuaagggucagaaagaa

SEQ ID NO: 526558 - RNA, 19 nt, Artificial Sequence
  Description of Artificial Sequence: Synthetic oligonucleotide
  Antisense strand to SEQ ID NO: 526557
uucuuucugacccuuagcu

SEQ ID NO: 526559 - RNA, 19 nt, Artificial Sequence
  Description of Artificial Sequence: Synthetic oligonucleotide
  Sense strand starting at position 910 of SEQ ID NO: 317969
cuguaaagugcucaaagca

SEQ ID NO: 526560 - RNA, 19 nt, Artificial Sequence
  Description of Artificial Sequence: Synthetic oligonucleotide
  Antisense strand to SEQ ID NO: 526559
ugcuuugagcacuuuacag

SEQ ID NO: 526561 - RNA, 19 nt, Artificial Sequence
  Description of Artificial Sequence: Synthetic oligonucleotide
  Sense strand starting at position 1012 of SEQ ID NO: 317969
gcagaaagcuacuucccuu

SEQ ID NO: 526562 - RNA, 19 nt, Artificial Sequence
  Description of Artificial Sequence: Synthetic oligonucleotide
  Antisense strand to SEQ ID NO: 526561
aagggaaguagcuuucugc

SEQ ID NO: 526563 - RNA, 19 nt, Artificial Sequence
  Description of Artificial Sequence: Synthetic oligonucleotide
  Sense strand starting at position 1052 of SEQ ID NO: 317969
uuccaaguuugggcaaagu

SEQ ID NO: 526564 - RNA, 19 nt, Artificial Sequence
  Description of Artificial Sequence: Synthetic oligonucleotide
  Antisense strand to SEQ ID NO: 526563
acuuugcccaaacuuggaa

SEQ ID NO: 526565 - RNA, 19 nt, Artificial Sequence
  Description of Artificial Sequence: Synthetic oligonucleotide
  Sense strand starting at position 1201 of SEQ ID NO: 317969
ugcaaaugggucgacugaa

SEQ ID NO: 526566 - RNA, 19 nt, Artificial Sequence
  Description of Artificial Sequence: Synthetic oligonucleotide
  Antisense strand to SEQ ID NO: 526565
uucagucgacccauuugca

SEQ ID NO: 526567 - RNA, 19 nt, Artificial Sequence
  Description of Artificial Sequence: Synthetic oligonucleotide
  Sense strand starting at position 1215 of SEQ ID NO: 317969
cugaaaucuccaggcuacu

SEQ ID NO: 526568 - RNA, 19 nt, Artificial Sequence
  Description of Artificial Sequence: Synthetic oligonucleotide
  Antisense strand to SEQ ID NO: 526567
aguagccuggagauuucag

SEQ ID NO: 526569 - RNA, 19 nt, Artificial Sequence
  Description of Artificial Sequence: Synthetic oligonucleotide
  Sense strand starting at position 1281 of SEQ ID NO: 317969
uaaaguuaucauggccaga

SEQ ID NO: 526570 - RNA, 19 nt, Artificial Sequence
  Description of Artificial Sequence: Synthetic oligonucleotide
  Antisense strand to SEQ ID NO: 526569
ucuggccaugauaacuuua

SEQ ID NO: 526571 - RNA, 19 nt, Artificial Sequence
  Description of Artificial Sequence: Synthetic oligonucleotide
  Sense strand starting at position 1283 of SEQ ID NO: 317969
aaguuaucauggccagaac

SEQ ID NO: 526572 - RNA, 19 nt, Artificial Sequence
  Description of Artificial Sequence: Synthetic oligonucleotide
  Antisense strand to SEQ ID NO: 526571
guucuggccaugauaacuu

SEQ ID NO: 526573 - RNA, 19 nt, Artificial Sequence
  Description of Artificial Sequence: Synthetic oligonucleotide
  Sense strand starting at position 1388 of SEQ ID NO: 317969
ccuaaagugucauugccua

SEQ ID NO: 526574 - RNA, 19 nt, Artificial Sequence
  Description of Artificial Sequence: Synthetic oligonucleotide
  Antisense strand to SEQ ID NO: 526573
uaggcaaugacacuuuagg

SEQ ID NO: 526575 - RNA, 19 nt, Artificial Sequence
  Description of Artificial Sequence: Synthetic oligonucleotide
  Sense strand starting at position 1393 of SEQ ID NO: 317969
agugucauugccuacaauu

SEQ ID NO: 526576 - RNA, 19 nt, Artificial Sequence
  Description of Artificial Sequence: Synthetic oligonucleotide
  Antisense strand to SEQ ID NO: 526575
aauuguaggcaaugacacu

SEQ ID NO: 526577 - RNA, 19 nt, Artificial Sequence
  Description of Artificial Sequence: Synthetic oligonucleotide
  Sense strand starting at position 2036 of SEQ ID NO: 317969
ggaagggaaucgucgaguu

SEQ ID NO: 526578 - RNA, 19 nt, Artificial Sequence
  Description of Artificial Sequence: Synthetic oligonucleotide
  Antisense strand to SEQ ID NO: 526577
aacucgacgauucccuucc

SEQ ID NO: 526579 - RNA, 19 nt, Artificial Sequence
  Description of Artificial Sequence: Synthetic oligonucleotide
  Sense strand starting at position 2038 of SEQ ID NO: 317969
aagggaaucgucgaguucu

SEQ ID NO: 526580 - RNA, 19 nt, Artificial Sequence
  Description of Artificial Sequence: Synthetic oligonucleotide
  Antisense strand to SEQ ID NO: 526579
agaacucgacgauucccuu

SEQ ID NO: 526581 - RNA, 19 nt, Artificial Sequence
  Description of Artificial Sequence: Synthetic oligonucleotide
  Sense strand starting at position 2048 of SEQ ID NO: 317969
ucgaguucuuauuugcgua

SEQ ID NO: 526582 - RNA, 19 nt, Artificial Sequence
  Description of Artificial Sequence: Synthetic oligonucleotide
  Antisense strand to SEQ ID NO: 526581
uacgcaaauaagaacucga

SEQ ID NO: 526583 - RNA, 19 nt, Artificial Sequence
  Description of Artificial Sequence: Synthetic oligonucleotide
  Sense strand starting at position 2049 of SEQ ID NO: 317969
cgaguucuuauuugcguag

SEQ ID NO: 526584 - RNA, 19 nt, Artificial Sequence
  Description of Artificial Sequence: Synthetic oligonucleotide
  Antisense strand to SEQ ID NO: 526583
cuacgcaaauaagaacucg

SEQ ID NO: 526585 - RNA, 19 nt, Artificial Sequence
  Description of Artificial Sequence: Synthetic oligonucleotide
  Sense strand starting at position 2891 of SEQ ID NO: 317969
ucuguagccucaguuuauu

SEQ ID NO: 526586 - RNA, 19 nt, Artificial Sequence
  Description of Artificial Sequence: Synthetic oligonucleotide
  Antisense strand to SEQ ID NO: 526585
aauaaacugaggcuacaga

SEQ ID NO: 526587 - RNA, 19 nt, Artificial Sequence
  Description of Artificial Sequence: Synthetic oligonucleotide
  Sense strand starting at position 2896 of SEQ ID NO: 317969
agccucaguuuauuaagua

SEQ ID NO: 526588 - RNA, 19 nt, Artificial Sequence
  Description of Artificial Sequence: Synthetic oligonucleotide
  Antisense strand to SEQ ID NO: 526587
uacuuaauaaacugaggcu

SEQ ID NO: 526589 - RNA, 19 nt, Artificial Sequence
  Description of Artificial Sequence: Synthetic oligonucleotide
  Sense strand starting at position 2921 of SEQ ID NO: 317969
cuggcauucuucgcugaaa

SEQ ID NO: 526590 - RNA, 19 nt, Artificial Sequence
  Description of Artificial Sequence: Synthetic oligonucleotide
  Antisense strand to SEQ ID NO: 526589
uuucagcgaagaaugccag

SEQ ID NO: 526591 - RNA, 19 nt, Artificial Sequence
  Description of Artificial Sequence: Synthetic oligonucleotide
  Sense strand starting at position 2922 of SEQ ID NO: 317969
uggcauucuucgcugaaag

SEQ ID NO: 526592 - RNA, 19 nt, Artificial Sequence
  Description of Artificial Sequence: Synthetic oligonucleotide
  Antisense strand to SEQ ID NO: 526591
cuuucagcgaagaaugcca

SEQ ID NO: 526593 - RNA, 19 nt, Artificial Sequence
  Description of Artificial Sequence: Synthetic oligonucleotide
  Sense strand starting at position 2924 of SEQ ID NO: 317969
gcauucuucgcugaaaguu

SEQ ID NO: 526594 - RNA, 19 nt, Artificial Sequence
  Description of Artificial Sequence: Synthetic oligonucleotide
  Antisense strand to SEQ ID NO: 526593
aacuuucagcgaagaaugc

SEQ ID NO: 526595 - RNA, 19 nt, Artificial Sequence
  Description of Artificial Sequence: Synthetic oligonucleotide
  Sense strand starting at position 2944 of SEQ ID NO: 317969
gcgggucucucauuuauaa

SEQ ID NO: 526596 - RNA, 19 nt, Artificial Sequence
  Description of Artificial Sequence: Synthetic oligonucleotide
  Antisense strand to SEQ ID NO: 526595
uuauaaaugagagacccgc

SEQ ID NO: 526597 - RNA, 19 nt, Artificial Sequence
  Description of Artificial Sequence: Synthetic oligonucleotide
  Sense strand starting at position 3036 of SEQ ID NO: 317969
ugcuauauuguuuauucca

SEQ ID NO: 526598 - RNA, 19 nt, Artificial Sequence
  Description of Artificial Sequence: Synthetic oligonucleotide
  Antisense strand to SEQ ID NO: 526597
uggaauaaacaauauagca

SEQ ID NO: 526599 - RNA, 19 nt, Artificial Sequence
  Description of Artificial Sequence: Synthetic oligonucleotide
  Sense strand starting at position 3100 of SEQ ID NO: 317969
acaacagauagcgaaguau

SEQ ID NO: 526600 - RNA, 19 nt, Artificial Sequence
  Description of Artificial Sequence: Synthetic oligonucleotide
  Antisense strand to SEQ ID NO: 526599
auacuucgcuaucuguugu

SEQ ID NO: 526601 - RNA, 19 nt, Artificial Sequence
  Description of Artificial Sequence: Synthetic oligonucleotide
  Sense strand starting at position 3133 of SEQ ID NO: 317969
uggacauucgcaggucacu

SEQ ID NO: 526602 - RNA, 19 nt, Artificial Sequence
  Description of Artificial Sequence: Synthetic oligonucleotide
  Antisense strand to SEQ ID NO: 526601
agugaccugcgaaugucca

SEQ ID NO: 526603 - RNA, 19 nt, Artificial Sequence
  Description of Artificial Sequence: Synthetic oligonucleotide
  Sense strand starting at position 3142 of SEQ ID NO: 317969
gcaggucacugggauuugu

SEQ ID NO: 526604 - RNA, 19 nt, Artificial Sequence
  Description of Artificial Sequence: Synthetic oligonucleotide
  Antisense strand to SEQ ID NO: 526603
acaaaucccagugaccugc

SEQ ID NO: 526605 - RNA, 19 nt, Artificial Sequence
  Description of Artificial Sequence: Synthetic oligonucleotide
  Sense strand starting at position 3151 of SEQ ID NO: 317969
ugggauuuguucuacgaau

SEQ ID NO: 526606 - RNA, 19 nt, Artificial Sequence
  Description of Artificial Sequence: Synthetic oligonucleotide
  Antisense strand to SEQ ID NO: 526605
auucguagaacaaauccca

SEQ ID NO: 526607 - RNA, 19 nt, Artificial Sequence
  Description of Artificial Sequence: Synthetic oligonucleotide
  Sense strand starting at position 3286 of SEQ ID NO: 317969
gcaaauaacucagugauaa

SEQ ID NO: 526608 - RNA, 19 nt, Artificial Sequence
  Description of Artificial Sequence: Synthetic oligonucleotide
  Antisense strand to SEQ ID NO: 526607
uuaucacugaguuauuugc

SEQ ID NO: 526609 - RNA, 19 nt, Artificial Sequence
  Description of Artificial Sequence: Synthetic oligonucleotide
  Sense strand starting at position 3290 of SEQ ID NO: 317969
auaacucagugauaacaga

SEQ ID NO: 526610 - RNA, 19 nt, Artificial Sequence
  Description of Artificial Sequence: Synthetic oligonucleotide
  Antisense strand to SEQ ID NO: 526609
ucuguuaucacugaguuau

SEQ ID NO: 526611 - RNA, 19 nt, Artificial Sequence
  Description of Artificial Sequence: Synthetic oligonucleotide
  Sense strand starting at position 3401 of SEQ ID NO: 317969
gaaauacagccgugcuaau

SEQ ID NO: 526612 - RNA, 19 nt, Artificial Sequence
  Description of Artificial Sequence: Synthetic oligonucleotide
  Antisense strand to SEQ ID NO: 526611
auuagcacggcuguauuuc

SEQ ID NO: 526613 - RNA, 19 nt, Artificial Sequence
  Description of Artificial Sequence: Synthetic oligonucleotide
  Sense strand starting at position 3573 of SEQ ID NO: 317969
gcuuuauaauuaccgucau

SEQ ID NO: 526614 - RNA, 19 nt, Artificial Sequence
  Description of Artificial Sequence: Synthetic oligonucleotide
  Antisense strand to SEQ ID NO: 526613
augacgguaauuauaaagc

SEQ ID NO: 526615 - RNA, 19 nt, Artificial Sequence
  Description of Artificial Sequence: Synthetic oligonucleotide
  Sense strand starting at position 3892 of SEQ ID NO: 317969
cucauuaauguagaguugu

SEQ ID NO: 526616 - RNA, 19 nt, Artificial Sequence
  Description of Artificial Sequence: Synthetic oligonucleotide
  Antisense strand to SEQ ID NO: 526615
acaacucuacauuaaugag

SEQ ID NO: 526617 - RNA, 19 nt, Artificial Sequence
  Description of Artificial Sequence: Synthetic oligonucleotide
  Sense strand starting at position 3920 of SEQ ID NO: 317969
ucuaauggcagacgacauu

SEQ ID NO: 526618 - RNA, 19 nt, Artificial Sequence
  Description of Artificial Sequence: Synthetic oligonucleotide
  Antisense strand to SEQ ID NO: 526617
aaugucgucugccauuaga

SEQ ID NO: 526619 - RNA, 19 nt, Artificial Sequence
  Description of Artificial Sequence: Synthetic oligonucleotide
  Sense strand starting at position 3929 of SEQ ID NO: 317969
agacgacauuaacaauuaa

SEQ ID NO: 526620 - RNA, 19 nt, Artificial Sequence
  Description of Artificial Sequence: Synthetic oligonucleotide
  Antisense strand to SEQ ID NO: 526619
uuaauuguuaaugucgucu

SEQ ID NO: 526621 - RNA, 19 nt, Artificial Sequence
  Description of Artificial Sequence: Synthetic oligonucleotide
  Sense strand starting at position 60 of SEQ ID NO: 317970
gagcuccugccugagaguu

SEQ ID NO: 526622 - RNA, 19 nt, Artificial Sequence
  Description of Artificial Sequence: Synthetic oligonucleotide
  Antisense strand to SEQ ID NO: 526621
aacucucaggcaggagcuc

SEQ ID NO: 526623 - RNA, 19 nt, Artificial Sequence
  Description of Artificial Sequence: Synthetic oligonucleotide
  Sense strand starting at position 352 of SEQ ID NO: 317970
cccauucccggugaacauu

SEQ ID NO: 526624 - RNA, 19 nt, Artificial Sequence
  Description of Artificial Sequence: Synthetic oligonucleotide
  Antisense strand to SEQ ID NO: 526623
aauguucaccgggaauggg

SEQ ID NO: 526625 - RNA, 19 nt, Artificial Sequence
  Description of Artificial Sequence: Synthetic oligonucleotide
  Sense strand starting at position 398 of SEQ ID NO: 317970
ugaaauucuguuuacguuu

SEQ ID NO: 526626 - RNA, 19 nt, Artificial Sequence
  Description of Artificial Sequence: Synthetic oligonucleotide
  Antisense strand to SEQ ID NO: 526625
aaacguaaacagaauuuca

SEQ ID NO: 526627 - RNA, 19 nt, Artificial Sequence
  Description of Artificial Sequence: Synthetic oligonucleotide
  Sense strand starting at position 409 of SEQ ID NO: 317970
uuacguuuggcccagagaa

SEQ ID NO: 526628 - RNA, 19 nt, Artificial Sequence
  Description of Artificial Sequence: Synthetic oligonucleotide
  Antisense strand to SEQ ID NO: 526627
uucucugggccaaacguaa

SEQ ID NO: 526629 - RNA, 19 nt, Artificial Sequence
  Description of Artificial Sequence: Synthetic oligonucleotide
  Sense strand starting at position 998 of SEQ ID NO: 317970
ggagaucauccacagugca

SEQ ID NO: 526630 - RNA, 19 nt, Artificial Sequence
  Description of Artificial Sequence: Synthetic oligonucleotide
  Antisense strand to SEQ ID NO: 526629
ugcacuguggaugaucucc

SEQ ID NO: 526631 - RNA, 19 nt, Artificial Sequence
  Description of Artificial Sequence: Synthetic oligonucleotide
  Sense strand starting at position 2348 of SEQ ID NO: 317970
cggccauugcucguggagu

SEQ ID NO: 526632 - RNA, 19 nt, Artificial Sequence
  Description of Artificial Sequence: Synthetic oligonucleotide
  Antisense strand to SEQ ID NO: 526631
acuccacgagcaauggccg

SEQ ID NO: 526633 - RNA, 19 nt, Artificial Sequence
  Description of Artificial Sequence: Synthetic oligonucleotide
  Sense strand starting at position 2408 of SEQ ID NO: 317970
ggacaaagugggugaaauc

SEQ ID NO: 526634 - RNA, 19 nt, Artificial Sequence
  Description of Artificial Sequence: Synthetic oligonucleotide
  Antisense strand to SEQ ID NO: 526633
gauuucacccacuuugucc

SEQ ID NO: 526635 - RNA, 19 nt, Artificial Sequence
  Description of Artificial Sequence: Synthetic oligonucleotide
  Sense strand starting at position 2578 of SEQ ID NO: 317970
ggucccuucucccuuagaa

SEQ ID NO: 526636 - RNA, 19 nt, Artificial Sequence
  Description of Artificial Sequence: Synthetic oligonucleotide
  Antisense strand to SEQ ID NO: 526635
uucuaagggagaagggacc

SEQ ID NO: 526637 - RNA, 19 nt, Artificial Sequence
  Description of Artificial Sequence: Synthetic oligonucleotide
  Sense strand starting at position 2688 of SEQ ID NO: 317970
gucuuccuucccgaaugaa

SEQ ID NO: 526638 - RNA, 19 nt, Artificial Sequence
  Description of Artificial Sequence: Synthetic oligonucleotide
  Antisense strand to SEQ ID NO: 526637
uucauucgggaaggaagac

SEQ ID NO: 526639 - RNA, 19 nt, Artificial Sequence
  Description of Artificial Sequence: Synthetic oligonucleotide
  Sense strand starting at position 2708 of SEQ ID NO: 317970
uggaaacaccuuuguaaca

SEQ ID NO: 526640 - RNA, 19 nt, Artificial Sequence
  Description of Artificial Sequence: Synthetic oligonucleotide
  Antisense strand to SEQ ID NO: 526639
uguuacaaagguguuucca

SEQ ID NO: 526641 - RNA, 19 nt, Artificial Sequence
  Description of Artificial Sequence: Synthetic oligonucleotide
  Sense strand starting at position 2732 of SEQ ID NO: 317970
gggcccauaaauggucaua

SEQ ID NO: 526642 - RNA, 19 nt, Artificial Sequence
  Description of Artificial Sequence: Synthetic oligonucleotide
  Antisense strand to SEQ ID NO: 526641
uaugaccauuuaugggccc

SEQ ID NO: 526643 - RNA, 19 nt, Artificial Sequence
  Description of Artificial Sequence: Synthetic oligonucleotide
  Sense strand starting at position 2735 of SEQ ID NO: 317970
cccauaaauggucauacgu

SEQ ID NO: 526644 - RNA, 19 nt, Artificial Sequence
  Description of Artificial Sequence: Synthetic oligonucleotide
  Antisense strand to SEQ ID NO: 526643
acguaugaccauuuauggg

SEQ ID NO: 526645 - RNA, 19 nt, Artificial Sequence
  Description of Artificial Sequence: Synthetic oligonucleotide
  Sense strand starting at position 2801 of SEQ ID NO: 317970
ggcugauggccaggagacu

SEQ ID NO: 526646 - RNA, 19 nt, Artificial Sequence
  Description of Artificial Sequence: Synthetic oligonucleotide
  Antisense strand to SEQ ID NO: 526645
agucuccuggccaucagcc

SEQ ID NO: 526647 - RNA, 19 nt, Artificial Sequence
  Description of Artificial Sequence: Synthetic oligonucleotide
  Sense strand starting at position 2871 of SEQ ID NO: 317970
ggcuuaggugaacaguguu

SEQ ID NO: 526648 - RNA, 19 nt, Artificial Sequence
  Description of Artificial Sequence: Synthetic oligonucleotide
  Antisense strand to SEQ ID NO: 526647
aacacuguucaccuaagcc

SEQ ID NO: 526649 - RNA, 19 nt, Artificial Sequence
  Description of Artificial Sequence: Synthetic oligonucleotide
  Sense strand starting at position 2950 of SEQ ID NO: 317970
ggaugaaguuaguuaaaua

SEQ ID NO: 526650 - RNA, 19 nt, Artificial Sequence
  Description of Artificial Sequence: Synthetic oligonucleotide
  Antisense strand to SEQ ID NO: 526649
uauuuaacuaacuucaucc

SEQ ID NO: 526651 - RNA, 19 nt, Artificial Sequence
  Description of Artificial Sequence: Synthetic oligonucleotide
  Sense strand starting at position 3009 of SEQ ID NO: 317970
aagagauauuacguuuguu

SEQ ID NO: 526652 - RNA, 19 nt, Artificial Sequence
  Description of Artificial Sequence: Synthetic oligonucleotide
  Antisense strand to SEQ ID NO: 526651
aacaaacguaauaucucuu

SEQ ID NO: 526653 - RNA, 19 nt, Artificial Sequence
  Description of Artificial Sequence: Synthetic oligonucleotide
  Sense strand starting at position 3085 of SEQ ID NO: 317970
uauuaauaguugcuagaga

SEQ ID NO: 526654 - RNA, 19 nt, Artificial Sequence
  Description of Artificial Sequence: Synthetic oligonucleotide
  Antisense strand to SEQ ID NO: 526653
ucucuagcaacuauuaaua

SEQ ID NO: 526655 - RNA, 19 nt, Artificial Sequence
  Description of Artificial Sequence: Synthetic oligonucleotide
  Sense strand starting at position 3185 of SEQ ID NO: 317970
cuauguaaugcagagccaa

SEQ ID NO: 526656 - RNA, 19 nt, Artificial Sequence
  Description of Artificial Sequence: Synthetic oligonucleotide
  Antisense strand to SEQ ID NO: 526655
uuggcucugcauuacauag

SEQ ID NO: 526657 - RNA, 19 nt, Artificial Sequence
  Description of Artificial Sequence: Synthetic oligonucleotide
  Sense strand starting at position 3206 of SEQ ID NO: 317970
guaucucuacuguagguau

SEQ ID NO: 526658 - RNA, 19 nt, Artificial Sequence
  Description of Artificial Sequence: Synthetic oligonucleotide
  Antisense strand to SEQ ID NO: 526657
auaccuacaguagagauac

SEQ ID NO: 526659 - RNA, 19 nt, Artificial Sequence
  Description of Artificial Sequence: Synthetic oligonucleotide
  Sense strand starting at position 3266 of SEQ ID NO: 317970
guugacuucccauguggau

SEQ ID NO: 526660 - RNA, 19 nt, Artificial Sequence
  Description of Artificial Sequence: Synthetic oligonucleotide
  Antisense strand to SEQ ID NO: 526659
auccacaugggaagucaac

SEQ ID NO: 526661 - RNA, 19 nt, Artificial Sequence
  Description of Artificial Sequence: Synthetic oligonucleotide
  Sense strand starting at position 3313 of SEQ ID NO: 317970
gcuacuacauccucaguga

SEQ ID NO: 526662 - RNA, 19 nt, Artificial Sequence
  Description of Artificial Sequence: Synthetic oligonucleotide
  Antisense strand to SEQ ID NO: 526661
ucacugaggauguaguagc

SEQ ID NO: 526663 - RNA, 19 nt, Artificial Sequence
  Description of Artificial Sequence: Synthetic oligonucleotide
  Sense strand starting at position 3348 of SEQ ID NO: 317970
gugugauccucucucagau

SEQ ID NO: 526664 - RNA, 19 nt, Artificial Sequence
  Description of Artificial Sequence: Synthetic oligonucleotide
  Antisense strand to SEQ ID NO: 526663
aucugagagaggaucacac

SEQ ID NO: 526665 - RNA, 19 nt, Artificial Sequence
  Description of Artificial Sequence: Synthetic oligonucleotide
  Sense strand starting at position 3363 of SEQ ID NO: 317970
agauuugacuaugaaucuu

SEQ ID NO: 526666 - RNA, 19 nt, Artificial Sequence
  Description of Artificial Sequence: Synthetic oligonucleotide
  Antisense strand to SEQ ID NO: 526665
aagauucauagucaaaucu

SEQ ID NO: 526667 - RNA, 19 nt, Artificial Sequence
  Description of Artificial Sequence: Synthetic oligonucleotide
  Sense strand starting at position 3539 of SEQ ID NO: 317970
ucugaaauguaauucuaag

SEQ ID NO: 526668 - RNA, 19 nt, Artificial Sequence
  Description of Artificial Sequence: Synthetic oligonucleotide
  Antisense strand to SEQ ID NO: 526667
cuuagaauuacauuucaga

SEQ ID NO: 526669 - RNA, 19 nt, Artificial Sequence
  Description of Artificial Sequence: Synthetic oligonucleotide
  Sense strand starting at position 3549 of SEQ ID NO: 317970
aauucuaagucugugguca

SEQ ID NO: 526670 - RNA, 19 nt, Artificial Sequence
  Description of Artificial Sequence: Synthetic oligonucleotide
  Antisense strand to SEQ ID NO: 526669
ugaccacagacuuagaauu

SEQ ID NO: 526671 - RNA, 19 nt, Artificial Sequence
  Description of Artificial Sequence: Synthetic oligonucleotide
  Sense strand starting at position 3553 of SEQ ID NO: 317970
cuaagucuguggucaggaa

SEQ ID NO: 526672 - RNA, 19 nt, Artificial Sequence
  Description of Artificial Sequence: Synthetic oligonucleotide
  Antisense strand to SEQ ID NO: 526671
uuccugaccacagacuuag

SEQ ID NO: 526673 - RNA, 19 nt, Artificial Sequence
  Description of Artificial Sequence: Synthetic oligonucleotide
  Sense strand starting at position 3598 of SEQ ID NO: 317970
ucggcucuccucuaagaca

SEQ ID NO: 526674 - RNA, 19 nt, Artificial Sequence
  Description of Artificial Sequence: Synthetic oligonucleotide
  Antisense strand to SEQ ID NO: 526673
ugucuuagaggagagccga

SEQ ID NO: 526675 - RNA, 19 nt, Artificial Sequence
  Description of Artificial Sequence: Synthetic oligonucleotide
  Sense strand starting at position 3633 of SEQ ID NO: 317970
gcagauuucuauucucagc

SEQ ID NO: 526676 - RNA, 19 nt, Artificial Sequence
  Description of Artificial Sequence: Synthetic oligonucleotide
  Antisense strand to SEQ ID NO: 526675
gcugagaauagaaaucugc

SEQ ID NO: 526677 - RNA, 19 nt, Artificial Sequence
  Description of Artificial Sequence: Synthetic oligonucleotide
  Sense strand starting at position 3657 of SEQ ID NO: 317970
ucacaaagucccugaguca

SEQ ID NO: 526678 - RNA, 19 nt, Artificial Sequence
  Description of Artificial Sequence: Synthetic oligonucleotide
  Antisense strand to SEQ ID NO: 526677
ugacucagggacuuuguga

SEQ ID NO: 526679 - RNA, 19 nt, Artificial Sequence
  Description of Artificial Sequence: Synthetic oligonucleotide
  Sense strand starting at position 3700 of SEQ ID NO: 317970
aaagcaggacuuuguguau

SEQ ID NO: 526680 - RNA, 19 nt, Artificial Sequence
  Description of Artificial Sequence: Synthetic oligonucleotide
  Antisense strand to SEQ ID NO: 526679
auacacaaaguccugcuuu

SEQ ID NO: 526681 - RNA, 19 nt, Artificial Sequence
  Description of Artificial Sequence: Synthetic oligonucleotide
  Sense strand starting at position 3729 of SEQ ID NO: 317970
uuaguaacucaaggucaua

SEQ ID NO: 526682 - RNA, 19 nt, Artificial Sequence
  Description of Artificial Sequence: Synthetic oligonucleotide
  Antisense strand to SEQ ID NO: 526681
uaugaccuugaguuacuaa

SEQ ID NO: 526683 - RNA, 19 nt, Artificial Sequence
  Description of Artificial Sequence: Synthetic oligonucleotide
  Sense strand starting at position 3746 of SEQ ID NO: 317970
uauguaaaucagggucuau

SEQ ID NO: 526684 - RNA, 19 nt, Artificial Sequence
  Description of Artificial Sequence: Synthetic oligonucleotide
  Antisense strand to SEQ ID NO: 526683
auagacccugauuuacaua

SEQ ID NO: 526685 - RNA, 19 nt, Artificial Sequence
  Description of Artificial Sequence: Synthetic oligonucleotide
  Sense strand starting at position 3757 of SEQ ID NO: 317970
gggucuauagguugaccaa

SEQ ID NO: 526686 - RNA, 19 nt, Artificial Sequence
  Description of Artificial Sequence: Synthetic oligonucleotide
  Antisense strand to SEQ ID NO: 526685
uuggucaaccuauagaccc

SEQ ID NO: 526687 - RNA, 19 nt, Artificial Sequence
  Description of Artificial Sequence: Synthetic oligonucleotide
  Sense strand starting at position 3760 of SEQ ID NO: 317970
ucuauagguugaccaagau

SEQ ID NO: 526688 - RNA, 19 nt, Artificial Sequence
  Description of Artificial Sequence: Synthetic oligonucleotide
  Antisense strand to SEQ ID NO: 526687
aucuuggucaaccuauaga

SEQ ID NO: 526689 - RNA, 19 nt, Artificial Sequence
  Description of Artificial Sequence: Synthetic oligonucleotide
  Sense strand starting at position 3780 of SEQ ID NO: 317970
agaaauagcucuguuuaau

SEQ ID NO: 526690 - RNA, 19 nt, Artificial Sequence
  Description of Artificial Sequence: Synthetic oligonucleotide
  Antisense strand to SEQ ID NO: 526689
auuaaacagagcuauuucu

SEQ ID NO: 526691 - RNA, 19 nt, Artificial Sequence
  Description of Artificial Sequence: Synthetic oligonucleotide
  Sense strand starting at position 3791 of SEQ ID NO: 317970
uguuuaaugcagugaacag

SEQ ID NO: 526692 - RNA, 19 nt, Artificial Sequence
  Description of Artificial Sequence: Synthetic oligonucleotide
  Antisense strand to SEQ ID NO: 526691
cuguucacugcauuaaaca

SEQ ID NO: 526693 - RNA, 19 nt, Artificial Sequence
  Description of Artificial Sequence: Synthetic oligonucleotide
  Sense strand starting at position 3855 of SEQ ID NO: 317970
ugcugcaaaccagauguau

SEQ ID NO: 526694 - RNA, 19 nt, Artificial Sequence
  Description of Artificial Sequence: Synthetic oligonucleotide
  Antisense strand to SEQ ID NO: 526693
auacaucugguuugcagca

SEQ ID NO: 526695 - RNA, 19 nt, Artificial Sequence
  Description of Artificial Sequence: Synthetic oligonucleotide
  Sense strand starting at position 3906 of SEQ ID NO: 317970
aagugagcuguuuaacuac

SEQ ID NO: 526696 - RNA, 19 nt, Artificial Sequence
  Description of Artificial Sequence: Synthetic oligonucleotide
  Antisense strand to SEQ ID NO: 526695
guaguuaaacagcucacuu

SEQ ID NO: 526697 - RNA, 19 nt, Artificial Sequence
  Description of Artificial Sequence: Synthetic oligonucleotide
  Sense strand starting at position 3953 of SEQ ID NO: 317970
gucaccucggaaugagaaa

SEQ ID NO: 526698 - RNA, 19 nt, Artificial Sequence
  Description of Artificial Sequence: Synthetic oligonucleotide
  Antisense strand to SEQ ID NO: 526697
uuucucauuccgaggugac

SEQ ID NO: 526699 - RNA, 19 nt, Artificial Sequence
  Description of Artificial Sequence: Synthetic oligonucleotide
  Sense strand starting at position 3969 of SEQ ID NO: 317970
aaaggugaagugugaauga

SEQ ID NO: 526700 - RNA, 19 nt, Artificial Sequence
  Description of Artificial Sequence: Synthetic oligonucleotide
  Antisense strand to SEQ ID NO: 526699
ucauucacacuucaccuuu

SEQ ID NO: 526701 - RNA, 19 nt, Artificial Sequence
  Description of Artificial Sequence: Synthetic oligonucleotide
  Sense strand starting at position 123 of SEQ ID NO: 317971
ucagauucuuauucuguau

SEQ ID NO: 526702 - RNA, 19 nt, Artificial Sequence
  Description of Artificial Sequence: Synthetic oligonucleotide
  Antisense strand to SEQ ID NO: 526701
auacagaauaagaaucuga

SEQ ID NO: 526703 - RNA, 19 nt, Artificial Sequence
  Description of Artificial Sequence: Synthetic oligonucleotide
  Sense strand starting at position 153 of SEQ ID NO: 317971
gccucagauugcuccauuu

SEQ ID NO: 526704 - RNA, 19 nt, Artificial Sequence
  Description of Artificial Sequence: Synthetic oligonucleotide
  Antisense strand to SEQ ID NO: 526703
aaauggagcaaucugaggc

SEQ ID NO: 526705 - RNA, 19 nt, Artificial Sequence
  Description of Artificial Sequence: Synthetic oligonucleotide
  Sense strand starting at position 292 of SEQ ID NO: 317971
guucuagucuauuccaaug

SEQ ID NO: 526706 - RNA, 19 nt, Artificial Sequence
  Description of Artificial Sequence: Synthetic oligonucleotide
  Antisense strand to SEQ ID NO: 526705
cauuggaauagacuagaac

SEQ ID NO: 526707 - RNA, 19 nt, Artificial Sequence
  Description of Artificial Sequence: Synthetic oligonucleotide
  Sense strand starting at position 297 of SEQ ID NO: 317971
agucuauuccaaugcugga

SEQ ID NO: 526708 - RNA, 19 nt, Artificial Sequence
  Description of Artificial Sequence: Synthetic oligonucleotide
  Antisense strand to SEQ ID NO: 526707
uccagcauuggaauagacu

SEQ ID NO: 526709 - RNA, 19 nt, Artificial Sequence
  Description of Artificial Sequence: Synthetic oligonucleotide
  Sense strand starting at position 466 of SEQ ID NO: 317971
cucuucuuggcagguuaaa

SEQ ID NO: 526710 - RNA, 19 nt, Artificial Sequence
  Description of Artificial Sequence: Synthetic oligonucleotide
  Antisense strand to SEQ ID NO: 526709
uuuaaccugccaagaagag

SEQ ID NO: 526711 - RNA, 19 nt, Artificial Sequence
  Description of Artificial Sequence: Synthetic oligonucleotide
  Sense strand starting at position 502 of SEQ ID NO: 317971
aaguauauagaguguggaa

SEQ ID NO: 526712 - RNA, 19 nt, Artificial Sequence
  Description of Artificial Sequence: Synthetic oligonucleotide
  Antisense strand to SEQ ID NO: 526711
uuccacacucuauauacuu

SEQ ID NO: 526713 - RNA, 19 nt, Artificial Sequence
  Description of Artificial Sequence: Synthetic oligonucleotide
  Sense strand starting at position 504 of SEQ ID NO: 317971
guauauagaguguggaauc

SEQ ID NO: 526714 - RNA, 19 nt, Artificial Sequence
  Description of Artificial Sequence: Synthetic oligonucleotide
  Antisense strand to SEQ ID NO: 526713
gauuccacacucuauauac

SEQ ID NO: 526715 - RNA, 19 nt, Artificial Sequence
  Description of Artificial Sequence: Synthetic oligonucleotide
  Sense strand starting at position 523 of SEQ ID NO: 317971
aggucugguuuguuauauu

SEQ ID NO: 526716 - RNA, 19 nt, Artificial Sequence
  Description of Artificial Sequence: Synthetic oligonucleotide
  Antisense strand to SEQ ID NO: 526715
aauauaacaaaccagaccu

SEQ ID NO: 526717 - RNA, 19 nt, Artificial Sequence
  Description of Artificial Sequence: Synthetic oligonucleotide
  Sense strand starting at position 567 of SEQ ID NO: 317971
gagauugcauauguuugga

SEQ ID NO: 526718 - RNA, 19 nt, Artificial Sequence
  Description of Artificial Sequence: Synthetic oligonucleotide
  Antisense strand to SEQ ID NO: 526717
uccaaacauaugcaaucuc

SEQ ID NO: 526719 - RNA, 19 nt, Artificial Sequence
  Description of Artificial Sequence: Synthetic oligonucleotide
  Sense strand starting at position 569 of SEQ ID NO: 317971
gauugcauauguuuggaaa

SEQ ID NO: 526720 - RNA, 19 nt, Artificial Sequence
  Description of Artificial Sequence: Synthetic oligonucleotide
  Antisense strand to SEQ ID NO: 526719
uuuccaaacauaugcaauc

SEQ ID NO: 526721 - RNA, 19 nt, Artificial Sequence
  Description of Artificial Sequence: Synthetic oligonucleotide
  Sense strand starting at position 910 of SEQ ID NO: 317971
auggcaggcacuuguugaa

SEQ ID NO: 526722 - RNA, 19 nt, Artificial Sequence
  Description of Artificial Sequence: Synthetic oligonucleotide
  Antisense strand to SEQ ID NO: 526721
uucaacaagugccugccau

SEQ ID NO: 526723 - RNA, 19 nt, Artificial Sequence
  Description of Artificial Sequence: Synthetic oligonucleotide
  Sense strand starting at position 914 of SEQ ID NO: 317971
caggcacuuguugaauuaa

SEQ ID NO: 526724 - RNA, 19 nt, Artificial Sequence
  Description of Artificial Sequence: Synthetic oligonucleotide
  Antisense strand to SEQ ID NO: 526723
uuaauucaacaagugccug

SEQ ID NO: 526725 - RNA, 19 nt, Artificial Sequence
  Description of Artificial Sequence: Synthetic oligonucleotide
  Sense strand starting at position 962 of SEQ ID NO: 317971
uucugauaauacuuggcaa

SEQ ID NO: 526726 - RNA, 19 nt, Artificial Sequence
  Description of Artificial Sequence: Synthetic oligonucleotide
  Antisense strand to SEQ ID NO: 526725
uugccaaguauuaucagaa

SEQ ID NO: 526727 - RNA, 19 nt, Artificial Sequence
  Description of Artificial Sequence: Synthetic oligonucleotide
  Sense strand starting at position 964 of SEQ ID NO: 317971
cugauaauacuuggcaacu

SEQ ID NO: 526728 - RNA, 19 nt, Artificial Sequence
  Description of Artificial Sequence: Synthetic oligonucleotide
  Antisense strand to SEQ ID NO: 526727
aguugccaaguauuaucag

SEQ ID NO: 526729 - RNA, 19 nt, Artificial Sequence
  Description of Artificial Sequence: Synthetic oligonucleotide
  Sense strand starting at position 1053 of SEQ ID NO: 317971
uaucuucgagccugggaaa

SEQ ID NO: 526730 - RNA, 19 nt, Artificial Sequence
  Description of Artificial Sequence: Synthetic oligonucleotide
  Antisense strand to SEQ ID NO: 526729
uuucccaggcucgaagaua

SEQ ID NO: 526731 - RNA, 19 nt, Artificial Sequence
  Description of Artificial Sequence: Synthetic oligonucleotide
  Sense strand starting at position 1070 of SEQ ID NO: 317971
aaauaacugccuugauggu

SEQ ID NO: 526732 - RNA, 19 nt, Artificial Sequence
  Description of Artificial Sequence: Synthetic oligonucleotide
  Antisense strand to SEQ ID NO: 526731
accaucaaggcaguuauuu

SEQ ID NO: 526733 - RNA, 19 nt, Artificial Sequence
  Description of Artificial Sequence: Synthetic oligonucleotide
  Sense strand starting at position 1076 of SEQ ID NO: 317971
cugccuugaugguuaguaa

SEQ ID NO: 526734 - RNA, 19 nt, Artificial Sequence
  Description of Artificial Sequence: Synthetic oligonucleotide
  Antisense strand to SEQ ID NO: 526733
uuacuaaccaucaaggcag

SEQ ID NO: 526735 - RNA, 19 nt, Artificial Sequence
  Description of Artificial Sequence: Synthetic oligonucleotide
  Sense strand starting at position 1077 of SEQ ID NO: 317971
ugccuugaugguuaguaaa

SEQ ID NO: 526736 - RNA, 19 nt, Artificial Sequence
  Description of Artificial Sequence: Synthetic oligonucleotide
  Antisense strand to SEQ ID NO: 526735
uuuacuaaccaucaaggca

SEQ ID NO: 526737 - RNA, 19 nt, Artificial Sequence
  Description of Artificial Sequence: Synthetic oligonucleotide
  Sense strand starting at position 1101 of SEQ ID NO: 317971
cuuguuaaacaugggcaaa

SEQ ID NO: 526738 - RNA, 19 nt, Artificial Sequence
  Description of Artificial Sequence: Synthetic oligonucleotide
  Antisense strand to SEQ ID NO: 526737
uuugcccauguuuaacaag

SEQ ID NO: 526739 - RNA, 19 nt, Artificial Sequence
  Description of Artificial Sequence: Synthetic oligonucleotide
  Sense strand starting at position 2267 of SEQ ID NO: 317971
gauuucugcucuuuggcga

SEQ ID NO: 526740 - RNA, 19 nt, Artificial Sequence
  Description of Artificial Sequence: Synthetic oligonucleotide
  Antisense strand to SEQ ID NO: 526739
ucgccaaagagcagaaauc

SEQ ID NO: 526741 - RNA, 19 nt, Artificial Sequence
  Description of Artificial Sequence: Synthetic oligonucleotide
  Sense strand starting at position 2280 of SEQ ID NO: 317971
uggcgauugucacugauuu

SEQ ID NO: 526742 - RNA, 19 nt, Artificial Sequence
  Description of Artificial Sequence: Synthetic oligonucleotide
  Antisense strand to SEQ ID NO: 526741
aaaucagugacaaucgcca

SEQ ID NO: 526743 - RNA, 19 nt, Artificial Sequence
  Description of Artificial Sequence: Synthetic oligonucleotide
  Sense strand starting at position 2281 of SEQ ID NO: 317971
ggcgauugucacugauuuc

SEQ ID NO: 526744 - RNA, 19 nt, Artificial Sequence
  Description of Artificial Sequence: Synthetic oligonucleotide
  Antisense strand to SEQ ID NO: 526743
gaaaucagugacaaucgcc

SEQ ID NO: 526745 - RNA, 19 nt, Artificial Sequence
  Description of Artificial Sequence: Synthetic oligonucleotide
  Sense strand starting at position 2311 of SEQ ID NO: 317971
aaaggcugucaggagagua

SEQ ID NO: 526746 - RNA, 19 nt, Artificial Sequence
  Description of Artificial Sequence: Synthetic oligonucleotide
  Antisense strand to SEQ ID NO: 526745
uacucuccugacagccuuu

SEQ ID NO: 526747 - RNA, 19 nt, Artificial Sequence
  Description of Artificial Sequence: Synthetic oligonucleotide
  Sense strand starting at position 2500 of SEQ ID NO: 317971
cugguuauuuaacauguaa

SEQ ID NO: 526748 - RNA, 19 nt, Artificial Sequence
  Description of Artificial Sequence: Synthetic oligonucleotide
  Antisense strand to SEQ ID NO: 526747
uuacauguuaaauaaccag

SEQ ID NO: 526749 - RNA, 19 nt, Artificial Sequence
  Description of Artificial Sequence: Synthetic oligonucleotide
  Sense strand starting at position 2508 of SEQ ID NO: 317971
uuaacauguaaguguggaa

SEQ ID NO: 526750 - RNA, 19 nt, Artificial Sequence
  Description of Artificial Sequence: Synthetic oligonucleotide
  Antisense strand to SEQ ID NO: 526749
uuccacacuuacauguuaa

SEQ ID NO: 526751 - RNA, 19 nt, Artificial Sequence
  Description of Artificial Sequence: Synthetic oligonucleotide
  Sense strand starting at position 3017 of SEQ ID NO: 317971
uuucuuagugcagagauua

SEQ ID NO: 526752 - RNA, 19 nt, Artificial Sequence
  Description of Artificial Sequence: Synthetic oligonucleotide
  Antisense strand to SEQ ID NO: 526751
uaaucucugcacuaagaaa

SEQ ID NO: 526753 - RNA, 19 nt, Artificial Sequence
  Description of Artificial Sequence: Synthetic oligonucleotide
  Sense strand starting at position 3172 of SEQ ID NO: 317971
gucuucugccgagauuacu

SEQ ID NO: 526754 - RNA, 19 nt, Artificial Sequence
  Description of Artificial Sequence: Synthetic oligonucleotide
  Antisense strand to SEQ ID NO: 526753
aguaaucucggcagaagac

SEQ ID NO: 526755 - RNA, 19 nt, Artificial Sequence
  Description of Artificial Sequence: Synthetic oligonucleotide
  Sense strand starting at position 3205 of SEQ ID NO: 317971
gaugguaaugcucagaggu

SEQ ID NO: 526756 - RNA, 19 nt, Artificial Sequence
  Description of Artificial Sequence: Synthetic oligonucleotide
  Antisense strand to SEQ ID NO: 526755
accucugagcauuaccauc

SEQ ID NO: 526757 - RNA, 19 nt, Artificial Sequence
  Description of Artificial Sequence: Synthetic oligonucleotide
  Sense strand starting at position 3340 of SEQ ID NO: 317971
ugugaauagagucaacagu

SEQ ID NO: 526758 - RNA, 19 nt, Artificial Sequence
  Description of Artificial Sequence: Synthetic oligonucleotide
  Antisense strand to SEQ ID NO: 526757
acuguugacucuauucaca

SEQ ID NO: 526759 - RNA, 19 nt, Artificial Sequence
  Description of Artificial Sequence: Synthetic oligonucleotide
  Sense strand starting at position 3542 of SEQ ID NO: 317971
aaaugaagucguuauagac

SEQ ID NO: 526760 - RNA, 19 nt, Artificial Sequence
  Description of Artificial Sequence: Synthetic oligonucleotide
  Antisense strand to SEQ ID NO: 526759
gucuauaacgacuucauuu

SEQ ID NO: 526761 - RNA, 19 nt, Artificial Sequence
  Description of Artificial Sequence: Synthetic oligonucleotide
  Sense strand starting at position 3569 of SEQ ID NO: 317971
acaagucuuucugugguca

SEQ ID NO: 526762 - RNA, 19 nt, Artificial Sequence
  Description of Artificial Sequence: Synthetic oligonucleotide
  Antisense strand to SEQ ID NO: 526761
ugaccacagaaagacuugu

SEQ ID NO: 526763 - RNA, 19 nt, Artificial Sequence
  Description of Artificial Sequence: Synthetic oligonucleotide
  Sense strand starting at position 3628 of SEQ ID NO: 317971
gccggauuacaugauaggu

SEQ ID NO: 526764 - RNA, 19 nt, Artificial Sequence
  Description of Artificial Sequence: Synthetic oligonucleotide
  Antisense strand to SEQ ID NO: 526763
accuaucauguaauccggc

SEQ ID NO: 526765 - RNA, 19 nt, Artificial Sequence
  Description of Artificial Sequence: Synthetic oligonucleotide
  Sense strand starting at position 3633 of SEQ ID NO: 317971
auuacaugauagguauaug

SEQ ID NO: 526766 - RNA, 19 nt, Artificial Sequence
  Description of Artificial Sequence: Synthetic oligonucleotide
  Antisense strand to SEQ ID NO: 526765
cauauaccuaucauguaau

SEQ ID NO: 526767 - RNA, 19 nt, Artificial Sequence
  Description of Artificial Sequence: Synthetic oligonucleotide
  Sense strand starting at position 3711 of SEQ ID NO: 317971
ccaucagcagaguguuaag

SEQ ID NO: 526768 - RNA, 19 nt, Artificial Sequence
  Description of Artificial Sequence: Synthetic oligonucleotide
  Antisense strand to SEQ ID NO: 526767
cuuaacacucugcugaugg

SEQ ID NO: 526769 - RNA, 19 nt, Artificial Sequence
  Description of Artificial Sequence: Synthetic oligonucleotide
  Sense strand starting at position 3722 of SEQ ID NO: 317971
guguuaagaguucaaguuc

SEQ ID NO: 526770 - RNA, 19 nt, Artificial Sequence
  Description of Artificial Sequence: Synthetic oligonucleotide
  Antisense strand to SEQ ID NO: 526769
gaacuugaacucuuaacac

SEQ ID NO: 526771 - RNA, 19 nt, Artificial Sequence
  Description of Artificial Sequence: Synthetic oligonucleotide
  Sense strand starting at position 3762 of SEQ ID NO: 317971
augguauugucagucauuu

SEQ ID NO: 526772 - RNA, 19 nt, Artificial Sequence
  Description of Artificial Sequence: Synthetic oligonucleotide
  Antisense strand to SEQ ID NO: 526771
aaaugacugacaauaccau

SEQ ID NO: 526773 - RNA, 19 nt, Artificial Sequence
  Description of Artificial Sequence: Synthetic oligonucleotide
  Sense strand starting at position 3813 of SEQ ID NO: 317971
cugugugcugguguuucaa

SEQ ID NO: 526774 - RNA, 19 nt, Artificial Sequence
  Description of Artificial Sequence: Synthetic oligonucleotide
  Antisense strand to SEQ ID NO: 526773
uugaaacaccagcacacag

SEQ ID NO: 526775 - RNA, 19 nt, Artificial Sequence
  Description of Artificial Sequence: Synthetic oligonucleotide
  Sense strand starting at position 3880 of SEQ ID NO: 317971
ccacauauucuuggugaag

SEQ ID NO: 526776 - RNA, 19 nt, Artificial Sequence
  Description of Artificial Sequence: Synthetic oligonucleotide
  Antisense strand to SEQ ID NO: 526775
cuucaccaagaauaugugg

SEQ ID NO: 526777 - RNA, 19 nt, Artificial Sequence
  Description of Artificial Sequence: Synthetic oligonucleotide
  Sense strand starting at position 3881 of SEQ ID NO: 317971
cacauauucuuggugaagu

SEQ ID NO: 526778 - RNA, 19 nt, Artificial Sequence
  Description of Artificial Sequence: Synthetic oligonucleotide
  Antisense strand to SEQ ID NO: 526777
acuucaccaagaauaugug

SEQ ID NO: 526779 - RNA, 19 nt, Artificial Sequence
  Description of Artificial Sequence: Synthetic oligonucleotide
  Sense strand starting at position 3883 of SEQ ID NO: 317971
cauauucuuggugaagugu

SEQ ID NO: 526780 - RNA, 19 nt, Artificial Sequence
  Description of Artificial Sequence: Synthetic oligonucleotide
  Antisense strand to SEQ ID NO: 526779
acacuucaccaagaauaug

SEQ ID NO: 526781 - RNA, 19 nt, Artificial Sequence
  Description of Artificial Sequence: Synthetic oligonucleotide
  Sense strand starting at position 736 of SEQ ID NO: 317972
uuggaaacguagagggauu

SEQ ID NO: 526782 - RNA, 19 nt, Artificial Sequence
  Description of Artificial Sequence: Synthetic oligonucleotide
  Antisense strand to SEQ ID NO: 526781
aaucccucuacguuuccaa

SEQ ID NO: 526783 - RNA, 19 nt, Artificial Sequence
  Description of Artificial Sequence: Synthetic oligonucleotide
  Sense strand starting at position 779 of SEQ ID NO: 317972
cugagacugucuucuacag

SEQ ID NO: 526784 - RNA, 19 nt, Artificial Sequence
  Description of Artificial Sequence: Synthetic oligonucleotide
  Antisense strand to SEQ ID NO: 526783
cuguagaagacagucucag

SEQ ID NO: 526785 - RNA, 19 nt, Artificial Sequence
  Description of Artificial Sequence: Synthetic oligonucleotide
  Sense strand starting at position 812 of SEQ ID NO: 317972
agggucaugcacuaacauu

SEQ ID NO: 526786 - RNA, 19 nt, Artificial Sequence
  Description of Artificial Sequence: Synthetic oligonucleotide
  Antisense strand to SEQ ID NO: 526785
aauguuagugcaugacccu

SEQ ID NO: 526787 - RNA, 19 nt, Artificial Sequence
  Description of Artificial Sequence: Synthetic oligonucleotide
  Sense strand starting at position 852 of SEQ ID NO: 317972
ucucaagacucagugacuu

SEQ ID NO: 526788 - RNA, 19 nt, Artificial Sequence
  Description of Artificial Sequence: Synthetic oligonucleotide
  Antisense strand to SEQ ID NO: 526787
aagucacugagucuugaga

SEQ ID NO: 526789 - RNA, 19 nt, Artificial Sequence
  Description of Artificial Sequence: Synthetic oligonucleotide
  Sense strand starting at position 1111 of SEQ ID NO: 317972
guauccucuccguaauaag

SEQ ID NO: 526790 - RNA, 19 nt, Artificial Sequence
  Description of Artificial Sequence: Synthetic oligonucleotide
  Antisense strand to SEQ ID NO: 526789
cuuauuacggagaggauac

SEQ ID NO: 526791 - RNA, 19 nt, Artificial Sequence
  Description of Artificial Sequence: Synthetic oligonucleotide
  Sense strand starting at position 1312 of SEQ ID NO: 317972
uauguuauggguuaaagua

SEQ ID NO: 526792 - RNA, 19 nt, Artificial Sequence
  Description of Artificial Sequence: Synthetic oligonucleotide
  Antisense strand to SEQ ID NO: 526791
uacuuuaacccauaacaua

SEQ ID NO: 526793 - RNA, 19 nt, Artificial Sequence
  Description of Artificial Sequence: Synthetic oligonucleotide
  Sense strand starting at position 1396 of SEQ ID NO: 317972
gacaaucuguccuuaaggu

SEQ ID NO: 526794 - RNA, 19 nt, Artificial Sequence
  Description of Artificial Sequence: Synthetic oligonucleotide
  Antisense strand to SEQ ID NO: 526793
accuuaaggacagauuguc

SEQ ID NO: 526795 - RNA, 19 nt, Artificial Sequence
  Description of Artificial Sequence: Synthetic oligonucleotide
  Sense strand starting at position 1397 of SEQ ID NO: 317972
acaaucuguccuuaagguu

SEQ ID NO: 526796 - RNA, 19 nt, Artificial Sequence
  Description of Artificial Sequence: Synthetic oligonucleotide
  Antisense strand to SEQ ID NO: 526795
aaccuuaaggacagauugu

SEQ ID NO: 526797 - RNA, 19 nt, Artificial Sequence
  Description of Artificial Sequence: Synthetic oligonucleotide
  Sense strand starting at position 1403 of SEQ ID NO: 317972
uguccuuaagguuaagacu

SEQ ID NO: 526798 - RNA, 19 nt, Artificial Sequence
  Description of Artificial Sequence: Synthetic oligonucleotide
  Antisense strand to SEQ ID NO: 526797
agucuuaaccuuaaggaca

SEQ ID NO: 526799 - RNA, 19 nt, Artificial Sequence
  Description of Artificial Sequence: Synthetic oligonucleotide
  Sense strand starting at position 1553 of SEQ ID NO: 317972
uggaguccuuuccugggau

SEQ ID NO: 526800 - RNA, 19 nt, Artificial Sequence
  Description of Artificial Sequence: Synthetic oligonucleotide
  Antisense strand to SEQ ID NO: 526799
aucccaggaaaggacucca

SEQ ID NO: 526801 - RNA, 19 nt, Artificial Sequence
  Description of Artificial Sequence: Synthetic oligonucleotide
  Sense strand starting at position 1556 of SEQ ID NO: 317972
aguccuuuccugggaucca

SEQ ID NO: 526802 - RNA, 19 nt, Artificial Sequence
  Description of Artificial Sequence: Synthetic oligonucleotide
  Antisense strand to SEQ ID NO: 526801
uggaucccaggaaaggacu

SEQ ID NO: 526803 - RNA, 19 nt, Artificial Sequence
  Description of Artificial Sequence: Synthetic oligonucleotide
  Sense strand starting at position 1616 of SEQ ID NO: 317972
gcaccaagcuauccuauga

SEQ ID NO: 526804 - RNA, 19 nt, Artificial Sequence
  Description of Artificial Sequence: Synthetic oligonucleotide
  Antisense strand to SEQ ID NO: 526803
ucauaggauagcuuggugc

SEQ ID NO: 526805 - RNA, 19 nt, Artificial Sequence
  Description of Artificial Sequence: Synthetic oligonucleotide
  Sense strand starting at position 1683 of SEQ ID NO: 317972
cccuauucugaaggcuaga

SEQ ID NO: 526806 - RNA, 19 nt, Artificial Sequence
  Description of Artificial Sequence: Synthetic oligonucleotide
  Antisense strand to SEQ ID NO: 526805
ucuagccuucagaauaggg

SEQ ID NO: 526807 - RNA, 19 nt, Artificial Sequence
  Description of Artificial Sequence: Synthetic oligonucleotide
  Sense strand starting at position 1843 of SEQ ID NO: 317972
cuguucuaugcagagaaga

SEQ ID NO: 526808 - RNA, 19 nt, Artificial Sequence
  Description of Artificial Sequence: Synthetic oligonucleotide
  Antisense strand to SEQ ID NO: 526807
ucuucucugcauagaacag

SEQ ID NO: 526809 - RNA, 19 nt, Artificial Sequence
  Description of Artificial Sequence: Synthetic oligonucleotide
  Sense strand starting at position 1845 of SEQ ID NO: 317972
guucuaugcagagaagagu

SEQ ID NO: 526810 - RNA, 19 nt, Artificial Sequence
  Description of Artificial Sequence: Synthetic oligonucleotide
  Antisense strand to SEQ ID NO: 526809
acucuucucugcauagaac

SEQ ID NO: 526811 - RNA, 19 nt, Artificial Sequence
  Description of Artificial Sequence: Synthetic oligonucleotide
  Sense strand starting at position 1971 of SEQ ID NO: 317972
uuggauagugaaugugcaa

SEQ ID NO: 526812 - RNA, 19 nt, Artificial Sequence
  Description of Artificial Sequence: Synthetic oligonucleotide
  Antisense strand to SEQ ID NO: 526811
uugcacauucacuauccaa

SEQ ID NO: 526813 - RNA, 19 nt, Artificial Sequence
  Description of Artificial Sequence: Synthetic oligonucleotide
  Sense strand starting at position 2062 of SEQ ID NO: 317972
gcuacauuugcauguuauc

SEQ ID NO: 526814 - RNA, 19 nt, Artificial Sequence
  Description of Artificial Sequence: Synthetic oligonucleotide
  Antisense strand to SEQ ID NO: 526813
gauaacaugcaaauguagc

SEQ ID NO: 526815 - RNA, 19 nt, Artificial Sequence
  Description of Artificial Sequence: Synthetic oligonucleotide
  Sense strand starting at position 2158 of SEQ ID NO: 317972
uguagcuuugaagacugaa

SEQ ID NO: 526816 - RNA, 19 nt, Artificial Sequence
  Description of Artificial Sequence: Synthetic oligonucleotide
  Antisense strand to SEQ ID NO: 526815
uucagucuucaaagcuaca

SEQ ID NO: 526817 - RNA, 19 nt, Artificial Sequence
  Description of Artificial Sequence: Synthetic oligonucleotide
  Sense strand starting at position 2343 of SEQ ID NO: 317972
uuugacuugaguggauaua

SEQ ID NO: 526818 - RNA, 19 nt, Artificial Sequence
  Description of Artificial Sequence: Synthetic oligonucleotide
  Antisense strand to SEQ ID NO: 526817
uauauccacucaagucaaa

SEQ ID NO: 526819 - RNA, 19 nt, Artificial Sequence
  Description of Artificial Sequence: Synthetic oligonucleotide
  Sense strand starting at position 2408 of SEQ ID NO: 317972
uuucuaucuuggguauaua

SEQ ID NO: 526820 - RNA, 19 nt, Artificial Sequence
  Description of Artificial Sequence: Synthetic oligonucleotide
  Antisense strand to SEQ ID NO: 526819
uauauacccaagauagaaa

SEQ ID NO: 526821 - RNA, 19 nt, Artificial Sequence
  Description of Artificial Sequence: Synthetic oligonucleotide
  Sense strand starting at position 2637 of SEQ ID NO: 317972
guuagcaucagauguuaag

SEQ ID NO: 526822 - RNA, 19 nt, Artificial Sequence
  Description of Artificial Sequence: Synthetic oligonucleotide
  Antisense strand to SEQ ID NO: 526821
cuuaacaucugaugcuaac

SEQ ID NO: 526823 - RNA, 19 nt, Artificial Sequence
  Description of Artificial Sequence: Synthetic oligonucleotide
  Sense strand starting at position 2646 of SEQ ID NO: 317972
agauguuaagggcauagua

SEQ ID NO: 526824 - RNA, 19 nt, Artificial Sequence
  Description of Artificial Sequence: Synthetic oligonucleotide
  Antisense strand to SEQ ID NO: 526823
uacuaugcccuuaacaucu

SEQ ID NO: 526825 - RNA, 19 nt, Artificial Sequence
  Description of Artificial Sequence: Synthetic oligonucleotide
  Sense strand starting at position 2648 of SEQ ID NO: 317972
auguuaagggcauaguauu

SEQ ID NO: 526826 - RNA, 19 nt, Artificial Sequence
  Description of Artificial Sequence: Synthetic oligonucleotide
  Antisense strand to SEQ ID NO: 526825
aauacuaugcccuuaacau

SEQ ID NO: 526827 - RNA, 19 nt, Artificial Sequence
  Description of Artificial Sequence: Synthetic oligonucleotide
  Sense strand starting at position 2668 of SEQ ID NO: 317972
gaucccaaguagucagacu

SEQ ID NO: 526828 - RNA, 19 nt, Artificial Sequence
  Description of Artificial Sequence: Synthetic oligonucleotide
  Antisense strand to SEQ ID NO: 526827
agucugacuacuugggauc

SEQ ID NO: 526829 - RNA, 19 nt, Artificial Sequence
  Description of Artificial Sequence: Synthetic oligonucleotide
  Sense strand starting at position 2780 of SEQ ID NO: 317972
aggguagaaggucaucuuu

SEQ ID NO: 526830 - RNA, 19 nt, Artificial Sequence
  Description of Artificial Sequence: Synthetic oligonucleotide
  Antisense strand to SEQ ID NO: 526829
aaagaugaccuucuacccu

SEQ ID NO: 526831 - RNA, 19 nt, Artificial Sequence
  Description of Artificial Sequence: Synthetic oligonucleotide
  Sense strand starting at position 2867 of SEQ ID NO: 317972
guauuacagugcuuauuua

SEQ ID NO: 526832 - RNA, 19 nt, Artificial Sequence
  Description of Artificial Sequence: Synthetic oligonucleotide
  Antisense strand to SEQ ID NO: 526831
uaaauaagcacuguaauac

SEQ ID NO: 526833 - RNA, 19 nt, Artificial Sequence
  Description of Artificial Sequence: Synthetic oligonucleotide
  Sense strand starting at position 2877 of SEQ ID NO: 317972
gcuuauuuaguguaagguc

SEQ ID NO: 526834 - RNA, 19 nt, Artificial Sequence
  Description of Artificial Sequence: Synthetic oligonucleotide
  Antisense strand to SEQ ID NO: 526833
gaccuuacacuaaauaagc

SEQ ID NO: 526835 - RNA, 19 nt, Artificial Sequence
  Description of Artificial Sequence: Synthetic oligonucleotide
  Sense strand starting at position 2885 of SEQ ID NO: 317972
aguguaaggucaccaaauu

SEQ ID NO: 526836 - RNA, 19 nt, Artificial Sequence
  Description of Artificial Sequence: Synthetic oligonucleotide
  Antisense strand to SEQ ID NO: 526835
aauuuggugaccuuacacu

SEQ ID NO: 526837 - RNA, 19 nt, Artificial Sequence
  Description of Artificial Sequence: Synthetic oligonucleotide
  Sense strand starting at position 2909 of SEQ ID NO: 317972
acaugaugcugaccaaaca

SEQ ID NO: 526838 - RNA, 19 nt, Artificial Sequence
  Description of Artificial Sequence: Synthetic oligonucleotide
  Antisense strand to SEQ ID NO: 526837
uguuuggucagcaucaugu

SEQ ID NO: 526839 - RNA, 19 nt, Artificial Sequence
  Description of Artificial Sequence: Synthetic oligonucleotide
  Sense strand starting at position 3062 of SEQ ID NO: 317972
gguugaguuccagaaguag

SEQ ID NO: 526840 - RNA, 19 nt, Artificial Sequence
  Description of Artificial Sequence: Synthetic oligonucleotide
  Antisense strand to SEQ ID NO: 526839
cuacuucuggaacucaacc

SEQ ID NO: 526841 - RNA, 19 nt, Artificial Sequence
  Description of Artificial Sequence: Synthetic oligonucleotide
  Sense strand starting at position 3082 of SEQ ID NO: 317972
aacugagauuguccugaaa

SEQ ID NO: 526842 - RNA, 19 nt, Artificial Sequence
  Description of Artificial Sequence: Synthetic oligonucleotide
  Antisense strand to SEQ ID NO: 526841
uuucaggacaaucucaguu

SEQ ID NO: 526843 - RNA, 19 nt, Artificial Sequence
  Description of Artificial Sequence: Synthetic oligonucleotide
  Sense strand starting at position 3151 of SEQ ID NO: 317972
uggucaggaaucugaaauu

SEQ ID NO: 526844 - RNA, 19 nt, Artificial Sequence
  Description of Artificial Sequence: Synthetic oligonucleotide
  Antisense strand to SEQ ID NO: 526843
aauuucagauuccugacca

SEQ ID NO: 526845 - RNA, 19 nt, Artificial Sequence
  Description of Artificial Sequence: Synthetic oligonucleotide
  Sense strand starting at position 3193 of SEQ ID NO: 317972
augcuuaaugaaugaauag

SEQ ID NO: 526846 - RNA, 19 nt, Artificial Sequence
  Description of Artificial Sequence: Synthetic oligonucleotide
  Antisense strand to SEQ ID NO: 526845
cuauucauucauuaagcau

SEQ ID NO: 526847 - RNA, 19 nt, Artificial Sequence
  Description of Artificial Sequence: Synthetic oligonucleotide
  Sense strand starting at position 3276 of SEQ ID NO: 317972
uccagaaugcuuugaaaug

SEQ ID NO: 526848 - RNA, 19 nt, Artificial Sequence
  Description of Artificial Sequence: Synthetic oligonucleotide
  Antisense strand to SEQ ID NO: 526847
cauuucaaagcauucugga

SEQ ID NO: 526849 - RNA, 19 nt, Artificial Sequence
  Description of Artificial Sequence: Synthetic oligonucleotide
  Sense strand starting at position 3282 of SEQ ID NO: 317972
augcuuugaaauggagaca

SEQ ID NO: 526850 - RNA, 19 nt, Artificial Sequence
  Description of Artificial Sequence: Synthetic oligonucleotide
  Antisense strand to SEQ ID NO: 526849
ugucuccauuucaaagcau

SEQ ID NO: 526851 - RNA, 19 nt, Artificial Sequence
  Description of Artificial Sequence: Synthetic oligonucleotide
  Sense strand starting at position 3293 of SEQ ID NO: 317972
uggagacauucuuuacuuu

SEQ ID NO: 526852 - RNA, 19 nt, Artificial Sequence
  Description of Artificial Sequence: Synthetic oligonucleotide
  Antisense strand to SEQ ID NO: 526851
aaaguaaagaaugucucca

SEQ ID NO: 526853 - RNA, 19 nt, Artificial Sequence
  Description of Artificial Sequence: Synthetic oligonucleotide
  Sense strand starting at position 3362 of SEQ ID NO: 317972
gcagauacagcuuagggua

SEQ ID NO: 526854 - RNA, 19 nt, Artificial Sequence
  Description of Artificial Sequence: Synthetic oligonucleotide
  Antisense strand to SEQ ID NO: 526853
uacccuaagcuguaucugc

SEQ ID NO: 526855 - RNA, 19 nt, Artificial Sequence
  Description of Artificial Sequence: Synthetic oligonucleotide
  Sense strand starting at position 3627 of SEQ ID NO: 317972
cagccuuguggguagaaau

SEQ ID NO: 526856 - RNA, 19 nt, Artificial Sequence
  Description of Artificial Sequence: Synthetic oligonucleotide
  Antisense strand to SEQ ID NO: 526855
auuucuacccacaaggcug

SEQ ID NO: 526857 - RNA, 19 nt, Artificial Sequence
  Description of Artificial Sequence: Synthetic oligonucleotide
  Sense strand starting at position 3637 of SEQ ID NO: 317972
gguagaaauaaucgugaca

SEQ ID NO: 526858 - RNA, 19 nt, Artificial Sequence
  Description of Artificial Sequence: Synthetic oligonucleotide
  Antisense strand to SEQ ID NO: 526857
ugucacgauuauuucuacc

SEQ ID NO: 526859 - RNA, 19 nt, Artificial Sequence
  Description of Artificial Sequence: Synthetic oligonucleotide
  Sense strand starting at position 3658 of SEQ ID NO: 317972
cugacacuguucucuacua

SEQ ID NO: 526860 - RNA, 19 nt, Artificial Sequence
  Description of Artificial Sequence: Synthetic oligonucleotide
  Antisense strand to SEQ ID NO: 526859
uaguagagaacagugucag

SEQ ID NO: 526861 - RNA, 19 nt, Artificial Sequence
  Description of Artificial Sequence: Synthetic oligonucleotide
  Sense strand starting at position 202 of SEQ ID NO: 317973
uuagaaauguuccuguaga

SEQ ID NO: 526862 - RNA, 19 nt, Artificial Sequence
  Description of Artificial Sequence: Synthetic oligonucleotide
  Antisense strand to SEQ ID NO: 526861
ucuacaggaacauuucuaa

SEQ ID NO: 526863 - RNA, 19 nt, Artificial Sequence
  Description of Artificial Sequence: Synthetic oligonucleotide
  Sense strand starting at position 292 of SEQ ID NO: 317973
uauuguguaaaugguggaa

SEQ ID NO: 526864 - RNA, 19 nt, Artificial Sequence
  Description of Artificial Sequence: Synthetic oligonucleotide
  Antisense strand to SEQ ID NO: 526863
uuccaccauuuacacaaua

SEQ ID NO: 526865 - RNA, 19 nt, Artificial Sequence
  Description of Artificial Sequence: Synthetic oligonucleotide
  Sense strand starting at position 372 of SEQ ID NO: 317973
ucuuuagaccacuagaugu

SEQ ID NO: 526866 - RNA, 19 nt, Artificial Sequence
  Description of Artificial Sequence: Synthetic oligonucleotide
  Antisense strand to SEQ ID NO: 526865
acaucuaguggucuaaaga

SEQ ID NO: 526867 - RNA, 19 nt, Artificial Sequence
  Description of Artificial Sequence: Synthetic oligonucleotide
  Sense strand starting at position 393 of SEQ ID NO: 317973
gugugauugcucuaugaag

SEQ ID NO: 526868 - RNA, 19 nt, Artificial Sequence
  Description of Artificial Sequence: Synthetic oligonucleotide
  Antisense strand to SEQ ID NO: 526867
cuucauagagcaaucacac

SEQ ID NO: 526869 - RNA, 19 nt, Artificial Sequence
  Description of Artificial Sequence: Synthetic oligonucleotide
  Sense strand starting at position 432 of SEQ ID NO: 317973
gcagcauugcaccagaaau

SEQ ID NO: 526870 - RNA, 19 nt, Artificial Sequence
  Description of Artificial Sequence: Synthetic oligonucleotide
  Antisense strand to SEQ ID NO: 526869
auuucuggugcaaugcugc

SEQ ID NO: 526871 - RNA, 19 nt, Artificial Sequence
  Description of Artificial Sequence: Synthetic oligonucleotide
  Sense strand starting at position 434 of SEQ ID NO: 317973
agcauugcaccagaaauca

SEQ ID NO: 526872 - RNA, 19 nt, Artificial Sequence
  Description of Artificial Sequence: Synthetic oligonucleotide
  Antisense strand to SEQ ID NO: 526871
ugauuucuggugcaaugcu

SEQ ID NO: 526873 - RNA, 19 nt, Artificial Sequence
  Description of Artificial Sequence: Synthetic oligonucleotide
  Sense strand starting at position 568 of SEQ ID NO: 317973
acaauaauuucucaaggga

SEQ ID NO: 526874 - RNA, 19 nt, Artificial Sequence
  Description of Artificial Sequence: Synthetic oligonucleotide
  Antisense strand to SEQ ID NO: 526873
ucccuugagaaauuauugu

SEQ ID NO: 526875 - RNA, 19 nt, Artificial Sequence
  Description of Artificial Sequence: Synthetic oligonucleotide
  Sense strand starting at position 1289 of SEQ ID NO: 317973
ggcugaucugcagcuguuu

SEQ ID NO: 526876 - RNA, 19 nt, Artificial Sequence
  Description of Artificial Sequence: Synthetic oligonucleotide
  Antisense strand to SEQ ID NO: 526875
aaacagcugcagaucagcc

SEQ ID NO: 526877 - RNA, 19 nt, Artificial Sequence
  Description of Artificial Sequence: Synthetic oligonucleotide
  Sense strand starting at position 1300 of SEQ ID NO: 317973
agcuguuugucaucauuua

SEQ ID NO: 526878 - RNA, 19 nt, Artificial Sequence
  Description of Artificial Sequence: Synthetic oligonucleotide
  Antisense strand to SEQ ID NO: 526877
uaaaugaugacaaacagcu

SEQ ID NO: 526879 - RNA, 19 nt, Artificial Sequence
  Description of Artificial Sequence: Synthetic oligonucleotide
  Sense strand starting at position 1301 of SEQ ID NO: 317973
gcuguuugucaucauuuau

SEQ ID NO: 526880 - RNA, 19 nt, Artificial Sequence
  Description of Artificial Sequence: Synthetic oligonucleotide
  Antisense strand to SEQ ID NO: 526879
auaaaugaugacaaacagc

SEQ ID NO: 526881 - RNA, 19 nt, Artificial Sequence
  Description of Artificial Sequence: Synthetic oligonucleotide
  Sense strand starting at position 1335 of SEQ ID NO: 317973
uccuucugagaaggcauaa

SEQ ID NO: 526882 - RNA, 19 nt, Artificial Sequence
  Description of Artificial Sequence: Synthetic oligonucleotide
  Antisense strand to SEQ ID NO: 526881
uuaugccuucucagaagga

SEQ ID NO: 526883 - RNA, 19 nt, Artificial Sequence
  Description of Artificial Sequence: Synthetic oligonucleotide
  Sense strand starting at position 1375 of SEQ ID NO: 317973
ucuuuagucuauguagaaa

SEQ ID NO: 526884 - RNA, 19 nt, Artificial Sequence
  Description of Artificial Sequence: Synthetic oligonucleotide
  Antisense strand to SEQ ID NO: 526883
uuucuacauagacuaaaga

SEQ ID NO: 526885 - RNA, 19 nt, Artificial Sequence
  Description of Artificial Sequence: Synthetic oligonucleotide
  Sense strand starting at position 1378 of SEQ ID NO: 317973
uuagucuauguagaaaucu

SEQ ID NO: 526886 - RNA, 19 nt, Artificial Sequence
  Description of Artificial Sequence: Synthetic oligonucleotide
  Antisense strand to SEQ ID NO: 526885
agauuucuacauagacuaa

SEQ ID NO: 526887 - RNA, 19 nt, Artificial Sequence
  Description of Artificial Sequence: Synthetic oligonucleotide
  Sense strand starting at position 1466 of SEQ ID NO: 317973
acacauauuuguuaggaac

SEQ ID NO: 526888 - RNA, 19 nt, Artificial Sequence
  Description of Artificial Sequence: Synthetic oligonucleotide
  Antisense strand to SEQ ID NO: 526887
guuccuaacaaauaugugu

SEQ ID NO: 526889 - RNA, 19 nt, Artificial Sequence
  Description of Artificial Sequence: Synthetic oligonucleotide
  Sense strand starting at position 2082 of SEQ ID NO: 317973
cuauuaugcccucaggaua

SEQ ID NO: 526890 - RNA, 19 nt, Artificial Sequence
  Description of Artificial Sequence: Synthetic oligonucleotide
  Antisense strand to SEQ ID NO: 526889
uauccugagggcauaauag

SEQ ID NO: 526891 - RNA, 19 nt, Artificial Sequence
  Description of Artificial Sequence: Synthetic oligonucleotide
  Sense strand starting at position 2403 of SEQ ID NO: 317973
ugugcuugaccauaucaac

SEQ ID NO: 526892 - RNA, 19 nt, Artificial Sequence
  Description of Artificial Sequence: Synthetic oligonucleotide
  Antisense strand to SEQ ID NO: 526891
guugauauggucaagcaca

SEQ ID NO: 526893 - RNA, 19 nt, Artificial Sequence
  Description of Artificial Sequence: Synthetic oligonucleotide
  Sense strand starting at position 2420 of SEQ ID NO: 317973
acugaagaguggucacuca

SEQ ID NO: 526894 - RNA, 19 nt, Artificial Sequence
  Description of Artificial Sequence: Synthetic oligonucleotide
  Antisense strand to SEQ ID NO: 526893
ugagugaccacucuucagu

SEQ ID NO: 526895 - RNA, 19 nt, Artificial Sequence
  Description of Artificial Sequence: Synthetic oligonucleotide
  Sense strand starting at position 2476 of SEQ ID NO: 317973
cuguuagacuauucuugag

SEQ ID NO: 526896 - RNA, 19 nt, Artificial Sequence
  Description of Artificial Sequence: Synthetic oligonucleotide
  Antisense strand to SEQ ID NO: 526895
cucaagaauagucuaacag

SEQ ID NO: 526897 - RNA, 19 nt, Artificial Sequence
  Description of Artificial Sequence: Synthetic oligonucleotide
  Sense strand starting at position 2485 of SEQ ID NO: 317973
uauucuugaggcuggaaga

SEQ ID NO: 526898 - RNA, 19 nt, Artificial Sequence
  Description of Artificial Sequence: Synthetic oligonucleotide
  Antisense strand to SEQ ID NO: 526897
ucuuccagccucaagaaua

SEQ ID NO: 526899 - RNA, 19 nt, Artificial Sequence
  Description of Artificial Sequence: Synthetic oligonucleotide
  Sense strand starting at position 2486 of SEQ ID NO: 317973
auucuugaggcuggaagaa

SEQ ID NO: 526900 - RNA, 19 nt, Artificial Sequence
  Description of Artificial Sequence: Synthetic oligonucleotide
  Antisense strand to SEQ ID NO: 526899
uucuuccagccucaagaau

SEQ ID NO: 526901 - RNA, 19 nt, Artificial Sequence
  Description of Artificial Sequence: Synthetic oligonucleotide
  Sense strand starting at position 2495 of SEQ ID NO: 317973
gcuggaagaaauggaguau

SEQ ID NO: 526902 - RNA, 19 nt, Artificial Sequence
  Description of Artificial Sequence: Synthetic oligonucleotide
  Antisense strand to SEQ ID NO: 526901
auacuccauuucuuccagc

SEQ ID NO: 526903 - RNA, 19 nt, Artificial Sequence
  Description of Artificial Sequence: Synthetic oligonucleotide
  Sense strand starting at position 2510 of SEQ ID NO: 317973
guauuuagaugauaaucca

SEQ ID NO: 526904 - RNA, 19 nt, Artificial Sequence
  Description of Artificial Sequence: Synthetic oligonucleotide
  Antisense strand to SEQ ID NO: 526903
uggauuaucaucuaaauac

SEQ ID NO: 526905 - RNA, 19 nt, Artificial Sequence
  Description of Artificial Sequence: Synthetic oligonucleotide
  Sense strand starting at position 2821 of SEQ ID NO: 317973
gcaagauccugucugaagg

SEQ ID NO: 526906 - RNA, 19 nt, Artificial Sequence
  Description of Artificial Sequence: Synthetic oligonucleotide
  Antisense strand to SEQ ID NO: 526905
ccuucagacaggaucuugc

SEQ ID NO: 526907 - RNA, 19 nt, Artificial Sequence
  Description of Artificial Sequence: Synthetic oligonucleotide
  Sense strand starting at position 2822 of SEQ ID NO: 317973
caagauccugucugaagga

SEQ ID NO: 526908 - RNA, 19 nt, Artificial Sequence
  Description of Artificial Sequence: Synthetic oligonucleotide
  Antisense strand to SEQ ID NO: 526907
uccuucagacaggaucuug

SEQ ID NO: 526909 - RNA, 19 nt, Artificial Sequence
  Description of Artificial Sequence: Synthetic oligonucleotide
  Sense strand starting at position 2994 of SEQ ID NO: 317973
aacaaauugugauugugaa

SEQ ID NO: 526910 - RNA, 19 nt, Artificial Sequence
  Description of Artificial Sequence: Synthetic oligonucleotide
  Antisense strand to SEQ ID NO: 526909
uucacaaucacaauuuguu

SEQ ID NO: 526911 - RNA, 19 nt, Artificial Sequence
  Description of Artificial Sequence: Synthetic oligonucleotide
  Sense strand starting at position 2995 of SEQ ID NO: 317973
acaaauugugauugugaaa

SEQ ID NO: 526912 - RNA, 19 nt, Artificial Sequence
  Description of Artificial Sequence: Synthetic oligonucleotide
  Antisense strand to SEQ ID NO: 526911
uuucacaaucacaauuugu

SEQ ID NO: 526913 - RNA, 19 nt, Artificial Sequence
  Description of Artificial Sequence: Synthetic oligonucleotide
  Sense strand starting at position 3156 of SEQ ID NO: 317973
cagagauggucacuuuccu

SEQ ID NO: 526914 - RNA, 19 nt, Artificial Sequence
  Description of Artificial Sequence: Synthetic oligonucleotide
  Antisense strand to SEQ ID NO: 526913
aggaaagugaccaucucug

SEQ ID NO: 526915 - RNA, 19 nt, Artificial Sequence
  Description of Artificial Sequence: Synthetic oligonucleotide
  Sense strand starting at position 3264 of SEQ ID NO: 317973
accucaggcuaagaauuua

SEQ ID NO: 526916 - RNA, 19 nt, Artificial Sequence
  Description of Artificial Sequence: Synthetic oligonucleotide
  Antisense strand to SEQ ID NO: 526915
uaaauucuuagccugaggu

SEQ ID NO: 526917 - RNA, 19 nt, Artificial Sequence
  Description of Artificial Sequence: Synthetic oligonucleotide
  Sense strand starting at position 3379 of SEQ ID NO: 317973
cguauauggccugaaauau

SEQ ID NO: 526918 - RNA, 19 nt, Artificial Sequence
  Description of Artificial Sequence: Synthetic oligonucleotide
  Antisense strand to SEQ ID NO: 526917
auauuucaggccauauacg

SEQ ID NO: 526919 - RNA, 19 nt, Artificial Sequence
  Description of Artificial Sequence: Synthetic oligonucleotide
  Sense strand starting at position 3511 of SEQ ID NO: 317973
cuagucccucuugacauua

SEQ ID NO: 526920 - RNA, 19 nt, Artificial Sequence
  Description of Artificial Sequence: Synthetic oligonucleotide
  Antisense strand to SEQ ID NO: 526919
uaaugucaagagggacuag

SEQ ID NO: 526921 - RNA, 19 nt, Artificial Sequence
  Description of Artificial Sequence: Synthetic oligonucleotide
  Sense strand starting at position 3528 of SEQ ID NO: 317973
uagauuuggccaugugguu

SEQ ID NO: 526922 - RNA, 19 nt, Artificial Sequence
  Description of Artificial Sequence: Synthetic oligonucleotide
  Antisense strand to SEQ ID NO: 526921
aaccacauggccaaaucua

SEQ ID NO: 526923 - RNA, 19 nt, Artificial Sequence
  Description of Artificial Sequence: Synthetic oligonucleotide
  Sense strand starting at position 3687 of SEQ ID NO: 317973
aagguaauacucuaggcau

SEQ ID NO: 526924 - RNA, 19 nt, Artificial Sequence
  Description of Artificial Sequence: Synthetic oligonucleotide
  Antisense strand to SEQ ID NO: 526923
augccuagaguauuaccuu

SEQ ID NO: 526925 - RNA, 19 nt, Artificial Sequence
  Description of Artificial Sequence: Synthetic oligonucleotide
  Sense strand starting at position 3689 of SEQ ID NO: 317973
gguaauacucuaggcauga

SEQ ID NO: 526926 - RNA, 19 nt, Artificial Sequence
  Description of Artificial Sequence: Synthetic oligonucleotide
  Antisense strand to SEQ ID NO: 526925
ucaugccuagaguauuacc

SEQ ID NO: 526927 - RNA, 19 nt, Artificial Sequence
  Description of Artificial Sequence: Synthetic oligonucleotide
  Sense strand starting at position 3690 of SEQ ID NO: 317973
guaauacucuaggcaugac

SEQ ID NO: 526928 - RNA, 19 nt, Artificial Sequence
  Description of Artificial Sequence: Synthetic oligonucleotide
  Antisense strand to SEQ ID NO: 526927
gucaugccuagaguauuac

SEQ ID NO: 526929 - RNA, 19 nt, Artificial Sequence
  Description of Artificial Sequence: Synthetic oligonucleotide
  Sense strand starting at position 3693 of SEQ ID NO: 317973
auacucuaggcaugacaga

SEQ ID NO: 526930 - RNA, 19 nt, Artificial Sequence
  Description of Artificial Sequence: Synthetic oligonucleotide
  Antisense strand to SEQ ID NO: 526929
ucugucaugccuagaguau

SEQ ID NO: 526931 - RNA, 19 nt, Artificial Sequence
  Description of Artificial Sequence: Synthetic oligonucleotide
  Sense strand starting at position 3770 of SEQ ID NO: 317973
uuugcuagaugguuauaaa

SEQ ID NO: 526932 - RNA, 19 nt, Artificial Sequence
  Description of Artificial Sequence: Synthetic oligonucleotide
  Antisense strand to SEQ ID NO: 526931
uuuauaaccaucuagcaaa

SEQ ID NO: 526933 - RNA, 19 nt, Artificial Sequence
  Description of Artificial Sequence: Synthetic oligonucleotide
  Sense strand starting at position 3771 of SEQ ID NO: 317973
uugcuagaugguuauaaag

SEQ ID NO: 526934 - RNA, 19 nt, Artificial Sequence
  Description of Artificial Sequence: Synthetic oligonucleotide
  Antisense strand to SEQ ID NO: 526933
cuuuauaaccaucuagcaa

SEQ ID NO: 526935 - RNA, 19 nt, Artificial Sequence
  Description of Artificial Sequence: Synthetic oligonucleotide
  Sense strand starting at position 3830 of SEQ ID NO: 317973
uguuauguugugucucuuu

SEQ ID NO: 526936 - RNA, 19 nt, Artificial Sequence
  Description of Artificial Sequence: Synthetic oligonucleotide
  Antisense strand to SEQ ID NO: 526935
aaagagacacaacauaaca

SEQ ID NO: 526937 - RNA, 19 nt, Artificial Sequence
  Description of Artificial Sequence: Synthetic oligonucleotide
  Sense strand starting at position 3909 of SEQ ID NO: 317973
acacacugugaugaguauu

SEQ ID NO: 526938 - RNA, 19 nt, Artificial Sequence
  Description of Artificial Sequence: Synthetic oligonucleotide
  Antisense strand to SEQ ID NO: 526937
aauacucaucacagugugu

SEQ ID NO: 526939 - RNA, 19 nt, Artificial Sequence
  Description of Artificial Sequence: Synthetic oligonucleotide
  Sense strand starting at position 3921 of SEQ ID NO: 317973
gaguauuaagcucaaagua

SEQ ID NO: 526940 - RNA, 19 nt, Artificial Sequence
  Description of Artificial Sequence: Synthetic oligonucleotide
  Antisense strand to SEQ ID NO: 526939
uacuuugagcuuaauacuc

SEQ ID NO: 526941 - RNA, 19 nt, Artificial Sequence
  Description of Artificial Sequence: Synthetic oligonucleotide
  Sense strand starting at position 20 of SEQ ID NO: 317974
ugccucaagcaguaauaaa

SEQ ID NO: 526942 - RNA, 19 nt, Artificial Sequence
  Description of Artificial Sequence: Synthetic oligonucleotide
  Antisense strand to SEQ ID NO: 526941
uuuauuacugcuugaggca

SEQ ID NO: 526943 - RNA, 19 nt, Artificial Sequence
  Description of Artificial Sequence: Synthetic oligonucleotide
  Sense strand starting at position 54 of SEQ ID NO: 317974
gcuuaaacaguuuaaaugu

SEQ ID NO: 526944 - RNA, 19 nt, Artificial Sequence
  Description of Artificial Sequence: Synthetic oligonucleotide
  Antisense strand to SEQ ID NO: 526943
acauuuaaacuguuuaagc

SEQ ID NO: 526945 - RNA, 19 nt, Artificial Sequence
  Description of Artificial Sequence: Synthetic oligonucleotide
  Sense strand starting at position 60 of SEQ ID NO: 317974
acaguuuaaauguagguca

SEQ ID NO: 526946 - RNA, 19 nt, Artificial Sequence
  Description of Artificial Sequence: Synthetic oligonucleotide
  Antisense strand to SEQ ID NO: 526945
ugaccuacauuuaaacugu

SEQ ID NO: 526947 - RNA, 19 nt, Artificial Sequence
  Description of Artificial Sequence: Synthetic oligonucleotide
  Sense strand starting at position 62 of SEQ ID NO: 317974
aguuuaaauguaggucauu

SEQ ID NO: 526948 - RNA, 19 nt, Artificial Sequence
  Description of Artificial Sequence: Synthetic oligonucleotide
  Antisense strand to SEQ ID NO: 526947
aaugaccuacauuuaaacu

SEQ ID NO: 526949 - RNA, 19 nt, Artificial Sequence
  Description of Artificial Sequence: Synthetic oligonucleotide
  Sense strand starting at position 65 of SEQ ID NO: 317974
uuaaauguaggucauucua

SEQ ID NO: 526950 - RNA, 19 nt, Artificial Sequence
  Description of Artificial Sequence: Synthetic oligonucleotide
  Antisense strand to SEQ ID NO: 526949
uagaaugaccuacauuuaa

SEQ ID NO: 526951 - RNA, 19 nt, Artificial Sequence
  Description of Artificial Sequence: Synthetic oligonucleotide
  Sense strand starting at position 67 of SEQ ID NO: 317974
aaauguaggucauucuagu

SEQ ID NO: 526952 - RNA, 19 nt, Artificial Sequence
  Description of Artificial Sequence: Synthetic oligonucleotide
  Antisense strand to SEQ ID NO: 526951
acuagaaugaccuacauuu

SEQ ID NO: 526953 - RNA, 19 nt, Artificial Sequence
  Description of Artificial Sequence: Synthetic oligonucleotide
  Sense strand starting at position 202 of SEQ ID NO: 317974
aaguaaauguuacuuggaa

SEQ ID NO: 526954 - RNA, 19 nt, Artificial Sequence
  Description of Artificial Sequence: Synthetic oligonucleotide
  Antisense strand to SEQ ID NO: 526953
uuccaaguaacauuuacuu

SEQ ID NO: 526955 - RNA, 19 nt, Artificial Sequence
  Description of Artificial Sequence: Synthetic oligonucleotide
  Sense strand starting at position 203 of SEQ ID NO: 317974
aguaaauguuacuuggaac

SEQ ID NO: 526956 - RNA, 19 nt, Artificial Sequence
  Description of Artificial Sequence: Synthetic oligonucleotide
  Antisense strand to SEQ ID NO: 526955
guuccaaguaacauuuacu

SEQ ID NO: 526957 - RNA, 19 nt, Artificial Sequence
  Description of Artificial Sequence: Synthetic oligonucleotide
  Sense strand starting at position 209 of SEQ ID NO: 317974
uguuacuuggaacauuauu

SEQ ID NO: 526958 - RNA, 19 nt, Artificial Sequence
  Description of Artificial Sequence: Synthetic oligonucleotide
  Antisense strand to SEQ ID NO: 526957
aauaauguuccaaguaaca

SEQ ID NO: 526959 - RNA, 19 nt, Artificial Sequence
  Description of Artificial Sequence: Synthetic oligonucleotide
  Sense strand starting at position 242 of SEQ ID NO: 317974
gaaacauguuuauagaaag

SEQ ID NO: 526960 - RNA, 19 nt, Artificial Sequence
  Description of Artificial Sequence: Synthetic oligonucleotide
  Antisense strand to SEQ ID NO: 526959
cuuucuauaaacauguuuc

SEQ ID NO: 526961 - RNA, 19 nt, Artificial Sequence
  Description of Artificial Sequence: Synthetic oligonucleotide
  Sense strand starting at position 260 of SEQ ID NO: 317974
ggguuuccagaacacgauu

SEQ ID NO: 526962 - RNA, 19 nt, Artificial Sequence
  Description of Artificial Sequence: Synthetic oligonucleotide
  Antisense strand to SEQ ID NO: 526961
aaucguguucuggaaaccc

SEQ ID NO: 526963 - RNA, 19 nt, Artificial Sequence
  Description of Artificial Sequence: Synthetic oligonucleotide
  Sense strand starting at position 268 of SEQ ID NO: 317974
agaacacgauuauagaaau

SEQ ID NO: 526964 - RNA, 19 nt, Artificial Sequence
  Description of Artificial Sequence: Synthetic oligonucleotide
  Antisense strand to SEQ ID NO: 526963
auuucuauaaucguguucu

SEQ ID NO: 526965 - RNA, 19 nt, Artificial Sequence
  Description of Artificial Sequence: Synthetic oligonucleotide
  Sense strand starting at position 297 of SEQ ID NO: 317974
auagaaguguuucuauaac

SEQ ID NO: 526966 - RNA, 19 nt, Artificial Sequence
  Description of Artificial Sequence: Synthetic oligonucleotide
  Antisense strand to SEQ ID NO: 526965
guuauagaaacacuucuau

SEQ ID NO: 526967 - RNA, 19 nt, Artificial Sequence
  Description of Artificial Sequence: Synthetic oligonucleotide
  Sense strand starting at position 330 of SEQ ID NO: 317974
ucacuaagccaaggaguau

SEQ ID NO: 526968 - RNA, 19 nt, Artificial Sequence
  Description of Artificial Sequence: Synthetic oligonucleotide
  Antisense strand to SEQ ID NO: 526967
auacuccuuggcuuaguga

SEQ ID NO: 526969 - RNA, 19 nt, Artificial Sequence
  Description of Artificial Sequence: Synthetic oligonucleotide
  Sense strand starting at position 396 of SEQ ID NO: 317974
agcuccagucccugaagaa

SEQ ID NO: 526970 - RNA, 19 nt, Artificial Sequence
  Description of Artificial Sequence: Synthetic oligonucleotide
  Antisense strand to SEQ ID NO: 526969
uucuucagggacuggagcu

SEQ ID NO: 526971 - RNA, 19 nt, Artificial Sequence
  Description of Artificial Sequence: Synthetic oligonucleotide
  Sense strand starting at position 397 of SEQ ID NO: 317974
gcuccagucccugaagaaa

SEQ ID NO: 526972 - RNA, 19 nt, Artificial Sequence
  Description of Artificial Sequence: Synthetic oligonucleotide
  Antisense strand to SEQ ID NO: 526971
uuucuucagggacuggagc

SEQ ID NO: 526973 - RNA, 19 nt, Artificial Sequence
  Description of Artificial Sequence: Synthetic oligonucleotide
  Sense strand starting at position 460 of SEQ ID NO: 317974
gcuaaauaaacggagugua

SEQ ID NO: 526974 - RNA, 19 nt, Artificial Sequence
  Description of Artificial Sequence: Synthetic oligonucleotide
  Antisense strand to SEQ ID NO: 526973
uacacuccguuuauuuagc

SEQ ID NO: 526975 - RNA, 19 nt, Artificial Sequence
  Description of Artificial Sequence: Synthetic oligonucleotide
  Sense strand starting at position 494 of SEQ ID NO: 317974
acagaucucgacugucaca

SEQ ID NO: 526976 - RNA, 19 nt, Artificial Sequence
  Description of Artificial Sequence: Synthetic oligonucleotide
  Antisense strand to SEQ ID NO: 526975
ugugacagucgagaucugu

SEQ ID NO: 526977 - RNA, 19 nt, Artificial Sequence
  Description of Artificial Sequence: Synthetic oligonucleotide
  Sense strand starting at position 575 of SEQ ID NO: 317974
guccaaauaguauacugua

SEQ ID NO: 526978 - RNA, 19 nt, Artificial Sequence
  Description of Artificial Sequence: Synthetic oligonucleotide
  Antisense strand to SEQ ID NO: 526977
uacaguauacuauuuggac

SEQ ID NO: 526979 - RNA, 19 nt, Artificial Sequence
  Description of Artificial Sequence: Synthetic oligonucleotide
  Sense strand starting at position 693 of SEQ ID NO: 317974
aagugaaucuucucaaggu

SEQ ID NO: 526980 - RNA, 19 nt, Artificial Sequence
  Description of Artificial Sequence: Synthetic oligonucleotide
  Antisense strand to SEQ ID NO: 526979
accuugagaagauucacuu

SEQ ID NO: 526981 - RNA, 19 nt, Artificial Sequence
  Description of Artificial Sequence: Synthetic oligonucleotide
  Sense strand starting at position 1251 of SEQ ID NO: 317974
gccagcucacugcaagaau

SEQ ID NO: 526982 - RNA, 19 nt, Artificial Sequence
  Description of Artificial Sequence: Synthetic oligonucleotide
  Antisense strand to SEQ ID NO: 526981
auucuugcagugagcuggc

SEQ ID NO: 526983 - RNA, 19 nt, Artificial Sequence
  Description of Artificial Sequence: Synthetic oligonucleotide
  Sense strand starting at position 1254 of SEQ ID NO: 317974
agcucacugcaagaaucaa

SEQ ID NO: 526984 - RNA, 19 nt, Artificial Sequence
  Description of Artificial Sequence: Synthetic oligonucleotide
  Antisense strand to SEQ ID NO: 526983
uugauucuugcagugagcu

SEQ ID NO: 526985 - RNA, 19 nt, Artificial Sequence
  Description of Artificial Sequence: Synthetic oligonucleotide
  Sense strand starting at position 1326 of SEQ ID NO: 317974
gaaagaacauugguuguua

SEQ ID NO: 526986 - RNA, 19 nt, Artificial Sequence
  Description of Artificial Sequence: Synthetic oligonucleotide
  Antisense strand to SEQ ID NO: 526985
uaacaaccaauguucuuuc

SEQ ID NO: 526987 - RNA, 19 nt, Artificial Sequence
  Description of Artificial Sequence: Synthetic oligonucleotide
  Sense strand starting at position 1328 of SEQ ID NO: 317974
aagaacauugguuguuacu

SEQ ID NO: 526988 - RNA, 19 nt, Artificial Sequence
  Description of Artificial Sequence: Synthetic oligonucleotide
  Antisense strand to SEQ ID NO: 526987
aguaacaaccaauguucuu

SEQ ID NO: 526989 - RNA, 19 nt, Artificial Sequence
  Description of Artificial Sequence: Synthetic oligonucleotide
  Sense strand starting at position 1330 of SEQ ID NO: 317974
gaacauugguuguuacuac

SEQ ID NO: 526990 - RNA, 19 nt, Artificial Sequence
  Description of Artificial Sequence: Synthetic oligonucleotide
  Antisense strand to SEQ ID NO: 526989
guaguaacaaccaauguuc

SEQ ID NO: 526991 - RNA, 19 nt, Artificial Sequence
  Description of Artificial Sequence: Synthetic oligonucleotide
  Sense strand starting at position 2061 of SEQ ID NO: 317974
gggcucuucgaacaguaau

SEQ ID NO: 526992 - RNA, 19 nt, Artificial Sequence
  Description of Artificial Sequence: Synthetic oligonucleotide
  Antisense strand to SEQ ID NO: 526991
auuacuguucgaagagccc

SEQ ID NO: 526993 - RNA, 19 nt, Artificial Sequence
  Description of Artificial Sequence: Synthetic oligonucleotide
  Sense strand starting at position 2071 of SEQ ID NO: 317974
aacaguaauugggcacuga

SEQ ID NO: 526994 - RNA, 19 nt, Artificial Sequence
  Description of Artificial Sequence: Synthetic oligonucleotide
  Antisense strand to SEQ ID NO: 526993
ucagugcccaauuacuguu

SEQ ID NO: 526995 - RNA, 19 nt, Artificial Sequence
  Description of Artificial Sequence: Synthetic oligonucleotide
  Sense strand starting at position 2122 of SEQ ID NO: 317974
uugacuccugccuaugaga

SEQ ID NO: 526996 - RNA, 19 nt, Artificial Sequence
  Description of Artificial Sequence: Synthetic oligonucleotide
  Antisense strand to SEQ ID NO: 526995
ucucauaggcaggagucaa

SEQ ID NO: 526997 - RNA, 19 nt, Artificial Sequence
  Description of Artificial Sequence: Synthetic oligonucleotide
  Sense strand starting at position 2124 of SEQ ID NO: 317974
gacuccugccuaugagacu

SEQ ID NO: 526998 - RNA, 19 nt, Artificial Sequence
  Description of Artificial Sequence: Synthetic oligonucleotide
  Antisense strand to SEQ ID NO: 526997
agucucauaggcaggaguc

SEQ ID NO: 526999 - RNA, 19 nt, Artificial Sequence
  Description of Artificial Sequence: Synthetic oligonucleotide
  Sense strand starting at position 2162 of SEQ ID NO: 317974
aguaacagaucggcacuaa

SEQ ID NO: 527000 - RNA, 19 nt, Artificial Sequence
  Description of Artificial Sequence: Synthetic oligonucleotide
  Antisense strand to SEQ ID NO: 526999
uuagugccgaucuguuacu

SEQ ID NO: 527001 - RNA, 19 nt, Artificial Sequence
  Description of Artificial Sequence: Synthetic oligonucleotide
  Sense strand starting at position 2219 of SEQ ID NO: 317974
ugagcaguucuuugacuga

SEQ ID NO: 527002 - RNA, 19 nt, Artificial Sequence
  Description of Artificial Sequence: Synthetic oligonucleotide
  Antisense strand to SEQ ID NO: 527001
ucagucaaagaacugcuca

SEQ ID NO: 527003 - RNA, 19 nt, Artificial Sequence
  Description of Artificial Sequence: Synthetic oligonucleotide
  Sense strand starting at position 2222 of SEQ ID NO: 317974
gcaguucuuugacugauac

SEQ ID NO: 527004 - RNA, 19 nt, Artificial Sequence
  Description of Artificial Sequence: Synthetic oligonucleotide
  Antisense strand to SEQ ID NO: 527003
guaucagucaaagaacugc

SEQ ID NO: 527005 - RNA, 19 nt, Artificial Sequence
  Description of Artificial Sequence: Synthetic oligonucleotide
  Sense strand starting at position 2229 of SEQ ID NO: 317974
uuugacugauacucaaagu

SEQ ID NO: 527006 - RNA, 19 nt, Artificial Sequence
  Description of Artificial Sequence: Synthetic oligonucleotide
  Antisense strand to SEQ ID NO: 527005
acuuugaguaucagucaaa

SEQ ID NO: 527007 - RNA, 19 nt, Artificial Sequence
  Description of Artificial Sequence: Synthetic oligonucleotide
  Sense strand starting at position 2612 of SEQ ID NO: 317974
uggcgaaccaacuaguaaa

SEQ ID NO: 527008 - RNA, 19 nt, Artificial Sequence
  Description of Artificial Sequence: Synthetic oligonucleotide
  Antisense strand to SEQ ID NO: 527007
uuuacuaguugguucgcca

SEQ ID NO: 527009 - RNA, 19 nt, Artificial Sequence
  Description of Artificial Sequence: Synthetic oligonucleotide
  Sense strand starting at position 2977 of SEQ ID NO: 317974
gggcuuauucucgucgcua

SEQ ID NO: 527010 - RNA, 19 nt, Artificial Sequence
  Description of Artificial Sequence: Synthetic oligonucleotide
  Antisense strand to SEQ ID NO: 527009
uagcgacgagaauaagccc

SEQ ID NO: 527011 - RNA, 19 nt, Artificial Sequence
  Description of Artificial Sequence: Synthetic oligonucleotide
  Sense strand starting at position 3536 of SEQ ID NO: 317974
cuguuagcucugcaaagga

SEQ ID NO: 527012 - RNA, 19 nt, Artificial Sequence
  Description of Artificial Sequence: Synthetic oligonucleotide
  Antisense strand to SEQ ID NO: 527011
uccuuugcagagcuaacag

SEQ ID NO: 527013 - RNA, 19 nt, Artificial Sequence
  Description of Artificial Sequence: Synthetic oligonucleotide
  Sense strand starting at position 3610 of SEQ ID NO: 317974
ggacuaagagauuggcauu

SEQ ID NO: 527014 - RNA, 19 nt, Artificial Sequence
  Description of Artificial Sequence: Synthetic oligonucleotide
  Antisense strand to SEQ ID NO: 527013
aaugccaaucucuuagucc

SEQ ID NO: 527015 - RNA, 19 nt, Artificial Sequence
  Description of Artificial Sequence: Synthetic oligonucleotide
  Sense strand starting at position 3649 of SEQ ID NO: 317974
uugaaacacuaagaagauu

SEQ ID NO: 527016 - RNA, 19 nt, Artificial Sequence
  Description of Artificial Sequence: Synthetic oligonucleotide
  Antisense strand to SEQ ID NO: 527015
aaucuucuuaguguuucaa

SEQ ID NO: 527017 - RNA, 19 nt, Artificial Sequence
  Description of Artificial Sequence: Synthetic oligonucleotide
  Sense strand starting at position 3657 of SEQ ID NO: 317974
cuaagaagauuggcgaaau

SEQ ID NO: 527018 - RNA, 19 nt, Artificial Sequence
  Description of Artificial Sequence: Synthetic oligonucleotide
  Antisense strand to SEQ ID NO: 527017
auuucgccaaucuucuuag

SEQ ID NO: 527019 - RNA, 19 nt, Artificial Sequence
  Description of Artificial Sequence: Synthetic oligonucleotide
  Sense strand starting at position 3934 of SEQ ID NO: 317974
ccaccaggaucugcuaauu

SEQ ID NO: 527020 - RNA, 19 nt, Artificial Sequence
  Description of Artificial Sequence: Synthetic oligonucleotide
  Antisense strand to SEQ ID NO: 527019
aauuagcagauccuggugg

SEQ ID NO: 527021 - RNA, 19 nt, Artificial Sequence
  Description of Artificial Sequence: Synthetic oligonucleotide
  Sense strand starting at position 41 of SEQ ID NO: 317975
uuaagaaaguuucuugcaa

SEQ ID NO: 527022 - RNA, 19 nt, Artificial Sequence
  Description of Artificial Sequence: Synthetic oligonucleotide
  Antisense strand to SEQ ID NO: 527021
uugcaagaaacuuucuuaa

SEQ ID NO: 527023 - RNA, 19 nt, Artificial Sequence
  Description of Artificial Sequence: Synthetic oligonucleotide
  Sense strand starting at position 195 of SEQ ID NO: 317975
ucguguucagaaugggaga

SEQ ID NO: 527024 - RNA, 19 nt, Artificial Sequence
  Description of Artificial Sequence: Synthetic oligonucleotide
  Antisense strand to SEQ ID NO: 527023
ucucccauucugaacacga

SEQ ID NO: 527025 - RNA, 19 nt, Artificial Sequence
  Description of Artificial Sequence: Synthetic oligonucleotide
  Sense strand starting at position 292 of SEQ ID NO: 317975
gugccuucccuaggaugau

SEQ ID NO: 527026 - RNA, 19 nt, Artificial Sequence
  Description of Artificial Sequence: Synthetic oligonucleotide
  Antisense strand to SEQ ID NO: 527025
aucauccuagggaaggcac

SEQ ID NO: 527027 - RNA, 19 nt, Artificial Sequence
  Description of Artificial Sequence: Synthetic oligonucleotide
  Sense strand starting at position 339 of SEQ ID NO: 317975
gcgucuuaacuuuagauga

SEQ ID NO: 527028 - RNA, 19 nt, Artificial Sequence
  Description of Artificial Sequence: Synthetic oligonucleotide
  Antisense strand to SEQ ID NO: 527027
ucaucuaaaguuaagacgc

SEQ ID NO: 527029 - RNA, 19 nt, Artificial Sequence
  Description of Artificial Sequence: Synthetic oligonucleotide
  Sense strand starting at position 540 of SEQ ID NO: 317975
gcgguuucacccugaaaga

SEQ ID NO: 527030 - RNA, 19 nt, Artificial Sequence
  Description of Artificial Sequence: Synthetic oligonucleotide
  Antisense strand to SEQ ID NO: 527029
ucuuucagggugaaaccgc

SEQ ID NO: 527031 - RNA, 19 nt, Artificial Sequence
  Description of Artificial Sequence: Synthetic oligonucleotide
  Sense strand starting at position 1589 of SEQ ID NO: 317975
agaguucuggcagguagga

SEQ ID NO: 527032 - RNA, 19 nt, Artificial Sequence
  Description of Artificial Sequence: Synthetic oligonucleotide
  Antisense strand to SEQ ID NO: 527031
uccuaccugccagaacucu

SEQ ID NO: 527033 - RNA, 19 nt, Artificial Sequence
  Description of Artificial Sequence: Synthetic oligonucleotide
  Sense strand starting at position 1730 of SEQ ID NO: 317975
ggaggcaacuguuugucua

SEQ ID NO: 527034 - RNA, 19 nt, Artificial Sequence
  Description of Artificial Sequence: Synthetic oligonucleotide
  Antisense strand to SEQ ID NO: 527033
uagacaaacaguugccucc

SEQ ID NO: 527035 - RNA, 19 nt, Artificial Sequence
  Description of Artificial Sequence: Synthetic oligonucleotide
  Sense strand starting at position 1742 of SEQ ID NO: 317975
uugucuauguuaucaugga

SEQ ID NO: 527036 - RNA, 19 nt, Artificial Sequence
  Description of Artificial Sequence: Synthetic oligonucleotide
  Antisense strand to SEQ ID NO: 527035
uccaugauaacauagacaa

SEQ ID NO: 527037 - RNA, 19 nt, Artificial Sequence
  Description of Artificial Sequence: Synthetic oligonucleotide
  Sense strand starting at position 1746 of SEQ ID NO: 317975
cuauguuaucauggagaaa

SEQ ID NO: 527038 - RNA, 19 nt, Artificial Sequence
  Description of Artificial Sequence: Synthetic oligonucleotide
  Antisense strand to SEQ ID NO: 527037
uuucuccaugauaacauag

SEQ ID NO: 527039 - RNA, 19 nt, Artificial Sequence
  Description of Artificial Sequence: Synthetic oligonucleotide
  Sense strand starting at position 2104 of SEQ ID NO: 317975
ugguuuccuccucggauuu

SEQ ID NO: 527040 - RNA, 19 nt, Artificial Sequence
  Description of Artificial Sequence: Synthetic oligonucleotide
  Antisense strand to SEQ ID NO: 527039
aaauccgaggaggaaacca

SEQ ID NO: 527041 - RNA, 19 nt, Artificial Sequence
  Description of Artificial Sequence: Synthetic oligonucleotide
  Sense strand starting at position 2266 of SEQ ID NO: 317975
aauguuucugguggauaag

SEQ ID NO: 527042 - RNA, 19 nt, Artificial Sequence
  Description of Artificial Sequence: Synthetic oligonucleotide
  Antisense strand to SEQ ID NO: 527041
cuuauccaccagaaacauu

SEQ ID NO: 527043 - RNA, 19 nt, Artificial Sequence
  Description of Artificial Sequence: Synthetic oligonucleotide
  Sense strand starting at position 2276 of SEQ ID NO: 317975
guggauaaggucugagcuu

SEQ ID NO: 527044 - RNA, 19 nt, Artificial Sequence
  Description of Artificial Sequence: Synthetic oligonucleotide
  Antisense strand to SEQ ID NO: 527043
aagcucagaccuuauccac

SEQ ID NO: 527045 - RNA, 19 nt, Artificial Sequence
  Description of Artificial Sequence: Synthetic oligonucleotide
  Sense strand starting at position 2283 of SEQ ID NO: 317975
aggucugagcuuugguaag

SEQ ID NO: 527046 - RNA, 19 nt, Artificial Sequence
  Description of Artificial Sequence: Synthetic oligonucleotide
  Antisense strand to SEQ ID NO: 527045
cuuaccaaagcucagaccu

SEQ ID NO: 527047 - RNA, 19 nt, Artificial Sequence
  Description of Artificial Sequence: Synthetic oligonucleotide
  Sense strand starting at position 2454 of SEQ ID NO: 317975
augcaaucagcuuaaugau

SEQ ID NO: 527048 - RNA, 19 nt, Artificial Sequence
  Description of Artificial Sequence: Synthetic oligonucleotide
  Antisense strand to SEQ ID NO: 527047
aucauuaagcugauugcau

SEQ ID NO: 527049 - RNA, 19 nt, Artificial Sequence
  Description of Artificial Sequence: Synthetic oligonucleotide
  Sense strand starting at position 2564 of SEQ ID NO: 317975
ucaagugucaacugggaag

SEQ ID NO: 527050 - RNA, 19 nt, Artificial Sequence
  Description of Artificial Sequence: Synthetic oligonucleotide
  Antisense strand to SEQ ID NO: 527049
cuucccaguugacacuuga

SEQ ID NO: 527051 - RNA, 19 nt, Artificial Sequence
  Description of Artificial Sequence: Synthetic oligonucleotide
  Sense strand starting at position 2640 of SEQ ID NO: 317975
guuucugggcaguaguuaa

SEQ ID NO: 527052 - RNA, 19 nt, Artificial Sequence
  Description of Artificial Sequence: Synthetic oligonucleotide
  Antisense strand to SEQ ID NO: 527051
uuaacuacugcccagaaac

SEQ ID NO: 527053 - RNA, 19 nt, Artificial Sequence
  Description of Artificial Sequence: Synthetic oligonucleotide
  Sense strand starting at position 2697 of SEQ ID NO: 317975
ucuuaaagauauucgcuga

SEQ ID NO: 527054 - RNA, 19 nt, Artificial Sequence
  Description of Artificial Sequence: Synthetic oligonucleotide
  Antisense strand to SEQ ID NO: 527053
ucagcgaauaucuuuaaga

SEQ ID NO: 527055 - RNA, 19 nt, Artificial Sequence
  Description of Artificial Sequence: Synthetic oligonucleotide
  Sense strand starting at position 2700 of SEQ ID NO: 317975
uaaagauauucgcugaaga

SEQ ID NO: 527056 - RNA, 19 nt, Artificial Sequence
  Description of Artificial Sequence: Synthetic oligonucleotide
  Antisense strand to SEQ ID NO: 527055
ucuucagcgaauaucuuua

SEQ ID NO: 527057 - RNA, 19 nt, Artificial Sequence
  Description of Artificial Sequence: Synthetic oligonucleotide
  Sense strand starting at position 2701 of SEQ ID NO: 317975
aaagauauucgcugaagaa

SEQ ID NO: 527058 - RNA, 19 nt, Artificial Sequence
  Description of Artificial Sequence: Synthetic oligonucleotide
  Antisense strand to SEQ ID NO: 527057
uucuucagcgaauaucuuu

SEQ ID NO: 527059 - RNA, 19 nt, Artificial Sequence
  Description of Artificial Sequence: Synthetic oligonucleotide
  Sense strand starting at position 2705 of SEQ ID NO: 317975
auauucgcugaagaaacau

SEQ ID NO: 527060 - RNA, 19 nt, Artificial Sequence
  Description of Artificial Sequence: Synthetic oligonucleotide
  Antisense strand to SEQ ID NO: 527059
auguuucuucagcgaauau

SEQ ID NO: 527061 - RNA, 19 nt, Artificial Sequence
  Description of Artificial Sequence: Synthetic oligonucleotide
  Sense strand starting at position 2732 of SEQ ID NO: 317975
cccuaugugucauuaccca

SEQ ID NO: 527062 - RNA, 19 nt, Artificial Sequence
  Description of Artificial Sequence: Synthetic oligonucleotide
  Antisense strand to SEQ ID NO: 527061
uggguaaugacacauaggg

SEQ ID NO: 527063 - RNA, 19 nt, Artificial Sequence
  Description of Artificial Sequence: Synthetic oligonucleotide
  Sense strand starting at position 2836 of SEQ ID NO: 317975
augaaauccugaguuaacg

SEQ ID NO: 527064 - RNA, 19 nt, Artificial Sequence
  Description of Artificial Sequence: Synthetic oligonucleotide
  Antisense strand to SEQ ID NO: 527063
cguuaacucaggauuucau

SEQ ID NO: 527065 - RNA, 19 nt, Artificial Sequence
  Description of Artificial Sequence: Synthetic oligonucleotide
  Sense strand starting at position 2842 of SEQ ID NO: 317975
uccugaguuaacgauuaga

SEQ ID NO: 527066 - RNA, 19 nt, Artificial Sequence
  Description of Artificial Sequence: Synthetic oligonucleotide
  Antisense strand to SEQ ID NO: 527065
ucuaaucguuaacucagga

SEQ ID NO: 527067 - RNA, 19 nt, Artificial Sequence
  Description of Artificial Sequence: Synthetic oligonucleotide
  Sense strand starting at position 3088 of SEQ ID NO: 317975
ucaucaugugaacaauagu

SEQ ID NO: 527068 - RNA, 19 nt, Artificial Sequence
  Description of Artificial Sequence: Synthetic oligonucleotide
  Antisense strand to SEQ ID NO: 527067
acuauuguucacaugauga

SEQ ID NO: 527069 - RNA, 19 nt, Artificial Sequence
  Description of Artificial Sequence: Synthetic oligonucleotide
  Sense strand starting at position 3094 of SEQ ID NO: 317975
ugugaacaauagucucaga

SEQ ID NO: 527070 - RNA, 19 nt, Artificial Sequence
  Description of Artificial Sequence: Synthetic oligonucleotide
  Antisense strand to SEQ ID NO: 527069
ucugagacuauuguucaca

SEQ ID NO: 527071 - RNA, 19 nt, Artificial Sequence
  Description of Artificial Sequence: Synthetic oligonucleotide
  Sense strand starting at position 3146 of SEQ ID NO: 317975
aauguuaugugacuaugaa

SEQ ID NO: 527072 - RNA, 19 nt, Artificial Sequence
  Description of Artificial Sequence: Synthetic oligonucleotide
  Antisense strand to SEQ ID NO: 527071
uucauagucacauaacauu

SEQ ID NO: 527073 - RNA, 19 nt, Artificial Sequence
  Description of Artificial Sequence: Synthetic oligonucleotide
  Sense strand starting at position 3319 of SEQ ID NO: 317975
cuaugaauaucagcuugua

SEQ ID NO: 527074 - RNA, 19 nt, Artificial Sequence
  Description of Artificial Sequence: Synthetic oligonucleotide
  Antisense strand to SEQ ID NO: 527073
uacaagcugauauucauag

SEQ ID NO: 527075 - RNA, 19 nt, Artificial Sequence
  Description of Artificial Sequence: Synthetic oligonucleotide
  Sense strand starting at position 3405 of SEQ ID NO: 317975
cauaaauugugaguguuua

SEQ ID NO: 527076 - RNA, 19 nt, Artificial Sequence
  Description of Artificial Sequence: Synthetic oligonucleotide
  Antisense strand to SEQ ID NO: 527075
uaaacacucacaauuuaug

SEQ ID NO: 527077 - RNA, 19 nt, Artificial Sequence
  Description of Artificial Sequence: Synthetic oligonucleotide
  Sense strand starting at position 3467 of SEQ ID NO: 317975
uaauuauggguguguuuau

SEQ ID NO: 527078 - RNA, 19 nt, Artificial Sequence
  Description of Artificial Sequence: Synthetic oligonucleotide
  Antisense strand to SEQ ID NO: 527077
auaaacacacccauaauua

SEQ ID NO: 527079 - RNA, 19 nt, Artificial Sequence
  Description of Artificial Sequence: Synthetic oligonucleotide
  Sense strand starting at position 3468 of SEQ ID NO: 317975
aauuauggguguguuuauu

SEQ ID NO: 527080 - RNA, 19 nt, Artificial Sequence
  Description of Artificial Sequence: Synthetic oligonucleotide
  Antisense strand to SEQ ID NO: 527079
aauaaacacacccauaauu

SEQ ID NO: 527081 - RNA, 19 nt, Artificial Sequence
  Description of Artificial Sequence: Synthetic oligonucleotide
  Sense strand starting at position 3491 of SEQ ID NO: 317975
uccaucugauaugucauua

SEQ ID NO: 527082 - RNA, 19 nt, Artificial Sequence
  Description of Artificial Sequence: Synthetic oligonucleotide
  Antisense strand to SEQ ID NO: 527081
uaaugacauaucagaugga

SEQ ID NO: 527083 - RNA, 19 nt, Artificial Sequence
  Description of Artificial Sequence: Synthetic oligonucleotide
  Sense strand starting at position 3680 of SEQ ID NO: 317975
ugauaauaacuaugguguu

SEQ ID NO: 527084 - RNA, 19 nt, Artificial Sequence
  Description of Artificial Sequence: Synthetic oligonucleotide
  Antisense strand to SEQ ID NO: 527083
aacaccauaguuauuauca

SEQ ID NO: 527085 - RNA, 19 nt, Artificial Sequence
  Description of Artificial Sequence: Synthetic oligonucleotide
  Sense strand starting at position 3693 of SEQ ID NO: 317975
gguguuuaauauucuuaga

SEQ ID NO: 527086 - RNA, 19 nt, Artificial Sequence
  Description of Artificial Sequence: Synthetic oligonucleotide
  Antisense strand to SEQ ID NO: 527085
ucuaagaauauuaaacacc

SEQ ID NO: 527087 - RNA, 19 nt, Artificial Sequence
  Description of Artificial Sequence: Synthetic oligonucleotide
  Sense strand starting at position 3701 of SEQ ID NO: 317975
auauucuuagaguguuuac

SEQ ID NO: 527088 - RNA, 19 nt, Artificial Sequence
  Description of Artificial Sequence: Synthetic oligonucleotide
  Antisense strand to SEQ ID NO: 527087
guaaacacucuaagaauau

SEQ ID NO: 527089 - RNA, 19 nt, Artificial Sequence
  Description of Artificial Sequence: Synthetic oligonucleotide
  Sense strand starting at position 3704 of SEQ ID NO: 317975
uucuuagaguguuuacuug

SEQ ID NO: 527090 - RNA, 19 nt, Artificial Sequence
  Description of Artificial Sequence: Synthetic oligonucleotide
  Antisense strand to SEQ ID NO: 527089
caaguaaacacucuaagaa

SEQ ID NO: 527091 - RNA, 19 nt, Artificial Sequence
  Description of Artificial Sequence: Synthetic oligonucleotide
  Sense strand starting at position 3780 of SEQ ID NO: 317975
gucucuaugagagaugguc

SEQ ID NO: 527092 - RNA, 19 nt, Artificial Sequence
  Description of Artificial Sequence: Synthetic oligonucleotide
  Antisense strand to SEQ ID NO: 527091
gaccaucucucauagagac

SEQ ID NO: 527093 - RNA, 19 nt, Artificial Sequence
  Description of Artificial Sequence: Synthetic oligonucleotide
  Sense strand starting at position 3782 of SEQ ID NO: 317975
cucuaugagagauggucuu

SEQ ID NO: 527094 - RNA, 19 nt, Artificial Sequence
  Description of Artificial Sequence: Synthetic oligonucleotide
  Antisense strand to SEQ ID NO: 527093
aagaccaucucucauagag

SEQ ID NO: 527095 - RNA, 19 nt, Artificial Sequence
  Description of Artificial Sequence: Synthetic oligonucleotide
  Sense strand starting at position 3874 of SEQ ID NO: 317975
gcuagugaauauccacacu

SEQ ID NO: 527096 - RNA, 19 nt, Artificial Sequence
  Description of Artificial Sequence: Synthetic oligonucleotide
  Antisense strand to SEQ ID NO: 527095
aguguggauauucacuagc

SEQ ID NO: 527097 - RNA, 19 nt, Artificial Sequence
  Description of Artificial Sequence: Synthetic oligonucleotide
  Sense strand starting at position 3958 of SEQ ID NO: 317975
cuuuccuuacugugagacu

SEQ ID NO: 527098 - RNA, 19 nt, Artificial Sequence
  Description of Artificial Sequence: Synthetic oligonucleotide
  Antisense strand to SEQ ID NO: 527097
agucucacaguaaggaaag

SEQ ID NO: 527099 - RNA, 19 nt, Artificial Sequence
  Description of Artificial Sequence: Synthetic oligonucleotide
  Sense strand starting at position 3969 of SEQ ID NO: 317975
gugagacugugagcucaua

SEQ ID NO: 527100 - RNA, 19 nt, Artificial Sequence
  Description of Artificial Sequence: Synthetic oligonucleotide
  Antisense strand to SEQ ID NO: 527099
uaugagcucacagucucac

SEQ ID NO: 527101 - RNA, 19 nt, Artificial Sequence
  Description of Artificial Sequence: Synthetic oligonucleotide
  Sense strand starting at position 50 of SEQ ID NO: 317976
gugguaugccuuuaaauac

SEQ ID NO: 527102 - RNA, 19 nt, Artificial Sequence
  Description of Artificial Sequence: Synthetic oligonucleotide
  Antisense strand to SEQ ID NO: 527101
guauuuaaaggcauaccac

SEQ ID NO: 527103 - RNA, 19 nt, Artificial Sequence
  Description of Artificial Sequence: Synthetic oligonucleotide
  Sense strand starting at position 133 of SEQ ID NO: 317976
gcuuguaagcaaugaaaca

SEQ ID NO: 527104 - RNA, 19 nt, Artificial Sequence
  Description of Artificial Sequence: Synthetic oligonucleotide
  Antisense strand to SEQ ID NO: 527103
uguuucauugcuuacaagc

SEQ ID NO: 527105 - RNA, 19 nt, Artificial Sequence
  Description of Artificial Sequence: Synthetic oligonucleotide
  Sense strand starting at position 154 of SEQ ID NO: 317976
auauguuuagagcgaaaug

SEQ ID NO: 527106 - RNA, 19 nt, Artificial Sequence
  Description of Artificial Sequence: Synthetic oligonucleotide
  Antisense strand to SEQ ID NO: 527105
cauuucgcucuaaacauau

SEQ ID NO: 527107 - RNA, 19 nt, Artificial Sequence
  Description of Artificial Sequence: Synthetic oligonucleotide
  Sense strand starting at position 159 of SEQ ID NO: 317976
uuuagagcgaaauggucua

SEQ ID NO: 527108 - RNA, 19 nt, Artificial Sequence
  Description of Artificial Sequence: Synthetic oligonucleotide
  Antisense strand to SEQ ID NO: 527107
uagaccauuucgcucuaaa

SEQ ID NO: 527109 - RNA, 19 nt, Artificial Sequence
  Description of Artificial Sequence: Synthetic oligonucleotide
  Sense strand starting at position 164 of SEQ ID NO: 317976
agcgaaauggucuagagau

SEQ ID NO: 527110 - RNA, 19 nt, Artificial Sequence
  Description of Artificial Sequence: Synthetic oligonucleotide
  Antisense strand to SEQ ID NO: 527109
aucucuagaccauuucgcu

SEQ ID NO: 527111 - RNA, 19 nt, Artificial Sequence
  Description of Artificial Sequence: Synthetic oligonucleotide
  Sense strand starting at position 179 of SEQ ID NO: 317976
agauaagaacucugagccu

SEQ ID NO: 527112 - RNA, 19 nt, Artificial Sequence
  Description of Artificial Sequence: Synthetic oligonucleotide
  Antisense strand to SEQ ID NO: 527111
aggcucagaguucuuaucu

SEQ ID NO: 527113 - RNA, 19 nt, Artificial Sequence
  Description of Artificial Sequence: Synthetic oligonucleotide
  Sense strand starting at position 248 of SEQ ID NO: 317976
auuaguugacuaugacaag

SEQ ID NO: 527114 - RNA, 19 nt, Artificial Sequence
  Description of Artificial Sequence: Synthetic oligonucleotide
  Antisense strand to SEQ ID NO: 527113
cuugucauagucaacuaau

SEQ ID NO: 527115 - RNA, 19 nt, Artificial Sequence
  Description of Artificial Sequence: Synthetic oligonucleotide
  Sense strand starting at position 529 of SEQ ID NO: 317976
uuaagaaaguuucuugcaa

SEQ ID NO: 527116 - RNA, 19 nt, Artificial Sequence
  Description of Artificial Sequence: Synthetic oligonucleotide
  Antisense strand to SEQ ID NO: 527115
uugcaagaaacuuucuuaa

SEQ ID NO: 527117 - RNA, 19 nt, Artificial Sequence
  Description of Artificial Sequence: Synthetic oligonucleotide
  Sense strand starting at position 683 of SEQ ID NO: 317976
ucguguucagaaugggaga

SEQ ID NO: 527118 - RNA, 19 nt, Artificial Sequence
  Description of Artificial Sequence: Synthetic oligonucleotide
  Antisense strand to SEQ ID NO: 527117
ucucccauucugaacacga

SEQ ID NO: 527119 - RNA, 19 nt, Artificial Sequence
  Description of Artificial Sequence: Synthetic oligonucleotide
  Sense strand starting at position 780 of SEQ ID NO: 317976
gugccuucccuaggaugau

SEQ ID NO: 527120 - RNA, 19 nt, Artificial Sequence
  Description of Artificial Sequence: Synthetic oligonucleotide
  Antisense strand to SEQ ID NO: 527119
aucauccuagggaaggcac

SEQ ID NO: 527121 - RNA, 19 nt, Artificial Sequence
  Description of Artificial Sequence: Synthetic oligonucleotide
  Sense strand starting at position 827 of SEQ ID NO: 317976
gcgucuuaacuuuagauga

SEQ ID NO: 527122 - RNA, 19 nt, Artificial Sequence
  Description of Artificial Sequence: Synthetic oligonucleotide
  Antisense strand to SEQ ID NO: 527121
ucaucuaaaguuaagacgc

SEQ ID NO: 527123 - RNA, 19 nt, Artificial Sequence
  Description of Artificial Sequence: Synthetic oligonucleotide
  Sense strand starting at position 1028 of SEQ ID NO: 317976
gcgguuucacccugaaaga

SEQ ID NO: 527124 - RNA, 19 nt, Artificial Sequence
  Description of Artificial Sequence: Synthetic oligonucleotide
  Antisense strand to SEQ ID NO: 527123
ucuuucagggugaaaccgc

SEQ ID NO: 527125 - RNA, 19 nt, Artificial Sequence
  Description of Artificial Sequence: Synthetic oligonucleotide
  Sense strand starting at position 2077 of SEQ ID NO: 317976
agaguucuggcagguagga

SEQ ID NO: 527126 - RNA, 19 nt, Artificial Sequence
  Description of Artificial Sequence: Synthetic oligonucleotide
  Antisense strand to SEQ ID NO: 527125
uccuaccugccagaacucu

SEQ ID NO: 527127 - RNA, 19 nt, Artificial Sequence
  Description of Artificial Sequence: Synthetic oligonucleotide
  Sense strand starting at position 2218 of SEQ ID NO: 317976
ggaggcaacuguuugucua

SEQ ID NO: 527128 - RNA, 19 nt, Artificial Sequence
  Description of Artificial Sequence: Synthetic oligonucleotide
  Antisense strand to SEQ ID NO: 527127
uagacaaacaguugccucc

SEQ ID NO: 527129 - RNA, 19 nt, Artificial Sequence
  Description of Artificial Sequence: Synthetic oligonucleotide
  Sense strand starting at position 2230 of SEQ ID NO: 317976
uugucuauguuaucaugga

SEQ ID NO: 527130 - RNA, 19 nt, Artificial Sequence
  Description of Artificial Sequence: Synthetic oligonucleotide
  Antisense strand to SEQ ID NO: 527129
uccaugauaacauagacaa

SEQ ID NO: 527131 - RNA, 19 nt, Artificial Sequence
  Description of Artificial Sequence: Synthetic oligonucleotide
  Sense strand starting at position 2234 of SEQ ID NO: 317976
cuauguuaucauggagaaa

SEQ ID NO: 527132 - RNA, 19 nt, Artificial Sequence
  Description of Artificial Sequence: Synthetic oligonucleotide
  Antisense strand to SEQ ID NO: 527131
uuucuccaugauaacauag

SEQ ID NO: 527133 - RNA, 19 nt, Artificial Sequence
  Description of Artificial Sequence: Synthetic oligonucleotide
  Sense strand starting at position 2592 of SEQ ID NO: 317976
ugguuuccuccucggauuu

SEQ ID NO: 527134 - RNA, 19 nt, Artificial Sequence
  Description of Artificial Sequence: Synthetic oligonucleotide
  Antisense strand to SEQ ID NO: 527133
aaauccgaggaggaaacca

SEQ ID NO: 527135 - RNA, 19 nt, Artificial Sequence
  Description of Artificial Sequence: Synthetic oligonucleotide
  Sense strand starting at position 2754 of SEQ ID NO: 317976
aauguuucugguggauaag

SEQ ID NO: 527136 - RNA, 19 nt, Artificial Sequence
  Description of Artificial Sequence: Synthetic oligonucleotide
  Antisense strand to SEQ ID NO: 527135
cuuauccaccagaaacauu

SEQ ID NO: 527137 - RNA, 19 nt, Artificial Sequence
  Description of Artificial Sequence: Synthetic oligonucleotide
  Sense strand starting at position 2764 of SEQ ID NO: 317976
guggauaaggucugagcuu

SEQ ID NO: 527138 - RNA, 19 nt, Artificial Sequence
  Description of Artificial Sequence: Synthetic oligonucleotide
  Antisense strand to SEQ ID NO: 527137
aagcucagaccuuauccac

SEQ ID NO: 527139 - RNA, 19 nt, Artificial Sequence
  Description of Artificial Sequence: Synthetic oligonucleotide
  Sense strand starting at position 2771 of SEQ ID NO: 317976
aggucugagcuuugguaag

SEQ ID NO: 527140 - RNA, 19 nt, Artificial Sequence
  Description of Artificial Sequence: Synthetic oligonucleotide
  Antisense strand to SEQ ID NO: 527139
cuuaccaaagcucagaccu

SEQ ID NO: 527141 - RNA, 19 nt, Artificial Sequence
  Description of Artificial Sequence: Synthetic oligonucleotide
  Sense strand starting at position 2942 of SEQ ID NO: 317976
augcaaucagcuuaaugau

SEQ ID NO: 527142 - RNA, 19 nt, Artificial Sequence
  Description of Artificial Sequence: Synthetic oligonucleotide
  Antisense strand to SEQ ID NO: 527141
aucauuaagcugauugcau

SEQ ID NO: 527143 - RNA, 19 nt, Artificial Sequence
  Description of Artificial Sequence: Synthetic oligonucleotide
  Sense strand starting at position 3052 of SEQ ID NO: 317976
ucaagugucaacugggaag

SEQ ID NO: 527144 - RNA, 19 nt, Artificial Sequence
  Description of Artificial Sequence: Synthetic oligonucleotide
  Antisense strand to SEQ ID NO: 527143
cuucccaguugacacuuga

SEQ ID NO: 527145 - RNA, 19 nt, Artificial Sequence
  Description of Artificial Sequence: Synthetic oligonucleotide
  Sense strand starting at position 3115 of SEQ ID NO: 317976
uuaagauagcccuguuucu

SEQ ID NO: 527146 - RNA, 19 nt, Artificial Sequence
  Description of Artificial Sequence: Synthetic oligonucleotide
  Antisense strand to SEQ ID NO: 527145
agaaacagggcuaucuuaa

SEQ ID NO: 527147 - RNA, 19 nt, Artificial Sequence
  Description of Artificial Sequence: Synthetic oligonucleotide
  Sense strand starting at position 3128 of SEQ ID NO: 317976
guuucugggcaguaguuaa

SEQ ID NO: 527148 - RNA, 19 nt, Artificial Sequence
  Description of Artificial Sequence: Synthetic oligonucleotide
  Antisense strand to SEQ ID NO: 527147
uuaacuacugcccagaaac

SEQ ID NO: 527149 - RNA, 19 nt, Artificial Sequence
  Description of Artificial Sequence: Synthetic oligonucleotide
  Sense strand starting at position 3185 of SEQ ID NO: 317976
ucuuaaagauauucgcuga

SEQ ID NO: 527150 - RNA, 19 nt, Artificial Sequence
  Description of Artificial Sequence: Synthetic oligonucleotide
  Antisense strand to SEQ ID NO: 527149
ucagcgaauaucuuuaaga

SEQ ID NO: 527151 - RNA, 19 nt, Artificial Sequence
  Description of Artificial Sequence: Synthetic oligonucleotide
  Sense strand starting at position 3188 of SEQ ID NO: 317976
uaaagauauucgcugaaga

SEQ ID NO: 527152 - RNA, 19 nt, Artificial Sequence
  Description of Artificial Sequence: Synthetic oligonucleotide
  Antisense strand to SEQ ID NO: 527151
ucuucagcgaauaucuuua

SEQ ID NO: 527153 - RNA, 19 nt, Artificial Sequence
  Description of Artificial Sequence: Synthetic oligonucleotide
  Sense strand starting at position 3189 of SEQ ID NO: 317976
aaagauauucgcugaagaa

SEQ ID NO: 527154 - RNA, 19 nt, Artificial Sequence
  Description of Artificial Sequence: Synthetic oligonucleotide
  Antisense strand to SEQ ID NO: 527153
uucuucagcgaauaucuuu

SEQ ID NO: 527155 - RNA, 19 nt, Artificial Sequence
  Description of Artificial Sequence: Synthetic oligonucleotide
  Sense strand starting at position 3193 of SEQ ID NO: 317976
auauucgcugaagaaacau

SEQ ID NO: 527156 - RNA, 19 nt, Artificial Sequence
  Description of Artificial Sequence: Synthetic oligonucleotide
  Antisense strand to SEQ ID NO: 527155
auguuucuucagcgaauau

SEQ ID NO: 527157 - RNA, 19 nt, Artificial Sequence
  Description of Artificial Sequence: Synthetic oligonucleotide
  Sense strand starting at position 3220 of SEQ ID NO: 317976
cccuaugugucauuaccca

SEQ ID NO: 527158 - RNA, 19 nt, Artificial Sequence
  Description of Artificial Sequence: Synthetic oligonucleotide
  Antisense strand to SEQ ID NO: 527157
uggguaaugacacauaggg

SEQ ID NO: 527159 - RNA, 19 nt, Artificial Sequence
  Description of Artificial Sequence: Synthetic oligonucleotide
  Sense strand starting at position 3324 of SEQ ID NO: 317976
augaaauccugaguuaacg

SEQ ID NO: 527160 - RNA, 19 nt, Artificial Sequence
  Description of Artificial Sequence: Synthetic oligonucleotide
  Antisense strand to SEQ ID NO: 527159
cguuaacucaggauuucau

SEQ ID NO: 527161 - RNA, 19 nt, Artificial Sequence
  Description of Artificial Sequence: Synthetic oligonucleotide
  Sense strand starting at position 3330 of SEQ ID NO: 317976
uccugaguuaacgauuaga

SEQ ID NO: 527162 - RNA, 19 nt, Artificial Sequence
  Description of Artificial Sequence: Synthetic oligonucleotide
  Antisense strand to SEQ ID NO: 527161
ucuaaucguuaacucagga

SEQ ID NO: 527163 - RNA, 19 nt, Artificial Sequence
  Description of Artificial Sequence: Synthetic oligonucleotide
  Sense strand starting at position 3576 of SEQ ID NO: 317976
ucaucaugugaacaauagu

SEQ ID NO: 527164 - RNA, 19 nt, Artificial Sequence
  Description of Artificial Sequence: Synthetic oligonucleotide
  Antisense strand to SEQ ID NO: 527163
acuauuguucacaugauga

SEQ ID NO: 527165 - RNA, 19 nt, Artificial Sequence
  Description of Artificial Sequence: Synthetic oligonucleotide
  Sense strand starting at position 3582 of SEQ ID NO: 317976
ugugaacaauagucucaga

SEQ ID NO: 527166 - RNA, 19 nt, Artificial Sequence
  Description of Artificial Sequence: Synthetic oligonucleotide
  Antisense strand to SEQ ID NO: 527165
ucugagacuauuguucaca

SEQ ID NO: 527167 - RNA, 19 nt, Artificial Sequence
  Description of Artificial Sequence: Synthetic oligonucleotide
  Sense strand starting at position 3634 of SEQ ID NO: 317976
aauguuaugugacuaugaa

SEQ ID NO: 527168 - RNA, 19 nt, Artificial Sequence
  Description of Artificial Sequence: Synthetic oligonucleotide
  Antisense strand to SEQ ID NO: 527167
uucauagucacauaacauu

SEQ ID NO: 527169 - RNA, 19 nt, Artificial Sequence
  Description of Artificial Sequence: Synthetic oligonucleotide
  Sense strand starting at position 3807 of SEQ ID NO: 317976
cuaugaauaucagcuugua

SEQ ID NO: 527170 - RNA, 19 nt, Artificial Sequence
  Description of Artificial Sequence: Synthetic oligonucleotide
  Antisense strand to SEQ ID NO: 527169
uacaagcugauauucauag

SEQ ID NO: 527171 - RNA, 19 nt, Artificial Sequence
  Description of Artificial Sequence: Synthetic oligonucleotide
  Sense strand starting at position 3893 of SEQ ID NO: 317976
cauaaauugugaguguuua

SEQ ID NO: 527172 - RNA, 19 nt, Artificial Sequence
  Description of Artificial Sequence: Synthetic oligonucleotide
  Antisense strand to SEQ ID NO: 527171
uaaacacucacaauuuaug

SEQ ID NO: 527173 - RNA, 19 nt, Artificial Sequence
  Description of Artificial Sequence: Synthetic oligonucleotide
  Sense strand starting at position 3951 of SEQ ID NO: 317976
acucuaauuaugggugugu

SEQ ID NO: 527174 - RNA, 19 nt, Artificial Sequence
  Description of Artificial Sequence: Synthetic oligonucleotide
  Antisense strand to SEQ ID NO: 527173
acacacccauaauuagagu

SEQ ID NO: 527175 - RNA, 19 nt, Artificial Sequence
  Description of Artificial Sequence: Synthetic oligonucleotide
  Sense strand starting at position 3955 of SEQ ID NO: 317976
uaauuauggguguguuuau

SEQ ID NO: 527176 - RNA, 19 nt, Artificial Sequence
  Description of Artificial Sequence: Synthetic oligonucleotide
  Antisense strand to SEQ ID NO: 527175
auaaacacacccauaauua

SEQ ID NO: 527177 - RNA, 19 nt, Artificial Sequence
  Description of Artificial Sequence: Synthetic oligonucleotide
  Sense strand starting at position 3956 of SEQ ID NO: 317976
aauuauggguguguuuauu

SEQ ID NO: 527178 - RNA, 19 nt, Artificial Sequence
  Description of Artificial Sequence: Synthetic oligonucleotide
  Antisense strand to SEQ ID NO: 527177
aauaaacacacccauaauu

SEQ ID NO: 527179 - RNA, 19 nt, Artificial Sequence
  Description of Artificial Sequence: Synthetic oligonucleotide
  Sense strand starting at position 3979 of SEQ ID NO: 317976
uccaucugauaugucauua

SEQ ID NO: 527180 - RNA, 19 nt, Artificial Sequence
  Description of Artificial Sequence: Synthetic oligonucleotide
  Antisense strand to SEQ ID NO: 527179
uaaugacauaucagaugga

SEQ ID NO: 527181 - RNA, 19 nt, Artificial Sequence
  Description of Artificial Sequence: Synthetic oligonucleotide
  Sense strand starting at position 10 of SEQ ID NO: 317977
ucaccaucugauuguugaa

SEQ ID NO: 527182 - RNA, 19 nt, Artificial Sequence
  Description of Artificial Sequence: Synthetic oligonucleotide
  Antisense strand to SEQ ID NO: 527181
uucaacaaucagaugguga

SEQ ID NO: 527183 - RNA, 19 nt, Artificial Sequence
  Description of Artificial Sequence: Synthetic oligonucleotide
  Sense strand starting at position 12 of SEQ ID NO: 317977
accaucugauuguugaauu

SEQ ID NO: 527184 - RNA, 19 nt, Artificial Sequence
  Description of Artificial Sequence: Synthetic oligonucleotide
  Antisense strand to SEQ ID NO: 527183
aauucaacaaucagauggu

SEQ ID NO: 527185 - RNA, 19 nt, Artificial Sequence
  Description of Artificial Sequence: Synthetic oligonucleotide
  Sense strand starting at position 42 of SEQ ID NO: 317977
guggaauguuggagaacug

SEQ ID NO: 527186 - RNA, 19 nt, Artificial Sequence
  Description of Artificial Sequence: Synthetic oligonucleotide
  Antisense strand to SEQ ID NO: 527185
caguucuccaacauuccac

SEQ ID NO: 527187 - RNA, 19 nt, Artificial Sequence
  Description of Artificial Sequence: Synthetic oligonucleotide
  Sense strand starting at position 94 of SEQ ID NO: 317977
uauauagucuaugugugga

SEQ ID NO: 527188 - RNA, 19 nt, Artificial Sequence
  Description of Artificial Sequence: Synthetic oligonucleotide
  Antisense strand to SEQ ID NO: 527187
uccacacauagacuauaua

SEQ ID NO: 527189 - RNA, 19 nt, Artificial Sequence
  Description of Artificial Sequence: Synthetic oligonucleotide
  Sense strand starting at position 230 of SEQ ID NO: 317977
uucuuuguaggguaaguga

SEQ ID NO: 527190 - RNA, 19 nt, Artificial Sequence
  Description of Artificial Sequence: Synthetic oligonucleotide
  Antisense strand to SEQ ID NO: 527189
ucacuuacccuacaaagaa

SEQ ID NO: 527191 - RNA, 19 nt, Artificial Sequence
  Description of Artificial Sequence: Synthetic oligonucleotide
  Sense strand starting at position 233 of SEQ ID NO: 317977
uuuguaggguaagugauua

SEQ ID NO: 527192 - RNA, 19 nt, Artificial Sequence
  Description of Artificial Sequence: Synthetic oligonucleotide
  Antisense strand to SEQ ID NO: 527191
uaaucacuuacccuacaaa

SEQ ID NO: 527193 - RNA, 19 nt, Artificial Sequence
  Description of Artificial Sequence: Synthetic oligonucleotide
  Sense strand starting at position 237 of SEQ ID NO: 317977
uaggguaagugauuaauag

SEQ ID NO: 527194 - RNA, 19 nt, Artificial Sequence
  Description of Artificial Sequence: Synthetic oligonucleotide
  Antisense strand to SEQ ID NO: 527193
cuauuaaucacuuacccua

SEQ ID NO: 527195 - RNA, 19 nt, Artificial Sequence
  Description of Artificial Sequence: Synthetic oligonucleotide
  Sense strand starting at position 246 of SEQ ID NO: 317977
ugauuaauagacugcaauc

SEQ ID NO: 527196 - RNA, 19 nt, Artificial Sequence
  Description of Artificial Sequence: Synthetic oligonucleotide
  Antisense strand to SEQ ID NO: 527195
gauugcagucuauuaauca

SEQ ID NO: 527197 - RNA, 19 nt, Artificial Sequence
  Description of Artificial Sequence: Synthetic oligonucleotide
  Sense strand starting at position 305 of SEQ ID NO: 317977
gugguaugccuuuaaauac

SEQ ID NO: 527198 - RNA, 19 nt, Artificial Sequence
  Description of Artificial Sequence: Synthetic oligonucleotide
  Antisense strand to SEQ ID NO: 527197
guauuuaaaggcauaccac

SEQ ID NO: 527199 - RNA, 19 nt, Artificial Sequence
  Description of Artificial Sequence: Synthetic oligonucleotide
  Sense strand starting at position 388 of SEQ ID NO: 317977
gcuuguaagcaaugaaaca

SEQ ID NO: 527200 - RNA, 19 nt, Artificial Sequence
  Description of Artificial Sequence: Synthetic oligonucleotide
  Antisense strand to SEQ ID NO: 527199
uguuucauugcuuacaagc

SEQ ID NO: 527201 - RNA, 19 nt, Artificial Sequence
  Description of Artificial Sequence: Synthetic oligonucleotide
  Sense strand starting at position 409 of SEQ ID NO: 317977
auauguuuagagcgaaaug

SEQ ID NO: 527202 - RNA, 19 nt, Artificial Sequence
  Description of Artificial Sequence: Synthetic oligonucleotide
  Antisense strand to SEQ ID NO: 527201
cauuucgcucuaaacauau

SEQ ID NO: 527203 - RNA, 19 nt, Artificial Sequence
  Description of Artificial Sequence: Synthetic oligonucleotide
  Sense strand starting at position 414 of SEQ ID NO: 317977
uuuagagcgaaauggucua

SEQ ID NO: 527204 - RNA, 19 nt, Artificial Sequence
  Description of Artificial Sequence: Synthetic oligonucleotide
  Antisense strand to SEQ ID NO: 527203
uagaccauuucgcucuaaa

SEQ ID NO: 527205 - RNA, 19 nt, Artificial Sequence
  Description of Artificial Sequence: Synthetic oligonucleotide
  Sense strand starting at position 419 of SEQ ID NO: 317977
agcgaaauggucuagagau

SEQ ID NO: 527206 - RNA, 19 nt, Artificial Sequence
  Description of Artificial Sequence: Synthetic oligonucleotide
  Antisense strand to SEQ ID NO: 527205
aucucuagaccauuucgcu

SEQ ID NO: 527207 - RNA, 19 nt, Artificial Sequence
  Description of Artificial Sequence: Synthetic oligonucleotide
  Sense strand starting at position 434 of SEQ ID NO: 317977
agauaagaacucugagccu

SEQ ID NO: 527208 - RNA, 19 nt, Artificial Sequence
  Description of Artificial Sequence: Synthetic oligonucleotide
  Antisense strand to SEQ ID NO: 527207
aggcucagaguucuuaucu

SEQ ID NO: 527209 - RNA, 19 nt, Artificial Sequence
  Description of Artificial Sequence: Synthetic oligonucleotide
  Sense strand starting at position 503 of SEQ ID NO: 317977
auuaguugacuaugacaag

SEQ ID NO: 527210 - RNA, 19 nt, Artificial Sequence
  Description of Artificial Sequence: Synthetic oligonucleotide
  Antisense strand to SEQ ID NO: 527209
cuugucauagucaacuaau

SEQ ID NO: 527211 - RNA, 19 nt, Artificial Sequence
  Description of Artificial Sequence: Synthetic oligonucleotide
  Sense strand starting at position 784 of SEQ ID NO: 317977
uuaagaaaguuucuugcaa

SEQ ID NO: 527212 - RNA, 19 nt, Artificial Sequence
  Description of Artificial Sequence: Synthetic oligonucleotide
  Antisense strand to SEQ ID NO: 527211
uugcaagaaacuuucuuaa

SEQ ID NO: 527213 - RNA, 19 nt, Artificial Sequence
  Description of Artificial Sequence: Synthetic oligonucleotide
  Sense strand starting at position 938 of SEQ ID NO: 317977
ucguguucagaaugggaga

SEQ ID NO: 527214 - RNA, 19 nt, Artificial Sequence
  Description of Artificial Sequence: Synthetic oligonucleotide
  Antisense strand to SEQ ID NO: 527213
ucucccauucugaacacga

SEQ ID NO: 527215 - RNA, 19 nt, Artificial Sequence
  Description of Artificial Sequence: Synthetic oligonucleotide
  Sense strand starting at position 1082 of SEQ ID NO: 317977
gcgucuuaacuuuagauga

SEQ ID NO: 527216 - RNA, 19 nt, Artificial Sequence
  Description of Artificial Sequence: Synthetic oligonucleotide
  Antisense strand to SEQ ID NO: 527215
ucaucuaaaguuaagacgc

SEQ ID NO: 527217 - RNA, 19 nt, Artificial Sequence
  Description of Artificial Sequence: Synthetic oligonucleotide
  Sense strand starting at position 1283 of SEQ ID NO: 317977
gcgguuucacccugaaaga

SEQ ID NO: 527218 - RNA, 19 nt, Artificial Sequence
  Description of Artificial Sequence: Synthetic oligonucleotide
  Antisense strand to SEQ ID NO: 527217
ucuuucagggugaaaccgc

SEQ ID NO: 527219 - RNA, 19 nt, Artificial Sequence
  Description of Artificial Sequence: Synthetic oligonucleotide
  Sense strand starting at position 2332 of SEQ ID NO: 317977
agaguucuggcagguagga

SEQ ID NO: 527220 - RNA, 19 nt, Artificial Sequence
  Description of Artificial Sequence: Synthetic oligonucleotide
  Antisense strand to SEQ ID NO: 527219
uccuaccugccagaacucu

SEQ ID NO: 527221 - RNA, 19 nt, Artificial Sequence
  Description of Artificial Sequence: Synthetic oligonucleotide
  Sense strand starting at position 2473 of SEQ ID NO: 317977
ggaggcaacuguuugucua

SEQ ID NO: 527222 - RNA, 19 nt, Artificial Sequence
  Description of Artificial Sequence: Synthetic oligonucleotide
  Antisense strand to SEQ ID NO: 527221
uagacaaacaguugccucc

SEQ ID NO: 527223 - RNA, 19 nt, Artificial Sequence
  Description of Artificial Sequence: Synthetic oligonucleotide
  Sense strand starting at position 2485 of SEQ ID NO: 317977
uugucuauguuaucaugga

SEQ ID NO: 527224 - RNA, 19 nt, Artificial Sequence
  Description of Artificial Sequence: Synthetic oligonucleotide
  Antisense strand to SEQ ID NO: 527223
uccaugauaacauagacaa

SEQ ID NO: 527225 - RNA, 19 nt, Artificial Sequence
  Description of Artificial Sequence: Synthetic oligonucleotide
  Sense strand starting at position 2489 of SEQ ID NO: 317977
cuauguuaucauggagaaa

SEQ ID NO: 527226 - RNA, 19 nt, Artificial Sequence
  Description of Artificial Sequence: Synthetic oligonucleotide
  Antisense strand to SEQ ID NO: 527225
uuucuccaugauaacauag

SEQ ID NO: 527227 - RNA, 19 nt, Artificial Sequence
  Description of Artificial Sequence: Synthetic oligonucleotide
  Sense strand starting at position 2847 of SEQ ID NO: 317977
ugguuuccuccucggauuu

SEQ ID NO: 527228 - RNA, 19 nt, Artificial Sequence
  Description of Artificial Sequence: Synthetic oligonucleotide
  Antisense strand to SEQ ID NO: 527227
aaauccgaggaggaaacca

SEQ ID NO: 527229 - RNA, 19 nt, Artificial Sequence
  Description of Artificial Sequence: Synthetic oligonucleotide
  Sense strand starting at position 3009 of SEQ ID NO: 317977
aauguuucugguggauaag

SEQ ID NO: 527230 - RNA, 19 nt, Artificial Sequence
  Description of Artificial Sequence: Synthetic oligonucleotide
  Antisense strand to SEQ ID NO: 527229
cuuauccaccagaaacauu

SEQ ID NO: 527231 - RNA, 19 nt, Artificial Sequence
  Description of Artificial Sequence: Synthetic oligonucleotide
  Sense strand starting at position 3019 of SEQ ID NO: 317977
guggauaaggucugagcuu

SEQ ID NO: 527232 - RNA, 19 nt, Artificial Sequence
  Description of Artificial Sequence: Synthetic oligonucleotide
  Antisense strand to SEQ ID NO: 527231
aagcucagaccuuauccac

SEQ ID NO: 527233 - RNA, 19 nt, Artificial Sequence
  Description of Artificial Sequence: Synthetic oligonucleotide
  Sense strand starting at position 3026 of SEQ ID NO: 317977
aggucugagcuuugguaag

SEQ ID NO: 527234 - RNA, 19 nt, Artificial Sequence
  Description of Artificial Sequence: Synthetic oligonucleotide
  Antisense strand to SEQ ID NO: 527233
cuuaccaaagcucagaccu

SEQ ID NO: 527235 - RNA, 19 nt, Artificial Sequence
  Description of Artificial Sequence: Synthetic oligonucleotide
  Sense strand starting at position 3197 of SEQ ID NO: 317977
augcaaucagcuuaaugau

SEQ ID NO: 527236 - RNA, 19 nt, Artificial Sequence
  Description of Artificial Sequence: Synthetic oligonucleotide
  Antisense strand to SEQ ID NO: 527235
aucauuaagcugauugcau

SEQ ID NO: 527237 - RNA, 19 nt, Artificial Sequence
  Description of Artificial Sequence: Synthetic oligonucleotide
  Sense strand starting at position 3307 of SEQ ID NO: 317977
ucaagugucaacugggaag

SEQ ID NO: 527238 - RNA, 19 nt, Artificial Sequence
  Description of Artificial Sequence: Synthetic oligonucleotide
  Antisense strand to SEQ ID NO: 527237
cuucccaguugacacuuga

SEQ ID NO: 527239 - RNA, 19 nt, Artificial Sequence
  Description of Artificial Sequence: Synthetic oligonucleotide
  Sense strand starting at position 3383 of SEQ ID NO: 317977
guuucugggcaguaguuaa

SEQ ID NO: 527240 - RNA, 19 nt, Artificial Sequence
  Description of Artificial Sequence: Synthetic oligonucleotide
  Antisense strand to SEQ ID NO: 527239
uuaacuacugcccagaaac

SEQ ID NO: 527241 - RNA, 19 nt, Artificial Sequence
  Description of Artificial Sequence: Synthetic oligonucleotide
  Sense strand starting at position 3440 of SEQ ID NO: 317977
ucuuaaagauauucgcuga

SEQ ID NO: 527242 - RNA, 19 nt, Artificial Sequence
  Description of Artificial Sequence: Synthetic oligonucleotide
  Antisense strand to SEQ ID NO: 527241
ucagcgaauaucuuuaaga

SEQ ID NO: 527243 - RNA, 19 nt, Artificial Sequence
  Description of Artificial Sequence: Synthetic oligonucleotide
  Sense strand starting at position 3443 of SEQ ID NO: 317977
uaaagauauucgcugaaga

SEQ ID NO: 527244 - RNA, 19 nt, Artificial Sequence
  Description of Artificial Sequence: Synthetic oligonucleotide
  Antisense strand to SEQ ID NO: 527243
ucuucagcgaauaucuuua

SEQ ID NO: 527245 - RNA, 19 nt, Artificial Sequence
  Description of Artificial Sequence: Synthetic oligonucleotide
  Sense strand starting at position 3444 of SEQ ID NO: 317977
aaagauauucgcugaagaa

SEQ ID NO: 527246 - RNA, 19 nt, Artificial Sequence
  Description of Artificial Sequence: Synthetic oligonucleotide
  Antisense strand to SEQ ID NO: 527245
uucuucagcgaauaucuuu

SEQ ID NO: 527247 - RNA, 19 nt, Artificial Sequence
  Description of Artificial Sequence: Synthetic oligonucleotide
  Sense strand starting at position 3448 of SEQ ID NO: 317977
auauucgcugaagaaacau

SEQ ID NO: 527248 - RNA, 19 nt, Artificial Sequence
  Description of Artificial Sequence: Synthetic oligonucleotide
  Antisense strand to SEQ ID NO: 527247
auguuucuucagcgaauau

SEQ ID NO: 527249 - RNA, 19 nt, Artificial Sequence
  Description of Artificial Sequence: Synthetic oligonucleotide
  Sense strand starting at position 3475 of SEQ ID NO: 317977
cccuaugugucauuaccca

SEQ ID NO: 527250 - RNA, 19 nt, Artificial Sequence
  Description of Artificial Sequence: Synthetic oligonucleotide
  Antisense strand to SEQ ID NO: 527249
uggguaaugacacauaggg

SEQ ID NO: 527251 - RNA, 19 nt, Artificial Sequence
  Description of Artificial Sequence: Synthetic oligonucleotide
  Sense strand starting at position 3579 of SEQ ID NO: 317977
augaaauccugaguuaacg

SEQ ID NO: 527252 - RNA, 19 nt, Artificial Sequence
  Description of Artificial Sequence: Synthetic oligonucleotide
  Antisense strand to SEQ ID NO: 527251
cguuaacucaggauuucau

SEQ ID NO: 527253 - RNA, 19 nt, Artificial Sequence
  Description of Artificial Sequence: Synthetic oligonucleotide
  Sense strand starting at position 3585 of SEQ ID NO: 317977
uccugaguuaacgauuaga

SEQ ID NO: 527254 - RNA, 19 nt, Artificial Sequence
  Description of Artificial Sequence: Synthetic oligonucleotide
  Antisense strand to SEQ ID NO: 527253
ucuaaucguuaacucagga

SEQ ID NO: 527255 - RNA, 19 nt, Artificial Sequence
  Description of Artificial Sequence: Synthetic oligonucleotide
  Sense strand starting at position 3831 of SEQ ID NO: 317977
ucaucaugugaacaauagu

SEQ ID NO: 527256 - RNA, 19 nt, Artificial Sequence
  Description of Artificial Sequence: Synthetic oligonucleotide
  Antisense strand to SEQ ID NO: 527255
acuauuguucacaugauga

SEQ ID NO: 527257 - RNA, 19 nt, Artificial Sequence
  Description of Artificial Sequence: Synthetic oligonucleotide
  Sense strand starting at position 3837 of SEQ ID NO: 317977
ugugaacaauagucucaga

SEQ ID NO: 527258 - RNA, 19 nt, Artificial Sequence
  Description of Artificial Sequence: Synthetic oligonucleotide
  Antisense strand to SEQ ID NO: 527257
ucugagacuauuguucaca

SEQ ID NO: 527259 - RNA, 19 nt, Artificial Sequence
  Description of Artificial Sequence: Synthetic oligonucleotide
  Sense strand starting at position 3889 of SEQ ID NO: 317977
aauguuaugugacuaugaa

SEQ ID NO: 527260 - RNA, 19 nt, Artificial Sequence
  Description of Artificial Sequence: Synthetic oligonucleotide
  Antisense strand to SEQ ID NO: 527259
uucauagucacauaacauu

SEQ ID NO: 527261 - RNA, 19 nt, Artificial Sequence
  Description of Artificial Sequence: Synthetic oligonucleotide
  Sense strand starting at position 120 of SEQ ID NO: 317978
cacagugaacugugcauua

SEQ ID NO: 527262 - RNA, 19 nt, Artificial Sequence
  Description of Artificial Sequence: Synthetic oligonucleotide
  Antisense strand to SEQ ID NO: 527261
uaaugcacaguucacugug

SEQ ID NO: 527263 - RNA, 19 nt, Artificial Sequence
  Description of Artificial Sequence: Synthetic oligonucleotide
  Sense strand starting at position 122 of SEQ ID NO: 317978
cagugaacugugcauuaaa

SEQ ID NO: 527264 - RNA, 19 nt, Artificial Sequence
  Description of Artificial Sequence: Synthetic oligonucleotide
  Antisense strand to SEQ ID NO: 527263
uuuaaugcacaguucacug

SEQ ID NO: 527265 - RNA, 19 nt, Artificial Sequence
  Description of Artificial Sequence: Synthetic oligonucleotide
  Sense strand starting at position 153 of SEQ ID NO: 317978
gugucucuaacaggaagaa

SEQ ID NO: 527266 - RNA, 19 nt, Artificial Sequence
  Description of Artificial Sequence: Synthetic oligonucleotide
  Antisense strand to SEQ ID NO: 527265
uucuuccuguuagagacac

SEQ ID NO: 527267 - RNA, 19 nt, Artificial Sequence
  Description of Artificial Sequence: Synthetic oligonucleotide
  Sense strand starting at position 201 of SEQ ID NO: 317978
acauguugugauggcugaa

SEQ ID NO: 527268 - RNA, 19 nt, Artificial Sequence
  Description of Artificial Sequence: Synthetic oligonucleotide
  Antisense strand to SEQ ID NO: 527267
uucagccaucacaacaugu

SEQ ID NO: 527269 - RNA, 19 nt, Artificial Sequence
  Description of Artificial Sequence: Synthetic oligonucleotide
  Sense strand starting at position 225 of SEQ ID NO: 317978
cuuugaauucugcagguac

SEQ ID NO: 527270 - RNA, 19 nt, Artificial Sequence
  Description of Artificial Sequence: Synthetic oligonucleotide
  Antisense strand to SEQ ID NO: 527269
guaccugcagaauucaaag

SEQ ID NO: 527271 - RNA, 19 nt, Artificial Sequence
  Description of Artificial Sequence: Synthetic oligonucleotide
  Sense strand starting at position 299 of SEQ ID NO: 317978
guugaaugccggagucgug

SEQ ID NO: 527272 - RNA, 19 nt, Artificial Sequence
  Description of Artificial Sequence: Synthetic oligonucleotide
  Antisense strand to SEQ ID NO: 527271
cacgacuccggcauucaac

SEQ ID NO: 527273 - RNA, 19 nt, Artificial Sequence
  Description of Artificial Sequence: Synthetic oligonucleotide
  Sense strand starting at position 356 of SEQ ID NO: 317978
uuccuaauguuucugugaa

SEQ ID NO: 527274 - RNA, 19 nt, Artificial Sequence
  Description of Artificial Sequence: Synthetic oligonucleotide
  Antisense strand to SEQ ID NO: 527273
uucacagaaacauuaggaa

SEQ ID NO: 527275 - RNA, 19 nt, Artificial Sequence
  Description of Artificial Sequence: Synthetic oligonucleotide
  Sense strand starting at position 558 of SEQ ID NO: 317978
uuugcuuugcaugaauaaa

SEQ ID NO: 527276 - RNA, 19 nt, Artificial Sequence
  Description of Artificial Sequence: Synthetic oligonucleotide
  Antisense strand to SEQ ID NO: 527275
uuuauucaugcaaagcaaa

SEQ ID NO: 527277 - RNA, 19 nt, Artificial Sequence
  Description of Artificial Sequence: Synthetic oligonucleotide
  Sense strand starting at position 585 of SEQ ID NO: 317978
uuuaccucuuagguaaagu

SEQ ID NO: 527278 - RNA, 19 nt, Artificial Sequence
  Description of Artificial Sequence: Synthetic oligonucleotide
  Antisense strand to SEQ ID NO: 527277
acuuuaccuaagagguaaa

SEQ ID NO: 527279 - RNA, 19 nt, Artificial Sequence
  Description of Artificial Sequence: Synthetic oligonucleotide
  Sense strand starting at position 593 of SEQ ID NO: 317978
uuagguaaagugcaaucaa

SEQ ID NO: 527280 - RNA, 19 nt, Artificial Sequence
  Description of Artificial Sequence: Synthetic oligonucleotide
  Antisense strand to SEQ ID NO: 527279
uugauugcacuuuaccuaa

SEQ ID NO: 527281 - RNA, 19 nt, Artificial Sequence
  Description of Artificial Sequence: Synthetic oligonucleotide
  Sense strand starting at position 612 of SEQ ID NO: 317978
ucaccaucugauuguugaa

SEQ ID NO: 527282 - RNA, 19 nt, Artificial Sequence
  Description of Artificial Sequence: Synthetic oligonucleotide
  Antisense strand to SEQ ID NO: 527281
uucaacaaucagaugguga

SEQ ID NO: 527283 - RNA, 19 nt, Artificial Sequence
  Description of Artificial Sequence: Synthetic oligonucleotide
  Sense strand starting at position 614 of SEQ ID NO: 317978
accaucugauuguugaauu

SEQ ID NO: 527284 - RNA, 19 nt, Artificial Sequence
  Description of Artificial Sequence: Synthetic oligonucleotide
  Antisense strand to SEQ ID NO: 527283
aauucaacaaucagauggu

SEQ ID NO: 527285 - RNA, 19 nt, Artificial Sequence
  Description of Artificial Sequence: Synthetic oligonucleotide
  Sense strand starting at position 644 of SEQ ID NO: 317978
guggaauguuggagaacug

SEQ ID NO: 527286 - RNA, 19 nt, Artificial Sequence
  Description of Artificial Sequence: Synthetic oligonucleotide
  Antisense strand to SEQ ID NO: 527285
caguucuccaacauuccac

SEQ ID NO: 527287 - RNA, 19 nt, Artificial Sequence
  Description of Artificial Sequence: Synthetic oligonucleotide
  Sense strand starting at position 696 of SEQ ID NO: 317978
uauauagucuaugugugga

SEQ ID NO: 527288 - RNA, 19 nt, Artificial Sequence
  Description of Artificial Sequence: Synthetic oligonucleotide
  Antisense strand to SEQ ID NO: 527287
uccacacauagacuauaua

SEQ ID NO: 527289 - RNA, 19 nt, Artificial Sequence
  Description of Artificial Sequence: Synthetic oligonucleotide
  Sense strand starting at position 832 of SEQ ID NO: 317978
uucuuuguaggguaaguga

SEQ ID NO: 527290 - RNA, 19 nt, Artificial Sequence
  Description of Artificial Sequence: Synthetic oligonucleotide
  Antisense strand to SEQ ID NO: 527289
ucacuuacccuacaaagaa

SEQ ID NO: 527291 - RNA, 19 nt, Artificial Sequence
  Description of Artificial Sequence: Synthetic oligonucleotide
  Sense strand starting at position 835 of SEQ ID NO: 317978
uuuguaggguaagugauua

SEQ ID NO: 527292 - RNA, 19 nt, Artificial Sequence
  Description of Artificial Sequence: Synthetic oligonucleotide
  Antisense strand to SEQ ID NO: 527291
uaaucacuuacccuacaaa

SEQ ID NO: 527293 - RNA, 19 nt, Artificial Sequence
  Description of Artificial Sequence: Synthetic oligonucleotide
  Sense strand starting at position 839 of SEQ ID NO: 317978
uaggguaagugauuaauag

SEQ ID NO: 527294 - RNA, 19 nt, Artificial Sequence
  Description of Artificial Sequence: Synthetic oligonucleotide
  Antisense strand to SEQ ID NO: 527293
cuauuaaucacuuacccua

SEQ ID NO: 527295 - RNA, 19 nt, Artificial Sequence
  Description of Artificial Sequence: Synthetic oligonucleotide
  Sense strand starting at position 848 of SEQ ID NO: 317978
ugauuaauagacugcaauc

SEQ ID NO: 527296 - RNA, 19 nt, Artificial Sequence
  Description of Artificial Sequence: Synthetic oligonucleotide
  Antisense strand to SEQ ID NO: 527295
gauugcagucuauuaauca

SEQ ID NO: 527297 - RNA, 19 nt, Artificial Sequence
  Description of Artificial Sequence: Synthetic oligonucleotide
  Sense strand starting at position 907 of SEQ ID NO: 317978
gugguaugccuuuaaauac

SEQ ID NO: 527298 - RNA, 19 nt, Artificial Sequence
  Description of Artificial Sequence: Synthetic oligonucleotide
  Antisense strand to SEQ ID NO: 527297
guauuuaaaggcauaccac

SEQ ID NO: 527299 - RNA, 19 nt, Artificial Sequence
  Description of Artificial Sequence: Synthetic oligonucleotide
  Sense strand starting at position 990 of SEQ ID NO: 317978
gcuuguaagcaaugaaaca

SEQ ID NO: 527300 - RNA, 19 nt, Artificial Sequence
  Description of Artificial Sequence: Synthetic oligonucleotide
  Antisense strand to SEQ ID NO: 527299
uguuucauugcuuacaagc

SEQ ID NO: 527301 - RNA, 19 nt, Artificial Sequence
  Description of Artificial Sequence: Synthetic oligonucleotide
  Sense strand starting at position 1011 of SEQ ID NO: 317978
auauguuuagagcgaaaug

SEQ ID NO: 527302 - RNA, 19 nt, Artificial Sequence
  Description of Artificial Sequence: Synthetic oligonucleotide
  Antisense strand to SEQ ID NO: 527301
cauuucgcucuaaacauau

SEQ ID NO: 527303 - RNA, 19 nt, Artificial Sequence
  Description of Artificial Sequence: Synthetic oligonucleotide
  Sense strand starting at position 1016 of SEQ ID NO: 317978
uuuagagcgaaauggucua

SEQ ID NO: 527304 - RNA, 19 nt, Artificial Sequence
  Description of Artificial Sequence: Synthetic oligonucleotide
  Antisense strand to SEQ ID NO: 527303
uagaccauuucgcucuaaa

SEQ ID NO: 527305 - RNA, 19 nt, Artificial Sequence
  Description of Artificial Sequence: Synthetic oligonucleotide
  Sense strand starting at position 1021 of SEQ ID NO: 317978
agcgaaauggucuagagau

SEQ ID NO: 527306 - RNA, 19 nt, Artificial Sequence
  Description of Artificial Sequence: Synthetic oligonucleotide
  Antisense strand to SEQ ID NO: 527305
aucucuagaccauuucgcu

SEQ ID NO: 527307 - RNA, 19 nt, Artificial Sequence
  Description of Artificial Sequence: Synthetic oligonucleotide
  Sense strand starting at position 1036 of SEQ ID NO: 317978
agauaagaacucugagccu

SEQ ID NO: 527308 - RNA, 19 nt, Artificial Sequence
  Description of Artificial Sequence: Synthetic oligonucleotide
  Antisense strand to SEQ ID NO: 527307
aggcucagaguucuuaucu

SEQ ID NO: 527309 - RNA, 19 nt, Artificial Sequence
  Description of Artificial Sequence: Synthetic oligonucleotide
  Sense strand starting at position 1105 of SEQ ID NO: 317978
auuaguugacuaugacaag

SEQ ID NO: 527310 - RNA, 19 nt, Artificial Sequence
  Description of Artificial Sequence: Synthetic oligonucleotide
  Antisense strand to SEQ ID NO: 527309
cuugucauagucaacuaau

SEQ ID NO: 527311 - RNA, 19 nt, Artificial Sequence
  Description of Artificial Sequence: Synthetic oligonucleotide
  Sense strand starting at position 1386 of SEQ ID NO: 317978
uuaagaaaguuucuugcaa

SEQ ID NO: 527312 - RNA, 19 nt, Artificial Sequence
  Description of Artificial Sequence: Synthetic oligonucleotide
  Antisense strand to SEQ ID NO: 527311
uugcaagaaacuuucuuaa

SEQ ID NO: 527313 - RNA, 19 nt, Artificial Sequence
  Description of Artificial Sequence: Synthetic oligonucleotide
  Sense strand starting at position 1540 of SEQ ID NO: 317978
ucguguucagaaugggaga

SEQ ID NO: 527314 - RNA, 19 nt, Artificial Sequence
  Description of Artificial Sequence: Synthetic oligonucleotide
  Antisense strand to SEQ ID NO: 527313
ucucccauucugaacacga

SEQ ID NO: 527315 - RNA, 19 nt, Artificial Sequence
  Description of Artificial Sequence: Synthetic oligonucleotide
  Sense strand starting at position 1637 of SEQ ID NO: 317978
gugccuucccuaggaugau

SEQ ID NO: 527316 - RNA, 19 nt, Artificial Sequence
  Description of Artificial Sequence: Synthetic oligonucleotide
  Antisense strand to SEQ ID NO: 527315
aucauccuagggaaggcac

SEQ ID NO: 527317 - RNA, 19 nt, Artificial Sequence
  Description of Artificial Sequence: Synthetic oligonucleotide
  Sense strand starting at position 1684 of SEQ ID NO: 317978
gcgucuuaacuuuagauga

SEQ ID NO: 527318 - RNA, 19 nt, Artificial Sequence
  Description of Artificial Sequence: Synthetic oligonucleotide
  Antisense strand to SEQ ID NO: 527317
ucaucuaaaguuaagacgc

SEQ ID NO: 527319 - RNA, 19 nt, Artificial Sequence
  Description of Artificial Sequence: Synthetic oligonucleotide
  Sense strand starting at position 1885 of SEQ ID NO: 317978
gcgguuucacccugaaaga

SEQ ID NO: 527320 - RNA, 19 nt, Artificial Sequence
  Description of Artificial Sequence: Synthetic oligonucleotide
  Antisense strand to SEQ ID NO: 527319
ucuuucagggugaaaccgc

SEQ ID NO: 527321 - RNA, 19 nt, Artificial Sequence
  Description of Artificial Sequence: Synthetic oligonucleotide
  Sense strand starting at position 2934 of SEQ ID NO: 317978
agaguucuggcagguagga

SEQ ID NO: 527322 - RNA, 19 nt, Artificial Sequence
  Description of Artificial Sequence: Synthetic oligonucleotide
  Antisense strand to SEQ ID NO: 527321
uccuaccugccagaacucu

SEQ ID NO: 527323 - RNA, 19 nt, Artificial Sequence
  Description of Artificial Sequence: Synthetic oligonucleotide
  Sense strand starting at position 3075 of SEQ ID NO: 317978
ggaggcaacuguuugucua

SEQ ID NO: 527324 - RNA, 19 nt, Artificial Sequence
  Description of Artificial Sequence: Synthetic oligonucleotide
  Antisense strand to SEQ ID NO: 527323
uagacaaacaguugccucc

SEQ ID NO: 527325 - RNA, 19 nt, Artificial Sequence
  Description of Artificial Sequence: Synthetic oligonucleotide
  Sense strand starting at position 3087 of SEQ ID NO: 317978
uugucuauguuaucaugga

SEQ ID NO: 527326 - RNA, 19 nt, Artificial Sequence
  Description of Artificial Sequence: Synthetic oligonucleotide
  Antisense strand to SEQ ID NO: 527325
uccaugauaacauagacaa

SEQ ID NO: 527327 - RNA, 19 nt, Artificial Sequence
  Description of Artificial Sequence: Synthetic oligonucleotide
  Sense strand starting at position 3091 of SEQ ID NO: 317978
cuauguuaucauggagaaa

SEQ ID NO: 527328 - RNA, 19 nt, Artificial Sequence
  Description of Artificial Sequence: Synthetic oligonucleotide
  Antisense strand to SEQ ID NO: 527327
uuucuccaugauaacauag

SEQ ID NO: 527329 - RNA, 19 nt, Artificial Sequence
  Description of Artificial Sequence: Synthetic oligonucleotide
  Sense strand starting at position 3449 of SEQ ID NO: 317978
ugguuuccuccucggauuu

SEQ ID NO: 527330 - RNA, 19 nt, Artificial Sequence
  Description of Artificial Sequence: Synthetic oligonucleotide
  Antisense strand to SEQ ID NO: 527329
aaauccgaggaggaaacca

SEQ ID NO: 527331 - RNA, 19 nt, Artificial Sequence
  Description of Artificial Sequence: Synthetic oligonucleotide
  Sense strand starting at position 3611 of SEQ ID NO: 317978
aauguuucugguggauaag

SEQ ID NO: 527332 - RNA, 19 nt, Artificial Sequence
  Description of Artificial Sequence: Synthetic oligonucleotide
  Antisense strand to SEQ ID NO: 527331
cuuauccaccagaaacauu

SEQ ID NO: 527333 - RNA, 19 nt, Artificial Sequence
  Description of Artificial Sequence: Synthetic oligonucleotide
  Sense strand starting at position 3621 of SEQ ID NO: 317978
guggauaaggucugagcuu

SEQ ID NO: 527334 - RNA, 19 nt, Artificial Sequence
  Description of Artificial Sequence: Synthetic oligonucleotide
  Antisense strand to SEQ ID NO: 527333
aagcucagaccuuauccac

SEQ ID NO: 527335 - RNA, 19 nt, Artificial Sequence
  Description of Artificial Sequence: Synthetic oligonucleotide
  Sense strand starting at position 3628 of SEQ ID NO: 317978
aggucugagcuuugguaag

SEQ ID NO: 527336 - RNA, 19 nt, Artificial Sequence
  Description of Artificial Sequence: Synthetic oligonucleotide
  Antisense strand to SEQ ID NO: 527335
cuuaccaaagcucagaccu

SEQ ID NO: 527337 - RNA, 19 nt, Artificial Sequence
  Description of Artificial Sequence: Synthetic oligonucleotide
  Sense strand starting at position 3799 of SEQ ID NO: 317978
augcaaucagcuuaaugau

SEQ ID NO: 527338 - RNA, 19 nt, Artificial Sequence
  Description of Artificial Sequence: Synthetic oligonucleotide
  Antisense strand to SEQ ID NO: 527337
aucauuaagcugauugcau

SEQ ID NO: 527339 - RNA, 19 nt, Artificial Sequence
  Description of Artificial Sequence: Synthetic oligonucleotide
  Sense strand starting at position 3909 of SEQ ID NO: 317978
ucaagugucaacugggaag

SEQ ID NO: 527340 - RNA, 19 nt, Artificial Sequence
  Description of Artificial Sequence: Synthetic oligonucleotide
  Antisense strand to SEQ ID NO: 527339
cuucccaguugacacuuga

SEQ ID NO: 527341 - RNA, 19 nt, Artificial Sequence
  Description of Artificial Sequence: Synthetic oligonucleotide
  Sense strand starting at position 92 of SEQ ID NO: 317979
gucucauuggcagaagaca

SEQ ID NO: 527342 - RNA, 19 nt, Artificial Sequence
  Description of Artificial Sequence: Synthetic oligonucleotide
  Antisense strand to SEQ ID NO: 527341
ugucuucugccaaugagac

SEQ ID NO: 527343 - RNA, 19 nt, Artificial Sequence
  Description of Artificial Sequence: Synthetic oligonucleotide
  Sense strand starting at position 201 of SEQ ID NO: 317979
gcuggaaggucaucuugau

SEQ ID NO: 527344 - RNA, 19 nt, Artificial Sequence
  Description of Artificial Sequence: Synthetic oligonucleotide
  Antisense strand to SEQ ID NO: 527343
aucaagaugaccuuccagc

SEQ ID NO: 527345 - RNA, 19 nt, Artificial Sequence
  Description of Artificial Sequence: Synthetic oligonucleotide
  Sense strand starting at position 476 of SEQ ID NO: 317979
aauuguuugcauuggaaug

SEQ ID NO: 527346 - RNA, 19 nt, Artificial Sequence
  Description of Artificial Sequence: Synthetic oligonucleotide
  Antisense strand to SEQ ID NO: 527345
cauuccaaugcaaacaauu

SEQ ID NO: 527347 - RNA, 19 nt, Artificial Sequence
  Description of Artificial Sequence: Synthetic oligonucleotide
  Sense strand starting at position 604 of SEQ ID NO: 317979
cuaacuuacuaugucaagu

SEQ ID NO: 527348 - RNA, 19 nt, Artificial Sequence
  Description of Artificial Sequence: Synthetic oligonucleotide
  Antisense strand to SEQ ID NO: 527347
acuugacauaguaaguuag

SEQ ID NO: 527349 - RNA, 19 nt, Artificial Sequence
  Description of Artificial Sequence: Synthetic oligonucleotide
  Sense strand starting at position 732 of SEQ ID NO: 317979
ccaguuacauuaccugauu

SEQ ID NO: 527350 - RNA, 19 nt, Artificial Sequence
  Description of Artificial Sequence: Synthetic oligonucleotide
  Antisense strand to SEQ ID NO: 527349
aaucagguaauguaacugg

SEQ ID NO: 527351 - RNA, 19 nt, Artificial Sequence
  Description of Artificial Sequence: Synthetic oligonucleotide
  Sense strand starting at position 799 of SEQ ID NO: 317979
aucuacaggucauugcaau

SEQ ID NO: 527352 - RNA, 19 nt, Artificial Sequence
  Description of Artificial Sequence: Synthetic oligonucleotide
  Antisense strand to SEQ ID NO: 527351
auugcaaugaccuguagau

SEQ ID NO: 527353 - RNA, 19 nt, Artificial Sequence
  Description of Artificial Sequence: Synthetic oligonucleotide
  Sense strand starting at position 800 of SEQ ID NO: 317979
ucuacaggucauugcaaua

SEQ ID NO: 527354 - RNA, 19 nt, Artificial Sequence
  Description of Artificial Sequence: Synthetic oligonucleotide
  Antisense strand to SEQ ID NO: 527353
uauugcaaugaccuguaga

SEQ ID NO: 527355 - RNA, 19 nt, Artificial Sequence
  Description of Artificial Sequence: Synthetic oligonucleotide
  Sense strand starting at position 805 of SEQ ID NO: 317979
aggucauugcaauaguaac

SEQ ID NO: 527356 - RNA, 19 nt, Artificial Sequence
  Description of Artificial Sequence: Synthetic oligonucleotide
  Antisense strand to SEQ ID NO: 527355
guuacuauugcaaugaccu

SEQ ID NO: 527357 - RNA, 19 nt, Artificial Sequence
  Description of Artificial Sequence: Synthetic oligonucleotide
  Sense strand starting at position 973 of SEQ ID NO: 317979
ucauaugucuuuccagacu

SEQ ID NO: 527358 - RNA, 19 nt, Artificial Sequence
  Description of Artificial Sequence: Synthetic oligonucleotide
  Antisense strand to SEQ ID NO: 527357
agucuggaaagacauauga

SEQ ID NO: 527359 - RNA, 19 nt, Artificial Sequence
  Description of Artificial Sequence: Synthetic oligonucleotide
  Sense strand starting at position 1058 of SEQ ID NO: 317979
uuauuauaugucugaccuu

SEQ ID NO: 527360 - RNA, 19 nt, Artificial Sequence
  Description of Artificial Sequence: Synthetic oligonucleotide
  Antisense strand to SEQ ID NO: 527359
aaggucagacauauaauaa

SEQ ID NO: 527361 - RNA, 19 nt, Artificial Sequence
  Description of Artificial Sequence: Synthetic oligonucleotide
  Sense strand starting at position 1430 of SEQ ID NO: 317979
ugaucuuuacaauaggcua

SEQ ID NO: 527362 - RNA, 19 nt, Artificial Sequence
  Description of Artificial Sequence: Synthetic oligonucleotide
  Antisense strand to SEQ ID NO: 527361
uagccuauuguaaagauca

SEQ ID NO: 527363 - RNA, 19 nt, Artificial Sequence
  Description of Artificial Sequence: Synthetic oligonucleotide
  Sense strand starting at position 1601 of SEQ ID NO: 317979
uuaacaauggcuuguuaau

SEQ ID NO: 527364 - RNA, 19 nt, Artificial Sequence
  Description of Artificial Sequence: Synthetic oligonucleotide
  Antisense strand to SEQ ID NO: 527363
auuaacaagccauuguuaa

SEQ ID NO: 527365 - RNA, 19 nt, Artificial Sequence
  Description of Artificial Sequence: Synthetic oligonucleotide
  Sense strand starting at position 1626 of SEQ ID NO: 317979
cuaacuaacgugcaaacau

SEQ ID NO: 527366 - RNA, 19 nt, Artificial Sequence
  Description of Artificial Sequence: Synthetic oligonucleotide
  Antisense strand to SEQ ID NO: 527365
auguuugcacguuaguuag

SEQ ID NO: 527367 - RNA, 19 nt, Artificial Sequence
  Description of Artificial Sequence: Synthetic oligonucleotide
  Sense strand starting at position 1668 of SEQ ID NO: 317979
ucuuuauucuuagcuggaa

SEQ ID NO: 527368 - RNA, 19 nt, Artificial Sequence
  Description of Artificial Sequence: Synthetic oligonucleotide
  Antisense strand to SEQ ID NO: 527367
uuccagcuaagaauaaaga

SEQ ID NO: 527369 - RNA, 19 nt, Artificial Sequence
  Description of Artificial Sequence: Synthetic oligonucleotide
  Sense strand starting at position 1669 of SEQ ID NO: 317979
cuuuauucuuagcuggaaa

SEQ ID NO: 527370 - RNA, 19 nt, Artificial Sequence
  Description of Artificial Sequence: Synthetic oligonucleotide
  Antisense strand to SEQ ID NO: 527369
uuuccagcuaagaauaaag

SEQ ID NO: 527371 - RNA, 19 nt, Artificial Sequence
  Description of Artificial Sequence: Synthetic oligonucleotide
  Sense strand starting at position 1671 of SEQ ID NO: 317979
uuauucuuagcuggaaauu

SEQ ID NO: 527372 - RNA, 19 nt, Artificial Sequence
  Description of Artificial Sequence: Synthetic oligonucleotide
  Antisense strand to SEQ ID NO: 527371
aauuuccagcuaagaauaa

SEQ ID NO: 527373 - RNA, 19 nt, Artificial Sequence
  Description of Artificial Sequence: Synthetic oligonucleotide
  Sense strand starting at position 1984 of SEQ ID NO: 317979
agaugaaugcuuugaaguc

SEQ ID NO: 527374 - RNA, 19 nt, Artificial Sequence
  Description of Artificial Sequence: Synthetic oligonucleotide
  Antisense strand to SEQ ID NO: 527373
gacuucaaagcauucaucu

SEQ ID NO: 527375 - RNA, 19 nt, Artificial Sequence
  Description of Artificial Sequence: Synthetic oligonucleotide
  Sense strand starting at position 2094 of SEQ ID NO: 317979
agaaauauaucaguguccu

SEQ ID NO: 527376 - RNA, 19 nt, Artificial Sequence
  Description of Artificial Sequence: Synthetic oligonucleotide
  Antisense strand to SEQ ID NO: 527375
aggacacugauauauuucu

SEQ ID NO: 527377 - RNA, 19 nt, Artificial Sequence
  Description of Artificial Sequence: Synthetic oligonucleotide
  Sense strand starting at position 2283 of SEQ ID NO: 317979
cagugaacugugcauuaaa

SEQ ID NO: 527378 - RNA, 19 nt, Artificial Sequence
  Description of Artificial Sequence: Synthetic oligonucleotide
  Antisense strand to SEQ ID NO: 527377
uuuaaugcacaguucacug

SEQ ID NO: 527379 - RNA, 19 nt, Artificial Sequence
  Description of Artificial Sequence: Synthetic oligonucleotide
  Sense strand starting at position 2314 of SEQ ID NO: 317979
gugucucuaacaggaagaa

SEQ ID NO: 527380 - RNA, 19 nt, Artificial Sequence
  Description of Artificial Sequence: Synthetic oligonucleotide
  Antisense strand to SEQ ID NO: 527379
uucuuccuguuagagacac

SEQ ID NO: 527381 - RNA, 19 nt, Artificial Sequence
  Description of Artificial Sequence: Synthetic oligonucleotide
  Sense strand starting at position 2386 of SEQ ID NO: 317979
cuuugaauucugcagguac

SEQ ID NO: 527382 - RNA, 19 nt, Artificial Sequence
  Description of Artificial Sequence: Synthetic oligonucleotide
  Antisense strand to SEQ ID NO: 527381
guaccugcagaauucaaag

SEQ ID NO: 527383 - RNA, 19 nt, Artificial Sequence
  Description of Artificial Sequence: Synthetic oligonucleotide
  Sense strand starting at position 2460 of SEQ ID NO: 317979
guugaaugccggagucgug

SEQ ID NO: 527384 - RNA, 19 nt, Artificial Sequence
  Description of Artificial Sequence: Synthetic oligonucleotide
  Antisense strand to SEQ ID NO: 527383
cacgacuccggcauucaac

SEQ ID NO: 527385 - RNA, 19 nt, Artificial Sequence
  Description of Artificial Sequence: Synthetic oligonucleotide
  Sense strand starting at position 2719 of SEQ ID NO: 317979
uuugcuuugcaugaauaaa

SEQ ID NO: 527386 - RNA, 19 nt, Artificial Sequence
  Description of Artificial Sequence: Synthetic oligonucleotide
  Antisense strand to SEQ ID NO: 527385
uuuauucaugcaaagcaaa

SEQ ID NO: 527387 - RNA, 19 nt, Artificial Sequence
  Description of Artificial Sequence: Synthetic oligonucleotide
  Sense strand starting at position 2746 of SEQ ID NO: 317979
uuuaccucuuagguaaagu

SEQ ID NO: 527388 - RNA, 19 nt, Artificial Sequence
  Description of Artificial Sequence: Synthetic oligonucleotide
  Antisense strand to SEQ ID NO: 527387
acuuuaccuaagagguaaa

SEQ ID NO: 527389 - RNA, 19 nt, Artificial Sequence
  Description of Artificial Sequence: Synthetic oligonucleotide
  Sense strand starting at position 2754 of SEQ ID NO: 317979
uuagguaaagugcaaucaa

SEQ ID NO: 527390 - RNA, 19 nt, Artificial Sequence
  Description of Artificial Sequence: Synthetic oligonucleotide
  Antisense strand to SEQ ID NO: 527389
uugauugcacuuuaccuaa

SEQ ID NO: 527391 - RNA, 19 nt, Artificial Sequence
  Description of Artificial Sequence: Synthetic oligonucleotide
  Sense strand starting at position 2773 of SEQ ID NO: 317979
ucaccaucugauuguugaa

SEQ ID NO: 527392 - RNA, 19 nt, Artificial Sequence
  Description of Artificial Sequence: Synthetic oligonucleotide
  Antisense strand to SEQ ID NO: 527391
uucaacaaucagaugguga

SEQ ID NO: 527393 - RNA, 19 nt, Artificial Sequence
  Description of Artificial Sequence: Synthetic oligonucleotide
  Sense strand starting at position 2775 of SEQ ID NO: 317979
accaucugauuguugaauu

SEQ ID NO: 527394 - RNA, 19 nt, Artificial Sequence
  Description of Artificial Sequence: Synthetic oligonucleotide
  Antisense strand to SEQ ID NO: 527393
aauucaacaaucagauggu

SEQ ID NO: 527395 - RNA, 19 nt, Artificial Sequence
  Description of Artificial Sequence: Synthetic oligonucleotide
  Sense strand starting at position 2993 of SEQ ID NO: 317979
uucuuuguaggguaaguga

SEQ ID NO: 527396 - RNA, 19 nt, Artificial Sequence
  Description of Artificial Sequence: Synthetic oligonucleotide
  Antisense strand to SEQ ID NO: 527395
ucacuuacccuacaaagaa

SEQ ID NO: 527397 - RNA, 19 nt, Artificial Sequence
  Description of Artificial Sequence: Synthetic oligonucleotide
  Sense strand starting at position 2996 of SEQ ID NO: 317979
uuuguaggguaagugauua

SEQ ID NO: 527398 - RNA, 19 nt, Artificial Sequence
  Description of Artificial Sequence: Synthetic oligonucleotide
  Antisense strand to SEQ ID NO: 527397
uaaucacuuacccuacaaa

SEQ ID NO: 527399 - RNA, 19 nt, Artificial Sequence
  Description of Artificial Sequence: Synthetic oligonucleotide
  Sense strand starting at position 3000 of SEQ ID NO: 317979
uaggguaagugauuaauag

SEQ ID NO: 527400 - RNA, 19 nt, Artificial Sequence
  Description of Artificial Sequence: Synthetic oligonucleotide
  Antisense strand to SEQ ID NO: 527399
cuauuaaucacuuacccua

SEQ ID NO: 527401 - RNA, 19 nt, Artificial Sequence
  Description of Artificial Sequence: Synthetic oligonucleotide
  Sense strand starting at position 3009 of SEQ ID NO: 317979
ugauuaauagacugcaauc

SEQ ID NO: 527402 - RNA, 19 nt, Artificial Sequence
  Description of Artificial Sequence: Synthetic oligonucleotide
  Antisense strand to SEQ ID NO: 527401
gauugcagucuauuaauca

SEQ ID NO: 527403 - RNA, 19 nt, Artificial Sequence
  Description of Artificial Sequence: Synthetic oligonucleotide
  Sense strand starting at position 3068 of SEQ ID NO: 317979
gugguaugccuuuaaauac

SEQ ID NO: 527404 - RNA, 19 nt, Artificial Sequence
  Description of Artificial Sequence: Synthetic oligonucleotide
  Antisense strand to SEQ ID NO: 527403
guauuuaaaggcauaccac

SEQ ID NO: 527405 - RNA, 19 nt, Artificial Sequence
  Description of Artificial Sequence: Synthetic oligonucleotide
  Sense strand starting at position 3151 of SEQ ID NO: 317979
gcuuguaagcaaugaaaca

SEQ ID NO: 527406 - RNA, 19 nt, Artificial Sequence
  Description of Artificial Sequence: Synthetic oligonucleotide
  Antisense strand to SEQ ID NO: 527405
uguuucauugcuuacaagc

SEQ ID NO: 527407 - RNA, 19 nt, Artificial Sequence
  Description of Artificial Sequence: Synthetic oligonucleotide
  Sense strand starting at position 3172 of SEQ ID NO: 317979
auauguuuagagcgaaaug

SEQ ID NO: 527408 - RNA, 19 nt, Artificial Sequence
  Description of Artificial Sequence: Synthetic oligonucleotide
  Antisense strand to SEQ ID NO: 527407
cauuucgcucuaaacauau

SEQ ID NO: 527409 - RNA, 19 nt, Artificial Sequence
  Description of Artificial Sequence: Synthetic oligonucleotide
  Sense strand starting at position 3182 of SEQ ID NO: 317979
agcgaaauggucuagagau

SEQ ID NO: 527410 - RNA, 19 nt, Artificial Sequence
  Description of Artificial Sequence: Synthetic oligonucleotide
  Antisense strand to SEQ ID NO: 527409
aucucuagaccauuucgcu

SEQ ID NO: 527411 - RNA, 19 nt, Artificial Sequence
  Description of Artificial Sequence: Synthetic oligonucleotide
  Sense strand starting at position 3197 of SEQ ID NO: 317979
agauaagaacucugagccu

SEQ ID NO: 527412 - RNA, 19 nt, Artificial Sequence
  Description of Artificial Sequence: Synthetic oligonucleotide
  Antisense strand to SEQ ID NO: 527411
aggcucagaguucuuaucu

SEQ ID NO: 527413 - RNA, 19 nt, Artificial Sequence
  Description of Artificial Sequence: Synthetic oligonucleotide
  Sense strand starting at position 3266 of SEQ ID NO: 317979
auuaguugacuaugacaag

SEQ ID NO: 527414 - RNA, 19 nt, Artificial Sequence
  Description of Artificial Sequence: Synthetic oligonucleotide
  Antisense strand to SEQ ID NO: 527413
cuugucauagucaacuaau

SEQ ID NO: 527415 - RNA, 19 nt, Artificial Sequence
  Description of Artificial Sequence: Synthetic oligonucleotide
  Sense strand starting at position 3547 of SEQ ID NO: 317979
uuaagaaaguuucuugcaa

SEQ ID NO: 527416 - RNA, 19 nt, Artificial Sequence
  Description of Artificial Sequence: Synthetic oligonucleotide
  Antisense strand to SEQ ID NO: 527415
uugcaagaaacuuucuuaa

SEQ ID NO: 527417 - RNA, 19 nt, Artificial Sequence
  Description of Artificial Sequence: Synthetic oligonucleotide
  Sense strand starting at position 3701 of SEQ ID NO: 317979
ucguguucagaaugggaga

SEQ ID NO: 527418 - RNA, 19 nt, Artificial Sequence
  Description of Artificial Sequence: Synthetic oligonucleotide
  Antisense strand to SEQ ID NO: 527417
ucucccauucugaacacga

SEQ ID NO: 527419 - RNA, 19 nt, Artificial Sequence
  Description of Artificial Sequence: Synthetic oligonucleotide
  Sense strand starting at position 3845 of SEQ ID NO: 317979
gcgucuuaacuuuagauga

SEQ ID NO: 527420 - RNA, 19 nt, Artificial Sequence
  Description of Artificial Sequence: Synthetic oligonucleotide
  Antisense strand to SEQ ID NO: 527419
ucaucuaaaguuaagacgc

SEQ ID NO: 527421 - RNA, 19 nt, Artificial Sequence
  Description of Artificial Sequence: Synthetic oligonucleotide
  Sense strand starting at position 105 of SEQ ID NO: 317980
uuaugaaugcuacagccau

SEQ ID NO: 527422 - RNA, 19 nt, Artificial Sequence
  Description of Artificial Sequence: Synthetic oligonucleotide
  Antisense strand to SEQ ID NO: 527421
auggcuguagcauucauaa

SEQ ID NO: 527423 - RNA, 19 nt, Artificial Sequence
  Description of Artificial Sequence: Synthetic oligonucleotide
  Sense strand starting at position 254 of SEQ ID NO: 317980
agacaauuaugcuuuaggu

SEQ ID NO: 527424 - RNA, 19 nt, Artificial Sequence
  Description of Artificial Sequence: Synthetic oligonucleotide
  Antisense strand to SEQ ID NO: 527423
accuaaagcauaauugucu

SEQ ID NO: 527425 - RNA, 19 nt, Artificial Sequence
  Description of Artificial Sequence: Synthetic oligonucleotide
  Sense strand starting at position 256 of SEQ ID NO: 317980
acaauuaugcuuuagguuu

SEQ ID NO: 527426 - RNA, 19 nt, Artificial Sequence
  Description of Artificial Sequence: Synthetic oligonucleotide
  Antisense strand to SEQ ID NO: 527425
aaaccuaaagcauaauugu

SEQ ID NO: 527427 - RNA, 19 nt, Artificial Sequence
  Description of Artificial Sequence: Synthetic oligonucleotide
  Sense strand starting at position 302 of SEQ ID NO: 317980
uggaauaagaucugugugu

SEQ ID NO: 527428 - RNA, 19 nt, Artificial Sequence
  Description of Artificial Sequence: Synthetic oligonucleotide
  Antisense strand to SEQ ID NO: 527427
acacacagaucuuauucca

SEQ ID NO: 527429 - RNA, 19 nt, Artificial Sequence
  Description of Artificial Sequence: Synthetic oligonucleotide
  Sense strand starting at position 303 of SEQ ID NO: 317980
ggaauaagaucuguguguu

SEQ ID NO: 527430 - RNA, 19 nt, Artificial Sequence
  Description of Artificial Sequence: Synthetic oligonucleotide
  Antisense strand to SEQ ID NO: 527429
aacacacagaucuuauucc

SEQ ID NO: 527431 - RNA, 19 nt, Artificial Sequence
  Description of Artificial Sequence: Synthetic oligonucleotide
  Sense strand starting at position 304 of SEQ ID NO: 317980
gaauaagaucuguguguuu

SEQ ID NO: 527432 - RNA, 19 nt, Artificial Sequence
  Description of Artificial Sequence: Synthetic oligonucleotide
  Antisense strand to SEQ ID NO: 527431
aaacacacagaucuuauuc

SEQ ID NO: 527433 - RNA, 19 nt, Artificial Sequence
  Description of Artificial Sequence: Synthetic oligonucleotide
  Sense strand starting at position 387 of SEQ ID NO: 317980
agggaagaauuagugcaua

SEQ ID NO: 527434 - RNA, 19 nt, Artificial Sequence
  Description of Artificial Sequence: Synthetic oligonucleotide
  Antisense strand to SEQ ID NO: 527433
uaugcacuaauucuucccu

SEQ ID NO: 527435 - RNA, 19 nt, Artificial Sequence
  Description of Artificial Sequence: Synthetic oligonucleotide
  Sense strand starting at position 390 of SEQ ID NO: 317980
gaagaauuagugcauagca

SEQ ID NO: 527436 - RNA, 19 nt, Artificial Sequence
  Description of Artificial Sequence: Synthetic oligonucleotide
  Antisense strand to SEQ ID NO: 527435
ugcuaugcacuaauucuuc

SEQ ID NO: 527437 - RNA, 19 nt, Artificial Sequence
  Description of Artificial Sequence: Synthetic oligonucleotide
  Sense strand starting at position 465 of SEQ ID NO: 317980
cccuuagugaaaugugaag

SEQ ID NO: 527438 - RNA, 19 nt, Artificial Sequence
  Description of Artificial Sequence: Synthetic oligonucleotide
  Antisense strand to SEQ ID NO: 527437
cuucacauuucacuaaggg

SEQ ID NO: 527439 - RNA, 19 nt, Artificial Sequence
  Description of Artificial Sequence: Synthetic oligonucleotide
  Sense strand starting at position 467 of SEQ ID NO: 317980
cuuagugaaaugugaagau

SEQ ID NO: 527440 - RNA, 19 nt, Artificial Sequence
  Description of Artificial Sequence: Synthetic oligonucleotide
  Antisense strand to SEQ ID NO: 527439
aucuucacauuucacuaag

SEQ ID NO: 527441 - RNA, 19 nt, Artificial Sequence
  Description of Artificial Sequence: Synthetic oligonucleotide
  Sense strand starting at position 568 of SEQ ID NO: 317980
ggcaaugcccauuaucauu

SEQ ID NO: 527442 - RNA, 19 nt, Artificial Sequence
  Description of Artificial Sequence: Synthetic oligonucleotide
  Antisense strand to SEQ ID NO: 527441
aaugauaaugggcauugcc

SEQ ID NO: 527443 - RNA, 19 nt, Artificial Sequence
  Description of Artificial Sequence: Synthetic oligonucleotide
  Sense strand starting at position 708 of SEQ ID NO: 317980
gugacagcaccugaaauua

SEQ ID NO: 527444 - RNA, 19 nt, Artificial Sequence
  Description of Artificial Sequence: Synthetic oligonucleotide
  Antisense strand to SEQ ID NO: 527443
uaauuucaggugcugucac

SEQ ID NO: 527445 - RNA, 19 nt, Artificial Sequence
  Description of Artificial Sequence: Synthetic oligonucleotide
  Sense strand starting at position 907 of SEQ ID NO: 317980
auucuagucaauugggaga

SEQ ID NO: 527446 - RNA, 19 nt, Artificial Sequence
  Description of Artificial Sequence: Synthetic oligonucleotide
  Antisense strand to SEQ ID NO: 527445
ucucccaauugacuagaau

SEQ ID NO: 527447 - RNA, 19 nt, Artificial Sequence
  Description of Artificial Sequence: Synthetic oligonucleotide
  Sense strand starting at position 979 of SEQ ID NO: 317980
auguauauugauggcuuua

SEQ ID NO: 527448 - RNA, 19 nt, Artificial Sequence
  Description of Artificial Sequence: Synthetic oligonucleotide
  Antisense strand to SEQ ID NO: 527447
uaaagccaucaauauacau

SEQ ID NO: 527449 - RNA, 19 nt, Artificial Sequence
  Description of Artificial Sequence: Synthetic oligonucleotide
  Sense strand starting at position 981 of SEQ ID NO: 317980
guauauugauggcuuuaau

SEQ ID NO: 527450 - RNA, 19 nt, Artificial Sequence
  Description of Artificial Sequence: Synthetic oligonucleotide
  Antisense strand to SEQ ID NO: 527449
auuaaagccaucaauauac

SEQ ID NO: 527451 - RNA, 19 nt, Artificial Sequence
  Description of Artificial Sequence: Synthetic oligonucleotide
  Sense strand starting at position 989 of SEQ ID NO: 317980
auggcuuuaaugggaaagu

SEQ ID NO: 527452 - RNA, 19 nt, Artificial Sequence
  Description of Artificial Sequence: Synthetic oligonucleotide
  Antisense strand to SEQ ID NO: 527451
acuuucccauuaaagccau

SEQ ID NO: 527453 - RNA, 19 nt, Artificial Sequence
  Description of Artificial Sequence: Synthetic oligonucleotide
  Sense strand starting at position 1061 of SEQ ID NO: 317980
ugaggcaaacauugaucau

SEQ ID NO: 527454 - RNA, 19 nt, Artificial Sequence
  Description of Artificial Sequence: Synthetic oligonucleotide
  Antisense strand to SEQ ID NO: 527453
augaucaauguuugccuca

SEQ ID NO: 527455 - RNA, 19 nt, Artificial Sequence
  Description of Artificial Sequence: Synthetic oligonucleotide
  Sense strand starting at position 1064 of SEQ ID NO: 317980
ggcaaacauugaucauaua

SEQ ID NO: 527456 - RNA, 19 nt, Artificial Sequence
  Description of Artificial Sequence: Synthetic oligonucleotide
  Antisense strand to SEQ ID NO: 527455
uauaugaucaauguuugcc

SEQ ID NO: 527457 - RNA, 19 nt, Artificial Sequence
  Description of Artificial Sequence: Synthetic oligonucleotide
  Sense strand starting at position 1263 of SEQ ID NO: 317980
ggaaacuacagguguuugu

SEQ ID NO: 527458 - RNA, 19 nt, Artificial Sequence
  Description of Artificial Sequence: Synthetic oligonucleotide
  Antisense strand to SEQ ID NO: 527457
acaaacaccuguaguuucc

SEQ ID NO: 527459 - RNA, 19 nt, Artificial Sequence
  Description of Artificial Sequence: Synthetic oligonucleotide
  Sense strand starting at position 1427 of SEQ ID NO: 317980
uguguagacagucaaugau

SEQ ID NO: 527460 - RNA, 19 nt, Artificial Sequence
  Description of Artificial Sequence: Synthetic oligonucleotide
  Antisense strand to SEQ ID NO: 527459
aucauugacugucuacaca

SEQ ID NO: 527461 - RNA, 19 nt, Artificial Sequence
  Description of Artificial Sequence: Synthetic oligonucleotide
  Sense strand starting at position 1550 of SEQ ID NO: 317980
ggagucacccaauggaugu

SEQ ID NO: 527462 - RNA, 19 nt, Artificial Sequence
  Description of Artificial Sequence: Synthetic oligonucleotide
  Antisense strand to SEQ ID NO: 527461
acauccauugggugacucc

SEQ ID NO: 527463 - RNA, 19 nt, Artificial Sequence
  Description of Artificial Sequence: Synthetic oligonucleotide
  Sense strand starting at position 2091 of SEQ ID NO: 317980
caucuugcugauugagauu

SEQ ID NO: 527464 - RNA, 19 nt, Artificial Sequence
  Description of Artificial Sequence: Synthetic oligonucleotide
  Antisense strand to SEQ ID NO: 527463
aaucucaaucagcaagaug

SEQ ID NO: 527465 - RNA, 19 nt, Artificial Sequence
  Description of Artificial Sequence: Synthetic oligonucleotide
  Sense strand starting at position 2097 of SEQ ID NO: 317980
gcugauugagauuauguuc

SEQ ID NO: 527466 - RNA, 19 nt, Artificial Sequence
  Description of Artificial Sequence: Synthetic oligonucleotide
  Antisense strand to SEQ ID NO: 527465
gaacauaaucucaaucagc

SEQ ID NO: 527467 - RNA, 19 nt, Artificial Sequence
  Description of Artificial Sequence: Synthetic oligonucleotide
  Sense strand starting at position 2100 of SEQ ID NO: 317980
gauugagauuauguuccaa

SEQ ID NO: 527468 - RNA, 19 nt, Artificial Sequence
  Description of Artificial Sequence: Synthetic oligonucleotide
  Antisense strand to SEQ ID NO: 527467
uuggaacauaaucucaauc

SEQ ID NO: 527469 - RNA, 19 nt, Artificial Sequence
  Description of Artificial Sequence: Synthetic oligonucleotide
  Sense strand starting at position 2328 of SEQ ID NO: 317980
caucuugcuguggauuaaa

SEQ ID NO: 527470 - RNA, 19 nt, Artificial Sequence
  Description of Artificial Sequence: Synthetic oligonucleotide
  Antisense strand to SEQ ID NO: 527469
uuuaauccacagcaagaug

SEQ ID NO: 527471 - RNA, 19 nt, Artificial Sequence
  Description of Artificial Sequence: Synthetic oligonucleotide
  Sense strand starting at position 2331 of SEQ ID NO: 317980
cuugcuguggauuaaauau

SEQ ID NO: 527472 - RNA, 19 nt, Artificial Sequence
  Description of Artificial Sequence: Synthetic oligonucleotide
  Antisense strand to SEQ ID NO: 527471
auauuuaauccacagcaag

SEQ ID NO: 527473 - RNA, 19 nt, Artificial Sequence
  Description of Artificial Sequence: Synthetic oligonucleotide
  Sense strand starting at position 2383 of SEQ ID NO: 317980
aaaggugugucaucuuaag

SEQ ID NO: 527474 - RNA, 19 nt, Artificial Sequence
  Description of Artificial Sequence: Synthetic oligonucleotide
  Antisense strand to SEQ ID NO: 527473
cuuaagaugacacaccuuu

SEQ ID NO: 527475 - RNA, 19 nt, Artificial Sequence
  Description of Artificial Sequence: Synthetic oligonucleotide
  Sense strand starting at position 2429 of SEQ ID NO: 317980
ucauuagagaccuggucag

SEQ ID NO: 527476 - RNA, 19 nt, Artificial Sequence
  Description of Artificial Sequence: Synthetic oligonucleotide
  Antisense strand to SEQ ID NO: 527475
cugaccaggucucuaauga

SEQ ID NO: 527477 - RNA, 19 nt, Artificial Sequence
  Description of Artificial Sequence: Synthetic oligonucleotide
  Sense strand starting at position 2480 of SEQ ID NO: 317980
ugagaaauagcagguuaag

SEQ ID NO: 527478 - RNA, 19 nt, Artificial Sequence
  Description of Artificial Sequence: Synthetic oligonucleotide
  Antisense strand to SEQ ID NO: 527477
cuuaaccugcuauuucuca

SEQ ID NO: 527479 - RNA, 19 nt, Artificial Sequence
  Description of Artificial Sequence: Synthetic oligonucleotide
  Sense strand starting at position 2532 of SEQ ID NO: 317980
aucuauagacgugguuaau

SEQ ID NO: 527480 - RNA, 19 nt, Artificial Sequence
  Description of Artificial Sequence: Synthetic oligonucleotide
  Antisense strand to SEQ ID NO: 527479
auuaaccacgucuauagau

SEQ ID NO: 527481 - RNA, 19 nt, Artificial Sequence
  Description of Artificial Sequence: Synthetic oligonucleotide
  Sense strand starting at position 2535 of SEQ ID NO: 317980
uauagacgugguuaauguu

SEQ ID NO: 527482 - RNA, 19 nt, Artificial Sequence
  Description of Artificial Sequence: Synthetic oligonucleotide
  Antisense strand to SEQ ID NO: 527481
aacauuaaccacgucuaua

SEQ ID NO: 527483 - RNA, 19 nt, Artificial Sequence
  Description of Artificial Sequence: Synthetic oligonucleotide
  Sense strand starting at position 2542 of SEQ ID NO: 317980
gugguuaauguugaugauu

SEQ ID NO: 527484 - RNA, 19 nt, Artificial Sequence
  Description of Artificial Sequence: Synthetic oligonucleotide
  Antisense strand to SEQ ID NO: 527483
aaucaucaacauuaaccac

SEQ ID NO: 527485 - RNA, 19 nt, Artificial Sequence
  Description of Artificial Sequence: Synthetic oligonucleotide
  Sense strand starting at position 2633 of SEQ ID NO: 317980
ucaguucugcuaggaggaa

SEQ ID NO: 527486 - RNA, 19 nt, Artificial Sequence
  Description of Artificial Sequence: Synthetic oligonucleotide
  Antisense strand to SEQ ID NO: 527485
uuccuccuagcagaacuga

SEQ ID NO: 527487 - RNA, 19 nt, Artificial Sequence
  Description of Artificial Sequence: Synthetic oligonucleotide
  Sense strand starting at position 3043 of SEQ ID NO: 317980
guaacuauugcagacaucu

SEQ ID NO: 527488 - RNA, 19 nt, Artificial Sequence
  Description of Artificial Sequence: Synthetic oligonucleotide
  Antisense strand to SEQ ID NO: 527487
agaugucugcaauaguuac

SEQ ID NO: 527489 - RNA, 19 nt, Artificial Sequence
  Description of Artificial Sequence: Synthetic oligonucleotide
  Sense strand starting at position 3115 of SEQ ID NO: 317980
guuugaauacauuauuguc

SEQ ID NO: 527490 - RNA, 19 nt, Artificial Sequence
  Description of Artificial Sequence: Synthetic oligonucleotide
  Antisense strand to SEQ ID NO: 527489
gacaauaauguauucaaac

SEQ ID NO: 527491 - RNA, 19 nt, Artificial Sequence
  Description of Artificial Sequence: Synthetic oligonucleotide
  Sense strand starting at position 3120 of SEQ ID NO: 317980
aauacauuauugucaggga

SEQ ID NO: 527492 - RNA, 19 nt, Artificial Sequence
  Description of Artificial Sequence: Synthetic oligonucleotide
  Antisense strand to SEQ ID NO: 527491
ucccugacaauaauguauu

SEQ ID NO: 527493 - RNA, 19 nt, Artificial Sequence
  Description of Artificial Sequence: Synthetic oligonucleotide
  Sense strand starting at position 3182 of SEQ ID NO: 317980
ucucuaauuuaagggaaac

SEQ ID NO: 527494 - RNA, 19 nt, Artificial Sequence
  Description of Artificial Sequence: Synthetic oligonucleotide
  Antisense strand to SEQ ID NO: 527493
guuucccuuaaauuagaga

SEQ ID NO: 527495 - RNA, 19 nt, Artificial Sequence
  Description of Artificial Sequence: Synthetic oligonucleotide
  Sense strand starting at position 3470 of SEQ ID NO: 317980
ucgaaauguuuaccacuca

SEQ ID NO: 527496 - RNA, 19 nt, Artificial Sequence
  Description of Artificial Sequence: Synthetic oligonucleotide
  Antisense strand to SEQ ID NO: 527495
ugagugguaaacauuucga

SEQ ID NO: 527497 - RNA, 19 nt, Artificial Sequence
  Description of Artificial Sequence: Synthetic oligonucleotide
  Sense strand starting at position 3625 of SEQ ID NO: 317980
aaacgugugccauuguguu

SEQ ID NO: 527498 - RNA, 19 nt, Artificial Sequence
  Description of Artificial Sequence: Synthetic oligonucleotide
  Antisense strand to SEQ ID NO: 527497
aacacaauggcacacguuu

SEQ ID NO: 527499 - RNA, 19 nt, Artificial Sequence
  Description of Artificial Sequence: Synthetic oligonucleotide
  Sense strand starting at position 3637 of SEQ ID NO: 317980
uuguguugugcugcaccua

SEQ ID NO: 527500 - RNA, 19 nt, Artificial Sequence
  Description of Artificial Sequence: Synthetic oligonucleotide
  Antisense strand to SEQ ID NO: 527499
uaggugcagcacaacacaa

SEQ ID NO: 527501 - RNA, 19 nt, Artificial Sequence
  Description of Artificial Sequence: Synthetic oligonucleotide
  Sense strand starting at position 19 of SEQ ID NO: 317981
ggaagugguggguagcaau

SEQ ID NO: 527502 - RNA, 19 nt, Artificial Sequence
  Description of Artificial Sequence: Synthetic oligonucleotide
  Antisense strand to SEQ ID NO: 527501
auugcuacccaccacuucc

SEQ ID NO: 527503 - RNA, 19 nt, Artificial Sequence
  Description of Artificial Sequence: Synthetic oligonucleotide
  Sense strand starting at position 57 of SEQ ID NO: 317981
ucaguuucucaauauggua

SEQ ID NO: 527504 - RNA, 19 nt, Artificial Sequence
  Description of Artificial Sequence: Synthetic oligonucleotide
  Antisense strand to SEQ ID NO: 527503
uaccauauugagaaacuga

SEQ ID NO: 527505 - RNA, 19 nt, Artificial Sequence
  Description of Artificial Sequence: Synthetic oligonucleotide
  Sense strand starting at position 210 of SEQ ID NO: 317981
gucucagacgaaugucaua

SEQ ID NO: 527506 - RNA, 19 nt, Artificial Sequence
  Description of Artificial Sequence: Synthetic oligonucleotide
  Antisense strand to SEQ ID NO: 527505
uaugacauucgucugagac

SEQ ID NO: 527507 - RNA, 19 nt, Artificial Sequence
  Description of Artificial Sequence: Synthetic oligonucleotide
  Sense strand starting at position 256 of SEQ ID NO: 317981
uuuaaccagcgacauauua

SEQ ID NO: 527508 - RNA, 19 nt, Artificial Sequence
  Description of Artificial Sequence: Synthetic oligonucleotide
  Antisense strand to SEQ ID NO: 527507
uaauaugucgcugguuaaa

SEQ ID NO: 527509 - RNA, 19 nt, Artificial Sequence
  Description of Artificial Sequence: Synthetic oligonucleotide
  Sense strand starting at position 266 of SEQ ID NO: 317981
gacauauuacuagggucau

SEQ ID NO: 527510 - RNA, 19 nt, Artificial Sequence
  Description of Artificial Sequence: Synthetic oligonucleotide
  Antisense strand to SEQ ID NO: 527509
augacccuaguaauauguc

SEQ ID NO: 527511 - RNA, 19 nt, Artificial Sequence
  Description of Artificial Sequence: Synthetic oligonucleotide
  Sense strand starting at position 660 of SEQ ID NO: 317981
cgagcagauuuccuuguuu

SEQ ID NO: 527512 - RNA, 19 nt, Artificial Sequence
  Description of Artificial Sequence: Synthetic oligonucleotide
  Antisense strand to SEQ ID NO: 527511
aaacaaggaaaucugcucg

SEQ ID NO: 527513 - RNA, 19 nt, Artificial Sequence
  Description of Artificial Sequence: Synthetic oligonucleotide
  Sense strand starting at position 793 of SEQ ID NO: 317981
uguuguuauccuuucguua

SEQ ID NO: 527514 - RNA, 19 nt, Artificial Sequence
  Description of Artificial Sequence: Synthetic oligonucleotide
  Antisense strand to SEQ ID NO: 527513
uaacgaaaggauaacaaca

SEQ ID NO: 527515 - RNA, 19 nt, Artificial Sequence
  Description of Artificial Sequence: Synthetic oligonucleotide
  Sense strand starting at position 798 of SEQ ID NO: 317981
uuauccuuucguuaagaca

SEQ ID NO: 527516 - RNA, 19 nt, Artificial Sequence
  Description of Artificial Sequence: Synthetic oligonucleotide
  Antisense strand to SEQ ID NO: 527515
ugucuuaacgaaaggauaa

SEQ ID NO: 527517 - RNA, 19 nt, Artificial Sequence
  Description of Artificial Sequence: Synthetic oligonucleotide
  Sense strand starting at position 835 of SEQ ID NO: 317981
guaaguuucgguaguugca

SEQ ID NO: 527518 - RNA, 19 nt, Artificial Sequence
  Description of Artificial Sequence: Synthetic oligonucleotide
  Antisense strand to SEQ ID NO: 527517
ugcaacuaccgaaacuuac

SEQ ID NO: 527519 - RNA, 19 nt, Artificial Sequence
  Description of Artificial Sequence: Synthetic oligonucleotide
  Sense strand starting at position 1171 of SEQ ID NO: 317981
ugagcaacccguuggauuu

SEQ ID NO: 527520 - RNA, 19 nt, Artificial Sequence
  Description of Artificial Sequence: Synthetic oligonucleotide
  Antisense strand to SEQ ID NO: 527519
aaauccaacggguugcuca

SEQ ID NO: 527521 - RNA, 19 nt, Artificial Sequence
  Description of Artificial Sequence: Synthetic oligonucleotide
  Sense strand starting at position 1285 of SEQ ID NO: 317981
cucuucuaguagucaaaga

SEQ ID NO: 527522 - RNA, 19 nt, Artificial Sequence
  Description of Artificial Sequence: Synthetic oligonucleotide
  Antisense strand to SEQ ID NO: 527521
ucuuugacuacuagaagag

SEQ ID NO: 527523 - RNA, 19 nt, Artificial Sequence
  Description of Artificial Sequence: Synthetic oligonucleotide
  Sense strand starting at position 1423 of SEQ ID NO: 317981
gcuaguccggguuauuuau

SEQ ID NO: 527524 - RNA, 19 nt, Artificial Sequence
  Description of Artificial Sequence: Synthetic oligonucleotide
  Antisense strand to SEQ ID NO: 527523
auaaauaacccggacuagc

SEQ ID NO: 527525 - RNA, 19 nt, Artificial Sequence
  Description of Artificial Sequence: Synthetic oligonucleotide
  Sense strand starting at position 1502 of SEQ ID NO: 317981
cugauucugcagugggaau

SEQ ID NO: 527526 - RNA, 19 nt, Artificial Sequence
  Description of Artificial Sequence: Synthetic oligonucleotide
  Antisense strand to SEQ ID NO: 527525
auucccacugcagaaucag

SEQ ID NO: 527527 - RNA, 19 nt, Artificial Sequence
  Description of Artificial Sequence: Synthetic oligonucleotide
  Sense strand starting at position 1503 of SEQ ID NO: 317981
ugauucugcagugggaauu

SEQ ID NO: 527528 - RNA, 19 nt, Artificial Sequence
  Description of Artificial Sequence: Synthetic oligonucleotide
  Antisense strand to SEQ ID NO: 527527
aauucccacugcagaauca

SEQ ID NO: 527529 - RNA, 19 nt, Artificial Sequence
  Description of Artificial Sequence: Synthetic oligonucleotide
  Sense strand starting at position 1504 of SEQ ID NO: 317981
gauucugcagugggaauua

SEQ ID NO: 527530 - RNA, 19 nt, Artificial Sequence
  Description of Artificial Sequence: Synthetic oligonucleotide
  Antisense strand to SEQ ID NO: 527529
uaauucccacugcagaauc

SEQ ID NO: 527531 - RNA, 19 nt, Artificial Sequence
  Description of Artificial Sequence: Synthetic oligonucleotide
  Sense strand starting at position 1509 of SEQ ID NO: 317981
ugcagugggaauuauuagu

SEQ ID NO: 527532 - RNA, 19 nt, Artificial Sequence
  Description of Artificial Sequence: Synthetic oligonucleotide
  Antisense strand to SEQ ID NO: 527531
acuaauaauucccacugca

SEQ ID NO: 527533 - RNA, 19 nt, Artificial Sequence
  Description of Artificial Sequence: Synthetic oligonucleotide
  Sense strand starting at position 1865 of SEQ ID NO: 317981
gcuguaccucuggauacaa

SEQ ID NO: 527534 - RNA, 19 nt, Artificial Sequence
  Description of Artificial Sequence: Synthetic oligonucleotide
  Antisense strand to SEQ ID NO: 527533
uuguauccagagguacagc

SEQ ID NO: 527535 - RNA, 19 nt, Artificial Sequence
  Description of Artificial Sequence: Synthetic oligonucleotide
  Sense strand starting at position 2252 of SEQ ID NO: 317981
ccggguacuccugaguuua

SEQ ID NO: 527536 - RNA, 19 nt, Artificial Sequence
  Description of Artificial Sequence: Synthetic oligonucleotide
  Antisense strand to SEQ ID NO: 527535
uaaacucaggaguacccgg

SEQ ID NO: 527537 - RNA, 19 nt, Artificial Sequence
  Description of Artificial Sequence: Synthetic oligonucleotide
  Sense strand starting at position 2260 of SEQ ID NO: 317981
uccugaguuuaucuuggaa

SEQ ID NO: 527538 - RNA, 19 nt, Artificial Sequence
  Description of Artificial Sequence: Synthetic oligonucleotide
  Antisense strand to SEQ ID NO: 527537
uuccaagauaaacucagga

SEQ ID NO: 527539 - RNA, 19 nt, Artificial Sequence
  Description of Artificial Sequence: Synthetic oligonucleotide
  Sense strand starting at position 2263 of SEQ ID NO: 317981
ugaguuuaucuuggaacug

SEQ ID NO: 527540 - RNA, 19 nt, Artificial Sequence
  Description of Artificial Sequence: Synthetic oligonucleotide
  Antisense strand to SEQ ID NO: 527539
caguuccaagauaaacuca

SEQ ID NO: 527541 - RNA, 19 nt, Artificial Sequence
  Description of Artificial Sequence: Synthetic oligonucleotide
  Sense strand starting at position 2408 of SEQ ID NO: 317981
gccaaucauggucacuauu

SEQ ID NO: 527542 - RNA, 19 nt, Artificial Sequence
  Description of Artificial Sequence: Synthetic oligonucleotide
  Antisense strand to SEQ ID NO: 527541
aauagugaccaugauuggc

SEQ ID NO: 527543 - RNA, 19 nt, Artificial Sequence
  Description of Artificial Sequence: Synthetic oligonucleotide
  Sense strand starting at position 2421 of SEQ ID NO: 317981
acuauuaagugaguuccua

SEQ ID NO: 527544 - RNA, 19 nt, Artificial Sequence
  Description of Artificial Sequence: Synthetic oligonucleotide
  Antisense strand to SEQ ID NO: 527543
uaggaacucacuuaauagu

SEQ ID NO: 527545 - RNA, 19 nt, Artificial Sequence
  Description of Artificial Sequence: Synthetic oligonucleotide
  Sense strand starting at position 2477 of SEQ ID NO: 317981
caguucuagcguuuagcua

SEQ ID NO: 527546 - RNA, 19 nt, Artificial Sequence
  Description of Artificial Sequence: Synthetic oligonucleotide
  Antisense strand to SEQ ID NO: 527545
uagcuaaacgcuagaacug

SEQ ID NO: 527547 - RNA, 19 nt, Artificial Sequence
  Description of Artificial Sequence: Synthetic oligonucleotide
  Sense strand starting at position 2526 of SEQ ID NO: 317981
gaaauugucucacugaagu

SEQ ID NO: 527548 - RNA, 19 nt, Artificial Sequence
  Description of Artificial Sequence: Synthetic oligonucleotide
  Antisense strand to SEQ ID NO: 527547
acuucagugagacaauuuc

SEQ ID NO: 527549 - RNA, 19 nt, Artificial Sequence
  Description of Artificial Sequence: Synthetic oligonucleotide
  Sense strand starting at position 3030 of SEQ ID NO: 317981
gcuccucugggauggauga

SEQ ID NO: 527550 - RNA, 19 nt, Artificial Sequence
  Description of Artificial Sequence: Synthetic oligonucleotide
  Antisense strand to SEQ ID NO: 527549
ucauccaucccagaggagc

SEQ ID NO: 527551 - RNA, 19 nt, Artificial Sequence
  Description of Artificial Sequence: Synthetic oligonucleotide
  Sense strand starting at position 3087 of SEQ ID NO: 317981
gggaguuucuagguuagga

SEQ ID NO: 527552 - RNA, 19 nt, Artificial Sequence
  Description of Artificial Sequence: Synthetic oligonucleotide
  Antisense strand to SEQ ID NO: 527551
uccuaaccuagaaacuccc

SEQ ID NO: 527553 - RNA, 19 nt, Artificial Sequence
  Description of Artificial Sequence: Synthetic oligonucleotide
  Sense strand starting at position 3089 of SEQ ID NO: 317981
gaguuucuagguuaggaac

SEQ ID NO: 527554 - RNA, 19 nt, Artificial Sequence
  Description of Artificial Sequence: Synthetic oligonucleotide
  Antisense strand to SEQ ID NO: 527553
guuccuaaccuagaaacuc

SEQ ID NO: 527555 - RNA, 19 nt, Artificial Sequence
  Description of Artificial Sequence: Synthetic oligonucleotide
  Sense strand starting at position 3241 of SEQ ID NO: 317981
gggaggaaggucuguaagu

SEQ ID NO: 527556 - RNA, 19 nt, Artificial Sequence
  Description of Artificial Sequence: Synthetic oligonucleotide
  Antisense strand to SEQ ID NO: 527555
acuuacagaccuuccuccc

SEQ ID NO: 527557 - RNA, 19 nt, Artificial Sequence
  Description of Artificial Sequence: Synthetic oligonucleotide
  Sense strand starting at position 3242 of SEQ ID NO: 317981
ggaggaaggucuguaaguc

SEQ ID NO: 527558 - RNA, 19 nt, Artificial Sequence
  Description of Artificial Sequence: Synthetic oligonucleotide
  Antisense strand to SEQ ID NO: 527557
gacuuacagaccuuccucc

SEQ ID NO: 527559 - RNA, 19 nt, Artificial Sequence
  Description of Artificial Sequence: Synthetic oligonucleotide
  Sense strand starting at position 3243 of SEQ ID NO: 317981
gaggaaggucuguaagucu

SEQ ID NO: 527560 - RNA, 19 nt, Artificial Sequence
  Description of Artificial Sequence: Synthetic oligonucleotide
  Antisense strand to SEQ ID NO: 527559
agacuuacagaccuuccuc

SEQ ID NO: 527561 - RNA, 19 nt, Artificial Sequence
  Description of Artificial Sequence: Synthetic oligonucleotide
  Sense strand starting at position 3288 of SEQ ID NO: 317981
guuaccucagaauguagaa

SEQ ID NO: 527562 - RNA, 19 nt, Artificial Sequence
  Description of Artificial Sequence: Synthetic oligonucleotide
  Antisense strand to SEQ ID NO: 527561
uucuacauucugagguaac

SEQ ID NO: 527563 - RNA, 19 nt, Artificial Sequence
  Description of Artificial Sequence: Synthetic oligonucleotide
  Sense strand starting at position 3347 of SEQ ID NO: 317981
uccuauacacagugagaau

SEQ ID NO: 527564 - RNA, 19 nt, Artificial Sequence
  Description of Artificial Sequence: Synthetic oligonucleotide
  Antisense strand to SEQ ID NO: 527563
auucucacuguguauagga

SEQ ID NO: 527565 - RNA, 19 nt, Artificial Sequence
  Description of Artificial Sequence: Synthetic oligonucleotide
  Sense strand starting at position 3426 of SEQ ID NO: 317981
agggcauuaucagcaugau

SEQ ID NO: 527566 - RNA, 19 nt, Artificial Sequence
  Description of Artificial Sequence: Synthetic oligonucleotide
  Antisense strand to SEQ ID NO: 527565
aucaugcugauaaugcccu

SEQ ID NO: 527567 - RNA, 19 nt, Artificial Sequence
  Description of Artificial Sequence: Synthetic oligonucleotide
  Sense strand starting at position 3427 of SEQ ID NO: 317981
gggcauuaucagcaugaug

SEQ ID NO: 527568 - RNA, 19 nt, Artificial Sequence
  Description of Artificial Sequence: Synthetic oligonucleotide
  Antisense strand to SEQ ID NO: 527567
caucaugcugauaaugccc

SEQ ID NO: 527569 - RNA, 19 nt, Artificial Sequence
  Description of Artificial Sequence: Synthetic oligonucleotide
  Sense strand starting at position 3438 of SEQ ID NO: 317981
gcaugauguccagaagauu

SEQ ID NO: 527570 - RNA, 19 nt, Artificial Sequence
  Description of Artificial Sequence: Synthetic oligonucleotide
  Antisense strand to SEQ ID NO: 527569
aaucuucuggacaucaugc

SEQ ID NO: 527571 - RNA, 19 nt, Artificial Sequence
  Description of Artificial Sequence: Synthetic oligonucleotide
  Sense strand starting at position 3846 of SEQ ID NO: 317981
ggagguaaaucuuuggguu

SEQ ID NO: 527572 - RNA, 19 nt, Artificial Sequence
  Description of Artificial Sequence: Synthetic oligonucleotide
  Antisense strand to SEQ ID NO: 527571
aacccaaagauuuaccucc

SEQ ID NO: 527573 - RNA, 19 nt, Artificial Sequence
  Description of Artificial Sequence: Synthetic oligonucleotide
  Sense strand starting at position 3847 of SEQ ID NO: 317981
gagguaaaucuuuggguuc

SEQ ID NO: 527574 - RNA, 19 nt, Artificial Sequence
  Description of Artificial Sequence: Synthetic oligonucleotide
  Antisense strand to SEQ ID NO: 527573
gaacccaaagauuuaccuc

SEQ ID NO: 527575 - RNA, 19 nt, Artificial Sequence
  Description of Artificial Sequence: Synthetic oligonucleotide
  Sense strand starting at position 3875 of SEQ ID NO: 317981
gucaaauacuuaguaacuu

SEQ ID NO: 527576 - RNA, 19 nt, Artificial Sequence
  Description of Artificial Sequence: Synthetic oligonucleotide
  Antisense strand to SEQ ID NO: 527575
aaguuacuaaguauuugac

SEQ ID NO: 527577 - RNA, 19 nt, Artificial Sequence
  Description of Artificial Sequence: Synthetic oligonucleotide
  Sense strand starting at position 3927 of SEQ ID NO: 317981
uuaguuuccucuucuggaa

SEQ ID NO: 527578 - RNA, 19 nt, Artificial Sequence
  Description of Artificial Sequence: Synthetic oligonucleotide
  Antisense strand to SEQ ID NO: 527577
uuccagaagaggaaacuaa

SEQ ID NO: 527579 - RNA, 19 nt, Artificial Sequence
  Description of Artificial Sequence: Synthetic oligonucleotide
  Sense strand starting at position 3979 of SEQ ID NO: 317981
auugcucuagaaugaggua

SEQ ID NO: 527580 - RNA, 19 nt, Artificial Sequence
  Description of Artificial Sequence: Synthetic oligonucleotide
  Antisense strand to SEQ ID NO: 527579
uaccucauucuagagcaau

SEQ ID NO: 527581 - RNA, 19 nt, Artificial Sequence
  Description of Artificial Sequence: Synthetic oligonucleotide
  Sense strand starting at position 89 of SEQ ID NO: 317982
ugggucucuuuaucauaaa

SEQ ID NO: 527582 - RNA, 19 nt, Artificial Sequence
  Description of Artificial Sequence: Synthetic oligonucleotide
  Antisense strand to SEQ ID NO: 527581
uuuaugauaaagagaccca

SEQ ID NO: 527583 - RNA, 19 nt, Artificial Sequence
  Description of Artificial Sequence: Synthetic oligonucleotide
  Sense strand starting at position 147 of SEQ ID NO: 317982
agagaaguugccuaguuuc

SEQ ID NO: 527584 - RNA, 19 nt, Artificial Sequence
  Description of Artificial Sequence: Synthetic oligonucleotide
  Antisense strand to SEQ ID NO: 527583
gaaacuaggcaacuucucu

SEQ ID NO: 527585 - RNA, 19 nt, Artificial Sequence
  Description of Artificial Sequence: Synthetic oligonucleotide
  Sense strand starting at position 305 of SEQ ID NO: 317982
uucuuuauauugguaggau

SEQ ID NO: 527586 - RNA, 19 nt, Artificial Sequence
  Description of Artificial Sequence: Synthetic oligonucleotide
  Antisense strand to SEQ ID NO: 527585
auccuaccaauauaaagaa

SEQ ID NO: 527587 - RNA, 19 nt, Artificial Sequence
  Description of Artificial Sequence: Synthetic oligonucleotide
  Sense strand starting at position 308 of SEQ ID NO: 317982
uuuauauugguaggauaug

SEQ ID NO: 527588 - RNA, 19 nt, Artificial Sequence
  Description of Artificial Sequence: Synthetic oligonucleotide
  Antisense strand to SEQ ID NO: 527587
cauauccuaccaauauaaa

SEQ ID NO: 527589 - RNA, 19 nt, Artificial Sequence
  Description of Artificial Sequence: Synthetic oligonucleotide
  Sense strand starting at position 328 of SEQ ID NO: 317982
gagguauauuuauagaacu

SEQ ID NO: 527590 - RNA, 19 nt, Artificial Sequence
  Description of Artificial Sequence: Synthetic oligonucleotide
  Antisense strand to SEQ ID NO: 527589
aguucuauaaauauaccuc

SEQ ID NO: 527591 - RNA, 19 nt, Artificial Sequence
  Description of Artificial Sequence: Synthetic oligonucleotide
  Sense strand starting at position 362 of SEQ ID NO: 317982
aguauagaagaaugcaagu

SEQ ID NO: 527592 - RNA, 19 nt, Artificial Sequence
  Description of Artificial Sequence: Synthetic oligonucleotide
  Antisense strand to SEQ ID NO: 527591
acuugcauucuucuauacu

SEQ ID NO: 527593 - RNA, 19 nt, Artificial Sequence
  Description of Artificial Sequence: Synthetic oligonucleotide
  Sense strand starting at position 409 of SEQ ID NO: 317982
uuugguccuaguuagaaag

SEQ ID NO: 527594 - RNA, 19 nt, Artificial Sequence
  Description of Artificial Sequence: Synthetic oligonucleotide
  Antisense strand to SEQ ID NO: 527593
cuuucuaacuaggaccaaa

SEQ ID NO: 527595 - RNA, 19 nt, Artificial Sequence
  Description of Artificial Sequence: Synthetic oligonucleotide
  Sense strand starting at position 485 of SEQ ID NO: 317982
gaugguugcuccucuaaua

SEQ ID NO: 527596 - RNA, 19 nt, Artificial Sequence
  Description of Artificial Sequence: Synthetic oligonucleotide
  Antisense strand to SEQ ID NO: 527595
uauuagaggagcaaccauc

SEQ ID NO: 527597 - RNA, 19 nt, Artificial Sequence
  Description of Artificial Sequence: Synthetic oligonucleotide
  Sense strand starting at position 504 of SEQ ID NO: 317982
cucuuagcucaggaaaguu

SEQ ID NO: 527598 - RNA, 19 nt, Artificial Sequence
  Description of Artificial Sequence: Synthetic oligonucleotide
  Antisense strand to SEQ ID NO: 527597
aacuuuccugagcuaagag

SEQ ID NO: 527599 - RNA, 19 nt, Artificial Sequence
  Description of Artificial Sequence: Synthetic oligonucleotide
  Sense strand starting at position 738 of SEQ ID NO: 317982
gcaaucauuuaacuacguu

SEQ ID NO: 527600 - RNA, 19 nt, Artificial Sequence
  Description of Artificial Sequence: Synthetic oligonucleotide
  Antisense strand to SEQ ID NO: 527599
aacguaguuaaaugauugc

SEQ ID NO: 527601 - RNA, 19 nt, Artificial Sequence
  Description of Artificial Sequence: Synthetic oligonucleotide
  Sense strand starting at position 813 of SEQ ID NO: 317982
agaucaggaucuguauauu

SEQ ID NO: 527602 - RNA, 19 nt, Artificial Sequence
  Description of Artificial Sequence: Synthetic oligonucleotide
  Antisense strand to SEQ ID NO: 527601
aauauacagauccugaucu

SEQ ID NO: 527603 - RNA, 19 nt, Artificial Sequence
  Description of Artificial Sequence: Synthetic oligonucleotide
  Sense strand starting at position 873 of SEQ ID NO: 317982
uguggaugcccugaguaua

SEQ ID NO: 527604 - RNA, 19 nt, Artificial Sequence
  Description of Artificial Sequence: Synthetic oligonucleotide
  Antisense strand to SEQ ID NO: 527603
uauacucagggcauccaca

SEQ ID NO: 527605 - RNA, 19 nt, Artificial Sequence
  Description of Artificial Sequence: Synthetic oligonucleotide
  Sense strand starting at position 901 of SEQ ID NO: 317982
guucuaucagguuagacaa

SEQ ID NO: 527606 - RNA, 19 nt, Artificial Sequence
  Description of Artificial Sequence: Synthetic oligonucleotide
  Antisense strand to SEQ ID NO: 527605
uugucuaaccugauagaac

SEQ ID NO: 527607 - RNA, 19 nt, Artificial Sequence
  Description of Artificial Sequence: Synthetic oligonucleotide
  Sense strand starting at position 1224 of SEQ ID NO: 317982
agcccacuccgauaucaga

SEQ ID NO: 527608 - RNA, 19 nt, Artificial Sequence
  Description of Artificial Sequence: Synthetic oligonucleotide
  Antisense strand to SEQ ID NO: 527607
ucugauaucggagugggcu

SEQ ID NO: 527609 - RNA, 19 nt, Artificial Sequence
  Description of Artificial Sequence: Synthetic oligonucleotide
  Sense strand starting at position 1232 of SEQ ID NO: 317982
ccgauaucagauugcaaua

SEQ ID NO: 527610 - RNA, 19 nt, Artificial Sequence
  Description of Artificial Sequence: Synthetic oligonucleotide
  Antisense strand to SEQ ID NO: 527609
uauugcaaucugauaucgg

SEQ ID NO: 527611 - RNA, 19 nt, Artificial Sequence
  Description of Artificial Sequence: Synthetic oligonucleotide
  Sense strand starting at position 1237 of SEQ ID NO: 317982
aucagauugcaauaauguc

SEQ ID NO: 527612 - RNA, 19 nt, Artificial Sequence
  Description of Artificial Sequence: Synthetic oligonucleotide
  Antisense strand to SEQ ID NO: 527611
gacauuauugcaaucugau

SEQ ID NO: 527613 - RNA, 19 nt, Artificial Sequence
  Description of Artificial Sequence: Synthetic oligonucleotide
  Sense strand starting at position 1528 of SEQ ID NO: 317982
acaucuuacccaggguaga

SEQ ID NO: 527614 - RNA, 19 nt, Artificial Sequence
  Description of Artificial Sequence: Synthetic oligonucleotide
  Antisense strand to SEQ ID NO: 527613
ucuacccuggguaagaugu

SEQ ID NO: 527615 - RNA, 19 nt, Artificial Sequence
  Description of Artificial Sequence: Synthetic oligonucleotide
  Sense strand starting at position 2123 of SEQ ID NO: 317982
agagacucugcgugauuaa

SEQ ID NO: 527616 - RNA, 19 nt, Artificial Sequence
  Description of Artificial Sequence: Synthetic oligonucleotide
  Antisense strand to SEQ ID NO: 527615
uuaaucacgcagagucucu

SEQ ID NO: 527617 - RNA, 19 nt, Artificial Sequence
  Description of Artificial Sequence: Synthetic oligonucleotide
  Sense strand starting at position 2124 of SEQ ID NO: 317982
gagacucugcgugauuaac

SEQ ID NO: 527618 - RNA, 19 nt, Artificial Sequence
  Description of Artificial Sequence: Synthetic oligonucleotide
  Antisense strand to SEQ ID NO: 527617
guuaaucacgcagagucuc

SEQ ID NO: 527619 - RNA, 19 nt, Artificial Sequence
  Description of Artificial Sequence: Synthetic oligonucleotide
  Sense strand starting at position 2149 of SEQ ID NO: 317982
gcagauuaacuaugagguc

SEQ ID NO: 527620 - RNA, 19 nt, Artificial Sequence
  Description of Artificial Sequence: Synthetic oligonucleotide
  Antisense strand to SEQ ID NO: 527619
gaccucauaguuaaucugc

SEQ ID NO: 527621 - RNA, 19 nt, Artificial Sequence
  Description of Artificial Sequence: Synthetic oligonucleotide
  Sense strand starting at position 2209 of SEQ ID NO: 317982
augcguggugucuuuccaa

SEQ ID NO: 527622 - RNA, 19 nt, Artificial Sequence
  Description of Artificial Sequence: Synthetic oligonucleotide
  Antisense strand to SEQ ID NO: 527621
uuggaaagacaccacgcau

SEQ ID NO: 527623 - RNA, 19 nt, Artificial Sequence
  Description of Artificial Sequence: Synthetic oligonucleotide
  Sense strand starting at position 2382 of SEQ ID NO: 317982
cuuagaaaucaugguugca

SEQ ID NO: 527624 - RNA, 19 nt, Artificial Sequence
  Description of Artificial Sequence: Synthetic oligonucleotide
  Antisense strand to SEQ ID NO: 527623
ugcaaccaugauuucuaag

SEQ ID NO: 527625 - RNA, 19 nt, Artificial Sequence
  Description of Artificial Sequence: Synthetic oligonucleotide
  Sense strand starting at position 2384 of SEQ ID NO: 317982
uagaaaucaugguugcauu

SEQ ID NO: 527626 - RNA, 19 nt, Artificial Sequence
  Description of Artificial Sequence: Synthetic oligonucleotide
  Antisense strand to SEQ ID NO: 527625
aaugcaaccaugauuucua

SEQ ID NO: 527627 - RNA, 19 nt, Artificial Sequence
  Description of Artificial Sequence: Synthetic oligonucleotide
  Sense strand starting at position 2528 of SEQ ID NO: 317982
ggagaaauucuaugcuacu

SEQ ID NO: 527628 - RNA, 19 nt, Artificial Sequence
  Description of Artificial Sequence: Synthetic oligonucleotide
  Antisense strand to SEQ ID NO: 527627
aguagcauagaauuucucc

SEQ ID NO: 527629 - RNA, 19 nt, Artificial Sequence
  Description of Artificial Sequence: Synthetic oligonucleotide
  Sense strand starting at position 2606 of SEQ ID NO: 317982
cugcuugaaguuugacaaa

SEQ ID NO: 527630 - RNA, 19 nt, Artificial Sequence
  Description of Artificial Sequence: Synthetic oligonucleotide
  Antisense strand to SEQ ID NO: 527629
uuugucaaacuucaagcag

SEQ ID NO: 527631 - RNA, 19 nt, Artificial Sequence
  Description of Artificial Sequence: Synthetic oligonucleotide
  Sense strand starting at position 2637 of SEQ ID NO: 317982
gggauagcugcuugaauaa

SEQ ID NO: 527632 - RNA, 19 nt, Artificial Sequence
  Description of Artificial Sequence: Synthetic oligonucleotide
  Antisense strand to SEQ ID NO: 527631
uuauucaagcagcuauccc

SEQ ID NO: 527633 - RNA, 19 nt, Artificial Sequence
  Description of Artificial Sequence: Synthetic oligonucleotide
  Sense strand starting at position 2712 of SEQ ID NO: 317982
guauaaucaggaggucauu

SEQ ID NO: 527634 - RNA, 19 nt, Artificial Sequence
  Description of Artificial Sequence: Synthetic oligonucleotide
  Antisense strand to SEQ ID NO: 527633
aaugaccuccugauuauac

SEQ ID NO: 527635 - RNA, 19 nt, Artificial Sequence
  Description of Artificial Sequence: Synthetic oligonucleotide
  Sense strand starting at position 2744 of SEQ ID NO: 317982
ggauuucuguuugucaugu

SEQ ID NO: 527636 - RNA, 19 nt, Artificial Sequence
  Description of Artificial Sequence: Synthetic oligonucleotide
  Antisense strand to SEQ ID NO: 527635
acaugacaaacagaaaucc

SEQ ID NO: 527637 - RNA, 19 nt, Artificial Sequence
  Description of Artificial Sequence: Synthetic oligonucleotide
  Sense strand starting at position 2785 of SEQ ID NO: 317982
gguaauaaucccgaaaguu

SEQ ID NO: 527638 - RNA, 19 nt, Artificial Sequence
  Description of Artificial Sequence: Synthetic oligonucleotide
  Antisense strand to SEQ ID NO: 527637
aacuuucgggauuauuacc

SEQ ID NO: 527639 - RNA, 19 nt, Artificial Sequence
  Description of Artificial Sequence: Synthetic oligonucleotide
  Sense strand starting at position 2806 of SEQ ID NO: 317982
uaguuuggaugagugguau

SEQ ID NO: 527640 - RNA, 19 nt, Artificial Sequence
  Description of Artificial Sequence: Synthetic oligonucleotide
  Antisense strand to SEQ ID NO: 527639
auaccacucauccaaacua

SEQ ID NO: 527641 - RNA, 19 nt, Artificial Sequence
  Description of Artificial Sequence: Synthetic oligonucleotide
  Sense strand starting at position 2833 of SEQ ID NO: 317982
uucuuucuugccuagaaug

SEQ ID NO: 527642 - RNA, 19 nt, Artificial Sequence
  Description of Artificial Sequence: Synthetic oligonucleotide
  Antisense strand to SEQ ID NO: 527641
cauucuaggcaagaaagaa

SEQ ID NO: 527643 - RNA, 19 nt, Artificial Sequence
  Description of Artificial Sequence: Synthetic oligonucleotide
  Sense strand starting at position 2835 of SEQ ID NO: 317982
cuuucuugccuagaauguu

SEQ ID NO: 527644 - RNA, 19 nt, Artificial Sequence
  Description of Artificial Sequence: Synthetic oligonucleotide
  Antisense strand to SEQ ID NO: 527643
aacauucuaggcaagaaag

SEQ ID NO: 527645 - RNA, 19 nt, Artificial Sequence
  Description of Artificial Sequence: Synthetic oligonucleotide
  Sense strand starting at position 2843 of SEQ ID NO: 317982
ccuagaauguuacuauaga

SEQ ID NO: 527646 - RNA, 19 nt, Artificial Sequence
  Description of Artificial Sequence: Synthetic oligonucleotide
  Antisense strand to SEQ ID NO: 527645
ucuauaguaacauucuagg

SEQ ID NO: 527647 - RNA, 19 nt, Artificial Sequence
  Description of Artificial Sequence: Synthetic oligonucleotide
  Sense strand starting at position 3023 of SEQ ID NO: 317982
ggaacaaucuuagcucuuu

SEQ ID NO: 527648 - RNA, 19 nt, Artificial Sequence
  Description of Artificial Sequence: Synthetic oligonucleotide
  Antisense strand to SEQ ID NO: 527647
aaagagcuaagauuguucc

SEQ ID NO: 527649 - RNA, 19 nt, Artificial Sequence
  Description of Artificial Sequence: Synthetic oligonucleotide
  Sense strand starting at position 3028 of SEQ ID NO: 317982
aaucuuagcucuuugugga

SEQ ID NO: 527650 - RNA, 19 nt, Artificial Sequence
  Description of Artificial Sequence: Synthetic oligonucleotide
  Antisense strand to SEQ ID NO: 527649
uccacaaagagcuaagauu

SEQ ID NO: 527651 - RNA, 19 nt, Artificial Sequence
  Description of Artificial Sequence: Synthetic oligonucleotide
  Sense strand starting at position 3318 of SEQ ID NO: 317982
cugccuuaggcagaguuau

SEQ ID NO: 527652 - RNA, 19 nt, Artificial Sequence
  Description of Artificial Sequence: Synthetic oligonucleotide
  Antisense strand to SEQ ID NO: 527651
auaacucugccuaaggcag

SEQ ID NO: 527653 - RNA, 19 nt, Artificial Sequence
  Description of Artificial Sequence: Synthetic oligonucleotide
  Sense strand starting at position 3324 of SEQ ID NO: 317982
uaggcagaguuauucuuaa

SEQ ID NO: 527654 - RNA, 19 nt, Artificial Sequence
  Description of Artificial Sequence: Synthetic oligonucleotide
  Antisense strand to SEQ ID NO: 527653
uuaagaauaacucugccua

SEQ ID NO: 527655 - RNA, 19 nt, Artificial Sequence
  Description of Artificial Sequence: Synthetic oligonucleotide
  Sense strand starting at position 3391 of SEQ ID NO: 317982
acuucuuuccauugugacu

SEQ ID NO: 527656 - RNA, 19 nt, Artificial Sequence
  Description of Artificial Sequence: Synthetic oligonucleotide
  Antisense strand to SEQ ID NO: 527655
agucacaauggaaagaagu

SEQ ID NO: 527657 - RNA, 19 nt, Artificial Sequence
  Description of Artificial Sequence: Synthetic oligonucleotide
  Sense strand starting at position 3820 of SEQ ID NO: 317982
guguguauuuacuuaagug

SEQ ID NO: 527658 - RNA, 19 nt, Artificial Sequence
  Description of Artificial Sequence: Synthetic oligonucleotide
  Antisense strand to SEQ ID NO: 527657
cacuuaaguaaauacacac

SEQ ID NO: 527659 - RNA, 19 nt, Artificial Sequence
  Description of Artificial Sequence: Synthetic oligonucleotide
  Sense strand starting at position 3882 of SEQ ID NO: 317982
guuuaugaaucaguaaagu

SEQ ID NO: 527660 - RNA, 19 nt, Artificial Sequence
  Description of Artificial Sequence: Synthetic oligonucleotide
  Antisense strand to SEQ ID NO: 527659
acuuuacugauucauaaac

SEQ ID NO: 527661 - RNA, 19 nt, Artificial Sequence
  Description of Artificial Sequence: Synthetic oligonucleotide
  Sense strand starting at position 68 of SEQ ID NO: 317983
ggccaaacuucuguuagga

SEQ ID NO: 527662 - RNA, 19 nt, Artificial Sequence
  Description of Artificial Sequence: Synthetic oligonucleotide
  Antisense strand to SEQ ID NO: 527661
uccuaacagaaguuuggcc

SEQ ID NO: 527663 - RNA, 19 nt, Artificial Sequence
  Description of Artificial Sequence: Synthetic oligonucleotide
  Sense strand starting at position 78 of SEQ ID NO: 317983
cuguuaggaagauguaaca

SEQ ID NO: 527664 - RNA, 19 nt, Artificial Sequence
  Description of Artificial Sequence: Synthetic oligonucleotide
  Antisense strand to SEQ ID NO: 527663
uguuacaucuuccuaacag

SEQ ID NO: 527665 - RNA, 19 nt, Artificial Sequence
  Description of Artificial Sequence: Synthetic oligonucleotide
  Sense strand starting at position 129 of SEQ ID NO: 317983
agucucaugaucugagaag

SEQ ID NO: 527666 - RNA, 19 nt, Artificial Sequence
  Description of Artificial Sequence: Synthetic oligonucleotide
  Antisense strand to SEQ ID NO: 527665
cuucucagaucaugagacu

SEQ ID NO: 527667 - RNA, 19 nt, Artificial Sequence
  Description of Artificial Sequence: Synthetic oligonucleotide
  Sense strand starting at position 154 of SEQ ID NO: 317983
ccaggcuagagccagaaau

SEQ ID NO: 527668 - RNA, 19 nt, Artificial Sequence
  Description of Artificial Sequence: Synthetic oligonucleotide
  Antisense strand to SEQ ID NO: 527667
auuucuggcucuagccugg

SEQ ID NO: 527669 - RNA, 19 nt, Artificial Sequence
  Description of Artificial Sequence: Synthetic oligonucleotide
  Sense strand starting at position 156 of SEQ ID NO: 317983
aggcuagagccagaaaugu

SEQ ID NO: 527670 - RNA, 19 nt, Artificial Sequence
  Description of Artificial Sequence: Synthetic oligonucleotide
  Antisense strand to SEQ ID NO: 527669
acauuucuggcucuagccu

SEQ ID NO: 527671 - RNA, 19 nt, Artificial Sequence
  Description of Artificial Sequence: Synthetic oligonucleotide
  Sense strand starting at position 256 of SEQ ID NO: 317983
ucuaaaugcccaugaauug

SEQ ID NO: 527672 - RNA, 19 nt, Artificial Sequence
  Description of Artificial Sequence: Synthetic oligonucleotide
  Antisense strand to SEQ ID NO: 527671
caauucaugggcauuuaga

SEQ ID NO: 527673 - RNA, 19 nt, Artificial Sequence
  Description of Artificial Sequence: Synthetic oligonucleotide
  Sense strand starting at position 263 of SEQ ID NO: 317983
gcccaugaauuguuagaag

SEQ ID NO: 527674 - RNA, 19 nt, Artificial Sequence
  Description of Artificial Sequence: Synthetic oligonucleotide
  Antisense strand to SEQ ID NO: 527673
cuucuaacaauucaugggc

SEQ ID NO: 527675 - RNA, 19 nt, Artificial Sequence
  Description of Artificial Sequence: Synthetic oligonucleotide
  Sense strand starting at position 283 of SEQ ID NO: 317983
caugucuggugcuuaauuu

SEQ ID NO: 527676 - RNA, 19 nt, Artificial Sequence
  Description of Artificial Sequence: Synthetic oligonucleotide
  Antisense strand to SEQ ID NO: 527675
aaauuaagcaccagacaug

SEQ ID NO: 527677 - RNA, 19 nt, Artificial Sequence
  Description of Artificial Sequence: Synthetic oligonucleotide
  Sense strand starting at position 345 of SEQ ID NO: 317983
agagucaaaucuuagauuu

SEQ ID NO: 527678 - RNA, 19 nt, Artificial Sequence
  Description of Artificial Sequence: Synthetic oligonucleotide
  Antisense strand to SEQ ID NO: 527677
aaaucuaagauuugacucu

SEQ ID NO: 527679 - RNA, 19 nt, Artificial Sequence
  Description of Artificial Sequence: Synthetic oligonucleotide
  Sense strand starting at position 578 of SEQ ID NO: 317983
caucacucccugugguaga

SEQ ID NO: 527680 - RNA, 19 nt, Artificial Sequence
  Description of Artificial Sequence: Synthetic oligonucleotide
  Antisense strand to SEQ ID NO: 527679
ucuaccacagggagugaug

SEQ ID NO: 527681 - RNA, 19 nt, Artificial Sequence
  Description of Artificial Sequence: Synthetic oligonucleotide
  Sense strand starting at position 604 of SEQ ID NO: 317983
aucguuaaguggcuauuua

SEQ ID NO: 527682 - RNA, 19 nt, Artificial Sequence
  Description of Artificial Sequence: Synthetic oligonucleotide
  Antisense strand to SEQ ID NO: 527681
uaaauagccacuuaacgau

SEQ ID NO: 527683 - RNA, 19 nt, Artificial Sequence
  Description of Artificial Sequence: Synthetic oligonucleotide
  Sense strand starting at position 605 of SEQ ID NO: 317983
ucguuaaguggcuauuuau

SEQ ID NO: 527684 - RNA, 19 nt, Artificial Sequence
  Description of Artificial Sequence: Synthetic oligonucleotide
  Antisense strand to SEQ ID NO: 527683
auaaauagccacuuaacga

SEQ ID NO: 527685 - RNA, 19 nt, Artificial Sequence
  Description of Artificial Sequence: Synthetic oligonucleotide
  Sense strand starting at position 680 of SEQ ID NO: 317983
gauggaauuuaguggagag

SEQ ID NO: 527686 - RNA, 19 nt, Artificial Sequence
  Description of Artificial Sequence: Synthetic oligonucleotide
  Antisense strand to SEQ ID NO: 527685
cucuccacuaaauuccauc

SEQ ID NO: 527687 - RNA, 19 nt, Artificial Sequence
  Description of Artificial Sequence: Synthetic oligonucleotide
  Sense strand starting at position 917 of SEQ ID NO: 317983
ccugauacacccgagucau

SEQ ID NO: 527688 - RNA, 19 nt, Artificial Sequence
  Description of Artificial Sequence: Synthetic oligonucleotide
  Antisense strand to SEQ ID NO: 527687
augacucggguguaucagg

SEQ ID NO: 527689 - RNA, 19 nt, Artificial Sequence
  Description of Artificial Sequence: Synthetic oligonucleotide
  Sense strand starting at position 1045 of SEQ ID NO: 317983
gugauuccacuaugacuaa

SEQ ID NO: 527690 - RNA, 19 nt, Artificial Sequence
  Description of Artificial Sequence: Synthetic oligonucleotide
  Antisense strand to SEQ ID NO: 527689
uuagucauaguggaaucac

SEQ ID NO: 527691 - RNA, 19 nt, Artificial Sequence
  Description of Artificial Sequence: Synthetic oligonucleotide
  Sense strand starting at position 1490 of SEQ ID NO: 317983
agaaucauuuguuggaaag

SEQ ID NO: 527692 - RNA, 19 nt, Artificial Sequence
  Description of Artificial Sequence: Synthetic oligonucleotide
  Antisense strand to SEQ ID NO: 527691
cuuuccaacaaaugauucu

SEQ ID NO: 527693 - RNA, 19 nt, Artificial Sequence
  Description of Artificial Sequence: Synthetic oligonucleotide
  Sense strand starting at position 1492 of SEQ ID NO: 317983
aaucauuuguuggaaagca

SEQ ID NO: 527694 - RNA, 19 nt, Artificial Sequence
  Description of Artificial Sequence: Synthetic oligonucleotide
  Antisense strand to SEQ ID NO: 527693
ugcuuuccaacaaaugauu

SEQ ID NO: 527695 - RNA, 19 nt, Artificial Sequence
  Description of Artificial Sequence: Synthetic oligonucleotide
  Sense strand starting at position 1510 of SEQ ID NO: 317983
aggaguagagcccgaauua

SEQ ID NO: 527696 - RNA, 19 nt, Artificial Sequence
  Description of Artificial Sequence: Synthetic oligonucleotide
  Antisense strand to SEQ ID NO: 527695
uaauucgggcucuacuccu

SEQ ID NO: 527697 - RNA, 19 nt, Artificial Sequence
  Description of Artificial Sequence: Synthetic oligonucleotide
  Sense strand starting at position 1511 of SEQ ID NO: 317983
ggaguagagcccgaauuag

SEQ ID NO: 527698 - RNA, 19 nt, Artificial Sequence
  Description of Artificial Sequence: Synthetic oligonucleotide
  Antisense strand to SEQ ID NO: 527697
cuaauucgggcucuacucc

SEQ ID NO: 527699 - RNA, 19 nt, Artificial Sequence
  Description of Artificial Sequence: Synthetic oligonucleotide
  Sense strand starting at position 1557 of SEQ ID NO: 317983
augggucccgcuuaagaaa

SEQ ID NO: 527700 - RNA, 19 nt, Artificial Sequence
  Description of Artificial Sequence: Synthetic oligonucleotide
  Antisense strand to SEQ ID NO: 527699
uuucuuaagcgggacccau

SEQ ID NO: 527701 - RNA, 19 nt, Artificial Sequence
  Description of Artificial Sequence: Synthetic oligonucleotide
  Sense strand starting at position 2117 of SEQ ID NO: 317983
gguccugaguuucuggaga

SEQ ID NO: 527702 - RNA, 19 nt, Artificial Sequence
  Description of Artificial Sequence: Synthetic oligonucleotide
  Antisense strand to SEQ ID NO: 527701
ucuccagaaacucaggacc

SEQ ID NO: 527703 - RNA, 19 nt, Artificial Sequence
  Description of Artificial Sequence: Synthetic oligonucleotide
  Sense strand starting at position 2178 of SEQ ID NO: 317983
cugagaucaugucucaguc

SEQ ID NO: 527704 - RNA, 19 nt, Artificial Sequence
  Description of Artificial Sequence: Synthetic oligonucleotide
  Antisense strand to SEQ ID NO: 527703
gacugagacaugaucucag

SEQ ID NO: 527705 - RNA, 19 nt, Artificial Sequence
  Description of Artificial Sequence: Synthetic oligonucleotide
  Sense strand starting at position 2405 of SEQ ID NO: 317983
uccgauuucuuguugugua

SEQ ID NO: 527706 - RNA, 19 nt, Artificial Sequence
  Description of Artificial Sequence: Synthetic oligonucleotide
  Antisense strand to SEQ ID NO: 527705
uacacaacaagaaaucgga

SEQ ID NO: 527707 - RNA, 19 nt, Artificial Sequence
  Description of Artificial Sequence: Synthetic oligonucleotide
  Sense strand starting at position 2426 of SEQ ID NO: 317983
uuaagagcaucuuugggau

SEQ ID NO: 527708 - RNA, 19 nt, Artificial Sequence
  Description of Artificial Sequence: Synthetic oligonucleotide
  Antisense strand to SEQ ID NO: 527707
aucccaaagaugcucuuaa

SEQ ID NO: 527709 - RNA, 19 nt, Artificial Sequence
  Description of Artificial Sequence: Synthetic oligonucleotide
  Sense strand starting at position 2452 of SEQ ID NO: 317983
aggccuauucuauguuaaa

SEQ ID NO: 527710 - RNA, 19 nt, Artificial Sequence
  Description of Artificial Sequence: Synthetic oligonucleotide
  Antisense strand to SEQ ID NO: 527709
uuuaacauagaauaggccu

SEQ ID NO: 527711 - RNA, 19 nt, Artificial Sequence
  Description of Artificial Sequence: Synthetic oligonucleotide
  Sense strand starting at position 2828 of SEQ ID NO: 317983
gagggauuccuuggaggcu

SEQ ID NO: 527712 - RNA, 19 nt, Artificial Sequence
  Description of Artificial Sequence: Synthetic oligonucleotide
  Antisense strand to SEQ ID NO: 527711
agccuccaaggaaucccuc

SEQ ID NO: 527713 - RNA, 19 nt, Artificial Sequence
  Description of Artificial Sequence: Synthetic oligonucleotide
  Sense strand starting at position 3184 of SEQ ID NO: 317983
cauuucuccugagaggacu

SEQ ID NO: 527714 - RNA, 19 nt, Artificial Sequence
  Description of Artificial Sequence: Synthetic oligonucleotide
  Antisense strand to SEQ ID NO: 527713
aguccucucaggagaaaug

SEQ ID NO: 527715 - RNA, 19 nt, Artificial Sequence
  Description of Artificial Sequence: Synthetic oligonucleotide
  Sense strand starting at position 3260 of SEQ ID NO: 317983
ucagguucucaaugaauag

SEQ ID NO: 527716 - RNA, 19 nt, Artificial Sequence
  Description of Artificial Sequence: Synthetic oligonucleotide
  Antisense strand to SEQ ID NO: 527715
cuauucauugagaaccuga

SEQ ID NO: 527717 - RNA, 19 nt, Artificial Sequence
  Description of Artificial Sequence: Synthetic oligonucleotide
  Sense strand starting at position 3523 of SEQ ID NO: 317983
gcuguaaggagucagcaau

SEQ ID NO: 527718 - RNA, 19 nt, Artificial Sequence
  Description of Artificial Sequence: Synthetic oligonucleotide
  Antisense strand to SEQ ID NO: 527717
auugcugacuccuuacagc

SEQ ID NO: 527719 - RNA, 19 nt, Artificial Sequence
  Description of Artificial Sequence: Synthetic oligonucleotide
  Sense strand starting at position 3529 of SEQ ID NO: 317983
aggagucagcaaugacaga

SEQ ID NO: 527720 - RNA, 19 nt, Artificial Sequence
  Description of Artificial Sequence: Synthetic oligonucleotide
  Antisense strand to SEQ ID NO: 527719
ucugucauugcugacuccu

SEQ ID NO: 527721 - RNA, 19 nt, Artificial Sequence
  Description of Artificial Sequence: Synthetic oligonucleotide
  Sense strand starting at position 3536 of SEQ ID NO: 317983
agcaaugacagauguggua

SEQ ID NO: 527722 - RNA, 19 nt, Artificial Sequence
  Description of Artificial Sequence: Synthetic oligonucleotide
  Antisense strand to SEQ ID NO: 527721
uaccacaucugucauugcu

SEQ ID NO: 527723 - RNA, 19 nt, Artificial Sequence
  Description of Artificial Sequence: Synthetic oligonucleotide
  Sense strand starting at position 3591 of SEQ ID NO: 317983
auuguagacgcucaacaaa

SEQ ID NO: 527724 - RNA, 19 nt, Artificial Sequence
  Description of Artificial Sequence: Synthetic oligonucleotide
  Antisense strand to SEQ ID NO: 527723
uuuguugagcgucuacaau

SEQ ID NO: 527725 - RNA, 19 nt, Artificial Sequence
  Description of Artificial Sequence: Synthetic oligonucleotide
  Sense strand starting at position 3725 of SEQ ID NO: 317983
cuauccuguguuuaaucuu

SEQ ID NO: 527726 - RNA, 19 nt, Artificial Sequence
  Description of Artificial Sequence: Synthetic oligonucleotide
  Antisense strand to SEQ ID NO: 527725
aagauuaaacacaggauag

SEQ ID NO: 527727 - RNA, 19 nt, Artificial Sequence
  Description of Artificial Sequence: Synthetic oligonucleotide
  Sense strand starting at position 3745 of SEQ ID NO: 317983
ccaaucauauuguuaguau

SEQ ID NO: 527728 - RNA, 19 nt, Artificial Sequence
  Description of Artificial Sequence: Synthetic oligonucleotide
  Antisense strand to SEQ ID NO: 527727
auacuaacaauaugauugg

SEQ ID NO: 527729 - RNA, 19 nt, Artificial Sequence
  Description of Artificial Sequence: Synthetic oligonucleotide
  Sense strand starting at position 3784 of SEQ ID NO: 317983
auuguacuucuauguagac

SEQ ID NO: 527730 - RNA, 19 nt, Artificial Sequence
  Description of Artificial Sequence: Synthetic oligonucleotide
  Antisense strand to SEQ ID NO: 527729
gucuacauagaaguacaau

SEQ ID NO: 527731 - RNA, 19 nt, Artificial Sequence
  Description of Artificial Sequence: Synthetic oligonucleotide
  Sense strand starting at position 3785 of SEQ ID NO: 317983
uuguacuucuauguagaca

SEQ ID NO: 527732 - RNA, 19 nt, Artificial Sequence
  Description of Artificial Sequence: Synthetic oligonucleotide
  Antisense strand to SEQ ID NO: 527731
ugucuacauagaaguacaa

SEQ ID NO: 527733 - RNA, 19 nt, Artificial Sequence
  Description of Artificial Sequence: Synthetic oligonucleotide
  Sense strand starting at position 3804 of SEQ ID NO: 317983
uccaguaaauauguuaaga

SEQ ID NO: 527734 - RNA, 19 nt, Artificial Sequence
  Description of Artificial Sequence: Synthetic oligonucleotide
  Antisense strand to SEQ ID NO: 527733
ucuuaacauauuuacugga

SEQ ID NO: 527735 - RNA, 19 nt, Artificial Sequence
  Description of Artificial Sequence: Synthetic oligonucleotide
  Sense strand starting at position 3814 of SEQ ID NO: 317983
auguuaagagacugauuac

SEQ ID NO: 527736 - RNA, 19 nt, Artificial Sequence
  Description of Artificial Sequence: Synthetic oligonucleotide
  Antisense strand to SEQ ID NO: 527735
guaaucagucucuuaacau

SEQ ID NO: 527737 - RNA, 19 nt, Artificial Sequence
  Description of Artificial Sequence: Synthetic oligonucleotide
  Sense strand starting at position 3851 of SEQ ID NO: 317983
gccagaucuuaagugaaag

SEQ ID NO: 527738 - RNA, 19 nt, Artificial Sequence
  Description of Artificial Sequence: Synthetic oligonucleotide
  Antisense strand to SEQ ID NO: 527737
cuuucacuuaagaucuggc

SEQ ID NO: 527739 - RNA, 19 nt, Artificial Sequence
  Description of Artificial Sequence: Synthetic oligonucleotide
  Sense strand starting at position 3861 of SEQ ID NO: 317983
aagugaaaguagguaugau

SEQ ID NO: 527740 - RNA, 19 nt, Artificial Sequence
  Description of Artificial Sequence: Synthetic oligonucleotide
  Antisense strand to SEQ ID NO: 527739
aucauaccuacuuucacuu

SEQ ID NO: 527741 - RNA, 19 nt, Artificial Sequence
  Description of Artificial Sequence: Synthetic oligonucleotide
  Sense strand starting at position 82 of SEQ ID NO: 317984
cguuguauuccucauugau

SEQ ID NO: 527742 - RNA, 19 nt, Artificial Sequence
  Description of Artificial Sequence: Synthetic oligonucleotide
  Antisense strand to SEQ ID NO: 527741
aucaaugaggaauacaacg

SEQ ID NO: 527743 - RNA, 19 nt, Artificial Sequence
  Description of Artificial Sequence: Synthetic oligonucleotide
  Sense strand starting at position 84 of SEQ ID NO: 317984
uuguauuccucauugauua

SEQ ID NO: 527744 - RNA, 19 nt, Artificial Sequence
  Description of Artificial Sequence: Synthetic oligonucleotide
  Antisense strand to SEQ ID NO: 527743
uaaucaaugaggaauacaa

SEQ ID NO: 527745 - RNA, 19 nt, Artificial Sequence
  Description of Artificial Sequence: Synthetic oligonucleotide
  Sense strand starting at position 109 of SEQ ID NO: 317984
aguaucacagaauguuaga

SEQ ID NO: 527746 - RNA, 19 nt, Artificial Sequence
  Description of Artificial Sequence: Synthetic oligonucleotide
  Antisense strand to SEQ ID NO: 527745
ucuaacauucugugauacu

SEQ ID NO: 527747 - RNA, 19 nt, Artificial Sequence
  Description of Artificial Sequence: Synthetic oligonucleotide
  Sense strand starting at position 228 of SEQ ID NO: 317984
aggucagaacccuggaacu

SEQ ID NO: 527748 - RNA, 19 nt, Artificial Sequence
  Description of Artificial Sequence: Synthetic oligonucleotide
  Antisense strand to SEQ ID NO: 527747
aguuccaggguucugaccu

SEQ ID NO: 527749 - RNA, 19 nt, Artificial Sequence
  Description of Artificial Sequence: Synthetic oligonucleotide
  Sense strand starting at position 382 of SEQ ID NO: 317984
auggaaaccuuaguuucua

SEQ ID NO: 527750 - RNA, 19 nt, Artificial Sequence
  Description of Artificial Sequence: Synthetic oligonucleotide
  Antisense strand to SEQ ID NO: 527749
uagaaacuaagguuuccau

SEQ ID NO: 527751 - RNA, 19 nt, Artificial Sequence
  Description of Artificial Sequence: Synthetic oligonucleotide
  Sense strand starting at position 383 of SEQ ID NO: 317984
uggaaaccuuaguuucuaa

SEQ ID NO: 527752 - RNA, 19 nt, Artificial Sequence
  Description of Artificial Sequence: Synthetic oligonucleotide
  Antisense strand to SEQ ID NO: 527751
uuagaaacuaagguuucca

SEQ ID NO: 527753 - RNA, 19 nt, Artificial Sequence
  Description of Artificial Sequence: Synthetic oligonucleotide
  Sense strand starting at position 484 of SEQ ID NO: 317984
uggucagcucuguagcaaa

SEQ ID NO: 527754 - RNA, 19 nt, Artificial Sequence
  Description of Artificial Sequence: Synthetic oligonucleotide
  Antisense strand to SEQ ID NO: 527753
uuugcuacagagcugacca

SEQ ID NO: 527755 - RNA, 19 nt, Artificial Sequence
  Description of Artificial Sequence: Synthetic oligonucleotide
  Sense strand starting at position 620 of SEQ ID NO: 317984
agucaagucugacccugau

SEQ ID NO: 527756 - RNA, 19 nt, Artificial Sequence
  Description of Artificial Sequence: Synthetic oligonucleotide
  Antisense strand to SEQ ID NO: 527755
aucagggucagacuugacu

SEQ ID NO: 527757 - RNA, 19 nt, Artificial Sequence
  Description of Artificial Sequence: Synthetic oligonucleotide
  Sense strand starting at position 678 of SEQ ID NO: 317984
guaagaaagccugaaaugu

SEQ ID NO: 527758 - RNA, 19 nt, Artificial Sequence
  Description of Artificial Sequence: Synthetic oligonucleotide
  Antisense strand to SEQ ID NO: 527757
acauuucaggcuuucuuac

SEQ ID NO: 527759 - RNA, 19 nt, Artificial Sequence
  Description of Artificial Sequence: Synthetic oligonucleotide
  Sense strand starting at position 749 of SEQ ID NO: 317984
gugggagugaugugacaga

SEQ ID NO: 527760 - RNA, 19 nt, Artificial Sequence
  Description of Artificial Sequence: Synthetic oligonucleotide
  Antisense strand to SEQ ID NO: 527759
ucugucacaucacucccac

SEQ ID NO: 527761 - RNA, 19 nt, Artificial Sequence
  Description of Artificial Sequence: Synthetic oligonucleotide
  Sense strand starting at position 762 of SEQ ID NO: 317984
gacagagcuucugcuauga

SEQ ID NO: 527762 - RNA, 19 nt, Artificial Sequence
  Description of Artificial Sequence: Synthetic oligonucleotide
  Antisense strand to SEQ ID NO: 527761
ucauagcagaagcucuguc

SEQ ID NO: 527763 - RNA, 19 nt, Artificial Sequence
  Description of Artificial Sequence: Synthetic oligonucleotide
  Sense strand starting at position 766 of SEQ ID NO: 317984
gagcuucugcuaugaggga

SEQ ID NO: 527764 - RNA, 19 nt, Artificial Sequence
  Description of Artificial Sequence: Synthetic oligonucleotide
  Antisense strand to SEQ ID NO: 527763
ucccucauagcagaagcuc

SEQ ID NO: 527765 - RNA, 19 nt, Artificial Sequence
  Description of Artificial Sequence: Synthetic oligonucleotide
  Sense strand starting at position 781 of SEQ ID NO: 317984
gggagcugcuagucuaaau

SEQ ID NO: 527766 - RNA, 19 nt, Artificial Sequence
  Description of Artificial Sequence: Synthetic oligonucleotide
  Antisense strand to SEQ ID NO: 527765
auuuagacuagcagcuccc

SEQ ID NO: 527767 - RNA, 19 nt, Artificial Sequence
  Description of Artificial Sequence: Synthetic oligonucleotide
  Sense strand starting at position 821 of SEQ ID NO: 317984
caaacauacguggguaagu

SEQ ID NO: 527768 - RNA, 19 nt, Artificial Sequence
  Description of Artificial Sequence: Synthetic oligonucleotide
  Antisense strand to SEQ ID NO: 527767
acuuacccacguauguuug

SEQ ID NO: 527769 - RNA, 19 nt, Artificial Sequence
  Description of Artificial Sequence: Synthetic oligonucleotide
  Sense strand starting at position 822 of SEQ ID NO: 317984
aaacauacguggguaaguu

SEQ ID NO: 527770 - RNA, 19 nt, Artificial Sequence
  Description of Artificial Sequence: Synthetic oligonucleotide
  Antisense strand to SEQ ID NO: 527769
aacuuacccacguauguuu

SEQ ID NO: 527771 - RNA, 19 nt, Artificial Sequence
  Description of Artificial Sequence: Synthetic oligonucleotide
  Sense strand starting at position 826 of SEQ ID NO: 317984
auacguggguaaguucaaa

SEQ ID NO: 527772 - RNA, 19 nt, Artificial Sequence
  Description of Artificial Sequence: Synthetic oligonucleotide
  Antisense strand to SEQ ID NO: 527771
uuugaacuuacccacguau

SEQ ID NO: 527773 - RNA, 19 nt, Artificial Sequence
  Description of Artificial Sequence: Synthetic oligonucleotide
  Sense strand starting at position 964 of SEQ ID NO: 317984
accaauagccucugggaca

SEQ ID NO: 527774 - RNA, 19 nt, Artificial Sequence
  Description of Artificial Sequence: Synthetic oligonucleotide
  Antisense strand to SEQ ID NO: 527773
ugucccagaggcuauuggu

SEQ ID NO: 527775 - RNA, 19 nt, Artificial Sequence
  Description of Artificial Sequence: Synthetic oligonucleotide
  Sense strand starting at position 1103 of SEQ ID NO: 317984
ggagcaugaucuuuacauu

SEQ ID NO: 527776 - RNA, 19 nt, Artificial Sequence
  Description of Artificial Sequence: Synthetic oligonucleotide
  Antisense strand to SEQ ID NO: 527775
aauguaaagaucaugcucc

SEQ ID NO: 527777 - RNA, 19 nt, Artificial Sequence
  Description of Artificial Sequence: Synthetic oligonucleotide
  Sense strand starting at position 1112 of SEQ ID NO: 317984
ucuuuacauucugcaagga

SEQ ID NO: 527778 - RNA, 19 nt, Artificial Sequence
  Description of Artificial Sequence: Synthetic oligonucleotide
  Antisense strand to SEQ ID NO: 527777
uccuugcagaauguaaaga

SEQ ID NO: 527779 - RNA, 19 nt, Artificial Sequence
  Description of Artificial Sequence: Synthetic oligonucleotide
  Sense strand starting at position 1113 of SEQ ID NO: 317984
cuuuacauucugcaaggaa

SEQ ID NO: 527780 - RNA, 19 nt, Artificial Sequence
  Description of Artificial Sequence: Synthetic oligonucleotide
  Antisense strand to SEQ ID NO: 527779
uuccuugcagaauguaaag

SEQ ID NO: 527781 - RNA, 19 nt, Artificial Sequence
  Description of Artificial Sequence: Synthetic oligonucleotide
  Sense strand starting at position 1212 of SEQ ID NO: 317984
ucucguugggcagaugaga

SEQ ID NO: 527782 - RNA, 19 nt, Artificial Sequence
  Description of Artificial Sequence: Synthetic oligonucleotide
  Antisense strand to SEQ ID NO: 527781
ucucaucugcccaacgaga

SEQ ID NO: 527783 - RNA, 19 nt, Artificial Sequence
  Description of Artificial Sequence: Synthetic oligonucleotide
  Sense strand starting at position 1375 of SEQ ID NO: 317984
aggagucauccugggauac

SEQ ID NO: 527784 - RNA, 19 nt, Artificial Sequence
  Description of Artificial Sequence: Synthetic oligonucleotide
  Antisense strand to SEQ ID NO: 527783
guaucccaggaugacuccu

SEQ ID NO: 527785 - RNA, 19 nt, Artificial Sequence
  Description of Artificial Sequence: Synthetic oligonucleotide
  Sense strand starting at position 1376 of SEQ ID NO: 317984
ggagucauccugggauaca

SEQ ID NO: 527786 - RNA, 19 nt, Artificial Sequence
  Description of Artificial Sequence: Synthetic oligonucleotide
  Antisense strand to SEQ ID NO: 527785
uguaucccaggaugacucc

SEQ ID NO: 527787 - RNA, 19 nt, Artificial Sequence
  Description of Artificial Sequence: Synthetic oligonucleotide
  Sense strand starting at position 1427 of SEQ ID NO: 317984
gcuggaagacgucaaggaa

SEQ ID NO: 527788 - RNA, 19 nt, Artificial Sequence
  Description of Artificial Sequence: Synthetic oligonucleotide
  Antisense strand to SEQ ID NO: 527787
uuccuugacgucuuccagc

SEQ ID NO: 527789 - RNA, 19 nt, Artificial Sequence
  Description of Artificial Sequence: Synthetic oligonucleotide
  Sense strand starting at position 1473 of SEQ ID NO: 317984
guaacauguggugagaaau

SEQ ID NO: 527790 - RNA, 19 nt, Artificial Sequence
  Description of Artificial Sequence: Synthetic oligonucleotide
  Antisense strand to SEQ ID NO: 527789
auuucucaccacauguuac

SEQ ID NO: 527791 - RNA, 19 nt, Artificial Sequence
  Description of Artificial Sequence: Synthetic oligonucleotide
  Sense strand starting at position 2564 of SEQ ID NO: 317984
gguguucccggccaugaaa

SEQ ID NO: 527792 - RNA, 19 nt, Artificial Sequence
  Description of Artificial Sequence: Synthetic oligonucleotide
  Antisense strand to SEQ ID NO: 527791
uuucauggccgggaacacc

SEQ ID NO: 527793 - RNA, 19 nt, Artificial Sequence
  Description of Artificial Sequence: Synthetic oligonucleotide
  Sense strand starting at position 2663 of SEQ ID NO: 317984
gugugaacgcccucugcaa

SEQ ID NO: 527794 - RNA, 19 nt, Artificial Sequence
  Description of Artificial Sequence: Synthetic oligonucleotide
  Antisense strand to SEQ ID NO: 527793
uugcagagggcguucacac

SEQ ID NO: 527795 - RNA, 19 nt, Artificial Sequence
  Description of Artificial Sequence: Synthetic oligonucleotide
  Sense strand starting at position 2797 of SEQ ID NO: 317984
gaguuagaaugcccugcau

SEQ ID NO: 527796 - RNA, 19 nt, Artificial Sequence
  Description of Artificial Sequence: Synthetic oligonucleotide
  Antisense strand to SEQ ID NO: 527795
augcagggcauucuaacuc

SEQ ID NO: 527797 - RNA, 19 nt, Artificial Sequence
  Description of Artificial Sequence: Synthetic oligonucleotide
  Sense strand starting at position 2912 of SEQ ID NO: 317984
caggcucugggaugaaaug

SEQ ID NO: 527798 - RNA, 19 nt, Artificial Sequence
  Description of Artificial Sequence: Synthetic oligonucleotide
  Antisense strand to SEQ ID NO: 527797
cauuucaucccagagccug

SEQ ID NO: 527799 - RNA, 19 nt, Artificial Sequence
  Description of Artificial Sequence: Synthetic oligonucleotide
  Sense strand starting at position 2992 of SEQ ID NO: 317984
caggcaaugugucuguaac

SEQ ID NO: 527800 - RNA, 19 nt, Artificial Sequence
  Description of Artificial Sequence: Synthetic oligonucleotide
  Antisense strand to SEQ ID NO: 527799
guuacagacacauugccug

SEQ ID NO: 527801 - RNA, 19 nt, Artificial Sequence
  Description of Artificial Sequence: Synthetic oligonucleotide
  Sense strand starting at position 3013 of SEQ ID NO: 317984
uggcgagggcuuugacaga

SEQ ID NO: 527802 - RNA, 19 nt, Artificial Sequence
  Description of Artificial Sequence: Synthetic oligonucleotide
  Antisense strand to SEQ ID NO: 527801
ucugucaaagcccucgcca

SEQ ID NO: 527803 - RNA, 19 nt, Artificial Sequence
  Description of Artificial Sequence: Synthetic oligonucleotide
  Sense strand starting at position 3195 of SEQ ID NO: 317984
ccacauucguccucuugau

SEQ ID NO: 527804 - RNA, 19 nt, Artificial Sequence
  Description of Artificial Sequence: Synthetic oligonucleotide
  Antisense strand to SEQ ID NO: 527803
aucaagaggacgaaugugg

SEQ ID NO: 527805 - RNA, 19 nt, Artificial Sequence
  Description of Artificial Sequence: Synthetic oligonucleotide
  Sense strand starting at position 3432 of SEQ ID NO: 317984
ccugcuagggcugaucaaa

SEQ ID NO: 527806 - RNA, 19 nt, Artificial Sequence
  Description of Artificial Sequence: Synthetic oligonucleotide
  Antisense strand to SEQ ID NO: 527805
uuugaucagcccuagcagg

SEQ ID NO: 527807 - RNA, 19 nt, Artificial Sequence
  Description of Artificial Sequence: Synthetic oligonucleotide
  Sense strand starting at position 3572 of SEQ ID NO: 317984
uucucuaggucgguggaaa

SEQ ID NO: 527808 - RNA, 19 nt, Artificial Sequence
  Description of Artificial Sequence: Synthetic oligonucleotide
  Antisense strand to SEQ ID NO: 527807
uuuccaccgaccuagagaa

SEQ ID NO: 527809 - RNA, 19 nt, Artificial Sequence
  Description of Artificial Sequence: Synthetic oligonucleotide
  Sense strand starting at position 3573 of SEQ ID NO: 317984
ucucuaggucgguggaaau

SEQ ID NO: 527810 - RNA, 19 nt, Artificial Sequence
  Description of Artificial Sequence: Synthetic oligonucleotide
  Antisense strand to SEQ ID NO: 527809
auuuccaccgaccuagaga

SEQ ID NO: 527811 - RNA, 19 nt, Artificial Sequence
  Description of Artificial Sequence: Synthetic oligonucleotide
  Sense strand starting at position 3598 of SEQ ID NO: 317984
cauccuuccgugucuaguu

SEQ ID NO: 527812 - RNA, 19 nt, Artificial Sequence
  Description of Artificial Sequence: Synthetic oligonucleotide
  Antisense strand to SEQ ID NO: 527811
aacuagacacggaaggaug

SEQ ID NO: 527813 - RNA, 19 nt, Artificial Sequence
  Description of Artificial Sequence: Synthetic oligonucleotide
  Sense strand starting at position 3600 of SEQ ID NO: 317984
uccuuccgugucuaguuaa

SEQ ID NO: 527814 - RNA, 19 nt, Artificial Sequence
  Description of Artificial Sequence: Synthetic oligonucleotide
  Antisense strand to SEQ ID NO: 527813
uuaacuagacacggaagga

SEQ ID NO: 527815 - RNA, 19 nt, Artificial Sequence
  Description of Artificial Sequence: Synthetic oligonucleotide
  Sense strand starting at position 3795 of SEQ ID NO: 317984
ucuuauacccauuggcgaa

SEQ ID NO: 527816 - RNA, 19 nt, Artificial Sequence
  Description of Artificial Sequence: Synthetic oligonucleotide
  Antisense strand to SEQ ID NO: 527815
uucgccaauggguauaaga

SEQ ID NO: 527817 - RNA, 19 nt, Artificial Sequence
  Description of Artificial Sequence: Synthetic oligonucleotide
  Sense strand starting at position 3802 of SEQ ID NO: 317984
cccauuggcgaaugagagu

SEQ ID NO: 527818 - RNA, 19 nt, Artificial Sequence
  Description of Artificial Sequence: Synthetic oligonucleotide
  Antisense strand to SEQ ID NO: 527817
acucucauucgccaauggg

SEQ ID NO: 527819 - RNA, 19 nt, Artificial Sequence
  Description of Artificial Sequence: Synthetic oligonucleotide
  Sense strand starting at position 3811 of SEQ ID NO: 317984
gaaugagagucagauuuaa

SEQ ID NO: 527820 - RNA, 19 nt, Artificial Sequence
  Description of Artificial Sequence: Synthetic oligonucleotide
  Antisense strand to SEQ ID NO: 527819
uuaaaucugacucucauuc

SEQ ID NO: 527821 - RNA, 19 nt, Artificial Sequence
  Description of Artificial Sequence: Synthetic oligonucleotide
  Sense strand starting at position 97 of SEQ ID NO: 317985
acuuccaugcaagaugauu

SEQ ID NO: 527822 - RNA, 19 nt, Artificial Sequence
  Description of Artificial Sequence: Synthetic oligonucleotide
  Antisense strand to SEQ ID NO: 527821
aaucaucuugcauggaagu

SEQ ID NO: 527823 - RNA, 19 nt, Artificial Sequence
  Description of Artificial Sequence: Synthetic oligonucleotide
  Sense strand starting at position 281 of SEQ ID NO: 317985
ucaucuauggaauguuauu

SEQ ID NO: 527824 - RNA, 19 nt, Artificial Sequence
  Description of Artificial Sequence: Synthetic oligonucleotide
  Antisense strand to SEQ ID NO: 527823
aauaacauuccauagauga

SEQ ID NO: 527825 - RNA, 19 nt, Artificial Sequence
  Description of Artificial Sequence: Synthetic oligonucleotide
  Sense strand starting at position 534 of SEQ ID NO: 317985
cuaagugcaucagucagaa

SEQ ID NO: 527826 - RNA, 19 nt, Artificial Sequence
  Description of Artificial Sequence: Synthetic oligonucleotide
  Antisense strand to SEQ ID NO: 527825
uucugacugaugcacuuag

SEQ ID NO: 527827 - RNA, 19 nt, Artificial Sequence
  Description of Artificial Sequence: Synthetic oligonucleotide
  Sense strand starting at position 678 of SEQ ID NO: 317985
gaaguaaucuccuuauggg

SEQ ID NO: 527828 - RNA, 19 nt, Artificial Sequence
  Description of Artificial Sequence: Synthetic oligonucleotide
  Antisense strand to SEQ ID NO: 527827
cccauaaggagauuacuuc

SEQ ID NO: 527829 - RNA, 19 nt, Artificial Sequence
  Description of Artificial Sequence: Synthetic oligonucleotide
  Sense strand starting at position 799 of SEQ ID NO: 317985
uuuguccaagguuagaaua

SEQ ID NO: 527830 - RNA, 19 nt, Artificial Sequence
  Description of Artificial Sequence: Synthetic oligonucleotide
  Antisense strand to SEQ ID NO: 527829
uauucuaaccuuggacaaa

SEQ ID NO: 527831 - RNA, 19 nt, Artificial Sequence
  Description of Artificial Sequence: Synthetic oligonucleotide
  Sense strand starting at position 972 of SEQ ID NO: 317985
gguugagaacuguaugguc

SEQ ID NO: 527832 - RNA, 19 nt, Artificial Sequence
  Description of Artificial Sequence: Synthetic oligonucleotide
  Antisense strand to SEQ ID NO: 527831
gaccauacaguucucaacc

SEQ ID NO: 527833 - RNA, 19 nt, Artificial Sequence
  Description of Artificial Sequence: Synthetic oligonucleotide
  Sense strand starting at position 984 of SEQ ID NO: 317985
uaugguccgccacauaaga

SEQ ID NO: 527834 - RNA, 19 nt, Artificial Sequence
  Description of Artificial Sequence: Synthetic oligonucleotide
  Antisense strand to SEQ ID NO: 527833
ucuuauguggcggaccaua

SEQ ID NO: 527835 - RNA, 19 nt, Artificial Sequence
  Description of Artificial Sequence: Synthetic oligonucleotide
  Sense strand starting at position 986 of SEQ ID NO: 317985
ugguccgccacauaagauu

SEQ ID NO: 527836 - RNA, 19 nt, Artificial Sequence
  Description of Artificial Sequence: Synthetic oligonucleotide
  Antisense strand to SEQ ID NO: 527835
aaucuuauguggcggacca

SEQ ID NO: 527837 - RNA, 19 nt, Artificial Sequence
  Description of Artificial Sequence: Synthetic oligonucleotide
  Sense strand starting at position 1142 of SEQ ID NO: 317985
uaugguauacaugguuaau

SEQ ID NO: 527838 - RNA, 19 nt, Artificial Sequence
  Description of Artificial Sequence: Synthetic oligonucleotide
  Antisense strand to SEQ ID NO: 527837
auuaaccauguauaccaua

SEQ ID NO: 527839 - RNA, 19 nt, Artificial Sequence
  Description of Artificial Sequence: Synthetic oligonucleotide
  Sense strand starting at position 1144 of SEQ ID NO: 317985
ugguauacaugguuaauga

SEQ ID NO: 527840 - RNA, 19 nt, Artificial Sequence
  Description of Artificial Sequence: Synthetic oligonucleotide
  Antisense strand to SEQ ID NO: 527839
ucauuaaccauguauacca

SEQ ID NO: 527841 - RNA, 19 nt, Artificial Sequence
  Description of Artificial Sequence: Synthetic oligonucleotide
  Sense strand starting at position 1178 of SEQ ID NO: 317985
gccagaauauuugaaauaa

SEQ ID NO: 527842 - RNA, 19 nt, Artificial Sequence
  Description of Artificial Sequence: Synthetic oligonucleotide
  Antisense strand to SEQ ID NO: 527841
uuauuucaaauauucuggc

SEQ ID NO: 527843 - RNA, 19 nt, Artificial Sequence
  Description of Artificial Sequence: Synthetic oligonucleotide
  Sense strand starting at position 1304 of SEQ ID NO: 317985
acuucuguagcugaggaua

SEQ ID NO: 527844 - RNA, 19 nt, Artificial Sequence
  Description of Artificial Sequence: Synthetic oligonucleotide
  Antisense strand to SEQ ID NO: 527843
uauccucagcuacagaagu

SEQ ID NO: 527845 - RNA, 19 nt, Artificial Sequence
  Description of Artificial Sequence: Synthetic oligonucleotide
  Sense strand starting at position 1375 of SEQ ID NO: 317985
uauguuauucuauguagag

SEQ ID NO: 527846 - RNA, 19 nt, Artificial Sequence
  Description of Artificial Sequence: Synthetic oligonucleotide
  Antisense strand to SEQ ID NO: 527845
cucuacauagaauaacaua

SEQ ID NO: 527847 - RNA, 19 nt, Artificial Sequence
  Description of Artificial Sequence: Synthetic oligonucleotide
  Sense strand starting at position 1377 of SEQ ID NO: 317985
uguuauucuauguagagua

SEQ ID NO: 527848 - RNA, 19 nt, Artificial Sequence
  Description of Artificial Sequence: Synthetic oligonucleotide
  Antisense strand to SEQ ID NO: 527847
uacucuacauagaauaaca

SEQ ID NO: 527849 - RNA, 19 nt, Artificial Sequence
  Description of Artificial Sequence: Synthetic oligonucleotide
  Sense strand starting at position 1379 of SEQ ID NO: 317985
uuauucuauguagaguaga

SEQ ID NO: 527850 - RNA, 19 nt, Artificial Sequence
  Description of Artificial Sequence: Synthetic oligonucleotide
  Antisense strand to SEQ ID NO: 527849
ucuacucuacauagaauaa

SEQ ID NO: 527851 - RNA, 19 nt, Artificial Sequence
  Description of Artificial Sequence: Synthetic oligonucleotide
  Sense strand starting at position 1614 of SEQ ID NO: 317985
cuuugaccaguuugaaaga

SEQ ID NO: 527852 - RNA, 19 nt, Artificial Sequence
  Description of Artificial Sequence: Synthetic oligonucleotide
  Antisense strand to SEQ ID NO: 527851
ucuuucaaacuggucaaag

SEQ ID NO: 527853 - RNA, 19 nt, Artificial Sequence
  Description of Artificial Sequence: Synthetic oligonucleotide
  Sense strand starting at position 1698 of SEQ ID NO: 317985
aaucgcaaauuguugagaa

SEQ ID NO: 527854 - RNA, 19 nt, Artificial Sequence
  Description of Artificial Sequence: Synthetic oligonucleotide
  Antisense strand to SEQ ID NO: 527853
uucucaacaauuugcgauu

SEQ ID NO: 527855 - RNA, 19 nt, Artificial Sequence
  Description of Artificial Sequence: Synthetic oligonucleotide
  Sense strand starting at position 1700 of SEQ ID NO: 317985
ucgcaaauuguugagaaac

SEQ ID NO: 527856 - RNA, 19 nt, Artificial Sequence
  Description of Artificial Sequence: Synthetic oligonucleotide
  Antisense strand to SEQ ID NO: 527855
guuucucaacaauuugcga

SEQ ID NO: 527857 - RNA, 19 nt, Artificial Sequence
  Description of Artificial Sequence: Synthetic oligonucleotide
  Sense strand starting at position 1749 of SEQ ID NO: 317985
gcuguuuggaaacaaggua

SEQ ID NO: 527858 - RNA, 19 nt, Artificial Sequence
  Description of Artificial Sequence: Synthetic oligonucleotide
  Antisense strand to SEQ ID NO: 527857
uaccuuguuuccaaacagc

SEQ ID NO: 527859 - RNA, 19 nt, Artificial Sequence
  Description of Artificial Sequence: Synthetic oligonucleotide
  Sense strand starting at position 1920 of SEQ ID NO: 317985
aguguuuaaucauccaaau

SEQ ID NO: 527860 - RNA, 19 nt, Artificial Sequence
  Description of Artificial Sequence: Synthetic oligonucleotide
  Antisense strand to SEQ ID NO: 527859
auuuggaugauuaaacacu

SEQ ID NO: 527861 - RNA, 19 nt, Artificial Sequence
  Description of Artificial Sequence: Synthetic oligonucleotide
  Sense strand starting at position 2016 of SEQ ID NO: 317985
ccugcauuggguuagaacu

SEQ ID NO: 527862 - RNA, 19 nt, Artificial Sequence
  Description of Artificial Sequence: Synthetic oligonucleotide
  Antisense strand to SEQ ID NO: 527861
aguucuaacccaaugcagg

SEQ ID NO: 527863 - RNA, 19 nt, Artificial Sequence
  Description of Artificial Sequence: Synthetic oligonucleotide
  Sense strand starting at position 2135 of SEQ ID NO: 317985
ucagaugcagcagaauuaa

SEQ ID NO: 527864 - RNA, 19 nt, Artificial Sequence
  Description of Artificial Sequence: Synthetic oligonucleotide
  Antisense strand to SEQ ID NO: 527863
uuaauucugcugcaucuga

SEQ ID NO: 527865 - RNA, 19 nt, Artificial Sequence
  Description of Artificial Sequence: Synthetic oligonucleotide
  Sense strand starting at position 2154 of SEQ ID NO: 317985
gauaaauggcgugagguuu

SEQ ID NO: 527866 - RNA, 19 nt, Artificial Sequence
  Description of Artificial Sequence: Synthetic oligonucleotide
  Antisense strand to SEQ ID NO: 527865
aaaccucacgccauuuauc

SEQ ID NO: 527867 - RNA, 19 nt, Artificial Sequence
  Description of Artificial Sequence: Synthetic oligonucleotide
  Sense strand starting at position 2392 of SEQ ID NO: 317985
uuauuuacuuguguugcua

SEQ ID NO: 527868 - RNA, 19 nt, Artificial Sequence
  Description of Artificial Sequence: Synthetic oligonucleotide
  Antisense strand to SEQ ID NO: 527867
uagcaacacaaguaaauaa

SEQ ID NO: 527869 - RNA, 19 nt, Artificial Sequence
  Description of Artificial Sequence: Synthetic oligonucleotide
  Sense strand starting at position 2456 of SEQ ID NO: 317985
aaguuauagccauacaggu

SEQ ID NO: 527870 - RNA, 19 nt, Artificial Sequence
  Description of Artificial Sequence: Synthetic oligonucleotide
  Antisense strand to SEQ ID NO: 527869
accuguauggcuauaacuu

SEQ ID NO: 527871 - RNA, 19 nt, Artificial Sequence
  Description of Artificial Sequence: Synthetic oligonucleotide
  Sense strand starting at position 2474 of SEQ ID NO: 317985
ucaaaucagugucccaauu

SEQ ID NO: 527872 - RNA, 19 nt, Artificial Sequence
  Description of Artificial Sequence: Synthetic oligonucleotide
  Antisense strand to SEQ ID NO: 527871
aauugggacacugauuuga

SEQ ID NO: 527873 - RNA, 19 nt, Artificial Sequence
  Description of Artificial Sequence: Synthetic oligonucleotide
  Sense strand starting at position 2531 of SEQ ID NO: 317985
auaggaauuuccuaaggua

SEQ ID NO: 527874 - RNA, 19 nt, Artificial Sequence
  Description of Artificial Sequence: Synthetic oligonucleotide
  Antisense strand to SEQ ID NO: 527873
uaccuuaggaaauuccuau

SEQ ID NO: 527875 - RNA, 19 nt, Artificial Sequence
  Description of Artificial Sequence: Synthetic oligonucleotide
  Sense strand starting at position 2625 of SEQ ID NO: 317985
ggagauucauggguacauc

SEQ ID NO: 527876 - RNA, 19 nt, Artificial Sequence
  Description of Artificial Sequence: Synthetic oligonucleotide
  Antisense strand to SEQ ID NO: 527875
gauguacccaugaaucucc

SEQ ID NO: 527877 - RNA, 19 nt, Artificial Sequence
  Description of Artificial Sequence: Synthetic oligonucleotide
  Sense strand starting at position 2797 of SEQ ID NO: 317985
gcaacaacccugugaggga

SEQ ID NO: 527878 - RNA, 19 nt, Artificial Sequence
  Description of Artificial Sequence: Synthetic oligonucleotide
  Antisense strand to SEQ ID NO: 527877
ucccucacaggguuguugc

SEQ ID NO: 527879 - RNA, 19 nt, Artificial Sequence
  Description of Artificial Sequence: Synthetic oligonucleotide
  Sense strand starting at position 2939 of SEQ ID NO: 317985
uugcuagauugaguaacau

SEQ ID NO: 527880 - RNA, 19 nt, Artificial Sequence
  Description of Artificial Sequence: Synthetic oligonucleotide
  Antisense strand to SEQ ID NO: 527879
auguuacucaaucuagcaa

SEQ ID NO: 527881 - RNA, 19 nt, Artificial Sequence
  Description of Artificial Sequence: Synthetic oligonucleotide
  Sense strand starting at position 2950 of SEQ ID NO: 317985
aguaacauguuucccacau

SEQ ID NO: 527882 - RNA, 19 nt, Artificial Sequence
  Description of Artificial Sequence: Synthetic oligonucleotide
  Antisense strand to SEQ ID NO: 527881
augugggaaacauguuacu

SEQ ID NO: 527883 - RNA, 19 nt, Artificial Sequence
  Description of Artificial Sequence: Synthetic oligonucleotide
  Sense strand starting at position 2951 of SEQ ID NO: 317985
guaacauguuucccacaua

SEQ ID NO: 527884 - RNA, 19 nt, Artificial Sequence
  Description of Artificial Sequence: Synthetic oligonucleotide
  Antisense strand to SEQ ID NO: 527883
uaugugggaaacauguuac

SEQ ID NO: 527885 - RNA, 19 nt, Artificial Sequence
  Description of Artificial Sequence: Synthetic oligonucleotide
  Sense strand starting at position 2997 of SEQ ID NO: 317985
aguccaacucaugggaaca

SEQ ID NO: 527886 - RNA, 19 nt, Artificial Sequence
  Description of Artificial Sequence: Synthetic oligonucleotide
  Antisense strand to SEQ ID NO: 527885
uguucccaugaguuggacu

SEQ ID NO: 527887 - RNA, 19 nt, Artificial Sequence
  Description of Artificial Sequence: Synthetic oligonucleotide
  Sense strand starting at position 3128 of SEQ ID NO: 317985
aggauuaacuuugcauaag

SEQ ID NO: 527888 - RNA, 19 nt, Artificial Sequence
  Description of Artificial Sequence: Synthetic oligonucleotide
  Antisense strand to SEQ ID NO: 527887
cuuaugcaaaguuaauccu

SEQ ID NO: 527889 - RNA, 19 nt, Artificial Sequence
  Description of Artificial Sequence: Synthetic oligonucleotide
  Sense strand starting at position 3250 of SEQ ID NO: 317985
ugugcuaagagaugaggau

SEQ ID NO: 527890 - RNA, 19 nt, Artificial Sequence
  Description of Artificial Sequence: Synthetic oligonucleotide
  Antisense strand to SEQ ID NO: 527889
auccucaucucuuagcaca

SEQ ID NO: 527891 - RNA, 19 nt, Artificial Sequence
  Description of Artificial Sequence: Synthetic oligonucleotide
  Sense strand starting at position 3443 of SEQ ID NO: 317985
ugagcuaagccucauagaa

SEQ ID NO: 527892 - RNA, 19 nt, Artificial Sequence
  Description of Artificial Sequence: Synthetic oligonucleotide
  Antisense strand to SEQ ID NO: 527891
uucuaugaggcuuagcuca

SEQ ID NO: 527893 - RNA, 19 nt, Artificial Sequence
  Description of Artificial Sequence: Synthetic oligonucleotide
  Sense strand starting at position 3515 of SEQ ID NO: 317985
agguuaugaaguugugaag

SEQ ID NO: 527894 - RNA, 19 nt, Artificial Sequence
  Description of Artificial Sequence: Synthetic oligonucleotide
  Antisense strand to SEQ ID NO: 527893
cuucacaacuucauaaccu

SEQ ID NO: 527895 - RNA, 19 nt, Artificial Sequence
  Description of Artificial Sequence: Synthetic oligonucleotide
  Sense strand starting at position 3623 of SEQ ID NO: 317985
aggcauacaucuguaagaa

SEQ ID NO: 527896 - RNA, 19 nt, Artificial Sequence
  Description of Artificial Sequence: Synthetic oligonucleotide
  Antisense strand to SEQ ID NO: 527895
uucuuacagauguaugccu

SEQ ID NO: 527897 - RNA, 19 nt, Artificial Sequence
  Description of Artificial Sequence: Synthetic oligonucleotide
  Sense strand starting at position 3862 of SEQ ID NO: 317985
agaaaugcuguauauauuc

SEQ ID NO: 527898 - RNA, 19 nt, Artificial Sequence
  Description of Artificial Sequence: Synthetic oligonucleotide
  Antisense strand to SEQ ID NO: 527897
gaauauauacagcauuucu

SEQ ID NO: 527899 - RNA, 19 nt, Artificial Sequence
  Description of Artificial Sequence: Synthetic oligonucleotide
  Sense strand starting at position 3889 of SEQ ID NO: 317985
auuauuggaucauugucau

SEQ ID NO: 527900 - RNA, 19 nt, Artificial Sequence
  Description of Artificial Sequence: Synthetic oligonucleotide
  Antisense strand to SEQ ID NO: 527899
augacaaugauccaauaau

SEQ ID NO: 527901 - RNA, 19 nt, Artificial Sequence
  Description of Artificial Sequence: Synthetic oligonucleotide
  Sense strand starting at position 41 of SEQ ID NO: 317986
agucuuacucugcagauca

SEQ ID NO: 527902 - RNA, 19 nt, Artificial Sequence
  Description of Artificial Sequence: Synthetic oligonucleotide
  Antisense strand to SEQ ID NO: 527901
ugaucugcagaguaagacu

SEQ ID NO: 527903 - RNA, 19 nt, Artificial Sequence
  Description of Artificial Sequence: Synthetic oligonucleotide
  Sense strand starting at position 43 of SEQ ID NO: 317986
ucuuacucugcagaucaga

SEQ ID NO: 527904 - RNA, 19 nt, Artificial Sequence
  Description of Artificial Sequence: Synthetic oligonucleotide
  Antisense strand to SEQ ID NO: 527903
ucugaucugcagaguaaga

SEQ ID NO: 527905 - RNA, 19 nt, Artificial Sequence
  Description of Artificial Sequence: Synthetic oligonucleotide
  Sense strand starting at position 69 of SEQ ID NO: 317986
ugggcugaucuggaaaucu

SEQ ID NO: 527906 - RNA, 19 nt, Artificial Sequence
  Description of Artificial Sequence: Synthetic oligonucleotide
  Antisense strand to SEQ ID NO: 527905
agauuuccagaucagccca

SEQ ID NO: 527907 - RNA, 19 nt, Artificial Sequence
  Description of Artificial Sequence: Synthetic oligonucleotide
  Sense strand starting at position 127 of SEQ ID NO: 317986
agugcucaucaggagagua

SEQ ID NO: 527908 - RNA, 19 nt, Artificial Sequence
  Description of Artificial Sequence: Synthetic oligonucleotide
  Antisense strand to SEQ ID NO: 527907
uacucuccugaugagcacu

SEQ ID NO: 527909 - RNA, 19 nt, Artificial Sequence
  Description of Artificial Sequence: Synthetic oligonucleotide
  Sense strand starting at position 137 of SEQ ID NO: 317986
aggagaguaugugucuuua

SEQ ID NO: 527910 - RNA, 19 nt, Artificial Sequence
  Description of Artificial Sequence: Synthetic oligonucleotide
  Antisense strand to SEQ ID NO: 527909
uaaagacacauacucuccu

SEQ ID NO: 527911 - RNA, 19 nt, Artificial Sequence
  Description of Artificial Sequence: Synthetic oligonucleotide
  Sense strand starting at position 147 of SEQ ID NO: 317986
gugucuuuagaccaggcaa

SEQ ID NO: 527912 - RNA, 19 nt, Artificial Sequence
  Description of Artificial Sequence: Synthetic oligonucleotide
  Antisense strand to SEQ ID NO: 527911
uugccuggucuaaagacac

SEQ ID NO: 527913 - RNA, 19 nt, Artificial Sequence
  Description of Artificial Sequence: Synthetic oligonucleotide
  Sense strand starting at position 175 of SEQ ID NO: 317986
gaacgauggaguuguugaa

SEQ ID NO: 527914 - RNA, 19 nt, Artificial Sequence
  Description of Artificial Sequence: Synthetic oligonucleotide
  Antisense strand to SEQ ID NO: 527913
uucaacaacuccaucguuc

SEQ ID NO: 527915 - RNA, 19 nt, Artificial Sequence
  Description of Artificial Sequence: Synthetic oligonucleotide
  Sense strand starting at position 338 of SEQ ID NO: 317986
guaagugaaucuuuccaau

SEQ ID NO: 527916 - RNA, 19 nt, Artificial Sequence
  Description of Artificial Sequence: Synthetic oligonucleotide
  Antisense strand to SEQ ID NO: 527915
auuggaaagauucacuuac

SEQ ID NO: 527917 - RNA, 19 nt, Artificial Sequence
  Description of Artificial Sequence: Synthetic oligonucleotide
  Sense strand starting at position 523 of SEQ ID NO: 317986
cagccuggagucuggaaau

SEQ ID NO: 527918 - RNA, 19 nt, Artificial Sequence
  Description of Artificial Sequence: Synthetic oligonucleotide
  Antisense strand to SEQ ID NO: 527917
auuuccagacuccaggcug

SEQ ID NO: 527919 - RNA, 19 nt, Artificial Sequence
  Description of Artificial Sequence: Synthetic oligonucleotide
  Sense strand starting at position 533 of SEQ ID NO: 317986
ucuggaaaugugggcauau

SEQ ID NO: 527920 - RNA, 19 nt, Artificial Sequence
  Description of Artificial Sequence: Synthetic oligonucleotide
  Antisense strand to SEQ ID NO: 527919
auaugcccacauuuccaga

SEQ ID NO: 527921 - RNA, 19 nt, Artificial Sequence
  Description of Artificial Sequence: Synthetic oligonucleotide
  Sense strand starting at position 534 of SEQ ID NO: 317986
cuggaaaugugggcauauu

SEQ ID NO: 527922 - RNA, 19 nt, Artificial Sequence
  Description of Artificial Sequence: Synthetic oligonucleotide
  Antisense strand to SEQ ID NO: 527921
aauaugcccacauuuccag

SEQ ID NO: 527923 - RNA, 19 nt, Artificial Sequence
  Description of Artificial Sequence: Synthetic oligonucleotide
  Sense strand starting at position 535 of SEQ ID NO: 317986
uggaaaugugggcauauuc

SEQ ID NO: 527924 - RNA, 19 nt, Artificial Sequence
  Description of Artificial Sequence: Synthetic oligonucleotide
  Antisense strand to SEQ ID NO: 527923
gaauaugcccacauuucca

SEQ ID NO: 527925 - RNA, 19 nt, Artificial Sequence
  Description of Artificial Sequence: Synthetic oligonucleotide
  Sense strand starting at position 589 of SEQ ID NO: 317986
agaagcacuuagcuaaauu

SEQ ID NO: 527926 - RNA, 19 nt, Artificial Sequence
  Description of Artificial Sequence: Synthetic oligonucleotide
  Antisense strand to SEQ ID NO: 527925
aauuuagcuaagugcuucu

SEQ ID NO: 527927 - RNA, 19 nt, Artificial Sequence
  Description of Artificial Sequence: Synthetic oligonucleotide
  Sense strand starting at position 614 of SEQ ID NO: 317986
ggcaacuuugaagguauca

SEQ ID NO: 527928 - RNA, 19 nt, Artificial Sequence
  Description of Artificial Sequence: Synthetic oligonucleotide
  Antisense strand to SEQ ID NO: 527927
ugauaccuucaaaguugcc

SEQ ID NO: 527929 - RNA, 19 nt, Artificial Sequence
  Description of Artificial Sequence: Synthetic oligonucleotide
  Sense strand starting at position 634 of SEQ ID NO: 317986
gugccuuacgaucauaaug

SEQ ID NO: 527930 - RNA, 19 nt, Artificial Sequence
  Description of Artificial Sequence: Synthetic oligonucleotide
  Antisense strand to SEQ ID NO: 527929
cauuaugaucguaaggcac

SEQ ID NO: 527931 - RNA, 19 nt, Artificial Sequence
  Description of Artificial Sequence: Synthetic oligonucleotide
  Sense strand starting at position 643 of SEQ ID NO: 317986
gaucauaauggaugcagua

SEQ ID NO: 527932 - RNA, 19 nt, Artificial Sequence
  Description of Artificial Sequence: Synthetic oligonucleotide
  Antisense strand to SEQ ID NO: 527931
uacugcauccauuaugauc

SEQ ID NO: 527933 - RNA, 19 nt, Artificial Sequence
  Description of Artificial Sequence: Synthetic oligonucleotide
  Sense strand starting at position 676 of SEQ ID NO: 317986
uguauauagcauggauaag

SEQ ID NO: 527934 - RNA, 19 nt, Artificial Sequence
  Description of Artificial Sequence: Synthetic oligonucleotide
  Antisense strand to SEQ ID NO: 527933
cuuauccaugcuauauaca

SEQ ID NO: 527935 - RNA, 19 nt, Artificial Sequence
  Description of Artificial Sequence: Synthetic oligonucleotide
  Sense strand starting at position 786 of SEQ ID NO: 317986
ccucuuagagucugauaaa

SEQ ID NO: 527936 - RNA, 19 nt, Artificial Sequence
  Description of Artificial Sequence: Synthetic oligonucleotide
  Antisense strand to SEQ ID NO: 527935
uuuaucagacucuaagagg

SEQ ID NO: 527937 - RNA, 19 nt, Artificial Sequence
  Description of Artificial Sequence: Synthetic oligonucleotide
  Sense strand starting at position 817 of SEQ ID NO: 317986
uggucauugccacaacauc

SEQ ID NO: 527938 - RNA, 19 nt, Artificial Sequence
  Description of Artificial Sequence: Synthetic oligonucleotide
  Antisense strand to SEQ ID NO: 527937
gauguuguggcaaugacca

SEQ ID NO: 527939 - RNA, 19 nt, Artificial Sequence
  Description of Artificial Sequence: Synthetic oligonucleotide
  Sense strand starting at position 1334 of SEQ ID NO: 317986
cuguguuaacuauaccuaa

SEQ ID NO: 527940 - RNA, 19 nt, Artificial Sequence
  Description of Artificial Sequence: Synthetic oligonucleotide
  Antisense strand to SEQ ID NO: 527939
uuagguauaguuaacacag

SEQ ID NO: 527941 - RNA, 19 nt, Artificial Sequence
  Description of Artificial Sequence: Synthetic oligonucleotide
  Sense strand starting at position 1357 of SEQ ID NO: 317986
gagagauguugguuuccaa

SEQ ID NO: 527942 - RNA, 19 nt, Artificial Sequence
  Description of Artificial Sequence: Synthetic oligonucleotide
  Antisense strand to SEQ ID NO: 527941
uuggaaaccaacaucucuc

SEQ ID NO: 527943 - RNA, 19 nt, Artificial Sequence
  Description of Artificial Sequence: Synthetic oligonucleotide
  Sense strand starting at position 1360 of SEQ ID NO: 317986
agauguugguuuccaaaca

SEQ ID NO: 527944 - RNA, 19 nt, Artificial Sequence
  Description of Artificial Sequence: Synthetic oligonucleotide
  Antisense strand to SEQ ID NO: 527943
uguuuggaaaccaacaucu

SEQ ID NO: 527945 - RNA, 19 nt, Artificial Sequence
  Description of Artificial Sequence: Synthetic oligonucleotide
  Sense strand starting at position 1422 of SEQ ID NO: 317986
ucuuauauugucugcauuu

SEQ ID NO: 527946 - RNA, 19 nt, Artificial Sequence
  Description of Artificial Sequence: Synthetic oligonucleotide
  Antisense strand to SEQ ID NO: 527945
aaaugcagacaauauaaga

SEQ ID NO: 527947 - RNA, 19 nt, Artificial Sequence
  Description of Artificial Sequence: Synthetic oligonucleotide
  Sense strand starting at position 1434 of SEQ ID NO: 317986
ugcauuucugcuuagcaua

SEQ ID NO: 527948 - RNA, 19 nt, Artificial Sequence
  Description of Artificial Sequence: Synthetic oligonucleotide
  Antisense strand to SEQ ID NO: 527947
uaugcuaagcagaaaugca

SEQ ID NO: 527949 - RNA, 19 nt, Artificial Sequence
  Description of Artificial Sequence: Synthetic oligonucleotide
  Sense strand starting at position 1484 of SEQ ID NO: 317986
ggucuagagaacuggaugu

SEQ ID NO: 527950 - RNA, 19 nt, Artificial Sequence
  Description of Artificial Sequence: Synthetic oligonucleotide
  Antisense strand to SEQ ID NO: 527949
acauccaguucucuagacc

SEQ ID NO: 527951 - RNA, 19 nt, Artificial Sequence
  Description of Artificial Sequence: Synthetic oligonucleotide
  Sense strand starting at position 1488 of SEQ ID NO: 317986
uagagaacuggaugucauc

SEQ ID NO: 527952 - RNA, 19 nt, Artificial Sequence
  Description of Artificial Sequence: Synthetic oligonucleotide
  Antisense strand to SEQ ID NO: 527951
gaugacauccaguucucua

SEQ ID NO: 527953 - RNA, 19 nt, Artificial Sequence
  Description of Artificial Sequence: Synthetic oligonucleotide
  Sense strand starting at position 1546 of SEQ ID NO: 317986
aagggaacauucgucuuga

SEQ ID NO: 527954 - RNA, 19 nt, Artificial Sequence
  Description of Artificial Sequence: Synthetic oligonucleotide
  Antisense strand to SEQ ID NO: 527953
ucaagacgaauguucccuu

SEQ ID NO: 527955 - RNA, 19 nt, Artificial Sequence
  Description of Artificial Sequence: Synthetic oligonucleotide
  Sense strand starting at position 1547 of SEQ ID NO: 317986
agggaacauucgucuugau

SEQ ID NO: 527956 - RNA, 19 nt, Artificial Sequence
  Description of Artificial Sequence: Synthetic oligonucleotide
  Antisense strand to SEQ ID NO: 527955
aucaagacgaauguucccu

SEQ ID NO: 527957 - RNA, 19 nt, Artificial Sequence
  Description of Artificial Sequence: Synthetic oligonucleotide
  Sense strand starting at position 1581 of SEQ ID NO: 317986
cuauuagauccaggucuga

SEQ ID NO: 527958 - RNA, 19 nt, Artificial Sequence
  Description of Artificial Sequence: Synthetic oligonucleotide
  Antisense strand to SEQ ID NO: 527957
ucagaccuggaucuaauag

SEQ ID NO: 527959 - RNA, 19 nt, Artificial Sequence
  Description of Artificial Sequence: Synthetic oligonucleotide
  Sense strand starting at position 1926 of SEQ ID NO: 317986
caaagagguucccuacagu

SEQ ID NO: 527960 - RNA, 19 nt, Artificial Sequence
  Description of Artificial Sequence: Synthetic oligonucleotide
  Antisense strand to SEQ ID NO: 527959
acuguagggaaccucuuug

SEQ ID NO: 527961 - RNA, 19 nt, Artificial Sequence
  Description of Artificial Sequence: Synthetic oligonucleotide
  Sense strand starting at position 1929 of SEQ ID NO: 317986
agagguucccuacaguguu

SEQ ID NO: 527962 - RNA, 19 nt, Artificial Sequence
  Description of Artificial Sequence: Synthetic oligonucleotide
  Antisense strand to SEQ ID NO: 527961
aacacuguagggaaccucu

SEQ ID NO: 527963 - RNA, 19 nt, Artificial Sequence
  Description of Artificial Sequence: Synthetic oligonucleotide
  Sense strand starting at position 1983 of SEQ ID NO: 317986
ccuugaacagugcauugau

SEQ ID NO: 527964 - RNA, 19 nt, Artificial Sequence
  Description of Artificial Sequence: Synthetic oligonucleotide
  Antisense strand to SEQ ID NO: 527963
aucaaugcacuguucaagg

SEQ ID NO: 527965 - RNA, 19 nt, Artificial Sequence
  Description of Artificial Sequence: Synthetic oligonucleotide
  Sense strand starting at position 1986 of SEQ ID NO: 317986
ugaacagugcauugauuaa

SEQ ID NO: 527966 - RNA, 19 nt, Artificial Sequence
  Description of Artificial Sequence: Synthetic oligonucleotide
  Antisense strand to SEQ ID NO: 527965
uuaaucaaugcacuguuca

SEQ ID NO: 527967 - RNA, 19 nt, Artificial Sequence
  Description of Artificial Sequence: Synthetic oligonucleotide
  Sense strand starting at position 2129 of SEQ ID NO: 317986
ugcuuacaugucuauacau

SEQ ID NO: 527968 - RNA, 19 nt, Artificial Sequence
  Description of Artificial Sequence: Synthetic oligonucleotide
  Antisense strand to SEQ ID NO: 527967
auguauagacauguaagca

SEQ ID NO: 527969 - RNA, 19 nt, Artificial Sequence
  Description of Artificial Sequence: Synthetic oligonucleotide
  Sense strand starting at position 2772 of SEQ ID NO: 317986
ggauuuacuuaucacugaa

SEQ ID NO: 527970 - RNA, 19 nt, Artificial Sequence
  Description of Artificial Sequence: Synthetic oligonucleotide
  Antisense strand to SEQ ID NO: 527969
uucagugauaaguaaaucc

SEQ ID NO: 527971 - RNA, 19 nt, Artificial Sequence
  Description of Artificial Sequence: Synthetic oligonucleotide
  Sense strand starting at position 3045 of SEQ ID NO: 317986
ggaagacaaucauuguauc

SEQ ID NO: 527972 - RNA, 19 nt, Artificial Sequence
  Description of Artificial Sequence: Synthetic oligonucleotide
  Antisense strand to SEQ ID NO: 527971
gauacaaugauugucuucc

SEQ ID NO: 527973 - RNA, 19 nt, Artificial Sequence
  Description of Artificial Sequence: Synthetic oligonucleotide
  Sense strand starting at position 3444 of SEQ ID NO: 317986
gauggacauugcuuccuga

SEQ ID NO: 527974 - RNA, 19 nt, Artificial Sequence
  Description of Artificial Sequence: Synthetic oligonucleotide
  Antisense strand to SEQ ID NO: 527973
ucaggaagcaauguccauc

SEQ ID NO: 527975 - RNA, 19 nt, Artificial Sequence
  Description of Artificial Sequence: Synthetic oligonucleotide
  Sense strand starting at position 3447 of SEQ ID NO: 317986
ggacauugcuuccugauau

SEQ ID NO: 527976 - RNA, 19 nt, Artificial Sequence
  Description of Artificial Sequence: Synthetic oligonucleotide
  Antisense strand to SEQ ID NO: 527975
auaucaggaagcaaugucc

SEQ ID NO: 527977 - RNA, 19 nt, Artificial Sequence
  Description of Artificial Sequence: Synthetic oligonucleotide
  Sense strand starting at position 3524 of SEQ ID NO: 317986
gcgucuucugucucaacuu

SEQ ID NO: 527978 - RNA, 19 nt, Artificial Sequence
  Description of Artificial Sequence: Synthetic oligonucleotide
  Antisense strand to SEQ ID NO: 527977
aaguugagacagaagacgc

SEQ ID NO: 527979 - RNA, 19 nt, Artificial Sequence
  Description of Artificial Sequence: Synthetic oligonucleotide
  Sense strand starting at position 3912 of SEQ ID NO: 317986
ugggcacauguguagaauu

SEQ ID NO: 527980 - RNA, 19 nt, Artificial Sequence
  Description of Artificial Sequence: Synthetic oligonucleotide
  Antisense strand to SEQ ID NO: 527979
aauucuacacaugugccca

SEQ ID NO: 527981 - RNA, 19 nt, Artificial Sequence
  Description of Artificial Sequence: Synthetic oligonucleotide
  Sense strand starting at position 19 of SEQ ID NO: 317987
ggauuaagauguucgcuag

SEQ ID NO: 527982 - RNA, 19 nt, Artificial Sequence
  Description of Artificial Sequence: Synthetic oligonucleotide
  Antisense strand to SEQ ID NO: 527981
cuagcgaacaucuuaaucc

SEQ ID NO: 527983 - RNA, 19 nt, Artificial Sequence
  Description of Artificial Sequence: Synthetic oligonucleotide
  Sense strand starting at position 50 of SEQ ID NO: 317987
acuucuaaggcauguggaa

SEQ ID NO: 527984 - RNA, 19 nt, Artificial Sequence
  Description of Artificial Sequence: Synthetic oligonucleotide
  Antisense strand to SEQ ID NO: 527983
uuccacaugccuuagaagu

SEQ ID NO: 527985 - RNA, 19 nt, Artificial Sequence
  Description of Artificial Sequence: Synthetic oligonucleotide
  Sense strand starting at position 106 of SEQ ID NO: 317987
ugguaugcaacuuauggua

SEQ ID NO: 527986 - RNA, 19 nt, Artificial Sequence
  Description of Artificial Sequence: Synthetic oligonucleotide
  Antisense strand to SEQ ID NO: 527985
uaccauaaguugcauacca

SEQ ID NO: 527987 - RNA, 19 nt, Artificial Sequence
  Description of Artificial Sequence: Synthetic oligonucleotide
  Sense strand starting at position 168 of SEQ ID NO: 317987
acuuccagguguuuacaau

SEQ ID NO: 527988 - RNA, 19 nt, Artificial Sequence
  Description of Artificial Sequence: Synthetic oligonucleotide
  Antisense strand to SEQ ID NO: 527987
auuguaaacaccuggaagu

SEQ ID NO: 527989 - RNA, 19 nt, Artificial Sequence
  Description of Artificial Sequence: Synthetic oligonucleotide
  Sense strand starting at position 169 of SEQ ID NO: 317987
cuuccagguguuuacaauu

SEQ ID NO: 527990 - RNA, 19 nt, Artificial Sequence
  Description of Artificial Sequence: Synthetic oligonucleotide
  Antisense strand to SEQ ID NO: 527989
aauuguaaacaccuggaag

SEQ ID NO: 527991 - RNA, 19 nt, Artificial Sequence
  Description of Artificial Sequence: Synthetic oligonucleotide
  Sense strand starting at position 201 of SEQ ID NO: 317987
gcauguuaauuugcgaauu

SEQ ID NO: 527992 - RNA, 19 nt, Artificial Sequence
  Description of Artificial Sequence: Synthetic oligonucleotide
  Antisense strand to SEQ ID NO: 527991
aauucgcaaauuaacaugc

SEQ ID NO: 527993 - RNA, 19 nt, Artificial Sequence
  Description of Artificial Sequence: Synthetic oligonucleotide
  Sense strand starting at position 218 of SEQ ID NO: 317987
uuuacaaauuugggugaga

SEQ ID NO: 527994 - RNA, 19 nt, Artificial Sequence
  Description of Artificial Sequence: Synthetic oligonucleotide
  Antisense strand to SEQ ID NO: 527993
ucucacccaaauuuguaaa

SEQ ID NO: 527995 - RNA, 19 nt, Artificial Sequence
  Description of Artificial Sequence: Synthetic oligonucleotide
  Sense strand starting at position 240 of SEQ ID NO: 317987
ucacaauuggcauagaagu

SEQ ID NO: 527996 - RNA, 19 nt, Artificial Sequence
  Description of Artificial Sequence: Synthetic oligonucleotide
  Antisense strand to SEQ ID NO: 527995
acuucuaugccaauuguga

SEQ ID NO: 527997 - RNA, 19 nt, Artificial Sequence
  Description of Artificial Sequence: Synthetic oligonucleotide
  Sense strand starting at position 312 of SEQ ID NO: 317987
agaauacguacuuggagua

SEQ ID NO: 527998 - RNA, 19 nt, Artificial Sequence
  Description of Artificial Sequence: Synthetic oligonucleotide
  Antisense strand to SEQ ID NO: 527997
uacuccaaguacguauucu

SEQ ID NO: 527999 - RNA, 19 nt, Artificial Sequence
  Description of Artificial Sequence: Synthetic oligonucleotide
  Sense strand starting at position 331 of SEQ ID NO: 317987
cuggaauuguauuugcgau

SEQ ID NO: 528000 - RNA, 19 nt, Artificial Sequence
  Description of Artificial Sequence: Synthetic oligonucleotide
  Antisense strand to SEQ ID NO: 527999
aucgcaaauacaauuccag

SEQ ID NO: 528001 - RNA, 19 nt, Artificial Sequence
  Description of Artificial Sequence: Synthetic oligonucleotide
  Sense strand starting at position 332 of SEQ ID NO: 317987
uggaauuguauuugcgaug

SEQ ID NO: 528002 - RNA, 19 nt, Artificial Sequence
  Description of Artificial Sequence: Synthetic oligonucleotide
  Antisense strand to SEQ ID NO: 528001
caucgcaaauacaauucca

SEQ ID NO: 528003 - RNA, 19 nt, Artificial Sequence
  Description of Artificial Sequence: Synthetic oligonucleotide
  Sense strand starting at position 333 of SEQ ID NO: 317987
ggaauuguauuugcgaugu

SEQ ID NO: 528004 - RNA, 19 nt, Artificial Sequence
  Description of Artificial Sequence: Synthetic oligonucleotide
  Antisense strand to SEQ ID NO: 528003
acaucgcaaauacaauucc

SEQ ID NO: 528005 - RNA, 19 nt, Artificial Sequence
  Description of Artificial Sequence: Synthetic oligonucleotide
  Sense strand starting at position 337 of SEQ ID NO: 317987
uuguauuugcgauguucuu

SEQ ID NO: 528006 - RNA, 19 nt, Artificial Sequence
  Description of Artificial Sequence: Synthetic oligonucleotide
  Antisense strand to SEQ ID NO: 528005
aagaacaucgcaaauacaa

SEQ ID NO: 528007 - RNA, 19 nt, Artificial Sequence
  Description of Artificial Sequence: Synthetic oligonucleotide
  Sense strand starting at position 509 of SEQ ID NO: 317987
cauccaaauggugguagaa

SEQ ID NO: 528008 - RNA, 19 nt, Artificial Sequence
  Description of Artificial Sequence: Synthetic oligonucleotide
  Antisense strand to SEQ ID NO: 528007
uucuaccaccauuuggaug

SEQ ID NO: 528009 - RNA, 19 nt, Artificial Sequence
  Description of Artificial Sequence: Synthetic oligonucleotide
  Sense strand starting at position 521 of SEQ ID NO: 317987
gguagaauuugccacaaua

SEQ ID NO: 528010 - RNA, 19 nt, Artificial Sequence
  Description of Artificial Sequence: Synthetic oligonucleotide
  Antisense strand to SEQ ID NO: 528009
uauuguggcaaauucuacc

SEQ ID NO: 528011 - RNA, 19 nt, Artificial Sequence
  Description of Artificial Sequence: Synthetic oligonucleotide
  Sense strand starting at position 680 of SEQ ID NO: 317987
cuggaagagucagccuaca

SEQ ID NO: 528012 - RNA, 19 nt, Artificial Sequence
  Description of Artificial Sequence: Synthetic oligonucleotide
  Antisense strand to SEQ ID NO: 528011
uguaggcugacucuuccag

SEQ ID NO: 528013 - RNA, 19 nt, Artificial Sequence
  Description of Artificial Sequence: Synthetic oligonucleotide
  Sense strand starting at position 696 of SEQ ID NO: 317987
acacucauagugcaagaua

SEQ ID NO: 528014 - RNA, 19 nt, Artificial Sequence
  Description of Artificial Sequence: Synthetic oligonucleotide
  Antisense strand to SEQ ID NO: 528013
uaucuugcacuaugagugu

SEQ ID NO: 528015 - RNA, 19 nt, Artificial Sequence
  Description of Artificial Sequence: Synthetic oligonucleotide
  Sense strand starting at position 836 of SEQ ID NO: 317987
augagagcuuaguccuaga

SEQ ID NO: 528016 - RNA, 19 nt, Artificial Sequence
  Description of Artificial Sequence: Synthetic oligonucleotide
  Antisense strand to SEQ ID NO: 528015
ucuaggacuaagcucucau

SEQ ID NO: 528017 - RNA, 19 nt, Artificial Sequence
  Description of Artificial Sequence: Synthetic oligonucleotide
  Sense strand starting at position 907 of SEQ ID NO: 317987
cgagcuguacauugacaac

SEQ ID NO: 528018 - RNA, 19 nt, Artificial Sequence
  Description of Artificial Sequence: Synthetic oligonucleotide
  Antisense strand to SEQ ID NO: 528017
guugucaauguacagcucg

SEQ ID NO: 528019 - RNA, 19 nt, Artificial Sequence
  Description of Artificial Sequence: Synthetic oligonucleotide
  Sense strand starting at position 1134 of SEQ ID NO: 317987
ugacgaaacguuuguauua

SEQ ID NO: 528020 - RNA, 19 nt, Artificial Sequence
  Description of Artificial Sequence: Synthetic oligonucleotide
  Antisense strand to SEQ ID NO: 528019
uaauacaaacguuucguca

SEQ ID NO: 528021 - RNA, 19 nt, Artificial Sequence
  Description of Artificial Sequence: Synthetic oligonucleotide
  Sense strand starting at position 1135 of SEQ ID NO: 317987
gacgaaacguuuguauuau

SEQ ID NO: 528022 - RNA, 19 nt, Artificial Sequence
  Description of Artificial Sequence: Synthetic oligonucleotide
  Antisense strand to SEQ ID NO: 528021
auaauacaaacguuucguc

SEQ ID NO: 528023 - RNA, 19 nt, Artificial Sequence
  Description of Artificial Sequence: Synthetic oligonucleotide
  Sense strand starting at position 1144 of SEQ ID NO: 317987
uuuguauuaucucuuggga

SEQ ID NO: 528024 - RNA, 19 nt, Artificial Sequence
  Description of Artificial Sequence: Synthetic oligonucleotide
  Antisense strand to SEQ ID NO: 528023
ucccaagagauaauacaaa

SEQ ID NO: 528025 - RNA, 19 nt, Artificial Sequence
  Description of Artificial Sequence: Synthetic oligonucleotide
  Sense strand starting at position 1147 of SEQ ID NO: 317987
guauuaucucuugggaacg

SEQ ID NO: 528026 - RNA, 19 nt, Artificial Sequence
  Description of Artificial Sequence: Synthetic oligonucleotide
  Antisense strand to SEQ ID NO: 528025
cguucccaagagauaauac

SEQ ID NO: 528027 - RNA, 19 nt, Artificial Sequence
  Description of Artificial Sequence: Synthetic oligonucleotide
  Sense strand starting at position 1213 of SEQ ID NO: 317987
cgaugugugucccugauuu

SEQ ID NO: 528028 - RNA, 19 nt, Artificial Sequence
  Description of Artificial Sequence: Synthetic oligonucleotide
  Antisense strand to SEQ ID NO: 528027
aaaucagggacacacaucg

SEQ ID NO: 528029 - RNA, 19 nt, Artificial Sequence
  Description of Artificial Sequence: Synthetic oligonucleotide
  Sense strand starting at position 1666 of SEQ ID NO: 317987
ggcgucaucccuuagagac

SEQ ID NO: 528030 - RNA, 19 nt, Artificial Sequence
  Description of Artificial Sequence: Synthetic oligonucleotide
  Antisense strand to SEQ ID NO: 528029
gucucuaagggaugacgcc

SEQ ID NO: 528031 - RNA, 19 nt, Artificial Sequence
  Description of Artificial Sequence: Synthetic oligonucleotide
  Sense strand starting at position 1694 of SEQ ID NO: 317987
augguaucucccggaaguu

SEQ ID NO: 528032 - RNA, 19 nt, Artificial Sequence
  Description of Artificial Sequence: Synthetic oligonucleotide
  Antisense strand to SEQ ID NO: 528031
aacuuccgggagauaccau

SEQ ID NO: 528033 - RNA, 19 nt, Artificial Sequence
  Description of Artificial Sequence: Synthetic oligonucleotide
  Sense strand starting at position 1695 of SEQ ID NO: 317987
ugguaucucccggaaguua

SEQ ID NO: 528034 - RNA, 19 nt, Artificial Sequence
  Description of Artificial Sequence: Synthetic oligonucleotide
  Antisense strand to SEQ ID NO: 528033
uaacuuccgggagauacca

SEQ ID NO: 528035 - RNA, 19 nt, Artificial Sequence
  Description of Artificial Sequence: Synthetic oligonucleotide
  Sense strand starting at position 1738 of SEQ ID NO: 317987
ccaaccuugccggaaauga

SEQ ID NO: 528036 - RNA, 19 nt, Artificial Sequence
  Description of Artificial Sequence: Synthetic oligonucleotide
  Antisense strand to SEQ ID NO: 528035
ucauuuccggcaagguugg

SEQ ID NO: 528037 - RNA, 19 nt, Artificial Sequence
  Description of Artificial Sequence: Synthetic oligonucleotide
  Sense strand starting at position 2294 of SEQ ID NO: 317987
cccuuaagcuggucauauu

SEQ ID NO: 528038 - RNA, 19 nt, Artificial Sequence
  Description of Artificial Sequence: Synthetic oligonucleotide
  Antisense strand to SEQ ID NO: 528037
aauaugaccagcuuaaggg

SEQ ID NO: 528039 - RNA, 19 nt, Artificial Sequence
  Description of Artificial Sequence: Synthetic oligonucleotide
  Sense strand starting at position 2295 of SEQ ID NO: 317987
ccuuaagcuggucauauua

SEQ ID NO: 528040 - RNA, 19 nt, Artificial Sequence
  Description of Artificial Sequence: Synthetic oligonucleotide
  Antisense strand to SEQ ID NO: 528039
uaauaugaccagcuuaagg

SEQ ID NO: 528041 - RNA, 19 nt, Artificial Sequence
  Description of Artificial Sequence: Synthetic oligonucleotide
  Sense strand starting at position 2378 of SEQ ID NO: 317987
gggugauuccagcauguuc

SEQ ID NO: 528042 - RNA, 19 nt, Artificial Sequence
  Description of Artificial Sequence: Synthetic oligonucleotide
  Antisense strand to SEQ ID NO: 528041
gaacaugcuggaaucaccc

SEQ ID NO: 528043 - RNA, 19 nt, Artificial Sequence
  Description of Artificial Sequence: Synthetic oligonucleotide
  Sense strand starting at position 2417 of SEQ ID NO: 317987
aguucuuaccaguggugaa

SEQ ID NO: 528044 - RNA, 19 nt, Artificial Sequence
  Description of Artificial Sequence: Synthetic oligonucleotide
  Antisense strand to SEQ ID NO: 528043
uucaccacugguaagaacu

SEQ ID NO: 528045 - RNA, 19 nt, Artificial Sequence
  Description of Artificial Sequence: Synthetic oligonucleotide
  Sense strand starting at position 2418 of SEQ ID NO: 317987
guucuuaccaguggugaaa

SEQ ID NO: 528046 - RNA, 19 nt, Artificial Sequence
  Description of Artificial Sequence: Synthetic oligonucleotide
  Antisense strand to SEQ ID NO: 528045
uuucaccacugguaagaac

SEQ ID NO: 528047 - RNA, 19 nt, Artificial Sequence
  Description of Artificial Sequence: Synthetic oligonucleotide
  Sense strand starting at position 2454 of SEQ ID NO: 317987
gcagcagauagugaugaua

SEQ ID NO: 528048 - RNA, 19 nt, Artificial Sequence
  Description of Artificial Sequence: Synthetic oligonucleotide
  Antisense strand to SEQ ID NO: 528047
uaucaucacuaucugcugc

SEQ ID NO: 528049 - RNA, 19 nt, Artificial Sequence
  Description of Artificial Sequence: Synthetic oligonucleotide
  Sense strand starting at position 2457 of SEQ ID NO: 317987
gcagauagugaugauaguu

SEQ ID NO: 528050 - RNA, 19 nt, Artificial Sequence
  Description of Artificial Sequence: Synthetic oligonucleotide
  Antisense strand to SEQ ID NO: 528049
aacuaucaucacuaucugc

SEQ ID NO: 528051 - RNA, 19 nt, Artificial Sequence
  Description of Artificial Sequence: Synthetic oligonucleotide
  Sense strand starting at position 2480 of SEQ ID NO: 317987
ggccuuggauaugcuaaga

SEQ ID NO: 528052 - RNA, 19 nt, Artificial Sequence
  Description of Artificial Sequence: Synthetic oligonucleotide
  Antisense strand to SEQ ID NO: 528051
ucuuagcauauccaaggcc

SEQ ID NO: 528053 - RNA, 19 nt, Artificial Sequence
  Description of Artificial Sequence: Synthetic oligonucleotide
  Sense strand starting at position 2504 of SEQ ID NO: 317987
ugaaguguaugcuuuaaag

SEQ ID NO: 528054 - RNA, 19 nt, Artificial Sequence
  Description of Artificial Sequence: Synthetic oligonucleotide
  Antisense strand to SEQ ID NO: 528053
cuuuaaagcauacacuuca

SEQ ID NO: 528055 - RNA, 19 nt, Artificial Sequence
  Description of Artificial Sequence: Synthetic oligonucleotide
  Sense strand starting at position 2506 of SEQ ID NO: 317987
aaguguaugcuuuaaagaa

SEQ ID NO: 528056 - RNA, 19 nt, Artificial Sequence
  Description of Artificial Sequence: Synthetic oligonucleotide
  Antisense strand to SEQ ID NO: 528055
uucuuuaaagcauacacuu

SEQ ID NO: 528057 - RNA, 19 nt, Artificial Sequence
  Description of Artificial Sequence: Synthetic oligonucleotide
  Sense strand starting at position 2566 of SEQ ID NO: 317987
auaugugugcucucuguuu

SEQ ID NO: 528058 - RNA, 19 nt, Artificial Sequence
  Description of Artificial Sequence: Synthetic oligonucleotide
  Antisense strand to SEQ ID NO: 528057
aaacagagagcacacauau

SEQ ID NO: 528059 - RNA, 19 nt, Artificial Sequence
  Description of Artificial Sequence: Synthetic oligonucleotide
  Sense strand starting at position 2597 of SEQ ID NO: 317987
uuuaaagaguuuguagugu

SEQ ID NO: 528060 - RNA, 19 nt, Artificial Sequence
  Description of Artificial Sequence: Synthetic oligonucleotide
  Antisense strand to SEQ ID NO: 528059
acacuacaaacucuuuaaa

SEQ ID NO: 528061 - RNA, 19 nt, Artificial Sequence
  Description of Artificial Sequence: Synthetic oligonucleotide
  Sense strand starting at position 66 of SEQ ID NO: 317988
cggucacuucuguaaucag

SEQ ID NO: 528062 - RNA, 19 nt, Artificial Sequence
  Description of Artificial Sequence: Synthetic oligonucleotide
  Antisense strand to SEQ ID NO: 528061
cugauuacagaagugaccg

SEQ ID NO: 528063 - RNA, 19 nt, Artificial Sequence
  Description of Artificial Sequence: Synthetic oligonucleotide
  Sense strand starting at position 77 of SEQ ID NO: 317988
guaaucaggccucaaguau

SEQ ID NO: 528064 - RNA, 19 nt, Artificial Sequence
  Description of Artificial Sequence: Synthetic oligonucleotide
  Antisense strand to SEQ ID NO: 528063
auacuugaggccugauuac

SEQ ID NO: 528065 - RNA, 19 nt, Artificial Sequence
  Description of Artificial Sequence: Synthetic oligonucleotide
  Sense strand starting at position 90 of SEQ ID NO: 317988
aaguaugccuagcugaaga

SEQ ID NO: 528066 - RNA, 19 nt, Artificial Sequence
  Description of Artificial Sequence: Synthetic oligonucleotide
  Antisense strand to SEQ ID NO: 528065
ucuucagcuaggcauacuu

SEQ ID NO: 528067 - RNA, 19 nt, Artificial Sequence
  Description of Artificial Sequence: Synthetic oligonucleotide
  Sense strand starting at position 92 of SEQ ID NO: 317988
guaugccuagcugaagauu

SEQ ID NO: 528068 - RNA, 19 nt, Artificial Sequence
  Description of Artificial Sequence: Synthetic oligonucleotide
  Antisense strand to SEQ ID NO: 528067
aaucuucagcuaggcauac

SEQ ID NO: 528069 - RNA, 19 nt, Artificial Sequence
  Description of Artificial Sequence: Synthetic oligonucleotide
  Sense strand starting at position 246 of SEQ ID NO: 317988
ggacuaacuauguagcuga

SEQ ID NO: 528070 - RNA, 19 nt, Artificial Sequence
  Description of Artificial Sequence: Synthetic oligonucleotide
  Antisense strand to SEQ ID NO: 528069
ucagcuacauaguuagucc

SEQ ID NO: 528071 - RNA, 19 nt, Artificial Sequence
  Description of Artificial Sequence: Synthetic oligonucleotide
  Sense strand starting at position 324 of SEQ ID NO: 317988
ggauuaagauguucgcuag

SEQ ID NO: 528072 - RNA, 19 nt, Artificial Sequence
  Description of Artificial Sequence: Synthetic oligonucleotide
  Antisense strand to SEQ ID NO: 528071
cuagcgaacaucuuaaucc

SEQ ID NO: 528073 - RNA, 19 nt, Artificial Sequence
  Description of Artificial Sequence: Synthetic oligonucleotide
  Sense strand starting at position 355 of SEQ ID NO: 317988
acuucuaaggcauguggaa

SEQ ID NO: 528074 - RNA, 19 nt, Artificial Sequence
  Description of Artificial Sequence: Synthetic oligonucleotide
  Antisense strand to SEQ ID NO: 528073
uuccacaugccuuagaagu

SEQ ID NO: 528075 - RNA, 19 nt, Artificial Sequence
  Description of Artificial Sequence: Synthetic oligonucleotide
  Sense strand starting at position 411 of SEQ ID NO: 317988
ugguaugcaacuuauggua

SEQ ID NO: 528076 - RNA, 19 nt, Artificial Sequence
  Description of Artificial Sequence: Synthetic oligonucleotide
  Antisense strand to SEQ ID NO: 528075
uaccauaaguugcauacca

SEQ ID NO: 528077 - RNA, 19 nt, Artificial Sequence
  Description of Artificial Sequence: Synthetic oligonucleotide
  Sense strand starting at position 473 of SEQ ID NO: 317988
acuuccagguguuuacaau

SEQ ID NO: 528078 - RNA, 19 nt, Artificial Sequence
  Description of Artificial Sequence: Synthetic oligonucleotide
  Antisense strand to SEQ ID NO: 528077
auuguaaacaccuggaagu

SEQ ID NO: 528079 - RNA, 19 nt, Artificial Sequence
  Description of Artificial Sequence: Synthetic oligonucleotide
  Sense strand starting at position 474 of SEQ ID NO: 317988
cuuccagguguuuacaauu

SEQ ID NO: 528080 - RNA, 19 nt, Artificial Sequence
  Description of Artificial Sequence: Synthetic oligonucleotide
  Antisense strand to SEQ ID NO: 528079
aauuguaaacaccuggaag

SEQ ID NO: 528081 - RNA, 19 nt, Artificial Sequence
  Description of Artificial Sequence: Synthetic oligonucleotide
  Sense strand starting at position 506 of SEQ ID NO: 317988
gcauguuaauuugcgaauu

SEQ ID NO: 528082 - RNA, 19 nt, Artificial Sequence
  Description of Artificial Sequence: Synthetic oligonucleotide
  Antisense strand to SEQ ID NO: 528081
aauucgcaaauuaacaugc

SEQ ID NO: 528083 - RNA, 19 nt, Artificial Sequence
  Description of Artificial Sequence: Synthetic oligonucleotide
  Sense strand starting at position 523 of SEQ ID NO: 317988
uuuacaaauuugggugaga

SEQ ID NO: 528084 - RNA, 19 nt, Artificial Sequence
  Description of Artificial Sequence: Synthetic oligonucleotide
  Antisense strand to SEQ ID NO: 528083
ucucacccaaauuuguaaa

SEQ ID NO: 528085 - RNA, 19 nt, Artificial Sequence
  Description of Artificial Sequence: Synthetic oligonucleotide
  Sense strand starting at position 545 of SEQ ID NO: 317988
ucacaauuggcauagaagu

SEQ ID NO: 528086 - RNA, 19 nt, Artificial Sequence
  Description of Artificial Sequence: Synthetic oligonucleotide
  Antisense strand to SEQ ID NO: 528085
acuucuaugccaauuguga

SEQ ID NO: 528087 - RNA, 19 nt, Artificial Sequence
  Description of Artificial Sequence: Synthetic oligonucleotide
  Sense strand starting at position 617 of SEQ ID NO: 317988
agaauacguacuuggagua

SEQ ID NO: 528088 - RNA, 19 nt, Artificial Sequence
  Description of Artificial Sequence: Synthetic oligonucleotide
  Antisense strand to SEQ ID NO: 528087
uacuccaaguacguauucu

SEQ ID NO: 528089 - RNA, 19 nt, Artificial Sequence
  Description of Artificial Sequence: Synthetic oligonucleotide
  Sense strand starting at position 636 of SEQ ID NO: 317988
cuggaauuguauuugcgau

SEQ ID NO: 528090 - RNA, 19 nt, Artificial Sequence
  Description of Artificial Sequence: Synthetic oligonucleotide
  Antisense strand to SEQ ID NO: 528089
aucgcaaauacaauuccag

SEQ ID NO: 528091 - RNA, 19 nt, Artificial Sequence
  Description of Artificial Sequence: Synthetic oligonucleotide
  Sense strand starting at position 637 of SEQ ID NO: 317988
uggaauuguauuugcgaug

SEQ ID NO: 528092 - RNA, 19 nt, Artificial Sequence
  Description of Artificial Sequence: Synthetic oligonucleotide
  Antisense strand to SEQ ID NO: 528091
caucgcaaauacaauucca

SEQ ID NO: 528093 - RNA, 19 nt, Artificial Sequence
  Description of Artificial Sequence: Synthetic oligonucleotide
  Sense strand starting at position 638 of SEQ ID NO: 317988
ggaauuguauuugcgaugu

SEQ ID NO: 528094 - RNA, 19 nt, Artificial Sequence
  Description of Artificial Sequence: Synthetic oligonucleotide
  Antisense strand to SEQ ID NO: 528093
acaucgcaaauacaauucc

SEQ ID NO: 528095 - RNA, 19 nt, Artificial Sequence
  Description of Artificial Sequence: Synthetic oligonucleotide
  Sense strand starting at position 642 of SEQ ID NO: 317988
uuguauuugcgauguucuu

SEQ ID NO: 528096 - RNA, 19 nt, Artificial Sequence
  Description of Artificial Sequence: Synthetic oligonucleotide
  Antisense strand to SEQ ID NO: 528095
aagaacaucgcaaauacaa

SEQ ID NO: 528097 - RNA, 19 nt, Artificial Sequence
  Description of Artificial Sequence: Synthetic oligonucleotide
  Sense strand starting at position 814 of SEQ ID NO: 317988
cauccaaauggugguagaa

SEQ ID NO: 528098 - RNA, 19 nt, Artificial Sequence
  Description of Artificial Sequence: Synthetic oligonucleotide
  Antisense strand to SEQ ID NO: 528097
uucuaccaccauuuggaug

SEQ ID NO: 528099 - RNA, 19 nt, Artificial Sequence
  Description of Artificial Sequence: Synthetic oligonucleotide
  Sense strand starting at position 826 of SEQ ID NO: 317988
gguagaauuugccacaaua

SEQ ID NO: 528100 - RNA, 19 nt, Artificial Sequence
  Description of Artificial Sequence: Synthetic oligonucleotide
  Antisense strand to SEQ ID NO: 528099
uauuguggcaaauucuacc

SEQ ID NO: 528101 - RNA, 19 nt, Artificial Sequence
  Description of Artificial Sequence: Synthetic oligonucleotide
  Sense strand starting at position 985 of SEQ ID NO: 317988
cuggaagagucagccuaca

SEQ ID NO: 528102 - RNA, 19 nt, Artificial Sequence
  Description of Artificial Sequence: Synthetic oligonucleotide
  Antisense strand to SEQ ID NO: 528101
uguaggcugacucuuccag

SEQ ID NO: 528103 - RNA, 19 nt, Artificial Sequence
  Description of Artificial Sequence: Synthetic oligonucleotide
  Sense strand starting at position 1001 of SEQ ID NO: 317988
acacucauagugcaagaua

SEQ ID NO: 528104 - RNA, 19 nt, Artificial Sequence
  Description of Artificial Sequence: Synthetic oligonucleotide
  Antisense strand to SEQ ID NO: 528103
uaucuugcacuaugagugu

SEQ ID NO: 528105 - RNA, 19 nt, Artificial Sequence
  Description of Artificial Sequence: Synthetic oligonucleotide
  Sense strand starting at position 1141 of SEQ ID NO: 317988
augagagcuuaguccuaga

SEQ ID NO: 528106 - RNA, 19 nt, Artificial Sequence
  Description of Artificial Sequence: Synthetic oligonucleotide
  Antisense strand to SEQ ID NO: 528105
ucuaggacuaagcucucau

SEQ ID NO: 528107 - RNA, 19 nt, Artificial Sequence
  Description of Artificial Sequence: Synthetic oligonucleotide
  Sense strand starting at position 1212 of SEQ ID NO: 317988
cgagcuguacauugacaac

SEQ ID NO: 528108 - RNA, 19 nt, Artificial Sequence
  Description of Artificial Sequence: Synthetic oligonucleotide
  Antisense strand to SEQ ID NO: 528107
guugucaauguacagcucg

SEQ ID NO: 528109 - RNA, 19 nt, Artificial Sequence
  Description of Artificial Sequence: Synthetic oligonucleotide
  Sense strand starting at position 1449 of SEQ ID NO: 317988
uuuguauuaucucuuggga

SEQ ID NO: 528110 - RNA, 19 nt, Artificial Sequence
  Description of Artificial Sequence: Synthetic oligonucleotide
  Antisense strand to SEQ ID NO: 528109
ucccaagagauaauacaaa

SEQ ID NO: 528111 - RNA, 19 nt, Artificial Sequence
  Description of Artificial Sequence: Synthetic oligonucleotide
  Sense strand starting at position 1452 of SEQ ID NO: 317988
guauuaucucuugggaacg

SEQ ID NO: 528112 - RNA, 19 nt, Artificial Sequence
  Description of Artificial Sequence: Synthetic oligonucleotide
  Antisense strand to SEQ ID NO: 528111
cguucccaagagauaauac

SEQ ID NO: 528113 - RNA, 19 nt, Artificial Sequence
  Description of Artificial Sequence: Synthetic oligonucleotide
  Sense strand starting at position 1518 of SEQ ID NO: 317988
cgaugugugucccugauuu

SEQ ID NO: 528114 - RNA, 19 nt, Artificial Sequence
  Description of Artificial Sequence: Synthetic oligonucleotide
  Antisense strand to SEQ ID NO: 528113
aaaucagggacacacaucg

SEQ ID NO: 528115 - RNA, 19 nt, Artificial Sequence
  Description of Artificial Sequence: Synthetic oligonucleotide
  Sense strand starting at position 1971 of SEQ ID NO: 317988
ggcgucaucccuuagagac

SEQ ID NO: 528116 - RNA, 19 nt, Artificial Sequence
  Description of Artificial Sequence: Synthetic oligonucleotide
  Antisense strand to SEQ ID NO: 528115
gucucuaagggaugacgcc

SEQ ID NO: 528117 - RNA, 19 nt, Artificial Sequence
  Description of Artificial Sequence: Synthetic oligonucleotide
  Sense strand starting at position 2000 of SEQ ID NO: 317988
ugguaucucccggaaguua

SEQ ID NO: 528118 - RNA, 19 nt, Artificial Sequence
  Description of Artificial Sequence: Synthetic oligonucleotide
  Antisense strand to SEQ ID NO: 528117
uaacuuccgggagauacca

SEQ ID NO: 528119 - RNA, 19 nt, Artificial Sequence
  Description of Artificial Sequence: Synthetic oligonucleotide
  Sense strand starting at position 2043 of SEQ ID NO: 317988
ccaaccuugccggaaauga

SEQ ID NO: 528120 - RNA, 19 nt, Artificial Sequence
  Description of Artificial Sequence: Synthetic oligonucleotide
  Antisense strand to SEQ ID NO: 528119
ucauuuccggcaagguugg

SEQ ID NO: 528121 - RNA, 19 nt, Artificial Sequence
  Description of Artificial Sequence: Synthetic oligonucleotide
  Sense strand starting at position 2600 of SEQ ID NO: 317988
ccuuaagcuggucauauua

SEQ ID NO: 528122 - RNA, 19 nt, Artificial Sequence
  Description of Artificial Sequence: Synthetic oligonucleotide
  Antisense strand to SEQ ID NO: 528121
uaauaugaccagcuuaagg

SEQ ID NO: 528123 - RNA, 19 nt, Artificial Sequence
  Description of Artificial Sequence: Synthetic oligonucleotide
  Sense strand starting at position 2683 of SEQ ID NO: 317988
gggugauuccagcauguuc

SEQ ID NO: 528124 - RNA, 19 nt, Artificial Sequence
  Description of Artificial Sequence: Synthetic oligonucleotide
  Antisense strand to SEQ ID NO: 528123
gaacaugcuggaaucaccc

SEQ ID NO: 528125 - RNA, 19 nt, Artificial Sequence
  Description of Artificial Sequence: Synthetic oligonucleotide
  Sense strand starting at position 2722 of SEQ ID NO: 317988
aguucuuaccaguggugaa

SEQ ID NO: 528126 - RNA, 19 nt, Artificial Sequence
  Description of Artificial Sequence: Synthetic oligonucleotide
  Antisense strand to SEQ ID NO: 528125
uucaccacugguaagaacu

SEQ ID NO: 528127 - RNA, 19 nt, Artificial Sequence
  Description of Artificial Sequence: Synthetic oligonucleotide
  Sense strand starting at position 2723 of SEQ ID NO: 317988
guucuuaccaguggugaaa

SEQ ID NO: 528128 - RNA, 19 nt, Artificial Sequence
  Description of Artificial Sequence: Synthetic oligonucleotide
  Antisense strand to SEQ ID NO: 528127
uuucaccacugguaagaac

SEQ ID NO: 528129 - RNA, 19 nt, Artificial Sequence
  Description of Artificial Sequence: Synthetic oligonucleotide
  Sense strand starting at position 2759 of SEQ ID NO: 317988
gcagcagauagugaugaua

SEQ ID NO: 528130 - RNA, 19 nt, Artificial Sequence
  Description of Artificial Sequence: Synthetic oligonucleotide
  Antisense strand to SEQ ID NO: 528129
uaucaucacuaucugcugc

SEQ ID NO: 528131 - RNA, 19 nt, Artificial Sequence
  Description of Artificial Sequence: Synthetic oligonucleotide
  Sense strand starting at position 2762 of SEQ ID NO: 317988
gcagauagugaugauaguu

SEQ ID NO: 528132 - RNA, 19 nt, Artificial Sequence
  Description of Artificial Sequence: Synthetic oligonucleotide
  Antisense strand to SEQ ID NO: 528131
aacuaucaucacuaucugc

SEQ ID NO: 528133 - RNA, 19 nt, Artificial Sequence
  Description of Artificial Sequence: Synthetic oligonucleotide
  Sense strand starting at position 2785 of SEQ ID NO: 317988
ggccuuggauaugcuaaga

SEQ ID NO: 528134 - RNA, 19 nt, Artificial Sequence
  Description of Artificial Sequence: Synthetic oligonucleotide
  Antisense strand to SEQ ID NO: 528133
ucuuagcauauccaaggcc

SEQ ID NO: 528135 - RNA, 19 nt, Artificial Sequence
  Description of Artificial Sequence: Synthetic oligonucleotide
  Sense strand starting at position 2809 of SEQ ID NO: 317988
ugaaguguaugcuuuaaag

SEQ ID NO: 528136 - RNA, 19 nt, Artificial Sequence
  Description of Artificial Sequence: Synthetic oligonucleotide
  Antisense strand to SEQ ID NO: 528135
cuuuaaagcauacacuuca

SEQ ID NO: 528137 - RNA, 19 nt, Artificial Sequence
  Description of Artificial Sequence: Synthetic oligonucleotide
  Sense strand starting at position 2811 of SEQ ID NO: 317988
aaguguaugcuuuaaagaa

SEQ ID NO: 528138 - RNA, 19 nt, Artificial Sequence
  Description of Artificial Sequence: Synthetic oligonucleotide
  Antisense strand to SEQ ID NO: 528137
uucuuuaaagcauacacuu

SEQ ID NO: 528139 - RNA, 19 nt, Artificial Sequence
  Description of Artificial Sequence: Synthetic oligonucleotide
  Sense strand starting at position 2871 of SEQ ID NO: 317988
auaugugugcucucuguuu

SEQ ID NO: 528140 - RNA, 19 nt, Artificial Sequence
  Description of Artificial Sequence: Synthetic oligonucleotide
  Antisense strand to SEQ ID NO: 528139
aaacagagagcacacauau

SEQ ID NO: 528141 - RNA, 19 nt, Artificial Sequence
  Description of Artificial Sequence: Synthetic oligonucleotide
  Sense strand starting at position 315 of SEQ ID NO: 317989
cggucacuucuguaaucag

SEQ ID NO: 528142 - RNA, 19 nt, Artificial Sequence
  Description of Artificial Sequence: Synthetic oligonucleotide
  Antisense strand to SEQ ID NO: 528141
cugauuacagaagugaccg

SEQ ID NO: 528143 - RNA, 19 nt, Artificial Sequence
  Description of Artificial Sequence: Synthetic oligonucleotide
  Sense strand starting at position 326 of SEQ ID NO: 317989
guaaucaggccucaaguau

SEQ ID NO: 528144 - RNA, 19 nt, Artificial Sequence
  Description of Artificial Sequence: Synthetic oligonucleotide
  Antisense strand to SEQ ID NO: 528143
auacuugaggccugauuac

SEQ ID NO: 528145 - RNA, 19 nt, Artificial Sequence
  Description of Artificial Sequence: Synthetic oligonucleotide
  Sense strand starting at position 339 of SEQ ID NO: 317989
aaguaugccuagcugaaga

SEQ ID NO: 528146 - RNA, 19 nt, Artificial Sequence
  Description of Artificial Sequence: Synthetic oligonucleotide
  Antisense strand to SEQ ID NO: 528145
ucuucagcuaggcauacuu

SEQ ID NO: 528147 - RNA, 19 nt, Artificial Sequence
  Description of Artificial Sequence: Synthetic oligonucleotide
  Sense strand starting at position 341 of SEQ ID NO: 317989
guaugccuagcugaagauu

SEQ ID NO: 528148 - RNA, 19 nt, Artificial Sequence
  Description of Artificial Sequence: Synthetic oligonucleotide
  Antisense strand to SEQ ID NO: 528147
aaucuucagcuaggcauac

SEQ ID NO: 528149 - RNA, 19 nt, Artificial Sequence
  Description of Artificial Sequence: Synthetic oligonucleotide
  Sense strand starting at position 495 of SEQ ID NO: 317989
ggacuaacuauguagcuga

SEQ ID NO: 528150 - RNA, 19 nt, Artificial Sequence
  Description of Artificial Sequence: Synthetic oligonucleotide
  Antisense strand to SEQ ID NO: 528149
ucagcuacauaguuagucc

SEQ ID NO: 528151 - RNA, 19 nt, Artificial Sequence
  Description of Artificial Sequence: Synthetic oligonucleotide
  Sense strand starting at position 573 of SEQ ID NO: 317989
ggauuaagauguucgcuag

SEQ ID NO: 528152 - RNA, 19 nt, Artificial Sequence
  Description of Artificial Sequence: Synthetic oligonucleotide
  Antisense strand to SEQ ID NO: 528151
cuagcgaacaucuuaaucc

SEQ ID NO: 528153 - RNA, 19 nt, Artificial Sequence
  Description of Artificial Sequence: Synthetic oligonucleotide
  Sense strand starting at position 604 of SEQ ID NO: 317989
acuucuaaggcauguggaa

SEQ ID NO: 528154 - RNA, 19 nt, Artificial Sequence
  Description of Artificial Sequence: Synthetic oligonucleotide
  Antisense strand to SEQ ID NO: 528153
uuccacaugccuuagaagu

SEQ ID NO: 528155 - RNA, 19 nt, Artificial Sequence
  Description of Artificial Sequence: Synthetic oligonucleotide
  Sense strand starting at position 660 of SEQ ID NO: 317989
ugguaugcaacuuauggua

SEQ ID NO: 528156 - RNA, 19 nt, Artificial Sequence
  Description of Artificial Sequence: Synthetic oligonucleotide
  Antisense strand to SEQ ID NO: 528155
uaccauaaguugcauacca

SEQ ID NO: 528157 - RNA, 19 nt, Artificial Sequence
  Description of Artificial Sequence: Synthetic oligonucleotide
  Sense strand starting at position 722 of SEQ ID NO: 317989
acuuccagguguuuacaau

SEQ ID NO: 528158 - RNA, 19 nt, Artificial Sequence
  Description of Artificial Sequence: Synthetic oligonucleotide
  Antisense strand to SEQ ID NO: 528157
auuguaaacaccuggaagu

SEQ ID NO: 528159 - RNA, 19 nt, Artificial Sequence
  Description of Artificial Sequence: Synthetic oligonucleotide
  Sense strand starting at position 723 of SEQ ID NO: 317989
cuuccagguguuuacaauu

SEQ ID NO: 528160 - RNA, 19 nt, Artificial Sequence
  Description of Artificial Sequence: Synthetic oligonucleotide
  Antisense strand to SEQ ID NO: 528159
aauuguaaacaccuggaag

SEQ ID NO: 528161 - RNA, 19 nt, Artificial Sequence
  Description of Artificial Sequence: Synthetic oligonucleotide
  Sense strand starting at position 755 of SEQ ID NO: 317989
gcauguuaauuugcgaauu

SEQ ID NO: 528162 - RNA, 19 nt, Artificial Sequence
  Description of Artificial Sequence: Synthetic oligonucleotide
  Antisense strand to SEQ ID NO: 528161
aauucgcaaauuaacaugc

SEQ ID NO: 528163 - RNA, 19 nt, Artificial Sequence
  Description of Artificial Sequence: Synthetic oligonucleotide
  Sense strand starting at position 772 of SEQ ID NO: 317989
uuuacaaauuugggugaga

SEQ ID NO: 528164 - RNA, 19 nt, Artificial Sequence
  Description of Artificial Sequence: Synthetic oligonucleotide
  Antisense strand to SEQ ID NO: 528163
ucucacccaaauuuguaaa

SEQ ID NO: 528165 - RNA, 19 nt, Artificial Sequence
  Description of Artificial Sequence: Synthetic oligonucleotide
  Sense strand starting at position 794 of SEQ ID NO: 317989
ucacaauuggcauagaagu

SEQ ID NO: 528166 - RNA, 19 nt, Artificial Sequence
  Description of Artificial Sequence: Synthetic oligonucleotide
  Antisense strand to SEQ ID NO: 528165
acuucuaugccaauuguga

SEQ ID NO: 528167 - RNA, 19 nt, Artificial Sequence
  Description of Artificial Sequence: Synthetic oligonucleotide
  Sense strand starting at position 866 of SEQ ID NO: 317989
agaauacguacuuggagua

SEQ ID NO: 528168 - RNA, 19 nt, Artificial Sequence
  Description of Artificial Sequence: Synthetic oligonucleotide
  Antisense strand to SEQ ID NO: 528167
uacuccaaguacguauucu

SEQ ID NO: 528169 - RNA, 19 nt, Artificial Sequence
  Description of Artificial Sequence: Synthetic oligonucleotide
  Sense strand starting at position 885 of SEQ ID NO: 317989
cuggaauuguauuugcgau

SEQ ID NO: 528170 - RNA, 19 nt, Artificial Sequence
  Description of Artificial Sequence: Synthetic oligonucleotide
  Antisense strand to SEQ ID NO: 528169
aucgcaaauacaauuccag

SEQ ID NO: 528171 - RNA, 19 nt, Artificial Sequence
  Description of Artificial Sequence: Synthetic oligonucleotide
  Sense strand starting at position 886 of SEQ ID NO: 317989
uggaauuguauuugcgaug

SEQ ID NO: 528172 - RNA, 19 nt, Artificial Sequence
  Description of Artificial Sequence: Synthetic oligonucleotide
  Antisense strand to SEQ ID NO: 528171
caucgcaaauacaauucca

SEQ ID NO: 528173 - RNA, 19 nt, Artificial Sequence
  Description of Artificial Sequence: Synthetic oligonucleotide
  Sense strand starting at position 887 of SEQ ID NO: 317989
ggaauuguauuugcgaugu

SEQ ID NO: 528174 - RNA, 19 nt, Artificial Sequence
  Description of Artificial Sequence: Synthetic oligonucleotide
  Antisense strand to SEQ ID NO: 528173
acaucgcaaauacaauucc

SEQ ID NO: 528175 - RNA, 19 nt, Artificial Sequence
  Description of Artificial Sequence: Synthetic oligonucleotide
  Sense strand starting at position 891 of SEQ ID NO: 317989
uuguauuugcgauguucuu

SEQ ID NO: 528176 - RNA, 19 nt, Artificial Sequence
  Description of Artificial Sequence: Synthetic oligonucleotide
  Antisense strand to SEQ ID NO: 528175
aagaacaucgcaaauacaa

SEQ ID NO: 528177 - RNA, 19 nt, Artificial Sequence
  Description of Artificial Sequence: Synthetic oligonucleotide
  Sense strand starting at position 1063 of SEQ ID NO: 317989
cauccaaauggugguagaa

SEQ ID NO: 528178 - RNA, 19 nt, Artificial Sequence
  Description of Artificial Sequence: Synthetic oligonucleotide
  Antisense strand to SEQ ID NO: 528177
uucuaccaccauuuggaug

SEQ ID NO: 528179 - RNA, 19 nt, Artificial Sequence
  Description of Artificial Sequence: Synthetic oligonucleotide
  Sense strand starting at position 1075 of SEQ ID NO: 317989
gguagaauuugccacaaua

SEQ ID NO: 528180 - RNA, 19 nt, Artificial Sequence
  Description of Artificial Sequence: Synthetic oligonucleotide
  Antisense strand to SEQ ID NO: 528179
uauuguggcaaauucuacc

SEQ ID NO: 528181 - RNA, 19 nt, Artificial Sequence
  Description of Artificial Sequence: Synthetic oligonucleotide
  Sense strand starting at position 1234 of SEQ ID NO: 317989
cuggaagagucagccuaca

SEQ ID NO: 528182 - RNA, 19 nt, Artificial Sequence
  Description of Artificial Sequence: Synthetic oligonucleotide
  Antisense strand to SEQ ID NO: 528181
uguaggcugacucuuccag

SEQ ID NO: 528183 - RNA, 19 nt, Artificial Sequence
  Description of Artificial Sequence: Synthetic oligonucleotide
  Sense strand starting at position 1250 of SEQ ID NO: 317989
acacucauagugcaagaua

SEQ ID NO: 528184 - RNA, 19 nt, Artificial Sequence
  Description of Artificial Sequence: Synthetic oligonucleotide
  Antisense strand to SEQ ID NO: 528183
uaucuugcacuaugagugu

SEQ ID NO: 528185 - RNA, 19 nt, Artificial Sequence
  Description of Artificial Sequence: Synthetic oligonucleotide
  Sense strand starting at position 1390 of SEQ ID NO: 317989
augagagcuuaguccuaga

SEQ ID NO: 528186 - RNA, 19 nt, Artificial Sequence
  Description of Artificial Sequence: Synthetic oligonucleotide
  Antisense strand to SEQ ID NO: 528185
ucuaggacuaagcucucau

SEQ ID NO: 528187 - RNA, 19 nt, Artificial Sequence
  Description of Artificial Sequence: Synthetic oligonucleotide
  Sense strand starting at position 1461 of SEQ ID NO: 317989
cgagcuguacauugacaac

SEQ ID NO: 528188 - RNA, 19 nt, Artificial Sequence
  Description of Artificial Sequence: Synthetic oligonucleotide
  Antisense strand to SEQ ID NO: 528187
guugucaauguacagcucg

SEQ ID NO: 528189 - RNA, 19 nt, Artificial Sequence
  Description of Artificial Sequence: Synthetic oligonucleotide
  Sense strand starting at position 1698 of SEQ ID NO: 317989
uuuguauuaucucuuggga

SEQ ID NO: 528190 - RNA, 19 nt, Artificial Sequence
  Description of Artificial Sequence: Synthetic oligonucleotide
  Antisense strand to SEQ ID NO: 528189
ucccaagagauaauacaaa

SEQ ID NO: 528191 - RNA, 19 nt, Artificial Sequence
  Description of Artificial Sequence: Synthetic oligonucleotide
  Sense strand starting at position 1701 of SEQ ID NO: 317989
guauuaucucuugggaacg

SEQ ID NO: 528192 - RNA, 19 nt, Artificial Sequence
  Description of Artificial Sequence: Synthetic oligonucleotide
  Antisense strand to SEQ ID NO: 528191
cguucccaagagauaauac

SEQ ID NO: 528193 - RNA, 19 nt, Artificial Sequence
  Description of Artificial Sequence: Synthetic oligonucleotide
  Sense strand starting at position 1767 of SEQ ID NO: 317989
cgaugugugucccugauuu

SEQ ID NO: 528194 - RNA, 19 nt, Artificial Sequence
  Description of Artificial Sequence: Synthetic oligonucleotide
  Antisense strand to SEQ ID NO: 528193
aaaucagggacacacaucg

SEQ ID NO: 528195 - RNA, 19 nt, Artificial Sequence
  Description of Artificial Sequence: Synthetic oligonucleotide
  Sense strand starting at position 2220 of SEQ ID NO: 317989
ggcgucaucccuuagagac

SEQ ID NO: 528196 - RNA, 19 nt, Artificial Sequence
  Description of Artificial Sequence: Synthetic oligonucleotide
  Antisense strand to SEQ ID NO: 528195
gucucuaagggaugacgcc

SEQ ID NO: 528197 - RNA, 19 nt, Artificial Sequence
  Description of Artificial Sequence: Synthetic oligonucleotide
  Sense strand starting at position 2249 of SEQ ID NO: 317989
ugguaucucccggaaguua

SEQ ID NO: 528198 - RNA, 19 nt, Artificial Sequence
  Description of Artificial Sequence: Synthetic oligonucleotide
  Antisense strand to SEQ ID NO: 528197
uaacuuccgggagauacca

SEQ ID NO: 528199 - RNA, 19 nt, Artificial Sequence
  Description of Artificial Sequence: Synthetic oligonucleotide
  Sense strand starting at position 2292 of SEQ ID NO: 317989
ccaaccuugccggaaauga

SEQ ID NO: 528200 - RNA, 19 nt, Artificial Sequence
  Description of Artificial Sequence: Synthetic oligonucleotide
  Antisense strand to SEQ ID NO: 528199
ucauuuccggcaagguugg

SEQ ID NO: 528201 - RNA, 19 nt, Artificial Sequence
  Description of Artificial Sequence: Synthetic oligonucleotide
  Sense strand starting at position 2849 of SEQ ID NO: 317989
ccuuaagcuggucauauua

SEQ ID NO: 528202 - RNA, 19 nt, Artificial Sequence
  Description of Artificial Sequence: Synthetic oligonucleotide
  Antisense strand to SEQ ID NO: 528201
uaauaugaccagcuuaagg

SEQ ID NO: 528203 - RNA, 19 nt, Artificial Sequence
  Description of Artificial Sequence: Synthetic oligonucleotide
  Sense strand starting at position 2932 of SEQ ID NO: 317989
gggugauuccagcauguuc

SEQ ID NO: 528204 - RNA, 19 nt, Artificial Sequence
  Description of Artificial Sequence: Synthetic oligonucleotide
  Antisense strand to SEQ ID NO: 528203
gaacaugcuggaaucaccc

SEQ ID NO: 528205 - RNA, 19 nt, Artificial Sequence
  Description of Artificial Sequence: Synthetic oligonucleotide
  Sense strand starting at position 2971 of SEQ ID NO: 317989
aguucuuaccaguggugaa

SEQ ID NO: 528206 - RNA, 19 nt, Artificial Sequence
  Description of Artificial Sequence: Synthetic oligonucleotide
  Antisense strand to SEQ ID NO: 528205
uucaccacugguaagaacu

SEQ ID NO: 528207 - RNA, 19 nt, Artificial Sequence
  Description of Artificial Sequence: Synthetic oligonucleotide
  Sense strand starting at position 2972 of SEQ ID NO: 317989
guucuuaccaguggugaaa

SEQ ID NO: 528208 - RNA, 19 nt, Artificial Sequence
  Description of Artificial Sequence: Synthetic oligonucleotide
  Antisense strand to SEQ ID NO: 528207
uuucaccacugguaagaac

SEQ ID NO: 528209 - RNA, 19 nt, Artificial Sequence
  Description of Artificial Sequence: Synthetic oligonucleotide
  Sense strand starting at position 3008 of SEQ ID NO: 317989
gcagcagauagugaugaua

SEQ ID NO: 528210 - RNA, 19 nt, Artificial Sequence
  Description of Artificial Sequence: Synthetic oligonucleotide
  Antisense strand to SEQ ID NO: 528209
uaucaucacuaucugcugc

SEQ ID NO: 528211 - RNA, 19 nt, Artificial Sequence
  Description of Artificial Sequence: Synthetic oligonucleotide
  Sense strand starting at position 3011 of SEQ ID NO: 317989
gcagauagugaugauaguu

SEQ ID NO: 528212 - RNA, 19 nt, Artificial Sequence
  Description of Artificial Sequence: Synthetic oligonucleotide
  Antisense strand to SEQ ID NO: 528211
aacuaucaucacuaucugc

SEQ ID NO: 528213 - RNA, 19 nt, Artificial Sequence
  Description of Artificial Sequence: Synthetic oligonucleotide
  Sense strand starting at position 3034 of SEQ ID NO: 317989
ggccuuggauaugcuaaga

SEQ ID NO: 528214 - RNA, 19 nt, Artificial Sequence
  Description of Artificial Sequence: Synthetic oligonucleotide
  Antisense strand to SEQ ID NO: 528213
ucuuagcauauccaaggcc

SEQ ID NO: 528215 - RNA, 19 nt, Artificial Sequence
  Description of Artificial Sequence: Synthetic oligonucleotide
  Sense strand starting at position 3058 of SEQ ID NO: 317989
ugaaguguaugcuuuaaag

SEQ ID NO: 528216 - RNA, 19 nt, Artificial Sequence
  Description of Artificial Sequence: Synthetic oligonucleotide
  Antisense strand to SEQ ID NO: 528215
cuuuaaagcauacacuuca

SEQ ID NO: 528217 - RNA, 19 nt, Artificial Sequence
  Description of Artificial Sequence: Synthetic oligonucleotide
  Sense strand starting at position 3060 of SEQ ID NO: 317989
aaguguaugcuuuaaagaa

SEQ ID NO: 528218 - RNA, 19 nt, Artificial Sequence
  Description of Artificial Sequence: Synthetic oligonucleotide
  Antisense strand to SEQ ID NO: 528217
uucuuuaaagcauacacuu

SEQ ID NO: 528219 - RNA, 19 nt, Artificial Sequence
  Description of Artificial Sequence: Synthetic oligonucleotide
  Sense strand starting at position 3120 of SEQ ID NO: 317989
auaugugugcucucuguuu

SEQ ID NO: 528220 - RNA, 19 nt, Artificial Sequence
  Description of Artificial Sequence: Synthetic oligonucleotide
  Antisense strand to SEQ ID NO: 528219
aaacagagagcacacauau

SEQ ID NO: 528221 - RNA, 19 nt, Artificial Sequence
  Description of Artificial Sequence: Synthetic oligonucleotide
  Sense strand starting at position 761 of SEQ ID NO: 317990
caauguaauugguccuagu

SEQ ID NO: 528222 - RNA, 19 nt, Artificial Sequence
  Description of Artificial Sequence: Synthetic oligonucleotide
  Antisense strand to SEQ ID NO: 528221
acuaggaccaauuacauug

SEQ ID NO: 528223 - RNA, 19 nt, Artificial Sequence
  Description of Artificial Sequence: Synthetic oligonucleotide
  Sense strand starting at position 885 of SEQ ID NO: 317990
aaaucaagagcugguagau

SEQ ID NO: 528224 - RNA, 19 nt, Artificial Sequence
  Description of Artificial Sequence: Synthetic oligonucleotide
  Antisense strand to SEQ ID NO: 528223
aucuaccagcucuugauuu

SEQ ID NO: 528225 - RNA, 19 nt, Artificial Sequence
  Description of Artificial Sequence: Synthetic oligonucleotide
  Sense strand starting at position 1147 of SEQ ID NO: 317990
caaacuguggacugauacu

SEQ ID NO: 528226 - RNA, 19 nt, Artificial Sequence
  Description of Artificial Sequence: Synthetic oligonucleotide
  Antisense strand to SEQ ID NO: 528225
aguaucaguccacaguuug

SEQ ID NO: 528227 - RNA, 19 nt, Artificial Sequence
  Description of Artificial Sequence: Synthetic oligonucleotide
  Sense strand starting at position 1156 of SEQ ID NO: 317990
gacugauacuuuguucuug

SEQ ID NO: 528228 - RNA, 19 nt, Artificial Sequence
  Description of Artificial Sequence: Synthetic oligonucleotide
  Antisense strand to SEQ ID NO: 528227
caagaacaaaguaucaguc

SEQ ID NO: 528229 - RNA, 19 nt, Artificial Sequence
  Description of Artificial Sequence: Synthetic oligonucleotide
  Sense strand starting at position 1160 of SEQ ID NO: 317990
gauacuuuguucuuguaag

SEQ ID NO: 528230 - RNA, 19 nt, Artificial Sequence
  Description of Artificial Sequence: Synthetic oligonucleotide
  Antisense strand to SEQ ID NO: 528229
cuuacaagaacaaaguauc

SEQ ID NO: 528231 - RNA, 19 nt, Artificial Sequence
  Description of Artificial Sequence: Synthetic oligonucleotide
  Sense strand starting at position 1268 of SEQ ID NO: 317990
auagcuguaagagauguuu

SEQ ID NO: 528232 - RNA, 19 nt, Artificial Sequence
  Description of Artificial Sequence: Synthetic oligonucleotide
  Antisense strand to SEQ ID NO: 528231
aaacaucucuuacagcuau

SEQ ID NO: 528233 - RNA, 19 nt, Artificial Sequence
  Description of Artificial Sequence: Synthetic oligonucleotide
  Sense strand starting at position 1270 of SEQ ID NO: 317990
agcuguaagagauguuuaa

SEQ ID NO: 528234 - RNA, 19 nt, Artificial Sequence
  Description of Artificial Sequence: Synthetic oligonucleotide
  Antisense strand to SEQ ID NO: 528233
uuaaacaucucuuacagcu

SEQ ID NO: 528235 - RNA, 19 nt, Artificial Sequence
  Description of Artificial Sequence: Synthetic oligonucleotide
  Sense strand starting at position 1274 of SEQ ID NO: 317990
guaagagauguuuaagguc

SEQ ID NO: 528236 - RNA, 19 nt, Artificial Sequence
  Description of Artificial Sequence: Synthetic oligonucleotide
  Antisense strand to SEQ ID NO: 528235
gaccuuaaacaucucuuac

SEQ ID NO: 528237 - RNA, 19 nt, Artificial Sequence
  Description of Artificial Sequence: Synthetic oligonucleotide
  Sense strand starting at position 1363 of SEQ ID NO: 317990
cuugaaagccauuaagucu

SEQ ID NO: 528238 - RNA, 19 nt, Artificial Sequence
  Description of Artificial Sequence: Synthetic oligonucleotide
  Antisense strand to SEQ ID NO: 528237
agacuuaauggcuuucaag

SEQ ID NO: 528239 - RNA, 19 nt, Artificial Sequence
  Description of Artificial Sequence: Synthetic oligonucleotide
  Sense strand starting at position 1424 of SEQ ID NO: 317990
caaugagagcguuaggaau

SEQ ID NO: 528240 - RNA, 19 nt, Artificial Sequence
  Description of Artificial Sequence: Synthetic oligonucleotide
  Antisense strand to SEQ ID NO: 528239
auuccuaacgcucucauug

SEQ ID NO: 528241 - RNA, 19 nt, Artificial Sequence
  Description of Artificial Sequence: Synthetic oligonucleotide
  Sense strand starting at position 1527 of SEQ ID NO: 317990
agcuccuuucuguaauuga

SEQ ID NO: 528242 - RNA, 19 nt, Artificial Sequence
  Description of Artificial Sequence: Synthetic oligonucleotide
  Antisense strand to SEQ ID NO: 528241
ucaauuacagaaaggagcu

SEQ ID NO: 528243 - RNA, 19 nt, Artificial Sequence
  Description of Artificial Sequence: Synthetic oligonucleotide
  Sense strand starting at position 1538 of SEQ ID NO: 317990
guaauugaaaugcagaagu

SEQ ID NO: 528244 - RNA, 19 nt, Artificial Sequence
  Description of Artificial Sequence: Synthetic oligonucleotide
  Antisense strand to SEQ ID NO: 528243
acuucugcauuucaauuac

SEQ ID NO: 528245 - RNA, 19 nt, Artificial Sequence
  Description of Artificial Sequence: Synthetic oligonucleotide
  Sense strand starting at position 1540 of SEQ ID NO: 317990
aauugaaaugcagaagugu

SEQ ID NO: 528246 - RNA, 19 nt, Artificial Sequence
  Description of Artificial Sequence: Synthetic oligonucleotide
  Antisense strand to SEQ ID NO: 528245
acacuucugcauuucaauu

SEQ ID NO: 528247 - RNA, 19 nt, Artificial Sequence
  Description of Artificial Sequence: Synthetic oligonucleotide
  Sense strand starting at position 1548 of SEQ ID NO: 317990
ugcagaagugucuaucauc

SEQ ID NO: 528248 - RNA, 19 nt, Artificial Sequence
  Description of Artificial Sequence: Synthetic oligonucleotide
  Antisense strand to SEQ ID NO: 528247
gaugauagacacuucugca

SEQ ID NO: 528249 - RNA, 19 nt, Artificial Sequence
  Description of Artificial Sequence: Synthetic oligonucleotide
  Sense strand starting at position 2112 of SEQ ID NO: 317990
cggucacuucuguaaucag

SEQ ID NO: 528250 - RNA, 19 nt, Artificial Sequence
  Description of Artificial Sequence: Synthetic oligonucleotide
  Antisense strand to SEQ ID NO: 528249
cugauuacagaagugaccg

SEQ ID NO: 528251 - RNA, 19 nt, Artificial Sequence
  Description of Artificial Sequence: Synthetic oligonucleotide
  Sense strand starting at position 2123 of SEQ ID NO: 317990
guaaucaggccucaaguau

SEQ ID NO: 528252 - RNA, 19 nt, Artificial Sequence
  Description of Artificial Sequence: Synthetic oligonucleotide
  Antisense strand to SEQ ID NO: 528251
auacuugaggccugauuac

SEQ ID NO: 528253 - RNA, 19 nt, Artificial Sequence
  Description of Artificial Sequence: Synthetic oligonucleotide
  Sense strand starting at position 2136 of SEQ ID NO: 317990
aaguaugccuagcugaaga

SEQ ID NO: 528254 - RNA, 19 nt, Artificial Sequence
  Description of Artificial Sequence: Synthetic oligonucleotide
  Antisense strand to SEQ ID NO: 528253
ucuucagcuaggcauacuu

SEQ ID NO: 528255 - RNA, 19 nt, Artificial Sequence
  Description of Artificial Sequence: Synthetic oligonucleotide
  Sense strand starting at position 2138 of SEQ ID NO: 317990
guaugccuagcugaagauu

SEQ ID NO: 528256 - RNA, 19 nt, Artificial Sequence
  Description of Artificial Sequence: Synthetic oligonucleotide
  Antisense strand to SEQ ID NO: 528255
aaucuucagcuaggcauac

SEQ ID NO: 528257 - RNA, 19 nt, Artificial Sequence
  Description of Artificial Sequence: Synthetic oligonucleotide
  Sense strand starting at position 2292 of SEQ ID NO: 317990
ggacuaacuauguagcuga

SEQ ID NO: 528258 - RNA, 19 nt, Artificial Sequence
  Description of Artificial Sequence: Synthetic oligonucleotide
  Antisense strand to SEQ ID NO: 528257
ucagcuacauaguuagucc

SEQ ID NO: 528259 - RNA, 19 nt, Artificial Sequence
  Description of Artificial Sequence: Synthetic oligonucleotide
  Sense strand starting at position 2370 of SEQ ID NO: 317990
ggauuaagauguucgcuag

SEQ ID NO: 528260 - RNA, 19 nt, Artificial Sequence
  Description of Artificial Sequence: Synthetic oligonucleotide
  Antisense strand to SEQ ID NO: 528259
cuagcgaacaucuuaaucc

SEQ ID NO: 528261 - RNA, 19 nt, Artificial Sequence
  Description of Artificial Sequence: Synthetic oligonucleotide
  Sense strand starting at position 2401 of SEQ ID NO: 317990
acuucuaaggcauguggaa

SEQ ID NO: 528262 - RNA, 19 nt, Artificial Sequence
  Description of Artificial Sequence: Synthetic oligonucleotide
  Antisense strand to SEQ ID NO: 528261
uuccacaugccuuagaagu

SEQ ID NO: 528263 - RNA, 19 nt, Artificial Sequence
  Description of Artificial Sequence: Synthetic oligonucleotide
  Sense strand starting at position 2457 of SEQ ID NO: 317990
ugguaugcaacuuauggua

SEQ ID NO: 528264 - RNA, 19 nt, Artificial Sequence
  Description of Artificial Sequence: Synthetic oligonucleotide
  Antisense strand to SEQ ID NO: 528263
uaccauaaguugcauacca

SEQ ID NO: 528265 - RNA, 19 nt, Artificial Sequence
  Description of Artificial Sequence: Synthetic oligonucleotide
  Sense strand starting at position 2519 of SEQ ID NO: 317990
acuuccagguguuuacaau

SEQ ID NO: 528266 - RNA, 19 nt, Artificial Sequence
  Description of Artificial Sequence: Synthetic oligonucleotide
  Antisense strand to SEQ ID NO: 528265
auuguaaacaccuggaagu

SEQ ID NO: 528267 - RNA, 19 nt, Artificial Sequence
  Description of Artificial Sequence: Synthetic oligonucleotide
  Sense strand starting at position 2520 of SEQ ID NO: 317990
cuuccagguguuuacaauu

SEQ ID NO: 528268 - RNA, 19 nt, Artificial Sequence
  Description of Artificial Sequence: Synthetic oligonucleotide
  Antisense strand to SEQ ID NO: 528267
aauuguaaacaccuggaag

SEQ ID NO: 528269 - RNA, 19 nt, Artificial Sequence
  Description of Artificial Sequence: Synthetic oligonucleotide
  Sense strand starting at position 2552 of SEQ ID NO: 317990
gcauguuaauuugcgaauu

SEQ ID NO: 528270 - RNA, 19 nt, Artificial Sequence
  Description of Artificial Sequence: Synthetic oligonucleotide
  Antisense strand to SEQ ID NO: 528269
aauucgcaaauuaacaugc

SEQ ID NO: 528271 - RNA, 19 nt, Artificial Sequence
  Description of Artificial Sequence: Synthetic oligonucleotide
  Sense strand starting at position 2569 of SEQ ID NO: 317990
uuuacaaauuugggugaga

SEQ ID NO: 528272 - RNA, 19 nt, Artificial Sequence
  Description of Artificial Sequence: Synthetic oligonucleotide
  Antisense strand to SEQ ID NO: 528271
ucucacccaaauuuguaaa

SEQ ID NO: 528273 - RNA, 19 nt, Artificial Sequence
  Description of Artificial Sequence: Synthetic oligonucleotide
  Sense strand starting at position 2591 of SEQ ID NO: 317990
ucacaauuggcauagaagu

SEQ ID NO: 528274 - RNA, 19 nt, Artificial Sequence
  Description of Artificial Sequence: Synthetic oligonucleotide
  Antisense strand to SEQ ID NO: 528273
acuucuaugccaauuguga

SEQ ID NO: 528275 - RNA, 19 nt, Artificial Sequence
  Description of Artificial Sequence: Synthetic oligonucleotide
  Sense strand starting at position 2663 of SEQ ID NO: 317990
agaauacguacuuggagua

SEQ ID NO: 528276 - RNA, 19 nt, Artificial Sequence
  Description of Artificial Sequence: Synthetic oligonucleotide
  Antisense strand to SEQ ID NO: 528275
uacuccaaguacguauucu

SEQ ID NO: 528277 - RNA, 19 nt, Artificial Sequence
  Description of Artificial Sequence: Synthetic oligonucleotide
  Sense strand starting at position 2682 of SEQ ID NO: 317990
cuggaauuguauuugcgau

SEQ ID NO: 528278 - RNA, 19 nt, Artificial Sequence
  Description of Artificial Sequence: Synthetic oligonucleotide
  Antisense strand to SEQ ID NO: 528277
aucgcaaauacaauuccag

SEQ ID NO: 528279 - RNA, 19 nt, Artificial Sequence
  Description of Artificial Sequence: Synthetic oligonucleotide
  Sense strand starting at position 2683 of SEQ ID NO: 317990
uggaauuguauuugcgaug

SEQ ID NO: 528280 - RNA, 19 nt, Artificial Sequence
  Description of Artificial Sequence: Synthetic oligonucleotide
  Antisense strand to SEQ ID NO: 528279
caucgcaaauacaauucca

SEQ ID NO: 528281 - RNA, 19 nt, Artificial Sequence
  Description of Artificial Sequence: Synthetic oligonucleotide
  Sense strand starting at position 2684 of SEQ ID NO: 317990
ggaauuguauuugcgaugu

SEQ ID NO: 528282 - RNA, 19 nt, Artificial Sequence
  Description of Artificial Sequence: Synthetic oligonucleotide
  Antisense strand to SEQ ID NO: 528281
acaucgcaaauacaauucc

SEQ ID NO: 528283 - RNA, 19 nt, Artificial Sequence
  Description of Artificial Sequence: Synthetic oligonucleotide
  Sense strand starting at position 2688 of SEQ ID NO: 317990
uuguauuugcgauguucuu

SEQ ID NO: 528284 - RNA, 19 nt, Artificial Sequence
  Description of Artificial Sequence: Synthetic oligonucleotide
  Antisense strand to SEQ ID NO: 528283
aagaacaucgcaaauacaa

SEQ ID NO: 528285 - RNA, 19 nt, Artificial Sequence
  Description of Artificial Sequence: Synthetic oligonucleotide
  Sense strand starting at position 2860 of SEQ ID NO: 317990
cauccaaauggugguagaa

SEQ ID NO: 528286 - RNA, 19 nt, Artificial Sequence
  Description of Artificial Sequence: Synthetic oligonucleotide
  Antisense strand to SEQ ID NO: 528285
uucuaccaccauuuggaug

SEQ ID NO: 528287 - RNA, 19 nt, Artificial Sequence
  Description of Artificial Sequence: Synthetic oligonucleotide
  Sense strand starting at position 2872 of SEQ ID NO: 317990
gguagaauuugccacaaua

SEQ ID NO: 528288 - RNA, 19 nt, Artificial Sequence
  Description of Artificial Sequence: Synthetic oligonucleotide
  Antisense strand to SEQ ID NO: 528287
uauuguggcaaauucuacc

SEQ ID NO: 528289 - RNA, 19 nt, Artificial Sequence
  Description of Artificial Sequence: Synthetic oligonucleotide
  Sense strand starting at position 3031 of SEQ ID NO: 317990
cuggaagagucagccuaca

SEQ ID NO: 528290 - RNA, 19 nt, Artificial Sequence
  Description of Artificial Sequence: Synthetic oligonucleotide
  Antisense strand to SEQ ID NO: 528289
uguaggcugacucuuccag

SEQ ID NO: 528291 - RNA, 19 nt, Artificial Sequence
  Description of Artificial Sequence: Synthetic oligonucleotide
  Sense strand starting at position 3047 of SEQ ID NO: 317990
acacucauagugcaagaua

SEQ ID NO: 528292 - RNA, 19 nt, Artificial Sequence
  Description of Artificial Sequence: Synthetic oligonucleotide
  Antisense strand to SEQ ID NO: 528291
uaucuugcacuaugagugu

SEQ ID NO: 528293 - RNA, 19 nt, Artificial Sequence
  Description of Artificial Sequence: Synthetic oligonucleotide
  Sense strand starting at position 3187 of SEQ ID NO: 317990
augagagcuuaguccuaga

SEQ ID NO: 528294 - RNA, 19 nt, Artificial Sequence
  Description of Artificial Sequence: Synthetic oligonucleotide
  Antisense strand to SEQ ID NO: 528293
ucuaggacuaagcucucau

SEQ ID NO: 528295 - RNA, 19 nt, Artificial Sequence
  Description of Artificial Sequence: Synthetic oligonucleotide
  Sense strand starting at position 3495 of SEQ ID NO: 317990
uuuguauuaucucuuggga

SEQ ID NO: 528296 - RNA, 19 nt, Artificial Sequence
  Description of Artificial Sequence: Synthetic oligonucleotide
  Antisense strand to SEQ ID NO: 528295
ucccaagagauaauacaaa

SEQ ID NO: 528297 - RNA, 19 nt, Artificial Sequence
  Description of Artificial Sequence: Synthetic oligonucleotide
  Sense strand starting at position 3498 of SEQ ID NO: 317990
guauuaucucuugggaacg

SEQ ID NO: 528298 - RNA, 19 nt, Artificial Sequence
  Description of Artificial Sequence: Synthetic oligonucleotide
  Antisense strand to SEQ ID NO: 528297
cguucccaagagauaauac

SEQ ID NO: 528299 - RNA, 19 nt, Artificial Sequence
  Description of Artificial Sequence: Synthetic oligonucleotide
  Sense strand starting at position 3564 of SEQ ID NO: 317990
cgaugugugucccugauuu

SEQ ID NO: 528300 - RNA, 19 nt, Artificial Sequence
  Description of Artificial Sequence: Synthetic oligonucleotide
  Antisense strand to SEQ ID NO: 528299
aaaucagggacacacaucg

SEQ ID NO: 528301 - RNA, 19 nt, Artificial Sequence
  Description of Artificial Sequence: Synthetic oligonucleotide
  Sense strand starting at position 155 of SEQ ID NO: 317991
gacagauucgcaggaggca

SEQ ID NO: 528302 - RNA, 19 nt, Artificial Sequence
  Description of Artificial Sequence: Synthetic oligonucleotide
  Antisense strand to SEQ ID NO: 528301
ugccuccugcgaaucuguc

SEQ ID NO: 528303 - RNA, 19 nt, Artificial Sequence
  Description of Artificial Sequence: Synthetic oligonucleotide
  Sense strand starting at position 289 of SEQ ID NO: 317991
gggagacggguuugcuaua

SEQ ID NO: 528304 - RNA, 19 nt, Artificial Sequence
  Description of Artificial Sequence: Synthetic oligonucleotide
  Antisense strand to SEQ ID NO: 528303
uauagcaaacccgucuccc

SEQ ID NO: 528305 - RNA, 19 nt, Artificial Sequence
  Description of Artificial Sequence: Synthetic oligonucleotide
  Sense strand starting at position 290 of SEQ ID NO: 317991
ggagacggguuugcuauaa

SEQ ID NO: 528306 - RNA, 19 nt, Artificial Sequence
  Description of Artificial Sequence: Synthetic oligonucleotide
  Antisense strand to SEQ ID NO: 528305
uuauagcaaacccgucucc

SEQ ID NO: 528307 - RNA, 19 nt, Artificial Sequence
  Description of Artificial Sequence: Synthetic oligonucleotide
  Sense strand starting at position 294 of SEQ ID NO: 317991
acggguuugcuauaaacuc

SEQ ID NO: 528308 - RNA, 19 nt, Artificial Sequence
  Description of Artificial Sequence: Synthetic oligonucleotide
  Antisense strand to SEQ ID NO: 528307
gaguuuauagcaaacccgu

SEQ ID NO: 528309 - RNA, 19 nt, Artificial Sequence
  Description of Artificial Sequence: Synthetic oligonucleotide
  Sense strand starting at position 386 of SEQ ID NO: 317991
cuaugcuucguguccuuga

SEQ ID NO: 528310 - RNA, 19 nt, Artificial Sequence
  Description of Artificial Sequence: Synthetic oligonucleotide
  Antisense strand to SEQ ID NO: 528309
ucaaggacacgaagcauag

SEQ ID NO: 528311 - RNA, 19 nt, Artificial Sequence
  Description of Artificial Sequence: Synthetic oligonucleotide
  Sense strand starting at position 394 of SEQ ID NO: 317991
cguguccuugacugacaga

SEQ ID NO: 528312 - RNA, 19 nt, Artificial Sequence
  Description of Artificial Sequence: Synthetic oligonucleotide
  Antisense strand to SEQ ID NO: 528311
ucugucagucaaggacacg

SEQ ID NO: 528313 - RNA, 19 nt, Artificial Sequence
  Description of Artificial Sequence: Synthetic oligonucleotide
  Sense strand starting at position 599 of SEQ ID NO: 317991
gacacuuguuacuuguuga

SEQ ID NO: 528314 - RNA, 19 nt, Artificial Sequence
  Description of Artificial Sequence: Synthetic oligonucleotide
  Antisense strand to SEQ ID NO: 528313
ucaacaaguaacaaguguc

SEQ ID NO: 528315 - RNA, 19 nt, Artificial Sequence
  Description of Artificial Sequence: Synthetic oligonucleotide
  Sense strand starting at position 623 of SEQ ID NO: 317991
cgccaccuucccugacaaa

SEQ ID NO: 528316 - RNA, 19 nt, Artificial Sequence
  Description of Artificial Sequence: Synthetic oligonucleotide
  Antisense strand to SEQ ID NO: 528315
uuugucagggaagguggcg

SEQ ID NO: 528317 - RNA, 19 nt, Artificial Sequence
  Description of Artificial Sequence: Synthetic oligonucleotide
  Sense strand starting at position 699 of SEQ ID NO: 317991
ggacugggugcgugaauga

SEQ ID NO: 528318 - RNA, 19 nt, Artificial Sequence
  Description of Artificial Sequence: Synthetic oligonucleotide
  Antisense strand to SEQ ID NO: 528317
ucauucacgcacccagucc

SEQ ID NO: 528319 - RNA, 19 nt, Artificial Sequence
  Description of Artificial Sequence: Synthetic oligonucleotide
  Sense strand starting at position 709 of SEQ ID NO: 317991
cgugaaugagguuggaaga

SEQ ID NO: 528320 - RNA, 19 nt, Artificial Sequence
  Description of Artificial Sequence: Synthetic oligonucleotide
  Antisense strand to SEQ ID NO: 528319
ucuuccaaccucauucacg

SEQ ID NO: 528321 - RNA, 19 nt, Artificial Sequence
  Description of Artificial Sequence: Synthetic oligonucleotide
  Sense strand starting at position 778 of SEQ ID NO: 317991
agucgagcgcguucuaaca

SEQ ID NO: 528322 - RNA, 19 nt, Artificial Sequence
  Description of Artificial Sequence: Synthetic oligonucleotide
  Antisense strand to SEQ ID NO: 528321
uguuagaacgcgcucgacu

SEQ ID NO: 528323 - RNA, 19 nt, Artificial Sequence
  Description of Artificial Sequence: Synthetic oligonucleotide
  Sense strand starting at position 855 of SEQ ID NO: 317991
cgagcucugggauggguaa

SEQ ID NO: 528324 - RNA, 19 nt, Artificial Sequence
  Description of Artificial Sequence: Synthetic oligonucleotide
  Antisense strand to SEQ ID NO: 528323
uuacccaucccagagcucg

SEQ ID NO: 528325 - RNA, 19 nt, Artificial Sequence
  Description of Artificial Sequence: Synthetic oligonucleotide
  Sense strand starting at position 959 of SEQ ID NO: 317991
cgcgaaaguccguuuccag

SEQ ID NO: 528326 - RNA, 19 nt, Artificial Sequence
  Description of Artificial Sequence: Synthetic oligonucleotide
  Antisense strand to SEQ ID NO: 528325
cuggaaacggacuuucgcg

SEQ ID NO: 528327 - RNA, 19 nt, Artificial Sequence
  Description of Artificial Sequence: Synthetic oligonucleotide
  Sense strand starting at position 1153 of SEQ ID NO: 317991
caagaauacguucgagaca

SEQ ID NO: 528328 - RNA, 19 nt, Artificial Sequence
  Description of Artificial Sequence: Synthetic oligonucleotide
  Antisense strand to SEQ ID NO: 528327
ugucucgaacguauucuug

SEQ ID NO: 528329 - RNA, 19 nt, Artificial Sequence
  Description of Artificial Sequence: Synthetic oligonucleotide
  Sense strand starting at position 1158 of SEQ ID NO: 317991
auacguucgagacagagau

SEQ ID NO: 528330 - RNA, 19 nt, Artificial Sequence
  Description of Artificial Sequence: Synthetic oligonucleotide
  Antisense strand to SEQ ID NO: 528329
aucucugucucgaacguau

SEQ ID NO: 528331 - RNA, 19 nt, Artificial Sequence
  Description of Artificial Sequence: Synthetic oligonucleotide
  Sense strand starting at position 1267 of SEQ ID NO: 317991
gggugaggaauguagcuuu

SEQ ID NO: 528332 - RNA, 19 nt, Artificial Sequence
  Description of Artificial Sequence: Synthetic oligonucleotide
  Antisense strand to SEQ ID NO: 528331
aaagcuacauuccucaccc

SEQ ID NO: 528333 - RNA, 19 nt, Artificial Sequence
  Description of Artificial Sequence: Synthetic oligonucleotide
  Sense strand starting at position 1408 of SEQ ID NO: 317991
cacucuuggcaaugauagu

SEQ ID NO: 528334 - RNA, 19 nt, Artificial Sequence
  Description of Artificial Sequence: Synthetic oligonucleotide
  Antisense strand to SEQ ID NO: 528333
acuaucauugccaagagug

SEQ ID NO: 528335 - RNA, 19 nt, Artificial Sequence
  Description of Artificial Sequence: Synthetic oligonucleotide
  Sense strand starting at position 1674 of SEQ ID NO: 317991
uuagguucccucuagucuu

SEQ ID NO: 528336 - RNA, 19 nt, Artificial Sequence
  Description of Artificial Sequence: Synthetic oligonucleotide
  Antisense strand to SEQ ID NO: 528335
aagacuagagggaaccuaa

SEQ ID NO: 528337 - RNA, 19 nt, Artificial Sequence
  Description of Artificial Sequence: Synthetic oligonucleotide
  Sense strand starting at position 2239 of SEQ ID NO: 317991
acgagacugguuugucuga

SEQ ID NO: 528338 - RNA, 19 nt, Artificial Sequence
  Description of Artificial Sequence: Synthetic oligonucleotide
  Antisense strand to SEQ ID NO: 528337
ucagacaaaccagucucgu

SEQ ID NO: 528339 - RNA, 19 nt, Artificial Sequence
  Description of Artificial Sequence: Synthetic oligonucleotide
  Sense strand starting at position 2241 of SEQ ID NO: 317991
gagacugguuugucugaug

SEQ ID NO: 528340 - RNA, 19 nt, Artificial Sequence
  Description of Artificial Sequence: Synthetic oligonucleotide
  Antisense strand to SEQ ID NO: 528339
caucagacaaaccagucuc

SEQ ID NO: 528341 - RNA, 19 nt, Artificial Sequence
  Description of Artificial Sequence: Synthetic oligonucleotide
  Sense strand starting at position 2273 of SEQ ID NO: 317991
ugaggucuugccuggagau

SEQ ID NO: 528342 - RNA, 19 nt, Artificial Sequence
  Description of Artificial Sequence: Synthetic oligonucleotide
  Antisense strand to SEQ ID NO: 528341
aucuccaggcaagaccuca

SEQ ID NO: 528343 - RNA, 19 nt, Artificial Sequence
  Description of Artificial Sequence: Synthetic oligonucleotide
  Sense strand starting at position 2274 of SEQ ID NO: 317991
gaggucuugccuggagauc

SEQ ID NO: 528344 - RNA, 19 nt, Artificial Sequence
  Description of Artificial Sequence: Synthetic oligonucleotide
  Antisense strand to SEQ ID NO: 528343
gaucuccaggcaagaccuc

SEQ ID NO: 528345 - RNA, 19 nt, Artificial Sequence
  Description of Artificial Sequence: Synthetic oligonucleotide
  Sense strand starting at position 2285 of SEQ ID NO: 317991
uggagauccgaacgagaca

SEQ ID NO: 528346 - RNA, 19 nt, Artificial Sequence
  Description of Artificial Sequence: Synthetic oligonucleotide
  Antisense strand to SEQ ID NO: 528345
ugucucguucggaucucca

SEQ ID NO: 528347 - RNA, 19 nt, Artificial Sequence
  Description of Artificial Sequence: Synthetic oligonucleotide
  Sense strand starting at position 2909 of SEQ ID NO: 317991
gugagggaagccgaguauu

SEQ ID NO: 528348 - RNA, 19 nt, Artificial Sequence
  Description of Artificial Sequence: Synthetic oligonucleotide
  Antisense strand to SEQ ID NO: 528347
aauacucggcuucccucac

SEQ ID NO: 528349 - RNA, 19 nt, Artificial Sequence
  Description of Artificial Sequence: Synthetic oligonucleotide
  Sense strand starting at position 3051 of SEQ ID NO: 317991
ccaacacggucuccaaaua

SEQ ID NO: 528350 - RNA, 19 nt, Artificial Sequence
  Description of Artificial Sequence: Synthetic oligonucleotide
  Antisense strand to SEQ ID NO: 528349
uauuuggagaccguguugg

SEQ ID NO: 528351 - RNA, 19 nt, Artificial Sequence
  Description of Artificial Sequence: Synthetic oligonucleotide
  Sense strand starting at position 3224 of SEQ ID NO: 317991
cccaauuccagaggcguaa

SEQ ID NO: 528352 - RNA, 19 nt, Artificial Sequence
  Description of Artificial Sequence: Synthetic oligonucleotide
  Antisense strand to SEQ ID NO: 528351
uuacgccucuggaauuggg

SEQ ID NO: 528353 - RNA, 19 nt, Artificial Sequence
  Description of Artificial Sequence: Synthetic oligonucleotide
  Sense strand starting at position 3228 of SEQ ID NO: 317991
auuccagaggcguaagauc

SEQ ID NO: 528354 - RNA, 19 nt, Artificial Sequence
  Description of Artificial Sequence: Synthetic oligonucleotide
  Antisense strand to SEQ ID NO: 528353
gaucuuacgccucuggaau

SEQ ID NO: 528355 - RNA, 19 nt, Artificial Sequence
  Description of Artificial Sequence: Synthetic oligonucleotide
  Sense strand starting at position 3379 of SEQ ID NO: 317991
auuccagagcucuguggau

SEQ ID NO: 528356 - RNA, 19 nt, Artificial Sequence
  Description of Artificial Sequence: Synthetic oligonucleotide
  Antisense strand to SEQ ID NO: 528355
auccacagagcucuggaau

SEQ ID NO: 528357 - RNA, 19 nt, Artificial Sequence
  Description of Artificial Sequence: Synthetic oligonucleotide
  Sense strand starting at position 3385 of SEQ ID NO: 317991
gagcucuguggaugggaga

SEQ ID NO: 528358 - RNA, 19 nt, Artificial Sequence
  Description of Artificial Sequence: Synthetic oligonucleotide
  Antisense strand to SEQ ID NO: 528357
ucucccauccacagagcuc

SEQ ID NO: 528359 - RNA, 19 nt, Artificial Sequence
  Description of Artificial Sequence: Synthetic oligonucleotide
  Sense strand starting at position 3485 of SEQ ID NO: 317991
gagggcaaguccuuacaca

SEQ ID NO: 528360 - RNA, 19 nt, Artificial Sequence
  Description of Artificial Sequence: Synthetic oligonucleotide
  Antisense strand to SEQ ID NO: 528359
uguguaaggacuugcccuc

SEQ ID NO: 528361 - RNA, 19 nt, Artificial Sequence
  Description of Artificial Sequence: Synthetic oligonucleotide
  Sense strand starting at position 3507 of SEQ ID NO: 317991
ugugcauggcuauaaccau

SEQ ID NO: 528362 - RNA, 19 nt, Artificial Sequence
  Description of Artificial Sequence: Synthetic oligonucleotide
  Antisense strand to SEQ ID NO: 528361
augguuauagccaugcaca

SEQ ID NO: 528363 - RNA, 19 nt, Artificial Sequence
  Description of Artificial Sequence: Synthetic oligonucleotide
  Sense strand starting at position 3593 of SEQ ID NO: 317991
ugucuuugcuaagcagaaa

SEQ ID NO: 528364 - RNA, 19 nt, Artificial Sequence
  Description of Artificial Sequence: Synthetic oligonucleotide
  Antisense strand to SEQ ID NO: 528363
uuucugcuuagcaaagaca

SEQ ID NO: 528365 - RNA, 19 nt, Artificial Sequence
  Description of Artificial Sequence: Synthetic oligonucleotide
  Sense strand starting at position 3685 of SEQ ID NO: 317991
uguaaacaggcucaguuua

SEQ ID NO: 528366 - RNA, 19 nt, Artificial Sequence
  Description of Artificial Sequence: Synthetic oligonucleotide
  Antisense strand to SEQ ID NO: 528365
uaaacugagccuguuuaca

SEQ ID NO: 528367 - RNA, 19 nt, Artificial Sequence
  Description of Artificial Sequence: Synthetic oligonucleotide
  Sense strand starting at position 3744 of SEQ ID NO: 317991
gggaguauguguucuucaa

SEQ ID NO: 528368 - RNA, 19 nt, Artificial Sequence
  Description of Artificial Sequence: Synthetic oligonucleotide
  Antisense strand to SEQ ID NO: 528367
uugaagaacacauacuccc

SEQ ID NO: 528369 - RNA, 19 nt, Artificial Sequence
  Description of Artificial Sequence: Synthetic oligonucleotide
  Sense strand starting at position 3748 of SEQ ID NO: 317991
guauguguucuucaaguag

SEQ ID NO: 528370 - RNA, 19 nt, Artificial Sequence
  Description of Artificial Sequence: Synthetic oligonucleotide
  Antisense strand to SEQ ID NO: 528369
cuacuugaagaacacauac

SEQ ID NO: 528371 - RNA, 19 nt, Artificial Sequence
  Description of Artificial Sequence: Synthetic oligonucleotide
  Sense strand starting at position 3842 of SEQ ID NO: 317991
agucaaagaucagcuacuu

SEQ ID NO: 528372 - RNA, 19 nt, Artificial Sequence
  Description of Artificial Sequence: Synthetic oligonucleotide
  Antisense strand to SEQ ID NO: 528371
aaguagcugaucuuugacu

SEQ ID NO: 528373 - RNA, 19 nt, Artificial Sequence
  Description of Artificial Sequence: Synthetic oligonucleotide
  Sense strand starting at position 3864 of SEQ ID NO: 317991
agguuugucagugaagcga

SEQ ID NO: 528374 - RNA, 19 nt, Artificial Sequence
  Description of Artificial Sequence: Synthetic oligonucleotide
  Antisense strand to SEQ ID NO: 528373
ucgcuucacugacaaaccu

SEQ ID NO: 528375 - RNA, 19 nt, Artificial Sequence
  Description of Artificial Sequence: Synthetic oligonucleotide
  Sense strand starting at position 3922 of SEQ ID NO: 317991
uuaagauuaagcgaaguga

SEQ ID NO: 528376 - RNA, 19 nt, Artificial Sequence
  Description of Artificial Sequence: Synthetic oligonucleotide
  Antisense strand to SEQ ID NO: 528375
ucacuucgcuuaaucuuaa

SEQ ID NO: 528377 - RNA, 19 nt, Artificial Sequence
  Description of Artificial Sequence: Synthetic oligonucleotide
  Sense strand starting at position 3974 of SEQ ID NO: 317991
uuaggaugcucucuggagu

SEQ ID NO: 528378 - RNA, 19 nt, Artificial Sequence
  Description of Artificial Sequence: Synthetic oligonucleotide
  Antisense strand to SEQ ID NO: 528377
acuccagagagcauccuaa

SEQ ID NO: 528379 - RNA, 19 nt, Artificial Sequence
  Description of Artificial Sequence: Synthetic oligonucleotide
  Sense strand starting at position 3975 of SEQ ID NO: 317991
uaggaugcucucuggaguu

SEQ ID NO: 528380 - RNA, 19 nt, Artificial Sequence
  Description of Artificial Sequence: Synthetic oligonucleotide
  Antisense strand to SEQ ID NO: 528379
aacuccagagagcauccua

SEQ ID NO: 528381 - RNA, 19 nt, Artificial Sequence
  Description of Artificial Sequence: Synthetic oligonucleotide
  Sense strand starting at position 55 of SEQ ID NO: 317992
gcugauaugcccuaauuga

SEQ ID NO: 528382 - RNA, 19 nt, Artificial Sequence
  Description of Artificial Sequence: Synthetic oligonucleotide
  Antisense strand to SEQ ID NO: 528381
ucaauuagggcauaucagc

SEQ ID NO: 528383 - RNA, 19 nt, Artificial Sequence
  Description of Artificial Sequence: Synthetic oligonucleotide
  Sense strand starting at position 101 of SEQ ID NO: 317992
agagguaaaucacagacuu

SEQ ID NO: 528384 - RNA, 19 nt, Artificial Sequence
  Description of Artificial Sequence: Synthetic oligonucleotide
  Antisense strand to SEQ ID NO: 528383
aagucugugauuuaccucu

SEQ ID NO: 528385 - RNA, 19 nt, Artificial Sequence
  Description of Artificial Sequence: Synthetic oligonucleotide
  Sense strand starting at position 154 of SEQ ID NO: 317992
aagaguuagcauugucuca

SEQ ID NO: 528386 - RNA, 19 nt, Artificial Sequence
  Description of Artificial Sequence: Synthetic oligonucleotide
  Antisense strand to SEQ ID NO: 528385
ugagacaaugcuaacucuu

SEQ ID NO: 528387 - RNA, 19 nt, Artificial Sequence
  Description of Artificial Sequence: Synthetic oligonucleotide
  Sense strand starting at position 221 of SEQ ID NO: 317992
augguuaagucuuucuaga

SEQ ID NO: 528388 - RNA, 19 nt, Artificial Sequence
  Description of Artificial Sequence: Synthetic oligonucleotide
  Antisense strand to SEQ ID NO: 528387
ucuagaaagacuuaaccau

SEQ ID NO: 528389 - RNA, 19 nt, Artificial Sequence
  Description of Artificial Sequence: Synthetic oligonucleotide
  Sense strand starting at position 223 of SEQ ID NO: 317992
gguuaagucuuucuagaac

SEQ ID NO: 528390 - RNA, 19 nt, Artificial Sequence
  Description of Artificial Sequence: Synthetic oligonucleotide
  Antisense strand to SEQ ID NO: 528389
guucuagaaagacuuaacc

SEQ ID NO: 528391 - RNA, 19 nt, Artificial Sequence
  Description of Artificial Sequence: Synthetic oligonucleotide
  Sense strand starting at position 270 of SEQ ID NO: 317992
cugaacagauuugacauua

SEQ ID NO: 528392 - RNA, 19 nt, Artificial Sequence
  Description of Artificial Sequence: Synthetic oligonucleotide
  Antisense strand to SEQ ID NO: 528391
uaaugucaaaucuguucag

SEQ ID NO: 528393 - RNA, 19 nt, Artificial Sequence
  Description of Artificial Sequence: Synthetic oligonucleotide
  Sense strand starting at position 281 of SEQ ID NO: 317992
ugacauuacccagacgcuu

SEQ ID NO: 528394 - RNA, 19 nt, Artificial Sequence
  Description of Artificial Sequence: Synthetic oligonucleotide
  Antisense strand to SEQ ID NO: 528393
aagcgucuggguaauguca

SEQ ID NO: 528395 - RNA, 19 nt, Artificial Sequence
  Description of Artificial Sequence: Synthetic oligonucleotide
  Sense strand starting at position 379 of SEQ ID NO: 317992
cgcaguuuaggaugaaagu

SEQ ID NO: 528396 - RNA, 19 nt, Artificial Sequence
  Description of Artificial Sequence: Synthetic oligonucleotide
  Antisense strand to SEQ ID NO: 528395
acuuucauccuaaacugcg

SEQ ID NO: 528397 - RNA, 19 nt, Artificial Sequence
  Description of Artificial Sequence: Synthetic oligonucleotide
  Sense strand starting at position 385 of SEQ ID NO: 317992
uuaggaugaaagugcaaua

SEQ ID NO: 528398 - RNA, 19 nt, Artificial Sequence
  Description of Artificial Sequence: Synthetic oligonucleotide
  Antisense strand to SEQ ID NO: 528397
uauugcacuuucauccuaa

SEQ ID NO: 528399 - RNA, 19 nt, Artificial Sequence
  Description of Artificial Sequence: Synthetic oligonucleotide
  Sense strand starting at position 396 of SEQ ID NO: 317992
gugcaauaguucucagaau

SEQ ID NO: 528400 - RNA, 19 nt, Artificial Sequence
  Description of Artificial Sequence: Synthetic oligonucleotide
  Antisense strand to SEQ ID NO: 528399
auucugagaacuauugcac

SEQ ID NO: 528401 - RNA, 19 nt, Artificial Sequence
  Description of Artificial Sequence: Synthetic oligonucleotide
  Sense strand starting at position 475 of SEQ ID NO: 317992
guguguauaggugaggaaa

SEQ ID NO: 528402 - RNA, 19 nt, Artificial Sequence
  Description of Artificial Sequence: Synthetic oligonucleotide
  Antisense strand to SEQ ID NO: 528401
uuuccucaccuauacacac

SEQ ID NO: 528403 - RNA, 19 nt, Artificial Sequence
  Description of Artificial Sequence: Synthetic oligonucleotide
  Sense strand starting at position 557 of SEQ ID NO: 317992
ucaucagaaugcuaaagga

SEQ ID NO: 528404 - RNA, 19 nt, Artificial Sequence
  Description of Artificial Sequence: Synthetic oligonucleotide
  Antisense strand to SEQ ID NO: 528403
uccuuuagcauucugauga

SEQ ID NO: 528405 - RNA, 19 nt, Artificial Sequence
  Description of Artificial Sequence: Synthetic oligonucleotide
  Sense strand starting at position 803 of SEQ ID NO: 317992
agggaacgguucuuacagu

SEQ ID NO: 528406 - RNA, 19 nt, Artificial Sequence
  Description of Artificial Sequence: Synthetic oligonucleotide
  Antisense strand to SEQ ID NO: 528405
acuguaagaaccguucccu

SEQ ID NO: 528407 - RNA, 19 nt, Artificial Sequence
  Description of Artificial Sequence: Synthetic oligonucleotide
  Sense strand starting at position 1467 of SEQ ID NO: 317992
gacgguguuucucuuugga

SEQ ID NO: 528408 - RNA, 19 nt, Artificial Sequence
  Description of Artificial Sequence: Synthetic oligonucleotide
  Antisense strand to SEQ ID NO: 528407
uccaaagagaaacaccguc

SEQ ID NO: 528409 - RNA, 19 nt, Artificial Sequence
  Description of Artificial Sequence: Synthetic oligonucleotide
  Sense strand starting at position 1469 of SEQ ID NO: 317992
cgguguuucucuuuggaaa

SEQ ID NO: 528410 - RNA, 19 nt, Artificial Sequence
  Description of Artificial Sequence: Synthetic oligonucleotide
  Antisense strand to SEQ ID NO: 528409
uuuccaaagagaaacaccg

SEQ ID NO: 528411 - RNA, 19 nt, Artificial Sequence
  Description of Artificial Sequence: Synthetic oligonucleotide
  Sense strand starting at position 1470 of SEQ ID NO: 317992
gguguuucucuuuggaaau

SEQ ID NO: 528412 - RNA, 19 nt, Artificial Sequence
  Description of Artificial Sequence: Synthetic oligonucleotide
  Antisense strand to SEQ ID NO: 528411
auuuccaaagagaaacacc

SEQ ID NO: 528413 - RNA, 19 nt, Artificial Sequence
  Description of Artificial Sequence: Synthetic oligonucleotide
  Sense strand starting at position 1616 of SEQ ID NO: 317992
uugcgagagcaagaaguua

SEQ ID NO: 528414 - RNA, 19 nt, Artificial Sequence
  Description of Artificial Sequence: Synthetic oligonucleotide
  Antisense strand to SEQ ID NO: 528413
uaacuucuugcucucgcaa

SEQ ID NO: 528415 - RNA, 19 nt, Artificial Sequence
  Description of Artificial Sequence: Synthetic oligonucleotide
  Sense strand starting at position 1663 of SEQ ID NO: 317992
ugggauaucugguuuaagu

SEQ ID NO: 528416 - RNA, 19 nt, Artificial Sequence
  Description of Artificial Sequence: Synthetic oligonucleotide
  Antisense strand to SEQ ID NO: 528415
acuuaaaccagauauccca

SEQ ID NO: 528417 - RNA, 19 nt, Artificial Sequence
  Description of Artificial Sequence: Synthetic oligonucleotide
  Sense strand starting at position 1665 of SEQ ID NO: 317992
ggauaucugguuuaaguua

SEQ ID NO: 528418 - RNA, 19 nt, Artificial Sequence
  Description of Artificial Sequence: Synthetic oligonucleotide
  Antisense strand to SEQ ID NO: 528417
uaacuuaaaccagauaucc

SEQ ID NO: 528419 - RNA, 19 nt, Artificial Sequence
  Description of Artificial Sequence: Synthetic oligonucleotide
  Sense strand starting at position 1672 of SEQ ID NO: 317992
ugguuuaaguuacuuaacu

SEQ ID NO: 528420 - RNA, 19 nt, Artificial Sequence
  Description of Artificial Sequence: Synthetic oligonucleotide
  Antisense strand to SEQ ID NO: 528419
aguuaaguaacuuaaacca

SEQ ID NO: 528421 - RNA, 19 nt, Artificial Sequence
  Description of Artificial Sequence: Synthetic oligonucleotide
  Sense strand starting at position 1673 of SEQ ID NO: 317992
gguuuaaguuacuuaacuu

SEQ ID NO: 528422 - RNA, 19 nt, Artificial Sequence
  Description of Artificial Sequence: Synthetic oligonucleotide
  Antisense strand to SEQ ID NO: 528421
aaguuaaguaacuuaaacc

SEQ ID NO: 528423 - RNA, 19 nt, Artificial Sequence
  Description of Artificial Sequence: Synthetic oligonucleotide
  Sense strand starting at position 1747 of SEQ ID NO: 317992
uuaaaucacgcaugacaag

SEQ ID NO: 528424 - RNA, 19 nt, Artificial Sequence
  Description of Artificial Sequence: Synthetic oligonucleotide
  Antisense strand to SEQ ID NO: 528423
cuugucaugcgugauuuaa

SEQ ID NO: 528425 - RNA, 19 nt, Artificial Sequence
  Description of Artificial Sequence: Synthetic oligonucleotide
  Sense strand starting at position 1780 of SEQ ID NO: 317992
guaguaagagcucaguaaa

SEQ ID NO: 528426 - RNA, 19 nt, Artificial Sequence
  Description of Artificial Sequence: Synthetic oligonucleotide
  Antisense strand to SEQ ID NO: 528425
uuuacugagcucuuacuac

SEQ ID NO: 528427 - RNA, 19 nt, Artificial Sequence
  Description of Artificial Sequence: Synthetic oligonucleotide
  Sense strand starting at position 1807 of SEQ ID NO: 317992
cauugcuguuaggcaaaga

SEQ ID NO: 528428 - RNA, 19 nt, Artificial Sequence
  Description of Artificial Sequence: Synthetic oligonucleotide
  Antisense strand to SEQ ID NO: 528427
ucuuugccuaacagcaaug

SEQ ID NO: 528429 - RNA, 19 nt, Artificial Sequence
  Description of Artificial Sequence: Synthetic oligonucleotide
  Sense strand starting at position 1845 of SEQ ID NO: 317992
uuuaauccuccgugguaua

SEQ ID NO: 528430 - RNA, 19 nt, Artificial Sequence
  Description of Artificial Sequence: Synthetic oligonucleotide
  Antisense strand to SEQ ID NO: 528429
uauaccacggaggauuaaa

SEQ ID NO: 528431 - RNA, 19 nt, Artificial Sequence
  Description of Artificial Sequence: Synthetic oligonucleotide
  Sense strand starting at position 1893 of SEQ ID NO: 317992
gcaccuuugagagauucug

SEQ ID NO: 528432 - RNA, 19 nt, Artificial Sequence
  Description of Artificial Sequence: Synthetic oligonucleotide
  Antisense strand to SEQ ID NO: 528431
cagaaucucucaaaggugc

SEQ ID NO: 528433 - RNA, 19 nt, Artificial Sequence
  Description of Artificial Sequence: Synthetic oligonucleotide
  Sense strand starting at position 1901 of SEQ ID NO: 317992
gagagauucuggcccuaau

SEQ ID NO: 528434 - RNA, 19 nt, Artificial Sequence
  Description of Artificial Sequence: Synthetic oligonucleotide
  Antisense strand to SEQ ID NO: 528433
auuagggccagaaucucuc

SEQ ID NO: 528435 - RNA, 19 nt, Artificial Sequence
  Description of Artificial Sequence: Synthetic oligonucleotide
  Sense strand starting at position 2167 of SEQ ID NO: 317992
gcgaguuccaaccaaugag

SEQ ID NO: 528436 - RNA, 19 nt, Artificial Sequence
  Description of Artificial Sequence: Synthetic oligonucleotide
  Antisense strand to SEQ ID NO: 528435
cucauugguuggaacucgc

SEQ ID NO: 528437 - RNA, 19 nt, Artificial Sequence
  Description of Artificial Sequence: Synthetic oligonucleotide
  Sense strand starting at position 2293 of SEQ ID NO: 317992
cggaaucugcgagauucgu

SEQ ID NO: 528438 - RNA, 19 nt, Artificial Sequence
  Description of Artificial Sequence: Synthetic oligonucleotide
  Antisense strand to SEQ ID NO: 528437
acgaaucucgcagauuccg

SEQ ID NO: 528439 - RNA, 19 nt, Artificial Sequence
  Description of Artificial Sequence: Synthetic oligonucleotide
  Sense strand starting at position 2309 of SEQ ID NO: 317992
cgugcagucgauuauccua

SEQ ID NO: 528440 - RNA, 19 nt, Artificial Sequence
  Description of Artificial Sequence: Synthetic oligonucleotide
  Antisense strand to SEQ ID NO: 528439
uaggauaaucgacugcacg

SEQ ID NO: 528441 - RNA, 19 nt, Artificial Sequence
  Description of Artificial Sequence: Synthetic oligonucleotide
  Sense strand starting at position 2570 of SEQ ID NO: 317992
ugcagagacuaaugcauuu

SEQ ID NO: 528442 - RNA, 19 nt, Artificial Sequence
  Description of Artificial Sequence: Synthetic oligonucleotide
  Antisense strand to SEQ ID NO: 528441
aaaugcauuagucucugca

SEQ ID NO: 528443 - RNA, 19 nt, Artificial Sequence
  Description of Artificial Sequence: Synthetic oligonucleotide
  Sense strand starting at position 2911 of SEQ ID NO: 317992
ggguuaaugcgccauucca

SEQ ID NO: 528444 - RNA, 19 nt, Artificial Sequence
  Description of Artificial Sequence: Synthetic oligonucleotide
  Antisense strand to SEQ ID NO: 528443
uggaauggcgcauuaaccc

SEQ ID NO: 528445 - RNA, 19 nt, Artificial Sequence
  Description of Artificial Sequence: Synthetic oligonucleotide
  Sense strand starting at position 3030 of SEQ ID NO: 317992
uuaaauuggacguggagau

SEQ ID NO: 528446 - RNA, 19 nt, Artificial Sequence
  Description of Artificial Sequence: Synthetic oligonucleotide
  Antisense strand to SEQ ID NO: 528445
aucuccacguccaauuuaa

SEQ ID NO: 528447 - RNA, 19 nt, Artificial Sequence
  Description of Artificial Sequence: Synthetic oligonucleotide
  Sense strand starting at position 3040 of SEQ ID NO: 317992
cguggagauccucaauuag

SEQ ID NO: 528448 - RNA, 19 nt, Artificial Sequence
  Description of Artificial Sequence: Synthetic oligonucleotide
  Antisense strand to SEQ ID NO: 528447
cuaauugaggaucuccacg

SEQ ID NO: 528449 - RNA, 19 nt, Artificial Sequence
  Description of Artificial Sequence: Synthetic oligonucleotide
  Sense strand starting at position 3052 of SEQ ID NO: 317992
caauuagaaguguggcgaa

SEQ ID NO: 528450 - RNA, 19 nt, Artificial Sequence
  Description of Artificial Sequence: Synthetic oligonucleotide
  Antisense strand to SEQ ID NO: 528449
uucgccacacuucuaauug

SEQ ID NO: 528451 - RNA, 19 nt, Artificial Sequence
  Description of Artificial Sequence: Synthetic oligonucleotide
  Sense strand starting at position 3247 of SEQ ID NO: 317992
ggcucuuucguucucggua

SEQ ID NO: 528452 - RNA, 19 nt, Artificial Sequence
  Description of Artificial Sequence: Synthetic oligonucleotide
  Antisense strand to SEQ ID NO: 528451
uaccgagaacgaaagagcc

SEQ ID NO: 528453 - RNA, 19 nt, Artificial Sequence
  Description of Artificial Sequence: Synthetic oligonucleotide
  Sense strand starting at position 3418 of SEQ ID NO: 317992
cgcgcuucuccucaaccau

SEQ ID NO: 528454 - RNA, 19 nt, Artificial Sequence
  Description of Artificial Sequence: Synthetic oligonucleotide
  Antisense strand to SEQ ID NO: 528453
augguugaggagaagcgcg

SEQ ID NO: 528455 - RNA, 19 nt, Artificial Sequence
  Description of Artificial Sequence: Synthetic oligonucleotide
  Sense strand starting at position 3490 of SEQ ID NO: 317992
agcucugcuccucaaguga

SEQ ID NO: 528456 - RNA, 19 nt, Artificial Sequence
  Description of Artificial Sequence: Synthetic oligonucleotide
  Antisense strand to SEQ ID NO: 528455
ucacuugaggagcagagcu

SEQ ID NO: 528457 - RNA, 19 nt, Artificial Sequence
  Description of Artificial Sequence: Synthetic oligonucleotide
  Sense strand starting at position 3676 of SEQ ID NO: 317992
cacagaagugcucgcagaa

SEQ ID NO: 528458 - RNA, 19 nt, Artificial Sequence
  Description of Artificial Sequence: Synthetic oligonucleotide
  Antisense strand to SEQ ID NO: 528457
uucugcgagcacuucugug

SEQ ID NO: 528459 - RNA, 19 nt, Artificial Sequence
  Description of Artificial Sequence: Synthetic oligonucleotide
  Sense strand starting at position 3706 of SEQ ID NO: 317992
ccgcgaggcacuucugagu

SEQ ID NO: 528460 - RNA, 19 nt, Artificial Sequence
  Description of Artificial Sequence: Synthetic oligonucleotide
  Antisense strand to SEQ ID NO: 528459
acucagaagugccucgcgg

SEQ ID NO: 528461 - RNA, 19 nt, Artificial Sequence
  Description of Artificial Sequence: Synthetic oligonucleotide
  Sense strand starting at position 35 of SEQ ID NO: 317993
aucaguagucuuuaaaguu

SEQ ID NO: 528462 - RNA, 19 nt, Artificial Sequence
  Description of Artificial Sequence: Synthetic oligonucleotide
  Antisense strand to SEQ ID NO: 528461
aacuuuaaagacuacugau

SEQ ID NO: 528463 - RNA, 19 nt, Artificial Sequence
  Description of Artificial Sequence: Synthetic oligonucleotide
  Sense strand starting at position 131 of SEQ ID NO: 317993
ucucauagccacugggauu

SEQ ID NO: 528464 - RNA, 19 nt, Artificial Sequence
  Description of Artificial Sequence: Synthetic oligonucleotide
  Antisense strand to SEQ ID NO: 528463
aaucccaguggcuaugaga

SEQ ID NO: 528465 - RNA, 19 nt, Artificial Sequence
  Description of Artificial Sequence: Synthetic oligonucleotide
  Sense strand starting at position 142 of SEQ ID NO: 317993
cugggauuguggaguagaa

SEQ ID NO: 528466 - RNA, 19 nt, Artificial Sequence
  Description of Artificial Sequence: Synthetic oligonucleotide
  Antisense strand to SEQ ID NO: 528465
uucuacuccacaaucccag

SEQ ID NO: 528467 - RNA, 19 nt, Artificial Sequence
  Description of Artificial Sequence: Synthetic oligonucleotide
  Sense strand starting at position 159 of SEQ ID NO: 317993
aaaggcuucucuuuauggu

SEQ ID NO: 528468 - RNA, 19 nt, Artificial Sequence
  Description of Artificial Sequence: Synthetic oligonucleotide
  Antisense strand to SEQ ID NO: 528467
accauaaagagaagccuuu

SEQ ID NO: 528469 - RNA, 19 nt, Artificial Sequence
  Description of Artificial Sequence: Synthetic oligonucleotide
  Sense strand starting at position 213 of SEQ ID NO: 317993
gucacagaguuaguugaaa

SEQ ID NO: 528470 - RNA, 19 nt, Artificial Sequence
  Description of Artificial Sequence: Synthetic oligonucleotide
  Antisense strand to SEQ ID NO: 528469
uuucaacuaacucugugac

SEQ ID NO: 528471 - RNA, 19 nt, Artificial Sequence
  Description of Artificial Sequence: Synthetic oligonucleotide
  Sense strand starting at position 242 of SEQ ID NO: 317993
gagccugagccagaauuaa

SEQ ID NO: 528472 - RNA, 19 nt, Artificial Sequence
  Description of Artificial Sequence: Synthetic oligonucleotide
  Antisense strand to SEQ ID NO: 528471
uuaauucuggcucaggcuc

SEQ ID NO: 528473 - RNA, 19 nt, Artificial Sequence
  Description of Artificial Sequence: Synthetic oligonucleotide
  Sense strand starting at position 305 of SEQ ID NO: 317993
augaauuaaucagcuuugu

SEQ ID NO: 528474 - RNA, 19 nt, Artificial Sequence
  Description of Artificial Sequence: Synthetic oligonucleotide
  Antisense strand to SEQ ID NO: 528473
acaaagcugauuaauucau

SEQ ID NO: 528475 - RNA, 19 nt, Artificial Sequence
  Description of Artificial Sequence: Synthetic oligonucleotide
  Sense strand starting at position 321 of SEQ ID NO: 317993
uguaaucaggcacagucau

SEQ ID NO: 528476 - RNA, 19 nt, Artificial Sequence
  Description of Artificial Sequence: Synthetic oligonucleotide
  Antisense strand to SEQ ID NO: 528475
augacugugccugauuaca

SEQ ID NO: 528477 - RNA, 19 nt, Artificial Sequence
  Description of Artificial Sequence: Synthetic oligonucleotide
  Sense strand starting at position 351 of SEQ ID NO: 317993
caacgucuggguuagagaa

SEQ ID NO: 528478 - RNA, 19 nt, Artificial Sequence
  Description of Artificial Sequence: Synthetic oligonucleotide
  Antisense strand to SEQ ID NO: 528477
uucucuaacccagacguug

SEQ ID NO: 528479 - RNA, 19 nt, Artificial Sequence
  Description of Artificial Sequence: Synthetic oligonucleotide
  Sense strand starting at position 407 of SEQ ID NO: 317993
gaccguuugagugaaugaa

SEQ ID NO: 528480 - RNA, 19 nt, Artificial Sequence
  Description of Artificial Sequence: Synthetic oligonucleotide
  Antisense strand to SEQ ID NO: 528479
uucauucacucaaacgguc

SEQ ID NO: 528481 - RNA, 19 nt, Artificial Sequence
  Description of Artificial Sequence: Synthetic oligonucleotide
  Sense strand starting at position 417 of SEQ ID NO: 317993
gugaaugaauagccaguuu

SEQ ID NO: 528482 - RNA, 19 nt, Artificial Sequence
  Description of Artificial Sequence: Synthetic oligonucleotide
  Antisense strand to SEQ ID NO: 528481
aaacuggcuauucauucac

SEQ ID NO: 528483 - RNA, 19 nt, Artificial Sequence
  Description of Artificial Sequence: Synthetic oligonucleotide
  Sense strand starting at position 467 of SEQ ID NO: 317993
guuucuguuggagaaacgu

SEQ ID NO: 528484 - RNA, 19 nt, Artificial Sequence
  Description of Artificial Sequence: Synthetic oligonucleotide
  Antisense strand to SEQ ID NO: 528483
acguuucuccaacagaaac

SEQ ID NO: 528485 - RNA, 19 nt, Artificial Sequence
  Description of Artificial Sequence: Synthetic oligonucleotide
  Sense strand starting at position 492 of SEQ ID NO: 317993
acauuaaauuugugaugga

SEQ ID NO: 528486 - RNA, 19 nt, Artificial Sequence
  Description of Artificial Sequence: Synthetic oligonucleotide
  Antisense strand to SEQ ID NO: 528485
uccaucacaaauuuaaugu

SEQ ID NO: 528487 - RNA, 19 nt, Artificial Sequence
  Description of Artificial Sequence: Synthetic oligonucleotide
  Sense strand starting at position 493 of SEQ ID NO: 317993
cauuaaauuugugauggaa

SEQ ID NO: 528488 - RNA, 19 nt, Artificial Sequence
  Description of Artificial Sequence: Synthetic oligonucleotide
  Antisense strand to SEQ ID NO: 528487
uuccaucacaaauuuaaug

SEQ ID NO: 528489 - RNA, 19 nt, Artificial Sequence
  Description of Artificial Sequence: Synthetic oligonucleotide
  Sense strand starting at position 643 of SEQ ID NO: 317993
cuuucuaucuuucuuggga

SEQ ID NO: 528490 - RNA, 19 nt, Artificial Sequence
  Description of Artificial Sequence: Synthetic oligonucleotide
  Antisense strand to SEQ ID NO: 528489
ucccaagaaagauagaaag

SEQ ID NO: 528491 - RNA, 19 nt, Artificial Sequence
  Description of Artificial Sequence: Synthetic oligonucleotide
  Sense strand starting at position 646 of SEQ ID NO: 317993
ucuaucuuucuugggacuu

SEQ ID NO: 528492 - RNA, 19 nt, Artificial Sequence
  Description of Artificial Sequence: Synthetic oligonucleotide
  Antisense strand to SEQ ID NO: 528491
aagucccaagaaagauaga

SEQ ID NO: 528493 - RNA, 19 nt, Artificial Sequence
  Description of Artificial Sequence: Synthetic oligonucleotide
  Sense strand starting at position 652 of SEQ ID NO: 317993
uuucuugggacuuguggaa

SEQ ID NO: 528494 - RNA, 19 nt, Artificial Sequence
  Description of Artificial Sequence: Synthetic oligonucleotide
  Antisense strand to SEQ ID NO: 528493
uuccacaagucccaagaaa

SEQ ID NO: 528495 - RNA, 19 nt, Artificial Sequence
  Description of Artificial Sequence: Synthetic oligonucleotide
  Sense strand starting at position 785 of SEQ ID NO: 317993
ggacuacuacugugguuau

SEQ ID NO: 528496 - RNA, 19 nt, Artificial Sequence
  Description of Artificial Sequence: Synthetic oligonucleotide
  Antisense strand to SEQ ID NO: 528495
auaaccacaguaguagucc

SEQ ID NO: 528497 - RNA, 19 nt, Artificial Sequence
  Description of Artificial Sequence: Synthetic oligonucleotide
  Sense strand starting at position 869 of SEQ ID NO: 317993
aagaguagccaggguggua

SEQ ID NO: 528498 - RNA, 19 nt, Artificial Sequence
  Description of Artificial Sequence: Synthetic oligonucleotide
  Antisense strand to SEQ ID NO: 528497
uaccacccuggcuacucuu

SEQ ID NO: 528499 - RNA, 19 nt, Artificial Sequence
  Description of Artificial Sequence: Synthetic oligonucleotide
  Sense strand starting at position 946 of SEQ ID NO: 317993
gcuaucuuuguugacauua

SEQ ID NO: 528500 - RNA, 19 nt, Artificial Sequence
  Description of Artificial Sequence: Synthetic oligonucleotide
  Antisense strand to SEQ ID NO: 528499
uaaugucaacaaagauagc

SEQ ID NO: 528501 - RNA, 19 nt, Artificial Sequence
  Description of Artificial Sequence: Synthetic oligonucleotide
  Sense strand starting at position 1060 of SEQ ID NO: 317993
gcugauaugcccuaauuga

SEQ ID NO: 528502 - RNA, 19 nt, Artificial Sequence
  Description of Artificial Sequence: Synthetic oligonucleotide
  Antisense strand to SEQ ID NO: 528501
ucaauuagggcauaucagc

SEQ ID NO: 528503 - RNA, 19 nt, Artificial Sequence
  Description of Artificial Sequence: Synthetic oligonucleotide
  Sense strand starting at position 1226 of SEQ ID NO: 317993
augguuaagucuuucuaga

SEQ ID NO: 528504 - RNA, 19 nt, Artificial Sequence
  Description of Artificial Sequence: Synthetic oligonucleotide
  Antisense strand to SEQ ID NO: 528503
ucuagaaagacuuaaccau

SEQ ID NO: 528505 - RNA, 19 nt, Artificial Sequence
  Description of Artificial Sequence: Synthetic oligonucleotide
  Sense strand starting at position 1228 of SEQ ID NO: 317993
gguuaagucuuucuagaac

SEQ ID NO: 528506 - RNA, 19 nt, Artificial Sequence
  Description of Artificial Sequence: Synthetic oligonucleotide
  Antisense strand to SEQ ID NO: 528505
guucuagaaagacuuaacc

SEQ ID NO: 528507 - RNA, 19 nt, Artificial Sequence
  Description of Artificial Sequence: Synthetic oligonucleotide
  Sense strand starting at position 1275 of SEQ ID NO: 317993
cugaacagauuugacauua

SEQ ID NO: 528508 - RNA, 19 nt, Artificial Sequence
  Description of Artificial Sequence: Synthetic oligonucleotide
  Antisense strand to SEQ ID NO: 528507
uaaugucaaaucuguucag

SEQ ID NO: 528509 - RNA, 19 nt, Artificial Sequence
  Description of Artificial Sequence: Synthetic oligonucleotide
  Sense strand starting at position 1286 of SEQ ID NO: 317993
ugacauuacccagacgcuu

SEQ ID NO: 528510 - RNA, 19 nt, Artificial Sequence
  Description of Artificial Sequence: Synthetic oligonucleotide
  Antisense strand to SEQ ID NO: 528509
aagcgucuggguaauguca

SEQ ID NO: 528511 - RNA, 19 nt, Artificial Sequence
  Description of Artificial Sequence: Synthetic oligonucleotide
  Sense strand starting at position 1390 of SEQ ID NO: 317993
uuaggaugaaagugcaaua

SEQ ID NO: 528512 - RNA, 19 nt, Artificial Sequence
  Description of Artificial Sequence: Synthetic oligonucleotide
  Antisense strand to SEQ ID NO: 528511
uauugcacuuucauccuaa

SEQ ID NO: 528513 - RNA, 19 nt, Artificial Sequence
  Description of Artificial Sequence: Synthetic oligonucleotide
  Sense strand starting at position 1401 of SEQ ID NO: 317993
gugcaauaguucucagaau

SEQ ID NO: 528514 - RNA, 19 nt, Artificial Sequence
  Description of Artificial Sequence: Synthetic oligonucleotide
  Antisense strand to SEQ ID NO: 528513
auucugagaacuauugcac

SEQ ID NO: 528515 - RNA, 19 nt, Artificial Sequence
  Description of Artificial Sequence: Synthetic oligonucleotide
  Sense strand starting at position 1480 of SEQ ID NO: 317993
guguguauaggugaggaaa

SEQ ID NO: 528516 - RNA, 19 nt, Artificial Sequence
  Description of Artificial Sequence: Synthetic oligonucleotide
  Antisense strand to SEQ ID NO: 528515
uuuccucaccuauacacac

SEQ ID NO: 528517 - RNA, 19 nt, Artificial Sequence
  Description of Artificial Sequence: Synthetic oligonucleotide
  Sense strand starting at position 1808 of SEQ ID NO: 317993
agggaacgguucuuacagu

SEQ ID NO: 528518 - RNA, 19 nt, Artificial Sequence
  Description of Artificial Sequence: Synthetic oligonucleotide
  Antisense strand to SEQ ID NO: 528517
acuguaagaaccguucccu

SEQ ID NO: 528519 - RNA, 19 nt, Artificial Sequence
  Description of Artificial Sequence: Synthetic oligonucleotide
  Sense strand starting at position 2475 of SEQ ID NO: 317993
gguguuucucuuuggaaau

SEQ ID NO: 528520 - RNA, 19 nt, Artificial Sequence
  Description of Artificial Sequence: Synthetic oligonucleotide
  Antisense strand to SEQ ID NO: 528519
auuuccaaagagaaacacc

SEQ ID NO: 528521 - RNA, 19 nt, Artificial Sequence
  Description of Artificial Sequence: Synthetic oligonucleotide
  Sense strand starting at position 2621 of SEQ ID NO: 317993
uugcgagagcaagaaguua

SEQ ID NO: 528522 - RNA, 19 nt, Artificial Sequence
  Description of Artificial Sequence: Synthetic oligonucleotide
  Antisense strand to SEQ ID NO: 528521
uaacuucuugcucucgcaa

SEQ ID NO: 528523 - RNA, 19 nt, Artificial Sequence
  Description of Artificial Sequence: Synthetic oligonucleotide
  Sense strand starting at position 2668 of SEQ ID NO: 317993
ugggauaucugguuuaagu

SEQ ID NO: 528524 - RNA, 19 nt, Artificial Sequence
  Description of Artificial Sequence: Synthetic oligonucleotide
  Antisense strand to SEQ ID NO: 528523
acuuaaaccagauauccca

SEQ ID NO: 528525 - RNA, 19 nt, Artificial Sequence
  Description of Artificial Sequence: Synthetic oligonucleotide
  Sense strand starting at position 2670 of SEQ ID NO: 317993
ggauaucugguuuaaguua

SEQ ID NO: 528526 - RNA, 19 nt, Artificial Sequence
  Description of Artificial Sequence: Synthetic oligonucleotide
  Antisense strand to SEQ ID NO: 528525
uaacuuaaaccagauaucc

SEQ ID NO: 528527 - RNA, 19 nt, Artificial Sequence
  Description of Artificial Sequence: Synthetic oligonucleotide
  Sense strand starting at position 2677 of SEQ ID NO: 317993
ugguuuaaguuacuuaacu

SEQ ID NO: 528528 - RNA, 19 nt, Artificial Sequence
  Description of Artificial Sequence: Synthetic oligonucleotide
  Antisense strand to SEQ ID NO: 528527
aguuaaguaacuuaaacca

SEQ ID NO: 528529 - RNA, 19 nt, Artificial Sequence
  Description of Artificial Sequence: Synthetic oligonucleotide
  Sense strand starting at position 2678 of SEQ ID NO: 317993
gguuuaaguuacuuaacuu

SEQ ID NO: 528530 - RNA, 19 nt, Artificial Sequence
  Description of Artificial Sequence: Synthetic oligonucleotide
  Antisense strand to SEQ ID NO: 528529
aaguuaaguaacuuaaacc

SEQ ID NO: 528531 - RNA, 19 nt, Artificial Sequence
  Description of Artificial Sequence: Synthetic oligonucleotide
  Sense strand starting at position 2752 of SEQ ID NO: 317993
uuaaaucacgcaugacaag

SEQ ID NO: 528532 - RNA, 19 nt, Artificial Sequence
  Description of Artificial Sequence: Synthetic oligonucleotide
  Antisense strand to SEQ ID NO: 528531
cuugucaugcgugauuuaa

SEQ ID NO: 528533 - RNA, 19 nt, Artificial Sequence
  Description of Artificial Sequence: Synthetic oligonucleotide
  Sense strand starting at position 2785 of SEQ ID NO: 317993
guaguaagagcucaguaaa

SEQ ID NO: 528534 - RNA, 19 nt, Artificial Sequence
  Description of Artificial Sequence: Synthetic oligonucleotide
  Antisense strand to SEQ ID NO: 528533
uuuacugagcucuuacuac

SEQ ID NO: 528535 - RNA, 19 nt, Artificial Sequence
  Description of Artificial Sequence: Synthetic oligonucleotide
  Sense strand starting at position 2898 of SEQ ID NO: 317993
gcaccuuugagagauucug

SEQ ID NO: 528536 - RNA, 19 nt, Artificial Sequence
  Description of Artificial Sequence: Synthetic oligonucleotide
  Antisense strand to SEQ ID NO: 528535
cagaaucucucaaaggugc

SEQ ID NO: 528537 - RNA, 19 nt, Artificial Sequence
  Description of Artificial Sequence: Synthetic oligonucleotide
  Sense strand starting at position 2906 of SEQ ID NO: 317993
gagagauucuggcccuaau

SEQ ID NO: 528538 - RNA, 19 nt, Artificial Sequence
  Description of Artificial Sequence: Synthetic oligonucleotide
  Antisense strand to SEQ ID NO: 528537
auuagggccagaaucucuc

SEQ ID NO: 528539 - RNA, 19 nt, Artificial Sequence
  Description of Artificial Sequence: Synthetic oligonucleotide
  Sense strand starting at position 3172 of SEQ ID NO: 317993
gcgaguuccaaccaaugag

SEQ ID NO: 528540 - RNA, 19 nt, Artificial Sequence
  Description of Artificial Sequence: Synthetic oligonucleotide
  Antisense strand to SEQ ID NO: 528539
cucauugguuggaacucgc

SEQ ID NO: 528541 - RNA, 19 nt, Artificial Sequence
  Description of Artificial Sequence: Synthetic oligonucleotide
  Sense strand starting at position 116 of SEQ ID NO: 317994
ggacuacuacugugguuau

SEQ ID NO: 528542 - RNA, 19 nt, Artificial Sequence
  Description of Artificial Sequence: Synthetic oligonucleotide
  Antisense strand to SEQ ID NO: 528541
auaaccacaguaguagucc

SEQ ID NO: 528543 - RNA, 19 nt, Artificial Sequence
  Description of Artificial Sequence: Synthetic oligonucleotide
  Sense strand starting at position 200 of SEQ ID NO: 317994
aagaguagccaggguggua

SEQ ID NO: 528544 - RNA, 19 nt, Artificial Sequence
  Description of Artificial Sequence: Synthetic oligonucleotide
  Antisense strand to SEQ ID NO: 528543
uaccacccuggcuacucuu

SEQ ID NO: 528545 - RNA, 19 nt, Artificial Sequence
  Description of Artificial Sequence: Synthetic oligonucleotide
  Sense strand starting at position 213 of SEQ ID NO: 317994
gugguauccuaguuacaca

SEQ ID NO: 528546 - RNA, 19 nt, Artificial Sequence
  Description of Artificial Sequence: Synthetic oligonucleotide
  Antisense strand to SEQ ID NO: 528545
uguguaacuaggauaccac

SEQ ID NO: 528547 - RNA, 19 nt, Artificial Sequence
  Description of Artificial Sequence: Synthetic oligonucleotide
  Sense strand starting at position 274 of SEQ ID NO: 317994
auugcuaucuuuguugaca

SEQ ID NO: 528548 - RNA, 19 nt, Artificial Sequence
  Description of Artificial Sequence: Synthetic oligonucleotide
  Antisense strand to SEQ ID NO: 528547
ugucaacaaagauagcaau

SEQ ID NO: 528549 - RNA, 19 nt, Artificial Sequence
  Description of Artificial Sequence: Synthetic oligonucleotide
  Sense strand starting at position 275 of SEQ ID NO: 317994
uugcuaucuuuguugacau

SEQ ID NO: 528550 - RNA, 19 nt, Artificial Sequence
  Description of Artificial Sequence: Synthetic oligonucleotide
  Antisense strand to SEQ ID NO: 528549
augucaacaaagauagcaa

SEQ ID NO: 528551 - RNA, 19 nt, Artificial Sequence
  Description of Artificial Sequence: Synthetic oligonucleotide
  Sense strand starting at position 277 of SEQ ID NO: 317994
gcuaucuuuguugacauua

SEQ ID NO: 528552 - RNA, 19 nt, Artificial Sequence
  Description of Artificial Sequence: Synthetic oligonucleotide
  Antisense strand to SEQ ID NO: 528551
uaaugucaacaaagauagc

SEQ ID NO: 528553 - RNA, 19 nt, Artificial Sequence
  Description of Artificial Sequence: Synthetic oligonucleotide
  Sense strand starting at position 391 of SEQ ID NO: 317994
gcugauaugcccuaauuga

SEQ ID NO: 528554 - RNA, 19 nt, Artificial Sequence
  Description of Artificial Sequence: Synthetic oligonucleotide
  Antisense strand to SEQ ID NO: 528553
ucaauuagggcauaucagc

SEQ ID NO: 528555 - RNA, 19 nt, Artificial Sequence
  Description of Artificial Sequence: Synthetic oligonucleotide
  Sense strand starting at position 437 of SEQ ID NO: 317994
agagguaaaucacagacuu

SEQ ID NO: 528556 - RNA, 19 nt, Artificial Sequence
  Description of Artificial Sequence: Synthetic oligonucleotide
  Antisense strand to SEQ ID NO: 528555
aagucugugauuuaccucu

SEQ ID NO: 528557 - RNA, 19 nt, Artificial Sequence
  Description of Artificial Sequence: Synthetic oligonucleotide
  Sense strand starting at position 490 of SEQ ID NO: 317994
aagaguuagcauugucuca

SEQ ID NO: 528558 - RNA, 19 nt, Artificial Sequence
  Description of Artificial Sequence: Synthetic oligonucleotide
  Antisense strand to SEQ ID NO: 528557
ugagacaaugcuaacucuu

SEQ ID NO: 528559 - RNA, 19 nt, Artificial Sequence
  Description of Artificial Sequence: Synthetic oligonucleotide
  Sense strand starting at position 557 of SEQ ID NO: 317994
augguuaagucuuucuaga

SEQ ID NO: 528560 - RNA, 19 nt, Artificial Sequence
  Description of Artificial Sequence: Synthetic oligonucleotide
  Antisense strand to SEQ ID NO: 528559
ucuagaaagacuuaaccau

SEQ ID NO: 528561 - RNA, 19 nt, Artificial Sequence
  Description of Artificial Sequence: Synthetic oligonucleotide
  Sense strand starting at position 559 of SEQ ID NO: 317994
gguuaagucuuucuagaac

SEQ ID NO: 528562 - RNA, 19 nt, Artificial Sequence
  Description of Artificial Sequence: Synthetic oligonucleotide
  Antisense strand to SEQ ID NO: 528561
guucuagaaagacuuaacc

SEQ ID NO: 528563 - RNA, 19 nt, Artificial Sequence
  Description of Artificial Sequence: Synthetic oligonucleotide
  Sense strand starting at position 606 of SEQ ID NO: 317994
cugaacagauuugacauua

SEQ ID NO: 528564 - RNA, 19 nt, Artificial Sequence
  Description of Artificial Sequence: Synthetic oligonucleotide
  Antisense strand to SEQ ID NO: 528563
uaaugucaaaucuguucag

SEQ ID NO: 528565 - RNA, 19 nt, Artificial Sequence
  Description of Artificial Sequence: Synthetic oligonucleotide
  Sense strand starting at position 617 of SEQ ID NO: 317994
ugacauuacccagacgcuu

SEQ ID NO: 528566 - RNA, 19 nt, Artificial Sequence
  Description of Artificial Sequence: Synthetic oligonucleotide
  Antisense strand to SEQ ID NO: 528565
aagcgucuggguaauguca

SEQ ID NO: 528567 - RNA, 19 nt, Artificial Sequence
  Description of Artificial Sequence: Synthetic oligonucleotide
  Sense strand starting at position 715 of SEQ ID NO: 317994
cgcaguuuaggaugaaagu

SEQ ID NO: 528568 - RNA, 19 nt, Artificial Sequence
  Description of Artificial Sequence: Synthetic oligonucleotide
  Antisense strand to SEQ ID NO: 528567
acuuucauccuaaacugcg

SEQ ID NO: 528569 - RNA, 19 nt, Artificial Sequence
  Description of Artificial Sequence: Synthetic oligonucleotide
  Sense strand starting at position 721 of SEQ ID NO: 317994
uuaggaugaaagugcaaua

SEQ ID NO: 528570 - RNA, 19 nt, Artificial Sequence
  Description of Artificial Sequence: Synthetic oligonucleotide
  Antisense strand to SEQ ID NO: 528569
uauugcacuuucauccuaa

SEQ ID NO: 528571 - RNA, 19 nt, Artificial Sequence
  Description of Artificial Sequence: Synthetic oligonucleotide
  Sense strand starting at position 732 of SEQ ID NO: 317994
gugcaauaguucucagaau

SEQ ID NO: 528572 - RNA, 19 nt, Artificial Sequence
  Description of Artificial Sequence: Synthetic oligonucleotide
  Antisense strand to SEQ ID NO: 528571
auucugagaacuauugcac

SEQ ID NO: 528573 - RNA, 19 nt, Artificial Sequence
  Description of Artificial Sequence: Synthetic oligonucleotide
  Sense strand starting at position 811 of SEQ ID NO: 317994
guguguauaggugaggaaa

SEQ ID NO: 528574 - RNA, 19 nt, Artificial Sequence
  Description of Artificial Sequence: Synthetic oligonucleotide
  Antisense strand to SEQ ID NO: 528573
uuuccucaccuauacacac

SEQ ID NO: 528575 - RNA, 19 nt, Artificial Sequence
  Description of Artificial Sequence: Synthetic oligonucleotide
  Sense strand starting at position 1139 of SEQ ID NO: 317994
agggaacgguucuuacagu

SEQ ID NO: 528576 - RNA, 19 nt, Artificial Sequence
  Description of Artificial Sequence: Synthetic oligonucleotide
  Antisense strand to SEQ ID NO: 528575
acuguaagaaccguucccu

SEQ ID NO: 528577 - RNA, 19 nt, Artificial Sequence
  Description of Artificial Sequence: Synthetic oligonucleotide
  Sense strand starting at position 1803 of SEQ ID NO: 317994
gacgguguuucucuuugga

SEQ ID NO: 528578 - RNA, 19 nt, Artificial Sequence
  Description of Artificial Sequence: Synthetic oligonucleotide
  Antisense strand to SEQ ID NO: 528577
uccaaagagaaacaccguc

SEQ ID NO: 528579 - RNA, 19 nt, Artificial Sequence
  Description of Artificial Sequence: Synthetic oligonucleotide
  Sense strand starting at position 1805 of SEQ ID NO: 317994
cgguguuucucuuuggaaa

SEQ ID NO: 528580 - RNA, 19 nt, Artificial Sequence
  Description of Artificial Sequence: Synthetic oligonucleotide
  Antisense strand to SEQ ID NO: 528579
uuuccaaagagaaacaccg

SEQ ID NO: 528581 - RNA, 19 nt, Artificial Sequence
  Description of Artificial Sequence: Synthetic oligonucleotide
  Sense strand starting at position 1806 of SEQ ID NO: 317994
gguguuucucuuuggaaau

SEQ ID NO: 528582 - RNA, 19 nt, Artificial Sequence
  Description of Artificial Sequence: Synthetic oligonucleotide
  Antisense strand to SEQ ID NO: 528581
auuuccaaagagaaacacc

SEQ ID NO: 528583 - RNA, 19 nt, Artificial Sequence
  Description of Artificial Sequence: Synthetic oligonucleotide
  Sense strand starting at position 1952 of SEQ ID NO: 317994
uugcgagagcaagaaguua

SEQ ID NO: 528584 - RNA, 19 nt, Artificial Sequence
  Description of Artificial Sequence: Synthetic oligonucleotide
  Antisense strand to SEQ ID NO: 528583
uaacuucuugcucucgcaa

SEQ ID NO: 528585 - RNA, 19 nt, Artificial Sequence
  Description of Artificial Sequence: Synthetic oligonucleotide
  Sense strand starting at position 1999 of SEQ ID NO: 317994
ugggauaucugguuuaagu

SEQ ID NO: 528586 - RNA, 19 nt, Artificial Sequence
  Description of Artificial Sequence: Synthetic oligonucleotide
  Antisense strand to SEQ ID NO: 528585
acuuaaaccagauauccca

SEQ ID NO: 528587 - RNA, 19 nt, Artificial Sequence
  Description of Artificial Sequence: Synthetic oligonucleotide
  Sense strand starting at position 2001 of SEQ ID NO: 317994
ggauaucugguuuaaguua

SEQ ID NO: 528588 - RNA, 19 nt, Artificial Sequence
  Description of Artificial Sequence: Synthetic oligonucleotide
  Antisense strand to SEQ ID NO: 528587
uaacuuaaaccagauaucc

SEQ ID NO: 528589 - RNA, 19 nt, Artificial Sequence
  Description of Artificial Sequence: Synthetic oligonucleotide
  Sense strand starting at position 2008 of SEQ ID NO: 317994
ugguuuaaguuacuuaacu

SEQ ID NO: 528590 - RNA, 19 nt, Artificial Sequence
  Description of Artificial Sequence: Synthetic oligonucleotide
  Antisense strand to SEQ ID NO: 528589
aguuaaguaacuuaaacca

SEQ ID NO: 528591 - RNA, 19 nt, Artificial Sequence
  Description of Artificial Sequence: Synthetic oligonucleotide
  Sense strand starting at position 2009 of SEQ ID NO: 317994
gguuuaaguuacuuaacuu

SEQ ID NO: 528592 - RNA, 19 nt, Artificial Sequence
  Description of Artificial Sequence: Synthetic oligonucleotide
  Antisense strand to SEQ ID NO: 528591
aaguuaaguaacuuaaacc

SEQ ID NO: 528593 - RNA, 19 nt, Artificial Sequence
  Description of Artificial Sequence: Synthetic oligonucleotide
  Sense strand starting at position 2083 of SEQ ID NO: 317994
uuaaaucacgcaugacaag

SEQ ID NO: 528594 - RNA, 19 nt, Artificial Sequence
  Description of Artificial Sequence: Synthetic oligonucleotide
  Antisense strand to SEQ ID NO: 528593
cuugucaugcgugauuuaa

SEQ ID NO: 528595 - RNA, 19 nt, Artificial Sequence
  Description of Artificial Sequence: Synthetic oligonucleotide
  Sense strand starting at position 2116 of SEQ ID NO: 317994
guaguaagagcucaguaaa

SEQ ID NO: 528596 - RNA, 19 nt, Artificial Sequence
  Description of Artificial Sequence: Synthetic oligonucleotide
  Antisense strand to SEQ ID NO: 528595
uuuacugagcucuuacuac

SEQ ID NO: 528597 - RNA, 19 nt, Artificial Sequence
  Description of Artificial Sequence: Synthetic oligonucleotide
  Sense strand starting at position 2143 of SEQ ID NO: 317994
cauugcuguuaggcaaaga

SEQ ID NO: 528598 - RNA, 19 nt, Artificial Sequence
  Description of Artificial Sequence: Synthetic oligonucleotide
  Antisense strand to SEQ ID NO: 528597
ucuuugccuaacagcaaug

SEQ ID NO: 528599 - RNA, 19 nt, Artificial Sequence
  Description of Artificial Sequence: Synthetic oligonucleotide
  Sense strand starting at position 2181 of SEQ ID NO: 317994
uuuaauccuccgugguaua

SEQ ID NO: 528600 - RNA, 19 nt, Artificial Sequence
  Description of Artificial Sequence: Synthetic oligonucleotide
  Antisense strand to SEQ ID NO: 528599
uauaccacggaggauuaaa

SEQ ID NO: 528601 - RNA, 19 nt, Artificial Sequence
  Description of Artificial Sequence: Synthetic oligonucleotide
  Sense strand starting at position 2229 of SEQ ID NO: 317994
gcaccuuugagagauucug

SEQ ID NO: 528602 - RNA, 19 nt, Artificial Sequence
  Description of Artificial Sequence: Synthetic oligonucleotide
  Antisense strand to SEQ ID NO: 528601
cagaaucucucaaaggugc

SEQ ID NO: 528603 - RNA, 19 nt, Artificial Sequence
  Description of Artificial Sequence: Synthetic oligonucleotide
  Sense strand starting at position 2237 of SEQ ID NO: 317994
gagagauucuggcccuaau

SEQ ID NO: 528604 - RNA, 19 nt, Artificial Sequence
  Description of Artificial Sequence: Synthetic oligonucleotide
  Antisense strand to SEQ ID NO: 528603
auuagggccagaaucucuc

SEQ ID NO: 528605 - RNA, 19 nt, Artificial Sequence
  Description of Artificial Sequence: Synthetic oligonucleotide
  Sense strand starting at position 2503 of SEQ ID NO: 317994
gcgaguuccaaccaaugag

SEQ ID NO: 528606 - RNA, 19 nt, Artificial Sequence
  Description of Artificial Sequence: Synthetic oligonucleotide
  Antisense strand to SEQ ID NO: 528605
cucauugguuggaacucgc

SEQ ID NO: 528607 - RNA, 19 nt, Artificial Sequence
  Description of Artificial Sequence: Synthetic oligonucleotide
  Sense strand starting at position 2629 of SEQ ID NO: 317994
cggaaucugcgagauucgu

SEQ ID NO: 528608 - RNA, 19 nt, Artificial Sequence
  Description of Artificial Sequence: Synthetic oligonucleotide
  Antisense strand to SEQ ID NO: 528607
acgaaucucgcagauuccg

SEQ ID NO: 528609 - RNA, 19 nt, Artificial Sequence
  Description of Artificial Sequence: Synthetic oligonucleotide
  Sense strand starting at position 3247 of SEQ ID NO: 317994
ggguuaaugcgccauucca

SEQ ID NO: 528610 - RNA, 19 nt, Artificial Sequence
  Description of Artificial Sequence: Synthetic oligonucleotide
  Antisense strand to SEQ ID NO: 528609
uggaauggcgcauuaaccc

SEQ ID NO: 528611 - RNA, 19 nt, Artificial Sequence
  Description of Artificial Sequence: Synthetic oligonucleotide
  Sense strand starting at position 3366 of SEQ ID NO: 317994
uuaaauuggacguggagau

SEQ ID NO: 528612 - RNA, 19 nt, Artificial Sequence
  Description of Artificial Sequence: Synthetic oligonucleotide
  Antisense strand to SEQ ID NO: 528611
aucuccacguccaauuuaa

SEQ ID NO: 528613 - RNA, 19 nt, Artificial Sequence
  Description of Artificial Sequence: Synthetic oligonucleotide
  Sense strand starting at position 3376 of SEQ ID NO: 317994
cguggagauccucaauuag

SEQ ID NO: 528614 - RNA, 19 nt, Artificial Sequence
  Description of Artificial Sequence: Synthetic oligonucleotide
  Antisense strand to SEQ ID NO: 528613
cuaauugaggaucuccacg

SEQ ID NO: 528615 - RNA, 19 nt, Artificial Sequence
  Description of Artificial Sequence: Synthetic oligonucleotide
  Sense strand starting at position 3388 of SEQ ID NO: 317994
caauuagaaguguggcgaa

SEQ ID NO: 528616 - RNA, 19 nt, Artificial Sequence
  Description of Artificial Sequence: Synthetic oligonucleotide
  Antisense strand to SEQ ID NO: 528615
uucgccacacuucuaauug

SEQ ID NO: 528617 - RNA, 19 nt, Artificial Sequence
  Description of Artificial Sequence: Synthetic oligonucleotide
  Sense strand starting at position 3583 of SEQ ID NO: 317994
ggcucuuucguucucggua

SEQ ID NO: 528618 - RNA, 19 nt, Artificial Sequence
  Description of Artificial Sequence: Synthetic oligonucleotide
  Antisense strand to SEQ ID NO: 528617
uaccgagaacgaaagagcc

SEQ ID NO: 528619 - RNA, 19 nt, Artificial Sequence
  Description of Artificial Sequence: Synthetic oligonucleotide
  Sense strand starting at position 3826 of SEQ ID NO: 317994
agcucugcuccucaaguga

SEQ ID NO: 528620 - RNA, 19 nt, Artificial Sequence
  Description of Artificial Sequence: Synthetic oligonucleotide
  Antisense strand to SEQ ID NO: 528619
ucacuugaggagcagagcu

SEQ ID NO: 528621 - RNA, 19 nt, Artificial Sequence
  Description of Artificial Sequence: Synthetic oligonucleotide
  Sense strand starting at position 858 of SEQ ID NO: 317995
uucucagagucaucauuau

SEQ ID NO: 528622 - RNA, 19 nt, Artificial Sequence
  Description of Artificial Sequence: Synthetic oligonucleotide
  Antisense strand to SEQ ID NO: 528621
auaaugaugacucugagaa

SEQ ID NO: 528623 - RNA, 19 nt, Artificial Sequence
  Description of Artificial Sequence: Synthetic oligonucleotide
  Sense strand starting at position 1133 of SEQ ID NO: 317995
uggaauauauuagggaacu

SEQ ID NO: 528624 - RNA, 19 nt, Artificial Sequence
  Description of Artificial Sequence: Synthetic oligonucleotide
  Antisense strand to SEQ ID NO: 528623
aguucccuaauauauucca

SEQ ID NO: 528625 - RNA, 19 nt, Artificial Sequence
  Description of Artificial Sequence: Synthetic oligonucleotide
  Sense strand starting at position 1134 of SEQ ID NO: 317995
ggaauauauuagggaacua

SEQ ID NO: 528626 - RNA, 19 nt, Artificial Sequence
  Description of Artificial Sequence: Synthetic oligonucleotide
  Antisense strand to SEQ ID NO: 528625
uaguucccuaauauauucc

SEQ ID NO: 528627 - RNA, 19 nt, Artificial Sequence
  Description of Artificial Sequence: Synthetic oligonucleotide
  Sense strand starting at position 2036 of SEQ ID NO: 317995
aauguuaaugauggcuaca

SEQ ID NO: 528628 - RNA, 19 nt, Artificial Sequence
  Description of Artificial Sequence: Synthetic oligonucleotide
  Antisense strand to SEQ ID NO: 528627
uguagccaucauuaacauu

SEQ ID NO: 528629 - RNA, 19 nt, Artificial Sequence
  Description of Artificial Sequence: Synthetic oligonucleotide
  Sense strand starting at position 2038 of SEQ ID NO: 317995
uguuaaugauggcuacaaa

SEQ ID NO: 528630 - RNA, 19 nt, Artificial Sequence
  Description of Artificial Sequence: Synthetic oligonucleotide
  Antisense strand to SEQ ID NO: 528629
uuuguagccaucauuaaca

SEQ ID NO: 528631 - RNA, 19 nt, Artificial Sequence
  Description of Artificial Sequence: Synthetic oligonucleotide
  Sense strand starting at position 2039 of SEQ ID NO: 317995
guuaaugauggcuacaaau

SEQ ID NO: 528632 - RNA, 19 nt, Artificial Sequence
  Description of Artificial Sequence: Synthetic oligonucleotide
  Antisense strand to SEQ ID NO: 528631
auuuguagccaucauuaac

SEQ ID NO: 528633 - RNA, 19 nt, Artificial Sequence
  Description of Artificial Sequence: Synthetic oligonucleotide
  Sense strand starting at position 2056 of SEQ ID NO: 317995
auagacagggcuugaguua

SEQ ID NO: 528634 - RNA, 19 nt, Artificial Sequence
  Description of Artificial Sequence: Synthetic oligonucleotide
  Antisense strand to SEQ ID NO: 528633
uaacucaagcccugucuau

SEQ ID NO: 528635 - RNA, 19 nt, Artificial Sequence
  Description of Artificial Sequence: Synthetic oligonucleotide
  Sense strand starting at position 2063 of SEQ ID NO: 317995
gggcuugaguuacaugauu

SEQ ID NO: 528636 - RNA, 19 nt, Artificial Sequence
  Description of Artificial Sequence: Synthetic oligonucleotide
  Antisense strand to SEQ ID NO: 528635
aaucauguaacucaagccc

SEQ ID NO: 528637 - RNA, 19 nt, Artificial Sequence
  Description of Artificial Sequence: Synthetic oligonucleotide
  Sense strand starting at position 2134 of SEQ ID NO: 317995
aagagauucuaacaguuga

SEQ ID NO: 528638 - RNA, 19 nt, Artificial Sequence
  Description of Artificial Sequence: Synthetic oligonucleotide
  Antisense strand to SEQ ID NO: 528637
ucaacuguuagaaucucuu

SEQ ID NO: 528639 - RNA, 19 nt, Artificial Sequence
  Description of Artificial Sequence: Synthetic oligonucleotide
  Sense strand starting at position 2154 of SEQ ID NO: 317995
acagguuucuagucagaaa

SEQ ID NO: 528640 - RNA, 19 nt, Artificial Sequence
  Description of Artificial Sequence: Synthetic oligonucleotide
  Antisense strand to SEQ ID NO: 528639
uuucugacuagaaaccugu

SEQ ID NO: 528641 - RNA, 19 nt, Artificial Sequence
  Description of Artificial Sequence: Synthetic oligonucleotide
  Sense strand starting at position 2157 of SEQ ID NO: 317995
gguuucuagucagaaacau

SEQ ID NO: 528642 - RNA, 19 nt, Artificial Sequence
  Description of Artificial Sequence: Synthetic oligonucleotide
  Antisense strand to SEQ ID NO: 528641
auguuucugacuagaaacc

SEQ ID NO: 528643 - RNA, 19 nt, Artificial Sequence
  Description of Artificial Sequence: Synthetic oligonucleotide
  Sense strand starting at position 2192 of SEQ ID NO: 317995
gacauauuagcaugaugga

SEQ ID NO: 528644 - RNA, 19 nt, Artificial Sequence
  Description of Artificial Sequence: Synthetic oligonucleotide
  Antisense strand to SEQ ID NO: 528643
uccaucaugcuaauauguc

SEQ ID NO: 528645 - RNA, 19 nt, Artificial Sequence
  Description of Artificial Sequence: Synthetic oligonucleotide
  Sense strand starting at position 2195 of SEQ ID NO: 317995
auauuagcaugauggaaac

SEQ ID NO: 528646 - RNA, 19 nt, Artificial Sequence
  Description of Artificial Sequence: Synthetic oligonucleotide
  Antisense strand to SEQ ID NO: 528645
guuuccaucaugcuaauau

SEQ ID NO: 528647 - RNA, 19 nt, Artificial Sequence
  Description of Artificial Sequence: Synthetic oligonucleotide
  Sense strand starting at position 2201 of SEQ ID NO: 317995
gcaugauggaaacgaucuu

SEQ ID NO: 528648 - RNA, 19 nt, Artificial Sequence
  Description of Artificial Sequence: Synthetic oligonucleotide
  Antisense strand to SEQ ID NO: 528647
aagaucguuuccaucaugc

SEQ ID NO: 528649 - RNA, 19 nt, Artificial Sequence
  Description of Artificial Sequence: Synthetic oligonucleotide
  Sense strand starting at position 2212 of SEQ ID NO: 317995
acgaucuuccagcaacauu

SEQ ID NO: 528650 - RNA, 19 nt, Artificial Sequence
  Description of Artificial Sequence: Synthetic oligonucleotide
  Antisense strand to SEQ ID NO: 528649
aauguugcuggaagaucgu

SEQ ID NO: 528651 - RNA, 19 nt, Artificial Sequence
  Description of Artificial Sequence: Synthetic oligonucleotide
  Sense strand starting at position 2259 of SEQ ID NO: 317995
ucuuacuaacuguaugagu

SEQ ID NO: 528652 - RNA, 19 nt, Artificial Sequence
  Description of Artificial Sequence: Synthetic oligonucleotide
  Antisense strand to SEQ ID NO: 528651
acucauacaguuaguaaga

SEQ ID NO: 528653 - RNA, 19 nt, Artificial Sequence
  Description of Artificial Sequence: Synthetic oligonucleotide
  Sense strand starting at position 2261 of SEQ ID NO: 317995
uuacuaacuguaugaguua

SEQ ID NO: 528654 - RNA, 19 nt, Artificial Sequence
  Description of Artificial Sequence: Synthetic oligonucleotide
  Antisense strand to SEQ ID NO: 528653
uaacucauacaguuaguaa

SEQ ID NO: 528655 - RNA, 19 nt, Artificial Sequence
  Description of Artificial Sequence: Synthetic oligonucleotide
  Sense strand starting at position 2264 of SEQ ID NO: 317995
cuaacuguaugaguuagaa

SEQ ID NO: 528656 - RNA, 19 nt, Artificial Sequence
  Description of Artificial Sequence: Synthetic oligonucleotide
  Antisense strand to SEQ ID NO: 528655
uucuaacucauacaguuag

SEQ ID NO: 528657 - RNA, 19 nt, Artificial Sequence
  Description of Artificial Sequence: Synthetic oligonucleotide
  Sense strand starting at position 2268 of SEQ ID NO: 317995
cuguaugaguuagaauugu

SEQ ID NO: 528658 - RNA, 19 nt, Artificial Sequence
  Description of Artificial Sequence: Synthetic oligonucleotide
  Antisense strand to SEQ ID NO: 528657
acaauucuaacucauacag

SEQ ID NO: 528659 - RNA, 19 nt, Artificial Sequence
  Description of Artificial Sequence: Synthetic oligonucleotide
  Sense strand starting at position 2322 of SEQ ID NO: 317995
aacagugugguuuaaauaa

SEQ ID NO: 528660 - RNA, 19 nt, Artificial Sequence
  Description of Artificial Sequence: Synthetic oligonucleotide
  Antisense strand to SEQ ID NO: 528659
uuauuuaaaccacacuguu

SEQ ID NO: 528661 - RNA, 19 nt, Artificial Sequence
  Description of Artificial Sequence: Synthetic oligonucleotide
  Sense strand starting at position 2781 of SEQ ID NO: 317995
cuacuuuauugcucuguca

SEQ ID NO: 528662 - RNA, 19 nt, Artificial Sequence
  Description of Artificial Sequence: Synthetic oligonucleotide
  Antisense strand to SEQ ID NO: 528661
ugacagagcaauaaaguag

SEQ ID NO: 528663 - RNA, 19 nt, Artificial Sequence
  Description of Artificial Sequence: Synthetic oligonucleotide
  Sense strand starting at position 2783 of SEQ ID NO: 317995
acuuuauugcucugucaug

SEQ ID NO: 528664 - RNA, 19 nt, Artificial Sequence
  Description of Artificial Sequence: Synthetic oligonucleotide
  Antisense strand to SEQ ID NO: 528663
caugacagagcaauaaagu

SEQ ID NO: 528665 - RNA, 19 nt, Artificial Sequence
  Description of Artificial Sequence: Synthetic oligonucleotide
  Sense strand starting at position 2784 of SEQ ID NO: 317995
cuuuauugcucugucauga

SEQ ID NO: 528666 - RNA, 19 nt, Artificial Sequence
  Description of Artificial Sequence: Synthetic oligonucleotide
  Antisense strand to SEQ ID NO: 528665
ucaugacagagcaauaaag

SEQ ID NO: 528667 - RNA, 19 nt, Artificial Sequence
  Description of Artificial Sequence: Synthetic oligonucleotide
  Sense strand starting at position 2919 of SEQ ID NO: 317995
caaggagacuuguaagaag

SEQ ID NO: 528668 - RNA, 19 nt, Artificial Sequence
  Description of Artificial Sequence: Synthetic oligonucleotide
  Antisense strand to SEQ ID NO: 528667
cuucuuacaagucuccuug

SEQ ID NO: 528669 - RNA, 19 nt, Artificial Sequence
  Description of Artificial Sequence: Synthetic oligonucleotide
  Sense strand starting at position 2922 of SEQ ID NO: 317995
ggagacuuguaagaaguuu

SEQ ID NO: 528670 - RNA, 19 nt, Artificial Sequence
  Description of Artificial Sequence: Synthetic oligonucleotide
  Antisense strand to SEQ ID NO: 528669
aaacuucuuacaagucucc

SEQ ID NO: 528671 - RNA, 19 nt, Artificial Sequence
  Description of Artificial Sequence: Synthetic oligonucleotide
  Sense strand starting at position 234 of SEQ ID NO: 317996
guaguacuucuauagcaac

SEQ ID NO: 528672 - RNA, 19 nt, Artificial Sequence
  Description of Artificial Sequence: Synthetic oligonucleotide
  Antisense strand to SEQ ID NO: 528671
guugcuauagaaguacuac

SEQ ID NO: 528673 - RNA, 19 nt, Artificial Sequence
  Description of Artificial Sequence: Synthetic oligonucleotide
  Sense strand starting at position 240 of SEQ ID NO: 317996
cuucuauagcaacacgaua

SEQ ID NO: 528674 - RNA, 19 nt, Artificial Sequence
  Description of Artificial Sequence: Synthetic oligonucleotide
  Antisense strand to SEQ ID NO: 528673
uaucguguugcuauagaag

SEQ ID NO: 528675 - RNA, 19 nt, Artificial Sequence
  Description of Artificial Sequence: Synthetic oligonucleotide
  Sense strand starting at position 271 of SEQ ID NO: 317996
ugggaagauuuagacuacu

SEQ ID NO: 528676 - RNA, 19 nt, Artificial Sequence
  Description of Artificial Sequence: Synthetic oligonucleotide
  Antisense strand to SEQ ID NO: 528675
aguagucuaaaucuuccca

SEQ ID NO: 528677 - RNA, 19 nt, Artificial Sequence
  Description of Artificial Sequence: Synthetic oligonucleotide
  Sense strand starting at position 389 of SEQ ID NO: 317996
guaacuaucuagcuuagaa

SEQ ID NO: 528678 - RNA, 19 nt, Artificial Sequence
  Description of Artificial Sequence: Synthetic oligonucleotide
  Antisense strand to SEQ ID NO: 528677
uucuaagcuagauaguuac

SEQ ID NO: 528679 - RNA, 19 nt, Artificial Sequence
  Description of Artificial Sequence: Synthetic oligonucleotide
  Sense strand starting at position 431 of SEQ ID NO: 317996
agucuauaucaggagucca

SEQ ID NO: 528680 - RNA, 19 nt, Artificial Sequence
  Description of Artificial Sequence: Synthetic oligonucleotide
  Antisense strand to SEQ ID NO: 528679
uggacuccugauauagacu

SEQ ID NO: 528681 - RNA, 19 nt, Artificial Sequence
  Description of Artificial Sequence: Synthetic oligonucleotide
  Sense strand starting at position 445 of SEQ ID NO: 317996
guccauuuguaucaauaac

SEQ ID NO: 528682 - RNA, 19 nt, Artificial Sequence
  Description of Artificial Sequence: Synthetic oligonucleotide
  Antisense strand to SEQ ID NO: 528681
guuauugauacaaauggac

SEQ ID NO: 528683 - RNA, 19 nt, Artificial Sequence
  Description of Artificial Sequence: Synthetic oligonucleotide
  Sense strand starting at position 557 of SEQ ID NO: 317996
aaugaauuagugugguugu

SEQ ID NO: 528684 - RNA, 19 nt, Artificial Sequence
  Description of Artificial Sequence: Synthetic oligonucleotide
  Antisense strand to SEQ ID NO: 528683
acaaccacacuaauucauu

SEQ ID NO: 528685 - RNA, 19 nt, Artificial Sequence
  Description of Artificial Sequence: Synthetic oligonucleotide
  Sense strand starting at position 706 of SEQ ID NO: 317996
acaaguuacuuugcacaga

SEQ ID NO: 528686 - RNA, 19 nt, Artificial Sequence
  Description of Artificial Sequence: Synthetic oligonucleotide
  Antisense strand to SEQ ID NO: 528685
ucugugcaaaguaacuugu

SEQ ID NO: 528687 - RNA, 19 nt, Artificial Sequence
  Description of Artificial Sequence: Synthetic oligonucleotide
  Sense strand starting at position 709 of SEQ ID NO: 317996
aguuacuuugcacagauga

SEQ ID NO: 528688 - RNA, 19 nt, Artificial Sequence
  Description of Artificial Sequence: Synthetic oligonucleotide
  Antisense strand to SEQ ID NO: 528687
ucaucugugcaaaguaacu

SEQ ID NO: 528689 - RNA, 19 nt, Artificial Sequence
  Description of Artificial Sequence: Synthetic oligonucleotide
  Sense strand starting at position 999 of SEQ ID NO: 317996
cgaagugcuauccaagguu

SEQ ID NO: 528690 - RNA, 19 nt, Artificial Sequence
  Description of Artificial Sequence: Synthetic oligonucleotide
  Antisense strand to SEQ ID NO: 528689
aaccuuggauagcacuucg

SEQ ID NO: 528691 - RNA, 19 nt, Artificial Sequence
  Description of Artificial Sequence: Synthetic oligonucleotide
  Sense strand starting at position 1013 of SEQ ID NO: 317996
agguuccuggcagaaucau

SEQ ID NO: 528692 - RNA, 19 nt, Artificial Sequence
  Description of Artificial Sequence: Synthetic oligonucleotide
  Antisense strand to SEQ ID NO: 528691
augauucugccaggaaccu

SEQ ID NO: 528693 - RNA, 19 nt, Artificial Sequence
  Description of Artificial Sequence: Synthetic oligonucleotide
  Sense strand starting at position 1032 of SEQ ID NO: 317996
acuguuguuggaugacaag

SEQ ID NO: 528694 - RNA, 19 nt, Artificial Sequence
  Description of Artificial Sequence: Synthetic oligonucleotide
  Antisense strand to SEQ ID NO: 528693
cuugucauccaacaacagu

SEQ ID NO: 528695 - RNA, 19 nt, Artificial Sequence
  Description of Artificial Sequence: Synthetic oligonucleotide
  Sense strand starting at position 1154 of SEQ ID NO: 317996
cgaacaagucucugagccu

SEQ ID NO: 528696 - RNA, 19 nt, Artificial Sequence
  Description of Artificial Sequence: Synthetic oligonucleotide
  Antisense strand to SEQ ID NO: 528695
aggcucagagacuuguucg

SEQ ID NO: 528697 - RNA, 19 nt, Artificial Sequence
  Description of Artificial Sequence: Synthetic oligonucleotide
  Sense strand starting at position 1184 of SEQ ID NO: 317996
cugugaaaugaauguugau

SEQ ID NO: 528698 - RNA, 19 nt, Artificial Sequence
  Description of Artificial Sequence: Synthetic oligonucleotide
  Antisense strand to SEQ ID NO: 528697
aucaacauucauuucacag

SEQ ID NO: 528699 - RNA, 19 nt, Artificial Sequence
  Description of Artificial Sequence: Synthetic oligonucleotide
  Sense strand starting at position 1252 of SEQ ID NO: 317996
gaaagugacucuuauuuag

SEQ ID NO: 528700 - RNA, 19 nt, Artificial Sequence
  Description of Artificial Sequence: Synthetic oligonucleotide
  Antisense strand to SEQ ID NO: 528699
cuaaauaagagucacuuuc

SEQ ID NO: 528701 - RNA, 19 nt, Artificial Sequence
  Description of Artificial Sequence: Synthetic oligonucleotide
  Sense strand starting at position 1266 of SEQ ID NO: 317996
uuuagauguggccagaaua

SEQ ID NO: 528702 - RNA, 19 nt, Artificial Sequence
  Description of Artificial Sequence: Synthetic oligonucleotide
  Antisense strand to SEQ ID NO: 528701
uauucuggccacaucuaaa

SEQ ID NO: 528703 - RNA, 19 nt, Artificial Sequence
  Description of Artificial Sequence: Synthetic oligonucleotide
  Sense strand starting at position 1482 of SEQ ID NO: 317996
cauauaaauggccgagacu

SEQ ID NO: 528704 - RNA, 19 nt, Artificial Sequence
  Description of Artificial Sequence: Synthetic oligonucleotide
  Antisense strand to SEQ ID NO: 528703
agucucggccauuuauaug

SEQ ID NO: 528705 - RNA, 19 nt, Artificial Sequence
  Description of Artificial Sequence: Synthetic oligonucleotide
  Sense strand starting at position 1577 of SEQ ID NO: 317996
gguguagcucauuaggaga

SEQ ID NO: 528706 - RNA, 19 nt, Artificial Sequence
  Description of Artificial Sequence: Synthetic oligonucleotide
  Antisense strand to SEQ ID NO: 528705
ucuccuaaugagcuacacc

SEQ ID NO: 528707 - RNA, 19 nt, Artificial Sequence
  Description of Artificial Sequence: Synthetic oligonucleotide
  Sense strand starting at position 1739 of SEQ ID NO: 317996
gguggugaguuaccucgaa

SEQ ID NO: 528708 - RNA, 19 nt, Artificial Sequence
  Description of Artificial Sequence: Synthetic oligonucleotide
  Antisense strand to SEQ ID NO: 528707
uucgagguaacucaccacc

SEQ ID NO: 528709 - RNA, 19 nt, Artificial Sequence
  Description of Artificial Sequence: Synthetic oligonucleotide
  Sense strand starting at position 2200 of SEQ ID NO: 317996
gguuaagcauucucacuuc

SEQ ID NO: 528710 - RNA, 19 nt, Artificial Sequence
  Description of Artificial Sequence: Synthetic oligonucleotide
  Antisense strand to SEQ ID NO: 528709
gaagugagaaugcuuaacc

SEQ ID NO: 528711 - RNA, 19 nt, Artificial Sequence
  Description of Artificial Sequence: Synthetic oligonucleotide
  Sense strand starting at position 2269 of SEQ ID NO: 317996
aggcuaccaguuuauuauu

SEQ ID NO: 528712 - RNA, 19 nt, Artificial Sequence
  Description of Artificial Sequence: Synthetic oligonucleotide
  Antisense strand to SEQ ID NO: 528711
aauaauaaacugguagccu

SEQ ID NO: 528713 - RNA, 19 nt, Artificial Sequence
  Description of Artificial Sequence: Synthetic oligonucleotide
  Sense strand starting at position 2977 of SEQ ID NO: 317996
auggcuaacgcucaaaguu

SEQ ID NO: 528714 - RNA, 19 nt, Artificial Sequence
  Description of Artificial Sequence: Synthetic oligonucleotide
  Antisense strand to SEQ ID NO: 528713
aacuuugagcguuagccau

SEQ ID NO: 528715 - RNA, 19 nt, Artificial Sequence
  Description of Artificial Sequence: Synthetic oligonucleotide
  Sense strand starting at position 2990 of SEQ ID NO: 317996
aaaguucucucagccggaa

SEQ ID NO: 528716 - RNA, 19 nt, Artificial Sequence
  Description of Artificial Sequence: Synthetic oligonucleotide
  Antisense strand to SEQ ID NO: 528715
uuccggcugagagaacuuu

SEQ ID NO: 528717 - RNA, 19 nt, Artificial Sequence
  Description of Artificial Sequence: Synthetic oligonucleotide
  Sense strand starting at position 2992 of SEQ ID NO: 317996
aguucucucagccggaaga

SEQ ID NO: 528718 - RNA, 19 nt, Artificial Sequence
  Description of Artificial Sequence: Synthetic oligonucleotide
  Antisense strand to SEQ ID NO: 528717
ucuuccggcugagagaacu

SEQ ID NO: 528719 - RNA, 19 nt, Artificial Sequence
  Description of Artificial Sequence: Synthetic oligonucleotide
  Sense strand starting at position 2993 of SEQ ID NO: 317996
guucucucagccggaagaa

SEQ ID NO: 528720 - RNA, 19 nt, Artificial Sequence
  Description of Artificial Sequence: Synthetic oligonucleotide
  Antisense strand to SEQ ID NO: 528719
uucuuccggcugagagaac

SEQ ID NO: 528721 - RNA, 19 nt, Artificial Sequence
  Description of Artificial Sequence: Synthetic oligonucleotide
  Sense strand starting at position 3190 of SEQ ID NO: 317996
ggugcuaucaaucagacga

SEQ ID NO: 528722 - RNA, 19 nt, Artificial Sequence
  Description of Artificial Sequence: Synthetic oligonucleotide
  Antisense strand to SEQ ID NO: 528721
ucgucugauugauagcacc

SEQ ID NO: 528723 - RNA, 19 nt, Artificial Sequence
  Description of Artificial Sequence: Synthetic oligonucleotide
  Sense strand starting at position 3290 of SEQ ID NO: 317996
caaguuaaguucuugagga

SEQ ID NO: 528724 - RNA, 19 nt, Artificial Sequence
  Description of Artificial Sequence: Synthetic oligonucleotide
  Antisense strand to SEQ ID NO: 528723
uccucaagaacuuaacuug

SEQ ID NO: 528725 - RNA, 19 nt, Artificial Sequence
  Description of Artificial Sequence: Synthetic oligonucleotide
  Sense strand starting at position 3605 of SEQ ID NO: 317996
ucugcaacuggguggaaau

SEQ ID NO: 528726 - RNA, 19 nt, Artificial Sequence
  Description of Artificial Sequence: Synthetic oligonucleotide
  Antisense strand to SEQ ID NO: 528725
auuuccacccaguugcaga

SEQ ID NO: 528727 - RNA, 19 nt, Artificial Sequence
  Description of Artificial Sequence: Synthetic oligonucleotide
  Sense strand starting at position 3606 of SEQ ID NO: 317996
cugcaacuggguggaaauu

SEQ ID NO: 528728 - RNA, 19 nt, Artificial Sequence
  Description of Artificial Sequence: Synthetic oligonucleotide
  Antisense strand to SEQ ID NO: 528727
aauuuccacccaguugcag

SEQ ID NO: 528729 - RNA, 19 nt, Artificial Sequence
  Description of Artificial Sequence: Synthetic oligonucleotide
  Sense strand starting at position 3631 of SEQ ID NO: 317996
cuggguucuggguacucaa

SEQ ID NO: 528730 - RNA, 19 nt, Artificial Sequence
  Description of Artificial Sequence: Synthetic oligonucleotide
  Antisense strand to SEQ ID NO: 528729
uugaguacccagaacccag

SEQ ID NO: 528731 - RNA, 19 nt, Artificial Sequence
  Description of Artificial Sequence: Synthetic oligonucleotide
  Sense strand starting at position 3634 of SEQ ID NO: 317996
gguucuggguacucaaaga

SEQ ID NO: 528732 - RNA, 19 nt, Artificial Sequence
  Description of Artificial Sequence: Synthetic oligonucleotide
  Antisense strand to SEQ ID NO: 528731
ucuuugaguacccagaacc

SEQ ID NO: 528733 - RNA, 19 nt, Artificial Sequence
  Description of Artificial Sequence: Synthetic oligonucleotide
  Sense strand starting at position 3712 of SEQ ID NO: 317996
ggaagcuguaugugguaaa

SEQ ID NO: 528734 - RNA, 19 nt, Artificial Sequence
  Description of Artificial Sequence: Synthetic oligonucleotide
  Antisense strand to SEQ ID NO: 528733
uuuaccacauacagcuucc

SEQ ID NO: 528735 - RNA, 19 nt, Artificial Sequence
  Description of Artificial Sequence: Synthetic oligonucleotide
  Sense strand starting at position 3724 of SEQ ID NO: 317996
ugguaaaugguguggaaga

SEQ ID NO: 528736 - RNA, 19 nt, Artificial Sequence
  Description of Artificial Sequence: Synthetic oligonucleotide
  Antisense strand to SEQ ID NO: 528735
ucuuccacaccauuuacca

SEQ ID NO: 528737 - RNA, 19 nt, Artificial Sequence
  Description of Artificial Sequence: Synthetic oligonucleotide
  Sense strand starting at position 3805 of SEQ ID NO: 317996
guuugcauuggguaucuga

SEQ ID NO: 528738 - RNA, 19 nt, Artificial Sequence
  Description of Artificial Sequence: Synthetic oligonucleotide
  Antisense strand to SEQ ID NO: 528737
ucagauacccaaugcaaac

SEQ ID NO: 528739 - RNA, 19 nt, Artificial Sequence
  Description of Artificial Sequence: Synthetic oligonucleotide
  Sense strand starting at position 3808 of SEQ ID NO: 317996
ugcauuggguaucugacau

SEQ ID NO: 528740 - RNA, 19 nt, Artificial Sequence
  Description of Artificial Sequence: Synthetic oligonucleotide
  Antisense strand to SEQ ID NO: 528739
augucagauacccaaugca

SEQ ID NO: 528741 - RNA, 19 nt, Artificial Sequence
  Description of Artificial Sequence: Synthetic oligonucleotide
  Sense strand starting at position 3820 of SEQ ID NO: 317996
cugacauuccugcauaggu

SEQ ID NO: 528742 - RNA, 19 nt, Artificial Sequence
  Description of Artificial Sequence: Synthetic oligonucleotide
  Antisense strand to SEQ ID NO: 528741
accuaugcaggaaugucag

SEQ ID NO: 528743 - RNA, 19 nt, Artificial Sequence
  Description of Artificial Sequence: Synthetic oligonucleotide
  Sense strand starting at position 3928 of SEQ ID NO: 317996
caccuagucguagauugau

SEQ ID NO: 528744 - RNA, 19 nt, Artificial Sequence
  Description of Artificial Sequence: Synthetic oligonucleotide
  Antisense strand to SEQ ID NO: 528743
aucaaucuacgacuaggug

SEQ ID NO: 528745 - RNA, 19 nt, Artificial Sequence
  Description of Artificial Sequence: Synthetic oligonucleotide
  Sense strand starting at position 3937 of SEQ ID NO: 317996
guagauugaucacugguuu

SEQ ID NO: 528746 - RNA, 19 nt, Artificial Sequence
  Description of Artificial Sequence: Synthetic oligonucleotide
  Antisense strand to SEQ ID NO: 528745
aaaccagugaucaaucuac

SEQ ID NO: 528747 - RNA, 19 nt, Artificial Sequence
  Description of Artificial Sequence: Synthetic oligonucleotide
  Sense strand starting at position 3938 of SEQ ID NO: 317996
uagauugaucacugguuug

SEQ ID NO: 528748 - RNA, 19 nt, Artificial Sequence
  Description of Artificial Sequence: Synthetic oligonucleotide
  Antisense strand to SEQ ID NO: 528747
caaaccagugaucaaucua

SEQ ID NO: 528749 - RNA, 19 nt, Artificial Sequence
  Description of Artificial Sequence: Synthetic oligonucleotide
  Sense strand starting at position 3957 of SEQ ID NO: 317996
ccaguuguuaguugagaga

SEQ ID NO: 528750 - RNA, 19 nt, Artificial Sequence
  Description of Artificial Sequence: Synthetic oligonucleotide
  Antisense strand to SEQ ID NO: 528749
ucucucaacuaacaacugg

SEQ ID NO: 528751 - RNA, 19 nt, Artificial Sequence
  Description of Artificial Sequence: Synthetic oligonucleotide
  Sense strand starting at position 37 of SEQ ID NO: 317997
agucucucccaugaugaua

SEQ ID NO: 528752 - RNA, 19 nt, Artificial Sequence
  Description of Artificial Sequence: Synthetic oligonucleotide
  Antisense strand to SEQ ID NO: 528751
uaucaucaugggagagacu

SEQ ID NO: 528753 - RNA, 19 nt, Artificial Sequence
  Description of Artificial Sequence: Synthetic oligonucleotide
  Sense strand starting at position 56 of SEQ ID NO: 317997
gggugcuguagagaagaau

SEQ ID NO: 528754 - RNA, 19 nt, Artificial Sequence
  Description of Artificial Sequence: Synthetic oligonucleotide
  Antisense strand to SEQ ID NO: 528753
auucuucucuacagcaccc

SEQ ID NO: 528755 - RNA, 19 nt, Artificial Sequence
  Description of Artificial Sequence: Synthetic oligonucleotide
  Sense strand starting at position 98 of SEQ ID NO: 317997
caguuagaacuguaaguaa

SEQ ID NO: 528756 - RNA, 19 nt, Artificial Sequence
  Description of Artificial Sequence: Synthetic oligonucleotide
  Antisense strand to SEQ ID NO: 528755
uuacuuacaguucuaacug

SEQ ID NO: 528757 - RNA, 19 nt, Artificial Sequence
  Description of Artificial Sequence: Synthetic oligonucleotide
  Sense strand starting at position 289 of SEQ ID NO: 317997
uaaagagaaugaugagauc

SEQ ID NO: 528758 - RNA, 19 nt, Artificial Sequence
  Description of Artificial Sequence: Synthetic oligonucleotide
  Antisense strand to SEQ ID NO: 528757
gaucucaucauucucuuua

SEQ ID NO: 528759 - RNA, 19 nt, Artificial Sequence
  Description of Artificial Sequence: Synthetic oligonucleotide
  Sense strand starting at position 597 of SEQ ID NO: 317997
cagccugugcgacaagauu

SEQ ID NO: 528760 - RNA, 19 nt, Artificial Sequence
  Description of Artificial Sequence: Synthetic oligonucleotide
  Antisense strand to SEQ ID NO: 528759
aaucuugucgcacaggcug

SEQ ID NO: 528761 - RNA, 19 nt, Artificial Sequence
  Description of Artificial Sequence: Synthetic oligonucleotide
  Sense strand starting at position 603 of SEQ ID NO: 317997
gugcgacaagauugaaacu

SEQ ID NO: 528762 - RNA, 19 nt, Artificial Sequence
  Description of Artificial Sequence: Synthetic oligonucleotide
  Antisense strand to SEQ ID NO: 528761
aguuucaaucuugucgcac

SEQ ID NO: 528763 - RNA, 19 nt, Artificial Sequence
  Description of Artificial Sequence: Synthetic oligonucleotide
  Sense strand starting at position 1127 of SEQ ID NO: 317997
acuuucugguaguuaauua

SEQ ID NO: 528764 - RNA, 19 nt, Artificial Sequence
  Description of Artificial Sequence: Synthetic oligonucleotide
  Antisense strand to SEQ ID NO: 528763
uaauuaacuaccagaaagu

SEQ ID NO: 528765 - RNA, 19 nt, Artificial Sequence
  Description of Artificial Sequence: Synthetic oligonucleotide
  Sense strand starting at position 1135 of SEQ ID NO: 317997
guaguuaauuacuucuuga

SEQ ID NO: 528766 - RNA, 19 nt, Artificial Sequence
  Description of Artificial Sequence: Synthetic oligonucleotide
  Antisense strand to SEQ ID NO: 528765
ucaagaaguaauuaacuac

SEQ ID NO: 528767 - RNA, 19 nt, Artificial Sequence
  Description of Artificial Sequence: Synthetic oligonucleotide
  Sense strand starting at position 1189 of SEQ ID NO: 317997
uuugauucggugcaccaaa

SEQ ID NO: 528768 - RNA, 19 nt, Artificial Sequence
  Description of Artificial Sequence: Synthetic oligonucleotide
  Antisense strand to SEQ ID NO: 528767
uuuggugcaccgaaucaaa

SEQ ID NO: 528769 - RNA, 19 nt, Artificial Sequence
  Description of Artificial Sequence: Synthetic oligonucleotide
  Sense strand starting at position 1212 of SEQ ID NO: 317997
cucagaaauuucuggaauc

SEQ ID NO: 528770 - RNA, 19 nt, Artificial Sequence
  Description of Artificial Sequence: Synthetic oligonucleotide
  Antisense strand to SEQ ID NO: 528769
gauuccagaaauuucugag

SEQ ID NO: 528771 - RNA, 19 nt, Artificial Sequence
  Description of Artificial Sequence: Synthetic oligonucleotide
  Sense strand starting at position 1213 of SEQ ID NO: 317997
ucagaaauuucuggaauca

SEQ ID NO: 528772 - RNA, 19 nt, Artificial Sequence
  Description of Artificial Sequence: Synthetic oligonucleotide
  Antisense strand to SEQ ID NO: 528771
ugauuccagaaauuucuga

SEQ ID NO: 528773 - RNA, 19 nt, Artificial Sequence
  Description of Artificial Sequence: Synthetic oligonucleotide
  Sense strand starting at position 1388 of SEQ ID NO: 317997
gacuucgccgaaugauaga

SEQ ID NO: 528774 - RNA, 19 nt, Artificial Sequence
  Description of Artificial Sequence: Synthetic oligonucleotide
  Antisense strand to SEQ ID NO: 528773
ucuaucauucggcgaaguc

SEQ ID NO: 528775 - RNA, 19 nt, Artificial Sequence
  Description of Artificial Sequence: Synthetic oligonucleotide
  Sense strand starting at position 1413 of SEQ ID NO: 317997
cuuccauacugagcgaaca

SEQ ID NO: 528776 - RNA, 19 nt, Artificial Sequence
  Description of Artificial Sequence: Synthetic oligonucleotide
  Antisense strand to SEQ ID NO: 528775
uguucgcucaguauggaag

SEQ ID NO: 528777 - RNA, 19 nt, Artificial Sequence
  Description of Artificial Sequence: Synthetic oligonucleotide
  Sense strand starting at position 1489 of SEQ ID NO: 317997
gccugaaaggucagcggua

SEQ ID NO: 528778 - RNA, 19 nt, Artificial Sequence
  Description of Artificial Sequence: Synthetic oligonucleotide
  Antisense strand to SEQ ID NO: 528777
uaccgcugaccuuucaggc

SEQ ID NO: 528779 - RNA, 19 nt, Artificial Sequence
  Description of Artificial Sequence: Synthetic oligonucleotide
  Sense strand starting at position 2195 of SEQ ID NO: 317997
caagcuuuggagcaagauu

SEQ ID NO: 528780 - RNA, 19 nt, Artificial Sequence
  Description of Artificial Sequence: Synthetic oligonucleotide
  Antisense strand to SEQ ID NO: 528779
aaucuugcuccaaagcuug

SEQ ID NO: 528781 - RNA, 19 nt, Artificial Sequence
  Description of Artificial Sequence: Synthetic oligonucleotide
  Sense strand starting at position 2242 of SEQ ID NO: 317997
uugauccaccgcuaagagu

SEQ ID NO: 528782 - RNA, 19 nt, Artificial Sequence
  Description of Artificial Sequence: Synthetic oligonucleotide
  Antisense strand to SEQ ID NO: 528781
acucuuagcgguggaucaa

SEQ ID NO: 528783 - RNA, 19 nt, Artificial Sequence
  Description of Artificial Sequence: Synthetic oligonucleotide
  Sense strand starting at position 2307 of SEQ ID NO: 317997
gccuaaugggaauaugguu

SEQ ID NO: 528784 - RNA, 19 nt, Artificial Sequence
  Description of Artificial Sequence: Synthetic oligonucleotide
  Antisense strand to SEQ ID NO: 528783
aaccauauucccauuaggc

SEQ ID NO: 528785 - RNA, 19 nt, Artificial Sequence
  Description of Artificial Sequence: Synthetic oligonucleotide
  Sense strand starting at position 2313 of SEQ ID NO: 317997
ugggaauaugguugucccu

SEQ ID NO: 528786 - RNA, 19 nt, Artificial Sequence
  Description of Artificial Sequence: Synthetic oligonucleotide
  Antisense strand to SEQ ID NO: 528785
agggacaaccauauuccca

SEQ ID NO: 528787 - RNA, 19 nt, Artificial Sequence
  Description of Artificial Sequence: Synthetic oligonucleotide
  Sense strand starting at position 2315 of SEQ ID NO: 317997
ggaauaugguugucccuug

SEQ ID NO: 528788 - RNA, 19 nt, Artificial Sequence
  Description of Artificial Sequence: Synthetic oligonucleotide
  Antisense strand to SEQ ID NO: 528787
caagggacaaccauauucc

SEQ ID NO: 528789 - RNA, 19 nt, Artificial Sequence
  Description of Artificial Sequence: Synthetic oligonucleotide
  Sense strand starting at position 2469 of SEQ ID NO: 317997
cuuuguguuacgucucuau

SEQ ID NO: 528790 - RNA, 19 nt, Artificial Sequence
  Description of Artificial Sequence: Synthetic oligonucleotide
  Antisense strand to SEQ ID NO: 528789
auagagacguaacacaaag

SEQ ID NO: 528791 - RNA, 19 nt, Artificial Sequence
  Description of Artificial Sequence: Synthetic oligonucleotide
  Sense strand starting at position 2473 of SEQ ID NO: 317997
guguuacgucucuauaauc

SEQ ID NO: 528792 - RNA, 19 nt, Artificial Sequence
  Description of Artificial Sequence: Synthetic oligonucleotide
  Antisense strand to SEQ ID NO: 528791
gauuauagagacguaacac

SEQ ID NO: 528793 - RNA, 19 nt, Artificial Sequence
  Description of Artificial Sequence: Synthetic oligonucleotide
  Sense strand starting at position 2529 of SEQ ID NO: 317997
augugauugcugcaaaguu

SEQ ID NO: 528794 - RNA, 19 nt, Artificial Sequence
  Description of Artificial Sequence: Synthetic oligonucleotide
  Antisense strand to SEQ ID NO: 528793
aacuuugcagcaaucacau

SEQ ID NO: 528795 - RNA, 19 nt, Artificial Sequence
  Description of Artificial Sequence: Synthetic oligonucleotide
  Sense strand starting at position 2539 of SEQ ID NO: 317997
ugcaaaguuuaugugauag

SEQ ID NO: 528796 - RNA, 19 nt, Artificial Sequence
  Description of Artificial Sequence: Synthetic oligonucleotide
  Antisense strand to SEQ ID NO: 528795
cuaucacauaaacuuugca

SEQ ID NO: 528797 - RNA, 19 nt, Artificial Sequence
  Description of Artificial Sequence: Synthetic oligonucleotide
  Sense strand starting at position 2579 of SEQ ID NO: 317997
guugguuguuacuuaacau

SEQ ID NO: 528798 - RNA, 19 nt, Artificial Sequence
  Description of Artificial Sequence: Synthetic oligonucleotide
  Antisense strand to SEQ ID NO: 528797
auguuaaguaacaaccaac

SEQ ID NO: 528799 - RNA, 19 nt, Artificial Sequence
  Description of Artificial Sequence: Synthetic oligonucleotide
  Sense strand starting at position 2610 of SEQ ID NO: 317997
uggacuuggcuuuguauca

SEQ ID NO: 528800 - RNA, 19 nt, Artificial Sequence
  Description of Artificial Sequence: Synthetic oligonucleotide
  Antisense strand to SEQ ID NO: 528799
ugauacaaagccaagucca

SEQ ID NO: 528801 - RNA, 19 nt, Artificial Sequence
  Description of Artificial Sequence: Synthetic oligonucleotide
  Sense strand starting at position 2611 of SEQ ID NO: 317997
ggacuuggcuuuguaucau

SEQ ID NO: 528802 - RNA, 19 nt, Artificial Sequence
  Description of Artificial Sequence: Synthetic oligonucleotide
  Antisense strand to SEQ ID NO: 528801
augauacaaagccaagucc

SEQ ID NO: 528803 - RNA, 19 nt, Artificial Sequence
  Description of Artificial Sequence: Synthetic oligonucleotide
  Sense strand starting at position 2711 of SEQ ID NO: 317997
ccauacauugcuggugaaa

SEQ ID NO: 528804 - RNA, 19 nt, Artificial Sequence
  Description of Artificial Sequence: Synthetic oligonucleotide
  Antisense strand to SEQ ID NO: 528803
uuucaccagcaauguaugg

SEQ ID NO: 528805 - RNA, 19 nt, Artificial Sequence
  Description of Artificial Sequence: Synthetic oligonucleotide
  Sense strand starting at position 2782 of SEQ ID NO: 317997
ugaagacuugcaugcaguu

SEQ ID NO: 528806 - RNA, 19 nt, Artificial Sequence
  Description of Artificial Sequence: Synthetic oligonucleotide
  Antisense strand to SEQ ID NO: 528805
aacugcaugcaagucuuca

SEQ ID NO: 528807 - RNA, 19 nt, Artificial Sequence
  Description of Artificial Sequence: Synthetic oligonucleotide
  Sense strand starting at position 2872 of SEQ ID NO: 317997
uaaacagugguguauccau

SEQ ID NO: 528808 - RNA, 19 nt, Artificial Sequence
  Description of Artificial Sequence: Synthetic oligonucleotide
  Antisense strand to SEQ ID NO: 528807
auggauacaccacuguuua

SEQ ID NO: 528809 - RNA, 19 nt, Artificial Sequence
  Description of Artificial Sequence: Synthetic oligonucleotide
  Sense strand starting at position 3127 of SEQ ID NO: 317997
gauuguggugguuacagaa

SEQ ID NO: 528810 - RNA, 19 nt, Artificial Sequence
  Description of Artificial Sequence: Synthetic oligonucleotide
  Antisense strand to SEQ ID NO: 528809
uucuguaaccaccacaauc

SEQ ID NO: 528811 - RNA, 19 nt, Artificial Sequence
  Description of Artificial Sequence: Synthetic oligonucleotide
  Sense strand starting at position 3137 of SEQ ID NO: 317997
guuacagaacuguguaguu

SEQ ID NO: 528812 - RNA, 19 nt, Artificial Sequence
  Description of Artificial Sequence: Synthetic oligonucleotide
  Antisense strand to SEQ ID NO: 528811
aacuacacaguucuguaac

SEQ ID NO: 528813 - RNA, 19 nt, Artificial Sequence
  Description of Artificial Sequence: Synthetic oligonucleotide
  Sense strand starting at position 3142 of SEQ ID NO: 317997
agaacuguguaguuaggaa

SEQ ID NO: 528814 - RNA, 19 nt, Artificial Sequence
  Description of Artificial Sequence: Synthetic oligonucleotide
  Antisense strand to SEQ ID NO: 528813
uuccuaacuacacaguucu

SEQ ID NO: 528815 - RNA, 19 nt, Artificial Sequence
  Description of Artificial Sequence: Synthetic oligonucleotide
  Sense strand starting at position 3239 of SEQ ID NO: 317997
uuaaaugugaaaugaaggu

SEQ ID NO: 528816 - RNA, 19 nt, Artificial Sequence
  Description of Artificial Sequence: Synthetic oligonucleotide
  Antisense strand to SEQ ID NO: 528815
accuucauuucacauuuaa

SEQ ID NO: 528817 - RNA, 19 nt, Artificial Sequence
  Description of Artificial Sequence: Synthetic oligonucleotide
  Sense strand starting at position 3243 of SEQ ID NO: 317997
augugaaaugaagguguua

SEQ ID NO: 528818 - RNA, 19 nt, Artificial Sequence
  Description of Artificial Sequence: Synthetic oligonucleotide
  Antisense strand to SEQ ID NO: 528817
uaacaccuucauuucacau

SEQ ID NO: 528819 - RNA, 19 nt, Artificial Sequence
  Description of Artificial Sequence: Synthetic oligonucleotide
  Sense strand starting at position 3245 of SEQ ID NO: 317997
gugaaaugaagguguuauu

SEQ ID NO: 528820 - RNA, 19 nt, Artificial Sequence
  Description of Artificial Sequence: Synthetic oligonucleotide
  Antisense strand to SEQ ID NO: 528819
aauaacaccuucauuucac

SEQ ID NO: 528821 - RNA, 19 nt, Artificial Sequence
  Description of Artificial Sequence: Synthetic oligonucleotide
  Sense strand starting at position 3451 of SEQ ID NO: 317997
aagugaacauuuggaugaa

SEQ ID NO: 528822 - RNA, 19 nt, Artificial Sequence
  Description of Artificial Sequence: Synthetic oligonucleotide
  Antisense strand to SEQ ID NO: 528821
uucauccaaauguucacuu

SEQ ID NO: 528823 - RNA, 19 nt, Artificial Sequence
  Description of Artificial Sequence: Synthetic oligonucleotide
  Sense strand starting at position 3452 of SEQ ID NO: 317997
agugaacauuuggaugaaa

SEQ ID NO: 528824 - RNA, 19 nt, Artificial Sequence
  Description of Artificial Sequence: Synthetic oligonucleotide
  Antisense strand to SEQ ID NO: 528823
uuucauccaaauguucacu

SEQ ID NO: 528825 - RNA, 19 nt, Artificial Sequence
  Description of Artificial Sequence: Synthetic oligonucleotide
  Sense strand starting at position 3503 of SEQ ID NO: 317997
uuagaauaauugucaguac

SEQ ID NO: 528826 - RNA, 19 nt, Artificial Sequence
  Description of Artificial Sequence: Synthetic oligonucleotide
  Antisense strand to SEQ ID NO: 528825
guacugacaauuauucuaa

SEQ ID NO: 528827 - RNA, 19 nt, Artificial Sequence
  Description of Artificial Sequence: Synthetic oligonucleotide
  Sense strand starting at position 3744 of SEQ ID NO: 317997
agacguaaguggucucauu

SEQ ID NO: 528828 - RNA, 19 nt, Artificial Sequence
  Description of Artificial Sequence: Synthetic oligonucleotide
  Antisense strand to SEQ ID NO: 528827
aaugagaccacuuacgucu

SEQ ID NO: 528829 - RNA, 19 nt, Artificial Sequence
  Description of Artificial Sequence: Synthetic oligonucleotide
  Sense strand starting at position 3839 of SEQ ID NO: 317997
guaguaucaagaugcauga

SEQ ID NO: 528830 - RNA, 19 nt, Artificial Sequence
  Description of Artificial Sequence: Synthetic oligonucleotide
  Antisense strand to SEQ ID NO: 528829
ucaugcaucuugauacuac

SEQ ID NO: 528831 - RNA, 19 nt, Artificial Sequence
  Description of Artificial Sequence: Synthetic oligonucleotide
  Sense strand starting at position 12 of SEQ ID NO: 317998
aguugaaacuuucuccuga

SEQ ID NO: 528832 - RNA, 19 nt, Artificial Sequence
  Description of Artificial Sequence: Synthetic oligonucleotide
  Antisense strand to SEQ ID NO: 528831
ucaggagaaaguuucaacu

SEQ ID NO: 528833 - RNA, 19 nt, Artificial Sequence
  Description of Artificial Sequence: Synthetic oligonucleotide
  Sense strand starting at position 13 of SEQ ID NO: 317998
guugaaacuuucuccugau

SEQ ID NO: 528834 - RNA, 19 nt, Artificial Sequence
  Description of Artificial Sequence: Synthetic oligonucleotide
  Antisense strand to SEQ ID NO: 528833
aucaggagaaaguuucaac

SEQ ID NO: 528835 - RNA, 19 nt, Artificial Sequence
  Description of Artificial Sequence: Synthetic oligonucleotide
  Sense strand starting at position 128 of SEQ ID NO: 317998
aucagcaaaucugggaauu

SEQ ID NO: 528836 - RNA, 19 nt, Artificial Sequence
  Description of Artificial Sequence: Synthetic oligonucleotide
  Antisense strand to SEQ ID NO: 528835
aauucccagauuugcugau

SEQ ID NO: 528837 - RNA, 19 nt, Artificial Sequence
  Description of Artificial Sequence: Synthetic oligonucleotide
  Sense strand starting at position 167 of SEQ ID NO: 317998
gcacgcacucuuugauucu

SEQ ID NO: 528838 - RNA, 19 nt, Artificial Sequence
  Description of Artificial Sequence: Synthetic oligonucleotide
  Antisense strand to SEQ ID NO: 528837
agaaucaaagagugcgugc

SEQ ID NO: 528839 - RNA, 19 nt, Artificial Sequence
  Description of Artificial Sequence: Synthetic oligonucleotide
  Sense strand starting at position 327 of SEQ ID NO: 317998
accuuucccuaggagacaa

SEQ ID NO: 528840 - RNA, 19 nt, Artificial Sequence
  Description of Artificial Sequence: Synthetic oligonucleotide
  Antisense strand to SEQ ID NO: 528839
uugucuccuagggaaaggu

SEQ ID NO: 528841 - RNA, 19 nt, Artificial Sequence
  Description of Artificial Sequence: Synthetic oligonucleotide
  Sense strand starting at position 445 of SEQ ID NO: 317998
gcaagaugccaguaggaag

SEQ ID NO: 528842 - RNA, 19 nt, Artificial Sequence
  Description of Artificial Sequence: Synthetic oligonucleotide
  Antisense strand to SEQ ID NO: 528841
cuuccuacuggcaucuugc

SEQ ID NO: 528843 - RNA, 19 nt, Artificial Sequence
  Description of Artificial Sequence: Synthetic oligonucleotide
  Sense strand starting at position 605 of SEQ ID NO: 317998
aagggucuugaaugcuaca

SEQ ID NO: 528844 - RNA, 19 nt, Artificial Sequence
  Description of Artificial Sequence: Synthetic oligonucleotide
  Antisense strand to SEQ ID NO: 528843
uguagcauucaagacccuu

SEQ ID NO: 528845 - RNA, 19 nt, Artificial Sequence
  Description of Artificial Sequence: Synthetic oligonucleotide
  Sense strand starting at position 708 of SEQ ID NO: 317998
uggcucuacacauggagaa

SEQ ID NO: 528846 - RNA, 19 nt, Artificial Sequence
  Description of Artificial Sequence: Synthetic oligonucleotide
  Antisense strand to SEQ ID NO: 528845
uucuccauguguagagcca

SEQ ID NO: 528847 - RNA, 19 nt, Artificial Sequence
  Description of Artificial Sequence: Synthetic oligonucleotide
  Sense strand starting at position 709 of SEQ ID NO: 317998
ggcucuacacauggagaau

SEQ ID NO: 528848 - RNA, 19 nt, Artificial Sequence
  Description of Artificial Sequence: Synthetic oligonucleotide
  Antisense strand to SEQ ID NO: 528847
auucuccauguguagagcc

SEQ ID NO: 528849 - RNA, 19 nt, Artificial Sequence
  Description of Artificial Sequence: Synthetic oligonucleotide
  Sense strand starting at position 779 of SEQ ID NO: 317998
gccuguucagccuggguga

SEQ ID NO: 528850 - RNA, 19 nt, Artificial Sequence
  Description of Artificial Sequence: Synthetic oligonucleotide
  Antisense strand to SEQ ID NO: 528849
ucacccaggcugaacaggc

SEQ ID NO: 528851 - RNA, 19 nt, Artificial Sequence
  Description of Artificial Sequence: Synthetic oligonucleotide
  Sense strand starting at position 959 of SEQ ID NO: 317998
uucgaaaguuccuccaggu

SEQ ID NO: 528852 - RNA, 19 nt, Artificial Sequence
  Description of Artificial Sequence: Synthetic oligonucleotide
  Antisense strand to SEQ ID NO: 528851
accuggaggaacuuucgaa

SEQ ID NO: 528853 - RNA, 19 nt, Artificial Sequence
  Description of Artificial Sequence: Synthetic oligonucleotide
  Sense strand starting at position 2339 of SEQ ID NO: 317998
ccgcuuucccgucugugaa

SEQ ID NO: 528854 - RNA, 19 nt, Artificial Sequence
  Description of Artificial Sequence: Synthetic oligonucleotide
  Antisense strand to SEQ ID NO: 528853
uucacagacgggaaagcgg

SEQ ID NO: 528855 - RNA, 19 nt, Artificial Sequence
  Description of Artificial Sequence: Synthetic oligonucleotide
  Sense strand starting at position 2500 of SEQ ID NO: 317998
gugacaggcuuguuucaga

SEQ ID NO: 528856 - RNA, 19 nt, Artificial Sequence
  Description of Artificial Sequence: Synthetic oligonucleotide
  Antisense strand to SEQ ID NO: 528855
ucugaaacaagccugucac

SEQ ID NO: 528857 - RNA, 19 nt, Artificial Sequence
  Description of Artificial Sequence: Synthetic oligonucleotide
  Sense strand starting at position 2610 of SEQ ID NO: 317998
agacaaggacucugccaaa

SEQ ID NO: 528858 - RNA, 19 nt, Artificial Sequence
  Description of Artificial Sequence: Synthetic oligonucleotide
  Antisense strand to SEQ ID NO: 528857
uuuggcagaguccuugucu

SEQ ID NO: 528859 - RNA, 19 nt, Artificial Sequence
  Description of Artificial Sequence: Synthetic oligonucleotide
  Sense strand starting at position 2650 of SEQ ID NO: 317998
agaauucgacccugggauu

SEQ ID NO: 528860 - RNA, 19 nt, Artificial Sequence
  Description of Artificial Sequence: Synthetic oligonucleotide
  Antisense strand to SEQ ID NO: 528859
aaucccagggucgaauucu

SEQ ID NO: 528861 - RNA, 19 nt, Artificial Sequence
  Description of Artificial Sequence: Synthetic oligonucleotide
  Sense strand starting at position 2955 of SEQ ID NO: 317998
aacguuugcgcacuuugaa

SEQ ID NO: 528862 - RNA, 19 nt, Artificial Sequence
  Description of Artificial Sequence: Synthetic oligonucleotide
  Antisense strand to SEQ ID NO: 528861
uucaaagugcgcaaacguu

SEQ ID NO: 528863 - RNA, 19 nt, Artificial Sequence
  Description of Artificial Sequence: Synthetic oligonucleotide
  Sense strand starting at position 3014 of SEQ ID NO: 317998
auccuccucagucguguaa

SEQ ID NO: 528864 - RNA, 19 nt, Artificial Sequence
  Description of Artificial Sequence: Synthetic oligonucleotide
  Antisense strand to SEQ ID NO: 528863
uuacacgacugaggaggau

SEQ ID NO: 528865 - RNA, 19 nt, Artificial Sequence
  Description of Artificial Sequence: Synthetic oligonucleotide
  Sense strand starting at position 3047 of SEQ ID NO: 317998
uuacaucucgucuagagca

SEQ ID NO: 528866 - RNA, 19 nt, Artificial Sequence
  Description of Artificial Sequence: Synthetic oligonucleotide
  Antisense strand to SEQ ID NO: 528865
ugcucuagacgagauguaa

SEQ ID NO: 528867 - RNA, 19 nt, Artificial Sequence
  Description of Artificial Sequence: Synthetic oligonucleotide
  Sense strand starting at position 3049 of SEQ ID NO: 317998
acaucucgucuagagcauu

SEQ ID NO: 528868 - RNA, 19 nt, Artificial Sequence
  Description of Artificial Sequence: Synthetic oligonucleotide
  Antisense strand to SEQ ID NO: 528867
aaugcucuagacgagaugu

SEQ ID NO: 528869 - RNA, 19 nt, Artificial Sequence
  Description of Artificial Sequence: Synthetic oligonucleotide
  Sense strand starting at position 3182 of SEQ ID NO: 317998
uugggugaguccuguuguu

SEQ ID NO: 528870 - RNA, 19 nt, Artificial Sequence
  Description of Artificial Sequence: Synthetic oligonucleotide
  Antisense strand to SEQ ID NO: 528869
aacaacaggacucacccaa

SEQ ID NO: 528871 - RNA, 19 nt, Artificial Sequence
  Description of Artificial Sequence: Synthetic oligonucleotide
  Sense strand starting at position 3187 of SEQ ID NO: 317998
ugaguccuguuguugggaa

SEQ ID NO: 528872 - RNA, 19 nt, Artificial Sequence
  Description of Artificial Sequence: Synthetic oligonucleotide
  Antisense strand to SEQ ID NO: 528871
uucccaacaacaggacuca

SEQ ID NO: 528873 - RNA, 19 nt, Artificial Sequence
  Description of Artificial Sequence: Synthetic oligonucleotide
  Sense strand starting at position 3188 of SEQ ID NO: 317998
gaguccuguuguugggaaa

SEQ ID NO: 528874 - RNA, 19 nt, Artificial Sequence
  Description of Artificial Sequence: Synthetic oligonucleotide
  Antisense strand to SEQ ID NO: 528873
uuucccaacaacaggacuc

SEQ ID NO: 528875 - RNA, 19 nt, Artificial Sequence
  Description of Artificial Sequence: Synthetic oligonucleotide
  Sense strand starting at position 3189 of SEQ ID NO: 317998
aguccuguuguugggaaau

SEQ ID NO: 528876 - RNA, 19 nt, Artificial Sequence
  Description of Artificial Sequence: Synthetic oligonucleotide
  Antisense strand to SEQ ID NO: 528875
auuucccaacaacaggacu

SEQ ID NO: 528877 - RNA, 19 nt, Artificial Sequence
  Description of Artificial Sequence: Synthetic oligonucleotide
  Sense strand starting at position 3191 of SEQ ID NO: 317998
uccuguuguugggaaaucu

SEQ ID NO: 528878 - RNA, 19 nt, Artificial Sequence
  Description of Artificial Sequence: Synthetic oligonucleotide
  Antisense strand to SEQ ID NO: 528877
agauuucccaacaacagga

SEQ ID NO: 528879 - RNA, 19 nt, Artificial Sequence
  Description of Artificial Sequence: Synthetic oligonucleotide
  Sense strand starting at position 3200 of SEQ ID NO: 317998
ugggaaaucucagagcgau

SEQ ID NO: 528880 - RNA, 19 nt, Artificial Sequence
  Description of Artificial Sequence: Synthetic oligonucleotide
  Antisense strand to SEQ ID NO: 528879
aucgcucugagauuuccca

SEQ ID NO: 528881 - RNA, 19 nt, Artificial Sequence
  Description of Artificial Sequence: Synthetic oligonucleotide
  Sense strand starting at position 3323 of SEQ ID NO: 317998
gugcaagagacuuauugau

SEQ ID NO: 528882 - RNA, 19 nt, Artificial Sequence
  Description of Artificial Sequence: Synthetic oligonucleotide
  Antisense strand to SEQ ID NO: 528881
aucaauaagucucuugcac

SEQ ID NO: 528883 - RNA, 19 nt, Artificial Sequence
  Description of Artificial Sequence: Synthetic oligonucleotide
  Sense strand starting at position 3325 of SEQ ID NO: 317998
gcaagagacuuauugauga

SEQ ID NO: 528884 - RNA, 19 nt, Artificial Sequence
  Description of Artificial Sequence: Synthetic oligonucleotide
  Antisense strand to SEQ ID NO: 528883
ucaucaauaagucucuugc

SEQ ID NO: 528885 - RNA, 19 nt, Artificial Sequence
  Description of Artificial Sequence: Synthetic oligonucleotide
  Sense strand starting at position 3329 of SEQ ID NO: 317998
gagacuuauugaugaauga

SEQ ID NO: 528886 - RNA, 19 nt, Artificial Sequence
  Description of Artificial Sequence: Synthetic oligonucleotide
  Antisense strand to SEQ ID NO: 528885
ucauucaucaauaagucuc

SEQ ID NO: 528887 - RNA, 19 nt, Artificial Sequence
  Description of Artificial Sequence: Synthetic oligonucleotide
  Sense strand starting at position 3336 of SEQ ID NO: 317998
auugaugaaugagaacaga

SEQ ID NO: 528888 - RNA, 19 nt, Artificial Sequence
  Description of Artificial Sequence: Synthetic oligonucleotide
  Antisense strand to SEQ ID NO: 528887
ucuguucucauucaucaau

SEQ ID NO: 528889 - RNA, 19 nt, Artificial Sequence
  Description of Artificial Sequence: Synthetic oligonucleotide
  Sense strand starting at position 3398 of SEQ ID NO: 317998
acacuaagcucgugguuac

SEQ ID NO: 528890 - RNA, 19 nt, Artificial Sequence
  Description of Artificial Sequence: Synthetic oligonucleotide
  Antisense strand to SEQ ID NO: 528889
guaaccacgagcuuagugu

SEQ ID NO: 528891 - RNA, 19 nt, Artificial Sequence
  Description of Artificial Sequence: Synthetic oligonucleotide
  Sense strand starting at position 3399 of SEQ ID NO: 317998
cacuaagcucgugguuaca

SEQ ID NO: 528892 - RNA, 19 nt, Artificial Sequence
  Description of Artificial Sequence: Synthetic oligonucleotide
  Antisense strand to SEQ ID NO: 528891
uguaaccacgagcuuagug

SEQ ID NO: 528893 - RNA, 19 nt, Artificial Sequence
  Description of Artificial Sequence: Synthetic oligonucleotide
  Sense strand starting at position 3401 of SEQ ID NO: 317998
cuaagcucgugguuacaca

SEQ ID NO: 528894 - RNA, 19 nt, Artificial Sequence
  Description of Artificial Sequence: Synthetic oligonucleotide
  Antisense strand to SEQ ID NO: 528893
uguguaaccacgagcuuag

SEQ ID NO: 528895 - RNA, 19 nt, Artificial Sequence
  Description of Artificial Sequence: Synthetic oligonucleotide
  Sense strand starting at position 3586 of SEQ ID NO: 317998
agggcuagaacuugaaugu

SEQ ID NO: 528896 - RNA, 19 nt, Artificial Sequence
  Description of Artificial Sequence: Synthetic oligonucleotide
  Antisense strand to SEQ ID NO: 528895
acauucaaguucuagcccu

SEQ ID NO: 528897 - RNA, 19 nt, Artificial Sequence
  Description of Artificial Sequence: Synthetic oligonucleotide
  Sense strand starting at position 3724 of SEQ ID NO: 317998
guccaaaucuguccuuuau

SEQ ID NO: 528898 - RNA, 19 nt, Artificial Sequence
  Description of Artificial Sequence: Synthetic oligonucleotide
  Antisense strand to SEQ ID NO: 528897
auaaaggacagauuuggac

SEQ ID NO: 528899 - RNA, 19 nt, Artificial Sequence
  Description of Artificial Sequence: Synthetic oligonucleotide
  Sense strand starting at position 3736 of SEQ ID NO: 317998
ccuuuauccuccuggagga

SEQ ID NO: 528900 - RNA, 19 nt, Artificial Sequence
  Description of Artificial Sequence: Synthetic oligonucleotide
  Antisense strand to SEQ ID NO: 528899
uccuccaggaggauaaagg

SEQ ID NO: 528901 - RNA, 19 nt, Artificial Sequence
  Description of Artificial Sequence: Synthetic oligonucleotide
  Sense strand starting at position 3836 of SEQ ID NO: 317998
ucacuccugcuuugagaac

SEQ ID NO: 528902 - RNA, 19 nt, Artificial Sequence
  Description of Artificial Sequence: Synthetic oligonucleotide
  Antisense strand to SEQ ID NO: 528901
guucucaaagcaggaguga

SEQ ID NO: 528903 - RNA, 19 nt, Artificial Sequence
  Description of Artificial Sequence: Synthetic oligonucleotide
  Sense strand starting at position 3847 of SEQ ID NO: 317998
uugagaacccucugagagu

SEQ ID NO: 528904 - RNA, 19 nt, Artificial Sequence
  Description of Artificial Sequence: Synthetic oligonucleotide
  Antisense strand to SEQ ID NO: 528903
acucucagaggguucucaa

SEQ ID NO: 528905 - RNA, 19 nt, Artificial Sequence
  Description of Artificial Sequence: Synthetic oligonucleotide
  Sense strand starting at position 3860 of SEQ ID NO: 317998
gagagucaucugggagguu

SEQ ID NO: 528906 - RNA, 19 nt, Artificial Sequence
  Description of Artificial Sequence: Synthetic oligonucleotide
  Antisense strand to SEQ ID NO: 528905
aaccucccagaugacucuc

SEQ ID NO: 528907 - RNA, 19 nt, Artificial Sequence
  Description of Artificial Sequence: Synthetic oligonucleotide
  Sense strand starting at position 3863 of SEQ ID NO: 317998
agucaucugggagguugau

SEQ ID NO: 528908 - RNA, 19 nt, Artificial Sequence
  Description of Artificial Sequence: Synthetic oligonucleotide
  Antisense strand to SEQ ID NO: 528907
aucaaccucccagaugacu

SEQ ID NO: 528909 - RNA, 19 nt, Artificial Sequence
  Description of Artificial Sequence: Synthetic oligonucleotide
  Sense strand starting at position 3912 of SEQ ID NO: 317998
ugguucagaggucagcaua

SEQ ID NO: 528910 - RNA, 19 nt, Artificial Sequence
  Description of Artificial Sequence: Synthetic oligonucleotide
  Antisense strand to SEQ ID NO: 528909
uaugcugaccucugaacca

SEQ ID NO: 528911 - RNA, 19 nt, Artificial Sequence
  Description of Artificial Sequence: Synthetic oligonucleotide
  Sense strand starting at position 207 of SEQ ID NO: 317999
cuuguuauaguccauacca

SEQ ID NO: 528912 - RNA, 19 nt, Artificial Sequence
  Description of Artificial Sequence: Synthetic oligonucleotide
  Antisense strand to SEQ ID NO: 528911
ugguauggacuauaacaag

SEQ ID NO: 528913 - RNA, 19 nt, Artificial Sequence
  Description of Artificial Sequence: Synthetic oligonucleotide
  Sense strand starting at position 209 of SEQ ID NO: 317999
uguuauaguccauaccacu

SEQ ID NO: 528914 - RNA, 19 nt, Artificial Sequence
  Description of Artificial Sequence: Synthetic oligonucleotide
  Antisense strand to SEQ ID NO: 528913
agugguauggacuauaaca

SEQ ID NO: 528915 - RNA, 19 nt, Artificial Sequence
  Description of Artificial Sequence: Synthetic oligonucleotide
  Sense strand starting at position 324 of SEQ ID NO: 317999
cuucuuggcucaucagaga

SEQ ID NO: 528916 - RNA, 19 nt, Artificial Sequence
  Description of Artificial Sequence: Synthetic oligonucleotide
  Antisense strand to SEQ ID NO: 528915
ucucugaugagccaagaag

SEQ ID NO: 528917 - RNA, 19 nt, Artificial Sequence
  Description of Artificial Sequence: Synthetic oligonucleotide
  Sense strand starting at position 339 of SEQ ID NO: 317999
gagaaugaguagcuacaga

SEQ ID NO: 528918 - RNA, 19 nt, Artificial Sequence
  Description of Artificial Sequence: Synthetic oligonucleotide
  Antisense strand to SEQ ID NO: 528917
ucuguagcuacucauucuc

SEQ ID NO: 528919 - RNA, 19 nt, Artificial Sequence
  Description of Artificial Sequence: Synthetic oligonucleotide
  Sense strand starting at position 439 of SEQ ID NO: 317999
uuuauaguuggaugaacaa

SEQ ID NO: 528920 - RNA, 19 nt, Artificial Sequence
  Description of Artificial Sequence: Synthetic oligonucleotide
  Antisense strand to SEQ ID NO: 528919
uuguucauccaacuauaaa

SEQ ID NO: 528921 - RNA, 19 nt, Artificial Sequence
  Description of Artificial Sequence: Synthetic oligonucleotide
  Sense strand starting at position 582 of SEQ ID NO: 317999
ggaggucuccuauaugcuu

SEQ ID NO: 528922 - RNA, 19 nt, Artificial Sequence
  Description of Artificial Sequence: Synthetic oligonucleotide
  Antisense strand to SEQ ID NO: 528921
aagcauauaggagaccucc

SEQ ID NO: 528923 - RNA, 19 nt, Artificial Sequence
  Description of Artificial Sequence: Synthetic oligonucleotide
  Sense strand starting at position 726 of SEQ ID NO: 317999
gcuacuuaaccagauguca

SEQ ID NO: 528924 - RNA, 19 nt, Artificial Sequence
  Description of Artificial Sequence: Synthetic oligonucleotide
  Antisense strand to SEQ ID NO: 528923
ugacaucugguuaaguagc

SEQ ID NO: 528925 - RNA, 19 nt, Artificial Sequence
  Description of Artificial Sequence: Synthetic oligonucleotide
  Sense strand starting at position 800 of SEQ ID NO: 317999
accauuuaaugagaaaggu

SEQ ID NO: 528926 - RNA, 19 nt, Artificial Sequence
  Description of Artificial Sequence: Synthetic oligonucleotide
  Antisense strand to SEQ ID NO: 528925
accuuucucauuaaauggu

SEQ ID NO: 528927 - RNA, 19 nt, Artificial Sequence
  Description of Artificial Sequence: Synthetic oligonucleotide
  Sense strand starting at position 809 of SEQ ID NO: 317999
ugagaaagguguuuaaugu

SEQ ID NO: 528928 - RNA, 19 nt, Artificial Sequence
  Description of Artificial Sequence: Synthetic oligonucleotide
  Antisense strand to SEQ ID NO: 528927
acauuaaacaccuuucuca

SEQ ID NO: 528929 - RNA, 19 nt, Artificial Sequence
  Description of Artificial Sequence: Synthetic oligonucleotide
  Sense strand starting at position 810 of SEQ ID NO: 317999
gagaaagguguuuaauguu

SEQ ID NO: 528930 - RNA, 19 nt, Artificial Sequence
  Description of Artificial Sequence: Synthetic oligonucleotide
  Antisense strand to SEQ ID NO: 528929
aacauuaaacaccuuucuc

SEQ ID NO: 528931 - RNA, 19 nt, Artificial Sequence
  Description of Artificial Sequence: Synthetic oligonucleotide
  Sense strand starting at position 849 of SEQ ID NO: 317999
agccauaaccuuuaggauu

SEQ ID NO: 528932 - RNA, 19 nt, Artificial Sequence
  Description of Artificial Sequence: Synthetic oligonucleotide
  Antisense strand to SEQ ID NO: 528931
aauccuaaagguuauggcu

SEQ ID NO: 528933 - RNA, 19 nt, Artificial Sequence
  Description of Artificial Sequence: Synthetic oligonucleotide
  Sense strand starting at position 857 of SEQ ID NO: 317999
ccuuuaggauuagugaaau

SEQ ID NO: 528934 - RNA, 19 nt, Artificial Sequence
  Description of Artificial Sequence: Synthetic oligonucleotide
  Antisense strand to SEQ ID NO: 528933
auuucacuaauccuaaagg

SEQ ID NO: 528935 - RNA, 19 nt, Artificial Sequence
  Description of Artificial Sequence: Synthetic oligonucleotide
  Sense strand starting at position 886 of SEQ ID NO: 317999
gucaaaucagacuggugau

SEQ ID NO: 528936 - RNA, 19 nt, Artificial Sequence
  Description of Artificial Sequence: Synthetic oligonucleotide
  Antisense strand to SEQ ID NO: 528935
aucaccagucugauuugac

SEQ ID NO: 528937 - RNA, 19 nt, Artificial Sequence
  Description of Artificial Sequence: Synthetic oligonucleotide
  Sense strand starting at position 887 of SEQ ID NO: 317999
ucaaaucagacuggugaug

SEQ ID NO: 528938 - RNA, 19 nt, Artificial Sequence
  Description of Artificial Sequence: Synthetic oligonucleotide
  Antisense strand to SEQ ID NO: 528937
caucaccagucugauuuga

SEQ ID NO: 528939 - RNA, 19 nt, Artificial Sequence
  Description of Artificial Sequence: Synthetic oligonucleotide
  Sense strand starting at position 984 of SEQ ID NO: 317999
gcagcauuucuacagcacu

SEQ ID NO: 528940 - RNA, 19 nt, Artificial Sequence
  Description of Artificial Sequence: Synthetic oligonucleotide
  Antisense strand to SEQ ID NO: 528939
agugcuguagaaaugcugc

SEQ ID NO: 528941 - RNA, 19 nt, Artificial Sequence
  Description of Artificial Sequence: Synthetic oligonucleotide
  Sense strand starting at position 1215 of SEQ ID NO: 317999
acaucuauuguggauuauu

SEQ ID NO: 528942 - RNA, 19 nt, Artificial Sequence
  Description of Artificial Sequence: Synthetic oligonucleotide
  Antisense strand to SEQ ID NO: 528941
aauaauccacaauagaugu

SEQ ID NO: 528943 - RNA, 19 nt, Artificial Sequence
  Description of Artificial Sequence: Synthetic oligonucleotide
  Sense strand starting at position 1398 of SEQ ID NO: 317999
augacacucuguuucugau

SEQ ID NO: 528944 - RNA, 19 nt, Artificial Sequence
  Description of Artificial Sequence: Synthetic oligonucleotide
  Antisense strand to SEQ ID NO: 528943
aucagaaacagagugucau

SEQ ID NO: 528945 - RNA, 19 nt, Artificial Sequence
  Description of Artificial Sequence: Synthetic oligonucleotide
  Sense strand starting at position 2171 of SEQ ID NO: 317999
cuagcaagacauuguggaa

SEQ ID NO: 528946 - RNA, 19 nt, Artificial Sequence
  Description of Artificial Sequence: Synthetic oligonucleotide
  Antisense strand to SEQ ID NO: 528945
uuccacaaugucuugcuag

SEQ ID NO: 528947 - RNA, 19 nt, Artificial Sequence
  Description of Artificial Sequence: Synthetic oligonucleotide
  Sense strand starting at position 2344 of SEQ ID NO: 317999
gcacuugcauuucuaguau

SEQ ID NO: 528948 - RNA, 19 nt, Artificial Sequence
  Description of Artificial Sequence: Synthetic oligonucleotide
  Antisense strand to SEQ ID NO: 528947
auacuagaaaugcaagugc

SEQ ID NO: 528949 - RNA, 19 nt, Artificial Sequence
  Description of Artificial Sequence: Synthetic oligonucleotide
  Sense strand starting at position 2411 of SEQ ID NO: 317999
ugucuucuaggguaagauu

SEQ ID NO: 528950 - RNA, 19 nt, Artificial Sequence
  Description of Artificial Sequence: Synthetic oligonucleotide
  Antisense strand to SEQ ID NO: 528949
aaucuuacccuagaagaca

SEQ ID NO: 528951 - RNA, 19 nt, Artificial Sequence
  Description of Artificial Sequence: Synthetic oligonucleotide
  Sense strand starting at position 2420 of SEQ ID NO: 317999
ggguaagauugggugguua

SEQ ID NO: 528952 - RNA, 19 nt, Artificial Sequence
  Description of Artificial Sequence: Synthetic oligonucleotide
  Antisense strand to SEQ ID NO: 528951
uaaccacccaaucuuaccc

SEQ ID NO: 528953 - RNA, 19 nt, Artificial Sequence
  Description of Artificial Sequence: Synthetic oligonucleotide
  Sense strand starting at position 2424 of SEQ ID NO: 317999
aagauugggugguuauuaa

SEQ ID NO: 528954 - RNA, 19 nt, Artificial Sequence
  Description of Artificial Sequence: Synthetic oligonucleotide
  Antisense strand to SEQ ID NO: 528953
uuaauaaccacccaaucuu

SEQ ID NO: 528955 - RNA, 19 nt, Artificial Sequence
  Description of Artificial Sequence: Synthetic oligonucleotide
  Sense strand starting at position 2434 of SEQ ID NO: 317999
gguuauuaagcucaagaug

SEQ ID NO: 528956 - RNA, 19 nt, Artificial Sequence
  Description of Artificial Sequence: Synthetic oligonucleotide
  Antisense strand to SEQ ID NO: 528955
caucuugagcuuaauaacc

SEQ ID NO: 528957 - RNA, 19 nt, Artificial Sequence
  Description of Artificial Sequence: Synthetic oligonucleotide
  Sense strand starting at position 2596 of SEQ ID NO: 317999
accaaagcucacugaggaa

SEQ ID NO: 528958 - RNA, 19 nt, Artificial Sequence
  Description of Artificial Sequence: Synthetic oligonucleotide
  Antisense strand to SEQ ID NO: 528957
uuccucagugagcuuuggu

SEQ ID NO: 528959 - RNA, 19 nt, Artificial Sequence
  Description of Artificial Sequence: Synthetic oligonucleotide
  Sense strand starting at position 2733 of SEQ ID NO: 317999
gacgucuacccauaaggau

SEQ ID NO: 528960 - RNA, 19 nt, Artificial Sequence
  Description of Artificial Sequence: Synthetic oligonucleotide
  Antisense strand to SEQ ID NO: 528959
auccuuauggguagacguc

SEQ ID NO: 528961 - RNA, 19 nt, Artificial Sequence
  Description of Artificial Sequence: Synthetic oligonucleotide
  Sense strand starting at position 2773 of SEQ ID NO: 317999
gccugauucccacaagauc

SEQ ID NO: 528962 - RNA, 19 nt, Artificial Sequence
  Description of Artificial Sequence: Synthetic oligonucleotide
  Antisense strand to SEQ ID NO: 528961
gaucuugugggaaucaggc

SEQ ID NO: 528963 - RNA, 19 nt, Artificial Sequence
  Description of Artificial Sequence: Synthetic oligonucleotide
  Sense strand starting at position 2808 of SEQ ID NO: 317999
agcagaauggcuuggaaga

SEQ ID NO: 528964 - RNA, 19 nt, Artificial Sequence
  Description of Artificial Sequence: Synthetic oligonucleotide
  Antisense strand to SEQ ID NO: 528963
ucuuccaagccauucugcu

SEQ ID NO: 528965 - RNA, 19 nt, Artificial Sequence
  Description of Artificial Sequence: Synthetic oligonucleotide
  Sense strand starting at position 2809 of SEQ ID NO: 317999
gcagaauggcuuggaagaa

SEQ ID NO: 528966 - RNA, 19 nt, Artificial Sequence
  Description of Artificial Sequence: Synthetic oligonucleotide
  Antisense strand to SEQ ID NO: 528965
uucuuccaagccauucugc

SEQ ID NO: 528967 - RNA, 19 nt, Artificial Sequence
  Description of Artificial Sequence: Synthetic oligonucleotide
  Sense strand starting at position 2987 of SEQ ID NO: 317999
cugagauuuauuggcugcu

SEQ ID NO: 528968 - RNA, 19 nt, Artificial Sequence
  Description of Artificial Sequence: Synthetic oligonucleotide
  Antisense strand to SEQ ID NO: 528967
agcagccaauaaaucucag

SEQ ID NO: 528969 - RNA, 19 nt, Artificial Sequence
  Description of Artificial Sequence: Synthetic oligonucleotide
  Sense strand starting at position 3043 of SEQ ID NO: 317999
ggcauuugccgauguaauc

SEQ ID NO: 528970 - RNA, 19 nt, Artificial Sequence
  Description of Artificial Sequence: Synthetic oligonucleotide
  Antisense strand to SEQ ID NO: 528969
gauuacaucggcaaaugcc

SEQ ID NO: 528971 - RNA, 19 nt, Artificial Sequence
  Description of Artificial Sequence: Synthetic oligonucleotide
  Sense strand starting at position 3094 of SEQ ID NO: 317999
guaaaucacccuuggcaaa

SEQ ID NO: 528972 - RNA, 19 nt, Artificial Sequence
  Description of Artificial Sequence: Synthetic oligonucleotide
  Antisense strand to SEQ ID NO: 528971
uuugccaagggugauuuac

SEQ ID NO: 528973 - RNA, 19 nt, Artificial Sequence
  Description of Artificial Sequence: Synthetic oligonucleotide
  Sense strand starting at position 3615 of SEQ ID NO: 317999
ggcugagacccaugaacca

SEQ ID NO: 528974 - RNA, 19 nt, Artificial Sequence
  Description of Artificial Sequence: Synthetic oligonucleotide
  Antisense strand to SEQ ID NO: 528973
ugguucaugggucucagcc

SEQ ID NO: 528975 - RNA, 19 nt, Artificial Sequence
  Description of Artificial Sequence: Synthetic oligonucleotide
  Sense strand starting at position 3636 of SEQ ID NO: 317999
aaagaugugagguggucaa

SEQ ID NO: 528976 - RNA, 19 nt, Artificial Sequence
  Description of Artificial Sequence: Synthetic oligonucleotide
  Antisense strand to SEQ ID NO: 528975
uugaccaccucacaucuuu

SEQ ID NO: 528977 - RNA, 19 nt, Artificial Sequence
  Description of Artificial Sequence: Synthetic oligonucleotide
  Sense strand starting at position 3756 of SEQ ID NO: 317999
gauagauacucagugucua

SEQ ID NO: 528978 - RNA, 19 nt, Artificial Sequence
  Description of Artificial Sequence: Synthetic oligonucleotide
  Antisense strand to SEQ ID NO: 528977
uagacacugaguaucuauc

SEQ ID NO: 528979 - RNA, 19 nt, Artificial Sequence
  Description of Artificial Sequence: Synthetic oligonucleotide
  Sense strand starting at position 3757 of SEQ ID NO: 317999
auagauacucagugucuau

SEQ ID NO: 528980 - RNA, 19 nt, Artificial Sequence
  Description of Artificial Sequence: Synthetic oligonucleotide
  Antisense strand to SEQ ID NO: 528979
auagacacugaguaucuau

SEQ ID NO: 528981 - RNA, 19 nt, Artificial Sequence
  Description of Artificial Sequence: Synthetic oligonucleotide
  Sense strand starting at position 3885 of SEQ ID NO: 317999
aagugucuggugcauauuu

SEQ ID NO: 528982 - RNA, 19 nt, Artificial Sequence
  Description of Artificial Sequence: Synthetic oligonucleotide
  Antisense strand to SEQ ID NO: 528981
aaauaugcaccagacacuu

SEQ ID NO: 528983 - RNA, 19 nt, Artificial Sequence
  Description of Artificial Sequence: Synthetic oligonucleotide
  Sense strand starting at position 3896 of SEQ ID NO: 317999
gcauauuucugucugggua

SEQ ID NO: 528984 - RNA, 19 nt, Artificial Sequence
  Description of Artificial Sequence: Synthetic oligonucleotide
  Antisense strand to SEQ ID NO: 528983
uacccagacagaaauaugc

SEQ ID NO: 528985 - RNA, 19 nt, Artificial Sequence
  Description of Artificial Sequence: Synthetic oligonucleotide
  Sense strand starting at position 3919 of SEQ ID NO: 317999
gguggagagccucauauca

SEQ ID NO: 528986 - RNA, 19 nt, Artificial Sequence
  Description of Artificial Sequence: Synthetic oligonucleotide
  Antisense strand to SEQ ID NO: 528985
ugauaugaggcucuccacc

SEQ ID NO: 528987 - RNA, 19 nt, Artificial Sequence
  Description of Artificial Sequence: Synthetic oligonucleotide
  Sense strand starting at position 3939 of SEQ ID NO: 317999
ugggccuuuaaugaggauu

SEQ ID NO: 528988 - RNA, 19 nt, Artificial Sequence
  Description of Artificial Sequence: Synthetic oligonucleotide
  Antisense strand to SEQ ID NO: 528987
aauccucauuaaaggccca

SEQ ID NO: 528989 - RNA, 19 nt, Artificial Sequence
  Description of Artificial Sequence: Synthetic oligonucleotide
  Sense strand starting at position 3957 of SEQ ID NO: 317999
uggagaagcucugcaaaua

SEQ ID NO: 528990 - RNA, 19 nt, Artificial Sequence
  Description of Artificial Sequence: Synthetic oligonucleotide
  Antisense strand to SEQ ID NO: 528989
uauuugcagagcuucucca

SEQ ID NO: 528991 - RNA, 19 nt, Artificial Sequence
  Description of Artificial Sequence: Synthetic oligonucleotide
  Sense strand starting at position 6 of SEQ ID NO: 318000
aguuuauaaggguggaaga

SEQ ID NO: 528992 - RNA, 19 nt, Artificial Sequence
  Description of Artificial Sequence: Synthetic oligonucleotide
  Antisense strand to SEQ ID NO: 528991
ucuuccacccuuauaaacu

SEQ ID NO: 528993 - RNA, 19 nt, Artificial Sequence
  Description of Artificial Sequence: Synthetic oligonucleotide
  Sense strand starting at position 7 of SEQ ID NO: 318000
guuuauaaggguggaagaa

SEQ ID NO: 528994 - RNA, 19 nt, Artificial Sequence
  Description of Artificial Sequence: Synthetic oligonucleotide
  Antisense strand to SEQ ID NO: 528993
uucuuccacccuuauaaac

SEQ ID NO: 528995 - RNA, 19 nt, Artificial Sequence
  Description of Artificial Sequence: Synthetic oligonucleotide
  Sense strand starting at position 19 of SEQ ID NO: 318000
ggaagaagaugaugagaga

SEQ ID NO: 528996 - RNA, 19 nt, Artificial Sequence
  Description of Artificial Sequence: Synthetic oligonucleotide
  Antisense strand to SEQ ID NO: 528995
ucucucaucaucuucuucc

SEQ ID NO: 528997 - RNA, 19 nt, Artificial Sequence
  Description of Artificial Sequence: Synthetic oligonucleotide
  Sense strand starting at position 39 of SEQ ID NO: 318000
gggacaaccucuuuaagcu

SEQ ID NO: 528998 - RNA, 19 nt, Artificial Sequence
  Description of Artificial Sequence: Synthetic oligonucleotide
  Antisense strand to SEQ ID NO: 528997
agcuuaaagagguuguccc

SEQ ID NO: 528999 - RNA, 19 nt, Artificial Sequence
  Description of Artificial Sequence: Synthetic oligonucleotide
  Sense strand starting at position 40 of SEQ ID NO: 318000
ggacaaccucuuuaagcua

SEQ ID NO: 529000 - RNA, 19 nt, Artificial Sequence
  Description of Artificial Sequence: Synthetic oligonucleotide
  Antisense strand to SEQ ID NO: 528999
uagcuuaaagagguugucc

SEQ ID NO: 529001 - RNA, 19 nt, Artificial Sequence
  Description of Artificial Sequence: Synthetic oligonucleotide
  Sense strand starting at position 130 of SEQ ID NO: 318000
agcuguagauagcugaaga

SEQ ID NO: 529002 - RNA, 19 nt, Artificial Sequence
  Description of Artificial Sequence: Synthetic oligonucleotide
  Antisense strand to SEQ ID NO: 529001
ucuucagcuaucuacagcu

SEQ ID NO: 529003 - RNA, 19 nt, Artificial Sequence
  Description of Artificial Sequence: Synthetic oligonucleotide
  Sense strand starting at position 141 of SEQ ID NO: 318000
gcugaagacuccuugaaau

SEQ ID NO: 529004 - RNA, 19 nt, Artificial Sequence
  Description of Artificial Sequence: Synthetic oligonucleotide
  Antisense strand to SEQ ID NO: 529003
auuucaaggagucuucagc

SEQ ID NO: 529005 - RNA, 19 nt, Artificial Sequence
  Description of Artificial Sequence: Synthetic oligonucleotide
  Sense strand starting at position 314 of SEQ ID NO: 318000
aagacacuucuagggugau

SEQ ID NO: 529006 - RNA, 19 nt, Artificial Sequence
  Description of Artificial Sequence: Synthetic oligonucleotide
  Antisense strand to SEQ ID NO: 529005
aucacccuagaagugucuu

SEQ ID NO: 529007 - RNA, 19 nt, Artificial Sequence
  Description of Artificial Sequence: Synthetic oligonucleotide
  Sense strand starting at position 327 of SEQ ID NO: 318000
ggugauucagguggaaacu

SEQ ID NO: 529008 - RNA, 19 nt, Artificial Sequence
  Description of Artificial Sequence: Synthetic oligonucleotide
  Antisense strand to SEQ ID NO: 529007
aguuuccaccugaaucacc

SEQ ID NO: 529009 - RNA, 19 nt, Artificial Sequence
  Description of Artificial Sequence: Synthetic oligonucleotide
  Sense strand starting at position 354 of SEQ ID NO: 318000
acaccaguugcucaggaaa

SEQ ID NO: 529010 - RNA, 19 nt, Artificial Sequence
  Description of Artificial Sequence: Synthetic oligonucleotide
  Antisense strand to SEQ ID NO: 529009
uuuccugagcaacuggugu

SEQ ID NO: 529011 - RNA, 19 nt, Artificial Sequence
  Description of Artificial Sequence: Synthetic oligonucleotide
  Sense strand starting at position 394 of SEQ ID NO: 318000
aucccaugucugcaagaaa

SEQ ID NO: 529012 - RNA, 19 nt, Artificial Sequence
  Description of Artificial Sequence: Synthetic oligonucleotide
  Antisense strand to SEQ ID NO: 529011
uuucuugcagacaugggau

SEQ ID NO: 529013 - RNA, 19 nt, Artificial Sequence
  Description of Artificial Sequence: Synthetic oligonucleotide
  Sense strand starting at position 596 of SEQ ID NO: 318000
ugcaguucuccugagaacu

SEQ ID NO: 529014 - RNA, 19 nt, Artificial Sequence
  Description of Artificial Sequence: Synthetic oligonucleotide
  Antisense strand to SEQ ID NO: 529013
aguucucaggagaacugca

SEQ ID NO: 529015 - RNA, 19 nt, Artificial Sequence
  Description of Artificial Sequence: Synthetic oligonucleotide
  Sense strand starting at position 694 of SEQ ID NO: 318000
ugcagaaacuacucugacu

SEQ ID NO: 529016 - RNA, 19 nt, Artificial Sequence
  Description of Artificial Sequence: Synthetic oligonucleotide
  Antisense strand to SEQ ID NO: 529015
agucagaguaguuucugca

SEQ ID NO: 529017 - RNA, 19 nt, Artificial Sequence
  Description of Artificial Sequence: Synthetic oligonucleotide
  Sense strand starting at position 1098 of SEQ ID NO: 318000
aaacuuuaagccugguuga

SEQ ID NO: 529018 - RNA, 19 nt, Artificial Sequence
  Description of Artificial Sequence: Synthetic oligonucleotide
  Antisense strand to SEQ ID NO: 529017
ucaaccaggcuuaaaguuu

SEQ ID NO: 529019 - RNA, 19 nt, Artificial Sequence
  Description of Artificial Sequence: Synthetic oligonucleotide
  Sense strand starting at position 1099 of SEQ ID NO: 318000
aacuuuaagccugguugau

SEQ ID NO: 529020 - RNA, 19 nt, Artificial Sequence
  Description of Artificial Sequence: Synthetic oligonucleotide
  Antisense strand to SEQ ID NO: 529019
aucaaccaggcuuaaaguu

SEQ ID NO: 529021 - RNA, 19 nt, Artificial Sequence
  Description of Artificial Sequence: Synthetic oligonucleotide
  Sense strand starting at position 1101 of SEQ ID NO: 318000
cuuuaagccugguugauuu

SEQ ID NO: 529022 - RNA, 19 nt, Artificial Sequence
  Description of Artificial Sequence: Synthetic oligonucleotide
  Antisense strand to SEQ ID NO: 529021
aaaucaaccaggcuuaaag

SEQ ID NO: 529023 - RNA, 19 nt, Artificial Sequence
  Description of Artificial Sequence: Synthetic oligonucleotide
  Sense strand starting at position 1601 of SEQ ID NO: 318000
acacuagauuggguuacaa

SEQ ID NO: 529024 - RNA, 19 nt, Artificial Sequence
  Description of Artificial Sequence: Synthetic oligonucleotide
  Antisense strand to SEQ ID NO: 529023
uuguaacccaaucuagugu

SEQ ID NO: 529025 - RNA, 19 nt, Artificial Sequence
  Description of Artificial Sequence: Synthetic oligonucleotide
  Sense strand starting at position 1667 of SEQ ID NO: 318000
agccaagucauccggaaua

SEQ ID NO: 529026 - RNA, 19 nt, Artificial Sequence
  Description of Artificial Sequence: Synthetic oligonucleotide
  Antisense strand to SEQ ID NO: 529025
uauuccggaugacuuggcu

SEQ ID NO: 529027 - RNA, 19 nt, Artificial Sequence
  Description of Artificial Sequence: Synthetic oligonucleotide
  Sense strand starting at position 2319 of SEQ ID NO: 318000
gugcgugucacucucaacu

SEQ ID NO: 529028 - RNA, 19 nt, Artificial Sequence
  Description of Artificial Sequence: Synthetic oligonucleotide
  Antisense strand to SEQ ID NO: 529027
aguugagagugacacgcac

SEQ ID NO: 529029 - RNA, 19 nt, Artificial Sequence
  Description of Artificial Sequence: Synthetic oligonucleotide
  Sense strand starting at position 2346 of SEQ ID NO: 318000
cggcuccuccuagaggaaa

SEQ ID NO: 529030 - RNA, 19 nt, Artificial Sequence
  Description of Artificial Sequence: Synthetic oligonucleotide
  Antisense strand to SEQ ID NO: 529029
uuuccucuaggaggagccg

SEQ ID NO: 529031 - RNA, 19 nt, Artificial Sequence
  Description of Artificial Sequence: Synthetic oligonucleotide
  Sense strand starting at position 2363 of SEQ ID NO: 318000
aaauauugguaguugcaau

SEQ ID NO: 529032 - RNA, 19 nt, Artificial Sequence
  Description of Artificial Sequence: Synthetic oligonucleotide
  Antisense strand to SEQ ID NO: 529031
auugcaacuaccaauauuu

SEQ ID NO: 529033 - RNA, 19 nt, Artificial Sequence
  Description of Artificial Sequence: Synthetic oligonucleotide
  Sense strand starting at position 2435 of SEQ ID NO: 318000
gcguuaagugcaguccaca

SEQ ID NO: 529034 - RNA, 19 nt, Artificial Sequence
  Description of Artificial Sequence: Synthetic oligonucleotide
  Antisense strand to SEQ ID NO: 529033
uguggacugcacuuaacgc

SEQ ID NO: 529035 - RNA, 19 nt, Artificial Sequence
  Description of Artificial Sequence: Synthetic oligonucleotide
  Sense strand starting at position 2479 of SEQ ID NO: 318000
guuagcuaucuccaggaau

SEQ ID NO: 529036 - RNA, 19 nt, Artificial Sequence
  Description of Artificial Sequence: Synthetic oligonucleotide
  Antisense strand to SEQ ID NO: 529035
auuccuggagauagcuaac

SEQ ID NO: 529037 - RNA, 19 nt, Artificial Sequence
  Description of Artificial Sequence: Synthetic oligonucleotide
  Sense strand starting at position 2625 of SEQ ID NO: 318000
gacuuuauuguggagguua

SEQ ID NO: 529038 - RNA, 19 nt, Artificial Sequence
  Description of Artificial Sequence: Synthetic oligonucleotide
  Antisense strand to SEQ ID NO: 529037
uaaccuccacaauaaaguc

SEQ ID NO: 529039 - RNA, 19 nt, Artificial Sequence
  Description of Artificial Sequence: Synthetic oligonucleotide
  Sense strand starting at position 2627 of SEQ ID NO: 318000
cuuuauuguggagguuaga

SEQ ID NO: 529040 - RNA, 19 nt, Artificial Sequence
  Description of Artificial Sequence: Synthetic oligonucleotide
  Antisense strand to SEQ ID NO: 529039
ucuaaccuccacaauaaag

SEQ ID NO: 529041 - RNA, 19 nt, Artificial Sequence
  Description of Artificial Sequence: Synthetic oligonucleotide
  Sense strand starting at position 2664 of SEQ ID NO: 318000
ugaguaauuuaccaaggac

SEQ ID NO: 529042 - RNA, 19 nt, Artificial Sequence
  Description of Artificial Sequence: Synthetic oligonucleotide
  Antisense strand to SEQ ID NO: 529041
guccuugguaaauuacuca

SEQ ID NO: 529043 - RNA, 19 nt, Artificial Sequence
  Description of Artificial Sequence: Synthetic oligonucleotide
  Sense strand starting at position 2689 of SEQ ID NO: 318000
cauguuagcagagagguau

SEQ ID NO: 529044 - RNA, 19 nt, Artificial Sequence
  Description of Artificial Sequence: Synthetic oligonucleotide
  Antisense strand to SEQ ID NO: 529043
auaccucucugcuaacaug

SEQ ID NO: 529045 - RNA, 19 nt, Artificial Sequence
  Description of Artificial Sequence: Synthetic oligonucleotide
  Sense strand starting at position 2799 of SEQ ID NO: 318000
ggacauagcucaucuguca

SEQ ID NO: 529046 - RNA, 19 nt, Artificial Sequence
  Description of Artificial Sequence: Synthetic oligonucleotide
  Antisense strand to SEQ ID NO: 529045
ugacagaugagcuaugucc

SEQ ID NO: 529047 - RNA, 19 nt, Artificial Sequence
  Description of Artificial Sequence: Synthetic oligonucleotide
  Sense strand starting at position 2861 of SEQ ID NO: 318000
guugcagaaaguuaaaguu

SEQ ID NO: 529048 - RNA, 19 nt, Artificial Sequence
  Description of Artificial Sequence: Synthetic oligonucleotide
  Antisense strand to SEQ ID NO: 529047
aacuuuaacuuucugcaac

SEQ ID NO: 529049 - RNA, 19 nt, Artificial Sequence
  Description of Artificial Sequence: Synthetic oligonucleotide
  Sense strand starting at position 2873 of SEQ ID NO: 318000
uaaaguugugcauaagcau

SEQ ID NO: 529050 - RNA, 19 nt, Artificial Sequence
  Description of Artificial Sequence: Synthetic oligonucleotide
  Antisense strand to SEQ ID NO: 529049
augcuuaugcacaacuuua

SEQ ID NO: 529051 - RNA, 19 nt, Artificial Sequence
  Description of Artificial Sequence: Synthetic oligonucleotide
  Sense strand starting at position 2968 of SEQ ID NO: 318000
uugucucagaucugaagga

SEQ ID NO: 529052 - RNA, 19 nt, Artificial Sequence
  Description of Artificial Sequence: Synthetic oligonucleotide
  Antisense strand to SEQ ID NO: 529051
uccuucagaucugagacaa

SEQ ID NO: 529053 - RNA, 19 nt, Artificial Sequence
  Description of Artificial Sequence: Synthetic oligonucleotide
  Sense strand starting at position 2984 of SEQ ID NO: 318000
ggaguagcuagucaugcaa

SEQ ID NO: 529054 - RNA, 19 nt, Artificial Sequence
  Description of Artificial Sequence: Synthetic oligonucleotide
  Antisense strand to SEQ ID NO: 529053
uugcaugacuagcuacucc

SEQ ID NO: 529055 - RNA, 19 nt, Artificial Sequence
  Description of Artificial Sequence: Synthetic oligonucleotide
  Sense strand starting at position 3058 of SEQ ID NO: 318000
acagcuuuggcuuacuaaa

SEQ ID NO: 529056 - RNA, 19 nt, Artificial Sequence
  Description of Artificial Sequence: Synthetic oligonucleotide
  Antisense strand to SEQ ID NO: 529055
uuuaguaagccaaagcugu

SEQ ID NO: 529057 - RNA, 19 nt, Artificial Sequence
  Description of Artificial Sequence: Synthetic oligonucleotide
  Sense strand starting at position 3060 of SEQ ID NO: 318000
agcuuuggcuuacuaaaga

SEQ ID NO: 529058 - RNA, 19 nt, Artificial Sequence
  Description of Artificial Sequence: Synthetic oligonucleotide
  Antisense strand to SEQ ID NO: 529057
ucuuuaguaagccaaagcu

SEQ ID NO: 529059 - RNA, 19 nt, Artificial Sequence
  Description of Artificial Sequence: Synthetic oligonucleotide
  Sense strand starting at position 3185 of SEQ ID NO: 318000
ucuauagggcuuugaagua

SEQ ID NO: 529060 - RNA, 19 nt, Artificial Sequence
  Description of Artificial Sequence: Synthetic oligonucleotide
  Antisense strand to SEQ ID NO: 529059
uacuucaaagcccuauaga

SEQ ID NO: 529061 - RNA, 19 nt, Artificial Sequence
  Description of Artificial Sequence: Synthetic oligonucleotide
  Sense strand starting at position 3190 of SEQ ID NO: 318000
agggcuuugaaguaguaca

SEQ ID NO: 529062 - RNA, 19 nt, Artificial Sequence
  Description of Artificial Sequence: Synthetic oligonucleotide
  Antisense strand to SEQ ID NO: 529061
uguacuacuucaaagcccu

SEQ ID NO: 529063 - RNA, 19 nt, Artificial Sequence
  Description of Artificial Sequence: Synthetic oligonucleotide
  Sense strand starting at position 3427 of SEQ ID NO: 318000
gggugggaugguuauugau

SEQ ID NO: 529064 - RNA, 19 nt, Artificial Sequence
  Description of Artificial Sequence: Synthetic oligonucleotide
  Antisense strand to SEQ ID NO: 529063
aucaauaaccaucccaccc

SEQ ID NO: 529065 - RNA, 19 nt, Artificial Sequence
  Description of Artificial Sequence: Synthetic oligonucleotide
  Sense strand starting at position 3433 of SEQ ID NO: 318000
gaugguuauugauccugaa

SEQ ID NO: 529066 - RNA, 19 nt, Artificial Sequence
  Description of Artificial Sequence: Synthetic oligonucleotide
  Antisense strand to SEQ ID NO: 529065
uucaggaucaauaaccauc

SEQ ID NO: 529067 - RNA, 19 nt, Artificial Sequence
  Description of Artificial Sequence: Synthetic oligonucleotide
  Sense strand starting at position 3852 of SEQ ID NO: 318000
agagaaucuugaucuaguu

SEQ ID NO: 529068 - RNA, 19 nt, Artificial Sequence
  Description of Artificial Sequence: Synthetic oligonucleotide
  Antisense strand to SEQ ID NO: 529067
aacuagaucaagauucucu

SEQ ID NO: 529069 - RNA, 19 nt, Artificial Sequence
  Description of Artificial Sequence: Synthetic oligonucleotide
  Sense strand starting at position 3933 of SEQ ID NO: 318000
agcucagggccauacuuaa

SEQ ID NO: 529070 - RNA, 19 nt, Artificial Sequence
  Description of Artificial Sequence: Synthetic oligonucleotide
  Antisense strand to SEQ ID NO: 529069
uuaaguauggcccugagcu

SEQ ID NO: 529071 - RNA, 19 nt, Artificial Sequence
  Description of Artificial Sequence: Synthetic oligonucleotide
  Sense strand starting at position 120 of SEQ ID NO: 318001
cauugcucaccaggagaua

SEQ ID NO: 529072 - RNA, 19 nt, Artificial Sequence
  Description of Artificial Sequence: Synthetic oligonucleotide
  Antisense strand to SEQ ID NO: 529071
uaucuccuggugagcaaug

SEQ ID NO: 529073 - RNA, 19 nt, Artificial Sequence
  Description of Artificial Sequence: Synthetic oligonucleotide
  Sense strand starting at position 261 of SEQ ID NO: 318001
acauuauguccugagcuaa

SEQ ID NO: 529074 - RNA, 19 nt, Artificial Sequence
  Description of Artificial Sequence: Synthetic oligonucleotide
  Antisense strand to SEQ ID NO: 529073
uuagcucaggacauaaugu

SEQ ID NO: 529075 - RNA, 19 nt, Artificial Sequence
  Description of Artificial Sequence: Synthetic oligonucleotide
  Sense strand starting at position 319 of SEQ ID NO: 318001
cuguaaacaucuguuuaag

SEQ ID NO: 529076 - RNA, 19 nt, Artificial Sequence
  Description of Artificial Sequence: Synthetic oligonucleotide
  Antisense strand to SEQ ID NO: 529075
cuuaaacagauguuuacag

SEQ ID NO: 529077 - RNA, 19 nt, Artificial Sequence
  Description of Artificial Sequence: Synthetic oligonucleotide
  Sense strand starting at position 357 of SEQ ID NO: 318001
acaggaggccucuaguauc

SEQ ID NO: 529078 - RNA, 19 nt, Artificial Sequence
  Description of Artificial Sequence: Synthetic oligonucleotide
  Antisense strand to SEQ ID NO: 529077
gauacuagaggccuccugu

SEQ ID NO: 529079 - RNA, 19 nt, Artificial Sequence
  Description of Artificial Sequence: Synthetic oligonucleotide
  Sense strand starting at position 379 of SEQ ID NO: 318001
uuuaaagugguuuaugaug

SEQ ID NO: 529080 - RNA, 19 nt, Artificial Sequence
  Description of Artificial Sequence: Synthetic oligonucleotide
  Antisense strand to SEQ ID NO: 529079
caucauaaaccacuuuaaa

SEQ ID NO: 529081 - RNA, 19 nt, Artificial Sequence
  Description of Artificial Sequence: Synthetic oligonucleotide
  Sense strand starting at position 511 of SEQ ID NO: 318001
ucacuuugucauugcauuu

SEQ ID NO: 529082 - RNA, 19 nt, Artificial Sequence
  Description of Artificial Sequence: Synthetic oligonucleotide
  Antisense strand to SEQ ID NO: 529081
aaaugcaaugacaaaguga

SEQ ID NO: 529083 - RNA, 19 nt, Artificial Sequence
  Description of Artificial Sequence: Synthetic oligonucleotide
  Sense strand starting at position 683 of SEQ ID NO: 318001
aguuuauaaggguggaaga

SEQ ID NO: 529084 - RNA, 19 nt, Artificial Sequence
  Description of Artificial Sequence: Synthetic oligonucleotide
  Antisense strand to SEQ ID NO: 529083
ucuuccacccuuauaaacu

SEQ ID NO: 529085 - RNA, 19 nt, Artificial Sequence
  Description of Artificial Sequence: Synthetic oligonucleotide
  Sense strand starting at position 684 of SEQ ID NO: 318001
guuuauaaggguggaagaa

SEQ ID NO: 529086 - RNA, 19 nt, Artificial Sequence
  Description of Artificial Sequence: Synthetic oligonucleotide
  Antisense strand to SEQ ID NO: 529085
uucuuccacccuuauaaac

SEQ ID NO: 529087 - RNA, 19 nt, Artificial Sequence
  Description of Artificial Sequence: Synthetic oligonucleotide
  Sense strand starting at position 696 of SEQ ID NO: 318001
ggaagaagaugaugagaga

SEQ ID NO: 529088 - RNA, 19 nt, Artificial Sequence
  Description of Artificial Sequence: Synthetic oligonucleotide
  Antisense strand to SEQ ID NO: 529087
ucucucaucaucuucuucc

SEQ ID NO: 529089 - RNA, 19 nt, Artificial Sequence
  Description of Artificial Sequence: Synthetic oligonucleotide
  Sense strand starting at position 716 of SEQ ID NO: 318001
gggacaaccucuuuaagcu

SEQ ID NO: 529090 - RNA, 19 nt, Artificial Sequence
  Description of Artificial Sequence: Synthetic oligonucleotide
  Antisense strand to SEQ ID NO: 529089
agcuuaaagagguuguccc

SEQ ID NO: 529091 - RNA, 19 nt, Artificial Sequence
  Description of Artificial Sequence: Synthetic oligonucleotide
  Sense strand starting at position 717 of SEQ ID NO: 318001
ggacaaccucuuuaagcua

SEQ ID NO: 529092 - RNA, 19 nt, Artificial Sequence
  Description of Artificial Sequence: Synthetic oligonucleotide
  Antisense strand to SEQ ID NO: 529091
uagcuuaaagagguugucc

SEQ ID NO: 529093 - RNA, 19 nt, Artificial Sequence
  Description of Artificial Sequence: Synthetic oligonucleotide
  Sense strand starting at position 807 of SEQ ID NO: 318001
agcuguagauagcugaaga

SEQ ID NO: 529094 - RNA, 19 nt, Artificial Sequence
  Description of Artificial Sequence: Synthetic oligonucleotide
  Antisense strand to SEQ ID NO: 529093
ucuucagcuaucuacagcu

SEQ ID NO: 529095 - RNA, 19 nt, Artificial Sequence
  Description of Artificial Sequence: Synthetic oligonucleotide
  Sense strand starting at position 818 of SEQ ID NO: 318001
gcugaagacuccuugaaau

SEQ ID NO: 529096 - RNA, 19 nt, Artificial Sequence
  Description of Artificial Sequence: Synthetic oligonucleotide
  Antisense strand to SEQ ID NO: 529095
auuucaaggagucuucagc

SEQ ID NO: 529097 - RNA, 19 nt, Artificial Sequence
  Description of Artificial Sequence: Synthetic oligonucleotide
  Sense strand starting at position 991 of SEQ ID NO: 318001
aagacacuucuagggugau

SEQ ID NO: 529098 - RNA, 19 nt, Artificial Sequence
  Description of Artificial Sequence: Synthetic oligonucleotide
  Antisense strand to SEQ ID NO: 529097
aucacccuagaagugucuu

SEQ ID NO: 529099 - RNA, 19 nt, Artificial Sequence
  Description of Artificial Sequence: Synthetic oligonucleotide
  Sense strand starting at position 1004 of SEQ ID NO: 318001
ggugauucagguggaaacu

SEQ ID NO: 529100 - RNA, 19 nt, Artificial Sequence
  Description of Artificial Sequence: Synthetic oligonucleotide
  Antisense strand to SEQ ID NO: 529099
aguuuccaccugaaucacc

SEQ ID NO: 529101 - RNA, 19 nt, Artificial Sequence
  Description of Artificial Sequence: Synthetic oligonucleotide
  Sense strand starting at position 1031 of SEQ ID NO: 318001
acaccaguugcucaggaaa

SEQ ID NO: 529102 - RNA, 19 nt, Artificial Sequence
  Description of Artificial Sequence: Synthetic oligonucleotide
  Antisense strand to SEQ ID NO: 529101
uuuccugagcaacuggugu

SEQ ID NO: 529103 - RNA, 19 nt, Artificial Sequence
  Description of Artificial Sequence: Synthetic oligonucleotide
  Sense strand starting at position 1071 of SEQ ID NO: 318001
aucccaugucugcaagaaa

SEQ ID NO: 529104 - RNA, 19 nt, Artificial Sequence
  Description of Artificial Sequence: Synthetic oligonucleotide
  Antisense strand to SEQ ID NO: 529103
uuucuugcagacaugggau

SEQ ID NO: 529105 - RNA, 19 nt, Artificial Sequence
  Description of Artificial Sequence: Synthetic oligonucleotide
  Sense strand starting at position 1273 of SEQ ID NO: 318001
ugcaguucuccugagaacu

SEQ ID NO: 529106 - RNA, 19 nt, Artificial Sequence
  Description of Artificial Sequence: Synthetic oligonucleotide
  Antisense strand to SEQ ID NO: 529105
aguucucaggagaacugca

SEQ ID NO: 529107 - RNA, 19 nt, Artificial Sequence
  Description of Artificial Sequence: Synthetic oligonucleotide
  Sense strand starting at position 1371 of SEQ ID NO: 318001
ugcagaaacuacucugacu

SEQ ID NO: 529108 - RNA, 19 nt, Artificial Sequence
  Description of Artificial Sequence: Synthetic oligonucleotide
  Antisense strand to SEQ ID NO: 529107
agucagaguaguuucugca

SEQ ID NO: 529109 - RNA, 19 nt, Artificial Sequence
  Description of Artificial Sequence: Synthetic oligonucleotide
  Sense strand starting at position 1775 of SEQ ID NO: 318001
aaacuuuaagccugguuga

SEQ ID NO: 529110 - RNA, 19 nt, Artificial Sequence
  Description of Artificial Sequence: Synthetic oligonucleotide
  Antisense strand to SEQ ID NO: 529109
ucaaccaggcuuaaaguuu

SEQ ID NO: 529111 - RNA, 19 nt, Artificial Sequence
  Description of Artificial Sequence: Synthetic oligonucleotide
  Sense strand starting at position 1778 of SEQ ID NO: 318001
cuuuaagccugguugauuu

SEQ ID NO: 529112 - RNA, 19 nt, Artificial Sequence
  Description of Artificial Sequence: Synthetic oligonucleotide
  Antisense strand to SEQ ID NO: 529111
aaaucaaccaggcuuaaag

SEQ ID NO: 529113 - RNA, 19 nt, Artificial Sequence
  Description of Artificial Sequence: Synthetic oligonucleotide
  Sense strand starting at position 2278 of SEQ ID NO: 318001
acacuagauuggguuacaa

SEQ ID NO: 529114 - RNA, 19 nt, Artificial Sequence
  Description of Artificial Sequence: Synthetic oligonucleotide
  Antisense strand to SEQ ID NO: 529113
uuguaacccaaucuagugu

SEQ ID NO: 529115 - RNA, 19 nt, Artificial Sequence
  Description of Artificial Sequence: Synthetic oligonucleotide
  Sense strand starting at position 2344 of SEQ ID NO: 318001
agccaagucauccggaaua

SEQ ID NO: 529116 - RNA, 19 nt, Artificial Sequence
  Description of Artificial Sequence: Synthetic oligonucleotide
  Antisense strand to SEQ ID NO: 529115
uauuccggaugacuuggcu

SEQ ID NO: 529117 - RNA, 19 nt, Artificial Sequence
  Description of Artificial Sequence: Synthetic oligonucleotide
  Sense strand starting at position 2996 of SEQ ID NO: 318001
gugcgugucacucucaacu

SEQ ID NO: 529118 - RNA, 19 nt, Artificial Sequence
  Description of Artificial Sequence: Synthetic oligonucleotide
  Antisense strand to SEQ ID NO: 529117
aguugagagugacacgcac

SEQ ID NO: 529119 - RNA, 19 nt, Artificial Sequence
  Description of Artificial Sequence: Synthetic oligonucleotide
  Sense strand starting at position 3023 of SEQ ID NO: 318001
cggcuccuccuagaggaaa

SEQ ID NO: 529120 - RNA, 19 nt, Artificial Sequence
  Description of Artificial Sequence: Synthetic oligonucleotide
  Antisense strand to SEQ ID NO: 529119
uuuccucuaggaggagccg

SEQ ID NO: 529121 - RNA, 19 nt, Artificial Sequence
  Description of Artificial Sequence: Synthetic oligonucleotide
  Sense strand starting at position 3040 of SEQ ID NO: 318001
aaauauugguaguugcaau

SEQ ID NO: 529122 - RNA, 19 nt, Artificial Sequence
  Description of Artificial Sequence: Synthetic oligonucleotide
  Antisense strand to SEQ ID NO: 529121
auugcaacuaccaauauuu

SEQ ID NO: 529123 - RNA, 19 nt, Artificial Sequence
  Description of Artificial Sequence: Synthetic oligonucleotide
  Sense strand starting at position 3112 of SEQ ID NO: 318001
gcguuaagugcaguccaca

SEQ ID NO: 529124 - RNA, 19 nt, Artificial Sequence
  Description of Artificial Sequence: Synthetic oligonucleotide
  Antisense strand to SEQ ID NO: 529123
uguggacugcacuuaacgc

SEQ ID NO: 529125 - RNA, 19 nt, Artificial Sequence
  Description of Artificial Sequence: Synthetic oligonucleotide
  Sense strand starting at position 3156 of SEQ ID NO: 318001
guuagcuaucuccaggaau

SEQ ID NO: 529126 - RNA, 19 nt, Artificial Sequence
  Description of Artificial Sequence: Synthetic oligonucleotide
  Antisense strand to SEQ ID NO: 529125
auuccuggagauagcuaac

SEQ ID NO: 529127 - RNA, 19 nt, Artificial Sequence
  Description of Artificial Sequence: Synthetic oligonucleotide
  Sense strand starting at position 3302 of SEQ ID NO: 318001
gacuuuauuguggagguua

SEQ ID NO: 529128 - RNA, 19 nt, Artificial Sequence
  Description of Artificial Sequence: Synthetic oligonucleotide
  Antisense strand to SEQ ID NO: 529127
uaaccuccacaauaaaguc

SEQ ID NO: 529129 - RNA, 19 nt, Artificial Sequence
  Description of Artificial Sequence: Synthetic oligonucleotide
  Sense strand starting at position 3304 of SEQ ID NO: 318001
cuuuauuguggagguuaga

SEQ ID NO: 529130 - RNA, 19 nt, Artificial Sequence
  Description of Artificial Sequence: Synthetic oligonucleotide
  Antisense strand to SEQ ID NO: 529129
ucuaaccuccacaauaaag

SEQ ID NO: 529131 - RNA, 19 nt, Artificial Sequence
  Description of Artificial Sequence: Synthetic oligonucleotide
  Sense strand starting at position 3341 of SEQ ID NO: 318001
ugaguaauuuaccaaggac

SEQ ID NO: 529132 - RNA, 19 nt, Artificial Sequence
  Description of Artificial Sequence: Synthetic oligonucleotide
  Antisense strand to SEQ ID NO: 529131
guccuugguaaauuacuca

SEQ ID NO: 529133 - RNA, 19 nt, Artificial Sequence
  Description of Artificial Sequence: Synthetic oligonucleotide
  Sense strand starting at position 3366 of SEQ ID NO: 318001
cauguuagcagagagguau

SEQ ID NO: 529134 - RNA, 19 nt, Artificial Sequence
  Description of Artificial Sequence: Synthetic oligonucleotide
  Antisense strand to SEQ ID NO: 529133
auaccucucugcuaacaug

SEQ ID NO: 529135 - RNA, 19 nt, Artificial Sequence
  Description of Artificial Sequence: Synthetic oligonucleotide
  Sense strand starting at position 3476 of SEQ ID NO: 318001
ggacauagcucaucuguca

SEQ ID NO: 529136 - RNA, 19 nt, Artificial Sequence
  Description of Artificial Sequence: Synthetic oligonucleotide
  Antisense strand to SEQ ID NO: 529135
ugacagaugagcuaugucc

SEQ ID NO: 529137 - RNA, 19 nt, Artificial Sequence
  Description of Artificial Sequence: Synthetic oligonucleotide
  Sense strand starting at position 3538 of SEQ ID NO: 318001
guugcagaaaguuaaaguu

SEQ ID NO: 529138 - RNA, 19 nt, Artificial Sequence
  Description of Artificial Sequence: Synthetic oligonucleotide
  Antisense strand to SEQ ID NO: 529137
aacuuuaacuuucugcaac

SEQ ID NO: 529139 - RNA, 19 nt, Artificial Sequence
  Description of Artificial Sequence: Synthetic oligonucleotide
  Sense strand starting at position 3645 of SEQ ID NO: 318001
uugucucagaucugaagga

SEQ ID NO: 529140 - RNA, 19 nt, Artificial Sequence
  Description of Artificial Sequence: Synthetic oligonucleotide
  Antisense strand to SEQ ID NO: 529139
uccuucagaucugagacaa

SEQ ID NO: 529141 - RNA, 19 nt, Artificial Sequence
  Description of Artificial Sequence: Synthetic oligonucleotide
  Sense strand starting at position 3661 of SEQ ID NO: 318001
ggaguagcuagucaugcaa

SEQ ID NO: 529142 - RNA, 19 nt, Artificial Sequence
  Description of Artificial Sequence: Synthetic oligonucleotide
  Antisense strand to SEQ ID NO: 529141
uugcaugacuagcuacucc

SEQ ID NO: 529143 - RNA, 19 nt, Artificial Sequence
  Description of Artificial Sequence: Synthetic oligonucleotide
  Sense strand starting at position 3735 of SEQ ID NO: 318001
acagcuuuggcuuacuaaa

SEQ ID NO: 529144 - RNA, 19 nt, Artificial Sequence
  Description of Artificial Sequence: Synthetic oligonucleotide
  Antisense strand to SEQ ID NO: 529143
uuuaguaagccaaagcugu

SEQ ID NO: 529145 - RNA, 19 nt, Artificial Sequence
  Description of Artificial Sequence: Synthetic oligonucleotide
  Sense strand starting at position 3737 of SEQ ID NO: 318001
agcuuuggcuuacuaaaga

SEQ ID NO: 529146 - RNA, 19 nt, Artificial Sequence
  Description of Artificial Sequence: Synthetic oligonucleotide
  Antisense strand to SEQ ID NO: 529145
ucuuuaguaagccaaagcu

SEQ ID NO: 529147 - RNA, 19 nt, Artificial Sequence
  Description of Artificial Sequence: Synthetic oligonucleotide
  Sense strand starting at position 3862 of SEQ ID NO: 318001
ucuauagggcuuugaagua

SEQ ID NO: 529148 - RNA, 19 nt, Artificial Sequence
  Description of Artificial Sequence: Synthetic oligonucleotide
  Antisense strand to SEQ ID NO: 529147
uacuucaaagcccuauaga

SEQ ID NO: 529149 - RNA, 19 nt, Artificial Sequence
  Description of Artificial Sequence: Synthetic oligonucleotide
  Sense strand starting at position 3867 of SEQ ID NO: 318001
agggcuuugaaguaguaca

SEQ ID NO: 529150 - RNA, 19 nt, Artificial Sequence
  Description of Artificial Sequence: Synthetic oligonucleotide
  Antisense strand to SEQ ID NO: 529149
uguacuacuucaaagcccu

SEQ ID NO: 529151 - RNA, 19 nt, Artificial Sequence
  Description of Artificial Sequence: Synthetic oligonucleotide
  Sense strand starting at position 234 of SEQ ID NO: 318002
gaaagacauucuguacugu

SEQ ID NO: 529152 - RNA, 19 nt, Artificial Sequence
  Description of Artificial Sequence: Synthetic oligonucleotide
  Antisense strand to SEQ ID NO: 529151
acaguacagaaugucuuuc

SEQ ID NO: 529153 - RNA, 19 nt, Artificial Sequence
  Description of Artificial Sequence: Synthetic oligonucleotide
  Sense strand starting at position 297 of SEQ ID NO: 318002
cuucgauucuuaucaauug

SEQ ID NO: 529154 - RNA, 19 nt, Artificial Sequence
  Description of Artificial Sequence: Synthetic oligonucleotide
  Antisense strand to SEQ ID NO: 529153
caauugauaagaaucgaag

SEQ ID NO: 529155 - RNA, 19 nt, Artificial Sequence
  Description of Artificial Sequence: Synthetic oligonucleotide
  Sense strand starting at position 324 of SEQ ID NO: 318002
aaaggugauuaggagauuu

SEQ ID NO: 529156 - RNA, 19 nt, Artificial Sequence
  Description of Artificial Sequence: Synthetic oligonucleotide
  Antisense strand to SEQ ID NO: 529155
aaaucuccuaaucaccuuu

SEQ ID NO: 529157 - RNA, 19 nt, Artificial Sequence
  Description of Artificial Sequence: Synthetic oligonucleotide
  Sense strand starting at position 499 of SEQ ID NO: 318002
accaaauucccauaguugu

SEQ ID NO: 529158 - RNA, 19 nt, Artificial Sequence
  Description of Artificial Sequence: Synthetic oligonucleotide
  Antisense strand to SEQ ID NO: 529157
acaacuaugggaauuuggu

SEQ ID NO: 529159 - RNA, 19 nt, Artificial Sequence
  Description of Artificial Sequence: Synthetic oligonucleotide
  Sense strand starting at position 506 of SEQ ID NO: 318002
ucccauaguugugcaauuu

SEQ ID NO: 529160 - RNA, 19 nt, Artificial Sequence
  Description of Artificial Sequence: Synthetic oligonucleotide
  Antisense strand to SEQ ID NO: 529159
aaauugcacaacuauggga

SEQ ID NO: 529161 - RNA, 19 nt, Artificial Sequence
  Description of Artificial Sequence: Synthetic oligonucleotide
  Sense strand starting at position 519 of SEQ ID NO: 318002
caauuugccagugguacga

SEQ ID NO: 529162 - RNA, 19 nt, Artificial Sequence
  Description of Artificial Sequence: Synthetic oligonucleotide
  Antisense strand to SEQ ID NO: 529161
ucguaccacuggcaaauug

SEQ ID NO: 529163 - RNA, 19 nt, Artificial Sequence
  Description of Artificial Sequence: Synthetic oligonucleotide
  Sense strand starting at position 528 of SEQ ID NO: 318002
agugguacgaccugagaag

SEQ ID NO: 529164 - RNA, 19 nt, Artificial Sequence
  Description of Artificial Sequence: Synthetic oligonucleotide
  Antisense strand to SEQ ID NO: 529163
cuucucaggucguaccacu

SEQ ID NO: 529165 - RNA, 19 nt, Artificial Sequence
  Description of Artificial Sequence: Synthetic oligonucleotide
  Sense strand starting at position 529 of SEQ ID NO: 318002
gugguacgaccugagaagu

SEQ ID NO: 529166 - RNA, 19 nt, Artificial Sequence
  Description of Artificial Sequence: Synthetic oligonucleotide
  Antisense strand to SEQ ID NO: 529165
acuucucaggucguaccac

SEQ ID NO: 529167 - RNA, 19 nt, Artificial Sequence
  Description of Artificial Sequence: Synthetic oligonucleotide
  Sense strand starting at position 535 of SEQ ID NO: 318002
cgaccugagaaguguaauc

SEQ ID NO: 529168 - RNA, 19 nt, Artificial Sequence
  Description of Artificial Sequence: Synthetic oligonucleotide
  Antisense strand to SEQ ID NO: 529167
gauuacacuucucaggucg

SEQ ID NO: 529169 - RNA, 19 nt, Artificial Sequence
  Description of Artificial Sequence: Synthetic oligonucleotide
  Sense strand starting at position 537 of SEQ ID NO: 318002
accugagaaguguaaucuu

SEQ ID NO: 529170 - RNA, 19 nt, Artificial Sequence
  Description of Artificial Sequence: Synthetic oligonucleotide
  Antisense strand to SEQ ID NO: 529169
aagauuacacuucucaggu

SEQ ID NO: 529171 - RNA, 19 nt, Artificial Sequence
  Description of Artificial Sequence: Synthetic oligonucleotide
  Sense strand starting at position 660 of SEQ ID NO: 318002
cauugcucaccaggagaua

SEQ ID NO: 529172 - RNA, 19 nt, Artificial Sequence
  Description of Artificial Sequence: Synthetic oligonucleotide
  Antisense strand to SEQ ID NO: 529171
uaucuccuggugagcaaug

SEQ ID NO: 529173 - RNA, 19 nt, Artificial Sequence
  Description of Artificial Sequence: Synthetic oligonucleotide
  Sense strand starting at position 801 of SEQ ID NO: 318002
acauuauguccugagcuaa

SEQ ID NO: 529174 - RNA, 19 nt, Artificial Sequence
  Description of Artificial Sequence: Synthetic oligonucleotide
  Antisense strand to SEQ ID NO: 529173
uuagcucaggacauaaugu

SEQ ID NO: 529175 - RNA, 19 nt, Artificial Sequence
  Description of Artificial Sequence: Synthetic oligonucleotide
  Sense strand starting at position 859 of SEQ ID NO: 318002
cuguaaacaucuguuuaag

SEQ ID NO: 529176 - RNA, 19 nt, Artificial Sequence
  Description of Artificial Sequence: Synthetic oligonucleotide
  Antisense strand to SEQ ID NO: 529175
cuuaaacagauguuuacag

SEQ ID NO: 529177 - RNA, 19 nt, Artificial Sequence
  Description of Artificial Sequence: Synthetic oligonucleotide
  Sense strand starting at position 897 of SEQ ID NO: 318002
acaggaggccucuaguauc

SEQ ID NO: 529178 - RNA, 19 nt, Artificial Sequence
  Description of Artificial Sequence: Synthetic oligonucleotide
  Antisense strand to SEQ ID NO: 529177
gauacuagaggccuccugu

SEQ ID NO: 529179 - RNA, 19 nt, Artificial Sequence
  Description of Artificial Sequence: Synthetic oligonucleotide
  Sense strand starting at position 919 of SEQ ID NO: 318002
uuuaaagugguuuaugaug

SEQ ID NO: 529180 - RNA, 19 nt, Artificial Sequence
  Description of Artificial Sequence: Synthetic oligonucleotide
  Antisense strand to SEQ ID NO: 529179
caucauaaaccacuuuaaa

SEQ ID NO: 529181 - RNA, 19 nt, Artificial Sequence
  Description of Artificial Sequence: Synthetic oligonucleotide
  Sense strand starting at position 1051 of SEQ ID NO: 318002
ucacuuugucauugcauuu

SEQ ID NO: 529182 - RNA, 19 nt, Artificial Sequence
  Description of Artificial Sequence: Synthetic oligonucleotide
  Antisense strand to SEQ ID NO: 529181
aaaugcaaugacaaaguga

SEQ ID NO: 529183 - RNA, 19 nt, Artificial Sequence
  Description of Artificial Sequence: Synthetic oligonucleotide
  Sense strand starting at position 1223 of SEQ ID NO: 318002
aguuuauaaggguggaaga

SEQ ID NO: 529184 - RNA, 19 nt, Artificial Sequence
  Description of Artificial Sequence: Synthetic oligonucleotide
  Antisense strand to SEQ ID NO: 529183
ucuuccacccuuauaaacu

SEQ ID NO: 529185 - RNA, 19 nt, Artificial Sequence
  Description of Artificial Sequence: Synthetic oligonucleotide
  Sense strand starting at position 1224 of SEQ ID NO: 318002
guuuauaaggguggaagaa

SEQ ID NO: 529186 - RNA, 19 nt, Artificial Sequence
  Description of Artificial Sequence: Synthetic oligonucleotide
  Antisense strand to SEQ ID NO: 529185
uucuuccacccuuauaaac

SEQ ID NO: 529187 - RNA, 19 nt, Artificial Sequence
  Description of Artificial Sequence: Synthetic oligonucleotide
  Sense strand starting at position 1256 of SEQ ID NO: 318002
gggacaaccucuuuaagcu

SEQ ID NO: 529188 - RNA, 19 nt, Artificial Sequence
  Description of Artificial Sequence: Synthetic oligonucleotide
  Antisense strand to SEQ ID NO: 529187
agcuuaaagagguuguccc

SEQ ID NO: 529189 - RNA, 19 nt, Artificial Sequence
  Description of Artificial Sequence: Synthetic oligonucleotide
  Sense strand starting at position 1257 of SEQ ID NO: 318002
ggacaaccucuuuaagcua

SEQ ID NO: 529190 - RNA, 19 nt, Artificial Sequence
  Description of Artificial Sequence: Synthetic oligonucleotide
  Antisense strand to SEQ ID NO: 529189
uagcuuaaagagguugucc

SEQ ID NO: 529191 - RNA, 19 nt, Artificial Sequence
  Description of Artificial Sequence: Synthetic oligonucleotide
  Sense strand starting at position 1347 of SEQ ID NO: 318002
agcuguagauagcugaaga

SEQ ID NO: 529192 - RNA, 19 nt, Artificial Sequence
  Description of Artificial Sequence: Synthetic oligonucleotide
  Antisense strand to SEQ ID NO: 529191
ucuucagcuaucuacagcu

SEQ ID NO: 529193 - RNA, 19 nt, Artificial Sequence
  Description of Artificial Sequence: Synthetic oligonucleotide
  Sense strand starting at position 1358 of SEQ ID NO: 318002
gcugaagacuccuugaaau

SEQ ID NO: 529194 - RNA, 19 nt, Artificial Sequence
  Description of Artificial Sequence: Synthetic oligonucleotide
  Antisense strand to SEQ ID NO: 529193
auuucaaggagucuucagc

SEQ ID NO: 529195 - RNA, 19 nt, Artificial Sequence
  Description of Artificial Sequence: Synthetic oligonucleotide
  Sense strand starting at position 1531 of SEQ ID NO: 318002
aagacacuucuagggugau

SEQ ID NO: 529196 - RNA, 19 nt, Artificial Sequence
  Description of Artificial Sequence: Synthetic oligonucleotide
  Antisense strand to SEQ ID NO: 529195
aucacccuagaagugucuu

SEQ ID NO: 529197 - RNA, 19 nt, Artificial Sequence
  Description of Artificial Sequence: Synthetic oligonucleotide
  Sense strand starting at position 1544 of SEQ ID NO: 318002
ggugauucagguggaaacu

SEQ ID NO: 529198 - RNA, 19 nt, Artificial Sequence
  Description of Artificial Sequence: Synthetic oligonucleotide
  Antisense strand to SEQ ID NO: 529197
aguuuccaccugaaucacc

SEQ ID NO: 529199 - RNA, 19 nt, Artificial Sequence
  Description of Artificial Sequence: Synthetic oligonucleotide
  Sense strand starting at position 1571 of SEQ ID NO: 318002
acaccaguugcucaggaaa

SEQ ID NO: 529200 - RNA, 19 nt, Artificial Sequence
  Description of Artificial Sequence: Synthetic oligonucleotide
  Antisense strand to SEQ ID NO: 529199
uuuccugagcaacuggugu

SEQ ID NO: 529201 - RNA, 19 nt, Artificial Sequence
  Description of Artificial Sequence: Synthetic oligonucleotide
  Sense strand starting at position 1611 of SEQ ID NO: 318002
aucccaugucugcaagaaa

SEQ ID NO: 529202 - RNA, 19 nt, Artificial Sequence
  Description of Artificial Sequence: Synthetic oligonucleotide
  Antisense strand to SEQ ID NO: 529201
uuucuugcagacaugggau

SEQ ID NO: 529203 - RNA, 19 nt, Artificial Sequence
  Description of Artificial Sequence: Synthetic oligonucleotide
  Sense strand starting at position 1813 of SEQ ID NO: 318002
ugcaguucuccugagaacu

SEQ ID NO: 529204 - RNA, 19 nt, Artificial Sequence
  Description of Artificial Sequence: Synthetic oligonucleotide
  Antisense strand to SEQ ID NO: 529203
aguucucaggagaacugca

SEQ ID NO: 529205 - RNA, 19 nt, Artificial Sequence
  Description of Artificial Sequence: Synthetic oligonucleotide
  Sense strand starting at position 1911 of SEQ ID NO: 318002
ugcagaaacuacucugacu

SEQ ID NO: 529206 - RNA, 19 nt, Artificial Sequence
  Description of Artificial Sequence: Synthetic oligonucleotide
  Antisense strand to SEQ ID NO: 529205
agucagaguaguuucugca

SEQ ID NO: 529207 - RNA, 19 nt, Artificial Sequence
  Description of Artificial Sequence: Synthetic oligonucleotide
  Sense strand starting at position 2315 of SEQ ID NO: 318002
aaacuuuaagccugguuga

SEQ ID NO: 529208 - RNA, 19 nt, Artificial Sequence
  Description of Artificial Sequence: Synthetic oligonucleotide
  Antisense strand to SEQ ID NO: 529207
ucaaccaggcuuaaaguuu

SEQ ID NO: 529209 - RNA, 19 nt, Artificial Sequence
  Description of Artificial Sequence: Synthetic oligonucleotide
  Sense strand starting at position 2318 of SEQ ID NO: 318002
cuuuaagccugguugauuu

SEQ ID NO: 529210 - RNA, 19 nt, Artificial Sequence
  Description of Artificial Sequence: Synthetic oligonucleotide
  Antisense strand to SEQ ID NO: 529209
aaaucaaccaggcuuaaag

SEQ ID NO: 529211 - RNA, 19 nt, Artificial Sequence
  Description of Artificial Sequence: Synthetic oligonucleotide
  Sense strand starting at position 2818 of SEQ ID NO: 318002
acacuagauuggguuacaa

SEQ ID NO: 529212 - RNA, 19 nt, Artificial Sequence
  Description of Artificial Sequence: Synthetic oligonucleotide
  Antisense strand to SEQ ID NO: 529211
uuguaacccaaucuagugu

SEQ ID NO: 529213 - RNA, 19 nt, Artificial Sequence
  Description of Artificial Sequence: Synthetic oligonucleotide
  Sense strand starting at position 3536 of SEQ ID NO: 318002
gugcgugucacucucaacu

SEQ ID NO: 529214 - RNA, 19 nt, Artificial Sequence
  Description of Artificial Sequence: Synthetic oligonucleotide
  Antisense strand to SEQ ID NO: 529213
aguugagagugacacgcac

SEQ ID NO: 529215 - RNA, 19 nt, Artificial Sequence
  Description of Artificial Sequence: Synthetic oligonucleotide
  Sense strand starting at position 3563 of SEQ ID NO: 318002
cggcuccuccuagaggaaa

SEQ ID NO: 529216 - RNA, 19 nt, Artificial Sequence
  Description of Artificial Sequence: Synthetic oligonucleotide
  Antisense strand to SEQ ID NO: 529215
uuuccucuaggaggagccg

SEQ ID NO: 529217 - RNA, 19 nt, Artificial Sequence
  Description of Artificial Sequence: Synthetic oligonucleotide
  Sense strand starting at position 3580 of SEQ ID NO: 318002
aaauauugguaguugcaau

SEQ ID NO: 529218 - RNA, 19 nt, Artificial Sequence
  Description of Artificial Sequence: Synthetic oligonucleotide
  Antisense strand to SEQ ID NO: 529217
auugcaacuaccaauauuu

SEQ ID NO: 529219 - RNA, 19 nt, Artificial Sequence
  Description of Artificial Sequence: Synthetic oligonucleotide
  Sense strand starting at position 3652 of SEQ ID NO: 318002
gcguuaagugcaguccaca

SEQ ID NO: 529220 - RNA, 19 nt, Artificial Sequence
  Description of Artificial Sequence: Synthetic oligonucleotide
  Antisense strand to SEQ ID NO: 529219
uguggacugcacuuaacgc

SEQ ID NO: 529221 - RNA, 19 nt, Artificial Sequence
  Description of Artificial Sequence: Synthetic oligonucleotide
  Sense strand starting at position 3696 of SEQ ID NO: 318002
guuagcuaucuccaggaau

SEQ ID NO: 529222 - RNA, 19 nt, Artificial Sequence
  Description of Artificial Sequence: Synthetic oligonucleotide
  Antisense strand to SEQ ID NO: 529221
auuccuggagauagcuaac

SEQ ID NO: 529223 - RNA, 19 nt, Artificial Sequence
  Description of Artificial Sequence: Synthetic oligonucleotide
  Sense strand starting at position 3842 of SEQ ID NO: 318002
gacuuuauuguggagguua

SEQ ID NO: 529224 - RNA, 19 nt, Artificial Sequence
  Description of Artificial Sequence: Synthetic oligonucleotide
  Antisense strand to SEQ ID NO: 529223
uaaccuccacaauaaaguc

SEQ ID NO: 529225 - RNA, 19 nt, Artificial Sequence
  Description of Artificial Sequence: Synthetic oligonucleotide
  Sense strand starting at position 3844 of SEQ ID NO: 318002
cuuuauuguggagguuaga

SEQ ID NO: 529226 - RNA, 19 nt, Artificial Sequence
  Description of Artificial Sequence: Synthetic oligonucleotide
  Antisense strand to SEQ ID NO: 529225
ucuaaccuccacaauaaag

SEQ ID NO: 529227 - RNA, 19 nt, Artificial Sequence
  Description of Artificial Sequence: Synthetic oligonucleotide
  Sense strand starting at position 3881 of SEQ ID NO: 318002
ugaguaauuuaccaaggac

SEQ ID NO: 529228 - RNA, 19 nt, Artificial Sequence
  Description of Artificial Sequence: Synthetic oligonucleotide
  Antisense strand to SEQ ID NO: 529227
guccuugguaaauuacuca

SEQ ID NO: 529229 - RNA, 19 nt, Artificial Sequence
  Description of Artificial Sequence: Synthetic oligonucleotide
  Sense strand starting at position 3906 of SEQ ID NO: 318002
cauguuagcagagagguau

SEQ ID NO: 529230 - RNA, 19 nt, Artificial Sequence
  Description of Artificial Sequence: Synthetic oligonucleotide
  Antisense strand to SEQ ID NO: 529229
auaccucucugcuaacaug

SEQ ID NO: 529231 - RNA, 19 nt, Artificial Sequence
  Description of Artificial Sequence: Synthetic oligonucleotide
  Sense strand starting at position 106 of SEQ ID NO: 318003
auacaagagcccuggagua

SEQ ID NO: 529232 - RNA, 19 nt, Artificial Sequence
  Description of Artificial Sequence: Synthetic oligonucleotide
  Antisense strand to SEQ ID NO: 529231
uacuccagggcucuuguau

SEQ ID NO: 529233 - RNA, 19 nt, Artificial Sequence
  Description of Artificial Sequence: Synthetic oligonucleotide
  Sense strand starting at position 165 of SEQ ID NO: 318003
ggacuaaauugggccuaaa

SEQ ID NO: 529234 - RNA, 19 nt, Artificial Sequence
  Description of Artificial Sequence: Synthetic oligonucleotide
  Antisense strand to SEQ ID NO: 529233
uuuaggcccaauuuagucc

SEQ ID NO: 529235 - RNA, 19 nt, Artificial Sequence
  Description of Artificial Sequence: Synthetic oligonucleotide
  Sense strand starting at position 736 of SEQ ID NO: 318003
caaagagguguuuggaaga

SEQ ID NO: 529236 - RNA, 19 nt, Artificial Sequence
  Description of Artificial Sequence: Synthetic oligonucleotide
  Antisense strand to SEQ ID NO: 529235
ucuuccaaacaccucuuug

SEQ ID NO: 529237 - RNA, 19 nt, Artificial Sequence
  Description of Artificial Sequence: Synthetic oligonucleotide
  Sense strand starting at position 739 of SEQ ID NO: 318003
agagguguuuggaagaggu

SEQ ID NO: 529238 - RNA, 19 nt, Artificial Sequence
  Description of Artificial Sequence: Synthetic oligonucleotide
  Antisense strand to SEQ ID NO: 529237
accucuuccaaacaccucu

SEQ ID NO: 529239 - RNA, 19 nt, Artificial Sequence
  Description of Artificial Sequence: Synthetic oligonucleotide
  Sense strand starting at position 762 of SEQ ID NO: 318003
gaauguccuucuguugaaa

SEQ ID NO: 529240 - RNA, 19 nt, Artificial Sequence
  Description of Artificial Sequence: Synthetic oligonucleotide
  Antisense strand to SEQ ID NO: 529239
uuucaacagaaggacauuc

SEQ ID NO: 529241 - RNA, 19 nt, Artificial Sequence
  Description of Artificial Sequence: Synthetic oligonucleotide
  Sense strand starting at position 786 of SEQ ID NO: 318003
ugugaauacuuuccauuga

SEQ ID NO: 529242 - RNA, 19 nt, Artificial Sequence
  Description of Artificial Sequence: Synthetic oligonucleotide
  Antisense strand to SEQ ID NO: 529241
ucaauggaaaguauucaca

SEQ ID NO: 529243 - RNA, 19 nt, Artificial Sequence
  Description of Artificial Sequence: Synthetic oligonucleotide
  Sense strand starting at position 805 of SEQ ID NO: 318003
gauagaauaaguggugguu

SEQ ID NO: 529244 - RNA, 19 nt, Artificial Sequence
  Description of Artificial Sequence: Synthetic oligonucleotide
  Antisense strand to SEQ ID NO: 529243
aaccaccacuuauucuauc

SEQ ID NO: 529245 - RNA, 19 nt, Artificial Sequence
  Description of Artificial Sequence: Synthetic oligonucleotide
  Sense strand starting at position 817 of SEQ ID NO: 318003
ggugguucccaucacauca

SEQ ID NO: 529246 - RNA, 19 nt, Artificial Sequence
  Description of Artificial Sequence: Synthetic oligonucleotide
  Antisense strand to SEQ ID NO: 529245
ugaugugaugggaaccacc

SEQ ID NO: 529247 - RNA, 19 nt, Artificial Sequence
  Description of Artificial Sequence: Synthetic oligonucleotide
  Sense strand starting at position 858 of SEQ ID NO: 318003
ucaggcaugcaguaagaaa

SEQ ID NO: 529248 - RNA, 19 nt, Artificial Sequence
  Description of Artificial Sequence: Synthetic oligonucleotide
  Antisense strand to SEQ ID NO: 529247
uuucuuacugcaugccuga

SEQ ID NO: 529249 - RNA, 19 nt, Artificial Sequence
  Description of Artificial Sequence: Synthetic oligonucleotide
  Sense strand starting at position 1036 of SEQ ID NO: 318003
auguaaacuguugaaaugu

SEQ ID NO: 529250 - RNA, 19 nt, Artificial Sequence
  Description of Artificial Sequence: Synthetic oligonucleotide
  Antisense strand to SEQ ID NO: 529249
acauuucaacaguuuacau

SEQ ID NO: 529251 - RNA, 19 nt, Artificial Sequence
  Description of Artificial Sequence: Synthetic oligonucleotide
  Sense strand starting at position 1084 of SEQ ID NO: 318003
guauuuccugagugcaaau

SEQ ID NO: 529252 - RNA, 19 nt, Artificial Sequence
  Description of Artificial Sequence: Synthetic oligonucleotide
  Antisense strand to SEQ ID NO: 529251
auuugcacucaggaaauac

SEQ ID NO: 529253 - RNA, 19 nt, Artificial Sequence
  Description of Artificial Sequence: Synthetic oligonucleotide
  Sense strand starting at position 1201 of SEQ ID NO: 318003
ucuugauggugaccagaca

SEQ ID NO: 529254 - RNA, 19 nt, Artificial Sequence
  Description of Artificial Sequence: Synthetic oligonucleotide
  Antisense strand to SEQ ID NO: 529253
ugucuggucaccaucaaga

SEQ ID NO: 529255 - RNA, 19 nt, Artificial Sequence
  Description of Artificial Sequence: Synthetic oligonucleotide
  Sense strand starting at position 1285 of SEQ ID NO: 318003
aaagaaguuucgcuuagag

SEQ ID NO: 529256 - RNA, 19 nt, Artificial Sequence
  Description of Artificial Sequence: Synthetic oligonucleotide
  Antisense strand to SEQ ID NO: 529255
cucuaagcgaaacuucuuu

SEQ ID NO: 529257 - RNA, 19 nt, Artificial Sequence
  Description of Artificial Sequence: Synthetic oligonucleotide
  Sense strand starting at position 1337 of SEQ ID NO: 318003
agagaacaaugagaaauua

SEQ ID NO: 529258 - RNA, 19 nt, Artificial Sequence
  Description of Artificial Sequence: Synthetic oligonucleotide
  Antisense strand to SEQ ID NO: 529257
uaauuucucauuguucucu

SEQ ID NO: 529259 - RNA, 19 nt, Artificial Sequence
  Description of Artificial Sequence: Synthetic oligonucleotide
  Sense strand starting at position 1401 of SEQ ID NO: 318003
uggccacagccauauauua

SEQ ID NO: 529260 - RNA, 19 nt, Artificial Sequence
  Description of Artificial Sequence: Synthetic oligonucleotide
  Antisense strand to SEQ ID NO: 529259
uaauauauggcuguggcca

SEQ ID NO: 529261 - RNA, 19 nt, Artificial Sequence
  Description of Artificial Sequence: Synthetic oligonucleotide
  Sense strand starting at position 1829 of SEQ ID NO: 318003
ucugguaccagaggaguaa

SEQ ID NO: 529262 - RNA, 19 nt, Artificial Sequence
  Description of Artificial Sequence: Synthetic oligonucleotide
  Antisense strand to SEQ ID NO: 529261
uuacuccucugguaccaga

SEQ ID NO: 529263 - RNA, 19 nt, Artificial Sequence
  Description of Artificial Sequence: Synthetic oligonucleotide
  Sense strand starting at position 1856 of SEQ ID NO: 318003
acaucagaccauugucuca

SEQ ID NO: 529264 - RNA, 19 nt, Artificial Sequence
  Description of Artificial Sequence: Synthetic oligonucleotide
  Antisense strand to SEQ ID NO: 529263
ugagacaauggucugaugu

SEQ ID NO: 529265 - RNA, 19 nt, Artificial Sequence
  Description of Artificial Sequence: Synthetic oligonucleotide
  Sense strand starting at position 1858 of SEQ ID NO: 318003
aucagaccauugucucaua

SEQ ID NO: 529266 - RNA, 19 nt, Artificial Sequence
  Description of Artificial Sequence: Synthetic oligonucleotide
  Antisense strand to SEQ ID NO: 529265
uaugagacaauggucugau

SEQ ID NO: 529267 - RNA, 19 nt, Artificial Sequence
  Description of Artificial Sequence: Synthetic oligonucleotide
  Sense strand starting at position 2006 of SEQ ID NO: 318003
agcguuagaacucagcaaa

SEQ ID NO: 529268 - RNA, 19 nt, Artificial Sequence
  Description of Artificial Sequence: Synthetic oligonucleotide
  Antisense strand to SEQ ID NO: 529267
uuugcugaguucuaacgcu

SEQ ID NO: 529269 - RNA, 19 nt, Artificial Sequence
  Description of Artificial Sequence: Synthetic oligonucleotide
  Sense strand starting at position 2029 of SEQ ID NO: 318003
cugaucuggauggguagaa

SEQ ID NO: 529270 - RNA, 19 nt, Artificial Sequence
  Description of Artificial Sequence: Synthetic oligonucleotide
  Antisense strand to SEQ ID NO: 529269
uucuacccauccagaucag

SEQ ID NO: 529271 - RNA, 19 nt, Artificial Sequence
  Description of Artificial Sequence: Synthetic oligonucleotide
  Sense strand starting at position 2052 of SEQ ID NO: 318003
gugauaggguaucugaauc

SEQ ID NO: 529272 - RNA, 19 nt, Artificial Sequence
  Description of Artificial Sequence: Synthetic oligonucleotide
  Antisense strand to SEQ ID NO: 529271
gauucagauacccuaucac

SEQ ID NO: 529273 - RNA, 19 nt, Artificial Sequence
  Description of Artificial Sequence: Synthetic oligonucleotide
  Sense strand starting at position 2288 of SEQ ID NO: 318003
agcaguauaaaguaguuua

SEQ ID NO: 529274 - RNA, 19 nt, Artificial Sequence
  Description of Artificial Sequence: Synthetic oligonucleotide
  Antisense strand to SEQ ID NO: 529273
uaaacuacuuuauacugcu

SEQ ID NO: 529275 - RNA, 19 nt, Artificial Sequence
  Description of Artificial Sequence: Synthetic oligonucleotide
  Sense strand starting at position 2456 of SEQ ID NO: 318003
ccuucuaguagagggaaau

SEQ ID NO: 529276 - RNA, 19 nt, Artificial Sequence
  Description of Artificial Sequence: Synthetic oligonucleotide
  Antisense strand to SEQ ID NO: 529275
auuucccucuacuagaagg

SEQ ID NO: 529277 - RNA, 19 nt, Artificial Sequence
  Description of Artificial Sequence: Synthetic oligonucleotide
  Sense strand starting at position 2540 of SEQ ID NO: 318003
uacauacucgggugacaua

SEQ ID NO: 529278 - RNA, 19 nt, Artificial Sequence
  Description of Artificial Sequence: Synthetic oligonucleotide
  Antisense strand to SEQ ID NO: 529277
uaugucacccgaguaugua

SEQ ID NO: 529279 - RNA, 19 nt, Artificial Sequence
  Description of Artificial Sequence: Synthetic oligonucleotide
  Sense strand starting at position 2584 of SEQ ID NO: 318003
ggagcuuugccauaauucu

SEQ ID NO: 529280 - RNA, 19 nt, Artificial Sequence
  Description of Artificial Sequence: Synthetic oligonucleotide
  Antisense strand to SEQ ID NO: 529279
agaauuauggcaaagcucc

SEQ ID NO: 529281 - RNA, 19 nt, Artificial Sequence
  Description of Artificial Sequence: Synthetic oligonucleotide
  Sense strand starting at position 2780 of SEQ ID NO: 318003
ccuuuagcugguuacaaga

SEQ ID NO: 529282 - RNA, 19 nt, Artificial Sequence
  Description of Artificial Sequence: Synthetic oligonucleotide
  Antisense strand to SEQ ID NO: 529281
ucuuguaaccagcuaaagg

SEQ ID NO: 529283 - RNA, 19 nt, Artificial Sequence
  Description of Artificial Sequence: Synthetic oligonucleotide
  Sense strand starting at position 2919 of SEQ ID NO: 318003
aguugacaaugacuagauu

SEQ ID NO: 529284 - RNA, 19 nt, Artificial Sequence
  Description of Artificial Sequence: Synthetic oligonucleotide
  Antisense strand to SEQ ID NO: 529283
aaucuagucauugucaacu

SEQ ID NO: 529285 - RNA, 19 nt, Artificial Sequence
  Description of Artificial Sequence: Synthetic oligonucleotide
  Sense strand starting at position 2927 of SEQ ID NO: 318003
augacuagauuugagaauu

SEQ ID NO: 529286 - RNA, 19 nt, Artificial Sequence
  Description of Artificial Sequence: Synthetic oligonucleotide
  Antisense strand to SEQ ID NO: 529285
aauucucaaaucuagucau

SEQ ID NO: 529287 - RNA, 19 nt, Artificial Sequence
  Description of Artificial Sequence: Synthetic oligonucleotide
  Sense strand starting at position 2955 of SEQ ID NO: 318003
gugaauuguggcuaauaug

SEQ ID NO: 529288 - RNA, 19 nt, Artificial Sequence
  Description of Artificial Sequence: Synthetic oligonucleotide
  Antisense strand to SEQ ID NO: 529287
cauauuagccacaauucac

SEQ ID NO: 529289 - RNA, 19 nt, Artificial Sequence
  Description of Artificial Sequence: Synthetic oligonucleotide
  Sense strand starting at position 3049 of SEQ ID NO: 318003
cucagugguccauaaacac

SEQ ID NO: 529290 - RNA, 19 nt, Artificial Sequence
  Description of Artificial Sequence: Synthetic oligonucleotide
  Antisense strand to SEQ ID NO: 529289
guguuuauggaccacugag

SEQ ID NO: 529291 - RNA, 19 nt, Artificial Sequence
  Description of Artificial Sequence: Synthetic oligonucleotide
  Sense strand starting at position 3102 of SEQ ID NO: 318003
cuaggaguuaucuggaugu

SEQ ID NO: 529292 - RNA, 19 nt, Artificial Sequence
  Description of Artificial Sequence: Synthetic oligonucleotide
  Antisense strand to SEQ ID NO: 529291
acauccagauaacuccuag

SEQ ID NO: 529293 - RNA, 19 nt, Artificial Sequence
  Description of Artificial Sequence: Synthetic oligonucleotide
  Sense strand starting at position 3104 of SEQ ID NO: 318003
aggaguuaucuggaugucu

SEQ ID NO: 529294 - RNA, 19 nt, Artificial Sequence
  Description of Artificial Sequence: Synthetic oligonucleotide
  Antisense strand to SEQ ID NO: 529293
agacauccagauaacuccu

SEQ ID NO: 529295 - RNA, 19 nt, Artificial Sequence
  Description of Artificial Sequence: Synthetic oligonucleotide
  Sense strand starting at position 3229 of SEQ ID NO: 318003
cccacuuggguuugagaau

SEQ ID NO: 529296 - RNA, 19 nt, Artificial Sequence
  Description of Artificial Sequence: Synthetic oligonucleotide
  Antisense strand to SEQ ID NO: 529295
auucucaaacccaaguggg

SEQ ID NO: 529297 - RNA, 19 nt, Artificial Sequence
  Description of Artificial Sequence: Synthetic oligonucleotide
  Sense strand starting at position 3522 of SEQ ID NO: 318003
gcuaacuguggucacauga

SEQ ID NO: 529298 - RNA, 19 nt, Artificial Sequence
  Description of Artificial Sequence: Synthetic oligonucleotide
  Antisense strand to SEQ ID NO: 529297
ucaugugaccacaguuagc

SEQ ID NO: 529299 - RNA, 19 nt, Artificial Sequence
  Description of Artificial Sequence: Synthetic oligonucleotide
  Sense strand starting at position 3561 of SEQ ID NO: 318003
ccugaauggaaguggcaua

SEQ ID NO: 529300 - RNA, 19 nt, Artificial Sequence
  Description of Artificial Sequence: Synthetic oligonucleotide
  Antisense strand to SEQ ID NO: 529299
uaugccacuuccauucagg

SEQ ID NO: 529301 - RNA, 19 nt, Artificial Sequence
  Description of Artificial Sequence: Synthetic oligonucleotide
  Sense strand starting at position 3672 of SEQ ID NO: 318003
gagggcuaucuagacuugu

SEQ ID NO: 529302 - RNA, 19 nt, Artificial Sequence
  Description of Artificial Sequence: Synthetic oligonucleotide
  Antisense strand to SEQ ID NO: 529301
acaagucuagauagcccuc

SEQ ID NO: 529303 - RNA, 19 nt, Artificial Sequence
  Description of Artificial Sequence: Synthetic oligonucleotide
  Sense strand starting at position 3689 of SEQ ID NO: 318003
guggaacaugucugagacu

SEQ ID NO: 529304 - RNA, 19 nt, Artificial Sequence
  Description of Artificial Sequence: Synthetic oligonucleotide
  Antisense strand to SEQ ID NO: 529303
agucucagacauguuccac

SEQ ID NO: 529305 - RNA, 19 nt, Artificial Sequence
  Description of Artificial Sequence: Synthetic oligonucleotide
  Sense strand starting at position 3698 of SEQ ID NO: 318003
gucugagacucacuaugau

SEQ ID NO: 529306 - RNA, 19 nt, Artificial Sequence
  Description of Artificial Sequence: Synthetic oligonucleotide
  Antisense strand to SEQ ID NO: 529305
aucauagugagucucagac

SEQ ID NO: 529307 - RNA, 19 nt, Artificial Sequence
  Description of Artificial Sequence: Synthetic oligonucleotide
  Sense strand starting at position 3701 of SEQ ID NO: 318003
ugagacucacuaugauguu

SEQ ID NO: 529308 - RNA, 19 nt, Artificial Sequence
  Description of Artificial Sequence: Synthetic oligonucleotide
  Antisense strand to SEQ ID NO: 529307
aacaucauagugagucuca

SEQ ID NO: 529309 - RNA, 19 nt, Artificial Sequence
  Description of Artificial Sequence: Synthetic oligonucleotide
  Sense strand starting at position 3846 of SEQ ID NO: 318003
gcucaaucgaaagaguaau

SEQ ID NO: 529310 - RNA, 19 nt, Artificial Sequence
  Description of Artificial Sequence: Synthetic oligonucleotide
  Antisense strand to SEQ ID NO: 529309
auuacucuuucgauugagc

SEQ ID NO: 529311 - RNA, 19 nt, Artificial Sequence
  Description of Artificial Sequence: Synthetic oligonucleotide
  Sense strand starting at position 276 of SEQ ID NO: 318004
auacaagagcccuggagua

SEQ ID NO: 529312 - RNA, 19 nt, Artificial Sequence
  Description of Artificial Sequence: Synthetic oligonucleotide
  Antisense strand to SEQ ID NO: 529311
uacuccagggcucuuguau

SEQ ID NO: 529313 - RNA, 19 nt, Artificial Sequence
  Description of Artificial Sequence: Synthetic oligonucleotide
  Sense strand starting at position 335 of SEQ ID NO: 318004
ggacuaaauugggccuaaa

SEQ ID NO: 529314 - RNA, 19 nt, Artificial Sequence
  Description of Artificial Sequence: Synthetic oligonucleotide
  Antisense strand to SEQ ID NO: 529313
uuuaggcccaauuuagucc

SEQ ID NO: 529315 - RNA, 19 nt, Artificial Sequence
  Description of Artificial Sequence: Synthetic oligonucleotide
  Sense strand starting at position 906 of SEQ ID NO: 318004
caaagagguguuuggaaga

SEQ ID NO: 529316 - RNA, 19 nt, Artificial Sequence
  Description of Artificial Sequence: Synthetic oligonucleotide
  Antisense strand to SEQ ID NO: 529315
ucuuccaaacaccucuuug

SEQ ID NO: 529317 - RNA, 19 nt, Artificial Sequence
  Description of Artificial Sequence: Synthetic oligonucleotide
  Sense strand starting at position 909 of SEQ ID NO: 318004
agagguguuuggaagaggu

SEQ ID NO: 529318 - RNA, 19 nt, Artificial Sequence
  Description of Artificial Sequence: Synthetic oligonucleotide
  Antisense strand to SEQ ID NO: 529317
accucuuccaaacaccucu

SEQ ID NO: 529319 - RNA, 19 nt, Artificial Sequence
  Description of Artificial Sequence: Synthetic oligonucleotide
  Sense strand starting at position 932 of SEQ ID NO: 318004
gaauguccuucuguugaaa

SEQ ID NO: 529320 - RNA, 19 nt, Artificial Sequence
  Description of Artificial Sequence: Synthetic oligonucleotide
  Antisense strand to SEQ ID NO: 529319
uuucaacagaaggacauuc

SEQ ID NO: 529321 - RNA, 19 nt, Artificial Sequence
  Description of Artificial Sequence: Synthetic oligonucleotide
  Sense strand starting at position 956 of SEQ ID NO: 318004
ugugaauacuuuccauuga

SEQ ID NO: 529322 - RNA, 19 nt, Artificial Sequence
  Description of Artificial Sequence: Synthetic oligonucleotide
  Antisense strand to SEQ ID NO: 529321
ucaauggaaaguauucaca

SEQ ID NO: 529323 - RNA, 19 nt, Artificial Sequence
  Description of Artificial Sequence: Synthetic oligonucleotide
  Sense strand starting at position 975 of SEQ ID NO: 318004
gauagaauaaguggugguu

SEQ ID NO: 529324 - RNA, 19 nt, Artificial Sequence
  Description of Artificial Sequence: Synthetic oligonucleotide
  Antisense strand to SEQ ID NO: 529323
aaccaccacuuauucuauc

SEQ ID NO: 529325 - RNA, 19 nt, Artificial Sequence
  Description of Artificial Sequence: Synthetic oligonucleotide
  Sense strand starting at position 987 of SEQ ID NO: 318004
ggugguucccaucacauca

SEQ ID NO: 529326 - RNA, 19 nt, Artificial Sequence
  Description of Artificial Sequence: Synthetic oligonucleotide
  Antisense strand to SEQ ID NO: 529325
ugaugugaugggaaccacc

SEQ ID NO: 529327 - RNA, 19 nt, Artificial Sequence
  Description of Artificial Sequence: Synthetic oligonucleotide
  Sense strand starting at position 1028 of SEQ ID NO: 318004
ucaggcaugcaguaagaaa

SEQ ID NO: 529328 - RNA, 19 nt, Artificial Sequence
  Description of Artificial Sequence: Synthetic oligonucleotide
  Antisense strand to SEQ ID NO: 529327
uuucuuacugcaugccuga

SEQ ID NO: 529329 - RNA, 19 nt, Artificial Sequence
  Description of Artificial Sequence: Synthetic oligonucleotide
  Sense strand starting at position 1206 of SEQ ID NO: 318004
auguaaacuguugaaaugu

SEQ ID NO: 529330 - RNA, 19 nt, Artificial Sequence
  Description of Artificial Sequence: Synthetic oligonucleotide
  Antisense strand to SEQ ID NO: 529329
acauuucaacaguuuacau

SEQ ID NO: 529331 - RNA, 19 nt, Artificial Sequence
  Description of Artificial Sequence: Synthetic oligonucleotide
  Sense strand starting at position 1254 of SEQ ID NO: 318004
guauuuccugagugcaaau

SEQ ID NO: 529332 - RNA, 19 nt, Artificial Sequence
  Description of Artificial Sequence: Synthetic oligonucleotide
  Antisense strand to SEQ ID NO: 529331
auuugcacucaggaaauac

SEQ ID NO: 529333 - RNA, 19 nt, Artificial Sequence
  Description of Artificial Sequence: Synthetic oligonucleotide
  Sense strand starting at position 1371 of SEQ ID NO: 318004
ucuugauggugaccagaca

SEQ ID NO: 529334 - RNA, 19 nt, Artificial Sequence
  Description of Artificial Sequence: Synthetic oligonucleotide
  Antisense strand to SEQ ID NO: 529333
ugucuggucaccaucaaga

SEQ ID NO: 529335 - RNA, 19 nt, Artificial Sequence
  Description of Artificial Sequence: Synthetic oligonucleotide
  Sense strand starting at position 1455 of SEQ ID NO: 318004
aaagaaguuucgcuuagag

SEQ ID NO: 529336 - RNA, 19 nt, Artificial Sequence
  Description of Artificial Sequence: Synthetic oligonucleotide
  Antisense strand to SEQ ID NO: 529335
cucuaagcgaaacuucuuu

SEQ ID NO: 529337 - RNA, 19 nt, Artificial Sequence
  Description of Artificial Sequence: Synthetic oligonucleotide
  Sense strand starting at position 1507 of SEQ ID NO: 318004
agagaacaaugagaaauua

SEQ ID NO: 529338 - RNA, 19 nt, Artificial Sequence
  Description of Artificial Sequence: Synthetic oligonucleotide
  Antisense strand to SEQ ID NO: 529337
uaauuucucauuguucucu

SEQ ID NO: 529339 - RNA, 19 nt, Artificial Sequence
  Description of Artificial Sequence: Synthetic oligonucleotide
  Sense strand starting at position 1571 of SEQ ID NO: 318004
uggccacagccauauauua

SEQ ID NO: 529340 - RNA, 19 nt, Artificial Sequence
  Description of Artificial Sequence: Synthetic oligonucleotide
  Antisense strand to SEQ ID NO: 529339
uaauauauggcuguggcca

SEQ ID NO: 529341 - RNA, 19 nt, Artificial Sequence
  Description of Artificial Sequence: Synthetic oligonucleotide
  Sense strand starting at position 1999 of SEQ ID NO: 318004
ucugguaccagaggaguaa

SEQ ID NO: 529342 - RNA, 19 nt, Artificial Sequence
  Description of Artificial Sequence: Synthetic oligonucleotide
  Antisense strand to SEQ ID NO: 529341
uuacuccucugguaccaga

SEQ ID NO: 529343 - RNA, 19 nt, Artificial Sequence
  Description of Artificial Sequence: Synthetic oligonucleotide
  Sense strand starting at position 2026 of SEQ ID NO: 318004
acaucagaccauugucuca

SEQ ID NO: 529344 - RNA, 19 nt, Artificial Sequence
  Description of Artificial Sequence: Synthetic oligonucleotide
  Antisense strand to SEQ ID NO: 529343
ugagacaauggucugaugu

SEQ ID NO: 529345 - RNA, 19 nt, Artificial Sequence
  Description of Artificial Sequence: Synthetic oligonucleotide
  Sense strand starting at position 2028 of SEQ ID NO: 318004
aucagaccauugucucaua

SEQ ID NO: 529346 - RNA, 19 nt, Artificial Sequence
  Description of Artificial Sequence: Synthetic oligonucleotide
  Antisense strand to SEQ ID NO: 529345
uaugagacaauggucugau

SEQ ID NO: 529347 - RNA, 19 nt, Artificial Sequence
  Description of Artificial Sequence: Synthetic oligonucleotide
  Sense strand starting at position 2176 of SEQ ID NO: 318004
agcguuagaacucagcaaa

SEQ ID NO: 529348 - RNA, 19 nt, Artificial Sequence
  Description of Artificial Sequence: Synthetic oligonucleotide
  Antisense strand to SEQ ID NO: 529347
uuugcugaguucuaacgcu

SEQ ID NO: 529349 - RNA, 19 nt, Artificial Sequence
  Description of Artificial Sequence: Synthetic oligonucleotide
  Sense strand starting at position 2199 of SEQ ID NO: 318004
cugaucuggauggguagaa

SEQ ID NO: 529350 - RNA, 19 nt, Artificial Sequence
  Description of Artificial Sequence: Synthetic oligonucleotide
  Antisense strand to SEQ ID NO: 529349
uucuacccauccagaucag

SEQ ID NO: 529351 - RNA, 19 nt, Artificial Sequence
  Description of Artificial Sequence: Synthetic oligonucleotide
  Sense strand starting at position 2222 of SEQ ID NO: 318004
gugauaggguaucugaauc

SEQ ID NO: 529352 - RNA, 19 nt, Artificial Sequence
  Description of Artificial Sequence: Synthetic oligonucleotide
  Antisense strand to SEQ ID NO: 529351
gauucagauacccuaucac

SEQ ID NO: 529353 - RNA, 19 nt, Artificial Sequence
  Description of Artificial Sequence: Synthetic oligonucleotide
  Sense strand starting at position 2453 of SEQ ID NO: 318004
uugucagcaguauaaagua

SEQ ID NO: 529354 - RNA, 19 nt, Artificial Sequence
  Description of Artificial Sequence: Synthetic oligonucleotide
  Antisense strand to SEQ ID NO: 529353
uacuuuauacugcugacaa

SEQ ID NO: 529355 - RNA, 19 nt, Artificial Sequence
  Description of Artificial Sequence: Synthetic oligonucleotide
  Sense strand starting at position 2458 of SEQ ID NO: 318004
agcaguauaaaguaguuua

SEQ ID NO: 529356 - RNA, 19 nt, Artificial Sequence
  Description of Artificial Sequence: Synthetic oligonucleotide
  Antisense strand to SEQ ID NO: 529355
uaaacuacuuuauacugcu

SEQ ID NO: 529357 - RNA, 19 nt, Artificial Sequence
  Description of Artificial Sequence: Synthetic oligonucleotide
  Sense strand starting at position 2626 of SEQ ID NO: 318004
ccuucuaguagagggaaau

SEQ ID NO: 529358 - RNA, 19 nt, Artificial Sequence
  Description of Artificial Sequence: Synthetic oligonucleotide
  Antisense strand to SEQ ID NO: 529357
auuucccucuacuagaagg

SEQ ID NO: 529359 - RNA, 19 nt, Artificial Sequence
  Description of Artificial Sequence: Synthetic oligonucleotide
  Sense strand starting at position 2710 of SEQ ID NO: 318004
uacauacucgggugacaua

SEQ ID NO: 529360 - RNA, 19 nt, Artificial Sequence
  Description of Artificial Sequence: Synthetic oligonucleotide
  Antisense strand to SEQ ID NO: 529359
uaugucacccgaguaugua

SEQ ID NO: 529361 - RNA, 19 nt, Artificial Sequence
  Description of Artificial Sequence: Synthetic oligonucleotide
  Sense strand starting at position 2754 of SEQ ID NO: 318004
ggagcuuugccauaauucu

SEQ ID NO: 529362 - RNA, 19 nt, Artificial Sequence
  Description of Artificial Sequence: Synthetic oligonucleotide
  Antisense strand to SEQ ID NO: 529361
agaauuauggcaaagcucc

SEQ ID NO: 529363 - RNA, 19 nt, Artificial Sequence
  Description of Artificial Sequence: Synthetic oligonucleotide
  Sense strand starting at position 2950 of SEQ ID NO: 318004
ccuuuagcugguuacaaga

SEQ ID NO: 529364 - RNA, 19 nt, Artificial Sequence
  Description of Artificial Sequence: Synthetic oligonucleotide
  Antisense strand to SEQ ID NO: 529363
ucuuguaaccagcuaaagg

SEQ ID NO: 529365 - RNA, 19 nt, Artificial Sequence
  Description of Artificial Sequence: Synthetic oligonucleotide
  Sense strand starting at position 3089 of SEQ ID NO: 318004
aguugacaaugacuagauu

SEQ ID NO: 529366 - RNA, 19 nt, Artificial Sequence
  Description of Artificial Sequence: Synthetic oligonucleotide
  Antisense strand to SEQ ID NO: 529365
aaucuagucauugucaacu

SEQ ID NO: 529367 - RNA, 19 nt, Artificial Sequence
  Description of Artificial Sequence: Synthetic oligonucleotide
  Sense strand starting at position 3097 of SEQ ID NO: 318004
augacuagauuugagaauu

SEQ ID NO: 529368 - RNA, 19 nt, Artificial Sequence
  Description of Artificial Sequence: Synthetic oligonucleotide
  Antisense strand to SEQ ID NO: 529367
aauucucaaaucuagucau

SEQ ID NO: 529369 - RNA, 19 nt, Artificial Sequence
  Description of Artificial Sequence: Synthetic oligonucleotide
  Sense strand starting at position 3125 of SEQ ID NO: 318004
gugaauuguggcuaauaug

SEQ ID NO: 529370 - RNA, 19 nt, Artificial Sequence
  Description of Artificial Sequence: Synthetic oligonucleotide
  Antisense strand to SEQ ID NO: 529369
cauauuagccacaauucac

SEQ ID NO: 529371 - RNA, 19 nt, Artificial Sequence
  Description of Artificial Sequence: Synthetic oligonucleotide
  Sense strand starting at position 3219 of SEQ ID NO: 318004
cucagugguccauaaacac

SEQ ID NO: 529372 - RNA, 19 nt, Artificial Sequence
  Description of Artificial Sequence: Synthetic oligonucleotide
  Antisense strand to SEQ ID NO: 529371
guguuuauggaccacugag

SEQ ID NO: 529373 - RNA, 19 nt, Artificial Sequence
  Description of Artificial Sequence: Synthetic oligonucleotide
  Sense strand starting at position 3272 of SEQ ID NO: 318004
cuaggaguuaucuggaugu

SEQ ID NO: 529374 - RNA, 19 nt, Artificial Sequence
  Description of Artificial Sequence: Synthetic oligonucleotide
  Antisense strand to SEQ ID NO: 529373
acauccagauaacuccuag

SEQ ID NO: 529375 - RNA, 19 nt, Artificial Sequence
  Description of Artificial Sequence: Synthetic oligonucleotide
  Sense strand starting at position 3274 of SEQ ID NO: 318004
aggaguuaucuggaugucu

SEQ ID NO: 529376 - RNA, 19 nt, Artificial Sequence
  Description of Artificial Sequence: Synthetic oligonucleotide
  Antisense strand to SEQ ID NO: 529375
agacauccagauaacuccu

SEQ ID NO: 529377 - RNA, 19 nt, Artificial Sequence
  Description of Artificial Sequence: Synthetic oligonucleotide
  Sense strand starting at position 3399 of SEQ ID NO: 318004
cccacuuggguuugagaau

SEQ ID NO: 529378 - RNA, 19 nt, Artificial Sequence
  Description of Artificial Sequence: Synthetic oligonucleotide
  Antisense strand to SEQ ID NO: 529377
auucucaaacccaaguggg

SEQ ID NO: 529379 - RNA, 19 nt, Artificial Sequence
  Description of Artificial Sequence: Synthetic oligonucleotide
  Sense strand starting at position 3692 of SEQ ID NO: 318004
gcuaacuguggucacauga

SEQ ID NO: 529380 - RNA, 19 nt, Artificial Sequence
  Description of Artificial Sequence: Synthetic oligonucleotide
  Antisense strand to SEQ ID NO: 529379
ucaugugaccacaguuagc

SEQ ID NO: 529381 - RNA, 19 nt, Artificial Sequence
  Description of Artificial Sequence: Synthetic oligonucleotide
  Sense strand starting at position 3731 of SEQ ID NO: 318004
ccugaauggaaguggcaua

SEQ ID NO: 529382 - RNA, 19 nt, Artificial Sequence
  Description of Artificial Sequence: Synthetic oligonucleotide
  Antisense strand to SEQ ID NO: 529381
uaugccacuuccauucagg

SEQ ID NO: 529383 - RNA, 19 nt, Artificial Sequence
  Description of Artificial Sequence: Synthetic oligonucleotide
  Sense strand starting at position 3842 of SEQ ID NO: 318004
gagggcuaucuagacuugu

SEQ ID NO: 529384 - RNA, 19 nt, Artificial Sequence
  Description of Artificial Sequence: Synthetic oligonucleotide
  Antisense strand to SEQ ID NO: 529383
acaagucuagauagcccuc

SEQ ID NO: 529385 - RNA, 19 nt, Artificial Sequence
  Description of Artificial Sequence: Synthetic oligonucleotide
  Sense strand starting at position 3859 of SEQ ID NO: 318004
guggaacaugucugagacu

SEQ ID NO: 529386 - RNA, 19 nt, Artificial Sequence
  Description of Artificial Sequence: Synthetic oligonucleotide
  Antisense strand to SEQ ID NO: 529385
agucucagacauguuccac

SEQ ID NO: 529387 - RNA, 19 nt, Artificial Sequence
  Description of Artificial Sequence: Synthetic oligonucleotide
  Sense strand starting at position 3868 of SEQ ID NO: 318004
gucugagacucacuaugau

SEQ ID NO: 529388 - RNA, 19 nt, Artificial Sequence
  Description of Artificial Sequence: Synthetic oligonucleotide
  Antisense strand to SEQ ID NO: 529387
aucauagugagucucagac

SEQ ID NO: 529389 - RNA, 19 nt, Artificial Sequence
  Description of Artificial Sequence: Synthetic oligonucleotide
  Sense strand starting at position 3871 of SEQ ID NO: 318004
ugagacucacuaugauguu

SEQ ID NO: 529390 - RNA, 19 nt, Artificial Sequence
  Description of Artificial Sequence: Synthetic oligonucleotide
  Antisense strand to SEQ ID NO: 529389
aacaucauagugagucuca

SEQ ID NO: 529391 - RNA, 19 nt, Artificial Sequence
  Description of Artificial Sequence: Synthetic oligonucleotide
  Sense strand starting at position 2 of SEQ ID NO: 318005
ggaggauucuaccucugca

SEQ ID NO: 529392 - RNA, 19 nt, Artificial Sequence
  Description of Artificial Sequence: Synthetic oligonucleotide
  Antisense strand to SEQ ID NO: 529391
ugcagagguagaauccucc

SEQ ID NO: 529393 - RNA, 19 nt, Artificial Sequence
  Description of Artificial Sequence: Synthetic oligonucleotide
  Sense strand starting at position 381 of SEQ ID NO: 318005
ggccuacugcaucaacuua

SEQ ID NO: 529394 - RNA, 19 nt, Artificial Sequence
  Description of Artificial Sequence: Synthetic oligonucleotide
  Antisense strand to SEQ ID NO: 529393
uaaguugaugcaguaggcc

SEQ ID NO: 529395 - RNA, 19 nt, Artificial Sequence
  Description of Artificial Sequence: Synthetic oligonucleotide
  Sense strand starting at position 425 of SEQ ID NO: 318005
caaagcaugggcuguauuu

SEQ ID NO: 529396 - RNA, 19 nt, Artificial Sequence
  Description of Artificial Sequence: Synthetic oligonucleotide
  Antisense strand to SEQ ID NO: 529395
aaauacagcccaugcuuug

SEQ ID NO: 529397 - RNA, 19 nt, Artificial Sequence
  Description of Artificial Sequence: Synthetic oligonucleotide
  Sense strand starting at position 450 of SEQ ID NO: 318005
ugagcagaaacaugugaca

SEQ ID NO: 529398 - RNA, 19 nt, Artificial Sequence
  Description of Artificial Sequence: Synthetic oligonucleotide
  Antisense strand to SEQ ID NO: 529397
ugucacauguuucugcuca

SEQ ID NO: 529399 - RNA, 19 nt, Artificial Sequence
  Description of Artificial Sequence: Synthetic oligonucleotide
  Sense strand starting at position 452 of SEQ ID NO: 318005
agcagaaacaugugacaug

SEQ ID NO: 529400 - RNA, 19 nt, Artificial Sequence
  Description of Artificial Sequence: Synthetic oligonucleotide
  Antisense strand to SEQ ID NO: 529399
caugucacauguuucugcu

SEQ ID NO: 529401 - RNA, 19 nt, Artificial Sequence
  Description of Artificial Sequence: Synthetic oligonucleotide
  Sense strand starting at position 485 of SEQ ID NO: 318005
gggaucugucaguggauau

SEQ ID NO: 529402 - RNA, 19 nt, Artificial Sequence
  Description of Artificial Sequence: Synthetic oligonucleotide
  Antisense strand to SEQ ID NO: 529401
auauccacugacagauccc

SEQ ID NO: 529403 - RNA, 19 nt, Artificial Sequence
  Description of Artificial Sequence: Synthetic oligonucleotide
  Sense strand starting at position 486 of SEQ ID NO: 318005
ggaucugucaguggauaua

SEQ ID NO: 529404 - RNA, 19 nt, Artificial Sequence
  Description of Artificial Sequence: Synthetic oligonucleotide
  Antisense strand to SEQ ID NO: 529403
uauauccacugacagaucc

SEQ ID NO: 529405 - RNA, 19 nt, Artificial Sequence
  Description of Artificial Sequence: Synthetic oligonucleotide
  Sense strand starting at position 499 of SEQ ID NO: 318005
gauauaaugucagccagag

SEQ ID NO: 529406 - RNA, 19 nt, Artificial Sequence
  Description of Artificial Sequence: Synthetic oligonucleotide
  Antisense strand to SEQ ID NO: 529405
cucuggcugacauuauauc

SEQ ID NO: 529407 - RNA, 19 nt, Artificial Sequence
  Description of Artificial Sequence: Synthetic oligonucleotide
  Sense strand starting at position 565 of SEQ ID NO: 318005
acuugucauuucuggauuu

SEQ ID NO: 529408 - RNA, 19 nt, Artificial Sequence
  Description of Artificial Sequence: Synthetic oligonucleotide
  Antisense strand to SEQ ID NO: 529407
aaauccagaaaugacaagu

SEQ ID NO: 529409 - RNA, 19 nt, Artificial Sequence
  Description of Artificial Sequence: Synthetic oligonucleotide
  Sense strand starting at position 935 of SEQ ID NO: 318005
gagagauugagauguguga

SEQ ID NO: 529410 - RNA, 19 nt, Artificial Sequence
  Description of Artificial Sequence: Synthetic oligonucleotide
  Antisense strand to SEQ ID NO: 529409
ucacacaucucaaucucuc

SEQ ID NO: 529411 - RNA, 19 nt, Artificial Sequence
  Description of Artificial Sequence: Synthetic oligonucleotide
  Sense strand starting at position 939 of SEQ ID NO: 318005
gauugagaugugugaagug

SEQ ID NO: 529412 - RNA, 19 nt, Artificial Sequence
  Description of Artificial Sequence: Synthetic oligonucleotide
  Antisense strand to SEQ ID NO: 529411
cacuucacacaucucaauc

SEQ ID NO: 529413 - RNA, 19 nt, Artificial Sequence
  Description of Artificial Sequence: Synthetic oligonucleotide
  Sense strand starting at position 948 of SEQ ID NO: 318005
gugugaagugguucugcuu

SEQ ID NO: 529414 - RNA, 19 nt, Artificial Sequence
  Description of Artificial Sequence: Synthetic oligonucleotide
  Antisense strand to SEQ ID NO: 529413
aagcagaaccacuucacac

SEQ ID NO: 529415 - RNA, 19 nt, Artificial Sequence
  Description of Artificial Sequence: Synthetic oligonucleotide
  Sense strand starting at position 1066 of SEQ ID NO: 318005
guacuucuggcugacauua

SEQ ID NO: 529416 - RNA, 19 nt, Artificial Sequence
  Description of Artificial Sequence: Synthetic oligonucleotide
  Antisense strand to SEQ ID NO: 529415
uaaugucagccagaaguac

SEQ ID NO: 529417 - RNA, 19 nt, Artificial Sequence
  Description of Artificial Sequence: Synthetic oligonucleotide
  Sense strand starting at position 1071 of SEQ ID NO: 318005
ucuggcugacauuaacuua

SEQ ID NO: 529418 - RNA, 19 nt, Artificial Sequence
  Description of Artificial Sequence: Synthetic oligonucleotide
  Antisense strand to SEQ ID NO: 529417
uaaguuaaugucagccaga

SEQ ID NO: 529419 - RNA, 19 nt, Artificial Sequence
  Description of Artificial Sequence: Synthetic oligonucleotide
  Sense strand starting at position 1074 of SEQ ID NO: 318005
ggcugacauuaacuuaaga

SEQ ID NO: 529420 - RNA, 19 nt, Artificial Sequence
  Description of Artificial Sequence: Synthetic oligonucleotide
  Antisense strand to SEQ ID NO: 529419
ucuuaaguuaaugucagcc

SEQ ID NO: 529421 - RNA, 19 nt, Artificial Sequence
  Description of Artificial Sequence: Synthetic oligonucleotide
  Sense strand starting at position 1115 of SEQ ID NO: 318005
uaugaaucagaaugucuag

SEQ ID NO: 529422 - RNA, 19 nt, Artificial Sequence
  Description of Artificial Sequence: Synthetic oligonucleotide
  Antisense strand to SEQ ID NO: 529421
cuagacauucugauucaua

SEQ ID NO: 529423 - RNA, 19 nt, Artificial Sequence
  Description of Artificial Sequence: Synthetic oligonucleotide
  Sense strand starting at position 1222 of SEQ ID NO: 318005
agaacaguguuagucuaaa

SEQ ID NO: 529424 - RNA, 19 nt, Artificial Sequence
  Description of Artificial Sequence: Synthetic oligonucleotide
  Antisense strand to SEQ ID NO: 529423
uuuagacuaacacuguucu

SEQ ID NO: 529425 - RNA, 19 nt, Artificial Sequence
  Description of Artificial Sequence: Synthetic oligonucleotide
  Sense strand starting at position 1619 of SEQ ID NO: 318005
auacaagagcccuggagua

SEQ ID NO: 529426 - RNA, 19 nt, Artificial Sequence
  Description of Artificial Sequence: Synthetic oligonucleotide
  Antisense strand to SEQ ID NO: 529425
uacuccagggcucuuguau

SEQ ID NO: 529427 - RNA, 19 nt, Artificial Sequence
  Description of Artificial Sequence: Synthetic oligonucleotide
  Sense strand starting at position 1678 of SEQ ID NO: 318005
ggacuaaauugggccuaaa

SEQ ID NO: 529428 - RNA, 19 nt, Artificial Sequence
  Description of Artificial Sequence: Synthetic oligonucleotide
  Antisense strand to SEQ ID NO: 529427
uuuaggcccaauuuagucc

SEQ ID NO: 529429 - RNA, 19 nt, Artificial Sequence
  Description of Artificial Sequence: Synthetic oligonucleotide
  Sense strand starting at position 2249 of SEQ ID NO: 318005
caaagagguguuuggaaga

SEQ ID NO: 529430 - RNA, 19 nt, Artificial Sequence
  Description of Artificial Sequence: Synthetic oligonucleotide
  Antisense strand to SEQ ID NO: 529429
ucuuccaaacaccucuuug

SEQ ID NO: 529431 - RNA, 19 nt, Artificial Sequence
  Description of Artificial Sequence: Synthetic oligonucleotide
  Sense strand starting at position 2252 of SEQ ID NO: 318005
agagguguuuggaagaggu

SEQ ID NO: 529432 - RNA, 19 nt, Artificial Sequence
  Description of Artificial Sequence: Synthetic oligonucleotide
  Antisense strand to SEQ ID NO: 529431
accucuuccaaacaccucu

SEQ ID NO: 529433 - RNA, 19 nt, Artificial Sequence
  Description of Artificial Sequence: Synthetic oligonucleotide
  Sense strand starting at position 2275 of SEQ ID NO: 318005
gaauguccuucuguugaaa

SEQ ID NO: 529434 - RNA, 19 nt, Artificial Sequence
  Description of Artificial Sequence: Synthetic oligonucleotide
  Antisense strand to SEQ ID NO: 529433
uuucaacagaaggacauuc

SEQ ID NO: 529435 - RNA, 19 nt, Artificial Sequence
  Description of Artificial Sequence: Synthetic oligonucleotide
  Sense strand starting at position 2299 of SEQ ID NO: 318005
ugugaauacuuuccauuga

SEQ ID NO: 529436 - RNA, 19 nt, Artificial Sequence
  Description of Artificial Sequence: Synthetic oligonucleotide
  Antisense strand to SEQ ID NO: 529435
ucaauggaaaguauucaca

SEQ ID NO: 529437 - RNA, 19 nt, Artificial Sequence
  Description of Artificial Sequence: Synthetic oligonucleotide
  Sense strand starting at position 2318 of SEQ ID NO: 318005
gauagaauaaguggugguu

SEQ ID NO: 529438 - RNA, 19 nt, Artificial Sequence
  Description of Artificial Sequence: Synthetic oligonucleotide
  Antisense strand to SEQ ID NO: 529437
aaccaccacuuauucuauc

SEQ ID NO: 529439 - RNA, 19 nt, Artificial Sequence
  Description of Artificial Sequence: Synthetic oligonucleotide
  Sense strand starting at position 2330 of SEQ ID NO: 318005
ggugguucccaucacauca

SEQ ID NO: 529440 - RNA, 19 nt, Artificial Sequence
  Description of Artificial Sequence: Synthetic oligonucleotide
  Antisense strand to SEQ ID NO: 529439
ugaugugaugggaaccacc

SEQ ID NO: 529441 - RNA, 19 nt, Artificial Sequence
  Description of Artificial Sequence: Synthetic oligonucleotide
  Sense strand starting at position 2371 of SEQ ID NO: 318005
ucaggcaugcaguaagaaa

SEQ ID NO: 529442 - RNA, 19 nt, Artificial Sequence
  Description of Artificial Sequence: Synthetic oligonucleotide
  Antisense strand to SEQ ID NO: 529441
uuucuuacugcaugccuga

SEQ ID NO: 529443 - RNA, 19 nt, Artificial Sequence
  Description of Artificial Sequence: Synthetic oligonucleotide
  Sense strand starting at position 2549 of SEQ ID NO: 318005
auguaaacuguugaaaugu

SEQ ID NO: 529444 - RNA, 19 nt, Artificial Sequence
  Description of Artificial Sequence: Synthetic oligonucleotide
  Antisense strand to SEQ ID NO: 529443
acauuucaacaguuuacau

SEQ ID NO: 529445 - RNA, 19 nt, Artificial Sequence
  Description of Artificial Sequence: Synthetic oligonucleotide
  Sense strand starting at position 2597 of SEQ ID NO: 318005
guauuuccugagugcaaau

SEQ ID NO: 529446 - RNA, 19 nt, Artificial Sequence
  Description of Artificial Sequence: Synthetic oligonucleotide
  Antisense strand to SEQ ID NO: 529445
auuugcacucaggaaauac

SEQ ID NO: 529447 - RNA, 19 nt, Artificial Sequence
  Description of Artificial Sequence: Synthetic oligonucleotide
  Sense strand starting at position 2714 of SEQ ID NO: 318005
ucuugauggugaccagaca

SEQ ID NO: 529448 - RNA, 19 nt, Artificial Sequence
  Description of Artificial Sequence: Synthetic oligonucleotide
  Antisense strand to SEQ ID NO: 529447
ugucuggucaccaucaaga

SEQ ID NO: 529449 - RNA, 19 nt, Artificial Sequence
  Description of Artificial Sequence: Synthetic oligonucleotide
  Sense strand starting at position 2798 of SEQ ID NO: 318005
aaagaaguuucgcuuagag

SEQ ID NO: 529450 - RNA, 19 nt, Artificial Sequence
  Description of Artificial Sequence: Synthetic oligonucleotide
  Antisense strand to SEQ ID NO: 529449
cucuaagcgaaacuucuuu

SEQ ID NO: 529451 - RNA, 19 nt, Artificial Sequence
  Description of Artificial Sequence: Synthetic oligonucleotide
  Sense strand starting at position 2850 of SEQ ID NO: 318005
agagaacaaugagaaauua

SEQ ID NO: 529452 - RNA, 19 nt, Artificial Sequence
  Description of Artificial Sequence: Synthetic oligonucleotide
  Antisense strand to SEQ ID NO: 529451
uaauuucucauuguucucu

SEQ ID NO: 529453 - RNA, 19 nt, Artificial Sequence
  Description of Artificial Sequence: Synthetic oligonucleotide
  Sense strand starting at position 2914 of SEQ ID NO: 318005
uggccacagccauauauua

SEQ ID NO: 529454 - RNA, 19 nt, Artificial Sequence
  Description of Artificial Sequence: Synthetic oligonucleotide
  Antisense strand to SEQ ID NO: 529453
uaauauauggcuguggcca

SEQ ID NO: 529455 - RNA, 19 nt, Artificial Sequence
  Description of Artificial Sequence: Synthetic oligonucleotide
  Sense strand starting at position 3342 of SEQ ID NO: 318005
ucugguaccagaggaguaa

SEQ ID NO: 529456 - RNA, 19 nt, Artificial Sequence
  Description of Artificial Sequence: Synthetic oligonucleotide
  Antisense strand to SEQ ID NO: 529455
uuacuccucugguaccaga

SEQ ID NO: 529457 - RNA, 19 nt, Artificial Sequence
  Description of Artificial Sequence: Synthetic oligonucleotide
  Sense strand starting at position 3369 of SEQ ID NO: 318005
acaucagaccauugucuca

SEQ ID NO: 529458 - RNA, 19 nt, Artificial Sequence
  Description of Artificial Sequence: Synthetic oligonucleotide
  Antisense strand to SEQ ID NO: 529457
ugagacaauggucugaugu

SEQ ID NO: 529459 - RNA, 19 nt, Artificial Sequence
  Description of Artificial Sequence: Synthetic oligonucleotide
  Sense strand starting at position 3371 of SEQ ID NO: 318005
aucagaccauugucucaua

SEQ ID NO: 529460 - RNA, 19 nt, Artificial Sequence
  Description of Artificial Sequence: Synthetic oligonucleotide
  Antisense strand to SEQ ID NO: 529459
uaugagacaauggucugau

SEQ ID NO: 529461 - RNA, 19 nt, Artificial Sequence
  Description of Artificial Sequence: Synthetic oligonucleotide
  Sense strand starting at position 3519 of SEQ ID NO: 318005
agcguuagaacucagcaaa

SEQ ID NO: 529462 - RNA, 19 nt, Artificial Sequence
  Description of Artificial Sequence: Synthetic oligonucleotide
  Antisense strand to SEQ ID NO: 529461
uuugcugaguucuaacgcu

SEQ ID NO: 529463 - RNA, 19 nt, Artificial Sequence
  Description of Artificial Sequence: Synthetic oligonucleotide
  Sense strand starting at position 3542 of SEQ ID NO: 318005
cugaucuggauggguagaa

SEQ ID NO: 529464 - RNA, 19 nt, Artificial Sequence
  Description of Artificial Sequence: Synthetic oligonucleotide
  Antisense strand to SEQ ID NO: 529463
uucuacccauccagaucag

SEQ ID NO: 529465 - RNA, 19 nt, Artificial Sequence
  Description of Artificial Sequence: Synthetic oligonucleotide
  Sense strand starting at position 3565 of SEQ ID NO: 318005
gugauaggguaucugaauc

SEQ ID NO: 529466 - RNA, 19 nt, Artificial Sequence
  Description of Artificial Sequence: Synthetic oligonucleotide
  Antisense strand to SEQ ID NO: 529465
gauucagauacccuaucac

SEQ ID NO: 529467 - RNA, 19 nt, Artificial Sequence
  Description of Artificial Sequence: Synthetic oligonucleotide
  Sense strand starting at position 3801 of SEQ ID NO: 318005
agcaguauaaaguaguuua

SEQ ID NO: 529468 - RNA, 19 nt, Artificial Sequence
  Description of Artificial Sequence: Synthetic oligonucleotide
  Antisense strand to SEQ ID NO: 529467
uaaacuacuuuauacugcu

SEQ ID NO: 529469 - RNA, 19 nt, Artificial Sequence
  Description of Artificial Sequence: Synthetic oligonucleotide
  Sense strand starting at position 3969 of SEQ ID NO: 318005
ccuucuaguagagggaaau

SEQ ID NO: 529470 - RNA, 19 nt, Artificial Sequence
  Description of Artificial Sequence: Synthetic oligonucleotide
  Antisense strand to SEQ ID NO: 529469
auuucccucuacuagaagg

SEQ ID NO: 529471 - RNA, 19 nt, Artificial Sequence
  Description of Artificial Sequence: Synthetic oligonucleotide
  Sense strand starting at position 189 of SEQ ID NO: 318006
accacuugugaucauguua

SEQ ID NO: 529472 - RNA, 19 nt, Artificial Sequence
  Description of Artificial Sequence: Synthetic oligonucleotide
  Antisense strand to SEQ ID NO: 529471
uaacaugaucacaaguggu

SEQ ID NO: 529473 - RNA, 19 nt, Artificial Sequence
  Description of Artificial Sequence: Synthetic oligonucleotide
  Sense strand starting at position 415 of SEQ ID NO: 318006
acauuaugagcaugcagau

SEQ ID NO: 529474 - RNA, 19 nt, Artificial Sequence
  Description of Artificial Sequence: Synthetic oligonucleotide
  Antisense strand to SEQ ID NO: 529473
aucugcaugcucauaaugu

SEQ ID NO: 529475 - RNA, 19 nt, Artificial Sequence
  Description of Artificial Sequence: Synthetic oligonucleotide
  Sense strand starting at position 457 of SEQ ID NO: 318006
gcuuaaugagaucaggguu

SEQ ID NO: 529476 - RNA, 19 nt, Artificial Sequence
  Description of Artificial Sequence: Synthetic oligonucleotide
  Antisense strand to SEQ ID NO: 529475
aacccugaucucauuaagc

SEQ ID NO: 529477 - RNA, 19 nt, Artificial Sequence
  Description of Artificial Sequence: Synthetic oligonucleotide
  Sense strand starting at position 526 of SEQ ID NO: 318006
ggaggauucuaccucugca

SEQ ID NO: 529478 - RNA, 19 nt, Artificial Sequence
  Description of Artificial Sequence: Synthetic oligonucleotide
  Antisense strand to SEQ ID NO: 529477
ugcagagguagaauccucc

SEQ ID NO: 529479 - RNA, 19 nt, Artificial Sequence
  Description of Artificial Sequence: Synthetic oligonucleotide
  Sense strand starting at position 905 of SEQ ID NO: 318006
ggccuacugcaucaacuua

SEQ ID NO: 529480 - RNA, 19 nt, Artificial Sequence
  Description of Artificial Sequence: Synthetic oligonucleotide
  Antisense strand to SEQ ID NO: 529479
uaaguugaugcaguaggcc

SEQ ID NO: 529481 - RNA, 19 nt, Artificial Sequence
  Description of Artificial Sequence: Synthetic oligonucleotide
  Sense strand starting at position 949 of SEQ ID NO: 318006
caaagcaugggcuguauuu

SEQ ID NO: 529482 - RNA, 19 nt, Artificial Sequence
  Description of Artificial Sequence: Synthetic oligonucleotide
  Antisense strand to SEQ ID NO: 529481
aaauacagcccaugcuuug

SEQ ID NO: 529483 - RNA, 19 nt, Artificial Sequence
  Description of Artificial Sequence: Synthetic oligonucleotide
  Sense strand starting at position 974 of SEQ ID NO: 318006
ugagcagaaacaugugaca

SEQ ID NO: 529484 - RNA, 19 nt, Artificial Sequence
  Description of Artificial Sequence: Synthetic oligonucleotide
  Antisense strand to SEQ ID NO: 529483
ugucacauguuucugcuca

SEQ ID NO: 529485 - RNA, 19 nt, Artificial Sequence
  Description of Artificial Sequence: Synthetic oligonucleotide
  Sense strand starting at position 976 of SEQ ID NO: 318006
agcagaaacaugugacaug

SEQ ID NO: 529486 - RNA, 19 nt, Artificial Sequence
  Description of Artificial Sequence: Synthetic oligonucleotide
  Antisense strand to SEQ ID NO: 529485
caugucacauguuucugcu

SEQ ID NO: 529487 - RNA, 19 nt, Artificial Sequence
  Description of Artificial Sequence: Synthetic oligonucleotide
  Sense strand starting at position 1009 of SEQ ID NO: 318006
gggaucugucaguggauau

SEQ ID NO: 529488 - RNA, 19 nt, Artificial Sequence
  Description of Artificial Sequence: Synthetic oligonucleotide
  Antisense strand to SEQ ID NO: 529487
auauccacugacagauccc

SEQ ID NO: 529489 - RNA, 19 nt, Artificial Sequence
  Description of Artificial Sequence: Synthetic oligonucleotide
  Sense strand starting at position 1010 of SEQ ID NO: 318006
ggaucugucaguggauaua

SEQ ID NO: 529490 - RNA, 19 nt, Artificial Sequence
  Description of Artificial Sequence: Synthetic oligonucleotide
  Antisense strand to SEQ ID NO: 529489
uauauccacugacagaucc

SEQ ID NO: 529491 - RNA, 19 nt, Artificial Sequence
  Description of Artificial Sequence: Synthetic oligonucleotide
  Sense strand starting at position 1023 of SEQ ID NO: 318006
gauauaaugucagccagag

SEQ ID NO: 529492 - RNA, 19 nt, Artificial Sequence
  Description of Artificial Sequence: Synthetic oligonucleotide
  Antisense strand to SEQ ID NO: 529491
cucuggcugacauuauauc

SEQ ID NO: 529493 - RNA, 19 nt, Artificial Sequence
  Description of Artificial Sequence: Synthetic oligonucleotide
  Sense strand starting at position 1089 of SEQ ID NO: 318006
acuugucauuucuggauuu

SEQ ID NO: 529494 - RNA, 19 nt, Artificial Sequence
  Description of Artificial Sequence: Synthetic oligonucleotide
  Antisense strand to SEQ ID NO: 529493
aaauccagaaaugacaagu

SEQ ID NO: 529495 - RNA, 19 nt, Artificial Sequence
  Description of Artificial Sequence: Synthetic oligonucleotide
  Sense strand starting at position 1459 of SEQ ID NO: 318006
gagagauugagauguguga

SEQ ID NO: 529496 - RNA, 19 nt, Artificial Sequence
  Description of Artificial Sequence: Synthetic oligonucleotide
  Antisense strand to SEQ ID NO: 529495
ucacacaucucaaucucuc

SEQ ID NO: 529497 - RNA, 19 nt, Artificial Sequence
  Description of Artificial Sequence: Synthetic oligonucleotide
  Sense strand starting at position 1463 of SEQ ID NO: 318006
gauugagaugugugaagug

SEQ ID NO: 529498 - RNA, 19 nt, Artificial Sequence
  Description of Artificial Sequence: Synthetic oligonucleotide
  Antisense strand to SEQ ID NO: 529497
cacuucacacaucucaauc

SEQ ID NO: 529499 - RNA, 19 nt, Artificial Sequence
  Description of Artificial Sequence: Synthetic oligonucleotide
  Sense strand starting at position 1472 of SEQ ID NO: 318006
gugugaagugguucugcuu

SEQ ID NO: 529500 - RNA, 19 nt, Artificial Sequence
  Description of Artificial Sequence: Synthetic oligonucleotide
  Antisense strand to SEQ ID NO: 529499
aagcagaaccacuucacac

SEQ ID NO: 529501 - RNA, 19 nt, Artificial Sequence
  Description of Artificial Sequence: Synthetic oligonucleotide
  Sense strand starting at position 1590 of SEQ ID NO: 318006
guacuucuggcugacauua

SEQ ID NO: 529502 - RNA, 19 nt, Artificial Sequence
  Description of Artificial Sequence: Synthetic oligonucleotide
  Antisense strand to SEQ ID NO: 529501
uaaugucagccagaaguac

SEQ ID NO: 529503 - RNA, 19 nt, Artificial Sequence
  Description of Artificial Sequence: Synthetic oligonucleotide
  Sense strand starting at position 1595 of SEQ ID NO: 318006
ucuggcugacauuaacuua

SEQ ID NO: 529504 - RNA, 19 nt, Artificial Sequence
  Description of Artificial Sequence: Synthetic oligonucleotide
  Antisense strand to SEQ ID NO: 529503
uaaguuaaugucagccaga

SEQ ID NO: 529505 - RNA, 19 nt, Artificial Sequence
  Description of Artificial Sequence: Synthetic oligonucleotide
  Sense strand starting at position 1598 of SEQ ID NO: 318006
ggcugacauuaacuuaaga

SEQ ID NO: 529506 - RNA, 19 nt, Artificial Sequence
  Description of Artificial Sequence: Synthetic oligonucleotide
  Antisense strand to SEQ ID NO: 529505
ucuuaaguuaaugucagcc

SEQ ID NO: 529507 - RNA, 19 nt, Artificial Sequence
  Description of Artificial Sequence: Synthetic oligonucleotide
  Sense strand starting at position 1639 of SEQ ID NO: 318006
uaugaaucagaaugucuag

SEQ ID NO: 529508 - RNA, 19 nt, Artificial Sequence
  Description of Artificial Sequence: Synthetic oligonucleotide
  Antisense strand to SEQ ID NO: 529507
cuagacauucugauucaua

SEQ ID NO: 529509 - RNA, 19 nt, Artificial Sequence
  Description of Artificial Sequence: Synthetic oligonucleotide
  Sense strand starting at position 1746 of SEQ ID NO: 318006
agaacaguguuagucuaaa

SEQ ID NO: 529510 - RNA, 19 nt, Artificial Sequence
  Description of Artificial Sequence: Synthetic oligonucleotide
  Antisense strand to SEQ ID NO: 529509
uuuagacuaacacuguucu

SEQ ID NO: 529511 - RNA, 19 nt, Artificial Sequence
  Description of Artificial Sequence: Synthetic oligonucleotide
  Sense strand starting at position 2143 of SEQ ID NO: 318006
auacaagagcccuggagua

SEQ ID NO: 529512 - RNA, 19 nt, Artificial Sequence
  Description of Artificial Sequence: Synthetic oligonucleotide
  Antisense strand to SEQ ID NO: 529511
uacuccagggcucuuguau

SEQ ID NO: 529513 - RNA, 19 nt, Artificial Sequence
  Description of Artificial Sequence: Synthetic oligonucleotide
  Sense strand starting at position 2202 of SEQ ID NO: 318006
ggacuaaauugggccuaaa

SEQ ID NO: 529514 - RNA, 19 nt, Artificial Sequence
  Description of Artificial Sequence: Synthetic oligonucleotide
  Antisense strand to SEQ ID NO: 529513
uuuaggcccaauuuagucc

SEQ ID NO: 529515 - RNA, 19 nt, Artificial Sequence
  Description of Artificial Sequence: Synthetic oligonucleotide
  Sense strand starting at position 2773 of SEQ ID NO: 318006
caaagagguguuuggaaga

SEQ ID NO: 529516 - RNA, 19 nt, Artificial Sequence
  Description of Artificial Sequence: Synthetic oligonucleotide
  Antisense strand to SEQ ID NO: 529515
ucuuccaaacaccucuuug

SEQ ID NO: 529517 - RNA, 19 nt, Artificial Sequence
  Description of Artificial Sequence: Synthetic oligonucleotide
  Sense strand starting at position 2776 of SEQ ID NO: 318006
agagguguuuggaagaggu

SEQ ID NO: 529518 - RNA, 19 nt, Artificial Sequence
  Description of Artificial Sequence: Synthetic oligonucleotide
  Antisense strand to SEQ ID NO: 529517
accucuuccaaacaccucu

SEQ ID NO: 529519 - RNA, 19 nt, Artificial Sequence
  Description of Artificial Sequence: Synthetic oligonucleotide
  Sense strand starting at position 2799 of SEQ ID NO: 318006
gaauguccuucuguugaaa

SEQ ID NO: 529520 - RNA, 19 nt, Artificial Sequence
  Description of Artificial Sequence: Synthetic oligonucleotide
  Antisense strand to SEQ ID NO: 529519
uuucaacagaaggacauuc

SEQ ID NO: 529521 - RNA, 19 nt, Artificial Sequence
  Description of Artificial Sequence: Synthetic oligonucleotide
  Sense strand starting at position 2823 of SEQ ID NO: 318006
ugugaauacuuuccauuga

SEQ ID NO: 529522 - RNA, 19 nt, Artificial Sequence
  Description of Artificial Sequence: Synthetic oligonucleotide
  Antisense strand to SEQ ID NO: 529521
ucaauggaaaguauucaca

SEQ ID NO: 529523 - RNA, 19 nt, Artificial Sequence
  Description of Artificial Sequence: Synthetic oligonucleotide
  Sense strand starting at position 2842 of SEQ ID NO: 318006
gauagaauaaguggugguu

SEQ ID NO: 529524 - RNA, 19 nt, Artificial Sequence
  Description of Artificial Sequence: Synthetic oligonucleotide
  Antisense strand to SEQ ID NO: 529523
aaccaccacuuauucuauc

SEQ ID NO: 529525 - RNA, 19 nt, Artificial Sequence
  Description of Artificial Sequence: Synthetic oligonucleotide
  Sense strand starting at position 2854 of SEQ ID NO: 318006
ggugguucccaucacauca

SEQ ID NO: 529526 - RNA, 19 nt, Artificial Sequence
  Description of Artificial Sequence: Synthetic oligonucleotide
  Antisense strand to SEQ ID NO: 529525
ugaugugaugggaaccacc

SEQ ID NO: 529527 - RNA, 19 nt, Artificial Sequence
  Description of Artificial Sequence: Synthetic oligonucleotide
  Sense strand starting at position 2873 of SEQ ID NO: 318006
ggcauuaugggauggguuu

SEQ ID NO: 529528 - RNA, 19 nt, Artificial Sequence
  Description of Artificial Sequence: Synthetic oligonucleotide
  Antisense strand to SEQ ID NO: 529527
aaacccaucccauaaugcc

SEQ ID NO: 529529 - RNA, 19 nt, Artificial Sequence
  Description of Artificial Sequence: Synthetic oligonucleotide
  Sense strand starting at position 2895 of SEQ ID NO: 318006
ucaggcaugcaguaagaaa

SEQ ID NO: 529530 - RNA, 19 nt, Artificial Sequence
  Description of Artificial Sequence: Synthetic oligonucleotide
  Antisense strand to SEQ ID NO: 529529
uuucuuacugcaugccuga

SEQ ID NO: 529531 - RNA, 19 nt, Artificial Sequence
  Description of Artificial Sequence: Synthetic oligonucleotide
  Sense strand starting at position 3042 of SEQ ID NO: 318006
gguaucacuucucuuuaca

SEQ ID NO: 529532 - RNA, 19 nt, Artificial Sequence
  Description of Artificial Sequence: Synthetic oligonucleotide
  Antisense strand to SEQ ID NO: 529531
uguaaagagaagugauacc

SEQ ID NO: 529533 - RNA, 19 nt, Artificial Sequence
  Description of Artificial Sequence: Synthetic oligonucleotide
  Sense strand starting at position 3073 of SEQ ID NO: 318006
auguaaacuguugaaaugu

SEQ ID NO: 529534 - RNA, 19 nt, Artificial Sequence
  Description of Artificial Sequence: Synthetic oligonucleotide
  Antisense strand to SEQ ID NO: 529533
acauuucaacaguuuacau

SEQ ID NO: 529535 - RNA, 19 nt, Artificial Sequence
  Description of Artificial Sequence: Synthetic oligonucleotide
  Sense strand starting at position 3121 of SEQ ID NO: 318006
guauuuccugagugcaaau

SEQ ID NO: 529536 - RNA, 19 nt, Artificial Sequence
  Description of Artificial Sequence: Synthetic oligonucleotide
  Antisense strand to SEQ ID NO: 529535
auuugcacucaggaaauac

SEQ ID NO: 529537 - RNA, 19 nt, Artificial Sequence
  Description of Artificial Sequence: Synthetic oligonucleotide
  Sense strand starting at position 3238 of SEQ ID NO: 318006
ucuugauggugaccagaca

SEQ ID NO: 529538 - RNA, 19 nt, Artificial Sequence
  Description of Artificial Sequence: Synthetic oligonucleotide
  Antisense strand to SEQ ID NO: 529537
ugucuggucaccaucaaga

SEQ ID NO: 529539 - RNA, 19 nt, Artificial Sequence
  Description of Artificial Sequence: Synthetic oligonucleotide
  Sense strand starting at position 3322 of SEQ ID NO: 318006
aaagaaguuucgcuuagag

SEQ ID NO: 529540 - RNA, 19 nt, Artificial Sequence
  Description of Artificial Sequence: Synthetic oligonucleotide
  Antisense strand to SEQ ID NO: 529539
cucuaagcgaaacuucuuu

SEQ ID NO: 529541 - RNA, 19 nt, Artificial Sequence
  Description of Artificial Sequence: Synthetic oligonucleotide
  Sense strand starting at position 3374 of SEQ ID NO: 318006
agagaacaaugagaaauua

SEQ ID NO: 529542 - RNA, 19 nt, Artificial Sequence
  Description of Artificial Sequence: Synthetic oligonucleotide
  Antisense strand to SEQ ID NO: 529541
uaauuucucauuguucucu

SEQ ID NO: 529543 - RNA, 19 nt, Artificial Sequence
  Description of Artificial Sequence: Synthetic oligonucleotide
  Sense strand starting at position 3438 of SEQ ID NO: 318006
uggccacagccauauauua

SEQ ID NO: 529544 - RNA, 19 nt, Artificial Sequence
  Description of Artificial Sequence: Synthetic oligonucleotide
  Antisense strand to SEQ ID NO: 529543
uaauauauggcuguggcca

SEQ ID NO: 529545 - RNA, 19 nt, Artificial Sequence
  Description of Artificial Sequence: Synthetic oligonucleotide
  Sense strand starting at position 3866 of SEQ ID NO: 318006
ucugguaccagaggaguaa

SEQ ID NO: 529546 - RNA, 19 nt, Artificial Sequence
  Description of Artificial Sequence: Synthetic oligonucleotide
  Antisense strand to SEQ ID NO: 529545
uuacuccucugguaccaga

SEQ ID NO: 529547 - RNA, 19 nt, Artificial Sequence
  Description of Artificial Sequence: Synthetic oligonucleotide
  Sense strand starting at position 3893 of SEQ ID NO: 318006
acaucagaccauugucuca

SEQ ID NO: 529548 - RNA, 19 nt, Artificial Sequence
  Description of Artificial Sequence: Synthetic oligonucleotide
  Antisense strand to SEQ ID NO: 529547
ugagacaauggucugaugu

SEQ ID NO: 529549 - RNA, 19 nt, Artificial Sequence
  Description of Artificial Sequence: Synthetic oligonucleotide
  Sense strand starting at position 3895 of SEQ ID NO: 318006
aucagaccauugucucaua

SEQ ID NO: 529550 - RNA, 19 nt, Artificial Sequence
  Description of Artificial Sequence: Synthetic oligonucleotide
  Antisense strand to SEQ ID NO: 529549
uaugagacaauggucugau

SEQ ID NO: 529551 - RNA, 19 nt, Artificial Sequence
  Description of Artificial Sequence: Synthetic oligonucleotide
  Sense strand starting at position 231 of SEQ ID NO: 318007
ucaaaucuugcccagugga

SEQ ID NO: 529552 - RNA, 19 nt, Artificial Sequence
  Description of Artificial Sequence: Synthetic oligonucleotide
  Antisense strand to SEQ ID NO: 529551
uccacugggcaagauuuga

SEQ ID NO: 529553 - RNA, 19 nt, Artificial Sequence
  Description of Artificial Sequence: Synthetic oligonucleotide
  Sense strand starting at position 248 of SEQ ID NO: 318007
gagugaaagucaccuuaau

SEQ ID NO: 529554 - RNA, 19 nt, Artificial Sequence
  Description of Artificial Sequence: Synthetic oligonucleotide
  Antisense strand to SEQ ID NO: 529553
auuaaggugacuuucacuc

SEQ ID NO: 529555 - RNA, 19 nt, Artificial Sequence
  Description of Artificial Sequence: Synthetic oligonucleotide
  Sense strand starting at position 286 of SEQ ID NO: 318007
ccaccaugacuuuggaaca

SEQ ID NO: 529556 - RNA, 19 nt, Artificial Sequence
  Description of Artificial Sequence: Synthetic oligonucleotide
  Antisense strand to SEQ ID NO: 529555
uguuccaaagucauggugg

SEQ ID NO: 529557 - RNA, 19 nt, Artificial Sequence
  Description of Artificial Sequence: Synthetic oligonucleotide
  Sense strand starting at position 373 of SEQ ID NO: 318007
ugaaauggagccugcaauu

SEQ ID NO: 529558 - RNA, 19 nt, Artificial Sequence
  Description of Artificial Sequence: Synthetic oligonucleotide
  Antisense strand to SEQ ID NO: 529557
aauugcaggcuccauuuca

SEQ ID NO: 529559 - RNA, 19 nt, Artificial Sequence
  Description of Artificial Sequence: Synthetic oligonucleotide
  Sense strand starting at position 407 of SEQ ID NO: 318007
uugcauaauguugacauua

SEQ ID NO: 529560 - RNA, 19 nt, Artificial Sequence
  Description of Artificial Sequence: Synthetic oligonucleotide
  Antisense strand to SEQ ID NO: 529559
uaaugucaacauuaugcaa

SEQ ID NO: 529561 - RNA, 19 nt, Artificial Sequence
  Description of Artificial Sequence: Synthetic oligonucleotide
  Sense strand starting at position 612 of SEQ ID NO: 318007
gcgcuaagucugcuguuaa

SEQ ID NO: 529562 - RNA, 19 nt, Artificial Sequence
  Description of Artificial Sequence: Synthetic oligonucleotide
  Antisense strand to SEQ ID NO: 529561
uuaacagcagacuuagcgc

SEQ ID NO: 529563 - RNA, 19 nt, Artificial Sequence
  Description of Artificial Sequence: Synthetic oligonucleotide
  Sense strand starting at position 701 of SEQ ID NO: 318007
agugucauagcaugggaga

SEQ ID NO: 529564 - RNA, 19 nt, Artificial Sequence
  Description of Artificial Sequence: Synthetic oligonucleotide
  Antisense strand to SEQ ID NO: 529563
ucucccaugcuaugacacu

SEQ ID NO: 529565 - RNA, 19 nt, Artificial Sequence
  Description of Artificial Sequence: Synthetic oligonucleotide
  Sense strand starting at position 702 of SEQ ID NO: 318007
gugucauagcaugggagaa

SEQ ID NO: 529566 - RNA, 19 nt, Artificial Sequence
  Description of Artificial Sequence: Synthetic oligonucleotide
  Antisense strand to SEQ ID NO: 529565
uucucccaugcuaugacac

SEQ ID NO: 529567 - RNA, 19 nt, Artificial Sequence
  Description of Artificial Sequence: Synthetic oligonucleotide
  Sense strand starting at position 703 of SEQ ID NO: 318007
ugucauagcaugggagaaa

SEQ ID NO: 529568 - RNA, 19 nt, Artificial Sequence
  Description of Artificial Sequence: Synthetic oligonucleotide
  Antisense strand to SEQ ID NO: 529567
uuucucccaugcuaugaca

SEQ ID NO: 529569 - RNA, 19 nt, Artificial Sequence
  Description of Artificial Sequence: Synthetic oligonucleotide
  Sense strand starting at position 877 of SEQ ID NO: 318007
uuaggucugcuaugaaaca

SEQ ID NO: 529570 - RNA, 19 nt, Artificial Sequence
  Description of Artificial Sequence: Synthetic oligonucleotide
  Antisense strand to SEQ ID NO: 529569
uguuucauagcagaccuaa

SEQ ID NO: 529571 - RNA, 19 nt, Artificial Sequence
  Description of Artificial Sequence: Synthetic oligonucleotide
  Sense strand starting at position 946 of SEQ ID NO: 318007
gagggagaauuauagagau

SEQ ID NO: 529572 - RNA, 19 nt, Artificial Sequence
  Description of Artificial Sequence: Synthetic oligonucleotide
  Antisense strand to SEQ ID NO: 529571
aucucuauaauucucccuc

SEQ ID NO: 529573 - RNA, 19 nt, Artificial Sequence
  Description of Artificial Sequence: Synthetic oligonucleotide
  Sense strand starting at position 1144 of SEQ ID NO: 318007
agauauccuuagucacaga

SEQ ID NO: 529574 - RNA, 19 nt, Artificial Sequence
  Description of Artificial Sequence: Synthetic oligonucleotide
  Antisense strand to SEQ ID NO: 529573
ucugugacuaaggauaucu

SEQ ID NO: 529575 - RNA, 19 nt, Artificial Sequence
  Description of Artificial Sequence: Synthetic oligonucleotide
  Sense strand starting at position 1167 of SEQ ID NO: 318007
cugagugaacaguaagcua

SEQ ID NO: 529576 - RNA, 19 nt, Artificial Sequence
  Description of Artificial Sequence: Synthetic oligonucleotide
  Antisense strand to SEQ ID NO: 529575
uagcuuacuguucacucag

SEQ ID NO: 529577 - RNA, 19 nt, Artificial Sequence
  Description of Artificial Sequence: Synthetic oligonucleotide
  Sense strand starting at position 1170 of SEQ ID NO: 318007
agugaacaguaagcuaaua

SEQ ID NO: 529578 - RNA, 19 nt, Artificial Sequence
  Description of Artificial Sequence: Synthetic oligonucleotide
  Antisense strand to SEQ ID NO: 529577
uauuagcuuacuguucacu

SEQ ID NO: 529579 - RNA, 19 nt, Artificial Sequence
  Description of Artificial Sequence: Synthetic oligonucleotide
  Sense strand starting at position 1265 of SEQ ID NO: 318007
ucagcaugauuuguaguau

SEQ ID NO: 529580 - RNA, 19 nt, Artificial Sequence
  Description of Artificial Sequence: Synthetic oligonucleotide
  Antisense strand to SEQ ID NO: 529579
auacuacaaaucaugcuga

SEQ ID NO: 529581 - RNA, 19 nt, Artificial Sequence
  Description of Artificial Sequence: Synthetic oligonucleotide
  Sense strand starting at position 1309 of SEQ ID NO: 318007
ugccaaaguugacugacua

SEQ ID NO: 529582 - RNA, 19 nt, Artificial Sequence
  Description of Artificial Sequence: Synthetic oligonucleotide
  Antisense strand to SEQ ID NO: 529581
uagucagucaacuuuggca

SEQ ID NO: 529583 - RNA, 19 nt, Artificial Sequence
  Description of Artificial Sequence: Synthetic oligonucleotide
  Sense strand starting at position 1447 of SEQ ID NO: 318007
cuuggauguagcgaauaca

SEQ ID NO: 529584 - RNA, 19 nt, Artificial Sequence
  Description of Artificial Sequence: Synthetic oligonucleotide
  Antisense strand to SEQ ID NO: 529583
uguauucgcuacauccaag

SEQ ID NO: 529585 - RNA, 19 nt, Artificial Sequence
  Description of Artificial Sequence: Synthetic oligonucleotide
  Sense strand starting at position 1450 of SEQ ID NO: 318007
ggauguagcgaauacaguu

SEQ ID NO: 529586 - RNA, 19 nt, Artificial Sequence
  Description of Artificial Sequence: Synthetic oligonucleotide
  Antisense strand to SEQ ID NO: 529585
aacuguauucgcuacaucc

SEQ ID NO: 529587 - RNA, 19 nt, Artificial Sequence
  Description of Artificial Sequence: Synthetic oligonucleotide
  Sense strand starting at position 2051 of SEQ ID NO: 318007
ucuguuucccagugaacaa

SEQ ID NO: 529588 - RNA, 19 nt, Artificial Sequence
  Description of Artificial Sequence: Synthetic oligonucleotide
  Antisense strand to SEQ ID NO: 529587
uuguucacugggaaacaga

SEQ ID NO: 529589 - RNA, 19 nt, Artificial Sequence
  Description of Artificial Sequence: Synthetic oligonucleotide
  Sense strand starting at position 2297 of SEQ ID NO: 318007
uggcuuugcuagccauuua

SEQ ID NO: 529590 - RNA, 19 nt, Artificial Sequence
  Description of Artificial Sequence: Synthetic oligonucleotide
  Antisense strand to SEQ ID NO: 529589
uaaauggcuagcaaagcca

SEQ ID NO: 529591 - RNA, 19 nt, Artificial Sequence
  Description of Artificial Sequence: Synthetic oligonucleotide
  Sense strand starting at position 2347 of SEQ ID NO: 318007
cagucuaacggagagagua

SEQ ID NO: 529592 - RNA, 19 nt, Artificial Sequence
  Description of Artificial Sequence: Synthetic oligonucleotide
  Antisense strand to SEQ ID NO: 529591
uacucucuccguuagacug

SEQ ID NO: 529593 - RNA, 19 nt, Artificial Sequence
  Description of Artificial Sequence: Synthetic oligonucleotide
  Sense strand starting at position 2500 of SEQ ID NO: 318007
aaaugaacucagcguauug

SEQ ID NO: 529594 - RNA, 19 nt, Artificial Sequence
  Description of Artificial Sequence: Synthetic oligonucleotide
  Antisense strand to SEQ ID NO: 529593
caauacgcugaguucauuu

SEQ ID NO: 529595 - RNA, 19 nt, Artificial Sequence
  Description of Artificial Sequence: Synthetic oligonucleotide
  Sense strand starting at position 2530 of SEQ ID NO: 318007
gcuguugcugugucugaca

SEQ ID NO: 529596 - RNA, 19 nt, Artificial Sequence
  Description of Artificial Sequence: Synthetic oligonucleotide
  Antisense strand to SEQ ID NO: 529595
ugucagacacagcaacagc

SEQ ID NO: 529597 - RNA, 19 nt, Artificial Sequence
  Description of Artificial Sequence: Synthetic oligonucleotide
  Sense strand starting at position 2603 of SEQ ID NO: 318007
uuuacaaguuacucagaga

SEQ ID NO: 529598 - RNA, 19 nt, Artificial Sequence
  Description of Artificial Sequence: Synthetic oligonucleotide
  Antisense strand to SEQ ID NO: 529597
ucucugaguaacuuguaaa

SEQ ID NO: 529599 - RNA, 19 nt, Artificial Sequence
  Description of Artificial Sequence: Synthetic oligonucleotide
  Sense strand starting at position 2678 of SEQ ID NO: 318007
gugcaaaccugaccuaaug

SEQ ID NO: 529600 - RNA, 19 nt, Artificial Sequence
  Description of Artificial Sequence: Synthetic oligonucleotide
  Antisense strand to SEQ ID NO: 529599
cauuaggucagguuugcac

SEQ ID NO: 529601 - RNA, 19 nt, Artificial Sequence
  Description of Artificial Sequence: Synthetic oligonucleotide
  Sense strand starting at position 2716 of SEQ ID NO: 318007
cccuaaucaggcugaaaua

SEQ ID NO: 529602 - RNA, 19 nt, Artificial Sequence
  Description of Artificial Sequence: Synthetic oligonucleotide
  Antisense strand to SEQ ID NO: 529601
uauuucagccugauuaggg

SEQ ID NO: 529603 - RNA, 19 nt, Artificial Sequence
  Description of Artificial Sequence: Synthetic oligonucleotide
  Sense strand starting at position 2752 of SEQ ID NO: 318007
uuuccaugggccuacagau

SEQ ID NO: 529604 - RNA, 19 nt, Artificial Sequence
  Description of Artificial Sequence: Synthetic oligonucleotide
  Antisense strand to SEQ ID NO: 529603
aucuguaggcccauggaaa

SEQ ID NO: 529605 - RNA, 19 nt, Artificial Sequence
  Description of Artificial Sequence: Synthetic oligonucleotide
  Sense strand starting at position 2949 of SEQ ID NO: 318007
ugugcaaauccacaugcau

SEQ ID NO: 529606 - RNA, 19 nt, Artificial Sequence
  Description of Artificial Sequence: Synthetic oligonucleotide
  Antisense strand to SEQ ID NO: 529605
augcauguggauuugcaca

SEQ ID NO: 529607 - RNA, 19 nt, Artificial Sequence
  Description of Artificial Sequence: Synthetic oligonucleotide
  Sense strand starting at position 2994 of SEQ ID NO: 318007
cauggagucguucauagga

SEQ ID NO: 529608 - RNA, 19 nt, Artificial Sequence
  Description of Artificial Sequence: Synthetic oligonucleotide
  Antisense strand to SEQ ID NO: 529607
uccuaugaacgacuccaug

SEQ ID NO: 529609 - RNA, 19 nt, Artificial Sequence
  Description of Artificial Sequence: Synthetic oligonucleotide
  Sense strand starting at position 3031 of SEQ ID NO: 318007
augaacacacuuugugaga

SEQ ID NO: 529610 - RNA, 19 nt, Artificial Sequence
  Description of Artificial Sequence: Synthetic oligonucleotide
  Antisense strand to SEQ ID NO: 529609
ucucacaaaguguguucau

SEQ ID NO: 529611 - RNA, 19 nt, Artificial Sequence
  Description of Artificial Sequence: Synthetic oligonucleotide
  Sense strand starting at position 3032 of SEQ ID NO: 318007
ugaacacacuuugugagau

SEQ ID NO: 529612 - RNA, 19 nt, Artificial Sequence
  Description of Artificial Sequence: Synthetic oligonucleotide
  Antisense strand to SEQ ID NO: 529611
aucucacaaaguguguuca

SEQ ID NO: 529613 - RNA, 19 nt, Artificial Sequence
  Description of Artificial Sequence: Synthetic oligonucleotide
  Sense strand starting at position 3054 of SEQ ID NO: 318007
acgugagaaacaugcagau

SEQ ID NO: 529614 - RNA, 19 nt, Artificial Sequence
  Description of Artificial Sequence: Synthetic oligonucleotide
  Antisense strand to SEQ ID NO: 529613
aucugcauguuucucacgu

SEQ ID NO: 529615 - RNA, 19 nt, Artificial Sequence
  Description of Artificial Sequence: Synthetic oligonucleotide
  Sense strand starting at position 3156 of SEQ ID NO: 318007
aucucacacuuugugagau

SEQ ID NO: 529616 - RNA, 19 nt, Artificial Sequence
  Description of Artificial Sequence: Synthetic oligonucleotide
  Antisense strand to SEQ ID NO: 529615
aucucacaaagugugagau

SEQ ID NO: 529617 - RNA, 19 nt, Artificial Sequence
  Description of Artificial Sequence: Synthetic oligonucleotide
  Sense strand starting at position 3376 of SEQ ID NO: 318007
auaaauaugaguugugguu

SEQ ID NO: 529618 - RNA, 19 nt, Artificial Sequence
  Description of Artificial Sequence: Synthetic oligonucleotide
  Antisense strand to SEQ ID NO: 529617
aaccacaacucauauuuau

SEQ ID NO: 529619 - RNA, 19 nt, Artificial Sequence
  Description of Artificial Sequence: Synthetic oligonucleotide
  Sense strand starting at position 3509 of SEQ ID NO: 318007
ccuuuacuccuaggugaac

SEQ ID NO: 529620 - RNA, 19 nt, Artificial Sequence
  Description of Artificial Sequence: Synthetic oligonucleotide
  Antisense strand to SEQ ID NO: 529619
guucaccuaggaguaaagg

SEQ ID NO: 529621 - RNA, 19 nt, Artificial Sequence
  Description of Artificial Sequence: Synthetic oligonucleotide
  Sense strand starting at position 3510 of SEQ ID NO: 318007
cuuuacuccuaggugaaca

SEQ ID NO: 529622 - RNA, 19 nt, Artificial Sequence
  Description of Artificial Sequence: Synthetic oligonucleotide
  Antisense strand to SEQ ID NO: 529621
uguucaccuaggaguaaag

SEQ ID NO: 529623 - RNA, 19 nt, Artificial Sequence
  Description of Artificial Sequence: Synthetic oligonucleotide
  Sense strand starting at position 3520 of SEQ ID NO: 318007
aggugaacaggcuauguaa

SEQ ID NO: 529624 - RNA, 19 nt, Artificial Sequence
  Description of Artificial Sequence: Synthetic oligonucleotide
  Antisense strand to SEQ ID NO: 529623
uuacauagccuguucaccu

SEQ ID NO: 529625 - RNA, 19 nt, Artificial Sequence
  Description of Artificial Sequence: Synthetic oligonucleotide
  Sense strand starting at position 3544 of SEQ ID NO: 318007
gcuggaaaccuccagcaga

SEQ ID NO: 529626 - RNA, 19 nt, Artificial Sequence
  Description of Artificial Sequence: Synthetic oligonucleotide
  Antisense strand to SEQ ID NO: 529625
ucugcuggagguuuccagc

SEQ ID NO: 529627 - RNA, 19 nt, Artificial Sequence
  Description of Artificial Sequence: Synthetic oligonucleotide
  Sense strand starting at position 3607 of SEQ ID NO: 318007
uccuguugguaacuaaaua

SEQ ID NO: 529628 - RNA, 19 nt, Artificial Sequence
  Description of Artificial Sequence: Synthetic oligonucleotide
  Antisense strand to SEQ ID NO: 529627
uauuuaguuaccaacagga

SEQ ID NO: 529629 - RNA, 19 nt, Artificial Sequence
  Description of Artificial Sequence: Synthetic oligonucleotide
  Sense strand starting at position 3634 of SEQ ID NO: 318007
gcauuugauucugucucuu

SEQ ID NO: 529630 - RNA, 19 nt, Artificial Sequence
  Description of Artificial Sequence: Synthetic oligonucleotide
  Antisense strand to SEQ ID NO: 529629
aagagacagaaucaaaugc

SEQ ID NO: 529631 - RNA, 19 nt, Artificial Sequence
  Description of Artificial Sequence: Synthetic oligonucleotide
  Sense strand starting at position 120 of SEQ ID NO: 318008
cuggaacgugcuuacauau

SEQ ID NO: 529632 - RNA, 19 nt, Artificial Sequence
  Description of Artificial Sequence: Synthetic oligonucleotide
  Antisense strand to SEQ ID NO: 529631
auauguaagcacguuccag

SEQ ID NO: 529633 - RNA, 19 nt, Artificial Sequence
  Description of Artificial Sequence: Synthetic oligonucleotide
  Sense strand starting at position 227 of SEQ ID NO: 318008
aagaaauauugguuaguuc

SEQ ID NO: 529634 - RNA, 19 nt, Artificial Sequence
  Description of Artificial Sequence: Synthetic oligonucleotide
  Antisense strand to SEQ ID NO: 529633
gaacuaaccaauauuucuu

SEQ ID NO: 529635 - RNA, 19 nt, Artificial Sequence
  Description of Artificial Sequence: Synthetic oligonucleotide
  Sense strand starting at position 310 of SEQ ID NO: 318008
acugguaggauaugugauu

SEQ ID NO: 529636 - RNA, 19 nt, Artificial Sequence
  Description of Artificial Sequence: Synthetic oligonucleotide
  Antisense strand to SEQ ID NO: 529635
aaucacauauccuaccagu

SEQ ID NO: 529637 - RNA, 19 nt, Artificial Sequence
  Description of Artificial Sequence: Synthetic oligonucleotide
  Sense strand starting at position 317 of SEQ ID NO: 318008
ggauaugugauuuguguuu

SEQ ID NO: 529638 - RNA, 19 nt, Artificial Sequence
  Description of Artificial Sequence: Synthetic oligonucleotide
  Antisense strand to SEQ ID NO: 529637
aaacacaaaucacauaucc

SEQ ID NO: 529639 - RNA, 19 nt, Artificial Sequence
  Description of Artificial Sequence: Synthetic oligonucleotide
  Sense strand starting at position 322 of SEQ ID NO: 318008
ugugauuuguguuuaguau

SEQ ID NO: 529640 - RNA, 19 nt, Artificial Sequence
  Description of Artificial Sequence: Synthetic oligonucleotide
  Antisense strand to SEQ ID NO: 529639
auacuaaacacaaaucaca

SEQ ID NO: 529641 - RNA, 19 nt, Artificial Sequence
  Description of Artificial Sequence: Synthetic oligonucleotide
  Sense strand starting at position 634 of SEQ ID NO: 318008
ucaaaucuugcccagugga

SEQ ID NO: 529642 - RNA, 19 nt, Artificial Sequence
  Description of Artificial Sequence: Synthetic oligonucleotide
  Antisense strand to SEQ ID NO: 529641
uccacugggcaagauuuga

SEQ ID NO: 529643 - RNA, 19 nt, Artificial Sequence
  Description of Artificial Sequence: Synthetic oligonucleotide
  Sense strand starting at position 651 of SEQ ID NO: 318008
gagugaaagucaccuuaau

SEQ ID NO: 529644 - RNA, 19 nt, Artificial Sequence
  Description of Artificial Sequence: Synthetic oligonucleotide
  Antisense strand to SEQ ID NO: 529643
auuaaggugacuuucacuc

SEQ ID NO: 529645 - RNA, 19 nt, Artificial Sequence
  Description of Artificial Sequence: Synthetic oligonucleotide
  Sense strand starting at position 689 of SEQ ID NO: 318008
ccaccaugacuuuggaaca

SEQ ID NO: 529646 - RNA, 19 nt, Artificial Sequence
  Description of Artificial Sequence: Synthetic oligonucleotide
  Antisense strand to SEQ ID NO: 529645
uguuccaaagucauggugg

SEQ ID NO: 529647 - RNA, 19 nt, Artificial Sequence
  Description of Artificial Sequence: Synthetic oligonucleotide
  Sense strand starting at position 776 of SEQ ID NO: 318008
ugaaauggagccugcaauu

SEQ ID NO: 529648 - RNA, 19 nt, Artificial Sequence
  Description of Artificial Sequence: Synthetic oligonucleotide
  Antisense strand to SEQ ID NO: 529647
aauugcaggcuccauuuca

SEQ ID NO: 529649 - RNA, 19 nt, Artificial Sequence
  Description of Artificial Sequence: Synthetic oligonucleotide
  Sense strand starting at position 810 of SEQ ID NO: 318008
uugcauaauguugacauua

SEQ ID NO: 529650 - RNA, 19 nt, Artificial Sequence
  Description of Artificial Sequence: Synthetic oligonucleotide
  Antisense strand to SEQ ID NO: 529649
uaaugucaacauuaugcaa

SEQ ID NO: 529651 - RNA, 19 nt, Artificial Sequence
  Description of Artificial Sequence: Synthetic oligonucleotide
  Sense strand starting at position 1015 of SEQ ID NO: 318008
gcgcuaagucugcuguuaa

SEQ ID NO: 529652 - RNA, 19 nt, Artificial Sequence
  Description of Artificial Sequence: Synthetic oligonucleotide
  Antisense strand to SEQ ID NO: 529651
uuaacagcagacuuagcgc

SEQ ID NO: 529653 - RNA, 19 nt, Artificial Sequence
  Description of Artificial Sequence: Synthetic oligonucleotide
  Sense strand starting at position 1104 of SEQ ID NO: 318008
agugucauagcaugggaga

SEQ ID NO: 529654 - RNA, 19 nt, Artificial Sequence
  Description of Artificial Sequence: Synthetic oligonucleotide
  Antisense strand to SEQ ID NO: 529653
ucucccaugcuaugacacu

SEQ ID NO: 529655 - RNA, 19 nt, Artificial Sequence
  Description of Artificial Sequence: Synthetic oligonucleotide
  Sense strand starting at position 1105 of SEQ ID NO: 318008
gugucauagcaugggagaa

SEQ ID NO: 529656 - RNA, 19 nt, Artificial Sequence
  Description of Artificial Sequence: Synthetic oligonucleotide
  Antisense strand to SEQ ID NO: 529655
uucucccaugcuaugacac

SEQ ID NO: 529657 - RNA, 19 nt, Artificial Sequence
  Description of Artificial Sequence: Synthetic oligonucleotide
  Sense strand starting at position 1106 of SEQ ID NO: 318008
ugucauagcaugggagaaa

SEQ ID NO: 529658 - RNA, 19 nt, Artificial Sequence
  Description of Artificial Sequence: Synthetic oligonucleotide
  Antisense strand to SEQ ID NO: 529657
uuucucccaugcuaugaca

SEQ ID NO: 529659 - RNA, 19 nt, Artificial Sequence
  Description of Artificial Sequence: Synthetic oligonucleotide
  Sense strand starting at position 1280 of SEQ ID NO: 318008
uuaggucugcuaugaaaca

SEQ ID NO: 529660 - RNA, 19 nt, Artificial Sequence
  Description of Artificial Sequence: Synthetic oligonucleotide
  Antisense strand to SEQ ID NO: 529659
uguuucauagcagaccuaa

SEQ ID NO: 529661 - RNA, 19 nt, Artificial Sequence
  Description of Artificial Sequence: Synthetic oligonucleotide
  Sense strand starting at position 1349 of SEQ ID NO: 318008
gagggagaauuauagagau

SEQ ID NO: 529662 - RNA, 19 nt, Artificial Sequence
  Description of Artificial Sequence: Synthetic oligonucleotide
  Antisense strand to SEQ ID NO: 529661
aucucuauaauucucccuc

SEQ ID NO: 529663 - RNA, 19 nt, Artificial Sequence
  Description of Artificial Sequence: Synthetic oligonucleotide
  Sense strand starting at position 1547 of SEQ ID NO: 318008
agauauccuuagucacaga

SEQ ID NO: 529664 - RNA, 19 nt, Artificial Sequence
  Description of Artificial Sequence: Synthetic oligonucleotide
  Antisense strand to SEQ ID NO: 529663
ucugugacuaaggauaucu

SEQ ID NO: 529665 - RNA, 19 nt, Artificial Sequence
  Description of Artificial Sequence: Synthetic oligonucleotide
  Sense strand starting at position 1570 of SEQ ID NO: 318008
cugagugaacaguaagcua

SEQ ID NO: 529666 - RNA, 19 nt, Artificial Sequence
  Description of Artificial Sequence: Synthetic oligonucleotide
  Antisense strand to SEQ ID NO: 529665
uagcuuacuguucacucag

SEQ ID NO: 529667 - RNA, 19 nt, Artificial Sequence
  Description of Artificial Sequence: Synthetic oligonucleotide
  Sense strand starting at position 1573 of SEQ ID NO: 318008
agugaacaguaagcuaaua

SEQ ID NO: 529668 - RNA, 19 nt, Artificial Sequence
  Description of Artificial Sequence: Synthetic oligonucleotide
  Antisense strand to SEQ ID NO: 529667
uauuagcuuacuguucacu

SEQ ID NO: 529669 - RNA, 19 nt, Artificial Sequence
  Description of Artificial Sequence: Synthetic oligonucleotide
  Sense strand starting at position 1668 of SEQ ID NO: 318008
ucagcaugauuuguaguau

SEQ ID NO: 529670 - RNA, 19 nt, Artificial Sequence
  Description of Artificial Sequence: Synthetic oligonucleotide
  Antisense strand to SEQ ID NO: 529669
auacuacaaaucaugcuga

SEQ ID NO: 529671 - RNA, 19 nt, Artificial Sequence
  Description of Artificial Sequence: Synthetic oligonucleotide
  Sense strand starting at position 1712 of SEQ ID NO: 318008
ugccaaaguugacugacua

SEQ ID NO: 529672 - RNA, 19 nt, Artificial Sequence
  Description of Artificial Sequence: Synthetic oligonucleotide
  Antisense strand to SEQ ID NO: 529671
uagucagucaacuuuggca

SEQ ID NO: 529673 - RNA, 19 nt, Artificial Sequence
  Description of Artificial Sequence: Synthetic oligonucleotide
  Sense strand starting at position 1850 of SEQ ID NO: 318008
cuuggauguagcgaauaca

SEQ ID NO: 529674 - RNA, 19 nt, Artificial Sequence
  Description of Artificial Sequence: Synthetic oligonucleotide
  Antisense strand to SEQ ID NO: 529673
uguauucgcuacauccaag

SEQ ID NO: 529675 - RNA, 19 nt, Artificial Sequence
  Description of Artificial Sequence: Synthetic oligonucleotide
  Sense strand starting at position 1853 of SEQ ID NO: 318008
ggauguagcgaauacaguu

SEQ ID NO: 529676 - RNA, 19 nt, Artificial Sequence
  Description of Artificial Sequence: Synthetic oligonucleotide
  Antisense strand to SEQ ID NO: 529675
aacuguauucgcuacaucc

SEQ ID NO: 529677 - RNA, 19 nt, Artificial Sequence
  Description of Artificial Sequence: Synthetic oligonucleotide
  Sense strand starting at position 2700 of SEQ ID NO: 318008
uggcuuugcuagccauuua

SEQ ID NO: 529678 - RNA, 19 nt, Artificial Sequence
  Description of Artificial Sequence: Synthetic oligonucleotide
  Antisense strand to SEQ ID NO: 529677
uaaauggcuagcaaagcca

SEQ ID NO: 529679 - RNA, 19 nt, Artificial Sequence
  Description of Artificial Sequence: Synthetic oligonucleotide
  Sense strand starting at position 2750 of SEQ ID NO: 318008
cagucuaacggagagagua

SEQ ID NO: 529680 - RNA, 19 nt, Artificial Sequence
  Description of Artificial Sequence: Synthetic oligonucleotide
  Antisense strand to SEQ ID NO: 529679
uacucucuccguuagacug

SEQ ID NO: 529681 - RNA, 19 nt, Artificial Sequence
  Description of Artificial Sequence: Synthetic oligonucleotide
  Sense strand starting at position 2933 of SEQ ID NO: 318008
gcuguugcugugucugaca

SEQ ID NO: 529682 - RNA, 19 nt, Artificial Sequence
  Description of Artificial Sequence: Synthetic oligonucleotide
  Antisense strand to SEQ ID NO: 529681
ugucagacacagcaacagc

SEQ ID NO: 529683 - RNA, 19 nt, Artificial Sequence
  Description of Artificial Sequence: Synthetic oligonucleotide
  Sense strand starting at position 3006 of SEQ ID NO: 318008
uuuacaaguuacucagaga

SEQ ID NO: 529684 - RNA, 19 nt, Artificial Sequence
  Description of Artificial Sequence: Synthetic oligonucleotide
  Antisense strand to SEQ ID NO: 529683
ucucugaguaacuuguaaa

SEQ ID NO: 529685 - RNA, 19 nt, Artificial Sequence
  Description of Artificial Sequence: Synthetic oligonucleotide
  Sense strand starting at position 3081 of SEQ ID NO: 318008
gugcaaaccugaccuaaug

SEQ ID NO: 529686 - RNA, 19 nt, Artificial Sequence
  Description of Artificial Sequence: Synthetic oligonucleotide
  Antisense strand to SEQ ID NO: 529685
cauuaggucagguuugcac

SEQ ID NO: 529687 - RNA, 19 nt, Artificial Sequence
  Description of Artificial Sequence: Synthetic oligonucleotide
  Sense strand starting at position 3119 of SEQ ID NO: 318008
cccuaaucaggcugaaaua

SEQ ID NO: 529688 - RNA, 19 nt, Artificial Sequence
  Description of Artificial Sequence: Synthetic oligonucleotide
  Antisense strand to SEQ ID NO: 529687
uauuucagccugauuaggg

SEQ ID NO: 529689 - RNA, 19 nt, Artificial Sequence
  Description of Artificial Sequence: Synthetic oligonucleotide
  Sense strand starting at position 3155 of SEQ ID NO: 318008
uuuccaugggccuacagau

SEQ ID NO: 529690 - RNA, 19 nt, Artificial Sequence
  Description of Artificial Sequence: Synthetic oligonucleotide
  Antisense strand to SEQ ID NO: 529689
aucuguaggcccauggaaa

SEQ ID NO: 529691 - RNA, 19 nt, Artificial Sequence
  Description of Artificial Sequence: Synthetic oligonucleotide
  Sense strand starting at position 3397 of SEQ ID NO: 318008
cauggagucguucauagga

SEQ ID NO: 529692 - RNA, 19 nt, Artificial Sequence
  Description of Artificial Sequence: Synthetic oligonucleotide
  Antisense strand to SEQ ID NO: 529691
uccuaugaacgacuccaug

SEQ ID NO: 529693 - RNA, 19 nt, Artificial Sequence
  Description of Artificial Sequence: Synthetic oligonucleotide
  Sense strand starting at position 3434 of SEQ ID NO: 318008
augaacacacuuugugaga

SEQ ID NO: 529694 - RNA, 19 nt, Artificial Sequence
  Description of Artificial Sequence: Synthetic oligonucleotide
  Antisense strand to SEQ ID NO: 529693
ucucacaaaguguguucau

SEQ ID NO: 529695 - RNA, 19 nt, Artificial Sequence
  Description of Artificial Sequence: Synthetic oligonucleotide
  Sense strand starting at position 3435 of SEQ ID NO: 318008
ugaacacacuuugugagau

SEQ ID NO: 529696 - RNA, 19 nt, Artificial Sequence
  Description of Artificial Sequence: Synthetic oligonucleotide
  Antisense strand to SEQ ID NO: 529695
aucucacaaaguguguuca

SEQ ID NO: 529697 - RNA, 19 nt, Artificial Sequence
  Description of Artificial Sequence: Synthetic oligonucleotide
  Sense strand starting at position 3457 of SEQ ID NO: 318008
acgugagaaacaugcagau

SEQ ID NO: 529698 - RNA, 19 nt, Artificial Sequence
  Description of Artificial Sequence: Synthetic oligonucleotide
  Antisense strand to SEQ ID NO: 529697
aucugcauguuucucacgu

SEQ ID NO: 529699 - RNA, 19 nt, Artificial Sequence
  Description of Artificial Sequence: Synthetic oligonucleotide
  Sense strand starting at position 3559 of SEQ ID NO: 318008
aucucacacuuugugagau

SEQ ID NO: 529700 - RNA, 19 nt, Artificial Sequence
  Description of Artificial Sequence: Synthetic oligonucleotide
  Antisense strand to SEQ ID NO: 529699
aucucacaaagugugagau

SEQ ID NO: 529701 - RNA, 19 nt, Artificial Sequence
  Description of Artificial Sequence: Synthetic oligonucleotide
  Sense strand starting at position 3779 of SEQ ID NO: 318008
auaaauaugaguugugguu

SEQ ID NO: 529702 - RNA, 19 nt, Artificial Sequence
  Description of Artificial Sequence: Synthetic oligonucleotide
  Antisense strand to SEQ ID NO: 529701
aaccacaacucauauuuau

SEQ ID NO: 529703 - RNA, 19 nt, Artificial Sequence
  Description of Artificial Sequence: Synthetic oligonucleotide
  Sense strand starting at position 3912 of SEQ ID NO: 318008
ccuuuacuccuaggugaac

SEQ ID NO: 529704 - RNA, 19 nt, Artificial Sequence
  Description of Artificial Sequence: Synthetic oligonucleotide
  Antisense strand to SEQ ID NO: 529703
guucaccuaggaguaaagg

SEQ ID NO: 529705 - RNA, 19 nt, Artificial Sequence
  Description of Artificial Sequence: Synthetic oligonucleotide
  Sense strand starting at position 3913 of SEQ ID NO: 318008
cuuuacuccuaggugaaca

SEQ ID NO: 529706 - RNA, 19 nt, Artificial Sequence
  Description of Artificial Sequence: Synthetic oligonucleotide
  Antisense strand to SEQ ID NO: 529705
uguucaccuaggaguaaag

SEQ ID NO: 529707 - RNA, 19 nt, Artificial Sequence
  Description of Artificial Sequence: Synthetic oligonucleotide
  Sense strand starting at position 3923 of SEQ ID NO: 318008
aggugaacaggcuauguaa

SEQ ID NO: 529708 - RNA, 19 nt, Artificial Sequence
  Description of Artificial Sequence: Synthetic oligonucleotide
  Antisense strand to SEQ ID NO: 529707
uuacauagccuguucaccu

SEQ ID NO: 529709 - RNA, 19 nt, Artificial Sequence
  Description of Artificial Sequence: Synthetic oligonucleotide
  Sense strand starting at position 3947 of SEQ ID NO: 318008
gcuggaaaccuccagcaga

SEQ ID NO: 529710 - RNA, 19 nt, Artificial Sequence
  Description of Artificial Sequence: Synthetic oligonucleotide
  Antisense strand to SEQ ID NO: 529709
ucugcuggagguuuccagc

SEQ ID NO: 529711 - RNA, 19 nt, Artificial Sequence
  Description of Artificial Sequence: Synthetic oligonucleotide
  Sense strand starting at position 89 of SEQ ID NO: 318009
aguaaacugugucuaagaa

SEQ ID NO: 529712 - RNA, 19 nt, Artificial Sequence
  Description of Artificial Sequence: Synthetic oligonucleotide
  Antisense strand to SEQ ID NO: 529711
uucuuagacacaguuuacu

SEQ ID NO: 529713 - RNA, 19 nt, Artificial Sequence
  Description of Artificial Sequence: Synthetic oligonucleotide
  Sense strand starting at position 90 of SEQ ID NO: 318009
guaaacugugucuaagaag

SEQ ID NO: 529714 - RNA, 19 nt, Artificial Sequence
  Description of Artificial Sequence: Synthetic oligonucleotide
  Antisense strand to SEQ ID NO: 529713
cuucuuagacacaguuuac

SEQ ID NO: 529715 - RNA, 19 nt, Artificial Sequence
  Description of Artificial Sequence: Synthetic oligonucleotide
  Sense strand starting at position 113 of SEQ ID NO: 318009
agacuuaagccuuaguauc

SEQ ID NO: 529716 - RNA, 19 nt, Artificial Sequence
  Description of Artificial Sequence: Synthetic oligonucleotide
  Antisense strand to SEQ ID NO: 529715
gauacuaaggcuuaagucu

SEQ ID NO: 529717 - RNA, 19 nt, Artificial Sequence
  Description of Artificial Sequence: Synthetic oligonucleotide
  Sense strand starting at position 125 of SEQ ID NO: 318009
uaguaucuauguuuggaaa

SEQ ID NO: 529718 - RNA, 19 nt, Artificial Sequence
  Description of Artificial Sequence: Synthetic oligonucleotide
  Antisense strand to SEQ ID NO: 529717
uuuccaaacauagauacua

SEQ ID NO: 529719 - RNA, 19 nt, Artificial Sequence
  Description of Artificial Sequence: Synthetic oligonucleotide
  Sense strand starting at position 167 of SEQ ID NO: 318009
uugcaauuacgaggaugau

SEQ ID NO: 529720 - RNA, 19 nt, Artificial Sequence
  Description of Artificial Sequence: Synthetic oligonucleotide
  Antisense strand to SEQ ID NO: 529719
aucauccucguaauugcaa

SEQ ID NO: 529721 - RNA, 19 nt, Artificial Sequence
  Description of Artificial Sequence: Synthetic oligonucleotide
  Sense strand starting at position 168 of SEQ ID NO: 318009
ugcaauuacgaggaugauu

SEQ ID NO: 529722 - RNA, 19 nt, Artificial Sequence
  Description of Artificial Sequence: Synthetic oligonucleotide
  Antisense strand to SEQ ID NO: 529721
aaucauccucguaauugca

SEQ ID NO: 529723 - RNA, 19 nt, Artificial Sequence
  Description of Artificial Sequence: Synthetic oligonucleotide
  Sense strand starting at position 696 of SEQ ID NO: 318009
cugauugcuaaguaaaggu

SEQ ID NO: 529724 - RNA, 19 nt, Artificial Sequence
  Description of Artificial Sequence: Synthetic oligonucleotide
  Antisense strand to SEQ ID NO: 529723
accuuuacuuagcaaucag

SEQ ID NO: 529725 - RNA, 19 nt, Artificial Sequence
  Description of Artificial Sequence: Synthetic oligonucleotide
  Sense strand starting at position 766 of SEQ ID NO: 318009
cugggacuucuuuggauau

SEQ ID NO: 529726 - RNA, 19 nt, Artificial Sequence
  Description of Artificial Sequence: Synthetic oligonucleotide
  Antisense strand to SEQ ID NO: 529725
auauccaaagaagucccag

SEQ ID NO: 529727 - RNA, 19 nt, Artificial Sequence
  Description of Artificial Sequence: Synthetic oligonucleotide
  Sense strand starting at position 901 of SEQ ID NO: 318009
ggucacauuugguuaagcu

SEQ ID NO: 529728 - RNA, 19 nt, Artificial Sequence
  Description of Artificial Sequence: Synthetic oligonucleotide
  Antisense strand to SEQ ID NO: 529727
agcuuaaccaaaugugacc

SEQ ID NO: 529729 - RNA, 19 nt, Artificial Sequence
  Description of Artificial Sequence: Synthetic oligonucleotide
  Sense strand starting at position 909 of SEQ ID NO: 318009
uugguuaagcuuuauacac

SEQ ID NO: 529730 - RNA, 19 nt, Artificial Sequence
  Description of Artificial Sequence: Synthetic oligonucleotide
  Antisense strand to SEQ ID NO: 529729
guguauaaagcuuaaccaa

SEQ ID NO: 529731 - RNA, 19 nt, Artificial Sequence
  Description of Artificial Sequence: Synthetic oligonucleotide
  Sense strand starting at position 998 of SEQ ID NO: 318009
aaguaaggcaguuagguau

SEQ ID NO: 529732 - RNA, 19 nt, Artificial Sequence
  Description of Artificial Sequence: Synthetic oligonucleotide
  Antisense strand to SEQ ID NO: 529731
auaccuaacugccuuacuu

SEQ ID NO: 529733 - RNA, 19 nt, Artificial Sequence
  Description of Artificial Sequence: Synthetic oligonucleotide
  Sense strand starting at position 1132 of SEQ ID NO: 318009
ucaacauguuaacuuggau

SEQ ID NO: 529734 - RNA, 19 nt, Artificial Sequence
  Description of Artificial Sequence: Synthetic oligonucleotide
  Antisense strand to SEQ ID NO: 529733
auccaaguuaacauguuga

SEQ ID NO: 529735 - RNA, 19 nt, Artificial Sequence
  Description of Artificial Sequence: Synthetic oligonucleotide
  Sense strand starting at position 1595 of SEQ ID NO: 318009
agcuuugggcgacucguua

SEQ ID NO: 529736 - RNA, 19 nt, Artificial Sequence
  Description of Artificial Sequence: Synthetic oligonucleotide
  Antisense strand to SEQ ID NO: 529735
uaacgagucgcccaaagcu

SEQ ID NO: 529737 - RNA, 19 nt, Artificial Sequence
  Description of Artificial Sequence: Synthetic oligonucleotide
  Sense strand starting at position 1602 of SEQ ID NO: 318009
ggcgacucguuaacggaau

SEQ ID NO: 529738 - RNA, 19 nt, Artificial Sequence
  Description of Artificial Sequence: Synthetic oligonucleotide
  Antisense strand to SEQ ID NO: 529737
auuccguuaacgagucgcc

SEQ ID NO: 529739 - RNA, 19 nt, Artificial Sequence
  Description of Artificial Sequence: Synthetic oligonucleotide
  Sense strand starting at position 1890 of SEQ ID NO: 318009
guagguaugacacagcaca

SEQ ID NO: 529740 - RNA, 19 nt, Artificial Sequence
  Description of Artificial Sequence: Synthetic oligonucleotide
  Antisense strand to SEQ ID NO: 529739
ugugcugugucauaccuac

SEQ ID NO: 529741 - RNA, 19 nt, Artificial Sequence
  Description of Artificial Sequence: Synthetic oligonucleotide
  Sense strand starting at position 1952 of SEQ ID NO: 318009
gauuuaagcuuccucucgu

SEQ ID NO: 529742 - RNA, 19 nt, Artificial Sequence
  Description of Artificial Sequence: Synthetic oligonucleotide
  Antisense strand to SEQ ID NO: 529741
acgagaggaagcuuaaauc

SEQ ID NO: 529743 - RNA, 19 nt, Artificial Sequence
  Description of Artificial Sequence: Synthetic oligonucleotide
  Sense strand starting at position 1959 of SEQ ID NO: 318009
gcuuccucucgugauuuau

SEQ ID NO: 529744 - RNA, 19 nt, Artificial Sequence
  Description of Artificial Sequence: Synthetic oligonucleotide
  Antisense strand to SEQ ID NO: 529743
auaaaucacgagaggaagc

SEQ ID NO: 529745 - RNA, 19 nt, Artificial Sequence
  Description of Artificial Sequence: Synthetic oligonucleotide
  Sense strand starting at position 1961 of SEQ ID NO: 318009
uuccucucgugauuuaucu

SEQ ID NO: 529746 - RNA, 19 nt, Artificial Sequence
  Description of Artificial Sequence: Synthetic oligonucleotide
  Antisense strand to SEQ ID NO: 529745
agauaaaucacgagaggaa

SEQ ID NO: 529747 - RNA, 19 nt, Artificial Sequence
  Description of Artificial Sequence: Synthetic oligonucleotide
  Sense strand starting at position 2074 of SEQ ID NO: 318009
ggcucuugccggaaaucgu

SEQ ID NO: 529748 - RNA, 19 nt, Artificial Sequence
  Description of Artificial Sequence: Synthetic oligonucleotide
  Antisense strand to SEQ ID NO: 529747
acgauuuccggcaagagcc

SEQ ID NO: 529749 - RNA, 19 nt, Artificial Sequence
  Description of Artificial Sequence: Synthetic oligonucleotide
  Sense strand starting at position 2475 of SEQ ID NO: 318009
gggcuugugcuggagagaa

SEQ ID NO: 529750 - RNA, 19 nt, Artificial Sequence
  Description of Artificial Sequence: Synthetic oligonucleotide
  Antisense strand to SEQ ID NO: 529749
uucucuccagcacaagccc

SEQ ID NO: 529751 - RNA, 19 nt, Artificial Sequence
  Description of Artificial Sequence: Synthetic oligonucleotide
  Sense strand starting at position 2531 of SEQ ID NO: 318009
gguccuuucgcgccuugau

SEQ ID NO: 529752 - RNA, 19 nt, Artificial Sequence
  Description of Artificial Sequence: Synthetic oligonucleotide
  Antisense strand to SEQ ID NO: 529751
aucaaggcgcgaaaggacc

SEQ ID NO: 529753 - RNA, 19 nt, Artificial Sequence
  Description of Artificial Sequence: Synthetic oligonucleotide
  Sense strand starting at position 2847 of SEQ ID NO: 318009
uagucauuuggaggucguu

SEQ ID NO: 529754 - RNA, 19 nt, Artificial Sequence
  Description of Artificial Sequence: Synthetic oligonucleotide
  Antisense strand to SEQ ID NO: 529753
aacgaccuccaaaugacua

SEQ ID NO: 529755 - RNA, 19 nt, Artificial Sequence
  Description of Artificial Sequence: Synthetic oligonucleotide
  Sense strand starting at position 2867 of SEQ ID NO: 318009
cagccuucugcgccuugaa

SEQ ID NO: 529756 - RNA, 19 nt, Artificial Sequence
  Description of Artificial Sequence: Synthetic oligonucleotide
  Antisense strand to SEQ ID NO: 529755
uucaaggcgcagaaggcug

SEQ ID NO: 529757 - RNA, 19 nt, Artificial Sequence
  Description of Artificial Sequence: Synthetic oligonucleotide
  Sense strand starting at position 2869 of SEQ ID NO: 318009
gccuucugcgccuugaaga

SEQ ID NO: 529758 - RNA, 19 nt, Artificial Sequence
  Description of Artificial Sequence: Synthetic oligonucleotide
  Antisense strand to SEQ ID NO: 529757
ucuucaaggcgcagaaggc

SEQ ID NO: 529759 - RNA, 19 nt, Artificial Sequence
  Description of Artificial Sequence: Synthetic oligonucleotide
  Sense strand starting at position 2899 of SEQ ID NO: 318009
gggugaugaucccuggauc

SEQ ID NO: 529760 - RNA, 19 nt, Artificial Sequence
  Description of Artificial Sequence: Synthetic oligonucleotide
  Antisense strand to SEQ ID NO: 529759
gauccagggaucaucaccc

SEQ ID NO: 529761 - RNA, 19 nt, Artificial Sequence
  Description of Artificial Sequence: Synthetic oligonucleotide
  Sense strand starting at position 2900 of SEQ ID NO: 318009
ggugaugaucccuggaucu

SEQ ID NO: 529762 - RNA, 19 nt, Artificial Sequence
  Description of Artificial Sequence: Synthetic oligonucleotide
  Antisense strand to SEQ ID NO: 529761
agauccagggaucaucacc

SEQ ID NO: 529763 - RNA, 19 nt, Artificial Sequence
  Description of Artificial Sequence: Synthetic oligonucleotide
  Sense strand starting at position 2934 of SEQ ID NO: 318009
ugaccacuuccugggagau

SEQ ID NO: 529764 - RNA, 19 nt, Artificial Sequence
  Description of Artificial Sequence: Synthetic oligonucleotide
  Antisense strand to SEQ ID NO: 529763
aucucccaggaagugguca

SEQ ID NO: 529765 - RNA, 19 nt, Artificial Sequence
  Description of Artificial Sequence: Synthetic oligonucleotide
  Sense strand starting at position 2935 of SEQ ID NO: 318009
gaccacuuccugggagauu

SEQ ID NO: 529766 - RNA, 19 nt, Artificial Sequence
  Description of Artificial Sequence: Synthetic oligonucleotide
  Antisense strand to SEQ ID NO: 529765
aaucucccaggaagugguc

SEQ ID NO: 529767 - RNA, 19 nt, Artificial Sequence
  Description of Artificial Sequence: Synthetic oligonucleotide
  Sense strand starting at position 3014 of SEQ ID NO: 318009
ggaagcauagcugaccuua

SEQ ID NO: 529768 - RNA, 19 nt, Artificial Sequence
  Description of Artificial Sequence: Synthetic oligonucleotide
  Antisense strand to SEQ ID NO: 529767
uaaggucagcuaugcuucc

SEQ ID NO: 529769 - RNA, 19 nt, Artificial Sequence
  Description of Artificial Sequence: Synthetic oligonucleotide
  Sense strand starting at position 3138 of SEQ ID NO: 318009
gauaguugccauuaacuga

SEQ ID NO: 529770 - RNA, 19 nt, Artificial Sequence
  Description of Artificial Sequence: Synthetic oligonucleotide
  Antisense strand to SEQ ID NO: 529769
ucaguuaauggcaacuauc

SEQ ID NO: 529771 - RNA, 19 nt, Artificial Sequence
  Description of Artificial Sequence: Synthetic oligonucleotide
  Sense strand starting at position 3223 of SEQ ID NO: 318009
guuagauuauuaucaccau

SEQ ID NO: 529772 - RNA, 19 nt, Artificial Sequence
  Description of Artificial Sequence: Synthetic oligonucleotide
  Antisense strand to SEQ ID NO: 529771
auggugauaauaaucuaac

SEQ ID NO: 529773 - RNA, 19 nt, Artificial Sequence
  Description of Artificial Sequence: Synthetic oligonucleotide
  Sense strand starting at position 3375 of SEQ ID NO: 318009
uccuguucuuccucgauuu

SEQ ID NO: 529774 - RNA, 19 nt, Artificial Sequence
  Description of Artificial Sequence: Synthetic oligonucleotide
  Antisense strand to SEQ ID NO: 529773
aaaucgaggaagaacagga

SEQ ID NO: 529775 - RNA, 19 nt, Artificial Sequence
  Description of Artificial Sequence: Synthetic oligonucleotide
  Sense strand starting at position 3416 of SEQ ID NO: 318009
agugucugaaaguauccau

SEQ ID NO: 529776 - RNA, 19 nt, Artificial Sequence
  Description of Artificial Sequence: Synthetic oligonucleotide
  Antisense strand to SEQ ID NO: 529775
auggauacuuucagacacu

SEQ ID NO: 529777 - RNA, 19 nt, Artificial Sequence
  Description of Artificial Sequence: Synthetic oligonucleotide
  Sense strand starting at position 3507 of SEQ ID NO: 318009
cauugugaugcagaauuaa

SEQ ID NO: 529778 - RNA, 19 nt, Artificial Sequence
  Description of Artificial Sequence: Synthetic oligonucleotide
  Antisense strand to SEQ ID NO: 529777
uuaauucugcaucacaaug

SEQ ID NO: 529779 - RNA, 19 nt, Artificial Sequence
  Description of Artificial Sequence: Synthetic oligonucleotide
  Sense strand starting at position 3657 of SEQ ID NO: 318009
guaguuguugugaggguau

SEQ ID NO: 529780 - RNA, 19 nt, Artificial Sequence
  Description of Artificial Sequence: Synthetic oligonucleotide
  Antisense strand to SEQ ID NO: 529779
auacccucacaacaacuac

SEQ ID NO: 529781 - RNA, 19 nt, Artificial Sequence
  Description of Artificial Sequence: Synthetic oligonucleotide
  Sense strand starting at position 3690 of SEQ ID NO: 318009
gguagaacaucuguugauu

SEQ ID NO: 529782 - RNA, 19 nt, Artificial Sequence
  Description of Artificial Sequence: Synthetic oligonucleotide
  Antisense strand to SEQ ID NO: 529781
aaucaacagauguucuacc

SEQ ID NO: 529783 - RNA, 19 nt, Artificial Sequence
  Description of Artificial Sequence: Synthetic oligonucleotide
  Sense strand starting at position 3731 of SEQ ID NO: 318009
aaguuaaguagugggaaua

SEQ ID NO: 529784 - RNA, 19 nt, Artificial Sequence
  Description of Artificial Sequence: Synthetic oligonucleotide
  Antisense strand to SEQ ID NO: 529783
uauucccacuacuuaacuu

SEQ ID NO: 529785 - RNA, 19 nt, Artificial Sequence
  Description of Artificial Sequence: Synthetic oligonucleotide
  Sense strand starting at position 3732 of SEQ ID NO: 318009
aguuaaguagugggaauau

SEQ ID NO: 529786 - RNA, 19 nt, Artificial Sequence
  Description of Artificial Sequence: Synthetic oligonucleotide
  Antisense strand to SEQ ID NO: 529785
auauucccacuacuuaacu

SEQ ID NO: 529787 - RNA, 19 nt, Artificial Sequence
  Description of Artificial Sequence: Synthetic oligonucleotide
  Sense strand starting at position 3753 of SEQ ID NO: 318009
agauuagguccucauucuu

SEQ ID NO: 529788 - RNA, 19 nt, Artificial Sequence
  Description of Artificial Sequence: Synthetic oligonucleotide
  Antisense strand to SEQ ID NO: 529787
aagaaugaggaccuaaucu

SEQ ID NO: 529789 - RNA, 19 nt, Artificial Sequence
  Description of Artificial Sequence: Synthetic oligonucleotide
  Sense strand starting at position 3836 of SEQ ID NO: 318009
aggaauugugguuauguag

SEQ ID NO: 529790 - RNA, 19 nt, Artificial Sequence
  Description of Artificial Sequence: Synthetic oligonucleotide
  Antisense strand to SEQ ID NO: 529789
cuacauaaccacaauuccu

SEQ ID NO: 529791 - RNA, 19 nt, Artificial Sequence
  Description of Artificial Sequence: Synthetic oligonucleotide
  Sense strand starting at position 311 of SEQ ID NO: 318010
auuguuugaacaggagauu

SEQ ID NO: 529792 - RNA, 19 nt, Artificial Sequence
  Description of Artificial Sequence: Synthetic oligonucleotide
  Antisense strand to SEQ ID NO: 529791
aaucuccuguucaaacaau

SEQ ID NO: 529793 - RNA, 19 nt, Artificial Sequence
  Description of Artificial Sequence: Synthetic oligonucleotide
  Sense strand starting at position 339 of SEQ ID NO: 318010
agcauuggguaucucagau

SEQ ID NO: 529794 - RNA, 19 nt, Artificial Sequence
  Description of Artificial Sequence: Synthetic oligonucleotide
  Antisense strand to SEQ ID NO: 529793
aucugagauacccaaugcu

SEQ ID NO: 529795 - RNA, 19 nt, Artificial Sequence
  Description of Artificial Sequence: Synthetic oligonucleotide
  Sense strand starting at position 433 of SEQ ID NO: 318010
ggugucauuuaauaaacca

SEQ ID NO: 529796 - RNA, 19 nt, Artificial Sequence
  Description of Artificial Sequence: Synthetic oligonucleotide
  Antisense strand to SEQ ID NO: 529795
ugguuuauuaaaugacacc

SEQ ID NO: 529797 - RNA, 19 nt, Artificial Sequence
  Description of Artificial Sequence: Synthetic oligonucleotide
  Sense strand starting at position 452 of SEQ ID NO: 318010
gccaacagauuagucaaau

SEQ ID NO: 529798 - RNA, 19 nt, Artificial Sequence
  Description of Artificial Sequence: Synthetic oligonucleotide
  Antisense strand to SEQ ID NO: 529797
auuugacuaaucuguuggc

SEQ ID NO: 529799 - RNA, 19 nt, Artificial Sequence
  Description of Artificial Sequence: Synthetic oligonucleotide
  Sense strand starting at position 653 of SEQ ID NO: 318010
ccugcaugucauggaagaa

SEQ ID NO: 529800 - RNA, 19 nt, Artificial Sequence
  Description of Artificial Sequence: Synthetic oligonucleotide
  Antisense strand to SEQ ID NO: 529799
uucuuccaugacaugcagg

SEQ ID NO: 529801 - RNA, 19 nt, Artificial Sequence
  Description of Artificial Sequence: Synthetic oligonucleotide
  Sense strand starting at position 698 of SEQ ID NO: 318010
uggaauuuaucauagccau

SEQ ID NO: 529802 - RNA, 19 nt, Artificial Sequence
  Description of Artificial Sequence: Synthetic oligonucleotide
  Antisense strand to SEQ ID NO: 529801
auggcuaugauaaauucca

SEQ ID NO: 529803 - RNA, 19 nt, Artificial Sequence
  Description of Artificial Sequence: Synthetic oligonucleotide
  Sense strand starting at position 768 of SEQ ID NO: 318010
gcuucuuaaagaggugauu

SEQ ID NO: 529804 - RNA, 19 nt, Artificial Sequence
  Description of Artificial Sequence: Synthetic oligonucleotide
  Antisense strand to SEQ ID NO: 529803
aaucaccucuuuaagaagc

SEQ ID NO: 529805 - RNA, 19 nt, Artificial Sequence
  Description of Artificial Sequence: Synthetic oligonucleotide
  Sense strand starting at position 863 of SEQ ID NO: 318010
ggauaacucagcuguugag

SEQ ID NO: 529806 - RNA, 19 nt, Artificial Sequence
  Description of Artificial Sequence: Synthetic oligonucleotide
  Antisense strand to SEQ ID NO: 529805
cucaacagcugaguuaucc

SEQ ID NO: 529807 - RNA, 19 nt, Artificial Sequence
  Description of Artificial Sequence: Synthetic oligonucleotide
  Sense strand starting at position 911 of SEQ ID NO: 318010
gcaaaugaagauugcucau

SEQ ID NO: 529808 - RNA, 19 nt, Artificial Sequence
  Description of Artificial Sequence: Synthetic oligonucleotide
  Antisense strand to SEQ ID NO: 529807
augagcaaucuucauuugc

SEQ ID NO: 529809 - RNA, 19 nt, Artificial Sequence
  Description of Artificial Sequence: Synthetic oligonucleotide
  Sense strand starting at position 914 of SEQ ID NO: 318010
aaugaagauugcucaugag

SEQ ID NO: 529810 - RNA, 19 nt, Artificial Sequence
  Description of Artificial Sequence: Synthetic oligonucleotide
  Antisense strand to SEQ ID NO: 529809
cucaugagcaaucuucauu

SEQ ID NO: 529811 - RNA, 19 nt, Artificial Sequence
  Description of Artificial Sequence: Synthetic oligonucleotide
  Sense strand starting at position 999 of SEQ ID NO: 318010
agggaaauguuucccagua

SEQ ID NO: 529812 - RNA, 19 nt, Artificial Sequence
  Description of Artificial Sequence: Synthetic oligonucleotide
  Antisense strand to SEQ ID NO: 529811
uacugggaaacauuucccu

SEQ ID NO: 529813 - RNA, 19 nt, Artificial Sequence
  Description of Artificial Sequence: Synthetic oligonucleotide
  Sense strand starting at position 1000 of SEQ ID NO: 318010
gggaaauguuucccaguau

SEQ ID NO: 529814 - RNA, 19 nt, Artificial Sequence
  Description of Artificial Sequence: Synthetic oligonucleotide
  Antisense strand to SEQ ID NO: 529813
auacugggaaacauuuccc

SEQ ID NO: 529815 - RNA, 19 nt, Artificial Sequence
  Description of Artificial Sequence: Synthetic oligonucleotide
  Sense strand starting at position 1011 of SEQ ID NO: 318010
cccaguauguuccuaaaua

SEQ ID NO: 529816 - RNA, 19 nt, Artificial Sequence
  Description of Artificial Sequence: Synthetic oligonucleotide
  Antisense strand to SEQ ID NO: 529815
uauuuaggaacauacuggg

SEQ ID NO: 529817 - RNA, 19 nt, Artificial Sequence
  Description of Artificial Sequence: Synthetic oligonucleotide
  Sense strand starting at position 1091 of SEQ ID NO: 318010
agcacucagccuuaguaau

SEQ ID NO: 529818 - RNA, 19 nt, Artificial Sequence
  Description of Artificial Sequence: Synthetic oligonucleotide
  Antisense strand to SEQ ID NO: 529817
auuacuaaggcugagugcu

SEQ ID NO: 529819 - RNA, 19 nt, Artificial Sequence
  Description of Artificial Sequence: Synthetic oligonucleotide
  Sense strand starting at position 1160 of SEQ ID NO: 318010
augaaaugaucugugucca

SEQ ID NO: 529820 - RNA, 19 nt, Artificial Sequence
  Description of Artificial Sequence: Synthetic oligonucleotide
  Antisense strand to SEQ ID NO: 529819
uggacacagaucauuucau

SEQ ID NO: 529821 - RNA, 19 nt, Artificial Sequence
  Description of Artificial Sequence: Synthetic oligonucleotide
  Sense strand starting at position 1161 of SEQ ID NO: 318010
ugaaaugaucuguguccag

SEQ ID NO: 529822 - RNA, 19 nt, Artificial Sequence
  Description of Artificial Sequence: Synthetic oligonucleotide
  Antisense strand to SEQ ID NO: 529821
cuggacacagaucauuuca

SEQ ID NO: 529823 - RNA, 19 nt, Artificial Sequence
  Description of Artificial Sequence: Synthetic oligonucleotide
  Sense strand starting at position 1172 of SEQ ID NO: 318010
guguccagcgaguuugagu

SEQ ID NO: 529824 - RNA, 19 nt, Artificial Sequence
  Description of Artificial Sequence: Synthetic oligonucleotide
  Antisense strand to SEQ ID NO: 529823
acucaaacucgcuggacac

SEQ ID NO: 529825 - RNA, 19 nt, Artificial Sequence
  Description of Artificial Sequence: Synthetic oligonucleotide
  Sense strand starting at position 1665 of SEQ ID NO: 318010
auacaauggucucccaaag

SEQ ID NO: 529826 - RNA, 19 nt, Artificial Sequence
  Description of Artificial Sequence: Synthetic oligonucleotide
  Antisense strand to SEQ ID NO: 529825
cuuugggagaccauuguau

SEQ ID NO: 529827 - RNA, 19 nt, Artificial Sequence
  Description of Artificial Sequence: Synthetic oligonucleotide
  Sense strand starting at position 1680 of SEQ ID NO: 318010
aaagguagagucgaagagu

SEQ ID NO: 529828 - RNA, 19 nt, Artificial Sequence
  Description of Artificial Sequence: Synthetic oligonucleotide
  Antisense strand to SEQ ID NO: 529827
acucuucgacucuaccuuu

SEQ ID NO: 529829 - RNA, 19 nt, Artificial Sequence
  Description of Artificial Sequence: Synthetic oligonucleotide
  Sense strand starting at position 1683 of SEQ ID NO: 318010
gguagagucgaagaguauu

SEQ ID NO: 529830 - RNA, 19 nt, Artificial Sequence
  Description of Artificial Sequence: Synthetic oligonucleotide
  Antisense strand to SEQ ID NO: 529829
aauacucuucgacucuacc

SEQ ID NO: 529831 - RNA, 19 nt, Artificial Sequence
  Description of Artificial Sequence: Synthetic oligonucleotide
  Sense strand starting at position 1720 of SEQ ID NO: 318010
gguccuugugcuuuguagu

SEQ ID NO: 529832 - RNA, 19 nt, Artificial Sequence
  Description of Artificial Sequence: Synthetic oligonucleotide
  Antisense strand to SEQ ID NO: 529831
acuacaaagcacaaggacc

SEQ ID NO: 529833 - RNA, 19 nt, Artificial Sequence
  Description of Artificial Sequence: Synthetic oligonucleotide
  Sense strand starting at position 2162 of SEQ ID NO: 318010
cgagcaucuuggguaaaga

SEQ ID NO: 529834 - RNA, 19 nt, Artificial Sequence
  Description of Artificial Sequence: Synthetic oligonucleotide
  Antisense strand to SEQ ID NO: 529833
ucuuuacccaagaugcucg

SEQ ID NO: 529835 - RNA, 19 nt, Artificial Sequence
  Description of Artificial Sequence: Synthetic oligonucleotide
  Sense strand starting at position 2255 of SEQ ID NO: 318010
caguuaaaucucggagagu

SEQ ID NO: 529836 - RNA, 19 nt, Artificial Sequence
  Description of Artificial Sequence: Synthetic oligonucleotide
  Antisense strand to SEQ ID NO: 529835
acucuccgagauuuaacug

SEQ ID NO: 529837 - RNA, 19 nt, Artificial Sequence
  Description of Artificial Sequence: Synthetic oligonucleotide
  Sense strand starting at position 2376 of SEQ ID NO: 318010
auaaguugugaucacugca

SEQ ID NO: 529838 - RNA, 19 nt, Artificial Sequence
  Description of Artificial Sequence: Synthetic oligonucleotide
  Antisense strand to SEQ ID NO: 529837
ugcagugaucacaacuuau

SEQ ID NO: 529839 - RNA, 19 nt, Artificial Sequence
  Description of Artificial Sequence: Synthetic oligonucleotide
  Sense strand starting at position 2379 of SEQ ID NO: 318010
aguugugaucacugcagaa

SEQ ID NO: 529840 - RNA, 19 nt, Artificial Sequence
  Description of Artificial Sequence: Synthetic oligonucleotide
  Antisense strand to SEQ ID NO: 529839
uucugcagugaucacaacu

SEQ ID NO: 529841 - RNA, 19 nt, Artificial Sequence
  Description of Artificial Sequence: Synthetic oligonucleotide
  Sense strand starting at position 2784 of SEQ ID NO: 318010
cuuagagugcuggacgaga

SEQ ID NO: 529842 - RNA, 19 nt, Artificial Sequence
  Description of Artificial Sequence: Synthetic oligonucleotide
  Antisense strand to SEQ ID NO: 529841
ucucguccagcacucuaag

SEQ ID NO: 529843 - RNA, 19 nt, Artificial Sequence
  Description of Artificial Sequence: Synthetic oligonucleotide
  Sense strand starting at position 2938 of SEQ ID NO: 318010
acacaugguuccuuguuaa

SEQ ID NO: 529844 - RNA, 19 nt, Artificial Sequence
  Description of Artificial Sequence: Synthetic oligonucleotide
  Antisense strand to SEQ ID NO: 529843
uuaacaaggaaccaugugu

SEQ ID NO: 529845 - RNA, 19 nt, Artificial Sequence
  Description of Artificial Sequence: Synthetic oligonucleotide
  Sense strand starting at position 2941 of SEQ ID NO: 318010
caugguuccuuguuaagac

SEQ ID NO: 529846 - RNA, 19 nt, Artificial Sequence
  Description of Artificial Sequence: Synthetic oligonucleotide
  Antisense strand to SEQ ID NO: 529845
gucuuaacaaggaaccaug

SEQ ID NO: 529847 - RNA, 19 nt, Artificial Sequence
  Description of Artificial Sequence: Synthetic oligonucleotide
  Sense strand starting at position 3132 of SEQ ID NO: 318010
gagagaaauucuuugagca

SEQ ID NO: 529848 - RNA, 19 nt, Artificial Sequence
  Description of Artificial Sequence: Synthetic oligonucleotide
  Antisense strand to SEQ ID NO: 529847
ugcucaaagaauuucucuc

SEQ ID NO: 529849 - RNA, 19 nt, Artificial Sequence
  Description of Artificial Sequence: Synthetic oligonucleotide
  Sense strand starting at position 3133 of SEQ ID NO: 318010
agagaaauucuuugagcag

SEQ ID NO: 529850 - RNA, 19 nt, Artificial Sequence
  Description of Artificial Sequence: Synthetic oligonucleotide
  Antisense strand to SEQ ID NO: 529849
cugcucaaagaauuucucu

SEQ ID NO: 529851 - RNA, 19 nt, Artificial Sequence
  Description of Artificial Sequence: Synthetic oligonucleotide
  Sense strand starting at position 3136 of SEQ ID NO: 318010
gaaauucuuugagcaguuu

SEQ ID NO: 529852 - RNA, 19 nt, Artificial Sequence
  Description of Artificial Sequence: Synthetic oligonucleotide
  Antisense strand to SEQ ID NO: 529851
aaacugcucaaagaauuuc

SEQ ID NO: 529853 - RNA, 19 nt, Artificial Sequence
  Description of Artificial Sequence: Synthetic oligonucleotide
  Sense strand starting at position 3148 of SEQ ID NO: 318010
gcaguuuccagcguugagu

SEQ ID NO: 529854 - RNA, 19 nt, Artificial Sequence
  Description of Artificial Sequence: Synthetic oligonucleotide
  Antisense strand to SEQ ID NO: 529853
acucaacgcuggaaacugc

SEQ ID NO: 529855 - RNA, 19 nt, Artificial Sequence
  Description of Artificial Sequence: Synthetic oligonucleotide
  Sense strand starting at position 3349 of SEQ ID NO: 318010
cguuauuucuuccucuguu

SEQ ID NO: 529856 - RNA, 19 nt, Artificial Sequence
  Description of Artificial Sequence: Synthetic oligonucleotide
  Antisense strand to SEQ ID NO: 529855
aacagaggaagaaauaacg

SEQ ID NO: 529857 - RNA, 19 nt, Artificial Sequence
  Description of Artificial Sequence: Synthetic oligonucleotide
  Sense strand starting at position 3350 of SEQ ID NO: 318010
guuauuucuuccucuguuu

SEQ ID NO: 529858 - RNA, 19 nt, Artificial Sequence
  Description of Artificial Sequence: Synthetic oligonucleotide
  Antisense strand to SEQ ID NO: 529857
aaacagaggaagaaauaac

SEQ ID NO: 529859 - RNA, 19 nt, Artificial Sequence
  Description of Artificial Sequence: Synthetic oligonucleotide
  Sense strand starting at position 3686 of SEQ ID NO: 318010
gccucuuaccaguaggauu

SEQ ID NO: 529860 - RNA, 19 nt, Artificial Sequence
  Description of Artificial Sequence: Synthetic oligonucleotide
  Antisense strand to SEQ ID NO: 529859
aauccuacugguaagaggc

SEQ ID NO: 529861 - RNA, 19 nt, Artificial Sequence
  Description of Artificial Sequence: Synthetic oligonucleotide
  Sense strand starting at position 3763 of SEQ ID NO: 318010
gcucccacagucuagaauu

SEQ ID NO: 529862 - RNA, 19 nt, Artificial Sequence
  Description of Artificial Sequence: Synthetic oligonucleotide
  Antisense strand to SEQ ID NO: 529861
aauucuagacugugggagc

SEQ ID NO: 529863 - RNA, 19 nt, Artificial Sequence
  Description of Artificial Sequence: Synthetic oligonucleotide
  Sense strand starting at position 3784 of SEQ ID NO: 318010
caugauauucugcauagug

SEQ ID NO: 529864 - RNA, 19 nt, Artificial Sequence
  Description of Artificial Sequence: Synthetic oligonucleotide
  Antisense strand to SEQ ID NO: 529863
cacuaugcagaauaucaug

SEQ ID NO: 529865 - RNA, 19 nt, Artificial Sequence
  Description of Artificial Sequence: Synthetic oligonucleotide
  Sense strand starting at position 3786 of SEQ ID NO: 318010
ugauauucugcauagugac

SEQ ID NO: 529866 - RNA, 19 nt, Artificial Sequence
  Description of Artificial Sequence: Synthetic oligonucleotide
  Antisense strand to SEQ ID NO: 529865
gucacuaugcagaauauca

SEQ ID NO: 529867 - RNA, 19 nt, Artificial Sequence
  Description of Artificial Sequence: Synthetic oligonucleotide
  Sense strand starting at position 3836 of SEQ ID NO: 318010
uuaauaugaguuggauaca

SEQ ID NO: 529868 - RNA, 19 nt, Artificial Sequence
  Description of Artificial Sequence: Synthetic oligonucleotide
  Antisense strand to SEQ ID NO: 529867
uguauccaacucauauuaa

SEQ ID NO: 529869 - RNA, 19 nt, Artificial Sequence
  Description of Artificial Sequence: Synthetic oligonucleotide
  Sense strand starting at position 3975 of SEQ ID NO: 318010
acagucaaaccuugaggua

SEQ ID NO: 529870 - RNA, 19 nt, Artificial Sequence
  Description of Artificial Sequence: Synthetic oligonucleotide
  Antisense strand to SEQ ID NO: 529869
uaccucaagguuugacugu

SEQ ID NO: 529871 - RNA, 19 nt, Artificial Sequence
  Description of Artificial Sequence: Synthetic oligonucleotide
  Sense strand starting at position 407 of SEQ ID NO: 318011
gcccguaguaguguuugca

SEQ ID NO: 529872 - RNA, 19 nt, Artificial Sequence
  Description of Artificial Sequence: Synthetic oligonucleotide
  Antisense strand to SEQ ID NO: 529871
ugcaaacacuacuacgggc

SEQ ID NO: 529873 - RNA, 19 nt, Artificial Sequence
  Description of Artificial Sequence: Synthetic oligonucleotide
  Sense strand starting at position 574 of SEQ ID NO: 318011
gcugacuucuuauuagaga

SEQ ID NO: 529874 - RNA, 19 nt, Artificial Sequence
  Description of Artificial Sequence: Synthetic oligonucleotide
  Antisense strand to SEQ ID NO: 529873
ucucuaauaagaagucagc

SEQ ID NO: 529875 - RNA, 19 nt, Artificial Sequence
  Description of Artificial Sequence: Synthetic oligonucleotide
  Sense strand starting at position 635 of SEQ ID NO: 318011
cagagacaaccuuguaagu

SEQ ID NO: 529876 - RNA, 19 nt, Artificial Sequence
  Description of Artificial Sequence: Synthetic oligonucleotide
  Antisense strand to SEQ ID NO: 529875
acuuacaagguugucucug

SEQ ID NO: 529877 - RNA, 19 nt, Artificial Sequence
  Description of Artificial Sequence: Synthetic oligonucleotide
  Sense strand starting at position 665 of SEQ ID NO: 318011
ugaaauaggauaugugcuu

SEQ ID NO: 529878 - RNA, 19 nt, Artificial Sequence
  Description of Artificial Sequence: Synthetic oligonucleotide
  Antisense strand to SEQ ID NO: 529877
aagcacauauccuauuuca

SEQ ID NO: 529879 - RNA, 19 nt, Artificial Sequence
  Description of Artificial Sequence: Synthetic oligonucleotide
  Sense strand starting at position 689 of SEQ ID NO: 318011
aacacugugcuguagaauu

SEQ ID NO: 529880 - RNA, 19 nt, Artificial Sequence
  Description of Artificial Sequence: Synthetic oligonucleotide
  Antisense strand to SEQ ID NO: 529879
aauucuacagcacaguguu

SEQ ID NO: 529881 - RNA, 19 nt, Artificial Sequence
  Description of Artificial Sequence: Synthetic oligonucleotide
  Sense strand starting at position 699 of SEQ ID NO: 318011
uguagaauucgugcaucgu

SEQ ID NO: 529882 - RNA, 19 nt, Artificial Sequence
  Description of Artificial Sequence: Synthetic oligonucleotide
  Antisense strand to SEQ ID NO: 529881
acgaugcacgaauucuaca

SEQ ID NO: 529883 - RNA, 19 nt, Artificial Sequence
  Description of Artificial Sequence: Synthetic oligonucleotide
  Sense strand starting at position 741 of SEQ ID NO: 318011
ugggacauuucucauccca

SEQ ID NO: 529884 - RNA, 19 nt, Artificial Sequence
  Description of Artificial Sequence: Synthetic oligonucleotide
  Antisense strand to SEQ ID NO: 529883
ugggaugagaaauguccca

SEQ ID NO: 529885 - RNA, 19 nt, Artificial Sequence
  Description of Artificial Sequence: Synthetic oligonucleotide
  Sense strand starting at position 844 of SEQ ID NO: 318011
aagucuuucggauggagga

SEQ ID NO: 529886 - RNA, 19 nt, Artificial Sequence
  Description of Artificial Sequence: Synthetic oligonucleotide
  Antisense strand to SEQ ID NO: 529885
uccuccauccgaaagacuu

SEQ ID NO: 529887 - RNA, 19 nt, Artificial Sequence
  Description of Artificial Sequence: Synthetic oligonucleotide
  Sense strand starting at position 983 of SEQ ID NO: 318011
acagccagccauuauaaga

SEQ ID NO: 529888 - RNA, 19 nt, Artificial Sequence
  Description of Artificial Sequence: Synthetic oligonucleotide
  Antisense strand to SEQ ID NO: 529887
ucuuauaauggcuggcugu

SEQ ID NO: 529889 - RNA, 19 nt, Artificial Sequence
  Description of Artificial Sequence: Synthetic oligonucleotide
  Sense strand starting at position 1018 of SEQ ID NO: 318011
aggcuaugauucccuacaa

SEQ ID NO: 529890 - RNA, 19 nt, Artificial Sequence
  Description of Artificial Sequence: Synthetic oligonucleotide
  Antisense strand to SEQ ID NO: 529889
uuguagggaaucauagccu

SEQ ID NO: 529891 - RNA, 19 nt, Artificial Sequence
  Description of Artificial Sequence: Synthetic oligonucleotide
  Sense strand starting at position 1019 of SEQ ID NO: 318011
ggcuaugauucccuacaau

SEQ ID NO: 529892 - RNA, 19 nt, Artificial Sequence
  Description of Artificial Sequence: Synthetic oligonucleotide
  Antisense strand to SEQ ID NO: 529891
auuguagggaaucauagcc

SEQ ID NO: 529893 - RNA, 19 nt, Artificial Sequence
  Description of Artificial Sequence: Synthetic oligonucleotide
  Sense strand starting at position 1077 of SEQ ID NO: 318011
ggcagauaacgguacauua

SEQ ID NO: 529894 - RNA, 19 nt, Artificial Sequence
  Description of Artificial Sequence: Synthetic oligonucleotide
  Antisense strand to SEQ ID NO: 529893
uaauguaccguuaucugcc

SEQ ID NO: 529895 - RNA, 19 nt, Artificial Sequence
  Description of Artificial Sequence: Synthetic oligonucleotide
  Sense strand starting at position 1100 of SEQ ID NO: 318011
uuuccagugggaggaauua

SEQ ID NO: 529896 - RNA, 19 nt, Artificial Sequence
  Description of Artificial Sequence: Synthetic oligonucleotide
  Antisense strand to SEQ ID NO: 529895
uaauuccucccacuggaaa

SEQ ID NO: 529897 - RNA, 19 nt, Artificial Sequence
  Description of Artificial Sequence: Synthetic oligonucleotide
  Sense strand starting at position 1592 of SEQ ID NO: 318011
ucccgugagcuguugcaaa

SEQ ID NO: 529898 - RNA, 19 nt, Artificial Sequence
  Description of Artificial Sequence: Synthetic oligonucleotide
  Antisense strand to SEQ ID NO: 529897
uuugcaacagcucacggga

SEQ ID NO: 529899 - RNA, 19 nt, Artificial Sequence
  Description of Artificial Sequence: Synthetic oligonucleotide
  Sense strand starting at position 1602 of SEQ ID NO: 318011
uguugcaaauaaucuugaa

SEQ ID NO: 529900 - RNA, 19 nt, Artificial Sequence
  Description of Artificial Sequence: Synthetic oligonucleotide
  Antisense strand to SEQ ID NO: 529899
uucaagauuauuugcaaca

SEQ ID NO: 529901 - RNA, 19 nt, Artificial Sequence
  Description of Artificial Sequence: Synthetic oligonucleotide
  Sense strand starting at position 1659 of SEQ ID NO: 318011
uccagaagcccuuguuuga

SEQ ID NO: 529902 - RNA, 19 nt, Artificial Sequence
  Description of Artificial Sequence: Synthetic oligonucleotide
  Antisense strand to SEQ ID NO: 529901
ucaaacaagggcuucugga

SEQ ID NO: 529903 - RNA, 19 nt, Artificial Sequence
  Description of Artificial Sequence: Synthetic oligonucleotide
  Sense strand starting at position 1670 of SEQ ID NO: 318011
uuguuugaugggcaauuga

SEQ ID NO: 529904 - RNA, 19 nt, Artificial Sequence
  Description of Artificial Sequence: Synthetic oligonucleotide
  Antisense strand to SEQ ID NO: 529903
ucaauugcccaucaaacaa

SEQ ID NO: 529905 - RNA, 19 nt, Artificial Sequence
  Description of Artificial Sequence: Synthetic oligonucleotide
  Sense strand starting at position 1871 of SEQ ID NO: 318011
gcuccuauuuaauaaggaa

SEQ ID NO: 529906 - RNA, 19 nt, Artificial Sequence
  Description of Artificial Sequence: Synthetic oligonucleotide
  Antisense strand to SEQ ID NO: 529905
uuccuuauuaaauaggagc

SEQ ID NO: 529907 - RNA, 19 nt, Artificial Sequence
  Description of Artificial Sequence: Synthetic oligonucleotide
  Sense strand starting at position 1977 of SEQ ID NO: 318011
guuagcaaugcccaggaau

SEQ ID NO: 529908 - RNA, 19 nt, Artificial Sequence
  Description of Artificial Sequence: Synthetic oligonucleotide
  Antisense strand to SEQ ID NO: 529907
auuccugggcauugcuaac

SEQ ID NO: 529909 - RNA, 19 nt, Artificial Sequence
  Description of Artificial Sequence: Synthetic oligonucleotide
  Sense strand starting at position 2012 of SEQ ID NO: 318011
aaucauugguagcuaugaa

SEQ ID NO: 529910 - RNA, 19 nt, Artificial Sequence
  Description of Artificial Sequence: Synthetic oligonucleotide
  Antisense strand to SEQ ID NO: 529909
uucauagcuaccaaugauu

SEQ ID NO: 529911 - RNA, 19 nt, Artificial Sequence
  Description of Artificial Sequence: Synthetic oligonucleotide
  Sense strand starting at position 2082 of SEQ ID NO: 318011
auuggcaaugaucagaguu

SEQ ID NO: 529912 - RNA, 19 nt, Artificial Sequence
  Description of Artificial Sequence: Synthetic oligonucleotide
  Antisense strand to SEQ ID NO: 529911
aacucugaucauugccaau

SEQ ID NO: 529913 - RNA, 19 nt, Artificial Sequence
  Description of Artificial Sequence: Synthetic oligonucleotide
  Sense strand starting at position 2118 of SEQ ID NO: 318011
gcauaaagugcuuacucac

SEQ ID NO: 529914 - RNA, 19 nt, Artificial Sequence
  Description of Artificial Sequence: Synthetic oligonucleotide
  Antisense strand to SEQ ID NO: 529913
gugaguaagcacuuuaugc

SEQ ID NO: 529915 - RNA, 19 nt, Artificial Sequence
  Description of Artificial Sequence: Synthetic oligonucleotide
  Sense strand starting at position 2295 of SEQ ID NO: 318011
caugaagguugcucucaca

SEQ ID NO: 529916 - RNA, 19 nt, Artificial Sequence
  Description of Artificial Sequence: Synthetic oligonucleotide
  Antisense strand to SEQ ID NO: 529915
ugugagagcaaccuucaug

SEQ ID NO: 529917 - RNA, 19 nt, Artificial Sequence
  Description of Artificial Sequence: Synthetic oligonucleotide
  Sense strand starting at position 2339 of SEQ ID NO: 318011
guguuuguuguugugaucu

SEQ ID NO: 529918 - RNA, 19 nt, Artificial Sequence
  Description of Artificial Sequence: Synthetic oligonucleotide
  Antisense strand to SEQ ID NO: 529917
agaucacaacaacaaacac

SEQ ID NO: 529919 - RNA, 19 nt, Artificial Sequence
  Description of Artificial Sequence: Synthetic oligonucleotide
  Sense strand starting at position 2597 of SEQ ID NO: 318011
guugguaacccuugaacag

SEQ ID NO: 529920 - RNA, 19 nt, Artificial Sequence
  Description of Artificial Sequence: Synthetic oligonucleotide
  Antisense strand to SEQ ID NO: 529919
cuguucaaggguuaccaac

SEQ ID NO: 529921 - RNA, 19 nt, Artificial Sequence
  Description of Artificial Sequence: Synthetic oligonucleotide
  Sense strand starting at position 2618 of SEQ ID NO: 318011
guuuaauauggaggcaaau

SEQ ID NO: 529922 - RNA, 19 nt, Artificial Sequence
  Description of Artificial Sequence: Synthetic oligonucleotide
  Antisense strand to SEQ ID NO: 529921
auuugccuccauauuaaac

SEQ ID NO: 529923 - RNA, 19 nt, Artificial Sequence
  Description of Artificial Sequence: Synthetic oligonucleotide
  Sense strand starting at position 2742 of SEQ ID NO: 318011
aguguuguaacucagacac

SEQ ID NO: 529924 - RNA, 19 nt, Artificial Sequence
  Description of Artificial Sequence: Synthetic oligonucleotide
  Antisense strand to SEQ ID NO: 529923
gugucugaguuacaacacu

SEQ ID NO: 529925 - RNA, 19 nt, Artificial Sequence
  Description of Artificial Sequence: Synthetic oligonucleotide
  Sense strand starting at position 2778 of SEQ ID NO: 318011
uuauaagacacggguugua

SEQ ID NO: 529926 - RNA, 19 nt, Artificial Sequence
  Description of Artificial Sequence: Synthetic oligonucleotide
  Antisense strand to SEQ ID NO: 529925
uacaacccgugucuuauaa

SEQ ID NO: 529927 - RNA, 19 nt, Artificial Sequence
  Description of Artificial Sequence: Synthetic oligonucleotide
  Sense strand starting at position 2791 of SEQ ID NO: 318011
guuguaacaguaggaaauc

SEQ ID NO: 529928 - RNA, 19 nt, Artificial Sequence
  Description of Artificial Sequence: Synthetic oligonucleotide
  Antisense strand to SEQ ID NO: 529927
gauuuccuacuguuacaac

SEQ ID NO: 529929 - RNA, 19 nt, Artificial Sequence
  Description of Artificial Sequence: Synthetic oligonucleotide
  Sense strand starting at position 2934 of SEQ ID NO: 318011
uccuuuaaacgugaaucau

SEQ ID NO: 529930 - RNA, 19 nt, Artificial Sequence
  Description of Artificial Sequence: Synthetic oligonucleotide
  Antisense strand to SEQ ID NO: 529929
augauucacguuuaaagga

SEQ ID NO: 529931 - RNA, 19 nt, Artificial Sequence
  Description of Artificial Sequence: Synthetic oligonucleotide
  Sense strand starting at position 3054 of SEQ ID NO: 318011
gcauacugcgaucaaggga

SEQ ID NO: 529932 - RNA, 19 nt, Artificial Sequence
  Description of Artificial Sequence: Synthetic oligonucleotide
  Antisense strand to SEQ ID NO: 529931
ucccuugaucgcaguaugc

SEQ ID NO: 529933 - RNA, 19 nt, Artificial Sequence
  Description of Artificial Sequence: Synthetic oligonucleotide
  Sense strand starting at position 3112 of SEQ ID NO: 318011
gacucucaucguuacuaga

SEQ ID NO: 529934 - RNA, 19 nt, Artificial Sequence
  Description of Artificial Sequence: Synthetic oligonucleotide
  Antisense strand to SEQ ID NO: 529933
ucuaguaacgaugagaguc

SEQ ID NO: 529935 - RNA, 19 nt, Artificial Sequence
  Description of Artificial Sequence: Synthetic oligonucleotide
  Sense strand starting at position 3114 of SEQ ID NO: 318011
cucucaucguuacuagaau

SEQ ID NO: 529936 - RNA, 19 nt, Artificial Sequence
  Description of Artificial Sequence: Synthetic oligonucleotide
  Antisense strand to SEQ ID NO: 529935
auucuaguaacgaugagag

SEQ ID NO: 529937 - RNA, 19 nt, Artificial Sequence
  Description of Artificial Sequence: Synthetic oligonucleotide
  Sense strand starting at position 3186 of SEQ ID NO: 318011
gacagcucuguccagagaa

SEQ ID NO: 529938 - RNA, 19 nt, Artificial Sequence
  Description of Artificial Sequence: Synthetic oligonucleotide
  Antisense strand to SEQ ID NO: 529937
uucucuggacagagcuguc

SEQ ID NO: 529939 - RNA, 19 nt, Artificial Sequence
  Description of Artificial Sequence: Synthetic oligonucleotide
  Sense strand starting at position 3428 of SEQ ID NO: 318011
gagguuuauccacacgacu

SEQ ID NO: 529940 - RNA, 19 nt, Artificial Sequence
  Description of Artificial Sequence: Synthetic oligonucleotide
  Antisense strand to SEQ ID NO: 529939
agucguguggauaaaccuc

SEQ ID NO: 529941 - RNA, 19 nt, Artificial Sequence
  Description of Artificial Sequence: Synthetic oligonucleotide
  Sense strand starting at position 3430 of SEQ ID NO: 318011
gguuuauccacacgacuug

SEQ ID NO: 529942 - RNA, 19 nt, Artificial Sequence
  Description of Artificial Sequence: Synthetic oligonucleotide
  Antisense strand to SEQ ID NO: 529941
caagucguguggauaaacc

SEQ ID NO: 529943 - RNA, 19 nt, Artificial Sequence
  Description of Artificial Sequence: Synthetic oligonucleotide
  Sense strand starting at position 3646 of SEQ ID NO: 318011
guuaucugaccuugucaac

SEQ ID NO: 529944 - RNA, 19 nt, Artificial Sequence
  Description of Artificial Sequence: Synthetic oligonucleotide
  Antisense strand to SEQ ID NO: 529943
guugacaaggucagauaac

SEQ ID NO: 529945 - RNA, 19 nt, Artificial Sequence
  Description of Artificial Sequence: Synthetic oligonucleotide
  Sense strand starting at position 3659 of SEQ ID NO: 318011
gucaaccauucugcugaau

SEQ ID NO: 529946 - RNA, 19 nt, Artificial Sequence
  Description of Artificial Sequence: Synthetic oligonucleotide
  Antisense strand to SEQ ID NO: 529945
auucagcagaaugguugac

SEQ ID NO: 529947 - RNA, 19 nt, Artificial Sequence
  Description of Artificial Sequence: Synthetic oligonucleotide
  Sense strand starting at position 3679 of SEQ ID NO: 318011
guuggcagacacuaaucau

SEQ ID NO: 529948 - RNA, 19 nt, Artificial Sequence
  Description of Artificial Sequence: Synthetic oligonucleotide
  Antisense strand to SEQ ID NO: 529947
augauuagugucugccaac

SEQ ID NO: 529949 - RNA, 19 nt, Artificial Sequence
  Description of Artificial Sequence: Synthetic oligonucleotide
  Sense strand starting at position 3699 of SEQ ID NO: 318011
gccucuaugucaccaaaug

SEQ ID NO: 529950 - RNA, 19 nt, Artificial Sequence
  Description of Artificial Sequence: Synthetic oligonucleotide
  Antisense strand to SEQ ID NO: 529949
cauuuggugacauagaggc

SEQ ID NO: 529951 - RNA, 19 nt, Artificial Sequence
  Description of Artificial Sequence: Synthetic oligonucleotide
  Sense strand starting at position 80 of SEQ ID NO: 318012
gguacacugcaaugugaaa

SEQ ID NO: 529952 - RNA, 19 nt, Artificial Sequence
  Description of Artificial Sequence: Synthetic oligonucleotide
  Antisense strand to SEQ ID NO: 529951
uuucacauugcaguguacc

SEQ ID NO: 529953 - RNA, 19 nt, Artificial Sequence
  Description of Artificial Sequence: Synthetic oligonucleotide
  Sense strand starting at position 92 of SEQ ID NO: 318012
ugugaaauguauucucuua

SEQ ID NO: 529954 - RNA, 19 nt, Artificial Sequence
  Description of Artificial Sequence: Synthetic oligonucleotide
  Antisense strand to SEQ ID NO: 529953
uaagagaauacauuucaca

SEQ ID NO: 529955 - RNA, 19 nt, Artificial Sequence
  Description of Artificial Sequence: Synthetic oligonucleotide
  Sense strand starting at position 139 of SEQ ID NO: 318012
cuuacaaugguuugacaua

SEQ ID NO: 529956 - RNA, 19 nt, Artificial Sequence
  Description of Artificial Sequence: Synthetic oligonucleotide
  Antisense strand to SEQ ID NO: 529955
uaugucaaaccauuguaag

SEQ ID NO: 529957 - RNA, 19 nt, Artificial Sequence
  Description of Artificial Sequence: Synthetic oligonucleotide
  Sense strand starting at position 172 of SEQ ID NO: 318012
uacaaucgugccuaaguga

SEQ ID NO: 529958 - RNA, 19 nt, Artificial Sequence
  Description of Artificial Sequence: Synthetic oligonucleotide
  Antisense strand to SEQ ID NO: 529957
ucacuuaggcacgauugua

SEQ ID NO: 529959 - RNA, 19 nt, Artificial Sequence
  Description of Artificial Sequence: Synthetic oligonucleotide
  Sense strand starting at position 175 of SEQ ID NO: 318012
aaucgugccuaagugauaa

SEQ ID NO: 529960 - RNA, 19 nt, Artificial Sequence
  Description of Artificial Sequence: Synthetic oligonucleotide
  Antisense strand to SEQ ID NO: 529959
uuaucacuuaggcacgauu

SEQ ID NO: 529961 - RNA, 19 nt, Artificial Sequence
  Description of Artificial Sequence: Synthetic oligonucleotide
  Sense strand starting at position 177 of SEQ ID NO: 318012
ucgugccuaagugauaaau

SEQ ID NO: 529962 - RNA, 19 nt, Artificial Sequence
  Description of Artificial Sequence: Synthetic oligonucleotide
  Antisense strand to SEQ ID NO: 529961
auuuaucacuuaggcacga

SEQ ID NO: 529963 - RNA, 19 nt, Artificial Sequence
  Description of Artificial Sequence: Synthetic oligonucleotide
  Sense strand starting at position 358 of SEQ ID NO: 318012
guaggcuaggcauguuuaa

SEQ ID NO: 529964 - RNA, 19 nt, Artificial Sequence
  Description of Artificial Sequence: Synthetic oligonucleotide
  Antisense strand to SEQ ID NO: 529963
uuaaacaugccuagccuac

SEQ ID NO: 529965 - RNA, 19 nt, Artificial Sequence
  Description of Artificial Sequence: Synthetic oligonucleotide
  Sense strand starting at position 385 of SEQ ID NO: 318012
aggcuaugauucucagguu

SEQ ID NO: 529966 - RNA, 19 nt, Artificial Sequence
  Description of Artificial Sequence: Synthetic oligonucleotide
  Antisense strand to SEQ ID NO: 529965
aaccugagaaucauagccu

SEQ ID NO: 529967 - RNA, 19 nt, Artificial Sequence
  Description of Artificial Sequence: Synthetic oligonucleotide
  Sense strand starting at position 397 of SEQ ID NO: 318012
ucagguuagcuguauuaaa

SEQ ID NO: 529968 - RNA, 19 nt, Artificial Sequence
  Description of Artificial Sequence: Synthetic oligonucleotide
  Antisense strand to SEQ ID NO: 529967
uuuaauacagcuaaccuga

SEQ ID NO: 529969 - RNA, 19 nt, Artificial Sequence
  Description of Artificial Sequence: Synthetic oligonucleotide
  Sense strand starting at position 466 of SEQ ID NO: 318012
uaaggagcuucuguauaua

SEQ ID NO: 529970 - RNA, 19 nt, Artificial Sequence
  Description of Artificial Sequence: Synthetic oligonucleotide
  Antisense strand to SEQ ID NO: 529969
uauauacagaagcuccuua

SEQ ID NO: 529971 - RNA, 19 nt, Artificial Sequence
  Description of Artificial Sequence: Synthetic oligonucleotide
  Sense strand starting at position 469 of SEQ ID NO: 318012
ggagcuucuguauauaaua

SEQ ID NO: 529972 - RNA, 19 nt, Artificial Sequence
  Description of Artificial Sequence: Synthetic oligonucleotide
  Antisense strand to SEQ ID NO: 529971
uauuauauacagaagcucc

SEQ ID NO: 529973 - RNA, 19 nt, Artificial Sequence
  Description of Artificial Sequence: Synthetic oligonucleotide
  Sense strand starting at position 530 of SEQ ID NO: 318012
gccuauuccuuagcagaac

SEQ ID NO: 529974 - RNA, 19 nt, Artificial Sequence
  Description of Artificial Sequence: Synthetic oligonucleotide
  Antisense strand to SEQ ID NO: 529973
guucugcuaaggaauaggc

SEQ ID NO: 529975 - RNA, 19 nt, Artificial Sequence
  Description of Artificial Sequence: Synthetic oligonucleotide
  Sense strand starting at position 713 of SEQ ID NO: 318012
uugguuagaauccgcauau

SEQ ID NO: 529976 - RNA, 19 nt, Artificial Sequence
  Description of Artificial Sequence: Synthetic oligonucleotide
  Antisense strand to SEQ ID NO: 529975
auaugcggauucuaaccaa

SEQ ID NO: 529977 - RNA, 19 nt, Artificial Sequence
  Description of Artificial Sequence: Synthetic oligonucleotide
  Sense strand starting at position 714 of SEQ ID NO: 318012
ugguuagaauccgcauaua

SEQ ID NO: 529978 - RNA, 19 nt, Artificial Sequence
  Description of Artificial Sequence: Synthetic oligonucleotide
  Antisense strand to SEQ ID NO: 529977
uauaugcggauucuaacca

SEQ ID NO: 529979 - RNA, 19 nt, Artificial Sequence
  Description of Artificial Sequence: Synthetic oligonucleotide
  Sense strand starting at position 896 of SEQ ID NO: 318012
acagacacuugauggauaa

SEQ ID NO: 529980 - RNA, 19 nt, Artificial Sequence
  Description of Artificial Sequence: Synthetic oligonucleotide
  Antisense strand to SEQ ID NO: 529979
uuauccaucaagugucugu

SEQ ID NO: 529981 - RNA, 19 nt, Artificial Sequence
  Description of Artificial Sequence: Synthetic oligonucleotide
  Sense strand starting at position 930 of SEQ ID NO: 318012
acagacacuugaugaagaa

SEQ ID NO: 529982 - RNA, 19 nt, Artificial Sequence
  Description of Artificial Sequence: Synthetic oligonucleotide
  Antisense strand to SEQ ID NO: 529981
uucuucaucaagugucugu

SEQ ID NO: 529983 - RNA, 19 nt, Artificial Sequence
  Description of Artificial Sequence: Synthetic oligonucleotide
  Sense strand starting at position 1060 of SEQ ID NO: 318012
ucugaaagacauugggcua

SEQ ID NO: 529984 - RNA, 19 nt, Artificial Sequence
  Description of Artificial Sequence: Synthetic oligonucleotide
  Antisense strand to SEQ ID NO: 529983
uagcccaaugucuuucaga

SEQ ID NO: 529985 - RNA, 19 nt, Artificial Sequence
  Description of Artificial Sequence: Synthetic oligonucleotide
  Sense strand starting at position 1180 of SEQ ID NO: 318012
agcggugucaaugagaagu

SEQ ID NO: 529986 - RNA, 19 nt, Artificial Sequence
  Description of Artificial Sequence: Synthetic oligonucleotide
  Antisense strand to SEQ ID NO: 529985
acuucucauugacaccgcu

SEQ ID NO: 529987 - RNA, 19 nt, Artificial Sequence
  Description of Artificial Sequence: Synthetic oligonucleotide
  Sense strand starting at position 1272 of SEQ ID NO: 318012
cuggguauuugucaccaga

SEQ ID NO: 529988 - RNA, 19 nt, Artificial Sequence
  Description of Artificial Sequence: Synthetic oligonucleotide
  Antisense strand to SEQ ID NO: 529987
ucuggugacaaauacccag

SEQ ID NO: 529989 - RNA, 19 nt, Artificial Sequence
  Description of Artificial Sequence: Synthetic oligonucleotide
  Sense strand starting at position 1426 of SEQ ID NO: 318012
gaguaaggugcaggguuaa

SEQ ID NO: 529990 - RNA, 19 nt, Artificial Sequence
  Description of Artificial Sequence: Synthetic oligonucleotide
  Antisense strand to SEQ ID NO: 529989
uuaacccugcaccuuacuc

SEQ ID NO: 529991 - RNA, 19 nt, Artificial Sequence
  Description of Artificial Sequence: Synthetic oligonucleotide
  Sense strand starting at position 1525 of SEQ ID NO: 318012
gagugcagacgugagauua

SEQ ID NO: 529992 - RNA, 19 nt, Artificial Sequence
  Description of Artificial Sequence: Synthetic oligonucleotide
  Antisense strand to SEQ ID NO: 529991
uaaucucacgucugcacuc

SEQ ID NO: 529993 - RNA, 19 nt, Artificial Sequence
  Description of Artificial Sequence: Synthetic oligonucleotide
  Sense strand starting at position 2305 of SEQ ID NO: 318012
ggagcugugguuugugaac

SEQ ID NO: 529994 - RNA, 19 nt, Artificial Sequence
  Description of Artificial Sequence: Synthetic oligonucleotide
  Antisense strand to SEQ ID NO: 529993
guucacaaaccacagcucc

SEQ ID NO: 529995 - RNA, 19 nt, Artificial Sequence
  Description of Artificial Sequence: Synthetic oligonucleotide
  Sense strand starting at position 2735 of SEQ ID NO: 318012
uuuaguaacugcuugaaag

SEQ ID NO: 529996 - RNA, 19 nt, Artificial Sequence
  Description of Artificial Sequence: Synthetic oligonucleotide
  Antisense strand to SEQ ID NO: 529995
cuuucaagcaguuacuaaa

SEQ ID NO: 529997 - RNA, 19 nt, Artificial Sequence
  Description of Artificial Sequence: Synthetic oligonucleotide
  Sense strand starting at position 2736 of SEQ ID NO: 318012
uuaguaacugcuugaaagc

SEQ ID NO: 529998 - RNA, 19 nt, Artificial Sequence
  Description of Artificial Sequence: Synthetic oligonucleotide
  Antisense strand to SEQ ID NO: 529997
gcuuucaagcaguuacuaa

SEQ ID NO: 529999 - RNA, 19 nt, Artificial Sequence
  Description of Artificial Sequence: Synthetic oligonucleotide
  Sense strand starting at position 2828 of SEQ ID NO: 318012
ugagguuagcucugccaag

SEQ ID NO: 530000 - RNA, 19 nt, Artificial Sequence
  Description of Artificial Sequence: Synthetic oligonucleotide
  Antisense strand to SEQ ID NO: 529999
cuuggcagagcuaaccuca

SEQ ID NO: 530001 - RNA, 19 nt, Artificial Sequence
  Description of Artificial Sequence: Synthetic oligonucleotide
  Sense strand starting at position 2916 of SEQ ID NO: 318012
uuaauauacuaguuggaga

SEQ ID NO: 530002 - RNA, 19 nt, Artificial Sequence
  Description of Artificial Sequence: Synthetic oligonucleotide
  Antisense strand to SEQ ID NO: 530001
ucuccaacuaguauauuaa

SEQ ID NO: 530003 - RNA, 19 nt, Artificial Sequence
  Description of Artificial Sequence: Synthetic oligonucleotide
  Sense strand starting at position 2919 of SEQ ID NO: 318012
auauacuaguuggagauuu

SEQ ID NO: 530004 - RNA, 19 nt, Artificial Sequence
  Description of Artificial Sequence: Synthetic oligonucleotide
  Antisense strand to SEQ ID NO: 530003
aaaucuccaacuaguauau

SEQ ID NO: 530005 - RNA, 19 nt, Artificial Sequence
  Description of Artificial Sequence: Synthetic oligonucleotide
  Sense strand starting at position 2982 of SEQ ID NO: 318012
accacaggauuguaaacua

SEQ ID NO: 530006 - RNA, 19 nt, Artificial Sequence
  Description of Artificial Sequence: Synthetic oligonucleotide
  Antisense strand to SEQ ID NO: 530005
uaguuuacaauccuguggu

SEQ ID NO: 530007 - RNA, 19 nt, Artificial Sequence
  Description of Artificial Sequence: Synthetic oligonucleotide
  Sense strand starting at position 3056 of SEQ ID NO: 318012
aauagacaaucuguugagu

SEQ ID NO: 530008 - RNA, 19 nt, Artificial Sequence
  Description of Artificial Sequence: Synthetic oligonucleotide
  Antisense strand to SEQ ID NO: 530007
acucaacagauugucuauu

SEQ ID NO: 530009 - RNA, 19 nt, Artificial Sequence
  Description of Artificial Sequence: Synthetic oligonucleotide
  Sense strand starting at position 3062 of SEQ ID NO: 318012
caaucuguugaguacauga

SEQ ID NO: 530010 - RNA, 19 nt, Artificial Sequence
  Description of Artificial Sequence: Synthetic oligonucleotide
  Antisense strand to SEQ ID NO: 530009
ucauguacucaacagauug

SEQ ID NO: 530011 - RNA, 19 nt, Artificial Sequence
  Description of Artificial Sequence: Synthetic oligonucleotide
  Sense strand starting at position 3064 of SEQ ID NO: 318012
aucuguugaguacaugaau

SEQ ID NO: 530012 - RNA, 19 nt, Artificial Sequence
  Description of Artificial Sequence: Synthetic oligonucleotide
  Antisense strand to SEQ ID NO: 530011
auucauguacucaacagau

SEQ ID NO: 530013 - RNA, 19 nt, Artificial Sequence
  Description of Artificial Sequence: Synthetic oligonucleotide
  Sense strand starting at position 3185 of SEQ ID NO: 318012
uccucuauuguugauaaga

SEQ ID NO: 530014 - RNA, 19 nt, Artificial Sequence
  Description of Artificial Sequence: Synthetic oligonucleotide
  Antisense strand to SEQ ID NO: 530013
ucuuaucaacaauagagga

SEQ ID NO: 530015 - RNA, 19 nt, Artificial Sequence
  Description of Artificial Sequence: Synthetic oligonucleotide
  Sense strand starting at position 3242 of SEQ ID NO: 318012
gagcuugugcuugugcaua

SEQ ID NO: 530016 - RNA, 19 nt, Artificial Sequence
  Description of Artificial Sequence: Synthetic oligonucleotide
  Antisense strand to SEQ ID NO: 530015
uaugcacaagcacaagcuc

SEQ ID NO: 530017 - RNA, 19 nt, Artificial Sequence
  Description of Artificial Sequence: Synthetic oligonucleotide
  Sense strand starting at position 3321 of SEQ ID NO: 318012
uuuaaaucugagggcauga

SEQ ID NO: 530018 - RNA, 19 nt, Artificial Sequence
  Description of Artificial Sequence: Synthetic oligonucleotide
  Antisense strand to SEQ ID NO: 530017
ucaugcccucagauuuaaa

SEQ ID NO: 530019 - RNA, 19 nt, Artificial Sequence
  Description of Artificial Sequence: Synthetic oligonucleotide
  Sense strand starting at position 3331 of SEQ ID NO: 318012
agggcaugacauugguaca

SEQ ID NO: 530020 - RNA, 19 nt, Artificial Sequence
  Description of Artificial Sequence: Synthetic oligonucleotide
  Antisense strand to SEQ ID NO: 530019
uguaccaaugucaugcccu

SEQ ID NO: 530021 - RNA, 19 nt, Artificial Sequence
  Description of Artificial Sequence: Synthetic oligonucleotide
  Sense strand starting at position 3542 of SEQ ID NO: 318012
agaggcuacucucuuuaca

SEQ ID NO: 530022 - RNA, 19 nt, Artificial Sequence
  Description of Artificial Sequence: Synthetic oligonucleotide
  Antisense strand to SEQ ID NO: 530021
uguaaagagaguagccucu

SEQ ID NO: 530023 - RNA, 19 nt, Artificial Sequence
  Description of Artificial Sequence: Synthetic oligonucleotide
  Sense strand starting at position 3596 of SEQ ID NO: 318012
gaaaguacauuucgauuuc

SEQ ID NO: 530024 - RNA, 19 nt, Artificial Sequence
  Description of Artificial Sequence: Synthetic oligonucleotide
  Antisense strand to SEQ ID NO: 530023
gaaaucgaaauguacuuuc

SEQ ID NO: 530025 - RNA, 19 nt, Artificial Sequence
  Description of Artificial Sequence: Synthetic oligonucleotide
  Sense strand starting at position 3605 of SEQ ID NO: 318012
uuucgauuucuaugcuaca

SEQ ID NO: 530026 - RNA, 19 nt, Artificial Sequence
  Description of Artificial Sequence: Synthetic oligonucleotide
  Antisense strand to SEQ ID NO: 530025
uguagcauagaaaucgaaa

SEQ ID NO: 530027 - RNA, 19 nt, Artificial Sequence
  Description of Artificial Sequence: Synthetic oligonucleotide
  Sense strand starting at position 3606 of SEQ ID NO: 318012
uucgauuucuaugcuacau

SEQ ID NO: 530028 - RNA, 19 nt, Artificial Sequence
  Description of Artificial Sequence: Synthetic oligonucleotide
  Antisense strand to SEQ ID NO: 530027
auguagcauagaaaucgaa

SEQ ID NO: 530029 - RNA, 19 nt, Artificial Sequence
  Description of Artificial Sequence: Synthetic oligonucleotide
  Sense strand starting at position 3608 of SEQ ID NO: 318012
cgauuucuaugcuacauuu

SEQ ID NO: 530030 - RNA, 19 nt, Artificial Sequence
  Description of Artificial Sequence: Synthetic oligonucleotide
  Antisense strand to SEQ ID NO: 530029
aaauguagcauagaaaucg

SEQ ID NO: 530031 - RNA, 19 nt, Artificial Sequence
  Description of Artificial Sequence: Synthetic oligonucleotide
  Sense strand starting at position 92 of SEQ ID NO: 318013
cagcaaugcugaguaacuu

SEQ ID NO: 530032 - RNA, 19 nt, Artificial Sequence
  Description of Artificial Sequence: Synthetic oligonucleotide
  Antisense strand to SEQ ID NO: 530031
aaguuacucagcauugcug

SEQ ID NO: 530033 - RNA, 19 nt, Artificial Sequence
  Description of Artificial Sequence: Synthetic oligonucleotide
  Sense strand starting at position 93 of SEQ ID NO: 318013
agcaaugcugaguaacuua

SEQ ID NO: 530034 - RNA, 19 nt, Artificial Sequence
  Description of Artificial Sequence: Synthetic oligonucleotide
  Antisense strand to SEQ ID NO: 530033
uaaguuacucagcauugcu

SEQ ID NO: 530035 - RNA, 19 nt, Artificial Sequence
  Description of Artificial Sequence: Synthetic oligonucleotide
  Sense strand starting at position 126 of SEQ ID NO: 318013
ggccaaacaucuucuguag

SEQ ID NO: 530036 - RNA, 19 nt, Artificial Sequence
  Description of Artificial Sequence: Synthetic oligonucleotide
  Antisense strand to SEQ ID NO: 530035
cuacagaagauguuuggcc

SEQ ID NO: 530037 - RNA, 19 nt, Artificial Sequence
  Description of Artificial Sequence: Synthetic oligonucleotide
  Sense strand starting at position 259 of SEQ ID NO: 318013
gcuacuugcguugugagau

SEQ ID NO: 530038 - RNA, 19 nt, Artificial Sequence
  Description of Artificial Sequence: Synthetic oligonucleotide
  Antisense strand to SEQ ID NO: 530037
aucucacaacgcaaguagc

SEQ ID NO: 530039 - RNA, 19 nt, Artificial Sequence
  Description of Artificial Sequence: Synthetic oligonucleotide
  Sense strand starting at position 420 of SEQ ID NO: 318013
ccacaugaugauggucuua

SEQ ID NO: 530040 - RNA, 19 nt, Artificial Sequence
  Description of Artificial Sequence: Synthetic oligonucleotide
  Antisense strand to SEQ ID NO: 530039
uaagaccaucaucaugugg

SEQ ID NO: 530041 - RNA, 19 nt, Artificial Sequence
  Description of Artificial Sequence: Synthetic oligonucleotide
  Sense strand starting at position 422 of SEQ ID NO: 318013
acaugaugauggucuuauc

SEQ ID NO: 530042 - RNA, 19 nt, Artificial Sequence
  Description of Artificial Sequence: Synthetic oligonucleotide
  Antisense strand to SEQ ID NO: 530041
gauaagaccaucaucaugu

SEQ ID NO: 530043 - RNA, 19 nt, Artificial Sequence
  Description of Artificial Sequence: Synthetic oligonucleotide
  Sense strand starting at position 433 of SEQ ID NO: 318013
gucuuaucuaaaggaggua

SEQ ID NO: 530044 - RNA, 19 nt, Artificial Sequence
  Description of Artificial Sequence: Synthetic oligonucleotide
  Antisense strand to SEQ ID NO: 530043
uaccuccuuuagauaagac

SEQ ID NO: 530045 - RNA, 19 nt, Artificial Sequence
  Description of Artificial Sequence: Synthetic oligonucleotide
  Sense strand starting at position 486 of SEQ ID NO: 318013
cguuuaacacacuggauaa

SEQ ID NO: 530046 - RNA, 19 nt, Artificial Sequence
  Description of Artificial Sequence: Synthetic oligonucleotide
  Antisense strand to SEQ ID NO: 530045
uuauccaguguguuaaacg

SEQ ID NO: 530047 - RNA, 19 nt, Artificial Sequence
  Description of Artificial Sequence: Synthetic oligonucleotide
  Sense strand starting at position 517 of SEQ ID NO: 318013
caaggucaugaguggguua

SEQ ID NO: 530048 - RNA, 19 nt, Artificial Sequence
  Description of Artificial Sequence: Synthetic oligonucleotide
  Antisense strand to SEQ ID NO: 530047
uaacccacucaugaccuug

SEQ ID NO: 530049 - RNA, 19 nt, Artificial Sequence
  Description of Artificial Sequence: Synthetic oligonucleotide
  Sense strand starting at position 518 of SEQ ID NO: 318013
aaggucaugaguggguuaa

SEQ ID NO: 530050 - RNA, 19 nt, Artificial Sequence
  Description of Artificial Sequence: Synthetic oligonucleotide
  Antisense strand to SEQ ID NO: 530049
uuaacccacucaugaccuu

SEQ ID NO: 530051 - RNA, 19 nt, Artificial Sequence
  Description of Artificial Sequence: Synthetic oligonucleotide
  Sense strand starting at position 520 of SEQ ID NO: 318013
ggucaugaguggguuaaca

SEQ ID NO: 530052 - RNA, 19 nt, Artificial Sequence
  Description of Artificial Sequence: Synthetic oligonucleotide
  Antisense strand to SEQ ID NO: 530051
uguuaacccacucaugacc

SEQ ID NO: 530053 - RNA, 19 nt, Artificial Sequence
  Description of Artificial Sequence: Synthetic oligonucleotide
  Sense strand starting at position 595 of SEQ ID NO: 318013
aggacugaguggcucuauu

SEQ ID NO: 530054 - RNA, 19 nt, Artificial Sequence
  Description of Artificial Sequence: Synthetic oligonucleotide
  Antisense strand to SEQ ID NO: 530053
aauagagccacucaguccu

SEQ ID NO: 530055 - RNA, 19 nt, Artificial Sequence
  Description of Artificial Sequence: Synthetic oligonucleotide
  Sense strand starting at position 605 of SEQ ID NO: 318013
ggcucuauuccagacuaaa

SEQ ID NO: 530056 - RNA, 19 nt, Artificial Sequence
  Description of Artificial Sequence: Synthetic oligonucleotide
  Antisense strand to SEQ ID NO: 530055
uuuagucuggaauagagcc

SEQ ID NO: 530057 - RNA, 19 nt, Artificial Sequence
  Description of Artificial Sequence: Synthetic oligonucleotide
  Sense strand starting at position 636 of SEQ ID NO: 318013
gguaaacuguacccugaua

SEQ ID NO: 530058 - RNA, 19 nt, Artificial Sequence
  Description of Artificial Sequence: Synthetic oligonucleotide
  Antisense strand to SEQ ID NO: 530057
uaucaggguacaguuuacc

SEQ ID NO: 530059 - RNA, 19 nt, Artificial Sequence
  Description of Artificial Sequence: Synthetic oligonucleotide
  Sense strand starting at position 968 of SEQ ID NO: 318013
uaauuuaggugccagaaau

SEQ ID NO: 530060 - RNA, 19 nt, Artificial Sequence
  Description of Artificial Sequence: Synthetic oligonucleotide
  Antisense strand to SEQ ID NO: 530059
auuucuggcaccuaaauua

SEQ ID NO: 530061 - RNA, 19 nt, Artificial Sequence
  Description of Artificial Sequence: Synthetic oligonucleotide
  Sense strand starting at position 1032 of SEQ ID NO: 318013
gugucuucucugcaaccaa

SEQ ID NO: 530062 - RNA, 19 nt, Artificial Sequence
  Description of Artificial Sequence: Synthetic oligonucleotide
  Antisense strand to SEQ ID NO: 530061
uugguugcagagaagacac

SEQ ID NO: 530063 - RNA, 19 nt, Artificial Sequence
  Description of Artificial Sequence: Synthetic oligonucleotide
  Sense strand starting at position 1107 of SEQ ID NO: 318013
ggccgacagaaauguagua

SEQ ID NO: 530064 - RNA, 19 nt, Artificial Sequence
  Description of Artificial Sequence: Synthetic oligonucleotide
  Antisense strand to SEQ ID NO: 530063
uacuacauuucugucggcc

SEQ ID NO: 530065 - RNA, 19 nt, Artificial Sequence
  Description of Artificial Sequence: Synthetic oligonucleotide
  Sense strand starting at position 1109 of SEQ ID NO: 318013
ccgacagaaauguaguaau

SEQ ID NO: 530066 - RNA, 19 nt, Artificial Sequence
  Description of Artificial Sequence: Synthetic oligonucleotide
  Antisense strand to SEQ ID NO: 530065
auuacuacauuucugucgg

SEQ ID NO: 530067 - RNA, 19 nt, Artificial Sequence
  Description of Artificial Sequence: Synthetic oligonucleotide
  Sense strand starting at position 1119 of SEQ ID NO: 318013
uguaguaaugaaugcugga

SEQ ID NO: 530068 - RNA, 19 nt, Artificial Sequence
  Description of Artificial Sequence: Synthetic oligonucleotide
  Antisense strand to SEQ ID NO: 530067
uccagcauucauuacuaca

SEQ ID NO: 530069 - RNA, 19 nt, Artificial Sequence
  Description of Artificial Sequence: Synthetic oligonucleotide
  Sense strand starting at position 1231 of SEQ ID NO: 318013
gucagacaauucuuaacag

SEQ ID NO: 530070 - RNA, 19 nt, Artificial Sequence
  Description of Artificial Sequence: Synthetic oligonucleotide
  Antisense strand to SEQ ID NO: 530069
cuguuaagaauugucugac

SEQ ID NO: 530071 - RNA, 19 nt, Artificial Sequence
  Description of Artificial Sequence: Synthetic oligonucleotide
  Sense strand starting at position 1710 of SEQ ID NO: 318013
cgcggaauucccuacacga

SEQ ID NO: 530072 - RNA, 19 nt, Artificial Sequence
  Description of Artificial Sequence: Synthetic oligonucleotide
  Antisense strand to SEQ ID NO: 530071
ucguguagggaauuccgcg

SEQ ID NO: 530073 - RNA, 19 nt, Artificial Sequence
  Description of Artificial Sequence: Synthetic oligonucleotide
  Sense strand starting at position 1712 of SEQ ID NO: 318013
cggaauucccuacacgaca

SEQ ID NO: 530074 - RNA, 19 nt, Artificial Sequence
  Description of Artificial Sequence: Synthetic oligonucleotide
  Antisense strand to SEQ ID NO: 530073
ugucguguagggaauuccg

SEQ ID NO: 530075 - RNA, 19 nt, Artificial Sequence
  Description of Artificial Sequence: Synthetic oligonucleotide
  Sense strand starting at position 1798 of SEQ ID NO: 318013
agaggaucauguccgggaa

SEQ ID NO: 530076 - RNA, 19 nt, Artificial Sequence
  Description of Artificial Sequence: Synthetic oligonucleotide
  Antisense strand to SEQ ID NO: 530075
uucccggacaugauccucu

SEQ ID NO: 530077 - RNA, 19 nt, Artificial Sequence
  Description of Artificial Sequence: Synthetic oligonucleotide
  Sense strand starting at position 1801 of SEQ ID NO: 318013
ggaucauguccgggaacug

SEQ ID NO: 530078 - RNA, 19 nt, Artificial Sequence
  Description of Artificial Sequence: Synthetic oligonucleotide
  Antisense strand to SEQ ID NO: 530077
caguucccggacaugaucc

SEQ ID NO: 530079 - RNA, 19 nt, Artificial Sequence
  Description of Artificial Sequence: Synthetic oligonucleotide
  Sense strand starting at position 1876 of SEQ ID NO: 318013
gggucaucugcucagucau

SEQ ID NO: 530080 - RNA, 19 nt, Artificial Sequence
  Description of Artificial Sequence: Synthetic oligonucleotide
  Antisense strand to SEQ ID NO: 530079
augacugagcagaugaccc

SEQ ID NO: 530081 - RNA, 19 nt, Artificial Sequence
  Description of Artificial Sequence: Synthetic oligonucleotide
  Sense strand starting at position 2026 of SEQ ID NO: 318013
gaaauacccgcucgaccau

SEQ ID NO: 530082 - RNA, 19 nt, Artificial Sequence
  Description of Artificial Sequence: Synthetic oligonucleotide
  Antisense strand to SEQ ID NO: 530081
auggucgagcggguauuuc

SEQ ID NO: 530083 - RNA, 19 nt, Artificial Sequence
  Description of Artificial Sequence: Synthetic oligonucleotide
  Sense strand starting at position 2112 of SEQ ID NO: 318013
gggaaauugcaaggcauca

SEQ ID NO: 530084 - RNA, 19 nt, Artificial Sequence
  Description of Artificial Sequence: Synthetic oligonucleotide
  Antisense strand to SEQ ID NO: 530083
ugaugccuugcaauuuccc

SEQ ID NO: 530085 - RNA, 19 nt, Artificial Sequence
  Description of Artificial Sequence: Synthetic oligonucleotide
  Sense strand starting at position 2136 of SEQ ID NO: 318013
ccgucuuccguacaacaaa

SEQ ID NO: 530086 - RNA, 19 nt, Artificial Sequence
  Description of Artificial Sequence: Synthetic oligonucleotide
  Antisense strand to SEQ ID NO: 530085
uuuguuguacggaagacgg

SEQ ID NO: 530087 - RNA, 19 nt, Artificial Sequence
  Description of Artificial Sequence: Synthetic oligonucleotide
  Sense strand starting at position 2209 of SEQ ID NO: 318013
aaggcuucucagggaugau

SEQ ID NO: 530088 - RNA, 19 nt, Artificial Sequence
  Description of Artificial Sequence: Synthetic oligonucleotide
  Antisense strand to SEQ ID NO: 530087
aucaucccugagaagccuu

SEQ ID NO: 530089 - RNA, 19 nt, Artificial Sequence
  Description of Artificial Sequence: Synthetic oligonucleotide
  Sense strand starting at position 2212 of SEQ ID NO: 318013
gcuucucagggaugaugua

SEQ ID NO: 530090 - RNA, 19 nt, Artificial Sequence
  Description of Artificial Sequence: Synthetic oligonucleotide
  Antisense strand to SEQ ID NO: 530089
uacaucaucccugagaagc

SEQ ID NO: 530091 - RNA, 19 nt, Artificial Sequence
  Description of Artificial Sequence: Synthetic oligonucleotide
  Sense strand starting at position 2260 of SEQ ID NO: 318013
ggcacauucccaugaggac

SEQ ID NO: 530092 - RNA, 19 nt, Artificial Sequence
  Description of Artificial Sequence: Synthetic oligonucleotide
  Antisense strand to SEQ ID NO: 530091
guccucaugggaaugugcc

SEQ ID NO: 530093 - RNA, 19 nt, Artificial Sequence
  Description of Artificial Sequence: Synthetic oligonucleotide
  Sense strand starting at position 2386 of SEQ ID NO: 318013
cacuaucguggguaacgau

SEQ ID NO: 530094 - RNA, 19 nt, Artificial Sequence
  Description of Artificial Sequence: Synthetic oligonucleotide
  Antisense strand to SEQ ID NO: 530093
aucguuacccacgauagug

SEQ ID NO: 530095 - RNA, 19 nt, Artificial Sequence
  Description of Artificial Sequence: Synthetic oligonucleotide
  Sense strand starting at position 2518 of SEQ ID NO: 318013
ggacuuaguccaggcugga

SEQ ID NO: 530096 - RNA, 19 nt, Artificial Sequence
  Description of Artificial Sequence: Synthetic oligonucleotide
  Antisense strand to SEQ ID NO: 530095
uccagccuggacuaagucc

SEQ ID NO: 530097 - RNA, 19 nt, Artificial Sequence
  Description of Artificial Sequence: Synthetic oligonucleotide
  Sense strand starting at position 2551 of SEQ ID NO: 318013
gguuacucuggaugaacua

SEQ ID NO: 530098 - RNA, 19 nt, Artificial Sequence
  Description of Artificial Sequence: Synthetic oligonucleotide
  Antisense strand to SEQ ID NO: 530097
uaguucauccagaguaacc

SEQ ID NO: 530099 - RNA, 19 nt, Artificial Sequence
  Description of Artificial Sequence: Synthetic oligonucleotide
  Sense strand starting at position 3097 of SEQ ID NO: 318013
ccaacugugcccugaagga

SEQ ID NO: 530100 - RNA, 19 nt, Artificial Sequence
  Description of Artificial Sequence: Synthetic oligonucleotide
  Antisense strand to SEQ ID NO: 530099
uccuucagggcacaguugg

SEQ ID NO: 530101 - RNA, 19 nt, Artificial Sequence
  Description of Artificial Sequence: Synthetic oligonucleotide
  Sense strand starting at position 3614 of SEQ ID NO: 318013
gggagaacauuggaacaga

SEQ ID NO: 530102 - RNA, 19 nt, Artificial Sequence
  Description of Artificial Sequence: Synthetic oligonucleotide
  Antisense strand to SEQ ID NO: 530101
ucuguuccaauguucuccc

SEQ ID NO: 530103 - RNA, 19 nt, Artificial Sequence
  Description of Artificial Sequence: Synthetic oligonucleotide
  Sense strand starting at position 3661 of SEQ ID NO: 318013
ggagaauaauguuccugug

SEQ ID NO: 530104 - RNA, 19 nt, Artificial Sequence
  Description of Artificial Sequence: Synthetic oligonucleotide
  Antisense strand to SEQ ID NO: 530103
cacaggaacauuauucucc

SEQ ID NO: 530105 - RNA, 19 nt, Artificial Sequence
  Description of Artificial Sequence: Synthetic oligonucleotide
  Sense strand starting at position 3663 of SEQ ID NO: 318013
agaauaauguuccugugga

SEQ ID NO: 530106 - RNA, 19 nt, Artificial Sequence
  Description of Artificial Sequence: Synthetic oligonucleotide
  Antisense strand to SEQ ID NO: 530105
uccacaggaacauuauucu

SEQ ID NO: 530107 - RNA, 19 nt, Artificial Sequence
  Description of Artificial Sequence: Synthetic oligonucleotide
  Sense strand starting at position 3817 of SEQ ID NO: 318013
agaagaaccuuggcaaugu

SEQ ID NO: 530108 - RNA, 19 nt, Artificial Sequence
  Description of Artificial Sequence: Synthetic oligonucleotide
  Antisense strand to SEQ ID NO: 530107
acauugccaagguucuucu

SEQ ID NO: 530109 - RNA, 19 nt, Artificial Sequence
  Description of Artificial Sequence: Synthetic oligonucleotide
  Sense strand starting at position 3928 of SEQ ID NO: 318013
aggaucccucccugaaaca

SEQ ID NO: 530110 - RNA, 19 nt, Artificial Sequence
  Description of Artificial Sequence: Synthetic oligonucleotide
  Antisense strand to SEQ ID NO: 530109
uguuucagggagggauccu

SEQ ID NO: 530111 - RNA, 19 nt, Artificial Sequence
  Description of Artificial Sequence: Synthetic oligonucleotide
  Sense strand starting at position 103 of SEQ ID NO: 318014
gagacuauauggcuaguga

SEQ ID NO: 530112 - RNA, 19 nt, Artificial Sequence
  Description of Artificial Sequence: Synthetic oligonucleotide
  Antisense strand to SEQ ID NO: 530111
ucacuagccauauagucuc

SEQ ID NO: 530113 - RNA, 19 nt, Artificial Sequence
  Description of Artificial Sequence: Synthetic oligonucleotide
  Sense strand starting at position 114 of SEQ ID NO: 318014
gcuagugaagucuaacaua

SEQ ID NO: 530114 - RNA, 19 nt, Artificial Sequence
  Description of Artificial Sequence: Synthetic oligonucleotide
  Antisense strand to SEQ ID NO: 530113
uauguuagacuucacuagc

SEQ ID NO: 530115 - RNA, 19 nt, Artificial Sequence
  Description of Artificial Sequence: Synthetic oligonucleotide
  Sense strand starting at position 117 of SEQ ID NO: 318014
agugaagucuaacauauuu

SEQ ID NO: 530116 - RNA, 19 nt, Artificial Sequence
  Description of Artificial Sequence: Synthetic oligonucleotide
  Antisense strand to SEQ ID NO: 530115
aaauauguuagacuucacu

SEQ ID NO: 530117 - RNA, 19 nt, Artificial Sequence
  Description of Artificial Sequence: Synthetic oligonucleotide
  Sense strand starting at position 314 of SEQ ID NO: 318014
ggacauuugucuugaggag

SEQ ID NO: 530118 - RNA, 19 nt, Artificial Sequence
  Description of Artificial Sequence: Synthetic oligonucleotide
  Antisense strand to SEQ ID NO: 530117
cuccucaagacaaaugucc

SEQ ID NO: 530119 - RNA, 19 nt, Artificial Sequence
  Description of Artificial Sequence: Synthetic oligonucleotide
  Sense strand starting at position 407 of SEQ ID NO: 318014
agguccuguguuuaauuaa

SEQ ID NO: 530120 - RNA, 19 nt, Artificial Sequence
  Description of Artificial Sequence: Synthetic oligonucleotide
  Antisense strand to SEQ ID NO: 530119
uuaauuaaacacaggaccu

SEQ ID NO: 530121 - RNA, 19 nt, Artificial Sequence
  Description of Artificial Sequence: Synthetic oligonucleotide
  Sense strand starting at position 553 of SEQ ID NO: 318014
ggacuuaauucuguuaaga

SEQ ID NO: 530122 - RNA, 19 nt, Artificial Sequence
  Description of Artificial Sequence: Synthetic oligonucleotide
  Antisense strand to SEQ ID NO: 530121
ucuuaacagaauuaagucc

SEQ ID NO: 530123 - RNA, 19 nt, Artificial Sequence
  Description of Artificial Sequence: Synthetic oligonucleotide
  Sense strand starting at position 637 of SEQ ID NO: 318014
ucccuucugcuccaggauu

SEQ ID NO: 530124 - RNA, 19 nt, Artificial Sequence
  Description of Artificial Sequence: Synthetic oligonucleotide
  Antisense strand to SEQ ID NO: 530123
aauccuggagcagaaggga

SEQ ID NO: 530125 - RNA, 19 nt, Artificial Sequence
  Description of Artificial Sequence: Synthetic oligonucleotide
  Sense strand starting at position 699 of SEQ ID NO: 318014
ggguccuuuguauguggaa

SEQ ID NO: 530126 - RNA, 19 nt, Artificial Sequence
  Description of Artificial Sequence: Synthetic oligonucleotide
  Antisense strand to SEQ ID NO: 530125
uuccacauacaaaggaccc

SEQ ID NO: 530127 - RNA, 19 nt, Artificial Sequence
  Description of Artificial Sequence: Synthetic oligonucleotide
  Sense strand starting at position 893 of SEQ ID NO: 318014
cuggguuaaacuggaugau

SEQ ID NO: 530128 - RNA, 19 nt, Artificial Sequence
  Description of Artificial Sequence: Synthetic oligonucleotide
  Antisense strand to SEQ ID NO: 530127
aucauccaguuuaacccag

SEQ ID NO: 530129 - RNA, 19 nt, Artificial Sequence
  Description of Artificial Sequence: Synthetic oligonucleotide
  Sense strand starting at position 949 of SEQ ID NO: 318014
ugagaauagugcuccagga

SEQ ID NO: 530130 - RNA, 19 nt, Artificial Sequence
  Description of Artificial Sequence: Synthetic oligonucleotide
  Antisense strand to SEQ ID NO: 530129
uccuggagcacuauucuca

SEQ ID NO: 530131 - RNA, 19 nt, Artificial Sequence
  Description of Artificial Sequence: Synthetic oligonucleotide
  Sense strand starting at position 953 of SEQ ID NO: 318014
aauagugcuccaggaugau

SEQ ID NO: 530132 - RNA, 19 nt, Artificial Sequence
  Description of Artificial Sequence: Synthetic oligonucleotide
  Antisense strand to SEQ ID NO: 530131
aucauccuggagcacuauu

SEQ ID NO: 530133 - RNA, 19 nt, Artificial Sequence
  Description of Artificial Sequence: Synthetic oligonucleotide
  Sense strand starting at position 1095 of SEQ ID NO: 318014
agcugucugagccaggaaa

SEQ ID NO: 530134 - RNA, 19 nt, Artificial Sequence
  Description of Artificial Sequence: Synthetic oligonucleotide
  Antisense strand to SEQ ID NO: 530133
uuuccuggcucagacagcu

SEQ ID NO: 530135 - RNA, 19 nt, Artificial Sequence
  Description of Artificial Sequence: Synthetic oligonucleotide
  Sense strand starting at position 1255 of SEQ ID NO: 318014
ggaccuaaguucucucuga

SEQ ID NO: 530136 - RNA, 19 nt, Artificial Sequence
  Description of Artificial Sequence: Synthetic oligonucleotide
  Antisense strand to SEQ ID NO: 530135
ucagagagaacuuaggucc

SEQ ID NO: 530137 - RNA, 19 nt, Artificial Sequence
  Description of Artificial Sequence: Synthetic oligonucleotide
  Sense strand starting at position 1320 of SEQ ID NO: 318014
agacuucacgacggguaau

SEQ ID NO: 530138 - RNA, 19 nt, Artificial Sequence
  Description of Artificial Sequence: Synthetic oligonucleotide
  Antisense strand to SEQ ID NO: 530137
auuacccgucgugaagucu

SEQ ID NO: 530139 - RNA, 19 nt, Artificial Sequence
  Description of Artificial Sequence: Synthetic oligonucleotide
  Sense strand starting at position 1484 of SEQ ID NO: 318014
agacucuuccuccagaagu

SEQ ID NO: 530140 - RNA, 19 nt, Artificial Sequence
  Description of Artificial Sequence: Synthetic oligonucleotide
  Antisense strand to SEQ ID NO: 530139
acuucuggaggaagagucu

SEQ ID NO: 530141 - RNA, 19 nt, Artificial Sequence
  Description of Artificial Sequence: Synthetic oligonucleotide
  Sense strand starting at position 1712 of SEQ ID NO: 318014
gcgguuagugggaguguga

SEQ ID NO: 530142 - RNA, 19 nt, Artificial Sequence
  Description of Artificial Sequence: Synthetic oligonucleotide
  Antisense strand to SEQ ID NO: 530141
ucacacucccacuaaccgc

SEQ ID NO: 530143 - RNA, 19 nt, Artificial Sequence
  Description of Artificial Sequence: Synthetic oligonucleotide
  Sense strand starting at position 2417 of SEQ ID NO: 318014
acuuguguuguuuaaagua

SEQ ID NO: 530144 - RNA, 19 nt, Artificial Sequence
  Description of Artificial Sequence: Synthetic oligonucleotide
  Antisense strand to SEQ ID NO: 530143
uacuuuaaacaacacaagu

SEQ ID NO: 530145 - RNA, 19 nt, Artificial Sequence
  Description of Artificial Sequence: Synthetic oligonucleotide
  Sense strand starting at position 2465 of SEQ ID NO: 318014
agaucaaacuuugcagcau

SEQ ID NO: 530146 - RNA, 19 nt, Artificial Sequence
  Description of Artificial Sequence: Synthetic oligonucleotide
  Antisense strand to SEQ ID NO: 530145
augcugcaaaguuugaucu

SEQ ID NO: 530147 - RNA, 19 nt, Artificial Sequence
  Description of Artificial Sequence: Synthetic oligonucleotide
  Sense strand starting at position 2535 of SEQ ID NO: 318014
agauaaccauugcuuaguu

SEQ ID NO: 530148 - RNA, 19 nt, Artificial Sequence
  Description of Artificial Sequence: Synthetic oligonucleotide
  Antisense strand to SEQ ID NO: 530147
aacuaagcaaugguuaucu

SEQ ID NO: 530149 - RNA, 19 nt, Artificial Sequence
  Description of Artificial Sequence: Synthetic oligonucleotide
  Sense strand starting at position 2540 of SEQ ID NO: 318014
accauugcuuaguuuaaga

SEQ ID NO: 530150 - RNA, 19 nt, Artificial Sequence
  Description of Artificial Sequence: Synthetic oligonucleotide
  Antisense strand to SEQ ID NO: 530149
ucuuaaacuaagcaauggu

SEQ ID NO: 530151 - RNA, 19 nt, Artificial Sequence
  Description of Artificial Sequence: Synthetic oligonucleotide
  Sense strand starting at position 2542 of SEQ ID NO: 318014
cauugcuuaguuuaagagu

SEQ ID NO: 530152 - RNA, 19 nt, Artificial Sequence
  Description of Artificial Sequence: Synthetic oligonucleotide
  Antisense strand to SEQ ID NO: 530151
acucuuaaacuaagcaaug

SEQ ID NO: 530153 - RNA, 19 nt, Artificial Sequence
  Description of Artificial Sequence: Synthetic oligonucleotide
  Sense strand starting at position 2566 of SEQ ID NO: 318014
cugaauugcuuucuuugaa

SEQ ID NO: 530154 - RNA, 19 nt, Artificial Sequence
  Description of Artificial Sequence: Synthetic oligonucleotide
  Antisense strand to SEQ ID NO: 530153
uucaaagaaagcaauucag

SEQ ID NO: 530155 - RNA, 19 nt, Artificial Sequence
  Description of Artificial Sequence: Synthetic oligonucleotide
  Sense strand starting at position 2567 of SEQ ID NO: 318014
ugaauugcuuucuuugaau

SEQ ID NO: 530156 - RNA, 19 nt, Artificial Sequence
  Description of Artificial Sequence: Synthetic oligonucleotide
  Antisense strand to SEQ ID NO: 530155
auucaaagaaagcaauuca

SEQ ID NO: 530157 - RNA, 19 nt, Artificial Sequence
  Description of Artificial Sequence: Synthetic oligonucleotide
  Sense strand starting at position 2573 of SEQ ID NO: 318014
gcuuucuuugaauaugcuu

SEQ ID NO: 530158 - RNA, 19 nt, Artificial Sequence
  Description of Artificial Sequence: Synthetic oligonucleotide
  Antisense strand to SEQ ID NO: 530157
aagcauauucaaagaaagc

SEQ ID NO: 530159 - RNA, 19 nt, Artificial Sequence
  Description of Artificial Sequence: Synthetic oligonucleotide
  Sense strand starting at position 2584 of SEQ ID NO: 318014
auaugcuuacacuguuauu

SEQ ID NO: 530160 - RNA, 19 nt, Artificial Sequence
  Description of Artificial Sequence: Synthetic oligonucleotide
  Antisense strand to SEQ ID NO: 530159
aauaacaguguaagcauau

SEQ ID NO: 530161 - RNA, 19 nt, Artificial Sequence
  Description of Artificial Sequence: Synthetic oligonucleotide
  Sense strand starting at position 2639 of SEQ ID NO: 318014
uauaucaaggcucggauau

SEQ ID NO: 530162 - RNA, 19 nt, Artificial Sequence
  Description of Artificial Sequence: Synthetic oligonucleotide
  Antisense strand to SEQ ID NO: 530161
auauccgagccuugauaua

SEQ ID NO: 530163 - RNA, 19 nt, Artificial Sequence
  Description of Artificial Sequence: Synthetic oligonucleotide
  Sense strand starting at position 2640 of SEQ ID NO: 318014
auaucaaggcucggauauu

SEQ ID NO: 530164 - RNA, 19 nt, Artificial Sequence
  Description of Artificial Sequence: Synthetic oligonucleotide
  Antisense strand to SEQ ID NO: 530163
aauauccgagccuugauau

SEQ ID NO: 530165 - RNA, 19 nt, Artificial Sequence
  Description of Artificial Sequence: Synthetic oligonucleotide
  Sense strand starting at position 2691 of SEQ ID NO: 318014
gcuccagugagguagguuu

SEQ ID NO: 530166 - RNA, 19 nt, Artificial Sequence
  Description of Artificial Sequence: Synthetic oligonucleotide
  Antisense strand to SEQ ID NO: 530165
aaaccuaccucacuggagc

SEQ ID NO: 530167 - RNA, 19 nt, Artificial Sequence
  Description of Artificial Sequence: Synthetic oligonucleotide
  Sense strand starting at position 2702 of SEQ ID NO: 318014
guagguuugccguuacuuu

SEQ ID NO: 530168 - RNA, 19 nt, Artificial Sequence
  Description of Artificial Sequence: Synthetic oligonucleotide
  Antisense strand to SEQ ID NO: 530167
aaaguaacggcaaaccuac

SEQ ID NO: 530169 - RNA, 19 nt, Artificial Sequence
  Description of Artificial Sequence: Synthetic oligonucleotide
  Sense strand starting at position 2927 of SEQ ID NO: 318014
ucaacauuagaguguucca

SEQ ID NO: 530170 - RNA, 19 nt, Artificial Sequence
  Description of Artificial Sequence: Synthetic oligonucleotide
  Antisense strand to SEQ ID NO: 530169
uggaacacucuaauguuga

SEQ ID NO: 530171 - RNA, 19 nt, Artificial Sequence
  Description of Artificial Sequence: Synthetic oligonucleotide
  Sense strand starting at position 2930 of SEQ ID NO: 318014
acauuagaguguuccagac

SEQ ID NO: 530172 - RNA, 19 nt, Artificial Sequence
  Description of Artificial Sequence: Synthetic oligonucleotide
  Antisense strand to SEQ ID NO: 530171
gucuggaacacucuaaugu

SEQ ID NO: 530173 - RNA, 19 nt, Artificial Sequence
  Description of Artificial Sequence: Synthetic oligonucleotide
  Sense strand starting at position 2934 of SEQ ID NO: 318014
uagaguguuccagacuucu

SEQ ID NO: 530174 - RNA, 19 nt, Artificial Sequence
  Description of Artificial Sequence: Synthetic oligonucleotide
  Antisense strand to SEQ ID NO: 530173
agaagucuggaacacucua

SEQ ID NO: 530175 - RNA, 19 nt, Artificial Sequence
  Description of Artificial Sequence: Synthetic oligonucleotide
  Sense strand starting at position 3002 of SEQ ID NO: 318014
gcuggucaucaguaacauc

SEQ ID NO: 530176 - RNA, 19 nt, Artificial Sequence
  Description of Artificial Sequence: Synthetic oligonucleotide
  Antisense strand to SEQ ID NO: 530175
gauguuacugaugaccagc

SEQ ID NO: 530177 - RNA, 19 nt, Artificial Sequence
  Description of Artificial Sequence: Synthetic oligonucleotide
  Sense strand starting at position 3085 of SEQ ID NO: 318014
cagauaugauuaccgccau

SEQ ID NO: 530178 - RNA, 19 nt, Artificial Sequence
  Description of Artificial Sequence: Synthetic oligonucleotide
  Antisense strand to SEQ ID NO: 530177
auggcgguaaucauaucug

SEQ ID NO: 530179 - RNA, 19 nt, Artificial Sequence
  Description of Artificial Sequence: Synthetic oligonucleotide
  Sense strand starting at position 3134 of SEQ ID NO: 318014
cguacagagacuugugaua

SEQ ID NO: 530180 - RNA, 19 nt, Artificial Sequence
  Description of Artificial Sequence: Synthetic oligonucleotide
  Antisense strand to SEQ ID NO: 530179
uaucacaagucucuguacg

SEQ ID NO: 530181 - RNA, 19 nt, Artificial Sequence
  Description of Artificial Sequence: Synthetic oligonucleotide
  Sense strand starting at position 3146 of SEQ ID NO: 318014
ugugauauaugaccucaua

SEQ ID NO: 530182 - RNA, 19 nt, Artificial Sequence
  Description of Artificial Sequence: Synthetic oligonucleotide
  Antisense strand to SEQ ID NO: 530181
uaugaggucauauaucaca

SEQ ID NO: 530183 - RNA, 19 nt, Artificial Sequence
  Description of Artificial Sequence: Synthetic oligonucleotide
  Sense strand starting at position 3165 of SEQ ID NO: 318014
gucugacaucccggacuuu

SEQ ID NO: 530184 - RNA, 19 nt, Artificial Sequence
  Description of Artificial Sequence: Synthetic oligonucleotide
  Antisense strand to SEQ ID NO: 530183
aaaguccgggaugucagac

SEQ ID NO: 530185 - RNA, 19 nt, Artificial Sequence
  Description of Artificial Sequence: Synthetic oligonucleotide
  Sense strand starting at position 3166 of SEQ ID NO: 318014
ucugacaucccggacuuua

SEQ ID NO: 530186 - RNA, 19 nt, Artificial Sequence
  Description of Artificial Sequence: Synthetic oligonucleotide
  Antisense strand to SEQ ID NO: 530185
uaaaguccgggaugucaga

SEQ ID NO: 530187 - RNA, 19 nt, Artificial Sequence
  Description of Artificial Sequence: Synthetic oligonucleotide
  Sense strand starting at position 3177 of SEQ ID NO: 318014
ggacuuuagucagugcuag

SEQ ID NO: 530188 - RNA, 19 nt, Artificial Sequence
  Description of Artificial Sequence: Synthetic oligonucleotide
  Antisense strand to SEQ ID NO: 530187
cuagcacugacuaaagucc

SEQ ID NO: 530189 - RNA, 19 nt, Artificial Sequence
  Description of Artificial Sequence: Synthetic oligonucleotide
  Sense strand starting at position 3253 of SEQ ID NO: 318014
aaggaauccuggcuuuaug

SEQ ID NO: 530190 - RNA, 19 nt, Artificial Sequence
  Description of Artificial Sequence: Synthetic oligonucleotide
  Antisense strand to SEQ ID NO: 530189
cauaaagccaggauuccuu

SEQ ID NO: 530191 - RNA, 19 nt, Artificial Sequence
  Description of Artificial Sequence: Synthetic oligonucleotide
  Sense strand starting at position 14 of SEQ ID NO: 318015
caagaaagauuacguuguu

SEQ ID NO: 530192 - RNA, 19 nt, Artificial Sequence
  Description of Artificial Sequence: Synthetic oligonucleotide
  Antisense strand to SEQ ID NO: 530191
aacaacguaaucuuucuug

SEQ ID NO: 530193 - RNA, 19 nt, Artificial Sequence
  Description of Artificial Sequence: Synthetic oligonucleotide
  Sense strand starting at position 15 of SEQ ID NO: 318015
aagaaagauuacguuguuu

SEQ ID NO: 530194 - RNA, 19 nt, Artificial Sequence
  Description of Artificial Sequence: Synthetic oligonucleotide
  Antisense strand to SEQ ID NO: 530193
aaacaacguaaucuuucuu

SEQ ID NO: 530195 - RNA, 19 nt, Artificial Sequence
  Description of Artificial Sequence: Synthetic oligonucleotide
  Sense strand starting at position 746 of SEQ ID NO: 318015
cuuugaggccucugaucaa

SEQ ID NO: 530196 - RNA, 19 nt, Artificial Sequence
  Description of Artificial Sequence: Synthetic oligonucleotide
  Antisense strand to SEQ ID NO: 530195
uugaucagaggccucaaag

SEQ ID NO: 530197 - RNA, 19 nt, Artificial Sequence
  Description of Artificial Sequence: Synthetic oligonucleotide
  Sense strand starting at position 803 of SEQ ID NO: 318015
cuuucuuaagacggcaaga

SEQ ID NO: 530198 - RNA, 19 nt, Artificial Sequence
  Description of Artificial Sequence: Synthetic oligonucleotide
  Antisense strand to SEQ ID NO: 530197
ucuugccgucuuaagaaag

SEQ ID NO: 530199 - RNA, 19 nt, Artificial Sequence
  Description of Artificial Sequence: Synthetic oligonucleotide
  Sense strand starting at position 813 of SEQ ID NO: 318015
acggcaagacuuugagauu

SEQ ID NO: 530200 - RNA, 19 nt, Artificial Sequence
  Description of Artificial Sequence: Synthetic oligonucleotide
  Antisense strand to SEQ ID NO: 530199
aaucucaaagucuugccgu

SEQ ID NO: 530201 - RNA, 19 nt, Artificial Sequence
  Description of Artificial Sequence: Synthetic oligonucleotide
  Sense strand starting at position 814 of SEQ ID NO: 318015
cggcaagacuuugagauuc

SEQ ID NO: 530202 - RNA, 19 nt, Artificial Sequence
  Description of Artificial Sequence: Synthetic oligonucleotide
  Antisense strand to SEQ ID NO: 530201
gaaucucaaagucuugccg

SEQ ID NO: 530203 - RNA, 19 nt, Artificial Sequence
  Description of Artificial Sequence: Synthetic oligonucleotide
  Sense strand starting at position 870 of SEQ ID NO: 318015
ucucucaccuaauguaagu

SEQ ID NO: 530204 - RNA, 19 nt, Artificial Sequence
  Description of Artificial Sequence: Synthetic oligonucleotide
  Antisense strand to SEQ ID NO: 530203
acuuacauuaggugagaga

SEQ ID NO: 530205 - RNA, 19 nt, Artificial Sequence
  Description of Artificial Sequence: Synthetic oligonucleotide
  Sense strand starting at position 987 of SEQ ID NO: 318015
uuucguaauucccaacagu

SEQ ID NO: 530206 - RNA, 19 nt, Artificial Sequence
  Description of Artificial Sequence: Synthetic oligonucleotide
  Antisense strand to SEQ ID NO: 530205
acuguugggaauuacgaaa

SEQ ID NO: 530207 - RNA, 19 nt, Artificial Sequence
  Description of Artificial Sequence: Synthetic oligonucleotide
  Sense strand starting at position 990 of SEQ ID NO: 318015
cguaauucccaacaguaag

SEQ ID NO: 530208 - RNA, 19 nt, Artificial Sequence
  Description of Artificial Sequence: Synthetic oligonucleotide
  Antisense strand to SEQ ID NO: 530207
cuuacuguugggaauuacg

SEQ ID NO: 530209 - RNA, 19 nt, Artificial Sequence
  Description of Artificial Sequence: Synthetic oligonucleotide
  Sense strand starting at position 2497 of SEQ ID NO: 318015
gcguccaaaugguuugaaa

SEQ ID NO: 530210 - RNA, 19 nt, Artificial Sequence
  Description of Artificial Sequence: Synthetic oligonucleotide
  Antisense strand to SEQ ID NO: 530209
uuucaaaccauuuggacgc

SEQ ID NO: 530211 - RNA, 19 nt, Artificial Sequence
  Description of Artificial Sequence: Synthetic oligonucleotide
  Sense strand starting at position 2499 of SEQ ID NO: 318015
guccaaaugguuugaaagu

SEQ ID NO: 530212 - RNA, 19 nt, Artificial Sequence
  Description of Artificial Sequence: Synthetic oligonucleotide
  Antisense strand to SEQ ID NO: 530211
acuuucaaaccauuuggac

SEQ ID NO: 530213 - RNA, 19 nt, Artificial Sequence
  Description of Artificial Sequence: Synthetic oligonucleotide
  Sense strand starting at position 2593 of SEQ ID NO: 318015
ucggacuugugcuauaaag

SEQ ID NO: 530214 - RNA, 19 nt, Artificial Sequence
  Description of Artificial Sequence: Synthetic oligonucleotide
  Antisense strand to SEQ ID NO: 530213
cuuuauagcacaaguccga

SEQ ID NO: 530215 - RNA, 19 nt, Artificial Sequence
  Description of Artificial Sequence: Synthetic oligonucleotide
  Sense strand starting at position 2595 of SEQ ID NO: 318015
ggacuugugcuauaaagug

SEQ ID NO: 530216 - RNA, 19 nt, Artificial Sequence
  Description of Artificial Sequence: Synthetic oligonucleotide
  Antisense strand to SEQ ID NO: 530215
cacuuuauagcacaagucc

SEQ ID NO: 530217 - RNA, 19 nt, Artificial Sequence
  Description of Artificial Sequence: Synthetic oligonucleotide
  Sense strand starting at position 2618 of SEQ ID NO: 318015
gggcguagugaguacaguu

SEQ ID NO: 530218 - RNA, 19 nt, Artificial Sequence
  Description of Artificial Sequence: Synthetic oligonucleotide
  Antisense strand to SEQ ID NO: 530217
aacuguacucacuacgccc

SEQ ID NO: 530219 - RNA, 19 nt, Artificial Sequence
  Description of Artificial Sequence: Synthetic oligonucleotide
  Sense strand starting at position 2621 of SEQ ID NO: 318015
cguagugaguacaguuagu

SEQ ID NO: 530220 - RNA, 19 nt, Artificial Sequence
  Description of Artificial Sequence: Synthetic oligonucleotide
  Antisense strand to SEQ ID NO: 530219
acuaacuguacucacuacg

SEQ ID NO: 530221 - RNA, 19 nt, Artificial Sequence
  Description of Artificial Sequence: Synthetic oligonucleotide
  Sense strand starting at position 2712 of SEQ ID NO: 318015
cgucuuuguacgcaucgga

SEQ ID NO: 530222 - RNA, 19 nt, Artificial Sequence
  Description of Artificial Sequence: Synthetic oligonucleotide
  Antisense strand to SEQ ID NO: 530221
uccgaugcguacaaagacg

SEQ ID NO: 530223 - RNA, 19 nt, Artificial Sequence
  Description of Artificial Sequence: Synthetic oligonucleotide
  Sense strand starting at position 2726 of SEQ ID NO: 318015
ucggaugucucuccgugua

SEQ ID NO: 530224 - RNA, 19 nt, Artificial Sequence
  Description of Artificial Sequence: Synthetic oligonucleotide
  Antisense strand to SEQ ID NO: 530223
uacacggagagacauccga

SEQ ID NO: 530225 - RNA, 19 nt, Artificial Sequence
  Description of Artificial Sequence: Synthetic oligonucleotide
  Sense strand starting at position 2728 of SEQ ID NO: 318015
ggaugucucuccguguagu

SEQ ID NO: 530226 - RNA, 19 nt, Artificial Sequence
  Description of Artificial Sequence: Synthetic oligonucleotide
  Antisense strand to SEQ ID NO: 530225
acuacacggagagacaucc

SEQ ID NO: 530227 - RNA, 19 nt, Artificial Sequence
  Description of Artificial Sequence: Synthetic oligonucleotide
  Sense strand starting at position 2729 of SEQ ID NO: 318015
gaugucucuccguguaguu

SEQ ID NO: 530228 - RNA, 19 nt, Artificial Sequence
  Description of Artificial Sequence: Synthetic oligonucleotide
  Antisense strand to SEQ ID NO: 530227
aacuacacggagagacauc

SEQ ID NO: 530229 - RNA, 19 nt, Artificial Sequence
  Description of Artificial Sequence: Synthetic oligonucleotide
  Sense strand starting at position 2730 of SEQ ID NO: 318015
augucucuccguguaguua

SEQ ID NO: 530230 - RNA, 19 nt, Artificial Sequence
  Description of Artificial Sequence: Synthetic oligonucleotide
  Antisense strand to SEQ ID NO: 530229
uaacuacacggagagacau

SEQ ID NO: 530231 - RNA, 19 nt, Artificial Sequence
  Description of Artificial Sequence: Synthetic oligonucleotide
  Sense strand starting at position 2738 of SEQ ID NO: 318015
ccguguaguuacuagguga

SEQ ID NO: 530232 - RNA, 19 nt, Artificial Sequence
  Description of Artificial Sequence: Synthetic oligonucleotide
  Antisense strand to SEQ ID NO: 530231
ucaccuaguaacuacacgg

SEQ ID NO: 530233 - RNA, 19 nt, Artificial Sequence
  Description of Artificial Sequence: Synthetic oligonucleotide
  Sense strand starting at position 2741 of SEQ ID NO: 318015
uguaguuacuaggugaaau

SEQ ID NO: 530234 - RNA, 19 nt, Artificial Sequence
  Description of Artificial Sequence: Synthetic oligonucleotide
  Antisense strand to SEQ ID NO: 530233
auuucaccuaguaacuaca

SEQ ID NO: 530235 - RNA, 19 nt, Artificial Sequence
  Description of Artificial Sequence: Synthetic oligonucleotide
  Sense strand starting at position 2742 of SEQ ID NO: 318015
guaguuacuaggugaaauc

SEQ ID NO: 530236 - RNA, 19 nt, Artificial Sequence
  Description of Artificial Sequence: Synthetic oligonucleotide
  Antisense strand to SEQ ID NO: 530235
gauuucaccuaguaacuac

SEQ ID NO: 530237 - RNA, 19 nt, Artificial Sequence
  Description of Artificial Sequence: Synthetic oligonucleotide
  Sense strand starting at position 2753 of SEQ ID NO: 318015
gugaaauccucuuggcgug

SEQ ID NO: 530238 - RNA, 19 nt, Artificial Sequence
  Description of Artificial Sequence: Synthetic oligonucleotide
  Antisense strand to SEQ ID NO: 530237
cacgccaagaggauuucac

SEQ ID NO: 530239 - RNA, 19 nt, Artificial Sequence
  Description of Artificial Sequence: Synthetic oligonucleotide
  Sense strand starting at position 2769 of SEQ ID NO: 318015
gugcgcaaauuagguuaaa

SEQ ID NO: 530240 - RNA, 19 nt, Artificial Sequence
  Description of Artificial Sequence: Synthetic oligonucleotide
  Antisense strand to SEQ ID NO: 530239
uuuaaccuaauuugcgcac

SEQ ID NO: 530241 - RNA, 19 nt, Artificial Sequence
  Description of Artificial Sequence: Synthetic oligonucleotide
  Sense strand starting at position 2827 of SEQ ID NO: 318015
gaggguggcgcuuguuaag

SEQ ID NO: 530242 - RNA, 19 nt, Artificial Sequence
  Description of Artificial Sequence: Synthetic oligonucleotide
  Antisense strand to SEQ ID NO: 530241
cuuaacaagcgccacccuc

SEQ ID NO: 530243 - RNA, 19 nt, Artificial Sequence
  Description of Artificial Sequence: Synthetic oligonucleotide
  Sense strand starting at position 2833 of SEQ ID NO: 318015
ggcgcuuguuaagugaaac

SEQ ID NO: 530244 - RNA, 19 nt, Artificial Sequence
  Description of Artificial Sequence: Synthetic oligonucleotide
  Antisense strand to SEQ ID NO: 530243
guuucacuuaacaagcgcc

SEQ ID NO: 530245 - RNA, 19 nt, Artificial Sequence
  Description of Artificial Sequence: Synthetic oligonucleotide
  Sense strand starting at position 2834 of SEQ ID NO: 318015
gcgcuuguuaagugaaaca

SEQ ID NO: 530246 - RNA, 19 nt, Artificial Sequence
  Description of Artificial Sequence: Synthetic oligonucleotide
  Antisense strand to SEQ ID NO: 530245
uguuucacuuaacaagcgc

SEQ ID NO: 530247 - RNA, 19 nt, Artificial Sequence
  Description of Artificial Sequence: Synthetic oligonucleotide
  Sense strand starting at position 2873 of SEQ ID NO: 318015
ugugccauccuguauuaaa

SEQ ID NO: 530248 - RNA, 19 nt, Artificial Sequence
  Description of Artificial Sequence: Synthetic oligonucleotide
  Antisense strand to SEQ ID NO: 530247
uuuaauacaggauggcaca

SEQ ID NO: 530249 - RNA, 19 nt, Artificial Sequence
  Description of Artificial Sequence: Synthetic oligonucleotide
  Sense strand starting at position 2963 of SEQ ID NO: 318015
guggcuaaagagugcuuua

SEQ ID NO: 530250 - RNA, 19 nt, Artificial Sequence
  Description of Artificial Sequence: Synthetic oligonucleotide
  Antisense strand to SEQ ID NO: 530249
uaaagcacucuuuagccac

SEQ ID NO: 530251 - RNA, 19 nt, Artificial Sequence
  Description of Artificial Sequence: Synthetic oligonucleotide
  Sense strand starting at position 2966 of SEQ ID NO: 318015
gcuaaagagugcuuuagau

SEQ ID NO: 530252 - RNA, 19 nt, Artificial Sequence
  Description of Artificial Sequence: Synthetic oligonucleotide
  Antisense strand to SEQ ID NO: 530251
aucuaaagcacucuuuagc

SEQ ID NO: 530253 - RNA, 19 nt, Artificial Sequence
  Description of Artificial Sequence: Synthetic oligonucleotide
  Sense strand starting at position 2970 of SEQ ID NO: 318015
aagagugcuuuagauggau

SEQ ID NO: 530254 - RNA, 19 nt, Artificial Sequence
  Description of Artificial Sequence: Synthetic oligonucleotide
  Antisense strand to SEQ ID NO: 530253
auccaucuaaagcacucuu

SEQ ID NO: 530255 - RNA, 19 nt, Artificial Sequence
  Description of Artificial Sequence: Synthetic oligonucleotide
  Sense strand starting at position 3034 of SEQ ID NO: 318015
aucccaugcccuggaaagu

SEQ ID NO: 530256 - RNA, 19 nt, Artificial Sequence
  Description of Artificial Sequence: Synthetic oligonucleotide
  Antisense strand to SEQ ID NO: 530255
acuuuccagggcaugggau

SEQ ID NO: 530257 - RNA, 19 nt, Artificial Sequence
  Description of Artificial Sequence: Synthetic oligonucleotide
  Sense strand starting at position 3525 of SEQ ID NO: 318015
aauguuguagcuugaaaua

SEQ ID NO: 530258 - RNA, 19 nt, Artificial Sequence
  Description of Artificial Sequence: Synthetic oligonucleotide
  Antisense strand to SEQ ID NO: 530257
uauuucaagcuacaacauu

SEQ ID NO: 530259 - RNA, 19 nt, Artificial Sequence
  Description of Artificial Sequence: Synthetic oligonucleotide
  Sense strand starting at position 3595 of SEQ ID NO: 318015
ggaguaguggcccacaucu

SEQ ID NO: 530260 - RNA, 19 nt, Artificial Sequence
  Description of Artificial Sequence: Synthetic oligonucleotide
  Antisense strand to SEQ ID NO: 530259
agaugugggccacuacucc

SEQ ID NO: 530261 - RNA, 19 nt, Artificial Sequence
  Description of Artificial Sequence: Synthetic oligonucleotide
  Sense strand starting at position 14 of SEQ ID NO: 318016
uuuaguuauacucguguuc

SEQ ID NO: 530262 - RNA, 19 nt, Artificial Sequence
  Description of Artificial Sequence: Synthetic oligonucleotide
  Antisense strand to SEQ ID NO: 530261
gaacacgaguauaacuaaa

SEQ ID NO: 530263 - RNA, 19 nt, Artificial Sequence
  Description of Artificial Sequence: Synthetic oligonucleotide
  Sense strand starting at position 151 of SEQ ID NO: 318016
guaguaacuaacgguaacu

SEQ ID NO: 530264 - RNA, 19 nt, Artificial Sequence
  Description of Artificial Sequence: Synthetic oligonucleotide
  Antisense strand to SEQ ID NO: 530263
aguuaccguuaguuacuac

SEQ ID NO: 530265 - RNA, 19 nt, Artificial Sequence
  Description of Artificial Sequence: Synthetic oligonucleotide
  Sense strand starting at position 300 of SEQ ID NO: 318016
gcauaaccucuugagugga

SEQ ID NO: 530266 - RNA, 19 nt, Artificial Sequence
  Description of Artificial Sequence: Synthetic oligonucleotide
  Antisense strand to SEQ ID NO: 530265
uccacucaagagguuaugc

SEQ ID NO: 530267 - RNA, 19 nt, Artificial Sequence
  Description of Artificial Sequence: Synthetic oligonucleotide
  Sense strand starting at position 302 of SEQ ID NO: 318016
auaaccucuugaguggaaa

SEQ ID NO: 530268 - RNA, 19 nt, Artificial Sequence
  Description of Artificial Sequence: Synthetic oligonucleotide
  Antisense strand to SEQ ID NO: 530267
uuuccacucaagagguuau

SEQ ID NO: 530269 - RNA, 19 nt, Artificial Sequence
  Description of Artificial Sequence: Synthetic oligonucleotide
  Sense strand starting at position 390 of SEQ ID NO: 318016
agcuucugguccugguaau

SEQ ID NO: 530270 - RNA, 19 nt, Artificial Sequence
  Description of Artificial Sequence: Synthetic oligonucleotide
  Antisense strand to SEQ ID NO: 530269
auuaccaggaccagaagcu

SEQ ID NO: 530271 - RNA, 19 nt, Artificial Sequence
  Description of Artificial Sequence: Synthetic oligonucleotide
  Sense strand starting at position 491 of SEQ ID NO: 318016
acggauuaauauguuagga

SEQ ID NO: 530272 - RNA, 19 nt, Artificial Sequence
  Description of Artificial Sequence: Synthetic oligonucleotide
  Antisense strand to SEQ ID NO: 530271
uccuaacauauuaauccgu

SEQ ID NO: 530273 - RNA, 19 nt, Artificial Sequence
  Description of Artificial Sequence: Synthetic oligonucleotide
  Sense strand starting at position 493 of SEQ ID NO: 318016
ggauuaauauguuaggaac

SEQ ID NO: 530274 - RNA, 19 nt, Artificial Sequence
  Description of Artificial Sequence: Synthetic oligonucleotide
  Antisense strand to SEQ ID NO: 530273
guuccuaacauauuaaucc

SEQ ID NO: 530275 - RNA, 19 nt, Artificial Sequence
  Description of Artificial Sequence: Synthetic oligonucleotide
  Sense strand starting at position 496 of SEQ ID NO: 318016
uuaauauguuaggaacaac

SEQ ID NO: 530276 - RNA, 19 nt, Artificial Sequence
  Description of Artificial Sequence: Synthetic oligonucleotide
  Antisense strand to SEQ ID NO: 530275
guuguuccuaacauauuaa

SEQ ID NO: 530277 - RNA, 19 nt, Artificial Sequence
  Description of Artificial Sequence: Synthetic oligonucleotide
  Sense strand starting at position 689 of SEQ ID NO: 318016
gaagacacguggugaauua

SEQ ID NO: 530278 - RNA, 19 nt, Artificial Sequence
  Description of Artificial Sequence: Synthetic oligonucleotide
  Antisense strand to SEQ ID NO: 530277
uaauucaccacgugucuuc

SEQ ID NO: 530279 - RNA, 19 nt, Artificial Sequence
  Description of Artificial Sequence: Synthetic oligonucleotide
  Sense strand starting at position 690 of SEQ ID NO: 318016
aagacacguggugaauuau

SEQ ID NO: 530280 - RNA, 19 nt, Artificial Sequence
  Description of Artificial Sequence: Synthetic oligonucleotide
  Antisense strand to SEQ ID NO: 530279
auaauucaccacgugucuu

SEQ ID NO: 530281 - RNA, 19 nt, Artificial Sequence
  Description of Artificial Sequence: Synthetic oligonucleotide
  Sense strand starting at position 699 of SEQ ID NO: 318016
ggugaauuauuuguugcau

SEQ ID NO: 530282 - RNA, 19 nt, Artificial Sequence
  Description of Artificial Sequence: Synthetic oligonucleotide
  Antisense strand to SEQ ID NO: 530281
augcaacaaauaauucacc

SEQ ID NO: 530283 - RNA, 19 nt, Artificial Sequence
  Description of Artificial Sequence: Synthetic oligonucleotide
  Sense strand starting at position 700 of SEQ ID NO: 318016
gugaauuauuuguugcauu

SEQ ID NO: 530284 - RNA, 19 nt, Artificial Sequence
  Description of Artificial Sequence: Synthetic oligonucleotide
  Antisense strand to SEQ ID NO: 530283
aaugcaacaaauaauucac

SEQ ID NO: 530285 - RNA, 19 nt, Artificial Sequence
  Description of Artificial Sequence: Synthetic oligonucleotide
  Sense strand starting at position 729 of SEQ ID NO: 318016
uuucuaccacugugaauga

SEQ ID NO: 530286 - RNA, 19 nt, Artificial Sequence
  Description of Artificial Sequence: Synthetic oligonucleotide
  Antisense strand to SEQ ID NO: 530285
ucauucacagugguagaaa

SEQ ID NO: 530287 - RNA, 19 nt, Artificial Sequence
  Description of Artificial Sequence: Synthetic oligonucleotide
  Sense strand starting at position 819 of SEQ ID NO: 318016
guagcuuaggacuguuuga

SEQ ID NO: 530288 - RNA, 19 nt, Artificial Sequence
  Description of Artificial Sequence: Synthetic oligonucleotide
  Antisense strand to SEQ ID NO: 530287
ucaaacaguccuaagcuac

SEQ ID NO: 530289 - RNA, 19 nt, Artificial Sequence
  Description of Artificial Sequence: Synthetic oligonucleotide
  Sense strand starting at position 847 of SEQ ID NO: 318016
guuccuaagccuuaaacgu

SEQ ID NO: 530290 - RNA, 19 nt, Artificial Sequence
  Description of Artificial Sequence: Synthetic oligonucleotide
  Antisense strand to SEQ ID NO: 530289
acguuuaaggcuuaggaac

SEQ ID NO: 530291 - RNA, 19 nt, Artificial Sequence
  Description of Artificial Sequence: Synthetic oligonucleotide
  Sense strand starting at position 878 of SEQ ID NO: 318016
ucaguuuacucagacaaug

SEQ ID NO: 530292 - RNA, 19 nt, Artificial Sequence
  Description of Artificial Sequence: Synthetic oligonucleotide
  Antisense strand to SEQ ID NO: 530291
cauugucugaguaaacuga

SEQ ID NO: 530293 - RNA, 19 nt, Artificial Sequence
  Description of Artificial Sequence: Synthetic oligonucleotide
  Sense strand starting at position 883 of SEQ ID NO: 318016
uuacucagacaaugguuaa

SEQ ID NO: 530294 - RNA, 19 nt, Artificial Sequence
  Description of Artificial Sequence: Synthetic oligonucleotide
  Antisense strand to SEQ ID NO: 530293
uuaaccauugucugaguaa

SEQ ID NO: 530295 - RNA, 19 nt, Artificial Sequence
  Description of Artificial Sequence: Synthetic oligonucleotide
  Sense strand starting at position 957 of SEQ ID NO: 318016
cugaaaggcuuccgagaau

SEQ ID NO: 530296 - RNA, 19 nt, Artificial Sequence
  Description of Artificial Sequence: Synthetic oligonucleotide
  Antisense strand to SEQ ID NO: 530295
auucucggaagccuuucag

SEQ ID NO: 530297 - RNA, 19 nt, Artificial Sequence
  Description of Artificial Sequence: Synthetic oligonucleotide
  Sense strand starting at position 963 of SEQ ID NO: 318016
ggcuuccgagaauaacaua

SEQ ID NO: 530298 - RNA, 19 nt, Artificial Sequence
  Description of Artificial Sequence: Synthetic oligonucleotide
  Antisense strand to SEQ ID NO: 530297
uauguuauucucggaagcc

SEQ ID NO: 530299 - RNA, 19 nt, Artificial Sequence
  Description of Artificial Sequence: Synthetic oligonucleotide
  Sense strand starting at position 2074 of SEQ ID NO: 318016
aagucaaccucuggagaga

SEQ ID NO: 530300 - RNA, 19 nt, Artificial Sequence
  Description of Artificial Sequence: Synthetic oligonucleotide
  Antisense strand to SEQ ID NO: 530299
ucucuccagagguugacuu

SEQ ID NO: 530301 - RNA, 19 nt, Artificial Sequence
  Description of Artificial Sequence: Synthetic oligonucleotide
  Sense strand starting at position 2130 of SEQ ID NO: 318016
gggcuucuuuacccaagca

SEQ ID NO: 530302 - RNA, 19 nt, Artificial Sequence
  Description of Artificial Sequence: Synthetic oligonucleotide
  Antisense strand to SEQ ID NO: 530301
ugcuuggguaaagaagccc

SEQ ID NO: 530303 - RNA, 19 nt, Artificial Sequence
  Description of Artificial Sequence: Synthetic oligonucleotide
  Sense strand starting at position 2173 of SEQ ID NO: 318016
ugaacaagacaucggagua

SEQ ID NO: 530304 - RNA, 19 nt, Artificial Sequence
  Description of Artificial Sequence: Synthetic oligonucleotide
  Antisense strand to SEQ ID NO: 530303
uacuccgaugucuuguuca

SEQ ID NO: 530305 - RNA, 19 nt, Artificial Sequence
  Description of Artificial Sequence: Synthetic oligonucleotide
  Sense strand starting at position 2215 of SEQ ID NO: 318016
acgguauuauggagggcaa

SEQ ID NO: 530306 - RNA, 19 nt, Artificial Sequence
  Description of Artificial Sequence: Synthetic oligonucleotide
  Antisense strand to SEQ ID NO: 530305
uugcccuccauaauaccgu

SEQ ID NO: 530307 - RNA, 19 nt, Artificial Sequence
  Description of Artificial Sequence: Synthetic oligonucleotide
  Sense strand starting at position 2395 of SEQ ID NO: 318016
ugugcugccacggaguauu

SEQ ID NO: 530308 - RNA, 19 nt, Artificial Sequence
  Description of Artificial Sequence: Synthetic oligonucleotide
  Antisense strand to SEQ ID NO: 530307
aauacuccguggcagcaca

SEQ ID NO: 530309 - RNA, 19 nt, Artificial Sequence
  Description of Artificial Sequence: Synthetic oligonucleotide
  Sense strand starting at position 2405 of SEQ ID NO: 318016
cggaguauuagcgaaugua

SEQ ID NO: 530310 - RNA, 19 nt, Artificial Sequence
  Description of Artificial Sequence: Synthetic oligonucleotide
  Antisense strand to SEQ ID NO: 530309
uacauucgcuaauacuccg

SEQ ID NO: 530311 - RNA, 19 nt, Artificial Sequence
  Description of Artificial Sequence: Synthetic oligonucleotide
  Sense strand starting at position 2408 of SEQ ID NO: 318016
aguauuagcgaauguaacu

SEQ ID NO: 530312 - RNA, 19 nt, Artificial Sequence
  Description of Artificial Sequence: Synthetic oligonucleotide
  Antisense strand to SEQ ID NO: 530311
aguuacauucgcuaauacu

SEQ ID NO: 530313 - RNA, 19 nt, Artificial Sequence
  Description of Artificial Sequence: Synthetic oligonucleotide
  Sense strand starting at position 2415 of SEQ ID NO: 318016
gcgaauguaacucagagau

SEQ ID NO: 530314 - RNA, 19 nt, Artificial Sequence
  Description of Artificial Sequence: Synthetic oligonucleotide
  Antisense strand to SEQ ID NO: 530313
aucucugaguuacauucgc

SEQ ID NO: 530315 - RNA, 19 nt, Artificial Sequence
  Description of Artificial Sequence: Synthetic oligonucleotide
  Sense strand starting at position 2421 of SEQ ID NO: 318016
guaacucagagauaagugu

SEQ ID NO: 530316 - RNA, 19 nt, Artificial Sequence
  Description of Artificial Sequence: Synthetic oligonucleotide
  Antisense strand to SEQ ID NO: 530315
acacuuaucucugaguuac

SEQ ID NO: 530317 - RNA, 19 nt, Artificial Sequence
  Description of Artificial Sequence: Synthetic oligonucleotide
  Sense strand starting at position 2425 of SEQ ID NO: 318016
cucagagauaaguguaaag

SEQ ID NO: 530318 - RNA, 19 nt, Artificial Sequence
  Description of Artificial Sequence: Synthetic oligonucleotide
  Antisense strand to SEQ ID NO: 530317
cuuuacacuuaucucugag

SEQ ID NO: 530319 - RNA, 19 nt, Artificial Sequence
  Description of Artificial Sequence: Synthetic oligonucleotide
  Sense strand starting at position 2542 of SEQ ID NO: 318016
cuuaaauucucccgaggag

SEQ ID NO: 530320 - RNA, 19 nt, Artificial Sequence
  Description of Artificial Sequence: Synthetic oligonucleotide
  Antisense strand to SEQ ID NO: 530319
cuccucgggagaauuuaag

SEQ ID NO: 530321 - RNA, 19 nt, Artificial Sequence
  Description of Artificial Sequence: Synthetic oligonucleotide
  Sense strand starting at position 2545 of SEQ ID NO: 318016
aaauucucccgaggagacu

SEQ ID NO: 530322 - RNA, 19 nt, Artificial Sequence
  Description of Artificial Sequence: Synthetic oligonucleotide
  Antisense strand to SEQ ID NO: 530321
agucuccucgggagaauuu

SEQ ID NO: 530323 - RNA, 19 nt, Artificial Sequence
  Description of Artificial Sequence: Synthetic oligonucleotide
  Sense strand starting at position 2566 of SEQ ID NO: 318016
cccacuucugagggagcaa

SEQ ID NO: 530324 - RNA, 19 nt, Artificial Sequence
  Description of Artificial Sequence: Synthetic oligonucleotide
  Antisense strand to SEQ ID NO: 530323
uugcucccucagaaguggg

SEQ ID NO: 530325 - RNA, 19 nt, Artificial Sequence
  Description of Artificial Sequence: Synthetic oligonucleotide
  Sense strand starting at position 2601 of SEQ ID NO: 318016
gguuuccacuuccucgaau

SEQ ID NO: 530326 - RNA, 19 nt, Artificial Sequence
  Description of Artificial Sequence: Synthetic oligonucleotide
  Antisense strand to SEQ ID NO: 530325
auucgaggaaguggaaacc

SEQ ID NO: 530327 - RNA, 19 nt, Artificial Sequence
  Description of Artificial Sequence: Synthetic oligonucleotide
  Sense strand starting at position 2602 of SEQ ID NO: 318016
guuuccacuuccucgaauu

SEQ ID NO: 530328 - RNA, 19 nt, Artificial Sequence
  Description of Artificial Sequence: Synthetic oligonucleotide
  Antisense strand to SEQ ID NO: 530327
aauucgaggaaguggaaac

SEQ ID NO: 530329 - RNA, 19 nt, Artificial Sequence
  Description of Artificial Sequence: Synthetic oligonucleotide
  Sense strand starting at position 3489 of SEQ ID NO: 318016
gagaaagaguguggaagaa

SEQ ID NO: 530330 - RNA, 19 nt, Artificial Sequence
  Description of Artificial Sequence: Synthetic oligonucleotide
  Antisense strand to SEQ ID NO: 530329
uucuuccacacucuuucuc

SEQ ID NO: 530331 - RNA, 19 nt, Artificial Sequence
  Description of Artificial Sequence: Synthetic oligonucleotide
  Sense strand starting at position 3777 of SEQ ID NO: 318016
gugaacaaucgggaacguu

SEQ ID NO: 530332 - RNA, 19 nt, Artificial Sequence
  Description of Artificial Sequence: Synthetic oligonucleotide
  Antisense strand to SEQ ID NO: 530331
aacguucccgauuguucac

SEQ ID NO: 530333 - RNA, 19 nt, Artificial Sequence
  Description of Artificial Sequence: Synthetic oligonucleotide
  Sense strand starting at position 381 of SEQ ID NO: 318017
aauggagauacugguagua

SEQ ID NO: 530334 - RNA, 19 nt, Artificial Sequence
  Description of Artificial Sequence: Synthetic oligonucleotide
  Antisense strand to SEQ ID NO: 530333
uacuaccaguaucuccauu

SEQ ID NO: 530335 - RNA, 19 nt, Artificial Sequence
  Description of Artificial Sequence: Synthetic oligonucleotide
  Sense strand starting at position 386 of SEQ ID NO: 318017
agauacugguaguaagaaa

SEQ ID NO: 530336 - RNA, 19 nt, Artificial Sequence
  Description of Artificial Sequence: Synthetic oligonucleotide
  Antisense strand to SEQ ID NO: 530335
uuucuuacuaccaguaucu

SEQ ID NO: 530337 - RNA, 19 nt, Artificial Sequence
  Description of Artificial Sequence: Synthetic oligonucleotide
  Sense strand starting at position 452 of SEQ ID NO: 318017
gcuaguucugaaugaaccu

SEQ ID NO: 530338 - RNA, 19 nt, Artificial Sequence
  Description of Artificial Sequence: Synthetic oligonucleotide
  Antisense strand to SEQ ID NO: 530337
agguucauucagaacuagc

SEQ ID NO: 530339 - RNA, 19 nt, Artificial Sequence
  Description of Artificial Sequence: Synthetic oligonucleotide
  Sense strand starting at position 461 of SEQ ID NO: 318017
gaaugaaccugagaaagag

SEQ ID NO: 530340 - RNA, 19 nt, Artificial Sequence
  Description of Artificial Sequence: Synthetic oligonucleotide
  Antisense strand to SEQ ID NO: 530339
cucuuucucagguucauuc

SEQ ID NO: 530341 - RNA, 19 nt, Artificial Sequence
  Description of Artificial Sequence: Synthetic oligonucleotide
  Sense strand starting at position 549 of SEQ ID NO: 318017
auaacuaaauuggaucaga

SEQ ID NO: 530342 - RNA, 19 nt, Artificial Sequence
  Description of Artificial Sequence: Synthetic oligonucleotide
  Antisense strand to SEQ ID NO: 530341
ucugauccaauuuaguuau

SEQ ID NO: 530343 - RNA, 19 nt, Artificial Sequence
  Description of Artificial Sequence: Synthetic oligonucleotide
  Sense strand starting at position 612 of SEQ ID NO: 318017
gagcaaucagcugggaauu

SEQ ID NO: 530344 - RNA, 19 nt, Artificial Sequence
  Description of Artificial Sequence: Synthetic oligonucleotide
  Antisense strand to SEQ ID NO: 530343
aauucccagcugauugcuc

SEQ ID NO: 530345 - RNA, 19 nt, Artificial Sequence
  Description of Artificial Sequence: Synthetic oligonucleotide
  Sense strand starting at position 613 of SEQ ID NO: 318017
agcaaucagcugggaauua

SEQ ID NO: 530346 - RNA, 19 nt, Artificial Sequence
  Description of Artificial Sequence: Synthetic oligonucleotide
  Antisense strand to SEQ ID NO: 530345
uaauucccagcugauugcu

SEQ ID NO: 530347 - RNA, 19 nt, Artificial Sequence
  Description of Artificial Sequence: Synthetic oligonucleotide
  Sense strand starting at position 641 of SEQ ID NO: 318017
aacggauggguuugauauc

SEQ ID NO: 530348 - RNA, 19 nt, Artificial Sequence
  Description of Artificial Sequence: Synthetic oligonucleotide
  Antisense strand to SEQ ID NO: 530347
gauaucaaacccauccguu

SEQ ID NO: 530349 - RNA, 19 nt, Artificial Sequence
  Description of Artificial Sequence: Synthetic oligonucleotide
  Sense strand starting at position 729 of SEQ ID NO: 318017
caaagugacugugcacaaa

SEQ ID NO: 530350 - RNA, 19 nt, Artificial Sequence
  Description of Artificial Sequence: Synthetic oligonucleotide
  Antisense strand to SEQ ID NO: 530349
uuugugcacagucacuuug

SEQ ID NO: 530351 - RNA, 19 nt, Artificial Sequence
  Description of Artificial Sequence: Synthetic oligonucleotide
  Sense strand starting at position 898 of SEQ ID NO: 318017
acugaaguacaucauguau

SEQ ID NO: 530352 - RNA, 19 nt, Artificial Sequence
  Description of Artificial Sequence: Synthetic oligonucleotide
  Antisense strand to SEQ ID NO: 530351
auacaugauguacuucagu

SEQ ID NO: 530353 - RNA, 19 nt, Artificial Sequence
  Description of Artificial Sequence: Synthetic oligonucleotide
  Sense strand starting at position 909 of SEQ ID NO: 318017
ucauguaugguggauauca

SEQ ID NO: 530354 - RNA, 19 nt, Artificial Sequence
  Description of Artificial Sequence: Synthetic oligonucleotide
  Antisense strand to SEQ ID NO: 530353
ugauauccaccauacauga

SEQ ID NO: 530355 - RNA, 19 nt, Artificial Sequence
  Description of Artificial Sequence: Synthetic oligonucleotide
  Sense strand starting at position 911 of SEQ ID NO: 318017
auguaugguggauaucauu

SEQ ID NO: 530356 - RNA, 19 nt, Artificial Sequence
  Description of Artificial Sequence: Synthetic oligonucleotide
  Antisense strand to SEQ ID NO: 530355
aaugauauccaccauacau

SEQ ID NO: 530357 - RNA, 19 nt, Artificial Sequence
  Description of Artificial Sequence: Synthetic oligonucleotide
  Sense strand starting at position 988 of SEQ ID NO: 318017
caaaguauaugacugguaa

SEQ ID NO: 530358 - RNA, 19 nt, Artificial Sequence
  Description of Artificial Sequence: Synthetic oligonucleotide
  Antisense strand to SEQ ID NO: 530357
uuaccagucauauacuuug

SEQ ID NO: 530359 - RNA, 19 nt, Artificial Sequence
  Description of Artificial Sequence: Synthetic oligonucleotide
  Sense strand starting at position 1019 of SEQ ID NO: 318017
gugaaacucugauuacuac

SEQ ID NO: 530360 - RNA, 19 nt, Artificial Sequence
  Description of Artificial Sequence: Synthetic oligonucleotide
  Antisense strand to SEQ ID NO: 530359
guaguaaucagaguuucac

SEQ ID NO: 530361 - RNA, 19 nt, Artificial Sequence
  Description of Artificial Sequence: Synthetic oligonucleotide
  Sense strand starting at position 1052 of SEQ ID NO: 318017
aaauaaauggcuuagugua

SEQ ID NO: 530362 - RNA, 19 nt, Artificial Sequence
  Description of Artificial Sequence: Synthetic oligonucleotide
  Antisense strand to SEQ ID NO: 530361
uacacuaagccauuuauuu

SEQ ID NO: 530363 - RNA, 19 nt, Artificial Sequence
  Description of Artificial Sequence: Synthetic oligonucleotide
  Sense strand starting at position 1328 of SEQ ID NO: 318017
ggagguguaggcuacaaua

SEQ ID NO: 530364 - RNA, 19 nt, Artificial Sequence
  Description of Artificial Sequence: Synthetic oligonucleotide
  Antisense strand to SEQ ID NO: 530363
uauuguagccuacaccucc

SEQ ID NO: 530365 - RNA, 19 nt, Artificial Sequence
  Description of Artificial Sequence: Synthetic oligonucleotide
  Sense strand starting at position 1776 of SEQ ID NO: 318017
auguacuucucugcaaaga

SEQ ID NO: 530366 - RNA, 19 nt, Artificial Sequence
  Description of Artificial Sequence: Synthetic oligonucleotide
  Antisense strand to SEQ ID NO: 530365
ucuuugcagagaaguacau

SEQ ID NO: 530367 - RNA, 19 nt, Artificial Sequence
  Description of Artificial Sequence: Synthetic oligonucleotide
  Sense strand starting at position 1777 of SEQ ID NO: 318017
uguacuucucugcaaagau

SEQ ID NO: 530368 - RNA, 19 nt, Artificial Sequence
  Description of Artificial Sequence: Synthetic oligonucleotide
  Antisense strand to SEQ ID NO: 530367
aucuuugcagagaaguaca

SEQ ID NO: 530369 - RNA, 19 nt, Artificial Sequence
  Description of Artificial Sequence: Synthetic oligonucleotide
  Sense strand starting at position 1870 of SEQ ID NO: 318017
cagaaagaguaccuuuguu

SEQ ID NO: 530370 - RNA, 19 nt, Artificial Sequence
  Description of Artificial Sequence: Synthetic oligonucleotide
  Antisense strand to SEQ ID NO: 530369
aacaaagguacucuuucug

SEQ ID NO: 530371 - RNA, 19 nt, Artificial Sequence
  Description of Artificial Sequence: Synthetic oligonucleotide
  Sense strand starting at position 1874 of SEQ ID NO: 318017
aagaguaccuuuguugaug

SEQ ID NO: 530372 - RNA, 19 nt, Artificial Sequence
  Description of Artificial Sequence: Synthetic oligonucleotide
  Antisense strand to SEQ ID NO: 530371
caucaacaaagguacucuu

SEQ ID NO: 530373 - RNA, 19 nt, Artificial Sequence
  Description of Artificial Sequence: Synthetic oligonucleotide
  Sense strand starting at position 1875 of SEQ ID NO: 318017
agaguaccuuuguugauga

SEQ ID NO: 530374 - RNA, 19 nt, Artificial Sequence
  Description of Artificial Sequence: Synthetic oligonucleotide
  Antisense strand to SEQ ID NO: 530373
ucaucaacaaagguacucu

SEQ ID NO: 530375 - RNA, 19 nt, Artificial Sequence
  Description of Artificial Sequence: Synthetic oligonucleotide
  Sense strand starting at position 1991 of SEQ ID NO: 318017
auggcaagucccugucaca

SEQ ID NO: 530376 - RNA, 19 nt, Artificial Sequence
  Description of Artificial Sequence: Synthetic oligonucleotide
  Antisense strand to SEQ ID NO: 530375
ugugacagggacuugccau

SEQ ID NO: 530377 - RNA, 19 nt, Artificial Sequence
  Description of Artificial Sequence: Synthetic oligonucleotide
  Sense strand starting at position 2195 of SEQ ID NO: 318017
cuggguaacugaguauuau

SEQ ID NO: 530378 - RNA, 19 nt, Artificial Sequence
  Description of Artificial Sequence: Synthetic oligonucleotide
  Antisense strand to SEQ ID NO: 530377
auaauacucaguuacccag

SEQ ID NO: 530379 - RNA, 19 nt, Artificial Sequence
  Description of Artificial Sequence: Synthetic oligonucleotide
  Sense strand starting at position 2196 of SEQ ID NO: 318017
uggguaacugaguauuauc

SEQ ID NO: 530380 - RNA, 19 nt, Artificial Sequence
  Description of Artificial Sequence: Synthetic oligonucleotide
  Antisense strand to SEQ ID NO: 530379
gauaauacucaguuaccca

SEQ ID NO: 530381 - RNA, 19 nt, Artificial Sequence
  Description of Artificial Sequence: Synthetic oligonucleotide
  Sense strand starting at position 2239 of SEQ ID NO: 318017
guacacauuugucaaaccu

SEQ ID NO: 530382 - RNA, 19 nt, Artificial Sequence
  Description of Artificial Sequence: Synthetic oligonucleotide
  Antisense strand to SEQ ID NO: 530381
agguuugacaaauguguac

SEQ ID NO: 530383 - RNA, 19 nt, Artificial Sequence
  Description of Artificial Sequence: Synthetic oligonucleotide
  Sense strand starting at position 2291 of SEQ ID NO: 318017
aguauaccucaguauagcu

SEQ ID NO: 530384 - RNA, 19 nt, Artificial Sequence
  Description of Artificial Sequence: Synthetic oligonucleotide
  Antisense strand to SEQ ID NO: 530383
agcuauacugagguauacu

SEQ ID NO: 530385 - RNA, 19 nt, Artificial Sequence
  Description of Artificial Sequence: Synthetic oligonucleotide
  Sense strand starting at position 2377 of SEQ ID NO: 318017
gaguaccaucuaugaugua

SEQ ID NO: 530386 - RNA, 19 nt, Artificial Sequence
  Description of Artificial Sequence: Synthetic oligonucleotide
  Antisense strand to SEQ ID NO: 530385
uacaucauagaugguacuc

SEQ ID NO: 530387 - RNA, 19 nt, Artificial Sequence
  Description of Artificial Sequence: Synthetic oligonucleotide
  Sense strand starting at position 2518 of SEQ ID NO: 318017
ugguuucuacgacaaauag

SEQ ID NO: 530388 - RNA, 19 nt, Artificial Sequence
  Description of Artificial Sequence: Synthetic oligonucleotide
  Antisense strand to SEQ ID NO: 530387
cuauuugucguagaaacca

SEQ ID NO: 530389 - RNA, 19 nt, Artificial Sequence
  Description of Artificial Sequence: Synthetic oligonucleotide
  Sense strand starting at position 2562 of SEQ ID NO: 318017
agaauccuuuaugugaaca

SEQ ID NO: 530390 - RNA, 19 nt, Artificial Sequence
  Description of Artificial Sequence: Synthetic oligonucleotide
  Antisense strand to SEQ ID NO: 530389
uguucacauaaaggauucu

SEQ ID NO: 530391 - RNA, 19 nt, Artificial Sequence
  Description of Artificial Sequence: Synthetic oligonucleotide
  Sense strand starting at position 2629 of SEQ ID NO: 318017
ugaacauaagcuggauauu

SEQ ID NO: 530392 - RNA, 19 nt, Artificial Sequence
  Description of Artificial Sequence: Synthetic oligonucleotide
  Antisense strand to SEQ ID NO: 530391
aauauccagcuuauguuca

SEQ ID NO: 530393 - RNA, 19 nt, Artificial Sequence
  Description of Artificial Sequence: Synthetic oligonucleotide
  Sense strand starting at position 3058 of SEQ ID NO: 318017
auacaucuggacuguucua

SEQ ID NO: 530394 - RNA, 19 nt, Artificial Sequence
  Description of Artificial Sequence: Synthetic oligonucleotide
  Antisense strand to SEQ ID NO: 530393
uagaacaguccagauguau

SEQ ID NO: 530395 - RNA, 19 nt, Artificial Sequence
  Description of Artificial Sequence: Synthetic oligonucleotide
  Sense strand starting at position 3121 of SEQ ID NO: 318017
aucccaucacuuugaggga

SEQ ID NO: 530396 - RNA, 19 nt, Artificial Sequence
  Description of Artificial Sequence: Synthetic oligonucleotide
  Antisense strand to SEQ ID NO: 530395
ucccucaaagugaugggau

SEQ ID NO: 530397 - RNA, 19 nt, Artificial Sequence
  Description of Artificial Sequence: Synthetic oligonucleotide
  Sense strand starting at position 3426 of SEQ ID NO: 318017
gguuaagaguaaccagaua

SEQ ID NO: 530398 - RNA, 19 nt, Artificial Sequence
  Description of Artificial Sequence: Synthetic oligonucleotide
  Antisense strand to SEQ ID NO: 530397
uaucugguuacucuuaacc

SEQ ID NO: 530399 - RNA, 19 nt, Artificial Sequence
  Description of Artificial Sequence: Synthetic oligonucleotide
  Sense strand starting at position 3490 of SEQ ID NO: 318017
uguuuaaaugcucaauaug

SEQ ID NO: 530400 - RNA, 19 nt, Artificial Sequence
  Description of Artificial Sequence: Synthetic oligonucleotide
  Antisense strand to SEQ ID NO: 530399
cauauugagcauuuaaaca

SEQ ID NO: 530401 - RNA, 19 nt, Artificial Sequence
  Description of Artificial Sequence: Synthetic oligonucleotide
  Sense strand starting at position 3658 of SEQ ID NO: 318017
uucuauuggcauuaaaugu

SEQ ID NO: 530402 - RNA, 19 nt, Artificial Sequence
  Description of Artificial Sequence: Synthetic oligonucleotide
  Antisense strand to SEQ ID NO: 530401
acauuuaaugccaauagaa

SEQ ID NO: 530403 - RNA, 19 nt, Artificial Sequence
  Description of Artificial Sequence: Synthetic oligonucleotide
  Sense strand starting at position 3677 of SEQ ID NO: 318017
caaagucuuguggaguaac

SEQ ID NO: 530404 - RNA, 19 nt, Artificial Sequence
  Description of Artificial Sequence: Synthetic oligonucleotide
  Antisense strand to SEQ ID NO: 530403
guuacuccacaagacuuug

SEQ ID NO: 530405 - RNA, 19 nt, Artificial Sequence
  Description of Artificial Sequence: Synthetic oligonucleotide
  Sense strand starting at position 3680 of SEQ ID NO: 318017
agucuuguggaguaacaau

SEQ ID NO: 530406 - RNA, 19 nt, Artificial Sequence
  Description of Artificial Sequence: Synthetic oligonucleotide
  Antisense strand to SEQ ID NO: 530405
auuguuacuccacaagacu

SEQ ID NO: 530407 - RNA, 19 nt, Artificial Sequence
  Description of Artificial Sequence: Synthetic oligonucleotide
  Sense strand starting at position 3755 of SEQ ID NO: 318017
aauacuaaacggugcuuua

SEQ ID NO: 530408 - RNA, 19 nt, Artificial Sequence
  Description of Artificial Sequence: Synthetic oligonucleotide
  Antisense strand to SEQ ID NO: 530407
uaaagcaccguuuaguauu

SEQ ID NO: 530409 - RNA, 19 nt, Artificial Sequence
  Description of Artificial Sequence: Synthetic oligonucleotide
  Sense strand starting at position 3758 of SEQ ID NO: 318017
acuaaacggugcuuuagua

SEQ ID NO: 530410 - RNA, 19 nt, Artificial Sequence
  Description of Artificial Sequence: Synthetic oligonucleotide
  Antisense strand to SEQ ID NO: 530409
uacuaaagcaccguuuagu

SEQ ID NO: 530411 - RNA, 19 nt, Artificial Sequence
  Description of Artificial Sequence: Synthetic oligonucleotide
  Sense strand starting at position 3815 of SEQ ID NO: 318017
acaacuuccuggccagaaa

SEQ ID NO: 530412 - RNA, 19 nt, Artificial Sequence
  Description of Artificial Sequence: Synthetic oligonucleotide
  Antisense strand to SEQ ID NO: 530411
uuucuggccaggaaguugu

SEQ ID NO: 530413 - RNA, 19 nt, Artificial Sequence
  Description of Artificial Sequence: Synthetic oligonucleotide
  Sense strand starting at position 630 of SEQ ID NO: 318018
gggcuucuuuacccaagca

SEQ ID NO: 530414 - RNA, 19 nt, Artificial Sequence
  Description of Artificial Sequence: Synthetic oligonucleotide
  Antisense strand to SEQ ID NO: 530413
ugcuuggguaaagaagccc

SEQ ID NO: 530415 - RNA, 19 nt, Artificial Sequence
  Description of Artificial Sequence: Synthetic oligonucleotide
  Sense strand starting at position 673 of SEQ ID NO: 318018
ugaacaagacaucggagua

SEQ ID NO: 530416 - RNA, 19 nt, Artificial Sequence
  Description of Artificial Sequence: Synthetic oligonucleotide
  Antisense strand to SEQ ID NO: 530415
uacuccgaugucuuguuca

SEQ ID NO: 530417 - RNA, 19 nt, Artificial Sequence
  Description of Artificial Sequence: Synthetic oligonucleotide
  Sense strand starting at position 715 of SEQ ID NO: 318018
acgguauuauggagggcaa

SEQ ID NO: 530418 - RNA, 19 nt, Artificial Sequence
  Description of Artificial Sequence: Synthetic oligonucleotide
  Antisense strand to SEQ ID NO: 530417
uugcccuccauaauaccgu

SEQ ID NO: 530419 - RNA, 19 nt, Artificial Sequence
  Description of Artificial Sequence: Synthetic oligonucleotide
  Sense strand starting at position 905 of SEQ ID NO: 318018
cggaguauuagcgaaugua

SEQ ID NO: 530420 - RNA, 19 nt, Artificial Sequence
  Description of Artificial Sequence: Synthetic oligonucleotide
  Antisense strand to SEQ ID NO: 530419
uacauucgcuaauacuccg

SEQ ID NO: 530421 - RNA, 19 nt, Artificial Sequence
  Description of Artificial Sequence: Synthetic oligonucleotide
  Sense strand starting at position 908 of SEQ ID NO: 318018
aguauuagcgaauguaacu

SEQ ID NO: 530422 - RNA, 19 nt, Artificial Sequence
  Description of Artificial Sequence: Synthetic oligonucleotide
  Antisense strand to SEQ ID NO: 530421
aguuacauucgcuaauacu

SEQ ID NO: 530423 - RNA, 19 nt, Artificial Sequence
  Description of Artificial Sequence: Synthetic oligonucleotide
  Sense strand starting at position 915 of SEQ ID NO: 318018
gcgaauguaacucagagau

SEQ ID NO: 530424 - RNA, 19 nt, Artificial Sequence
  Description of Artificial Sequence: Synthetic oligonucleotide
  Antisense strand to SEQ ID NO: 530423
aucucugaguuacauucgc

SEQ ID NO: 530425 - RNA, 19 nt, Artificial Sequence
  Description of Artificial Sequence: Synthetic oligonucleotide
  Sense strand starting at position 921 of SEQ ID NO: 318018
guaacucagagauaagugu

SEQ ID NO: 530426 - RNA, 19 nt, Artificial Sequence
  Description of Artificial Sequence: Synthetic oligonucleotide
  Antisense strand to SEQ ID NO: 530425
acacuuaucucugaguuac

SEQ ID NO: 530427 - RNA, 19 nt, Artificial Sequence
  Description of Artificial Sequence: Synthetic oligonucleotide
  Sense strand starting at position 925 of SEQ ID NO: 318018
cucagagauaaguguaaag

SEQ ID NO: 530428 - RNA, 19 nt, Artificial Sequence
  Description of Artificial Sequence: Synthetic oligonucleotide
  Antisense strand to SEQ ID NO: 530427
cuuuacacuuaucucugag

SEQ ID NO: 530429 - RNA, 19 nt, Artificial Sequence
  Description of Artificial Sequence: Synthetic oligonucleotide
  Sense strand starting at position 1045 of SEQ ID NO: 318018
aaauucucccgaggagacu

SEQ ID NO: 530430 - RNA, 19 nt, Artificial Sequence
  Description of Artificial Sequence: Synthetic oligonucleotide
  Antisense strand to SEQ ID NO: 530429
agucuccucgggagaauuu

SEQ ID NO: 530431 - RNA, 19 nt, Artificial Sequence
  Description of Artificial Sequence: Synthetic oligonucleotide
  Sense strand starting at position 1066 of SEQ ID NO: 318018
cccacuucugagggagcaa

SEQ ID NO: 530432 - RNA, 19 nt, Artificial Sequence
  Description of Artificial Sequence: Synthetic oligonucleotide
  Antisense strand to SEQ ID NO: 530431
uugcucccucagaaguggg

SEQ ID NO: 530433 - RNA, 19 nt, Artificial Sequence
  Description of Artificial Sequence: Synthetic oligonucleotide
  Sense strand starting at position 1101 of SEQ ID NO: 318018
gguuuccacuuccucgaau

SEQ ID NO: 530434 - RNA, 19 nt, Artificial Sequence
  Description of Artificial Sequence: Synthetic oligonucleotide
  Antisense strand to SEQ ID NO: 530433
auucgaggaaguggaaacc

SEQ ID NO: 530435 - RNA, 19 nt, Artificial Sequence
  Description of Artificial Sequence: Synthetic oligonucleotide
  Sense strand starting at position 1102 of SEQ ID NO: 318018
guuuccacuuccucgaauu

SEQ ID NO: 530436 - RNA, 19 nt, Artificial Sequence
  Description of Artificial Sequence: Synthetic oligonucleotide
  Antisense strand to SEQ ID NO: 530435
aauucgaggaaguggaaac

SEQ ID NO: 530437 - RNA, 19 nt, Artificial Sequence
  Description of Artificial Sequence: Synthetic oligonucleotide
  Sense strand starting at position 2277 of SEQ ID NO: 318018
gugaacaaucgggaacguu

SEQ ID NO: 530438 - RNA, 19 nt, Artificial Sequence
  Description of Artificial Sequence: Synthetic oligonucleotide
  Antisense strand to SEQ ID NO: 530437
aacguucccgauuguucac

SEQ ID NO: 530439 - RNA, 19 nt, Artificial Sequence
  Description of Artificial Sequence: Synthetic oligonucleotide
  Sense strand starting at position 2702 of SEQ ID NO: 318018
gacugugucaggcaugaga

SEQ ID NO: 530440 - RNA, 19 nt, Artificial Sequence
  Description of Artificial Sequence: Synthetic oligonucleotide
  Antisense strand to SEQ ID NO: 530439
ucucaugccugacacaguc

SEQ ID NO: 530441 - RNA, 19 nt, Artificial Sequence
  Description of Artificial Sequence: Synthetic oligonucleotide
  Sense strand starting at position 2704 of SEQ ID NO: 318018
cugugucaggcaugagaac

SEQ ID NO: 530442 - RNA, 19 nt, Artificial Sequence
  Description of Artificial Sequence: Synthetic oligonucleotide
  Antisense strand to SEQ ID NO: 530441
guucucaugccugacacag

SEQ ID NO: 530443 - RNA, 19 nt, Artificial Sequence
  Description of Artificial Sequence: Synthetic oligonucleotide
  Sense strand starting at position 2790 of SEQ ID NO: 318018
aauggcuacuagguauaau

SEQ ID NO: 530444 - RNA, 19 nt, Artificial Sequence
  Description of Artificial Sequence: Synthetic oligonucleotide
  Antisense strand to SEQ ID NO: 530443
auuauaccuaguagccauu

SEQ ID NO: 530445 - RNA, 19 nt, Artificial Sequence
  Description of Artificial Sequence: Synthetic oligonucleotide
  Sense strand starting at position 2793 of SEQ ID NO: 318018
ggcuacuagguauaaucau

SEQ ID NO: 530446 - RNA, 19 nt, Artificial Sequence
  Description of Artificial Sequence: Synthetic oligonucleotide
  Antisense strand to SEQ ID NO: 530445
augauuauaccuaguagcc

SEQ ID NO: 530447 - RNA, 19 nt, Artificial Sequence
  Description of Artificial Sequence: Synthetic oligonucleotide
  Sense strand starting at position 2832 of SEQ ID NO: 318018
cuaaaucugcaguagguga

SEQ ID NO: 530448 - RNA, 19 nt, Artificial Sequence
  Description of Artificial Sequence: Synthetic oligonucleotide
  Antisense strand to SEQ ID NO: 530447
ucaccuacugcagauuuag

SEQ ID NO: 530449 - RNA, 19 nt, Artificial Sequence
  Description of Artificial Sequence: Synthetic oligonucleotide
  Sense strand starting at position 2836 of SEQ ID NO: 318018
aucugcaguaggugaauua

SEQ ID NO: 530450 - RNA, 19 nt, Artificial Sequence
  Description of Artificial Sequence: Synthetic oligonucleotide
  Antisense strand to SEQ ID NO: 530449
uaauucaccuacugcagau

SEQ ID NO: 530451 - RNA, 19 nt, Artificial Sequence
  Description of Artificial Sequence: Synthetic oligonucleotide
  Sense strand starting at position 2837 of SEQ ID NO: 318018
ucugcaguaggugaauuau

SEQ ID NO: 530452 - RNA, 19 nt, Artificial Sequence
  Description of Artificial Sequence: Synthetic oligonucleotide
  Antisense strand to SEQ ID NO: 530451
auaauucaccuacugcaga

SEQ ID NO: 530453 - RNA, 19 nt, Artificial Sequence
  Description of Artificial Sequence: Synthetic oligonucleotide
  Sense strand starting at position 2974 of SEQ ID NO: 318018
acuuuaacaccugggaagu

SEQ ID NO: 530454 - RNA, 19 nt, Artificial Sequence
  Description of Artificial Sequence: Synthetic oligonucleotide
  Antisense strand to SEQ ID NO: 530453
acuucccagguguuaaagu

SEQ ID NO: 530455 - RNA, 19 nt, Artificial Sequence
  Description of Artificial Sequence: Synthetic oligonucleotide
  Sense strand starting at position 2975 of SEQ ID NO: 318018
cuuuaacaccugggaaguu

SEQ ID NO: 530456 - RNA, 19 nt, Artificial Sequence
  Description of Artificial Sequence: Synthetic oligonucleotide
  Antisense strand to SEQ ID NO: 530455
aacuucccagguguuaaag

SEQ ID NO: 530457 - RNA, 19 nt, Artificial Sequence
  Description of Artificial Sequence: Synthetic oligonucleotide
  Sense strand starting at position 3017 of SEQ ID NO: 318018
cacauuuguuuagagggaa

SEQ ID NO: 530458 - RNA, 19 nt, Artificial Sequence
  Description of Artificial Sequence: Synthetic oligonucleotide
  Antisense strand to SEQ ID NO: 530457
uucccucuaaacaaaugug

SEQ ID NO: 530459 - RNA, 19 nt, Artificial Sequence
  Description of Artificial Sequence: Synthetic oligonucleotide
  Sense strand starting at position 3040 of SEQ ID NO: 318018
gggagagguugucucaaag

SEQ ID NO: 530460 - RNA, 19 nt, Artificial Sequence
  Description of Artificial Sequence: Synthetic oligonucleotide
  Antisense strand to SEQ ID NO: 530459
cuuugagacaaccucuccc

SEQ ID NO: 530461 - RNA, 19 nt, Artificial Sequence
  Description of Artificial Sequence: Synthetic oligonucleotide
  Sense strand starting at position 3160 of SEQ ID NO: 318018
ggguuuguaguuuaaugga

SEQ ID NO: 530462 - RNA, 19 nt, Artificial Sequence
  Description of Artificial Sequence: Synthetic oligonucleotide
  Antisense strand to SEQ ID NO: 530461
uccauuaaacuacaaaccc

SEQ ID NO: 530463 - RNA, 19 nt, Artificial Sequence
  Description of Artificial Sequence: Synthetic oligonucleotide
  Sense strand starting at position 3165 of SEQ ID NO: 318018
uguaguuuaauggaauguu

SEQ ID NO: 530464 - RNA, 19 nt, Artificial Sequence
  Description of Artificial Sequence: Synthetic oligonucleotide
  Antisense strand to SEQ ID NO: 530463
aacauuccauuaaacuaca

SEQ ID NO: 530465 - RNA, 19 nt, Artificial Sequence
  Description of Artificial Sequence: Synthetic oligonucleotide
  Sense strand starting at position 3168 of SEQ ID NO: 318018
aguuuaauggaauguuucu

SEQ ID NO: 530466 - RNA, 19 nt, Artificial Sequence
  Description of Artificial Sequence: Synthetic oligonucleotide
  Antisense strand to SEQ ID NO: 530465
agaaacauuccauuaaacu

SEQ ID NO: 530467 - RNA, 19 nt, Artificial Sequence
  Description of Artificial Sequence: Synthetic oligonucleotide
  Sense strand starting at position 3252 of SEQ ID NO: 318018
uuaaucuuuaucgggaguu

SEQ ID NO: 530468 - RNA, 19 nt, Artificial Sequence
  Description of Artificial Sequence: Synthetic oligonucleotide
  Antisense strand to SEQ ID NO: 530467
aacucccgauaaagauuaa

SEQ ID NO: 530469 - RNA, 19 nt, Artificial Sequence
  Description of Artificial Sequence: Synthetic oligonucleotide
  Sense strand starting at position 3262 of SEQ ID NO: 318018
ucgggaguuggccacuuua

SEQ ID NO: 530470 - RNA, 19 nt, Artificial Sequence
  Description of Artificial Sequence: Synthetic oligonucleotide
  Antisense strand to SEQ ID NO: 530469
uaaaguggccaacucccga

SEQ ID NO: 530471 - RNA, 19 nt, Artificial Sequence
  Description of Artificial Sequence: Synthetic oligonucleotide
  Sense strand starting at position 3270 of SEQ ID NO: 318018
uggccacuuuaagcaauua

SEQ ID NO: 530472 - RNA, 19 nt, Artificial Sequence
  Description of Artificial Sequence: Synthetic oligonucleotide
  Antisense strand to SEQ ID NO: 530471
uaauugcuuaaaguggcca

SEQ ID NO: 530473 - RNA, 19 nt, Artificial Sequence
  Description of Artificial Sequence: Synthetic oligonucleotide
  Sense strand starting at position 3414 of SEQ ID NO: 318018
augagauugacguguuuaa

SEQ ID NO: 530474 - RNA, 19 nt, Artificial Sequence
  Description of Artificial Sequence: Synthetic oligonucleotide
  Antisense strand to SEQ ID NO: 530473
uuaaacacgucaaucucau

SEQ ID NO: 530475 - RNA, 19 nt, Artificial Sequence
  Description of Artificial Sequence: Synthetic oligonucleotide
  Sense strand starting at position 3418 of SEQ ID NO: 318018
gauugacguguuuaacguu

SEQ ID NO: 530476 - RNA, 19 nt, Artificial Sequence
  Description of Artificial Sequence: Synthetic oligonucleotide
  Antisense strand to SEQ ID NO: 530475
aacguuaaacacgucaauc

SEQ ID NO: 530477 - RNA, 19 nt, Artificial Sequence
  Description of Artificial Sequence: Synthetic oligonucleotide
  Sense strand starting at position 3424 of SEQ ID NO: 318018
cguguuuaacguuacagaa

SEQ ID NO: 530478 - RNA, 19 nt, Artificial Sequence
  Description of Artificial Sequence: Synthetic oligonucleotide
  Antisense strand to SEQ ID NO: 530477
uucuguaacguuaaacacg

SEQ ID NO: 530479 - RNA, 19 nt, Artificial Sequence
  Description of Artificial Sequence: Synthetic oligonucleotide
  Sense strand starting at position 3526 of SEQ ID NO: 318018
accacauuguuuccguaua

SEQ ID NO: 530480 - RNA, 19 nt, Artificial Sequence
  Description of Artificial Sequence: Synthetic oligonucleotide
  Antisense strand to SEQ ID NO: 530479
uauacggaaacaauguggu

SEQ ID NO: 530481 - RNA, 19 nt, Artificial Sequence
  Description of Artificial Sequence: Synthetic oligonucleotide
  Sense strand starting at position 3528 of SEQ ID NO: 318018
cacauuguuuccguauaag

SEQ ID NO: 530482 - RNA, 19 nt, Artificial Sequence
  Description of Artificial Sequence: Synthetic oligonucleotide
  Antisense strand to SEQ ID NO: 530481
cuuauacggaaacaaugug

SEQ ID NO: 530483 - RNA, 19 nt, Artificial Sequence
  Description of Artificial Sequence: Synthetic oligonucleotide
  Sense strand starting at position 3531 of SEQ ID NO: 318018
auuguuuccguauaagcaa

SEQ ID NO: 530484 - RNA, 19 nt, Artificial Sequence
  Description of Artificial Sequence: Synthetic oligonucleotide
  Antisense strand to SEQ ID NO: 530483
uugcuuauacggaaacaau

SEQ ID NO: 530485 - RNA, 19 nt, Artificial Sequence
  Description of Artificial Sequence: Synthetic oligonucleotide
  Sense strand starting at position 3550 of SEQ ID NO: 318018
cuuaugugucgggagagga

SEQ ID NO: 530486 - RNA, 19 nt, Artificial Sequence
  Description of Artificial Sequence: Synthetic oligonucleotide
  Antisense strand to SEQ ID NO: 530485
uccucucccgacacauaag

SEQ ID NO: 530487 - RNA, 19 nt, Artificial Sequence
  Description of Artificial Sequence: Synthetic oligonucleotide
  Sense strand starting at position 3584 of SEQ ID NO: 318018
auguguaagcaugauauca

SEQ ID NO: 530488 - RNA, 19 nt, Artificial Sequence
  Description of Artificial Sequence: Synthetic oligonucleotide
  Antisense strand to SEQ ID NO: 530487
ugauaucaugcuuacacau

SEQ ID NO: 530489 - RNA, 19 nt, Artificial Sequence
  Description of Artificial Sequence: Synthetic oligonucleotide
  Sense strand starting at position 3727 of SEQ ID NO: 318018
gagaaacaauuguaguaaa

SEQ ID NO: 530490 - RNA, 19 nt, Artificial Sequence
  Description of Artificial Sequence: Synthetic oligonucleotide
  Antisense strand to SEQ ID NO: 530489
uuuacuacaauuguuucuc

SEQ ID NO: 530491 - RNA, 19 nt, Artificial Sequence
  Description of Artificial Sequence: Synthetic oligonucleotide
  Sense strand starting at position 3772 of SEQ ID NO: 318018
gauuaccauccuuagcgua

SEQ ID NO: 530492 - RNA, 19 nt, Artificial Sequence
  Description of Artificial Sequence: Synthetic oligonucleotide
  Antisense strand to SEQ ID NO: 530491
uacgcuaaggaugguaauc

SEQ ID NO: 530493 - RNA, 19 nt, Artificial Sequence
  Description of Artificial Sequence: Synthetic oligonucleotide
  Sense strand starting at position 180 of SEQ ID NO: 318019
augacagcaugauuacauu

SEQ ID NO: 530494 - RNA, 19 nt, Artificial Sequence
  Description of Artificial Sequence: Synthetic oligonucleotide
  Antisense strand to SEQ ID NO: 530493
aauguaaucaugcugucau

SEQ ID NO: 530495 - RNA, 19 nt, Artificial Sequence
  Description of Artificial Sequence: Synthetic oligonucleotide
  Sense strand starting at position 209 of SEQ ID NO: 318019
cugguauaauucucagacu

SEQ ID NO: 530496 - RNA, 19 nt, Artificial Sequence
  Description of Artificial Sequence: Synthetic oligonucleotide
  Antisense strand to SEQ ID NO: 530495
agucugagaauuauaccag

SEQ ID NO: 530497 - RNA, 19 nt, Artificial Sequence
  Description of Artificial Sequence: Synthetic oligonucleotide
  Sense strand starting at position 351 of SEQ ID NO: 318019
acugaaaguuggguaauca

SEQ ID NO: 530498 - RNA, 19 nt, Artificial Sequence
  Description of Artificial Sequence: Synthetic oligonucleotide
  Antisense strand to SEQ ID NO: 530497
ugauuacccaacuuucagu

SEQ ID NO: 530499 - RNA, 19 nt, Artificial Sequence
  Description of Artificial Sequence: Synthetic oligonucleotide
  Sense strand starting at position 355 of SEQ ID NO: 318019
aaaguuggguaaucagcaa

SEQ ID NO: 530500 - RNA, 19 nt, Artificial Sequence
  Description of Artificial Sequence: Synthetic oligonucleotide
  Antisense strand to SEQ ID NO: 530499
uugcugauuacccaacuuu

SEQ ID NO: 530501 - RNA, 19 nt, Artificial Sequence
  Description of Artificial Sequence: Synthetic oligonucleotide
  Sense strand starting at position 381 of SEQ ID NO: 318019
uggcauuauccagagcacu

SEQ ID NO: 530502 - RNA, 19 nt, Artificial Sequence
  Description of Artificial Sequence: Synthetic oligonucleotide
  Antisense strand to SEQ ID NO: 530501
agugcucuggauaaugcca

SEQ ID NO: 530503 - RNA, 19 nt, Artificial Sequence
  Description of Artificial Sequence: Synthetic oligonucleotide
  Sense strand starting at position 396 of SEQ ID NO: 318019
cacuauaaaugcgugaaag

SEQ ID NO: 530504 - RNA, 19 nt, Artificial Sequence
  Description of Artificial Sequence: Synthetic oligonucleotide
  Antisense strand to SEQ ID NO: 530503
cuuucacgcauuuauagug

SEQ ID NO: 530505 - RNA, 19 nt, Artificial Sequence
  Description of Artificial Sequence: Synthetic oligonucleotide
  Sense strand starting at position 397 of SEQ ID NO: 318019
acuauaaaugcgugaaaga

SEQ ID NO: 530506 - RNA, 19 nt, Artificial Sequence
  Description of Artificial Sequence: Synthetic oligonucleotide
  Antisense strand to SEQ ID NO: 530505
ucuuucacgcauuuauagu

SEQ ID NO: 530507 - RNA, 19 nt, Artificial Sequence
  Description of Artificial Sequence: Synthetic oligonucleotide
  Sense strand starting at position 398 of SEQ ID NO: 318019
cuauaaaugcgugaaagaa

SEQ ID NO: 530508 - RNA, 19 nt, Artificial Sequence
  Description of Artificial Sequence: Synthetic oligonucleotide
  Antisense strand to SEQ ID NO: 530507
uucuuucacgcauuuauag

SEQ ID NO: 530509 - RNA, 19 nt, Artificial Sequence
  Description of Artificial Sequence: Synthetic oligonucleotide
  Sense strand starting at position 649 of SEQ ID NO: 318019
ggagguugcgccuuagcga

SEQ ID NO: 530510 - RNA, 19 nt, Artificial Sequence
  Description of Artificial Sequence: Synthetic oligonucleotide
  Antisense strand to SEQ ID NO: 530509
ucgcuaaggcgcaaccucc

SEQ ID NO: 530511 - RNA, 19 nt, Artificial Sequence
  Description of Artificial Sequence: Synthetic oligonucleotide
  Sense strand starting at position 1999 of SEQ ID NO: 318019
cauccuugucccggaggaa

SEQ ID NO: 530512 - RNA, 19 nt, Artificial Sequence
  Description of Artificial Sequence: Synthetic oligonucleotide
  Antisense strand to SEQ ID NO: 530511
uuccuccgggacaaggaug

SEQ ID NO: 530513 - RNA, 19 nt, Artificial Sequence
  Description of Artificial Sequence: Synthetic oligonucleotide
  Sense strand starting at position 2104 of SEQ ID NO: 318019
uucccaaaguuaguugaaa

SEQ ID NO: 530514 - RNA, 19 nt, Artificial Sequence
  Description of Artificial Sequence: Synthetic oligonucleotide
  Antisense strand to SEQ ID NO: 530513
uuucaacuaacuuugggaa

SEQ ID NO: 530515 - RNA, 19 nt, Artificial Sequence
  Description of Artificial Sequence: Synthetic oligonucleotide
  Sense strand starting at position 2182 of SEQ ID NO: 318019
gauuguccucgugauuugu

SEQ ID NO: 530516 - RNA, 19 nt, Artificial Sequence
  Description of Artificial Sequence: Synthetic oligonucleotide
  Antisense strand to SEQ ID NO: 530515
acaaaucacgaggacaauc

SEQ ID NO: 530517 - RNA, 19 nt, Artificial Sequence
  Description of Artificial Sequence: Synthetic oligonucleotide
  Sense strand starting at position 2184 of SEQ ID NO: 318019
uuguccucgugauuuguca

SEQ ID NO: 530518 - RNA, 19 nt, Artificial Sequence
  Description of Artificial Sequence: Synthetic oligonucleotide
  Antisense strand to SEQ ID NO: 530517
ugacaaaucacgaggacaa

SEQ ID NO: 530519 - RNA, 19 nt, Artificial Sequence
  Description of Artificial Sequence: Synthetic oligonucleotide
  Sense strand starting at position 2186 of SEQ ID NO: 318019
guccucgugauuugucacu

SEQ ID NO: 530520 - RNA, 19 nt, Artificial Sequence
  Description of Artificial Sequence: Synthetic oligonucleotide
  Antisense strand to SEQ ID NO: 530519
agugacaaaucacgaggac

SEQ ID NO: 530521 - RNA, 19 nt, Artificial Sequence
  Description of Artificial Sequence: Synthetic oligonucleotide
  Sense strand starting at position 2188 of SEQ ID NO: 318019
ccucgugauuugucacuca

SEQ ID NO: 530522 - RNA, 19 nt, Artificial Sequence
  Description of Artificial Sequence: Synthetic oligonucleotide
  Antisense strand to SEQ ID NO: 530521
ugagugacaaaucacgagg

SEQ ID NO: 530523 - RNA, 19 nt, Artificial Sequence
  Description of Artificial Sequence: Synthetic oligonucleotide
  Sense strand starting at position 2349 of SEQ ID NO: 318019
cgcugagaaccucauccau

SEQ ID NO: 530524 - RNA, 19 nt, Artificial Sequence
  Description of Artificial Sequence: Synthetic oligonucleotide
  Antisense strand to SEQ ID NO: 530523
auggaugagguucucagcg

SEQ ID NO: 530525 - RNA, 19 nt, Artificial Sequence
  Description of Artificial Sequence: Synthetic oligonucleotide
  Sense strand starting at position 2367 of SEQ ID NO: 318019
uucucuauuuacguguaaa

SEQ ID NO: 530526 - RNA, 19 nt, Artificial Sequence
  Description of Artificial Sequence: Synthetic oligonucleotide
  Antisense strand to SEQ ID NO: 530525
uuuacacguaaauagagaa

SEQ ID NO: 530527 - RNA, 19 nt, Artificial Sequence
  Description of Artificial Sequence: Synthetic oligonucleotide
  Sense strand starting at position 2460 of SEQ ID NO: 318019
ggaccucuugacugagauu

SEQ ID NO: 530528 - RNA, 19 nt, Artificial Sequence
  Description of Artificial Sequence: Synthetic oligonucleotide
  Antisense strand to SEQ ID NO: 530527
aaucucagucaagaggucc

SEQ ID NO: 530529 - RNA, 19 nt, Artificial Sequence
  Description of Artificial Sequence: Synthetic oligonucleotide
  Sense strand starting at position 2504 of SEQ ID NO: 318019
ugugauugccaguaggaaa

SEQ ID NO: 530530 - RNA, 19 nt, Artificial Sequence
  Description of Artificial Sequence: Synthetic oligonucleotide
  Antisense strand to SEQ ID NO: 530529
uuuccuacuggcaaucaca

SEQ ID NO: 530531 - RNA, 19 nt, Artificial Sequence
  Description of Artificial Sequence: Synthetic oligonucleotide
  Sense strand starting at position 2557 of SEQ ID NO: 318019
uuugaaaugccauggaucu

SEQ ID NO: 530532 - RNA, 19 nt, Artificial Sequence
  Description of Artificial Sequence: Synthetic oligonucleotide
  Antisense strand to SEQ ID NO: 530531
agauccauggcauuucaaa

SEQ ID NO: 530533 - RNA, 19 nt, Artificial Sequence
  Description of Artificial Sequence: Synthetic oligonucleotide
  Sense strand starting at position 2632 of SEQ ID NO: 318019
ggagaccuauuagcugaau

SEQ ID NO: 530534 - RNA, 19 nt, Artificial Sequence
  Description of Artificial Sequence: Synthetic oligonucleotide
  Antisense strand to SEQ ID NO: 530533
auucagcuaauaggucucc

SEQ ID NO: 530535 - RNA, 19 nt, Artificial Sequence
  Description of Artificial Sequence: Synthetic oligonucleotide
  Sense strand starting at position 2665 of SEQ ID NO: 318019
gucuucucuguccaagaau

SEQ ID NO: 530536 - RNA, 19 nt, Artificial Sequence
  Description of Artificial Sequence: Synthetic oligonucleotide
  Antisense strand to SEQ ID NO: 530535
auucuuggacagagaagac

SEQ ID NO: 530537 - RNA, 19 nt, Artificial Sequence
  Description of Artificial Sequence: Synthetic oligonucleotide
  Sense strand starting at position 3155 of SEQ ID NO: 318019
cacguuaaucauggugaaa

SEQ ID NO: 530538 - RNA, 19 nt, Artificial Sequence
  Description of Artificial Sequence: Synthetic oligonucleotide
  Antisense strand to SEQ ID NO: 530537
uuucaccaugauuaacgug

SEQ ID NO: 530539 - RNA, 19 nt, Artificial Sequence
  Description of Artificial Sequence: Synthetic oligonucleotide
  Sense strand starting at position 3158 of SEQ ID NO: 318019
guuaaucauggugaaagua

SEQ ID NO: 530540 - RNA, 19 nt, Artificial Sequence
  Description of Artificial Sequence: Synthetic oligonucleotide
  Antisense strand to SEQ ID NO: 530539
uacuuucaccaugauuaac

SEQ ID NO: 530541 - RNA, 19 nt, Artificial Sequence
  Description of Artificial Sequence: Synthetic oligonucleotide
  Sense strand starting at position 3248 of SEQ ID NO: 318019
gaggaaacauuuggaacuu

SEQ ID NO: 530542 - RNA, 19 nt, Artificial Sequence
  Description of Artificial Sequence: Synthetic oligonucleotide
  Antisense strand to SEQ ID NO: 530541
aaguuccaaauguuuccuc

SEQ ID NO: 530543 - RNA, 19 nt, Artificial Sequence
  Description of Artificial Sequence: Synthetic oligonucleotide
  Sense strand starting at position 3249 of SEQ ID NO: 318019
aggaaacauuuggaacuuu

SEQ ID NO: 530544 - RNA, 19 nt, Artificial Sequence
  Description of Artificial Sequence: Synthetic oligonucleotide
  Antisense strand to SEQ ID NO: 530543
aaaguuccaaauguuuccu

SEQ ID NO: 530545 - RNA, 19 nt, Artificial Sequence
  Description of Artificial Sequence: Synthetic oligonucleotide
  Sense strand starting at position 3349 of SEQ ID NO: 318019
guccuuuggccagaaaccu

SEQ ID NO: 530546 - RNA, 19 nt, Artificial Sequence
  Description of Artificial Sequence: Synthetic oligonucleotide
  Antisense strand to SEQ ID NO: 530545
agguuucuggccaaaggac

SEQ ID NO: 530547 - RNA, 19 nt, Artificial Sequence
  Description of Artificial Sequence: Synthetic oligonucleotide
  Sense strand starting at position 3412 of SEQ ID NO: 318019
acagguuguaguuaucagu

SEQ ID NO: 530548 - RNA, 19 nt, Artificial Sequence
  Description of Artificial Sequence: Synthetic oligonucleotide
  Antisense strand to SEQ ID NO: 530547
acugauaacuacaaccugu

SEQ ID NO: 530549 - RNA, 19 nt, Artificial Sequence
  Description of Artificial Sequence: Synthetic oligonucleotide
  Sense strand starting at position 3430 of SEQ ID NO: 318019
uggguauguguugaguuga

SEQ ID NO: 530550 - RNA, 19 nt, Artificial Sequence
  Description of Artificial Sequence: Synthetic oligonucleotide
  Antisense strand to SEQ ID NO: 530549
ucaacucaacacauaccca

SEQ ID NO: 530551 - RNA, 19 nt, Artificial Sequence
  Description of Artificial Sequence: Synthetic oligonucleotide
  Sense strand starting at position 3435 of SEQ ID NO: 318019
auguguugaguugaugaau

SEQ ID NO: 530552 - RNA, 19 nt, Artificial Sequence
  Description of Artificial Sequence: Synthetic oligonucleotide
  Antisense strand to SEQ ID NO: 530551
auucaucaacucaacacau

SEQ ID NO: 530553 - RNA, 19 nt, Artificial Sequence
  Description of Artificial Sequence: Synthetic oligonucleotide
  Sense strand starting at position 3438 of SEQ ID NO: 318019
uguugaguugaugaauuag

SEQ ID NO: 530554 - RNA, 19 nt, Artificial Sequence
  Description of Artificial Sequence: Synthetic oligonucleotide
  Antisense strand to SEQ ID NO: 530553
cuaauucaucaacucaaca

SEQ ID NO: 530555 - RNA, 19 nt, Artificial Sequence
  Description of Artificial Sequence: Synthetic oligonucleotide
  Sense strand starting at position 3444 of SEQ ID NO: 318019
guugaugaauuaguggaua

SEQ ID NO: 530556 - RNA, 19 nt, Artificial Sequence
  Description of Artificial Sequence: Synthetic oligonucleotide
  Antisense strand to SEQ ID NO: 530555
uauccacuaauucaucaac

SEQ ID NO: 530557 - RNA, 19 nt, Artificial Sequence
  Description of Artificial Sequence: Synthetic oligonucleotide
  Sense strand starting at position 3496 of SEQ ID NO: 318019
gccugccuugacuauaaau

SEQ ID NO: 530558 - RNA, 19 nt, Artificial Sequence
  Description of Artificial Sequence: Synthetic oligonucleotide
  Antisense strand to SEQ ID NO: 530557
auuuauagucaaggcaggc

SEQ ID NO: 530559 - RNA, 19 nt, Artificial Sequence
  Description of Artificial Sequence: Synthetic oligonucleotide
  Sense strand starting at position 3548 of SEQ ID NO: 318019
gccaguauuguccagagga

SEQ ID NO: 530560 - RNA, 19 nt, Artificial Sequence
  Description of Artificial Sequence: Synthetic oligonucleotide
  Antisense strand to SEQ ID NO: 530559
uccucuggacaauacuggc

SEQ ID NO: 530561 - RNA, 19 nt, Artificial Sequence
  Description of Artificial Sequence: Synthetic oligonucleotide
  Sense strand starting at position 3550 of SEQ ID NO: 318019
caguauuguccagaggagc

SEQ ID NO: 530562 - RNA, 19 nt, Artificial Sequence
  Description of Artificial Sequence: Synthetic oligonucleotide
  Antisense strand to SEQ ID NO: 530561
gcuccucuggacaauacug

SEQ ID NO: 530563 - RNA, 19 nt, Artificial Sequence
  Description of Artificial Sequence: Synthetic oligonucleotide
  Sense strand starting at position 3570 of SEQ ID NO: 318019
caaggaagcucuguggaga

SEQ ID NO: 530564 - RNA, 19 nt, Artificial Sequence
  Description of Artificial Sequence: Synthetic oligonucleotide
  Antisense strand to SEQ ID NO: 530563
ucuccacagagcuuccuug

SEQ ID NO: 530565 - RNA, 19 nt, Artificial Sequence
  Description of Artificial Sequence: Synthetic oligonucleotide
  Sense strand starting at position 3573 of SEQ ID NO: 318019
ggaagcucuguggagacau

SEQ ID NO: 530566 - RNA, 19 nt, Artificial Sequence
  Description of Artificial Sequence: Synthetic oligonucleotide
  Antisense strand to SEQ ID NO: 530565
augucuccacagagcuucc

SEQ ID NO: 530567 - RNA, 19 nt, Artificial Sequence
  Description of Artificial Sequence: Synthetic oligonucleotide
  Sense strand starting at position 3592 of SEQ ID NO: 318019
aggaauaaguguuccuggu

SEQ ID NO: 530568 - RNA, 19 nt, Artificial Sequence
  Description of Artificial Sequence: Synthetic oligonucleotide
  Antisense strand to SEQ ID NO: 530567
accaggaacacuuauuccu

SEQ ID NO: 530569 - RNA, 19 nt, Artificial Sequence
  Description of Artificial Sequence: Synthetic oligonucleotide
  Sense strand starting at position 3789 of SEQ ID NO: 318019
uuuccuagccaguaucauu

SEQ ID NO: 530570 - RNA, 19 nt, Artificial Sequence
  Description of Artificial Sequence: Synthetic oligonucleotide
  Antisense strand to SEQ ID NO: 530569
aaugauacuggcuaggaaa

SEQ ID NO: 530571 - RNA, 19 nt, Artificial Sequence
  Description of Artificial Sequence: Synthetic oligonucleotide
  Sense strand starting at position 3810 of SEQ ID NO: 318019
aguguuucucaagauaguc

SEQ ID NO: 530572 - RNA, 19 nt, Artificial Sequence
  Description of Artificial Sequence: Synthetic oligonucleotide
  Antisense strand to SEQ ID NO: 530571
gacuaucuugagaaacacu

SEQ ID NO: 530573 - RNA, 19 nt, Artificial Sequence
  Description of Artificial Sequence: Synthetic oligonucleotide
  Sense strand starting at position 67 of SEQ ID NO: 318020
ugaagcaggcuuuaguuua

SEQ ID NO: 530574 - RNA, 19 nt, Artificial Sequence
  Description of Artificial Sequence: Synthetic oligonucleotide
  Antisense strand to SEQ ID NO: 530573
uaaacuaaagccugcuuca

SEQ ID NO: 530575 - RNA, 19 nt, Artificial Sequence
  Description of Artificial Sequence: Synthetic oligonucleotide
  Sense strand starting at position 116 of SEQ ID NO: 318020
cagccauggcuugaaauga

SEQ ID NO: 530576 - RNA, 19 nt, Artificial Sequence
  Description of Artificial Sequence: Synthetic oligonucleotide
  Antisense strand to SEQ ID NO: 530575
ucauuucaagccauggcug

SEQ ID NO: 530577 - RNA, 19 nt, Artificial Sequence
  Description of Artificial Sequence: Synthetic oligonucleotide
  Sense strand starting at position 232 of SEQ ID NO: 318020
guaaaugaagaacgcauua

SEQ ID NO: 530578 - RNA, 19 nt, Artificial Sequence
  Description of Artificial Sequence: Synthetic oligonucleotide
  Antisense strand to SEQ ID NO: 530577
uaaugcguucuucauuuac

SEQ ID NO: 530579 - RNA, 19 nt, Artificial Sequence
  Description of Artificial Sequence: Synthetic oligonucleotide
  Sense strand starting at position 518 of SEQ ID NO: 318020
acacuuaaauuguuuggga

SEQ ID NO: 530580 - RNA, 19 nt, Artificial Sequence
  Description of Artificial Sequence: Synthetic oligonucleotide
  Antisense strand to SEQ ID NO: 530579
ucccaaacaauuuaagugu

SEQ ID NO: 530581 - RNA, 19 nt, Artificial Sequence
  Description of Artificial Sequence: Synthetic oligonucleotide
  Sense strand starting at position 519 of SEQ ID NO: 318020
cacuuaaauuguuugggaa

SEQ ID NO: 530582 - RNA, 19 nt, Artificial Sequence
  Description of Artificial Sequence: Synthetic oligonucleotide
  Antisense strand to SEQ ID NO: 530581
uucccaaacaauuuaagug

SEQ ID NO: 530583 - RNA, 19 nt, Artificial Sequence
  Description of Artificial Sequence: Synthetic oligonucleotide
  Sense strand starting at position 520 of SEQ ID NO: 318020
acuuaaauuguuugggaag

SEQ ID NO: 530584 - RNA, 19 nt, Artificial Sequence
  Description of Artificial Sequence: Synthetic oligonucleotide
  Antisense strand to SEQ ID NO: 530583
cuucccaaacaauuuaagu

SEQ ID NO: 530585 - RNA, 19 nt, Artificial Sequence
  Description of Artificial Sequence: Synthetic oligonucleotide
  Sense strand starting at position 606 of SEQ ID NO: 318020
gaaaguguagauugugaaa

SEQ ID NO: 530586 - RNA, 19 nt, Artificial Sequence
  Description of Artificial Sequence: Synthetic oligonucleotide
  Antisense strand to SEQ ID NO: 530585
uuucacaaucuacacuuuc

SEQ ID NO: 530587 - RNA, 19 nt, Artificial Sequence
  Description of Artificial Sequence: Synthetic oligonucleotide
  Sense strand starting at position 662 of SEQ ID NO: 318020
uuguaaagucagcaauauu

SEQ ID NO: 530588 - RNA, 19 nt, Artificial Sequence
  Description of Artificial Sequence: Synthetic oligonucleotide
  Antisense strand to SEQ ID NO: 530587
aauauugcugacuuuacaa

SEQ ID NO: 530589 - RNA, 19 nt, Artificial Sequence
  Description of Artificial Sequence: Synthetic oligonucleotide
  Sense strand starting at position 792 of SEQ ID NO: 318020
gucauuguccuguacagaa

SEQ ID NO: 530590 - RNA, 19 nt, Artificial Sequence
  Description of Artificial Sequence: Synthetic oligonucleotide
  Antisense strand to SEQ ID NO: 530589
uucuguacaggacaaugac

SEQ ID NO: 530591 - RNA, 19 nt, Artificial Sequence
  Description of Artificial Sequence: Synthetic oligonucleotide
  Sense strand starting at position 839 of SEQ ID NO: 318020
gcucuacgucaggaaggau

SEQ ID NO: 530592 - RNA, 19 nt, Artificial Sequence
  Description of Artificial Sequence: Synthetic oligonucleotide
  Antisense strand to SEQ ID NO: 530591
auccuuccugacguagagc

SEQ ID NO: 530593 - RNA, 19 nt, Artificial Sequence
  Description of Artificial Sequence: Synthetic oligonucleotide
  Sense strand starting at position 858 of SEQ ID NO: 318020
gggaaucucugccuucuca

SEQ ID NO: 530594 - RNA, 19 nt, Artificial Sequence
  Description of Artificial Sequence: Synthetic oligonucleotide
  Antisense strand to SEQ ID NO: 530593
ugagaaggcagagauuccc

SEQ ID NO: 530595 - RNA, 19 nt, Artificial Sequence
  Description of Artificial Sequence: Synthetic oligonucleotide
  Sense strand starting at position 1320 of SEQ ID NO: 318020
gucauaagcucuccagaaa

SEQ ID NO: 530596 - RNA, 19 nt, Artificial Sequence
  Description of Artificial Sequence: Synthetic oligonucleotide
  Antisense strand to SEQ ID NO: 530595
uuucuggagagcuuaugac

SEQ ID NO: 530597 - RNA, 19 nt, Artificial Sequence
  Description of Artificial Sequence: Synthetic oligonucleotide
  Sense strand starting at position 1379 of SEQ ID NO: 318020
guggguagagcuuaccaaa

SEQ ID NO: 530598 - RNA, 19 nt, Artificial Sequence
  Description of Artificial Sequence: Synthetic oligonucleotide
  Antisense strand to SEQ ID NO: 530597
uuugguaagcucuacccac

SEQ ID NO: 530599 - RNA, 19 nt, Artificial Sequence
  Description of Artificial Sequence: Synthetic oligonucleotide
  Sense strand starting at position 1573 of SEQ ID NO: 318020
gggucacuugcauacauga

SEQ ID NO: 530600 - RNA, 19 nt, Artificial Sequence
  Description of Artificial Sequence: Synthetic oligonucleotide
  Antisense strand to SEQ ID NO: 530599
ucauguaugcaagugaccc

SEQ ID NO: 530601 - RNA, 19 nt, Artificial Sequence
  Description of Artificial Sequence: Synthetic oligonucleotide
  Sense strand starting at position 1805 of SEQ ID NO: 318020
aagcauugugaaggaggau

SEQ ID NO: 530602 - RNA, 19 nt, Artificial Sequence
  Description of Artificial Sequence: Synthetic oligonucleotide
  Antisense strand to SEQ ID NO: 530601
auccuccuucacaaugcuu

SEQ ID NO: 530603 - RNA, 19 nt, Artificial Sequence
  Description of Artificial Sequence: Synthetic oligonucleotide
  Sense strand starting at position 1871 of SEQ ID NO: 318020
ccaagagagccgggaugau

SEQ ID NO: 530604 - RNA, 19 nt, Artificial Sequence
  Description of Artificial Sequence: Synthetic oligonucleotide
  Antisense strand to SEQ ID NO: 530603
aucaucccggcucucuugg

SEQ ID NO: 530605 - RNA, 19 nt, Artificial Sequence
  Description of Artificial Sequence: Synthetic oligonucleotide
  Sense strand starting at position 1883 of SEQ ID NO: 318020
ggaugaugguucuccaguc

SEQ ID NO: 530606 - RNA, 19 nt, Artificial Sequence
  Description of Artificial Sequence: Synthetic oligonucleotide
  Antisense strand to SEQ ID NO: 530605
gacuggagaaccaucaucc

SEQ ID NO: 530607 - RNA, 19 nt, Artificial Sequence
  Description of Artificial Sequence: Synthetic oligonucleotide
  Sense strand starting at position 1893 of SEQ ID NO: 318020
ucuccaguccugggaauca

SEQ ID NO: 530608 - RNA, 19 nt, Artificial Sequence
  Description of Artificial Sequence: Synthetic oligonucleotide
  Antisense strand to SEQ ID NO: 530607
ugauucccaggacuggaga

SEQ ID NO: 530609 - RNA, 19 nt, Artificial Sequence
  Description of Artificial Sequence: Synthetic oligonucleotide
  Sense strand starting at position 1968 of SEQ ID NO: 318020
ggaguuagagucugcaaag

SEQ ID NO: 530610 - RNA, 19 nt, Artificial Sequence
  Description of Artificial Sequence: Synthetic oligonucleotide
  Antisense strand to SEQ ID NO: 530609
cuuugcagacucuaacucc

SEQ ID NO: 530611 - RNA, 19 nt, Artificial Sequence
  Description of Artificial Sequence: Synthetic oligonucleotide
  Sense strand starting at position 2033 of SEQ ID NO: 318020
cuuauuuagguuugucuuu

SEQ ID NO: 530612 - RNA, 19 nt, Artificial Sequence
  Description of Artificial Sequence: Synthetic oligonucleotide
  Antisense strand to SEQ ID NO: 530611
aaagacaaaccuaaauaag

SEQ ID NO: 530613 - RNA, 19 nt, Artificial Sequence
  Description of Artificial Sequence: Synthetic oligonucleotide
  Sense strand starting at position 2270 of SEQ ID NO: 318020
agcccuguggaguaauaca

SEQ ID NO: 530614 - RNA, 19 nt, Artificial Sequence
  Description of Artificial Sequence: Synthetic oligonucleotide
  Antisense strand to SEQ ID NO: 530613
uguauuacuccacagggcu

SEQ ID NO: 530615 - RNA, 19 nt, Artificial Sequence
  Description of Artificial Sequence: Synthetic oligonucleotide
  Sense strand starting at position 2737 of SEQ ID NO: 318020
ggaugacucucaguuuauu

SEQ ID NO: 530616 - RNA, 19 nt, Artificial Sequence
  Description of Artificial Sequence: Synthetic oligonucleotide
  Antisense strand to SEQ ID NO: 530615
aauaaacugagagucaucc

SEQ ID NO: 530617 - RNA, 19 nt, Artificial Sequence
  Description of Artificial Sequence: Synthetic oligonucleotide
  Sense strand starting at position 2740 of SEQ ID NO: 318020
ugacucucaguuuauucua

SEQ ID NO: 530618 - RNA, 19 nt, Artificial Sequence
  Description of Artificial Sequence: Synthetic oligonucleotide
  Antisense strand to SEQ ID NO: 530617
uagaauaaacugagaguca

SEQ ID NO: 530619 - RNA, 19 nt, Artificial Sequence
  Description of Artificial Sequence: Synthetic oligonucleotide
  Sense strand starting at position 2844 of SEQ ID NO: 318020
aaggcaacugcaugaugaa

SEQ ID NO: 530620 - RNA, 19 nt, Artificial Sequence
  Description of Artificial Sequence: Synthetic oligonucleotide
  Antisense strand to SEQ ID NO: 530619
uucaucaugcaguugccuu

SEQ ID NO: 530621 - RNA, 19 nt, Artificial Sequence
  Description of Artificial Sequence: Synthetic oligonucleotide
  Sense strand starting at position 2845 of SEQ ID NO: 318020
aggcaacugcaugaugaau

SEQ ID NO: 530622 - RNA, 19 nt, Artificial Sequence
  Description of Artificial Sequence: Synthetic oligonucleotide
  Antisense strand to SEQ ID NO: 530621
auucaucaugcaguugccu

SEQ ID NO: 530623 - RNA, 19 nt, Artificial Sequence
  Description of Artificial Sequence: Synthetic oligonucleotide
  Sense strand starting at position 3481 of SEQ ID NO: 318020
gcaugauauacaggagagu

SEQ ID NO: 530624 - RNA, 19 nt, Artificial Sequence
  Description of Artificial Sequence: Synthetic oligonucleotide
  Antisense strand to SEQ ID NO: 530623
acucuccuguauaucaugc

SEQ ID NO: 530625 - RNA, 19 nt, Artificial Sequence
  Description of Artificial Sequence: Synthetic oligonucleotide
  Sense strand starting at position 3529 of SEQ ID NO: 318020
gguacugugcuuucacguu

SEQ ID NO: 530626 - RNA, 19 nt, Artificial Sequence
  Description of Artificial Sequence: Synthetic oligonucleotide
  Antisense strand to SEQ ID NO: 530625
aacgugaaagcacaguacc

SEQ ID NO: 530627 - RNA, 19 nt, Artificial Sequence
  Description of Artificial Sequence: Synthetic oligonucleotide
  Sense strand starting at position 3557 of SEQ ID NO: 318020
uaaagaagggucugacguu

SEQ ID NO: 530628 - RNA, 19 nt, Artificial Sequence
  Description of Artificial Sequence: Synthetic oligonucleotide
  Antisense strand to SEQ ID NO: 530627
aacgucagacccuucuuua

SEQ ID NO: 530629 - RNA, 19 nt, Artificial Sequence
  Description of Artificial Sequence: Synthetic oligonucleotide
  Sense strand starting at position 3605 of SEQ ID NO: 318020
auaaguagugaucaguaua

SEQ ID NO: 530630 - RNA, 19 nt, Artificial Sequence
  Description of Artificial Sequence: Synthetic oligonucleotide
  Antisense strand to SEQ ID NO: 530629
uauacugaucacuacuuau

SEQ ID NO: 530631 - RNA, 19 nt, Artificial Sequence
  Description of Artificial Sequence: Synthetic oligonucleotide
  Sense strand starting at position 3608 of SEQ ID NO: 318020
aguagugaucaguauagcu

SEQ ID NO: 530632 - RNA, 19 nt, Artificial Sequence
  Description of Artificial Sequence: Synthetic oligonucleotide
  Antisense strand to SEQ ID NO: 530631
agcuauacugaucacuacu

SEQ ID NO: 530633 - RNA, 19 nt, Artificial Sequence
  Description of Artificial Sequence: Synthetic oligonucleotide
  Sense strand starting at position 3610 of SEQ ID NO: 318020
uagugaucaguauagcuau

SEQ ID NO: 530634 - RNA, 19 nt, Artificial Sequence
  Description of Artificial Sequence: Synthetic oligonucleotide
  Antisense strand to SEQ ID NO: 530633
auagcuauacugaucacua

SEQ ID NO: 530635 - RNA, 19 nt, Artificial Sequence
  Description of Artificial Sequence: Synthetic oligonucleotide
  Sense strand starting at position 3712 of SEQ ID NO: 318020
guuguuccuauagaacagu

SEQ ID NO: 530636 - RNA, 19 nt, Artificial Sequence
  Description of Artificial Sequence: Synthetic oligonucleotide
  Antisense strand to SEQ ID NO: 530635
acuguucuauaggaacaac

SEQ ID NO: 530637 - RNA, 19 nt, Artificial Sequence
  Description of Artificial Sequence: Synthetic oligonucleotide
  Sense strand starting at position 3744 of SEQ ID NO: 318020
accuuauuccagcaaggca

SEQ ID NO: 530638 - RNA, 19 nt, Artificial Sequence
  Description of Artificial Sequence: Synthetic oligonucleotide
  Antisense strand to SEQ ID NO: 530637
ugccuugcuggaauaaggu

SEQ ID NO: 530639 - RNA, 19 nt, Artificial Sequence
  Description of Artificial Sequence: Synthetic oligonucleotide
  Sense strand starting at position 3771 of SEQ ID NO: 318020
cccaguaacuacuuaagga

SEQ ID NO: 530640 - RNA, 19 nt, Artificial Sequence
  Description of Artificial Sequence: Synthetic oligonucleotide
  Antisense strand to SEQ ID NO: 530639
uccuuaaguaguuacuggg

SEQ ID NO: 530641 - RNA, 19 nt, Artificial Sequence
  Description of Artificial Sequence: Synthetic oligonucleotide
  Sense strand starting at position 3788 of SEQ ID NO: 318020
gaugaaauauccuugaguc

SEQ ID NO: 530642 - RNA, 19 nt, Artificial Sequence
  Description of Artificial Sequence: Synthetic oligonucleotide
  Antisense strand to SEQ ID NO: 530641
gacucaaggauauuucauc

SEQ ID NO: 530643 - RNA, 19 nt, Artificial Sequence
  Description of Artificial Sequence: Synthetic oligonucleotide
  Sense strand starting at position 3789 of SEQ ID NO: 318020
augaaauauccuugagucu

SEQ ID NO: 530644 - RNA, 19 nt, Artificial Sequence
  Description of Artificial Sequence: Synthetic oligonucleotide
  Antisense strand to SEQ ID NO: 530643
agacucaaggauauuucau

SEQ ID NO: 530645 - RNA, 19 nt, Artificial Sequence
  Description of Artificial Sequence: Synthetic oligonucleotide
  Sense strand starting at position 3790 of SEQ ID NO: 318020
ugaaauauccuugagucuc

SEQ ID NO: 530646 - RNA, 19 nt, Artificial Sequence
  Description of Artificial Sequence: Synthetic oligonucleotide
  Antisense strand to SEQ ID NO: 530645
gagacucaaggauauuuca

SEQ ID NO: 530647 - RNA, 19 nt, Artificial Sequence
  Description of Artificial Sequence: Synthetic oligonucleotide
  Sense strand starting at position 3843 of SEQ ID NO: 318020
aacgucuuacagggaagaa

SEQ ID NO: 530648 - RNA, 19 nt, Artificial Sequence
  Description of Artificial Sequence: Synthetic oligonucleotide
  Antisense strand to SEQ ID NO: 530647
uucuucccuguaagacguu

SEQ ID NO: 530649 - RNA, 19 nt, Artificial Sequence
  Description of Artificial Sequence: Synthetic oligonucleotide
  Sense strand starting at position 3869 of SEQ ID NO: 318020
gagggagcagagugauguu

SEQ ID NO: 530650 - RNA, 19 nt, Artificial Sequence
  Description of Artificial Sequence: Synthetic oligonucleotide
  Antisense strand to SEQ ID NO: 530649
aacaucacucugcucccuc

SEQ ID NO: 530651 - RNA, 19 nt, Artificial Sequence
  Description of Artificial Sequence: Synthetic oligonucleotide
  Sense strand starting at position 3918 of SEQ ID NO: 318020
ucacuugauguauguggaa

SEQ ID NO: 530652 - RNA, 19 nt, Artificial Sequence
  Description of Artificial Sequence: Synthetic oligonucleotide
  Antisense strand to SEQ ID NO: 530651
uuccacauacaucaaguga

SEQ ID NO: 530653 - RNA, 19 nt, Artificial Sequence
  Description of Artificial Sequence: Synthetic oligonucleotide
  Sense strand starting at position 109 of SEQ ID NO: 318021
auuuaaugguaugaagacu

SEQ ID NO: 530654 - RNA, 19 nt, Artificial Sequence
  Description of Artificial Sequence: Synthetic oligonucleotide
  Antisense strand to SEQ ID NO: 530653
agucuucauaccauuaaau

SEQ ID NO: 530655 - RNA, 19 nt, Artificial Sequence
  Description of Artificial Sequence: Synthetic oligonucleotide
  Sense strand starting at position 118 of SEQ ID NO: 318021
uaugaagacucaguguuac

SEQ ID NO: 530656 - RNA, 19 nt, Artificial Sequence
  Description of Artificial Sequence: Synthetic oligonucleotide
  Antisense strand to SEQ ID NO: 530655
guaacacugagucuucaua

SEQ ID NO: 530657 - RNA, 19 nt, Artificial Sequence
  Description of Artificial Sequence: Synthetic oligonucleotide
  Sense strand starting at position 163 of SEQ ID NO: 318021
cucuuauaguaguccaaga

SEQ ID NO: 530658 - RNA, 19 nt, Artificial Sequence
  Description of Artificial Sequence: Synthetic oligonucleotide
  Antisense strand to SEQ ID NO: 530657
ucuuggacuacuauaagag

SEQ ID NO: 530659 - RNA, 19 nt, Artificial Sequence
  Description of Artificial Sequence: Synthetic oligonucleotide
  Sense strand starting at position 165 of SEQ ID NO: 318021
cuuauaguaguccaagauu

SEQ ID NO: 530660 - RNA, 19 nt, Artificial Sequence
  Description of Artificial Sequence: Synthetic oligonucleotide
  Antisense strand to SEQ ID NO: 530659
aaucuuggacuacuauaag

SEQ ID NO: 530661 - RNA, 19 nt, Artificial Sequence
  Description of Artificial Sequence: Synthetic oligonucleotide
  Sense strand starting at position 168 of SEQ ID NO: 318021
auaguaguccaagauuacu

SEQ ID NO: 530662 - RNA, 19 nt, Artificial Sequence
  Description of Artificial Sequence: Synthetic oligonucleotide
  Antisense strand to SEQ ID NO: 530661
aguaaucuuggacuacuau

SEQ ID NO: 530663 - RNA, 19 nt, Artificial Sequence
  Description of Artificial Sequence: Synthetic oligonucleotide
  Sense strand starting at position 226 of SEQ ID NO: 318021
aguauaguauagguccuaa

SEQ ID NO: 530664 - RNA, 19 nt, Artificial Sequence
  Description of Artificial Sequence: Synthetic oligonucleotide
  Antisense strand to SEQ ID NO: 530663
uuaggaccuauacuauacu

SEQ ID NO: 530665 - RNA, 19 nt, Artificial Sequence
  Description of Artificial Sequence: Synthetic oligonucleotide
  Sense strand starting at position 293 of SEQ ID NO: 318021
gggcaaggagcuuaaacuu

SEQ ID NO: 530666 - RNA, 19 nt, Artificial Sequence
  Description of Artificial Sequence: Synthetic oligonucleotide
  Antisense strand to SEQ ID NO: 530665
aaguuuaagcuccuugccc

SEQ ID NO: 530667 - RNA, 19 nt, Artificial Sequence
  Description of Artificial Sequence: Synthetic oligonucleotide
  Sense strand starting at position 481 of SEQ ID NO: 318021
ggagauaggauucagucgu

SEQ ID NO: 530668 - RNA, 19 nt, Artificial Sequence
  Description of Artificial Sequence: Synthetic oligonucleotide
  Antisense strand to SEQ ID NO: 530667
acgacugaauccuaucucc

SEQ ID NO: 530669 - RNA, 19 nt, Artificial Sequence
  Description of Artificial Sequence: Synthetic oligonucleotide
  Sense strand starting at position 788 of SEQ ID NO: 318021
caaauuauauaggcggaau

SEQ ID NO: 530670 - RNA, 19 nt, Artificial Sequence
  Description of Artificial Sequence: Synthetic oligonucleotide
  Antisense strand to SEQ ID NO: 530669
auuccgccuauauaauuug

SEQ ID NO: 530671 - RNA, 19 nt, Artificial Sequence
  Description of Artificial Sequence: Synthetic oligonucleotide
  Sense strand starting at position 791 of SEQ ID NO: 318021
auuauauaggcggaauagu

SEQ ID NO: 530672 - RNA, 19 nt, Artificial Sequence
  Description of Artificial Sequence: Synthetic oligonucleotide
  Antisense strand to SEQ ID NO: 530671
acuauuccgccuauauaau

SEQ ID NO: 530673 - RNA, 19 nt, Artificial Sequence
  Description of Artificial Sequence: Synthetic oligonucleotide
  Sense strand starting at position 802 of SEQ ID NO: 318021
ggaauaguucgccacuuac

SEQ ID NO: 530674 - RNA, 19 nt, Artificial Sequence
  Description of Artificial Sequence: Synthetic oligonucleotide
  Antisense strand to SEQ ID NO: 530673
guaaguggcgaacuauucc

SEQ ID NO: 530675 - RNA, 19 nt, Artificial Sequence
  Description of Artificial Sequence: Synthetic oligonucleotide
  Sense strand starting at position 811 of SEQ ID NO: 318021
cgccacuuacucuaugaaa

SEQ ID NO: 530676 - RNA, 19 nt, Artificial Sequence
  Description of Artificial Sequence: Synthetic oligonucleotide
  Antisense strand to SEQ ID NO: 530675
uuucauagaguaaguggcg

SEQ ID NO: 530677 - RNA, 19 nt, Artificial Sequence
  Description of Artificial Sequence: Synthetic oligonucleotide
  Sense strand starting at position 859 of SEQ ID NO: 318021
uuguauccugccuaagaua

SEQ ID NO: 530678 - RNA, 19 nt, Artificial Sequence
  Description of Artificial Sequence: Synthetic oligonucleotide
  Antisense strand to SEQ ID NO: 530677
uaucuuaggcaggauacaa

SEQ ID NO: 530679 - RNA, 19 nt, Artificial Sequence
  Description of Artificial Sequence: Synthetic oligonucleotide
  Sense strand starting at position 1016 of SEQ ID NO: 318021
cuaaucaugcuguaugagu

SEQ ID NO: 530680 - RNA, 19 nt, Artificial Sequence
  Description of Artificial Sequence: Synthetic oligonucleotide
  Antisense strand to SEQ ID NO: 530679
acucauacagcaugauuag

SEQ ID NO: 530681 - RNA, 19 nt, Artificial Sequence
  Description of Artificial Sequence: Synthetic oligonucleotide
  Sense strand starting at position 1343 of SEQ ID NO: 318021
auucuauagcuccauguua

SEQ ID NO: 530682 - RNA, 19 nt, Artificial Sequence
  Description of Artificial Sequence: Synthetic oligonucleotide
  Antisense strand to SEQ ID NO: 530681
uaacauggagcuauagaau

SEQ ID NO: 530683 - RNA, 19 nt, Artificial Sequence
  Description of Artificial Sequence: Synthetic oligonucleotide
  Sense strand starting at position 2325 of SEQ ID NO: 318021
gcggucagugcuuucuaau

SEQ ID NO: 530684 - RNA, 19 nt, Artificial Sequence
  Description of Artificial Sequence: Synthetic oligonucleotide
  Antisense strand to SEQ ID NO: 530683
auuagaaagcacugaccgc

SEQ ID NO: 530685 - RNA, 19 nt, Artificial Sequence
  Description of Artificial Sequence: Synthetic oligonucleotide
  Sense strand starting at position 2422 of SEQ ID NO: 318021
gguacuccacuguaagcaa

SEQ ID NO: 530686 - RNA, 19 nt, Artificial Sequence
  Description of Artificial Sequence: Synthetic oligonucleotide
  Antisense strand to SEQ ID NO: 530685
uugcuuacaguggaguacc

SEQ ID NO: 530687 - RNA, 19 nt, Artificial Sequence
  Description of Artificial Sequence: Synthetic oligonucleotide
  Sense strand starting at position 2489 of SEQ ID NO: 318021
ucguuccuaagagaauguu

SEQ ID NO: 530688 - RNA, 19 nt, Artificial Sequence
  Description of Artificial Sequence: Synthetic oligonucleotide
  Antisense strand to SEQ ID NO: 530687
aacauucucuuaggaacga

SEQ ID NO: 530689 - RNA, 19 nt, Artificial Sequence
  Description of Artificial Sequence: Synthetic oligonucleotide
  Sense strand starting at position 2545 of SEQ ID NO: 318021
ccauaagaauuugagcaua

SEQ ID NO: 530690 - RNA, 19 nt, Artificial Sequence
  Description of Artificial Sequence: Synthetic oligonucleotide
  Antisense strand to SEQ ID NO: 530689
uaugcucaaauucuuaugg

SEQ ID NO: 530691 - RNA, 19 nt, Artificial Sequence
  Description of Artificial Sequence: Synthetic oligonucleotide
  Sense strand starting at position 2645 of SEQ ID NO: 318021
uugucugucuccucauuua

SEQ ID NO: 530692 - RNA, 19 nt, Artificial Sequence
  Description of Artificial Sequence: Synthetic oligonucleotide
  Antisense strand to SEQ ID NO: 530691
uaaaugaggagacagacaa

SEQ ID NO: 530693 - RNA, 19 nt, Artificial Sequence
  Description of Artificial Sequence: Synthetic oligonucleotide
  Sense strand starting at position 2691 of SEQ ID NO: 318021
ggcuguuaggaguagauga

SEQ ID NO: 530694 - RNA, 19 nt, Artificial Sequence
  Description of Artificial Sequence: Synthetic oligonucleotide
  Antisense strand to SEQ ID NO: 530693
ucaucuacuccuaacagcc

SEQ ID NO: 530695 - RNA, 19 nt, Artificial Sequence
  Description of Artificial Sequence: Synthetic oligonucleotide
  Sense strand starting at position 2705 of SEQ ID NO: 318021
gaugaaugagacuguguga

SEQ ID NO: 530696 - RNA, 19 nt, Artificial Sequence
  Description of Artificial Sequence: Synthetic oligonucleotide
  Antisense strand to SEQ ID NO: 530695
ucacacagucucauucauc

SEQ ID NO: 530697 - RNA, 19 nt, Artificial Sequence
  Description of Artificial Sequence: Synthetic oligonucleotide
  Sense strand starting at position 2708 of SEQ ID NO: 318021
gaaugagacugugugaagu

SEQ ID NO: 530698 - RNA, 19 nt, Artificial Sequence
  Description of Artificial Sequence: Synthetic oligonucleotide
  Antisense strand to SEQ ID NO: 530697
acuucacacagucucauuc

SEQ ID NO: 530699 - RNA, 19 nt, Artificial Sequence
  Description of Artificial Sequence: Synthetic oligonucleotide
  Sense strand starting at position 2724 of SEQ ID NO: 318021
agugcaacucuuuacagua

SEQ ID NO: 530700 - RNA, 19 nt, Artificial Sequence
  Description of Artificial Sequence: Synthetic oligonucleotide
  Antisense strand to SEQ ID NO: 530699
uacuguaaagaguugcacu

SEQ ID NO: 530701 - RNA, 19 nt, Artificial Sequence
  Description of Artificial Sequence: Synthetic oligonucleotide
  Sense strand starting at position 2753 of SEQ ID NO: 318021
gugguaaacccucagcaaa

SEQ ID NO: 530702 - RNA, 19 nt, Artificial Sequence
  Description of Artificial Sequence: Synthetic oligonucleotide
  Antisense strand to SEQ ID NO: 530701
uuugcugaggguuuaccac

SEQ ID NO: 530703 - RNA, 19 nt, Artificial Sequence
  Description of Artificial Sequence: Synthetic oligonucleotide
  Sense strand starting at position 2755 of SEQ ID NO: 318021
gguaaacccucagcaaaug

SEQ ID NO: 530704 - RNA, 19 nt, Artificial Sequence
  Description of Artificial Sequence: Synthetic oligonucleotide
  Antisense strand to SEQ ID NO: 530703
cauuugcugaggguuuacc

SEQ ID NO: 530705 - RNA, 19 nt, Artificial Sequence
  Description of Artificial Sequence: Synthetic oligonucleotide
  Sense strand starting at position 3071 of SEQ ID NO: 318021
ggcacucauuuagcguuau

SEQ ID NO: 530706 - RNA, 19 nt, Artificial Sequence
  Description of Artificial Sequence: Synthetic oligonucleotide
  Antisense strand to SEQ ID NO: 530705
auaacgcuaaaugagugcc

SEQ ID NO: 530707 - RNA, 19 nt, Artificial Sequence
  Description of Artificial Sequence: Synthetic oligonucleotide
  Sense strand starting at position 3102 of SEQ ID NO: 318021
cugagcaccuccucugaaa

SEQ ID NO: 530708 - RNA, 19 nt, Artificial Sequence
  Description of Artificial Sequence: Synthetic oligonucleotide
  Antisense strand to SEQ ID NO: 530707
uuucagaggaggugcucag

SEQ ID NO: 530709 - RNA, 19 nt, Artificial Sequence
  Description of Artificial Sequence: Synthetic oligonucleotide
  Sense strand starting at position 3113 of SEQ ID NO: 318021
cucugaaagcugcaauacu

SEQ ID NO: 530710 - RNA, 19 nt, Artificial Sequence
  Description of Artificial Sequence: Synthetic oligonucleotide
  Antisense strand to SEQ ID NO: 530709
aguauugcagcuuucagag

SEQ ID NO: 530711 - RNA, 19 nt, Artificial Sequence
  Description of Artificial Sequence: Synthetic oligonucleotide
  Sense strand starting at position 3186 of SEQ ID NO: 318021
acagaaaccgugugggaau

SEQ ID NO: 530712 - RNA, 19 nt, Artificial Sequence
  Description of Artificial Sequence: Synthetic oligonucleotide
  Antisense strand to SEQ ID NO: 530711
auucccacacgguuucugu

SEQ ID NO: 530713 - RNA, 19 nt, Artificial Sequence
  Description of Artificial Sequence: Synthetic oligonucleotide
  Sense strand starting at position 3251 of SEQ ID NO: 318021
cuaggugauccaggagauu

SEQ ID NO: 530714 - RNA, 19 nt, Artificial Sequence
  Description of Artificial Sequence: Synthetic oligonucleotide
  Antisense strand to SEQ ID NO: 530713
aaucuccuggaucaccuag

SEQ ID NO: 530715 - RNA, 19 nt, Artificial Sequence
  Description of Artificial Sequence: Synthetic oligonucleotide
  Sense strand starting at position 3322 of SEQ ID NO: 318021
cuuuaaauccacgagcaua

SEQ ID NO: 530716 - RNA, 19 nt, Artificial Sequence
  Description of Artificial Sequence: Synthetic oligonucleotide
  Antisense strand to SEQ ID NO: 530715
uaugcucguggauuuaaag

SEQ ID NO: 530717 - RNA, 19 nt, Artificial Sequence
  Description of Artificial Sequence: Synthetic oligonucleotide
  Sense strand starting at position 3335 of SEQ ID NO: 318021
agcauaucaacggaguaga

SEQ ID NO: 530718 - RNA, 19 nt, Artificial Sequence
  Description of Artificial Sequence: Synthetic oligonucleotide
  Antisense strand to SEQ ID NO: 530717
ucuacuccguugauaugcu

SEQ ID NO: 530719 - RNA, 19 nt, Artificial Sequence
  Description of Artificial Sequence: Synthetic oligonucleotide
  Sense strand starting at position 3547 of SEQ ID NO: 318021
gcguuuguaaaggcuuuau

SEQ ID NO: 530720 - RNA, 19 nt, Artificial Sequence
  Description of Artificial Sequence: Synthetic oligonucleotide
  Antisense strand to SEQ ID NO: 530719
auaaagccuuuacaaacgc

SEQ ID NO: 530721 - RNA, 19 nt, Artificial Sequence
  Description of Artificial Sequence: Synthetic oligonucleotide
  Sense strand starting at position 3570 of SEQ ID NO: 318021
ggcuaaauacccuggcaaa

SEQ ID NO: 530722 - RNA, 19 nt, Artificial Sequence
  Description of Artificial Sequence: Synthetic oligonucleotide
  Antisense strand to SEQ ID NO: 530721
uuugccaggguauuuagcc

SEQ ID NO: 530723 - RNA, 19 nt, Artificial Sequence
  Description of Artificial Sequence: Synthetic oligonucleotide
  Sense strand starting at position 3694 of SEQ ID NO: 318021
uguguaugacauuacccua

SEQ ID NO: 530724 - RNA, 19 nt, Artificial Sequence
  Description of Artificial Sequence: Synthetic oligonucleotide
  Antisense strand to SEQ ID NO: 530723
uaggguaaugucauacaca

SEQ ID NO: 530725 - RNA, 19 nt, Artificial Sequence
  Description of Artificial Sequence: Synthetic oligonucleotide
  Sense strand starting at position 3712 of SEQ ID NO: 318021
aggcacugugaugaguaaa

SEQ ID NO: 530726 - RNA, 19 nt, Artificial Sequence
  Description of Artificial Sequence: Synthetic oligonucleotide
  Antisense strand to SEQ ID NO: 530725
uuuacucaucacagugccu

SEQ ID NO: 530727 - RNA, 19 nt, Artificial Sequence
  Description of Artificial Sequence: Synthetic oligonucleotide
  Sense strand starting at position 3785 of SEQ ID NO: 318021
auuacuaaguguuuaggaa

SEQ ID NO: 530728 - RNA, 19 nt, Artificial Sequence
  Description of Artificial Sequence: Synthetic oligonucleotide
  Antisense strand to SEQ ID NO: 530727
uuccuaaacacuuaguaau

SEQ ID NO: 530729 - RNA, 19 nt, Artificial Sequence
  Description of Artificial Sequence: Synthetic oligonucleotide
  Sense strand starting at position 3886 of SEQ ID NO: 318021
gugaaaguuaaucaaccga

SEQ ID NO: 530730 - RNA, 19 nt, Artificial Sequence
  Description of Artificial Sequence: Synthetic oligonucleotide
  Antisense strand to SEQ ID NO: 530729
ucgguugauuaacuuucac

SEQ ID NO: 530731 - RNA, 19 nt, Artificial Sequence
  Description of Artificial Sequence: Synthetic oligonucleotide
  Sense strand starting at position 3936 of SEQ ID NO: 318021
acucaagugcuagaaaucu

SEQ ID NO: 530732 - RNA, 19 nt, Artificial Sequence
  Description of Artificial Sequence: Synthetic oligonucleotide
  Antisense strand to SEQ ID NO: 530731
agauuucuagcacuugagu

SEQ ID NO: 530733 - RNA, 19 nt, Artificial Sequence
  Description of Artificial Sequence: Synthetic oligonucleotide
  Sense strand starting at position 88 of SEQ ID NO: 318022
ccugacacuugguucucaa

SEQ ID NO: 530734 - RNA, 19 nt, Artificial Sequence
  Description of Artificial Sequence: Synthetic oligonucleotide
  Antisense strand to SEQ ID NO: 530733
uugagaaccaagugucagg

SEQ ID NO: 530735 - RNA, 19 nt, Artificial Sequence
  Description of Artificial Sequence: Synthetic oligonucleotide
  Sense strand starting at position 277 of SEQ ID NO: 318022
uugaguguggccugacuga

SEQ ID NO: 530736 - RNA, 19 nt, Artificial Sequence
  Description of Artificial Sequence: Synthetic oligonucleotide
  Antisense strand to SEQ ID NO: 530735
ucagucaggccacacucaa

SEQ ID NO: 530737 - RNA, 19 nt, Artificial Sequence
  Description of Artificial Sequence: Synthetic oligonucleotide
  Sense strand starting at position 417 of SEQ ID NO: 318022
cuguguucugcucaagaag

SEQ ID NO: 530738 - RNA, 19 nt, Artificial Sequence
  Description of Artificial Sequence: Synthetic oligonucleotide
  Antisense strand to SEQ ID NO: 530737
cuucuugagcagaacacag

SEQ ID NO: 530739 - RNA, 19 nt, Artificial Sequence
  Description of Artificial Sequence: Synthetic oligonucleotide
  Sense strand starting at position 647 of SEQ ID NO: 318022
aggauuucuuuccagcaug

SEQ ID NO: 530740 - RNA, 19 nt, Artificial Sequence
  Description of Artificial Sequence: Synthetic oligonucleotide
  Antisense strand to SEQ ID NO: 530739
caugcuggaaagaaauccu

SEQ ID NO: 530741 - RNA, 19 nt, Artificial Sequence
  Description of Artificial Sequence: Synthetic oligonucleotide
  Sense strand starting at position 752 of SEQ ID NO: 318022
gagggacuucgucaggcau

SEQ ID NO: 530742 - RNA, 19 nt, Artificial Sequence
  Description of Artificial Sequence: Synthetic oligonucleotide
  Antisense strand to SEQ ID NO: 530741
augccugacgaagucccuc

SEQ ID NO: 530743 - RNA, 19 nt, Artificial Sequence
  Description of Artificial Sequence: Synthetic oligonucleotide
  Sense strand starting at position 781 of SEQ ID NO: 318022
cugagaaucucagucugcu

SEQ ID NO: 530744 - RNA, 19 nt, Artificial Sequence
  Description of Artificial Sequence: Synthetic oligonucleotide
  Antisense strand to SEQ ID NO: 530743
agcagacugagauucucag

SEQ ID NO: 530745 - RNA, 19 nt, Artificial Sequence
  Description of Artificial Sequence: Synthetic oligonucleotide
  Sense strand starting at position 1053 of SEQ ID NO: 318022
ggcagucuacuccagggua

SEQ ID NO: 530746 - RNA, 19 nt, Artificial Sequence
  Description of Artificial Sequence: Synthetic oligonucleotide
  Antisense strand to SEQ ID NO: 530745
uacccuggaguagacugcc

SEQ ID NO: 530747 - RNA, 19 nt, Artificial Sequence
  Description of Artificial Sequence: Synthetic oligonucleotide
  Sense strand starting at position 1135 of SEQ ID NO: 318022
uguugugaucagggaguau

SEQ ID NO: 530748 - RNA, 19 nt, Artificial Sequence
  Description of Artificial Sequence: Synthetic oligonucleotide
  Antisense strand to SEQ ID NO: 530747
auacucccugaucacaaca

SEQ ID NO: 530749 - RNA, 19 nt, Artificial Sequence
  Description of Artificial Sequence: Synthetic oligonucleotide
  Sense strand starting at position 1139 of SEQ ID NO: 318022
gugaucagggaguauuguu

SEQ ID NO: 530750 - RNA, 19 nt, Artificial Sequence
  Description of Artificial Sequence: Synthetic oligonucleotide
  Antisense strand to SEQ ID NO: 530749
aacaauacucccugaucac

SEQ ID NO: 530751 - RNA, 19 nt, Artificial Sequence
  Description of Artificial Sequence: Synthetic oligonucleotide
  Sense strand starting at position 1144 of SEQ ID NO: 318022
cagggaguauuguugaguu

SEQ ID NO: 530752 - RNA, 19 nt, Artificial Sequence
  Description of Artificial Sequence: Synthetic oligonucleotide
  Antisense strand to SEQ ID NO: 530751
aacucaacaauacucccug

SEQ ID NO: 530753 - RNA, 19 nt, Artificial Sequence
  Description of Artificial Sequence: Synthetic oligonucleotide
  Sense strand starting at position 1146 of SEQ ID NO: 318022
gggaguauuguugaguuga

SEQ ID NO: 530754 - RNA, 19 nt, Artificial Sequence
  Description of Artificial Sequence: Synthetic oligonucleotide
  Antisense strand to SEQ ID NO: 530753
ucaacucaacaauacuccc

SEQ ID NO: 530755 - RNA, 19 nt, Artificial Sequence
  Description of Artificial Sequence: Synthetic oligonucleotide
  Sense strand starting at position 1148 of SEQ ID NO: 318022
gaguauuguugaguugaug

SEQ ID NO: 530756 - RNA, 19 nt, Artificial Sequence
  Description of Artificial Sequence: Synthetic oligonucleotide
  Antisense strand to SEQ ID NO: 530755
caucaacucaacaauacuc

SEQ ID NO: 530757 - RNA, 19 nt, Artificial Sequence
  Description of Artificial Sequence: Synthetic oligonucleotide
  Sense strand starting at position 1263 of SEQ ID NO: 318022
uguguaugagucuaaugga

SEQ ID NO: 530758 - RNA, 19 nt, Artificial Sequence
  Description of Artificial Sequence: Synthetic oligonucleotide
  Antisense strand to SEQ ID NO: 530757
uccauuagacucauacaca

SEQ ID NO: 530759 - RNA, 19 nt, Artificial Sequence
  Description of Artificial Sequence: Synthetic oligonucleotide
  Sense strand starting at position 1320 of SEQ ID NO: 318022
gccucacucgaggaaauga

SEQ ID NO: 530760 - RNA, 19 nt, Artificial Sequence
  Description of Artificial Sequence: Synthetic oligonucleotide
  Antisense strand to SEQ ID NO: 530759
ucauuuccucgagugaggc

SEQ ID NO: 530761 - RNA, 19 nt, Artificial Sequence
  Description of Artificial Sequence: Synthetic oligonucleotide
  Sense strand starting at position 1408 of SEQ ID NO: 318022
gcgagugugcucaguagug

SEQ ID NO: 530762 - RNA, 19 nt, Artificial Sequence
  Description of Artificial Sequence: Synthetic oligonucleotide
  Antisense strand to SEQ ID NO: 530761
cacuacugagcacacucgc

SEQ ID NO: 530763 - RNA, 19 nt, Artificial Sequence
  Description of Artificial Sequence: Synthetic oligonucleotide
  Sense strand starting at position 2546 of SEQ ID NO: 318022
guaguggugcgggagagau

SEQ ID NO: 530764 - RNA, 19 nt, Artificial Sequence
  Description of Artificial Sequence: Synthetic oligonucleotide
  Antisense strand to SEQ ID NO: 530763
aucucucccgcaccacuac

SEQ ID NO: 530765 - RNA, 19 nt, Artificial Sequence
  Description of Artificial Sequence: Synthetic oligonucleotide
  Sense strand starting at position 2621 of SEQ ID NO: 318022
ccuggauacccucgagcaa

SEQ ID NO: 530766 - RNA, 19 nt, Artificial Sequence
  Description of Artificial Sequence: Synthetic oligonucleotide
  Antisense strand to SEQ ID NO: 530765
uugcucgaggguauccagg

SEQ ID NO: 530767 - RNA, 19 nt, Artificial Sequence
  Description of Artificial Sequence: Synthetic oligonucleotide
  Sense strand starting at position 2622 of SEQ ID NO: 318022
cuggauacccucgagcaaa

SEQ ID NO: 530768 - RNA, 19 nt, Artificial Sequence
  Description of Artificial Sequence: Synthetic oligonucleotide
  Antisense strand to SEQ ID NO: 530767
uuugcucgaggguauccag

SEQ ID NO: 530769 - RNA, 19 nt, Artificial Sequence
  Description of Artificial Sequence: Synthetic oligonucleotide
  Sense strand starting at position 2750 of SEQ ID NO: 318022
guaucugaaucaccaagga

SEQ ID NO: 530770 - RNA, 19 nt, Artificial Sequence
  Description of Artificial Sequence: Synthetic oligonucleotide
  Antisense strand to SEQ ID NO: 530769
uccuuggugauucagauac

SEQ ID NO: 530771 - RNA, 19 nt, Artificial Sequence
  Description of Artificial Sequence: Synthetic oligonucleotide
  Sense strand starting at position 2857 of SEQ ID NO: 318022
ccguaauugcucuagaugu

SEQ ID NO: 530772 - RNA, 19 nt, Artificial Sequence
  Description of Artificial Sequence: Synthetic oligonucleotide
  Antisense strand to SEQ ID NO: 530771
acaucuagagcaauuacgg

SEQ ID NO: 530773 - RNA, 19 nt, Artificial Sequence
  Description of Artificial Sequence: Synthetic oligonucleotide
  Sense strand starting at position 2859 of SEQ ID NO: 318022
guaauugcucuagauguga

SEQ ID NO: 530774 - RNA, 19 nt, Artificial Sequence
  Description of Artificial Sequence: Synthetic oligonucleotide
  Antisense strand to SEQ ID NO: 530773
ucacaucuagagcaauuac

SEQ ID NO: 530775 - RNA, 19 nt, Artificial Sequence
  Description of Artificial Sequence: Synthetic oligonucleotide
  Sense strand starting at position 2929 of SEQ ID NO: 318022
gguaacaaccauuggcaau

SEQ ID NO: 530776 - RNA, 19 nt, Artificial Sequence
  Description of Artificial Sequence: Synthetic oligonucleotide
  Antisense strand to SEQ ID NO: 530775
auugccaaugguuguuacc

SEQ ID NO: 530777 - RNA, 19 nt, Artificial Sequence
  Description of Artificial Sequence: Synthetic oligonucleotide
  Sense strand starting at position 2941 of SEQ ID NO: 318022
uggcaaugaugcuuaugua

SEQ ID NO: 530778 - RNA, 19 nt, Artificial Sequence
  Description of Artificial Sequence: Synthetic oligonucleotide
  Antisense strand to SEQ ID NO: 530777
uacauaagcaucauugcca

SEQ ID NO: 530779 - RNA, 19 nt, Artificial Sequence
  Description of Artificial Sequence: Synthetic oligonucleotide
  Sense strand starting at position 2942 of SEQ ID NO: 318022
ggcaaugaugcuuauguag

SEQ ID NO: 530780 - RNA, 19 nt, Artificial Sequence
  Description of Artificial Sequence: Synthetic oligonucleotide
  Antisense strand to SEQ ID NO: 530779
cuacauaagcaucauugcc

SEQ ID NO: 530781 - RNA, 19 nt, Artificial Sequence
  Description of Artificial Sequence: Synthetic oligonucleotide
  Sense strand starting at position 2964 of SEQ ID NO: 318022
cagacacggcgcuaagauu

SEQ ID NO: 530782 - RNA, 19 nt, Artificial Sequence
  Description of Artificial Sequence: Synthetic oligonucleotide
  Antisense strand to SEQ ID NO: 530781
aaucuuagcgccgugucug

SEQ ID NO: 530783 - RNA, 19 nt, Artificial Sequence
  Description of Artificial Sequence: Synthetic oligonucleotide
  Sense strand starting at position 2973 of SEQ ID NO: 318022
cgcuaagauucuguuuaca

SEQ ID NO: 530784 - RNA, 19 nt, Artificial Sequence
  Description of Artificial Sequence: Synthetic oligonucleotide
  Antisense strand to SEQ ID NO: 530783
uguaaacagaaucuuagcg

SEQ ID NO: 530785 - RNA, 19 nt, Artificial Sequence
  Description of Artificial Sequence: Synthetic oligonucleotide
  Sense strand starting at position 2975 of SEQ ID NO: 318022
cuaagauucuguuuacagg

SEQ ID NO: 530786 - RNA, 19 nt, Artificial Sequence
  Description of Artificial Sequence: Synthetic oligonucleotide
  Antisense strand to SEQ ID NO: 530785
ccuguaaacagaaucuuag

SEQ ID NO: 530787 - RNA, 19 nt, Artificial Sequence
  Description of Artificial Sequence: Synthetic oligonucleotide
  Sense strand starting at position 2976 of SEQ ID NO: 318022
uaagauucuguuuacaggu

SEQ ID NO: 530788 - RNA, 19 nt, Artificial Sequence
  Description of Artificial Sequence: Synthetic oligonucleotide
  Antisense strand to SEQ ID NO: 530787
accuguaaacagaaucuua

SEQ ID NO: 530789 - RNA, 19 nt, Artificial Sequence
  Description of Artificial Sequence: Synthetic oligonucleotide
  Sense strand starting at position 3079 of SEQ ID NO: 318022
gcagauaaguaacuuguuu

SEQ ID NO: 530790 - RNA, 19 nt, Artificial Sequence
  Description of Artificial Sequence: Synthetic oligonucleotide
  Antisense strand to SEQ ID NO: 530789
aaacaaguuacuuaucugc

SEQ ID NO: 530791 - RNA, 19 nt, Artificial Sequence
  Description of Artificial Sequence: Synthetic oligonucleotide
  Sense strand starting at position 3090 of SEQ ID NO: 318022
acuuguuuguggucacaca

SEQ ID NO: 530792 - RNA, 19 nt, Artificial Sequence
  Description of Artificial Sequence: Synthetic oligonucleotide
  Antisense strand to SEQ ID NO: 530791
ugugugaccacaaacaagu

SEQ ID NO: 530793 - RNA, 19 nt, Artificial Sequence
  Description of Artificial Sequence: Synthetic oligonucleotide
  Sense strand starting at position 3116 of SEQ ID NO: 318022
aguaguggagcugggauua

SEQ ID NO: 530794 - RNA, 19 nt, Artificial Sequence
  Description of Artificial Sequence: Synthetic oligonucleotide
  Antisense strand to SEQ ID NO: 530793
uaaucccagcuccacuacu

SEQ ID NO: 530795 - RNA, 19 nt, Artificial Sequence
  Description of Artificial Sequence: Synthetic oligonucleotide
  Sense strand starting at position 3199 of SEQ ID NO: 318022
cuuggugaaccguaaguca

SEQ ID NO: 530796 - RNA, 19 nt, Artificial Sequence
  Description of Artificial Sequence: Synthetic oligonucleotide
  Antisense strand to SEQ ID NO: 530795
ugacuuacgguucaccaag

SEQ ID NO: 530797 - RNA, 19 nt, Artificial Sequence
  Description of Artificial Sequence: Synthetic oligonucleotide
  Sense strand starting at position 3210 of SEQ ID NO: 318022
guaagucaccgugauccuu

SEQ ID NO: 530798 - RNA, 19 nt, Artificial Sequence
  Description of Artificial Sequence: Synthetic oligonucleotide
  Antisense strand to SEQ ID NO: 530797
aaggaucacggugacuuac

SEQ ID NO: 530799 - RNA, 19 nt, Artificial Sequence
  Description of Artificial Sequence: Synthetic oligonucleotide
  Sense strand starting at position 3212 of SEQ ID NO: 318022
aagucaccgugauccuuua

SEQ ID NO: 530800 - RNA, 19 nt, Artificial Sequence
  Description of Artificial Sequence: Synthetic oligonucleotide
  Antisense strand to SEQ ID NO: 530799
uaaaggaucacggugacuu

SEQ ID NO: 530801 - RNA, 19 nt, Artificial Sequence
  Description of Artificial Sequence: Synthetic oligonucleotide
  Sense strand starting at position 3616 of SEQ ID NO: 318022
agaaccaaccugugaucga

SEQ ID NO: 530802 - RNA, 19 nt, Artificial Sequence
  Description of Artificial Sequence: Synthetic oligonucleotide
  Antisense strand to SEQ ID NO: 530801
ucgaucacagguugguucu

SEQ ID NO: 530803 - RNA, 19 nt, Artificial Sequence
  Description of Artificial Sequence: Synthetic oligonucleotide
  Sense strand starting at position 3705 of SEQ ID NO: 318022
agguguucaggugagcgau

SEQ ID NO: 530804 - RNA, 19 nt, Artificial Sequence
  Description of Artificial Sequence: Synthetic oligonucleotide
  Antisense strand to SEQ ID NO: 530803
aucgcucaccugaacaccu

SEQ ID NO: 530805 - RNA, 19 nt, Artificial Sequence
  Description of Artificial Sequence: Synthetic oligonucleotide
  Sense strand starting at position 3711 of SEQ ID NO: 318022
ucaggugagcgaugaugau

SEQ ID NO: 530806 - RNA, 19 nt, Artificial Sequence
  Description of Artificial Sequence: Synthetic oligonucleotide
  Antisense strand to SEQ ID NO: 530805
aucaucaucgcucaccuga

SEQ ID NO: 530807 - RNA, 19 nt, Artificial Sequence
  Description of Artificial Sequence: Synthetic oligonucleotide
  Sense strand starting at position 3721 of SEQ ID NO: 318022
gaugaugaugccugaacca

SEQ ID NO: 530808 - RNA, 19 nt, Artificial Sequence
  Description of Artificial Sequence: Synthetic oligonucleotide
  Antisense strand to SEQ ID NO: 530807
ugguucaggcaucaucauc

SEQ ID NO: 530809 - RNA, 19 nt, Artificial Sequence
  Description of Artificial Sequence: Synthetic oligonucleotide
  Sense strand starting at position 3762 of SEQ ID NO: 318022
gaggaagagucagauugga

SEQ ID NO: 530810 - RNA, 19 nt, Artificial Sequence
  Description of Artificial Sequence: Synthetic oligonucleotide
  Antisense strand to SEQ ID NO: 530809
uccaaucugacucuuccuc

SEQ ID NO: 530811 - RNA, 19 nt, Artificial Sequence
  Description of Artificial Sequence: Synthetic oligonucleotide
  Sense strand starting at position 3799 of SEQ ID NO: 318022
aucaauaggccuugaccau

SEQ ID NO: 530812 - RNA, 19 nt, Artificial Sequence
  Description of Artificial Sequence: Synthetic oligonucleotide
  Antisense strand to SEQ ID NO: 530811
auggucaaggccuauugau

SEQ ID NO: 530813 - RNA, 19 nt, Artificial Sequence
  Description of Artificial Sequence: Synthetic oligonucleotide
  Sense strand starting at position 12 of SEQ ID NO: 318023
acugguuguaugugauaug

SEQ ID NO: 530814 - RNA, 19 nt, Artificial Sequence
  Description of Artificial Sequence: Synthetic oligonucleotide
  Antisense strand to SEQ ID NO: 530813
cauaucacauacaaccagu

SEQ ID NO: 530815 - RNA, 19 nt, Artificial Sequence
  Description of Artificial Sequence: Synthetic oligonucleotide
  Sense strand starting at position 99 of SEQ ID NO: 318023
cccagagugcugcagagaa

SEQ ID NO: 530816 - RNA, 19 nt, Artificial Sequence
  Description of Artificial Sequence: Synthetic oligonucleotide
  Antisense strand to SEQ ID NO: 530815
uucucugcagcacucuggg

SEQ ID NO: 530817 - RNA, 19 nt, Artificial Sequence
  Description of Artificial Sequence: Synthetic oligonucleotide
  Sense strand starting at position 101 of SEQ ID NO: 318023
cagagugcugcagagaaga

SEQ ID NO: 530818 - RNA, 19 nt, Artificial Sequence
  Description of Artificial Sequence: Synthetic oligonucleotide
  Antisense strand to SEQ ID NO: 530817
ucuucucugcagcacucug

SEQ ID NO: 530819 - RNA, 19 nt, Artificial Sequence
  Description of Artificial Sequence: Synthetic oligonucleotide
  Sense strand starting at position 120 of SEQ ID NO: 318023
cacagcuaugaugaguuau

SEQ ID NO: 530820 - RNA, 19 nt, Artificial Sequence
  Description of Artificial Sequence: Synthetic oligonucleotide
  Antisense strand to SEQ ID NO: 530819
auaacucaucauagcugug

SEQ ID NO: 530821 - RNA, 19 nt, Artificial Sequence
  Description of Artificial Sequence: Synthetic oligonucleotide
  Sense strand starting at position 122 of SEQ ID NO: 318023
cagcuaugaugaguuauuc

SEQ ID NO: 530822 - RNA, 19 nt, Artificial Sequence
  Description of Artificial Sequence: Synthetic oligonucleotide
  Antisense strand to SEQ ID NO: 530821
gaauaacucaucauagcug

SEQ ID NO: 530823 - RNA, 19 nt, Artificial Sequence
  Description of Artificial Sequence: Synthetic oligonucleotide
  Sense strand starting at position 399 of SEQ ID NO: 318023
gaggcugauuaaucggauu

SEQ ID NO: 530824 - RNA, 19 nt, Artificial Sequence
  Description of Artificial Sequence: Synthetic oligonucleotide
  Antisense strand to SEQ ID NO: 530823
aauccgauuaaucagccuc

SEQ ID NO: 530825 - RNA, 19 nt, Artificial Sequence
  Description of Artificial Sequence: Synthetic oligonucleotide
  Sense strand starting at position 618 of SEQ ID NO: 318023
gaaaucgcucgcuuugagu

SEQ ID NO: 530826 - RNA, 19 nt, Artificial Sequence
  Description of Artificial Sequence: Synthetic oligonucleotide
  Antisense strand to SEQ ID NO: 530825
acucaaagcgagcgauuuc

SEQ ID NO: 530827 - RNA, 19 nt, Artificial Sequence
  Description of Artificial Sequence: Synthetic oligonucleotide
  Sense strand starting at position 629 of SEQ ID NO: 318023
cuuugagucuaucccuaca

SEQ ID NO: 530828 - RNA, 19 nt, Artificial Sequence
  Description of Artificial Sequence: Synthetic oligonucleotide
  Antisense strand to SEQ ID NO: 530827
uguagggauagacucaaag

SEQ ID NO: 530829 - RNA, 19 nt, Artificial Sequence
  Description of Artificial Sequence: Synthetic oligonucleotide
  Sense strand starting at position 946 of SEQ ID NO: 318023
cagagaacagcuuguggau

SEQ ID NO: 530830 - RNA, 19 nt, Artificial Sequence
  Description of Artificial Sequence: Synthetic oligonucleotide
  Antisense strand to SEQ ID NO: 530829
auccacaagcuguucucug

SEQ ID NO: 530831 - RNA, 19 nt, Artificial Sequence
  Description of Artificial Sequence: Synthetic oligonucleotide
  Sense strand starting at position 1177 of SEQ ID NO: 318023
ucuaccugccuguaucauu

SEQ ID NO: 530832 - RNA, 19 nt, Artificial Sequence
  Description of Artificial Sequence: Synthetic oligonucleotide
  Antisense strand to SEQ ID NO: 530831
aaugauacaggcagguaga

SEQ ID NO: 530833 - RNA, 19 nt, Artificial Sequence
  Description of Artificial Sequence: Synthetic oligonucleotide
  Sense strand starting at position 1375 of SEQ ID NO: 318023
gugacauagauguagcaag

SEQ ID NO: 530834 - RNA, 19 nt, Artificial Sequence
  Description of Artificial Sequence: Synthetic oligonucleotide
  Antisense strand to SEQ ID NO: 530833
cuugcuacaucuaugucac

SEQ ID NO: 530835 - RNA, 19 nt, Artificial Sequence
  Description of Artificial Sequence: Synthetic oligonucleotide
  Sense strand starting at position 1457 of SEQ ID NO: 318023
gucauucugcccgccugaa

SEQ ID NO: 530836 - RNA, 19 nt, Artificial Sequence
  Description of Artificial Sequence: Synthetic oligonucleotide
  Antisense strand to SEQ ID NO: 530835
uucaggcgggcagaaugac

SEQ ID NO: 530837 - RNA, 19 nt, Artificial Sequence
  Description of Artificial Sequence: Synthetic oligonucleotide
  Sense strand starting at position 1997 of SEQ ID NO: 318023
gcgacagugacauaagcaa

SEQ ID NO: 530838 - RNA, 19 nt, Artificial Sequence
  Description of Artificial Sequence: Synthetic oligonucleotide
  Antisense strand to SEQ ID NO: 530837
uugcuuaugucacugucgc

SEQ ID NO: 530839 - RNA, 19 nt, Artificial Sequence
  Description of Artificial Sequence: Synthetic oligonucleotide
  Sense strand starting at position 2010 of SEQ ID NO: 318023
aagcaaaucugggcagaga

SEQ ID NO: 530840 - RNA, 19 nt, Artificial Sequence
  Description of Artificial Sequence: Synthetic oligonucleotide
  Antisense strand to SEQ ID NO: 530839
ucucugcccagauuugcuu

SEQ ID NO: 530841 - RNA, 19 nt, Artificial Sequence
  Description of Artificial Sequence: Synthetic oligonucleotide
  Sense strand starting at position 2137 of SEQ ID NO: 318023
gcuaauagcucccuagaac

SEQ ID NO: 530842 - RNA, 19 nt, Artificial Sequence
  Description of Artificial Sequence: Synthetic oligonucleotide
  Antisense strand to SEQ ID NO: 530841
guucuagggagcuauuagc

SEQ ID NO: 530843 - RNA, 19 nt, Artificial Sequence
  Description of Artificial Sequence: Synthetic oligonucleotide
  Sense strand starting at position 2251 of SEQ ID NO: 318023
ucagcaagagcugaaguua

SEQ ID NO: 530844 - RNA, 19 nt, Artificial Sequence
  Description of Artificial Sequence: Synthetic oligonucleotide
  Antisense strand to SEQ ID NO: 530843
uaacuucagcucuugcuga

SEQ ID NO: 530845 - RNA, 19 nt, Artificial Sequence
  Description of Artificial Sequence: Synthetic oligonucleotide
  Sense strand starting at position 2295 of SEQ ID NO: 318023
uagguuuagugcuuaagaa

SEQ ID NO: 530846 - RNA, 19 nt, Artificial Sequence
  Description of Artificial Sequence: Synthetic oligonucleotide
  Antisense strand to SEQ ID NO: 530845
uucuuaagcacuaaaccua

SEQ ID NO: 530847 - RNA, 19 nt, Artificial Sequence
  Description of Artificial Sequence: Synthetic oligonucleotide
  Sense strand starting at position 2296 of SEQ ID NO: 318023
agguuuagugcuuaagaaa

SEQ ID NO: 530848 - RNA, 19 nt, Artificial Sequence
  Description of Artificial Sequence: Synthetic oligonucleotide
  Antisense strand to SEQ ID NO: 530847
uuucuuaagcacuaaaccu

SEQ ID NO: 530849 - RNA, 19 nt, Artificial Sequence
  Description of Artificial Sequence: Synthetic oligonucleotide
  Sense strand starting at position 2567 of SEQ ID NO: 318023
cauggaaaugcgcagaaau

SEQ ID NO: 530850 - RNA, 19 nt, Artificial Sequence
  Description of Artificial Sequence: Synthetic oligonucleotide
  Antisense strand to SEQ ID NO: 530849
auuucugcgcauuuccaug

SEQ ID NO: 530851 - RNA, 19 nt, Artificial Sequence
  Description of Artificial Sequence: Synthetic oligonucleotide
  Sense strand starting at position 2569 of SEQ ID NO: 318023
uggaaaugcgcagaaaugu

SEQ ID NO: 530852 - RNA, 19 nt, Artificial Sequence
  Description of Artificial Sequence: Synthetic oligonucleotide
  Antisense strand to SEQ ID NO: 530851
acauuucugcgcauuucca

SEQ ID NO: 530853 - RNA, 19 nt, Artificial Sequence
  Description of Artificial Sequence: Synthetic oligonucleotide
  Sense strand starting at position 2642 of SEQ ID NO: 318023
aaggcuugucuguucguau

SEQ ID NO: 530854 - RNA, 19 nt, Artificial Sequence
  Description of Artificial Sequence: Synthetic oligonucleotide
  Antisense strand to SEQ ID NO: 530853
auacgaacagacaagccuu

SEQ ID NO: 530855 - RNA, 19 nt, Artificial Sequence
  Description of Artificial Sequence: Synthetic oligonucleotide
  Sense strand starting at position 2721 of SEQ ID NO: 318023
cuguguagucuuuaacaug

SEQ ID NO: 530856 - RNA, 19 nt, Artificial Sequence
  Description of Artificial Sequence: Synthetic oligonucleotide
  Antisense strand to SEQ ID NO: 530855
cauguuaaagacuacacag

SEQ ID NO: 530857 - RNA, 19 nt, Artificial Sequence
  Description of Artificial Sequence: Synthetic oligonucleotide
  Sense strand starting at position 2765 of SEQ ID NO: 318023
uuccucagcuauguaauga

SEQ ID NO: 530858 - RNA, 19 nt, Artificial Sequence
  Description of Artificial Sequence: Synthetic oligonucleotide
  Antisense strand to SEQ ID NO: 530857
ucauuacauagcugaggaa

SEQ ID NO: 530859 - RNA, 19 nt, Artificial Sequence
  Description of Artificial Sequence: Synthetic oligonucleotide
  Sense strand starting at position 2784 of SEQ ID NO: 318023
ugggauugauuagugaucu

SEQ ID NO: 530860 - RNA, 19 nt, Artificial Sequence
  Description of Artificial Sequence: Synthetic oligonucleotide
  Antisense strand to SEQ ID NO: 530859
agaucacuaaucaauccca

SEQ ID NO: 530861 - RNA, 19 nt, Artificial Sequence
  Description of Artificial Sequence: Synthetic oligonucleotide
  Sense strand starting at position 2788 of SEQ ID NO: 318023
auugauuagugaucuccag

SEQ ID NO: 530862 - RNA, 19 nt, Artificial Sequence
  Description of Artificial Sequence: Synthetic oligonucleotide
  Antisense strand to SEQ ID NO: 530861
cuggagaucacuaaucaau

SEQ ID NO: 530863 - RNA, 19 nt, Artificial Sequence
  Description of Artificial Sequence: Synthetic oligonucleotide
  Sense strand starting at position 2824 of SEQ ID NO: 318023
cuagaugacuuguuucuaa

SEQ ID NO: 530864 - RNA, 19 nt, Artificial Sequence
  Description of Artificial Sequence: Synthetic oligonucleotide
  Antisense strand to SEQ ID NO: 530863
uuagaaacaagucaucuag

SEQ ID NO: 530865 - RNA, 19 nt, Artificial Sequence
  Description of Artificial Sequence: Synthetic oligonucleotide
  Sense strand starting at position 2827 of SEQ ID NO: 318023
gaugacuuguuucuaaagu

SEQ ID NO: 530866 - RNA, 19 nt, Artificial Sequence
  Description of Artificial Sequence: Synthetic oligonucleotide
  Antisense strand to SEQ ID NO: 530865
acuuuagaaacaagucauc

SEQ ID NO: 530867 - RNA, 19 nt, Artificial Sequence
  Description of Artificial Sequence: Synthetic oligonucleotide
  Sense strand starting at position 2862 of SEQ ID NO: 318023
ccaggaguccuuugagaau

SEQ ID NO: 530868 - RNA, 19 nt, Artificial Sequence
  Description of Artificial Sequence: Synthetic oligonucleotide
  Antisense strand to SEQ ID NO: 530867
auucucaaaggacuccugg

SEQ ID NO: 530869 - RNA, 19 nt, Artificial Sequence
  Description of Artificial Sequence: Synthetic oligonucleotide
  Sense strand starting at position 2926 of SEQ ID NO: 318023
uguaaaguauuugcugacu

SEQ ID NO: 530870 - RNA, 19 nt, Artificial Sequence
  Description of Artificial Sequence: Synthetic oligonucleotide
  Antisense strand to SEQ ID NO: 530869
agucagcaaauacuuuaca

SEQ ID NO: 530871 - RNA, 19 nt, Artificial Sequence
  Description of Artificial Sequence: Synthetic oligonucleotide
  Sense strand starting at position 3237 of SEQ ID NO: 318023
gugugaguccuaggauuaa

SEQ ID NO: 530872 - RNA, 19 nt, Artificial Sequence
  Description of Artificial Sequence: Synthetic oligonucleotide
  Antisense strand to SEQ ID NO: 530871
uuaauccuaggacucacac

SEQ ID NO: 530873 - RNA, 19 nt, Artificial Sequence
  Description of Artificial Sequence: Synthetic oligonucleotide
  Sense strand starting at position 3344 of SEQ ID NO: 318023
uuuggaagaugucucucaa

SEQ ID NO: 530874 - RNA, 19 nt, Artificial Sequence
  Description of Artificial Sequence: Synthetic oligonucleotide
  Antisense strand to SEQ ID NO: 530873
uugagagacaucuuccaaa

SEQ ID NO: 530875 - RNA, 19 nt, Artificial Sequence
  Description of Artificial Sequence: Synthetic oligonucleotide
  Sense strand starting at position 3432 of SEQ ID NO: 318023
ccaggaagucuuuagcuga

SEQ ID NO: 530876 - RNA, 19 nt, Artificial Sequence
  Description of Artificial Sequence: Synthetic oligonucleotide
  Antisense strand to SEQ ID NO: 530875
ucagcuaaagacuuccugg

SEQ ID NO: 530877 - RNA, 19 nt, Artificial Sequence
  Description of Artificial Sequence: Synthetic oligonucleotide
  Sense strand starting at position 3437 of SEQ ID NO: 318023
aagucuuuagcugaguuaa

SEQ ID NO: 530878 - RNA, 19 nt, Artificial Sequence
  Description of Artificial Sequence: Synthetic oligonucleotide
  Antisense strand to SEQ ID NO: 530877
uuaacucagcuaaagacuu

SEQ ID NO: 530879 - RNA, 19 nt, Artificial Sequence
  Description of Artificial Sequence: Synthetic oligonucleotide
  Sense strand starting at position 3449 of SEQ ID NO: 318023
gaguuaaagccugggagca

SEQ ID NO: 530880 - RNA, 19 nt, Artificial Sequence
  Description of Artificial Sequence: Synthetic oligonucleotide
  Antisense strand to SEQ ID NO: 530879
ugcucccaggcuuuaacuc

SEQ ID NO: 530881 - RNA, 19 nt, Artificial Sequence
  Description of Artificial Sequence: Synthetic oligonucleotide
  Sense strand starting at position 3450 of SEQ ID NO: 318023
aguuaaagccugggagcau

SEQ ID NO: 530882 - RNA, 19 nt, Artificial Sequence
  Description of Artificial Sequence: Synthetic oligonucleotide
  Antisense strand to SEQ ID NO: 530881
augcucccaggcuuuaacu

SEQ ID NO: 530883 - RNA, 19 nt, Artificial Sequence
  Description of Artificial Sequence: Synthetic oligonucleotide
  Sense strand starting at position 3525 of SEQ ID NO: 318023
uucccugaagccuagagau

SEQ ID NO: 530884 - RNA, 19 nt, Artificial Sequence
  Description of Artificial Sequence: Synthetic oligonucleotide
  Antisense strand to SEQ ID NO: 530883
aucucuaggcuucagggaa

SEQ ID NO: 530885 - RNA, 19 nt, Artificial Sequence
  Description of Artificial Sequence: Synthetic oligonucleotide
  Sense strand starting at position 3597 of SEQ ID NO: 318023
gaauccaggucucuagacu

SEQ ID NO: 530886 - RNA, 19 nt, Artificial Sequence
  Description of Artificial Sequence: Synthetic oligonucleotide
  Antisense strand to SEQ ID NO: 530885
agucuagagaccuggauuc

SEQ ID NO: 530887 - RNA, 19 nt, Artificial Sequence
  Description of Artificial Sequence: Synthetic oligonucleotide
  Sense strand starting at position 3691 of SEQ ID NO: 318023
gcacaucaguuugucagaa

SEQ ID NO: 530888 - RNA, 19 nt, Artificial Sequence
  Description of Artificial Sequence: Synthetic oligonucleotide
  Antisense strand to SEQ ID NO: 530887
uucugacaaacugaugugc

SEQ ID NO: 530889 - RNA, 19 nt, Artificial Sequence
  Description of Artificial Sequence: Synthetic oligonucleotide
  Sense strand starting at position 3719 of SEQ ID NO: 318023
ucauuaguaucaguaggca

SEQ ID NO: 530890 - RNA, 19 nt, Artificial Sequence
  Description of Artificial Sequence: Synthetic oligonucleotide
  Antisense strand to SEQ ID NO: 530889
ugccuacugauacuaauga

SEQ ID NO: 530891 - RNA, 19 nt, Artificial Sequence
  Description of Artificial Sequence: Synthetic oligonucleotide
  Sense strand starting at position 3829 of SEQ ID NO: 318023
agguguuuccagcagauac

SEQ ID NO: 530892 - RNA, 19 nt, Artificial Sequence
  Description of Artificial Sequence: Synthetic oligonucleotide
  Antisense strand to SEQ ID NO: 530891
guaucugcuggaaacaccu

SEQ ID NO: 530893 - RNA, 19 nt, Artificial Sequence
  Description of Artificial Sequence: Synthetic oligonucleotide
  Sense strand starting at position 66 of SEQ ID NO: 318024
ugacuaauaugguuuagaa

SEQ ID NO: 530894 - RNA, 19 nt, Artificial Sequence
  Description of Artificial Sequence: Synthetic oligonucleotide
  Antisense strand to SEQ ID NO: 530893
uucuaaaccauauuaguca

SEQ ID NO: 530895 - RNA, 19 nt, Artificial Sequence
  Description of Artificial Sequence: Synthetic oligonucleotide
  Sense strand starting at position 158 of SEQ ID NO: 318024
uuaagaaggcgguacuauu

SEQ ID NO: 530896 - RNA, 19 nt, Artificial Sequence
  Description of Artificial Sequence: Synthetic oligonucleotide
  Antisense strand to SEQ ID NO: 530895
aauaguaccgccuucuuaa

SEQ ID NO: 530897 - RNA, 19 nt, Artificial Sequence
  Description of Artificial Sequence: Synthetic oligonucleotide
  Sense strand starting at position 322 of SEQ ID NO: 318024
cuuggcaagucuuuaaaca

SEQ ID NO: 530898 - RNA, 19 nt, Artificial Sequence
  Description of Artificial Sequence: Synthetic oligonucleotide
  Antisense strand to SEQ ID NO: 530897
uguuuaaagacuugccaag

SEQ ID NO: 530899 - RNA, 19 nt, Artificial Sequence
  Description of Artificial Sequence: Synthetic oligonucleotide
  Sense strand starting at position 340 of SEQ ID NO: 318024
agauuucuguagcuagcuu

SEQ ID NO: 530900 - RNA, 19 nt, Artificial Sequence
  Description of Artificial Sequence: Synthetic oligonucleotide
  Antisense strand to SEQ ID NO: 530899
aagcuagcuacagaaaucu

SEQ ID NO: 530901 - RNA, 19 nt, Artificial Sequence
  Description of Artificial Sequence: Synthetic oligonucleotide
  Sense strand starting at position 349 of SEQ ID NO: 318024
uagcuagcuuaauuggaga

SEQ ID NO: 530902 - RNA, 19 nt, Artificial Sequence
  Description of Artificial Sequence: Synthetic oligonucleotide
  Antisense strand to SEQ ID NO: 530901
ucuccaauuaagcuagcua

SEQ ID NO: 530903 - RNA, 19 nt, Artificial Sequence
  Description of Artificial Sequence: Synthetic oligonucleotide
  Sense strand starting at position 576 of SEQ ID NO: 318024
uccagaugcuaguuacaag

SEQ ID NO: 530904 - RNA, 19 nt, Artificial Sequence
  Description of Artificial Sequence: Synthetic oligonucleotide
  Antisense strand to SEQ ID NO: 530903
cuuguaacuagcaucugga

SEQ ID NO: 530905 - RNA, 19 nt, Artificial Sequence
  Description of Artificial Sequence: Synthetic oligonucleotide
  Sense strand starting at position 631 of SEQ ID NO: 318024
ggcacacuuuaaguaaauu

SEQ ID NO: 530906 - RNA, 19 nt, Artificial Sequence
  Description of Artificial Sequence: Synthetic oligonucleotide
  Antisense strand to SEQ ID NO: 530905
aauuuacuuaaagugugcc

SEQ ID NO: 530907 - RNA, 19 nt, Artificial Sequence
  Description of Artificial Sequence: Synthetic oligonucleotide
  Sense strand starting at position 736 of SEQ ID NO: 318024
gcauaacuccuagaaguua

SEQ ID NO: 530908 - RNA, 19 nt, Artificial Sequence
  Description of Artificial Sequence: Synthetic oligonucleotide
  Antisense strand to SEQ ID NO: 530907
uaacuucuaggaguuaugc

SEQ ID NO: 530909 - RNA, 19 nt, Artificial Sequence
  Description of Artificial Sequence: Synthetic oligonucleotide
  Sense strand starting at position 765 of SEQ ID NO: 318024
gauucuggcucuuugauga

SEQ ID NO: 530910 - RNA, 19 nt, Artificial Sequence
  Description of Artificial Sequence: Synthetic oligonucleotide
  Antisense strand to SEQ ID NO: 530909
ucaucaaagagccagaauc

SEQ ID NO: 530911 - RNA, 19 nt, Artificial Sequence
  Description of Artificial Sequence: Synthetic oligonucleotide
  Sense strand starting at position 770 of SEQ ID NO: 318024
uggcucuuugaugauaguu

SEQ ID NO: 530912 - RNA, 19 nt, Artificial Sequence
  Description of Artificial Sequence: Synthetic oligonucleotide
  Antisense strand to SEQ ID NO: 530911
aacuaucaucaaagagcca

SEQ ID NO: 530913 - RNA, 19 nt, Artificial Sequence
  Description of Artificial Sequence: Synthetic oligonucleotide
  Sense strand starting at position 792 of SEQ ID NO: 318024
ugaagcuuucccgauacaa

SEQ ID NO: 530914 - RNA, 19 nt, Artificial Sequence
  Description of Artificial Sequence: Synthetic oligonucleotide
  Antisense strand to SEQ ID NO: 530913
uuguaucgggaaagcuuca

SEQ ID NO: 530915 - RNA, 19 nt, Artificial Sequence
  Description of Artificial Sequence: Synthetic oligonucleotide
  Sense strand starting at position 879 of SEQ ID NO: 318024
gcauaugcaaggcagauau

SEQ ID NO: 530916 - RNA, 19 nt, Artificial Sequence
  Description of Artificial Sequence: Synthetic oligonucleotide
  Antisense strand to SEQ ID NO: 530915
auaucugccuugcauaugc

SEQ ID NO: 530917 - RNA, 19 nt, Artificial Sequence
  Description of Artificial Sequence: Synthetic oligonucleotide
  Sense strand starting at position 890 of SEQ ID NO: 318024
gcagauauuuaccaacaag

SEQ ID NO: 530918 - RNA, 19 nt, Artificial Sequence
  Description of Artificial Sequence: Synthetic oligonucleotide
  Antisense strand to SEQ ID NO: 530917
cuuguugguaaauaucugc

SEQ ID NO: 530919 - RNA, 19 nt, Artificial Sequence
  Description of Artificial Sequence: Synthetic oligonucleotide
  Sense strand starting at position 1260 of SEQ ID NO: 318024
auaaccucugauugauguu

SEQ ID NO: 530920 - RNA, 19 nt, Artificial Sequence
  Description of Artificial Sequence: Synthetic oligonucleotide
  Antisense strand to SEQ ID NO: 530919
aacaucaaucagagguuau

SEQ ID NO: 530921 - RNA, 19 nt, Artificial Sequence
  Description of Artificial Sequence: Synthetic oligonucleotide
  Sense strand starting at position 1321 of SEQ ID NO: 318024
aaccuagaugccuggguua

SEQ ID NO: 530922 - RNA, 19 nt, Artificial Sequence
  Description of Artificial Sequence: Synthetic oligonucleotide
  Antisense strand to SEQ ID NO: 530921
uaacccaggcaucuagguu

SEQ ID NO: 530923 - RNA, 19 nt, Artificial Sequence
  Description of Artificial Sequence: Synthetic oligonucleotide
  Sense strand starting at position 1323 of SEQ ID NO: 318024
ccuagaugccuggguuaag

SEQ ID NO: 530924 - RNA, 19 nt, Artificial Sequence
  Description of Artificial Sequence: Synthetic oligonucleotide
  Antisense strand to SEQ ID NO: 530923
cuuaacccaggcaucuagg

SEQ ID NO: 530925 - RNA, 19 nt, Artificial Sequence
  Description of Artificial Sequence: Synthetic oligonucleotide
  Sense strand starting at position 1334 of SEQ ID NO: 318024
ggguuaaggcccugaaaua

SEQ ID NO: 530926 - RNA, 19 nt, Artificial Sequence
  Description of Artificial Sequence: Synthetic oligonucleotide
  Antisense strand to SEQ ID NO: 530925
uauuucagggccuuaaccc

SEQ ID NO: 530927 - RNA, 19 nt, Artificial Sequence
  Description of Artificial Sequence: Synthetic oligonucleotide
  Sense strand starting at position 1369 of SEQ ID NO: 318024
agcauuagauacucaugaa

SEQ ID NO: 530928 - RNA, 19 nt, Artificial Sequence
  Description of Artificial Sequence: Synthetic oligonucleotide
  Antisense strand to SEQ ID NO: 530927
uucaugaguaucuaaugcu

SEQ ID NO: 530929 - RNA, 19 nt, Artificial Sequence
  Description of Artificial Sequence: Synthetic oligonucleotide
  Sense strand starting at position 1567 of SEQ ID NO: 318024
acgagauaaucggaauuua

SEQ ID NO: 530930 - RNA, 19 nt, Artificial Sequence
  Description of Artificial Sequence: Synthetic oligonucleotide
  Antisense strand to SEQ ID NO: 530929
uaaauuccgauuaucucgu

SEQ ID NO: 530931 - RNA, 19 nt, Artificial Sequence
  Description of Artificial Sequence: Synthetic oligonucleotide
  Sense strand starting at position 2022 of SEQ ID NO: 318024
uugaaaccggcuuaguuua

SEQ ID NO: 530932 - RNA, 19 nt, Artificial Sequence
  Description of Artificial Sequence: Synthetic oligonucleotide
  Antisense strand to SEQ ID NO: 530931
uaaacuaagccgguuucaa

SEQ ID NO: 530933 - RNA, 19 nt, Artificial Sequence
  Description of Artificial Sequence: Synthetic oligonucleotide
  Sense strand starting at position 2299 of SEQ ID NO: 318024
caugcuaagcuguguauuu

SEQ ID NO: 530934 - RNA, 19 nt, Artificial Sequence
  Description of Artificial Sequence: Synthetic oligonucleotide
  Antisense strand to SEQ ID NO: 530933
aaauacacagcuuagcaug

SEQ ID NO: 530935 - RNA, 19 nt, Artificial Sequence
  Description of Artificial Sequence: Synthetic oligonucleotide
  Sense strand starting at position 2300 of SEQ ID NO: 318024
augcuaagcuguguauuua

SEQ ID NO: 530936 - RNA, 19 nt, Artificial Sequence
  Description of Artificial Sequence: Synthetic oligonucleotide
  Antisense strand to SEQ ID NO: 530935
uaaauacacagcuuagcau

SEQ ID NO: 530937 - RNA, 19 nt, Artificial Sequence
  Description of Artificial Sequence: Synthetic oligonucleotide
  Sense strand starting at position 2301 of SEQ ID NO: 318024
ugcuaagcuguguauuuau

SEQ ID NO: 530938 - RNA, 19 nt, Artificial Sequence
  Description of Artificial Sequence: Synthetic oligonucleotide
  Antisense strand to SEQ ID NO: 530937
auaaauacacagcuuagca

SEQ ID NO: 530939 - RNA, 19 nt, Artificial Sequence
  Description of Artificial Sequence: Synthetic oligonucleotide
  Sense strand starting at position 2304 of SEQ ID NO: 318024
uaagcuguguauuuauuga

SEQ ID NO: 530940 - RNA, 19 nt, Artificial Sequence
  Description of Artificial Sequence: Synthetic oligonucleotide
  Antisense strand to SEQ ID NO: 530939
ucaauaaauacacagcuua

SEQ ID NO: 530941 - RNA, 19 nt, Artificial Sequence
  Description of Artificial Sequence: Synthetic oligonucleotide
  Sense strand starting at position 2353 of SEQ ID NO: 318024
gaugcucagcaauaguuua

SEQ ID NO: 530942 - RNA, 19 nt, Artificial Sequence
  Description of Artificial Sequence: Synthetic oligonucleotide
  Antisense strand to SEQ ID NO: 530941
uaaacuauugcugagcauc

SEQ ID NO: 530943 - RNA, 19 nt, Artificial Sequence
  Description of Artificial Sequence: Synthetic oligonucleotide
  Sense strand starting at position 2358 of SEQ ID NO: 318024
ucagcaauaguuuagaaug

SEQ ID NO: 530944 - RNA, 19 nt, Artificial Sequence
  Description of Artificial Sequence: Synthetic oligonucleotide
  Antisense strand to SEQ ID NO: 530943
cauucuaaacuauugcuga

SEQ ID NO: 530945 - RNA, 19 nt, Artificial Sequence
  Description of Artificial Sequence: Synthetic oligonucleotide
  Sense strand starting at position 2401 of SEQ ID NO: 318024
ugguguauacccugaagga

SEQ ID NO: 530946 - RNA, 19 nt, Artificial Sequence
  Description of Artificial Sequence: Synthetic oligonucleotide
  Antisense strand to SEQ ID NO: 530945
uccuucaggguauacacca

SEQ ID NO: 530947 - RNA, 19 nt, Artificial Sequence
  Description of Artificial Sequence: Synthetic oligonucleotide
  Sense strand starting at position 2402 of SEQ ID NO: 318024
gguguauacccugaaggac

SEQ ID NO: 530948 - RNA, 19 nt, Artificial Sequence
  Description of Artificial Sequence: Synthetic oligonucleotide
  Antisense strand to SEQ ID NO: 530947
guccuucaggguauacacc

SEQ ID NO: 530949 - RNA, 19 nt, Artificial Sequence
  Description of Artificial Sequence: Synthetic oligonucleotide
  Sense strand starting at position 2411 of SEQ ID NO: 318024
ccugaaggacguuacuauu

SEQ ID NO: 530950 - RNA, 19 nt, Artificial Sequence
  Description of Artificial Sequence: Synthetic oligonucleotide
  Antisense strand to SEQ ID NO: 530949
aauaguaacguccuucagg

SEQ ID NO: 530951 - RNA, 19 nt, Artificial Sequence
  Description of Artificial Sequence: Synthetic oligonucleotide
  Sense strand starting at position 2425 of SEQ ID NO: 318024
cuauuacauguauggguua

SEQ ID NO: 530952 - RNA, 19 nt, Artificial Sequence
  Description of Artificial Sequence: Synthetic oligonucleotide
  Antisense strand to SEQ ID NO: 530951
uaacccauacauguaauag

SEQ ID NO: 530953 - RNA, 19 nt, Artificial Sequence
  Description of Artificial Sequence: Synthetic oligonucleotide
  Sense strand starting at position 2428 of SEQ ID NO: 318024
uuacauguauggguuaaac

SEQ ID NO: 530954 - RNA, 19 nt, Artificial Sequence
  Description of Artificial Sequence: Synthetic oligonucleotide
  Antisense strand to SEQ ID NO: 530953
guuuaacccauacauguaa

SEQ ID NO: 530955 - RNA, 19 nt, Artificial Sequence
  Description of Artificial Sequence: Synthetic oligonucleotide
  Sense strand starting at position 2441 of SEQ ID NO: 318024
uuaaacaugcuauaugagu

SEQ ID NO: 530956 - RNA, 19 nt, Artificial Sequence
  Description of Artificial Sequence: Synthetic oligonucleotide
  Antisense strand to SEQ ID NO: 530955
acucauauagcauguuuaa

SEQ ID NO: 530957 - RNA, 19 nt, Artificial Sequence
  Description of Artificial Sequence: Synthetic oligonucleotide
  Sense strand starting at position 2460 of SEQ ID NO: 318024
ucaggaaauuuauagugga

SEQ ID NO: 530958 - RNA, 19 nt, Artificial Sequence
  Description of Artificial Sequence: Synthetic oligonucleotide
  Antisense strand to SEQ ID NO: 530957
uccacuauaaauuuccuga

SEQ ID NO: 530959 - RNA, 19 nt, Artificial Sequence
  Description of Artificial Sequence: Synthetic oligonucleotide
  Sense strand starting at position 2463 of SEQ ID NO: 318024
ggaaauuuauaguggaaag

SEQ ID NO: 530960 - RNA, 19 nt, Artificial Sequence
  Description of Artificial Sequence: Synthetic oligonucleotide
  Antisense strand to SEQ ID NO: 530959
cuuuccacuauaaauuucc

SEQ ID NO: 530961 - RNA, 19 nt, Artificial Sequence
  Description of Artificial Sequence: Synthetic oligonucleotide
  Sense strand starting at position 3062 of SEQ ID NO: 318024
gcagugagucguguuugua

SEQ ID NO: 530962 - RNA, 19 nt, Artificial Sequence
  Description of Artificial Sequence: Synthetic oligonucleotide
  Antisense strand to SEQ ID NO: 530961
uacaaacacgacucacugc

SEQ ID NO: 530963 - RNA, 19 nt, Artificial Sequence
  Description of Artificial Sequence: Synthetic oligonucleotide
  Sense strand starting at position 3063 of SEQ ID NO: 318024
cagugagucguguuuguag

SEQ ID NO: 530964 - RNA, 19 nt, Artificial Sequence
  Description of Artificial Sequence: Synthetic oligonucleotide
  Antisense strand to SEQ ID NO: 530963
cuacaaacacgacucacug

SEQ ID NO: 530965 - RNA, 19 nt, Artificial Sequence
  Description of Artificial Sequence: Synthetic oligonucleotide
  Sense strand starting at position 3477 of SEQ ID NO: 318024
caugauguguuuccagaaa

SEQ ID NO: 530966 - RNA, 19 nt, Artificial Sequence
  Description of Artificial Sequence: Synthetic oligonucleotide
  Antisense strand to SEQ ID NO: 530965
uuucuggaaacacaucaug

SEQ ID NO: 530967 - RNA, 19 nt, Artificial Sequence
  Description of Artificial Sequence: Synthetic oligonucleotide
  Sense strand starting at position 3688 of SEQ ID NO: 318024
ucucauggcucaguaagaa

SEQ ID NO: 530968 - RNA, 19 nt, Artificial Sequence
  Description of Artificial Sequence: Synthetic oligonucleotide
  Antisense strand to SEQ ID NO: 530967
uucuuacugagccaugaga

SEQ ID NO: 530969 - RNA, 19 nt, Artificial Sequence
  Description of Artificial Sequence: Synthetic oligonucleotide
  Sense strand starting at position 3723 of SEQ ID NO: 318024
agcaaugauuaugcagaaa

SEQ ID NO: 530970 - RNA, 19 nt, Artificial Sequence
  Description of Artificial Sequence: Synthetic oligonucleotide
  Antisense strand to SEQ ID NO: 530969
uuucugcauaaucauugcu

SEQ ID NO: 530971 - RNA, 19 nt, Artificial Sequence
  Description of Artificial Sequence: Synthetic oligonucleotide
  Sense strand starting at position 3858 of SEQ ID NO: 318024
agucccuguguuuauauga

SEQ ID NO: 530972 - RNA, 19 nt, Artificial Sequence
  Description of Artificial Sequence: Synthetic oligonucleotide
  Antisense strand to SEQ ID NO: 530971
ucauauaaacacagggacu

SEQ ID NO: 530973 - RNA, 19 nt, Artificial Sequence
  Description of Artificial Sequence: Synthetic oligonucleotide
  Sense strand starting at position 66 of SEQ ID NO: 318025
uuugaaaggucaccacauu

SEQ ID NO: 530974 - RNA, 19 nt, Artificial Sequence
  Description of Artificial Sequence: Synthetic oligonucleotide
  Antisense strand to SEQ ID NO: 530973
aauguggugaccuuucaaa

SEQ ID NO: 530975 - RNA, 19 nt, Artificial Sequence
  Description of Artificial Sequence: Synthetic oligonucleotide
  Sense strand starting at position 265 of SEQ ID NO: 318025
agccacagugagcaauuaa

SEQ ID NO: 530976 - RNA, 19 nt, Artificial Sequence
  Description of Artificial Sequence: Synthetic oligonucleotide
  Antisense strand to SEQ ID NO: 530975
uuaauugcucacuguggcu

SEQ ID NO: 530977 - RNA, 19 nt, Artificial Sequence
  Description of Artificial Sequence: Synthetic oligonucleotide
  Sense strand starting at position 521 of SEQ ID NO: 318025
uucuauaugccuggcauuu

SEQ ID NO: 530978 - RNA, 19 nt, Artificial Sequence
  Description of Artificial Sequence: Synthetic oligonucleotide
  Antisense strand to SEQ ID NO: 530977
aaaugccaggcauauagaa

SEQ ID NO: 530979 - RNA, 19 nt, Artificial Sequence
  Description of Artificial Sequence: Synthetic oligonucleotide
  Sense strand starting at position 566 of SEQ ID NO: 318025
uuagcaaugcuaggaaaca

SEQ ID NO: 530980 - RNA, 19 nt, Artificial Sequence
  Description of Artificial Sequence: Synthetic oligonucleotide
  Antisense strand to SEQ ID NO: 530979
uguuuccuagcauugcuaa

SEQ ID NO: 530981 - RNA, 19 nt, Artificial Sequence
  Description of Artificial Sequence: Synthetic oligonucleotide
  Sense strand starting at position 844 of SEQ ID NO: 318025
ucacaugucuuucugaaga

SEQ ID NO: 530982 - RNA, 19 nt, Artificial Sequence
  Description of Artificial Sequence: Synthetic oligonucleotide
  Antisense strand to SEQ ID NO: 530981
ucuucagaaagacauguga

SEQ ID NO: 530983 - RNA, 19 nt, Artificial Sequence
  Description of Artificial Sequence: Synthetic oligonucleotide
  Sense strand starting at position 933 of SEQ ID NO: 318025
auaggauuauuugagggau

SEQ ID NO: 530984 - RNA, 19 nt, Artificial Sequence
  Description of Artificial Sequence: Synthetic oligonucleotide
  Antisense strand to SEQ ID NO: 530983
aucccucaaauaauccuau

SEQ ID NO: 530985 - RNA, 19 nt, Artificial Sequence
  Description of Artificial Sequence: Synthetic oligonucleotide
  Sense strand starting at position 1175 of SEQ ID NO: 318025
aauguagagaguugacaug

SEQ ID NO: 530986 - RNA, 19 nt, Artificial Sequence
  Description of Artificial Sequence: Synthetic oligonucleotide
  Antisense strand to SEQ ID NO: 530985
caugucaacucucuacauu

SEQ ID NO: 530987 - RNA, 19 nt, Artificial Sequence
  Description of Artificial Sequence: Synthetic oligonucleotide
  Sense strand starting at position 1181 of SEQ ID NO: 318025
gagaguugacauggcaagu

SEQ ID NO: 530988 - RNA, 19 nt, Artificial Sequence
  Description of Artificial Sequence: Synthetic oligonucleotide
  Antisense strand to SEQ ID NO: 530987
acuugccaugucaacucuc

SEQ ID NO: 530989 - RNA, 19 nt, Artificial Sequence
  Description of Artificial Sequence: Synthetic oligonucleotide
  Sense strand starting at position 1252 of SEQ ID NO: 318025
aauacugaguucucccgaa

SEQ ID NO: 530990 - RNA, 19 nt, Artificial Sequence
  Description of Artificial Sequence: Synthetic oligonucleotide
  Antisense strand to SEQ ID NO: 530989
uucgggagaacucaguauu

SEQ ID NO: 530991 - RNA, 19 nt, Artificial Sequence
  Description of Artificial Sequence: Synthetic oligonucleotide
  Sense strand starting at position 1256 of SEQ ID NO: 318025
cugaguucucccgaacaca

SEQ ID NO: 530992 - RNA, 19 nt, Artificial Sequence
  Description of Artificial Sequence: Synthetic oligonucleotide
  Antisense strand to SEQ ID NO: 530991
uguguucgggagaacucag

SEQ ID NO: 530993 - RNA, 19 nt, Artificial Sequence
  Description of Artificial Sequence: Synthetic oligonucleotide
  Sense strand starting at position 1276 of SEQ ID NO: 318025
agagucuuagauugcaacu

SEQ ID NO: 530994 - RNA, 19 nt, Artificial Sequence
  Description of Artificial Sequence: Synthetic oligonucleotide
  Antisense strand to SEQ ID NO: 530993
aguugcaaucuaagacucu

SEQ ID NO: 530995 - RNA, 19 nt, Artificial Sequence
  Description of Artificial Sequence: Synthetic oligonucleotide
  Sense strand starting at position 1355 of SEQ ID NO: 318025
gcuugagugacaugacaaa

SEQ ID NO: 530996 - RNA, 19 nt, Artificial Sequence
  Description of Artificial Sequence: Synthetic oligonucleotide
  Antisense strand to SEQ ID NO: 530995
uuugucaugucacucaagc

SEQ ID NO: 530997 - RNA, 19 nt, Artificial Sequence
  Description of Artificial Sequence: Synthetic oligonucleotide
  Sense strand starting at position 1447 of SEQ ID NO: 318025
caguaugugggauaauucu

SEQ ID NO: 530998 - RNA, 19 nt, Artificial Sequence
  Description of Artificial Sequence: Synthetic oligonucleotide
  Antisense strand to SEQ ID NO: 530997
agaauuaucccacauacug

SEQ ID NO: 530999 - RNA, 19 nt, Artificial Sequence
  Description of Artificial Sequence: Synthetic oligonucleotide
  Sense strand starting at position 1523 of SEQ ID NO: 318025
agacauucuccauguggag

SEQ ID NO: 531000 - RNA, 19 nt, Artificial Sequence
  Description of Artificial Sequence: Synthetic oligonucleotide
  Antisense strand to SEQ ID NO: 530999
cuccacauggagaaugucu

SEQ ID NO: 531001 - RNA, 19 nt, Artificial Sequence
  Description of Artificial Sequence: Synthetic oligonucleotide
  Sense strand starting at position 1537 of SEQ ID NO: 318025
uggagacacucuguccuua

SEQ ID NO: 531002 - RNA, 19 nt, Artificial Sequence
  Description of Artificial Sequence: Synthetic oligonucleotide
  Antisense strand to SEQ ID NO: 531001
uaaggacagagugucucca

SEQ ID NO: 531003 - RNA, 19 nt, Artificial Sequence
  Description of Artificial Sequence: Synthetic oligonucleotide
  Sense strand starting at position 1539 of SEQ ID NO: 318025
gagacacucuguccuuaag

SEQ ID NO: 531004 - RNA, 19 nt, Artificial Sequence
  Description of Artificial Sequence: Synthetic oligonucleotide
  Antisense strand to SEQ ID NO: 531003
cuuaaggacagagugucuc

SEQ ID NO: 531005 - RNA, 19 nt, Artificial Sequence
  Description of Artificial Sequence: Synthetic oligonucleotide
  Sense strand starting at position 2044 of SEQ ID NO: 318025
ugauguugacuuggaguca

SEQ ID NO: 531006 - RNA, 19 nt, Artificial Sequence
  Description of Artificial Sequence: Synthetic oligonucleotide
  Antisense strand to SEQ ID NO: 531005
ugacuccaagucaacauca

SEQ ID NO: 531007 - RNA, 19 nt, Artificial Sequence
  Description of Artificial Sequence: Synthetic oligonucleotide
  Sense strand starting at position 2087 of SEQ ID NO: 318025
gacguaugucuuuccgcaa

SEQ ID NO: 531008 - RNA, 19 nt, Artificial Sequence
  Description of Artificial Sequence: Synthetic oligonucleotide
  Antisense strand to SEQ ID NO: 531007
uugcggaaagacauacguc

SEQ ID NO: 531009 - RNA, 19 nt, Artificial Sequence
  Description of Artificial Sequence: Synthetic oligonucleotide
  Sense strand starting at position 2125 of SEQ ID NO: 318025
uuuagaagacagugauugu

SEQ ID NO: 531010 - RNA, 19 nt, Artificial Sequence
  Description of Artificial Sequence: Synthetic oligonucleotide
  Antisense strand to SEQ ID NO: 531009
acaaucacugucuucuaaa

SEQ ID NO: 531011 - RNA, 19 nt, Artificial Sequence
  Description of Artificial Sequence: Synthetic oligonucleotide
  Sense strand starting at position 2348 of SEQ ID NO: 318025
ugucauacucaucaugauu

SEQ ID NO: 531012 - RNA, 19 nt, Artificial Sequence
  Description of Artificial Sequence: Synthetic oligonucleotide
  Antisense strand to SEQ ID NO: 531011
aaucaugaugaguaugaca

SEQ ID NO: 531013 - RNA, 19 nt, Artificial Sequence
  Description of Artificial Sequence: Synthetic oligonucleotide
  Sense strand starting at position 2486 of SEQ ID NO: 318025
gucacuaaugcagacagua

SEQ ID NO: 531014 - RNA, 19 nt, Artificial Sequence
  Description of Artificial Sequence: Synthetic oligonucleotide
  Antisense strand to SEQ ID NO: 531013
uacugucugcauuagugac

SEQ ID NO: 531015 - RNA, 19 nt, Artificial Sequence
  Description of Artificial Sequence: Synthetic oligonucleotide
  Sense strand starting at position 2501 of SEQ ID NO: 318025
aguaaaguugcucauuaau

SEQ ID NO: 531016 - RNA, 19 nt, Artificial Sequence
  Description of Artificial Sequence: Synthetic oligonucleotide
  Antisense strand to SEQ ID NO: 531015
auuaaugagcaacuuuacu

SEQ ID NO: 531017 - RNA, 19 nt, Artificial Sequence
  Description of Artificial Sequence: Synthetic oligonucleotide
  Sense strand starting at position 2661 of SEQ ID NO: 318025
aguguacauuuggagauga

SEQ ID NO: 531018 - RNA, 19 nt, Artificial Sequence
  Description of Artificial Sequence: Synthetic oligonucleotide
  Antisense strand to SEQ ID NO: 531017
ucaucuccaaauguacacu

SEQ ID NO: 531019 - RNA, 19 nt, Artificial Sequence
  Description of Artificial Sequence: Synthetic oligonucleotide
  Sense strand starting at position 2691 of SEQ ID NO: 318025
aggauauacuaagauaaag

SEQ ID NO: 531020 - RNA, 19 nt, Artificial Sequence
  Description of Artificial Sequence: Synthetic oligonucleotide
  Antisense strand to SEQ ID NO: 531019
cuuuaucuuaguauauccu

SEQ ID NO: 531021 - RNA, 19 nt, Artificial Sequence
  Description of Artificial Sequence: Synthetic oligonucleotide
  Sense strand starting at position 2730 of SEQ ID NO: 318025
aguacaauuugcuugaguu

SEQ ID NO: 531022 - RNA, 19 nt, Artificial Sequence
  Description of Artificial Sequence: Synthetic oligonucleotide
  Antisense strand to SEQ ID NO: 531021
aacucaagcaaauuguacu

SEQ ID NO: 531023 - RNA, 19 nt, Artificial Sequence
  Description of Artificial Sequence: Synthetic oligonucleotide
  Sense strand starting at position 2731 of SEQ ID NO: 318025
guacaauuugcuugaguuc

SEQ ID NO: 531024 - RNA, 19 nt, Artificial Sequence
  Description of Artificial Sequence: Synthetic oligonucleotide
  Antisense strand to SEQ ID NO: 531023
gaacucaagcaaauuguac

SEQ ID NO: 531025 - RNA, 19 nt, Artificial Sequence
  Description of Artificial Sequence: Synthetic oligonucleotide
  Sense strand starting at position 2784 of SEQ ID NO: 318025
agagauuauuuagaaugca

SEQ ID NO: 531026 - RNA, 19 nt, Artificial Sequence
  Description of Artificial Sequence: Synthetic oligonucleotide
  Antisense strand to SEQ ID NO: 531025
ugcauucuaaauaaucucu

SEQ ID NO: 531027 - RNA, 19 nt, Artificial Sequence
  Description of Artificial Sequence: Synthetic oligonucleotide
  Sense strand starting at position 3143 of SEQ ID NO: 318025
uuguguuagauugaaugca

SEQ ID NO: 531028 - RNA, 19 nt, Artificial Sequence
  Description of Artificial Sequence: Synthetic oligonucleotide
  Antisense strand to SEQ ID NO: 531027
ugcauucaaucuaacacaa

SEQ ID NO: 531029 - RNA, 19 nt, Artificial Sequence
  Description of Artificial Sequence: Synthetic oligonucleotide
  Sense strand starting at position 3311 of SEQ ID NO: 318025
ucuagaccucaagaagcuu

SEQ ID NO: 531030 - RNA, 19 nt, Artificial Sequence
  Description of Artificial Sequence: Synthetic oligonucleotide
  Antisense strand to SEQ ID NO: 531029
aagcuucuugaggucuaga

SEQ ID NO: 531031 - RNA, 19 nt, Artificial Sequence
  Description of Artificial Sequence: Synthetic oligonucleotide
  Sense strand starting at position 3348 of SEQ ID NO: 318025
cccuguggucacuaugacu

SEQ ID NO: 531032 - RNA, 19 nt, Artificial Sequence
  Description of Artificial Sequence: Synthetic oligonucleotide
  Antisense strand to SEQ ID NO: 531031
agucauagugaccacaggg

SEQ ID NO: 531033 - RNA, 19 nt, Artificial Sequence
  Description of Artificial Sequence: Synthetic oligonucleotide
  Sense strand starting at position 3362 of SEQ ID NO: 318025
ugacuacacgacugaauua

SEQ ID NO: 531034 - RNA, 19 nt, Artificial Sequence
  Description of Artificial Sequence: Synthetic oligonucleotide
  Antisense strand to SEQ ID NO: 531033
uaauucagucguguaguca

SEQ ID NO: 531035 - RNA, 19 nt, Artificial Sequence
  Description of Artificial Sequence: Synthetic oligonucleotide
  Sense strand starting at position 3637 of SEQ ID NO: 318025
ucacuaaugcaguaagaug

SEQ ID NO: 531036 - RNA, 19 nt, Artificial Sequence
  Description of Artificial Sequence: Synthetic oligonucleotide
  Antisense strand to SEQ ID NO: 531035
caucuuacugcauuaguga

SEQ ID NO: 531037 - RNA, 19 nt, Artificial Sequence
  Description of Artificial Sequence: Synthetic oligonucleotide
  Sense strand starting at position 3702 of SEQ ID NO: 318025
gagcuaaaugaggguaauu

SEQ ID NO: 531038 - RNA, 19 nt, Artificial Sequence
  Description of Artificial Sequence: Synthetic oligonucleotide
  Antisense strand to SEQ ID NO: 531037
aauuacccucauuuagcuc

SEQ ID NO: 531039 - RNA, 19 nt, Artificial Sequence
  Description of Artificial Sequence: Synthetic oligonucleotide
  Sense strand starting at position 3721 of SEQ ID NO: 318025
uugagagggucuucagguu

SEQ ID NO: 531040 - RNA, 19 nt, Artificial Sequence
  Description of Artificial Sequence: Synthetic oligonucleotide
  Antisense strand to SEQ ID NO: 531039
aaccugaagacccucucaa

SEQ ID NO: 531041 - RNA, 19 nt, Artificial Sequence
  Description of Artificial Sequence: Synthetic oligonucleotide
  Sense strand starting at position 3773 of SEQ ID NO: 318025
guggaucuuccugggauca

SEQ ID NO: 531042 - RNA, 19 nt, Artificial Sequence
  Description of Artificial Sequence: Synthetic oligonucleotide
  Antisense strand to SEQ ID NO: 531041
ugaucccaggaagauccac

SEQ ID NO: 531043 - RNA, 19 nt, Artificial Sequence
  Description of Artificial Sequence: Synthetic oligonucleotide
  Sense strand starting at position 3774 of SEQ ID NO: 318025
uggaucuuccugggaucaa

SEQ ID NO: 531044 - RNA, 19 nt, Artificial Sequence
  Description of Artificial Sequence: Synthetic oligonucleotide
  Antisense strand to SEQ ID NO: 531043
uugaucccaggaagaucca

SEQ ID NO: 531045 - RNA, 19 nt, Artificial Sequence
  Description of Artificial Sequence: Synthetic oligonucleotide
  Sense strand starting at position 3795 of SEQ ID NO: 318025
ucugauaugcuuuagaggu

SEQ ID NO: 531046 - RNA, 19 nt, Artificial Sequence
  Description of Artificial Sequence: Synthetic oligonucleotide
  Antisense strand to SEQ ID NO: 531045
accucuaaagcauaucaga

SEQ ID NO: 531047 - RNA, 19 nt, Artificial Sequence
  Description of Artificial Sequence: Synthetic oligonucleotide
  Sense strand starting at position 3812 of SEQ ID NO: 318025
gucugcuaucaugagaaua

SEQ ID NO: 531048 - RNA, 19 nt, Artificial Sequence
  Description of Artificial Sequence: Synthetic oligonucleotide
  Antisense strand to SEQ ID NO: 531047
uauucucaugauagcagac

SEQ ID NO: 531049 - RNA, 19 nt, Artificial Sequence
  Description of Artificial Sequence: Synthetic oligonucleotide
  Sense strand starting at position 3887 of SEQ ID NO: 318025
uuguuaguccuacaaacug

SEQ ID NO: 531050 - RNA, 19 nt, Artificial Sequence
  Description of Artificial Sequence: Synthetic oligonucleotide
  Antisense strand to SEQ ID NO: 531049
caguuuguaggacuaacaa

SEQ ID NO: 531051 - RNA, 19 nt, Artificial Sequence
  Description of Artificial Sequence: Synthetic oligonucleotide
  Sense strand starting at position 3976 of SEQ ID NO: 318025
caaaguugagaguaguacu

SEQ ID NO: 531052 - RNA, 19 nt, Artificial Sequence
  Description of Artificial Sequence: Synthetic oligonucleotide
  Antisense strand to SEQ ID NO: 531051
aguacuacucucaacuuug

SEQ ID NO: 531053 - RNA, 19 nt, Artificial Sequence
  Description of Artificial Sequence: Synthetic oligonucleotide
  Sense strand starting at position 1 of SEQ ID NO: 318026
gggagugcugcauaucacu

SEQ ID NO: 531054 - RNA, 19 nt, Artificial Sequence
  Description of Artificial Sequence: Synthetic oligonucleotide
  Antisense strand to SEQ ID NO: 531053
agugauaugcagcacuccc

SEQ ID NO: 531055 - RNA, 19 nt, Artificial Sequence
  Description of Artificial Sequence: Synthetic oligonucleotide
  Sense strand starting at position 42 of SEQ ID NO: 318026
uaugauuguuuggcuauaa

SEQ ID NO: 531056 - RNA, 19 nt, Artificial Sequence
  Description of Artificial Sequence: Synthetic oligonucleotide
  Antisense strand to SEQ ID NO: 531055
uuauagccaaacaaucaua

SEQ ID NO: 531057 - RNA, 19 nt, Artificial Sequence
  Description of Artificial Sequence: Synthetic oligonucleotide
  Sense strand starting at position 43 of SEQ ID NO: 318026
augauuguuuggcuauaaa

SEQ ID NO: 531058 - RNA, 19 nt, Artificial Sequence
  Description of Artificial Sequence: Synthetic oligonucleotide
  Antisense strand to SEQ ID NO: 531057
uuuauagccaaacaaucau

SEQ ID NO: 531059 - RNA, 19 nt, Artificial Sequence
  Description of Artificial Sequence: Synthetic oligonucleotide
  Sense strand starting at position 79 of SEQ ID NO: 318026
aguauuaggaagugagguu

SEQ ID NO: 531060 - RNA, 19 nt, Artificial Sequence
  Description of Artificial Sequence: Synthetic oligonucleotide
  Antisense strand to SEQ ID NO: 531059
aaccucacuuccuaauacu

SEQ ID NO: 531061 - RNA, 19 nt, Artificial Sequence
  Description of Artificial Sequence: Synthetic oligonucleotide
  Sense strand starting at position 364 of SEQ ID NO: 318026
gccucauucuuugugagaa

SEQ ID NO: 531062 - RNA, 19 nt, Artificial Sequence
  Description of Artificial Sequence: Synthetic oligonucleotide
  Antisense strand to SEQ ID NO: 531061
uucucacaaagaaugaggc

SEQ ID NO: 531063 - RNA, 19 nt, Artificial Sequence
  Description of Artificial Sequence: Synthetic oligonucleotide
  Sense strand starting at position 420 of SEQ ID NO: 318026
uaagcauucucaguaagug

SEQ ID NO: 531064 - RNA, 19 nt, Artificial Sequence
  Description of Artificial Sequence: Synthetic oligonucleotide
  Antisense strand to SEQ ID NO: 531063
cacuuacugagaaugcuua

SEQ ID NO: 531065 - RNA, 19 nt, Artificial Sequence
  Description of Artificial Sequence: Synthetic oligonucleotide
  Sense strand starting at position 445 of SEQ ID NO: 318026
acuauuauuuaggaggcua

SEQ ID NO: 531066 - RNA, 19 nt, Artificial Sequence
  Description of Artificial Sequence: Synthetic oligonucleotide
  Antisense strand to SEQ ID NO: 531065
uagccuccuaaauaauagu

SEQ ID NO: 531067 - RNA, 19 nt, Artificial Sequence
  Description of Artificial Sequence: Synthetic oligonucleotide
  Sense strand starting at position 474 of SEQ ID NO: 318026
ugaugaggucuacaugggu

SEQ ID NO: 531068 - RNA, 19 nt, Artificial Sequence
  Description of Artificial Sequence: Synthetic oligonucleotide
  Antisense strand to SEQ ID NO: 531067
acccauguagaccucauca

SEQ ID NO: 531069 - RNA, 19 nt, Artificial Sequence
  Description of Artificial Sequence: Synthetic oligonucleotide
  Sense strand starting at position 517 of SEQ ID NO: 318026
ugaggagcaagucauucua

SEQ ID NO: 531070 - RNA, 19 nt, Artificial Sequence
  Description of Artificial Sequence: Synthetic oligonucleotide
  Antisense strand to SEQ ID NO: 531069
uagaaugacuugcuccuca

SEQ ID NO: 531071 - RNA, 19 nt, Artificial Sequence
  Description of Artificial Sequence: Synthetic oligonucleotide
  Sense strand starting at position 519 of SEQ ID NO: 318026
aggagcaagucauucuaau

SEQ ID NO: 531072 - RNA, 19 nt, Artificial Sequence
  Description of Artificial Sequence: Synthetic oligonucleotide
  Antisense strand to SEQ ID NO: 531071
auuagaaugacuugcuccu

SEQ ID NO: 531073 - RNA, 19 nt, Artificial Sequence
  Description of Artificial Sequence: Synthetic oligonucleotide
  Sense strand starting at position 577 of SEQ ID NO: 318026
acaagacuuugagccuagu

SEQ ID NO: 531074 - RNA, 19 nt, Artificial Sequence
  Description of Artificial Sequence: Synthetic oligonucleotide
  Antisense strand to SEQ ID NO: 531073
acuaggcucaaagucuugu

SEQ ID NO: 531075 - RNA, 19 nt, Artificial Sequence
  Description of Artificial Sequence: Synthetic oligonucleotide
  Sense strand starting at position 580 of SEQ ID NO: 318026
agacuuugagccuagugau

SEQ ID NO: 531076 - RNA, 19 nt, Artificial Sequence
  Description of Artificial Sequence: Synthetic oligonucleotide
  Antisense strand to SEQ ID NO: 531075
aucacuaggcucaaagucu

SEQ ID NO: 531077 - RNA, 19 nt, Artificial Sequence
  Description of Artificial Sequence: Synthetic oligonucleotide
  Sense strand starting at position 628 of SEQ ID NO: 318026
gaaguuagaccggguuucu

SEQ ID NO: 531078 - RNA, 19 nt, Artificial Sequence
  Description of Artificial Sequence: Synthetic oligonucleotide
  Antisense strand to SEQ ID NO: 531077
agaaacccggucuaacuuc

SEQ ID NO: 531079 - RNA, 19 nt, Artificial Sequence
  Description of Artificial Sequence: Synthetic oligonucleotide
  Sense strand starting at position 637 of SEQ ID NO: 318026
ccggguuucuaagcacaaa

SEQ ID NO: 531080 - RNA, 19 nt, Artificial Sequence
  Description of Artificial Sequence: Synthetic oligonucleotide
  Antisense strand to SEQ ID NO: 531079
uuugugcuuagaaacccgg

SEQ ID NO: 531081 - RNA, 19 nt, Artificial Sequence
  Description of Artificial Sequence: Synthetic oligonucleotide
  Sense strand starting at position 776 of SEQ ID NO: 318026
ucagaaggguuagugucua

SEQ ID NO: 531082 - RNA, 19 nt, Artificial Sequence
  Description of Artificial Sequence: Synthetic oligonucleotide
  Antisense strand to SEQ ID NO: 531081
uagacacuaacccuucuga

SEQ ID NO: 531083 - RNA, 19 nt, Artificial Sequence
  Description of Artificial Sequence: Synthetic oligonucleotide
  Sense strand starting at position 978 of SEQ ID NO: 318026
uggcaauggucaccaaagu

SEQ ID NO: 531084 - RNA, 19 nt, Artificial Sequence
  Description of Artificial Sequence: Synthetic oligonucleotide
  Antisense strand to SEQ ID NO: 531083
acuuuggugaccauugcca

SEQ ID NO: 531085 - RNA, 19 nt, Artificial Sequence
  Description of Artificial Sequence: Synthetic oligonucleotide
  Sense strand starting at position 989 of SEQ ID NO: 318026
accaaagucccuugaagua

SEQ ID NO: 531086 - RNA, 19 nt, Artificial Sequence
  Description of Artificial Sequence: Synthetic oligonucleotide
  Antisense strand to SEQ ID NO: 531085
uacuucaagggacuuuggu

SEQ ID NO: 531087 - RNA, 19 nt, Artificial Sequence
  Description of Artificial Sequence: Synthetic oligonucleotide
  Sense strand starting at position 999 of SEQ ID NO: 318026
cuugaaguacaguaauauu

SEQ ID NO: 531088 - RNA, 19 nt, Artificial Sequence
  Description of Artificial Sequence: Synthetic oligonucleotide
  Antisense strand to SEQ ID NO: 531087
aauauuacuguacuucaag

SEQ ID NO: 531089 - RNA, 19 nt, Artificial Sequence
  Description of Artificial Sequence: Synthetic oligonucleotide
  Sense strand starting at position 1093 of SEQ ID NO: 318026
auugcccaucguuauugaa

SEQ ID NO: 531090 - RNA, 19 nt, Artificial Sequence
  Description of Artificial Sequence: Synthetic oligonucleotide
  Antisense strand to SEQ ID NO: 531089
uucaauaacgaugggcaau

SEQ ID NO: 531091 - RNA, 19 nt, Artificial Sequence
  Description of Artificial Sequence: Synthetic oligonucleotide
  Sense strand starting at position 1236 of SEQ ID NO: 318026
cccaacauccagugaguuu

SEQ ID NO: 531092 - RNA, 19 nt, Artificial Sequence
  Description of Artificial Sequence: Synthetic oligonucleotide
  Antisense strand to SEQ ID NO: 531091
aaacucacuggauguuggg

SEQ ID NO: 531093 - RNA, 19 nt, Artificial Sequence
  Description of Artificial Sequence: Synthetic oligonucleotide
  Sense strand starting at position 1271 of SEQ ID NO: 318026
guuuaaauccuacaguaga

SEQ ID NO: 531094 - RNA, 19 nt, Artificial Sequence
  Description of Artificial Sequence: Synthetic oligonucleotide
  Antisense strand to SEQ ID NO: 531093
ucuacuguaggauuuaaac

SEQ ID NO: 531095 - RNA, 19 nt, Artificial Sequence
  Description of Artificial Sequence: Synthetic oligonucleotide
  Sense strand starting at position 1365 of SEQ ID NO: 318026
gccacaagauuguccauau

SEQ ID NO: 531096 - RNA, 19 nt, Artificial Sequence
  Description of Artificial Sequence: Synthetic oligonucleotide
  Antisense strand to SEQ ID NO: 531095
auauggacaaucuuguggc

SEQ ID NO: 531097 - RNA, 19 nt, Artificial Sequence
  Description of Artificial Sequence: Synthetic oligonucleotide
  Sense strand starting at position 1464 of SEQ ID NO: 318026
augggucccagcugagaau

SEQ ID NO: 531098 - RNA, 19 nt, Artificial Sequence
  Description of Artificial Sequence: Synthetic oligonucleotide
  Antisense strand to SEQ ID NO: 531097
auucucagcugggacccau

SEQ ID NO: 531099 - RNA, 19 nt, Artificial Sequence
  Description of Artificial Sequence: Synthetic oligonucleotide
  Sense strand starting at position 2024 of SEQ ID NO: 318026
gcucuagauaccggaaaug

SEQ ID NO: 531100 - RNA, 19 nt, Artificial Sequence
  Description of Artificial Sequence: Synthetic oligonucleotide
  Antisense strand to SEQ ID NO: 531099
cauuuccgguaucuagagc

SEQ ID NO: 531101 - RNA, 19 nt, Artificial Sequence
  Description of Artificial Sequence: Synthetic oligonucleotide
  Sense strand starting at position 2311 of SEQ ID NO: 318026
gguuaugacuguucucauc

SEQ ID NO: 531102 - RNA, 19 nt, Artificial Sequence
  Description of Artificial Sequence: Synthetic oligonucleotide
  Antisense strand to SEQ ID NO: 531101
gaugagaacagucauaacc

SEQ ID NO: 531103 - RNA, 19 nt, Artificial Sequence
  Description of Artificial Sequence: Synthetic oligonucleotide
  Sense strand starting at position 2342 of SEQ ID NO: 318026
gguguuugauaauucccaa

SEQ ID NO: 531104 - RNA, 19 nt, Artificial Sequence
  Description of Artificial Sequence: Synthetic oligonucleotide
  Antisense strand to SEQ ID NO: 531103
uugggaauuaucaaacacc

SEQ ID NO: 531105 - RNA, 19 nt, Artificial Sequence
  Description of Artificial Sequence: Synthetic oligonucleotide
  Sense strand starting at position 2984 of SEQ ID NO: 318026
gcauaaaugucaccauguu

SEQ ID NO: 531106 - RNA, 19 nt, Artificial Sequence
  Description of Artificial Sequence: Synthetic oligonucleotide
  Antisense strand to SEQ ID NO: 531105
aacauggugacauuuaugc

SEQ ID NO: 531107 - RNA, 19 nt, Artificial Sequence
  Description of Artificial Sequence: Synthetic oligonucleotide
  Sense strand starting at position 3096 of SEQ ID NO: 318026
aaaugacauuuguauuggu

SEQ ID NO: 531108 - RNA, 19 nt, Artificial Sequence
  Description of Artificial Sequence: Synthetic oligonucleotide
  Antisense strand to SEQ ID NO: 531107
accaauacaaaugucauuu

SEQ ID NO: 531109 - RNA, 19 nt, Artificial Sequence
  Description of Artificial Sequence: Synthetic oligonucleotide
  Sense strand starting at position 3100 of SEQ ID NO: 318026
gacauuuguauuggugguu

SEQ ID NO: 531110 - RNA, 19 nt, Artificial Sequence
  Description of Artificial Sequence: Synthetic oligonucleotide
  Antisense strand to SEQ ID NO: 531109
aaccaccaauacaaauguc

SEQ ID NO: 531111 - RNA, 19 nt, Artificial Sequence
  Description of Artificial Sequence: Synthetic oligonucleotide
  Sense strand starting at position 3125 of SEQ ID NO: 318026
uuugcaauggaguaguuga

SEQ ID NO: 531112 - RNA, 19 nt, Artificial Sequence
  Description of Artificial Sequence: Synthetic oligonucleotide
  Antisense strand to SEQ ID NO: 531111
ucaacuacuccauugcaaa

SEQ ID NO: 531113 - RNA, 19 nt, Artificial Sequence
  Description of Artificial Sequence: Synthetic oligonucleotide
  Sense strand starting at position 3222 of SEQ ID NO: 318026
gcaugacaugccugggaaa

SEQ ID NO: 531114 - RNA, 19 nt, Artificial Sequence
  Description of Artificial Sequence: Synthetic oligonucleotide
  Antisense strand to SEQ ID NO: 531113
uuucccaggcaugucaugc

SEQ ID NO: 531115 - RNA, 19 nt, Artificial Sequence
  Description of Artificial Sequence: Synthetic oligonucleotide
  Sense strand starting at position 3417 of SEQ ID NO: 318026
aggugcaaguucuuuccaa

SEQ ID NO: 531116 - RNA, 19 nt, Artificial Sequence
  Description of Artificial Sequence: Synthetic oligonucleotide
  Antisense strand to SEQ ID NO: 531115
uuggaaagaacuugcaccu

SEQ ID NO: 531117 - RNA, 19 nt, Artificial Sequence
  Description of Artificial Sequence: Synthetic oligonucleotide
  Sense strand starting at position 3418 of SEQ ID NO: 318026
ggugcaaguucuuuccaaa

SEQ ID NO: 531118 - RNA, 19 nt, Artificial Sequence
  Description of Artificial Sequence: Synthetic oligonucleotide
  Antisense strand to SEQ ID NO: 531117
uuuggaaagaacuugcacc

SEQ ID NO: 531119 - RNA, 19 nt, Artificial Sequence
  Description of Artificial Sequence: Synthetic oligonucleotide
  Sense strand starting at position 3464 of SEQ ID NO: 318026
auauaucauuaggcugaga

SEQ ID NO: 531120 - RNA, 19 nt, Artificial Sequence
  Description of Artificial Sequence: Synthetic oligonucleotide
  Antisense strand to SEQ ID NO: 531119
ucucagccuaaugauauau

SEQ ID NO: 531121 - RNA, 19 nt, Artificial Sequence
  Description of Artificial Sequence: Synthetic oligonucleotide
  Sense strand starting at position 3466 of SEQ ID NO: 318026
auaucauuaggcugagaga

SEQ ID NO: 531122 - RNA, 19 nt, Artificial Sequence
  Description of Artificial Sequence: Synthetic oligonucleotide
  Antisense strand to SEQ ID NO: 531121
ucucucagccuaaugauau

SEQ ID NO: 531123 - RNA, 19 nt, Artificial Sequence
  Description of Artificial Sequence: Synthetic oligonucleotide
  Sense strand starting at position 3573 of SEQ ID NO: 318026
ccagaagaguuggcuuagu

SEQ ID NO: 531124 - RNA, 19 nt, Artificial Sequence
  Description of Artificial Sequence: Synthetic oligonucleotide
  Antisense strand to SEQ ID NO: 531123
acuaagccaacucuucugg

SEQ ID NO: 531125 - RNA, 19 nt, Artificial Sequence
  Description of Artificial Sequence: Synthetic oligonucleotide
  Sense strand starting at position 3666 of SEQ ID NO: 318026
aacucugggugaccugaaa

SEQ ID NO: 531126 - RNA, 19 nt, Artificial Sequence
  Description of Artificial Sequence: Synthetic oligonucleotide
  Antisense strand to SEQ ID NO: 531125
uuucaggucacccagaguu

SEQ ID NO: 531127 - RNA, 19 nt, Artificial Sequence
  Description of Artificial Sequence: Synthetic oligonucleotide
  Sense strand starting at position 3792 of SEQ ID NO: 318026
cagagaugagguugucaau

SEQ ID NO: 531128 - RNA, 19 nt, Artificial Sequence
  Description of Artificial Sequence: Synthetic oligonucleotide
  Antisense strand to SEQ ID NO: 531127
auugacaaccucaucucug

SEQ ID NO: 531129 - RNA, 19 nt, Artificial Sequence
  Description of Artificial Sequence: Synthetic oligonucleotide
  Sense strand starting at position 3795 of SEQ ID NO: 318026
agaugagguugucaauuuc

SEQ ID NO: 531130 - RNA, 19 nt, Artificial Sequence
  Description of Artificial Sequence: Synthetic oligonucleotide
  Antisense strand to SEQ ID NO: 531129
gaaauugacaaccucaucu

SEQ ID NO: 531131 - RNA, 19 nt, Artificial Sequence
  Description of Artificial Sequence: Synthetic oligonucleotide
  Sense strand starting at position 3872 of SEQ ID NO: 318026
cucagaucagacugacuuu

SEQ ID NO: 531132 - RNA, 19 nt, Artificial Sequence
  Description of Artificial Sequence: Synthetic oligonucleotide
  Antisense strand to SEQ ID NO: 531131
aaagucagucugaucugag

SEQ ID NO: 531133 - RNA, 19 nt, Artificial Sequence
  Description of Artificial Sequence: Synthetic oligonucleotide
  Sense strand starting at position 207 of SEQ ID NO: 318027
gagaguguauuauuauuac

SEQ ID NO: 531134 - RNA, 19 nt, Artificial Sequence
  Description of Artificial Sequence: Synthetic oligonucleotide
  Antisense strand to SEQ ID NO: 531133
guaauaauaauacacucuc

SEQ ID NO: 531135 - RNA, 19 nt, Artificial Sequence
  Description of Artificial Sequence: Synthetic oligonucleotide
  Sense strand starting at position 210 of SEQ ID NO: 318027
aguguauuauuauuacgga

SEQ ID NO: 531136 - RNA, 19 nt, Artificial Sequence
  Description of Artificial Sequence: Synthetic oligonucleotide
  Antisense strand to SEQ ID NO: 531135
uccguaauaauaauacacu

SEQ ID NO: 531137 - RNA, 19 nt, Artificial Sequence
  Description of Artificial Sequence: Synthetic oligonucleotide
  Sense strand starting at position 306 of SEQ ID NO: 318027
gagaaauaaugugccuugu

SEQ ID NO: 531138 - RNA, 19 nt, Artificial Sequence
  Description of Artificial Sequence: Synthetic oligonucleotide
  Antisense strand to SEQ ID NO: 531137
acaaggcacauuauuucuc

SEQ ID NO: 531139 - RNA, 19 nt, Artificial Sequence
  Description of Artificial Sequence: Synthetic oligonucleotide
  Sense strand starting at position 316 of SEQ ID NO: 318027
gugccuugugccuuuguga

SEQ ID NO: 531140 - RNA, 19 nt, Artificial Sequence
  Description of Artificial Sequence: Synthetic oligonucleotide
  Antisense strand to SEQ ID NO: 531139
ucacaaaggcacaaggcac

SEQ ID NO: 531141 - RNA, 19 nt, Artificial Sequence
  Description of Artificial Sequence: Synthetic oligonucleotide
  Sense strand starting at position 317 of SEQ ID NO: 318027
ugccuugugccuuugugaa

SEQ ID NO: 531142 - RNA, 19 nt, Artificial Sequence
  Description of Artificial Sequence: Synthetic oligonucleotide
  Antisense strand to SEQ ID NO: 531141
uucacaaaggcacaaggca

SEQ ID NO: 531143 - RNA, 19 nt, Artificial Sequence
  Description of Artificial Sequence: Synthetic oligonucleotide
  Sense strand starting at position 702 of SEQ ID NO: 318027
agagauaauugggaauuag

SEQ ID NO: 531144 - RNA, 19 nt, Artificial Sequence
  Description of Artificial Sequence: Synthetic oligonucleotide
  Antisense strand to SEQ ID NO: 531143
cuaauucccaauuaucucu

SEQ ID NO: 531145 - RNA, 19 nt, Artificial Sequence
  Description of Artificial Sequence: Synthetic oligonucleotide
  Sense strand starting at position 753 of SEQ ID NO: 318027
gacuuacucuugguccuga

SEQ ID NO: 531146 - RNA, 19 nt, Artificial Sequence
  Description of Artificial Sequence: Synthetic oligonucleotide
  Antisense strand to SEQ ID NO: 531145
ucaggaccaagaguaaguc

SEQ ID NO: 531147 - RNA, 19 nt, Artificial Sequence
  Description of Artificial Sequence: Synthetic oligonucleotide
  Sense strand starting at position 754 of SEQ ID NO: 318027
acuuacucuugguccugaa

SEQ ID NO: 531148 - RNA, 19 nt, Artificial Sequence
  Description of Artificial Sequence: Synthetic oligonucleotide
  Antisense strand to SEQ ID NO: 531147
uucaggaccaagaguaagu

SEQ ID NO: 531149 - RNA, 19 nt, Artificial Sequence
  Description of Artificial Sequence: Synthetic oligonucleotide
  Sense strand starting at position 913 of SEQ ID NO: 318027
ugauuucuguacucaguuu

SEQ ID NO: 531150 - RNA, 19 nt, Artificial Sequence
  Description of Artificial Sequence: Synthetic oligonucleotide
  Antisense strand to SEQ ID NO: 531149
aaacugaguacagaaauca

SEQ ID NO: 531151 - RNA, 19 nt, Artificial Sequence
  Description of Artificial Sequence: Synthetic oligonucleotide
  Sense strand starting at position 919 of SEQ ID NO: 318027
cuguacucaguuuagauaa

SEQ ID NO: 531152 - RNA, 19 nt, Artificial Sequence
  Description of Artificial Sequence: Synthetic oligonucleotide
  Antisense strand to SEQ ID NO: 531151
uuaucuaaacugaguacag

SEQ ID NO: 531153 - RNA, 19 nt, Artificial Sequence
  Description of Artificial Sequence: Synthetic oligonucleotide
  Sense strand starting at position 1414 of SEQ ID NO: 318027
ugcucauucuuucucagga

SEQ ID NO: 531154 - RNA, 19 nt, Artificial Sequence
  Description of Artificial Sequence: Synthetic oligonucleotide
  Antisense strand to SEQ ID NO: 531153
uccugagaaagaaugagca

SEQ ID NO: 531155 - RNA, 19 nt, Artificial Sequence
  Description of Artificial Sequence: Synthetic oligonucleotide
  Sense strand starting at position 1419 of SEQ ID NO: 318027
auucuuucucaggaguauu

SEQ ID NO: 531156 - RNA, 19 nt, Artificial Sequence
  Description of Artificial Sequence: Synthetic oligonucleotide
  Antisense strand to SEQ ID NO: 531155
aauacuccugagaaagaau

SEQ ID NO: 531157 - RNA, 19 nt, Artificial Sequence
  Description of Artificial Sequence: Synthetic oligonucleotide
  Sense strand starting at position 1422 of SEQ ID NO: 318027
cuuucucaggaguauuauu

SEQ ID NO: 531158 - RNA, 19 nt, Artificial Sequence
  Description of Artificial Sequence: Synthetic oligonucleotide
  Antisense strand to SEQ ID NO: 531157
aauaauacuccugagaaag

SEQ ID NO: 531159 - RNA, 19 nt, Artificial Sequence
  Description of Artificial Sequence: Synthetic oligonucleotide
  Sense strand starting at position 1531 of SEQ ID NO: 318027
agagucaacggaggacuua

SEQ ID NO: 531160 - RNA, 19 nt, Artificial Sequence
  Description of Artificial Sequence: Synthetic oligonucleotide
  Antisense strand to SEQ ID NO: 531159
uaaguccuccguugacucu

SEQ ID NO: 531161 - RNA, 19 nt, Artificial Sequence
  Description of Artificial Sequence: Synthetic oligonucleotide
  Sense strand starting at position 1781 of SEQ ID NO: 318027
cugauaggcuaguuaacuu

SEQ ID NO: 531162 - RNA, 19 nt, Artificial Sequence
  Description of Artificial Sequence: Synthetic oligonucleotide
  Antisense strand to SEQ ID NO: 531161
aaguuaacuagccuaucag

SEQ ID NO: 531163 - RNA, 19 nt, Artificial Sequence
  Description of Artificial Sequence: Synthetic oligonucleotide
  Sense strand starting at position 2103 of SEQ ID NO: 318027
cuuacauguuguuuaacca

SEQ ID NO: 531164 - RNA, 19 nt, Artificial Sequence
  Description of Artificial Sequence: Synthetic oligonucleotide
  Antisense strand to SEQ ID NO: 531163
ugguuaaacaacauguaag

SEQ ID NO: 531165 - RNA, 19 nt, Artificial Sequence
  Description of Artificial Sequence: Synthetic oligonucleotide
  Sense strand starting at position 2104 of SEQ ID NO: 318027
uuacauguuguuuaaccaa

SEQ ID NO: 531166 - RNA, 19 nt, Artificial Sequence
  Description of Artificial Sequence: Synthetic oligonucleotide
  Antisense strand to SEQ ID NO: 531165
uugguuaaacaacauguaa

SEQ ID NO: 531167 - RNA, 19 nt, Artificial Sequence
  Description of Artificial Sequence: Synthetic oligonucleotide
  Sense strand starting at position 2123 of SEQ ID NO: 318027
gcaguucccuaagcaauuu

SEQ ID NO: 531168 - RNA, 19 nt, Artificial Sequence
  Description of Artificial Sequence: Synthetic oligonucleotide
  Antisense strand to SEQ ID NO: 531167
aaauugcuuagggaacugc

SEQ ID NO: 531169 - RNA, 19 nt, Artificial Sequence
  Description of Artificial Sequence: Synthetic oligonucleotide
  Sense strand starting at position 2249 of SEQ ID NO: 318027
gcaucuaucuuacuugaga

SEQ ID NO: 531170 - RNA, 19 nt, Artificial Sequence
  Description of Artificial Sequence: Synthetic oligonucleotide
  Antisense strand to SEQ ID NO: 531169
ucucaaguaagauagaugc

SEQ ID NO: 531171 - RNA, 19 nt, Artificial Sequence
  Description of Artificial Sequence: Synthetic oligonucleotide
  Sense strand starting at position 2390 of SEQ ID NO: 318027
gugggaaucuuacucaucu

SEQ ID NO: 531172 - RNA, 19 nt, Artificial Sequence
  Description of Artificial Sequence: Synthetic oligonucleotide
  Antisense strand to SEQ ID NO: 531171
agaugaguaagauucccac

SEQ ID NO: 531173 - RNA, 19 nt, Artificial Sequence
  Description of Artificial Sequence: Synthetic oligonucleotide
  Sense strand starting at position 2391 of SEQ ID NO: 318027
ugggaaucuuacucaucuu

SEQ ID NO: 531174 - RNA, 19 nt, Artificial Sequence
  Description of Artificial Sequence: Synthetic oligonucleotide
  Antisense strand to SEQ ID NO: 531173
aagaugaguaagauuccca

SEQ ID NO: 531175 - RNA, 19 nt, Artificial Sequence
  Description of Artificial Sequence: Synthetic oligonucleotide
  Sense strand starting at position 2475 of SEQ ID NO: 318027
uaggucugaccuugguaaa

SEQ ID NO: 531176 - RNA, 19 nt, Artificial Sequence
  Description of Artificial Sequence: Synthetic oligonucleotide
  Antisense strand to SEQ ID NO: 531175
uuuaccaaggucagaccua

SEQ ID NO: 531177 - RNA, 19 nt, Artificial Sequence
  Description of Artificial Sequence: Synthetic oligonucleotide
  Sense strand starting at position 2528 of SEQ ID NO: 318027
ucaagaagguuugugcaua

SEQ ID NO: 531178 - RNA, 19 nt, Artificial Sequence
  Description of Artificial Sequence: Synthetic oligonucleotide
  Antisense strand to SEQ ID NO: 531177
uaugcacaaaccuucuuga

SEQ ID NO: 531179 - RNA, 19 nt, Artificial Sequence
  Description of Artificial Sequence: Synthetic oligonucleotide
  Sense strand starting at position 2584 of SEQ ID NO: 318027
agaggugaguucccucagu

SEQ ID NO: 531180 - RNA, 19 nt, Artificial Sequence
  Description of Artificial Sequence: Synthetic oligonucleotide
  Antisense strand to SEQ ID NO: 531179
acugagggaacucaccucu

SEQ ID NO: 531181 - RNA, 19 nt, Artificial Sequence
  Description of Artificial Sequence: Synthetic oligonucleotide
  Sense strand starting at position 2607 of SEQ ID NO: 318027
cggugaagaucucuuggga

SEQ ID NO: 531182 - RNA, 19 nt, Artificial Sequence
  Description of Artificial Sequence: Synthetic oligonucleotide
  Antisense strand to SEQ ID NO: 531181
ucccaagagaucuucaccg

SEQ ID NO: 531183 - RNA, 19 nt, Artificial Sequence
  Description of Artificial Sequence: Synthetic oligonucleotide
  Sense strand starting at position 2703 of SEQ ID NO: 318027
aucagaacuucuuuggugu

SEQ ID NO: 531184 - RNA, 19 nt, Artificial Sequence
  Description of Artificial Sequence: Synthetic oligonucleotide
  Antisense strand to SEQ ID NO: 531183
acaccaaagaaguucugau

SEQ ID NO: 531185 - RNA, 19 nt, Artificial Sequence
  Description of Artificial Sequence: Synthetic oligonucleotide
  Sense strand starting at position 2798 of SEQ ID NO: 318027
uuaagauggcauugcuaug

SEQ ID NO: 531186 - RNA, 19 nt, Artificial Sequence
  Description of Artificial Sequence: Synthetic oligonucleotide
  Antisense strand to SEQ ID NO: 531185
cauagcaaugccaucuuaa

SEQ ID NO: 531187 - RNA, 19 nt, Artificial Sequence
  Description of Artificial Sequence: Synthetic oligonucleotide
  Sense strand starting at position 2803 of SEQ ID NO: 318027
auggcauugcuaugagaga

SEQ ID NO: 531188 - RNA, 19 nt, Artificial Sequence
  Description of Artificial Sequence: Synthetic oligonucleotide
  Antisense strand to SEQ ID NO: 531187
ucucucauagcaaugccau

SEQ ID NO: 531189 - RNA, 19 nt, Artificial Sequence
  Description of Artificial Sequence: Synthetic oligonucleotide
  Sense strand starting at position 2814 of SEQ ID NO: 318027
augagagauuagcuaaucu

SEQ ID NO: 531190 - RNA, 19 nt, Artificial Sequence
  Description of Artificial Sequence: Synthetic oligonucleotide
  Antisense strand to SEQ ID NO: 531189
agauuagcuaaucucucau

SEQ ID NO: 531191 - RNA, 19 nt, Artificial Sequence
  Description of Artificial Sequence: Synthetic oligonucleotide
  Sense strand starting at position 2888 of SEQ ID NO: 318027
ggaaaugccacuggauagu

SEQ ID NO: 531192 - RNA, 19 nt, Artificial Sequence
  Description of Artificial Sequence: Synthetic oligonucleotide
  Antisense strand to SEQ ID NO: 531191
acuauccaguggcauuucc

SEQ ID NO: 531193 - RNA, 19 nt, Artificial Sequence
  Description of Artificial Sequence: Synthetic oligonucleotide
  Sense strand starting at position 2996 of SEQ ID NO: 318027
aggccaguauaucugacaa

SEQ ID NO: 531194 - RNA, 19 nt, Artificial Sequence
  Description of Artificial Sequence: Synthetic oligonucleotide
  Antisense strand to SEQ ID NO: 531193
uugucagauauacuggccu

SEQ ID NO: 531195 - RNA, 19 nt, Artificial Sequence
  Description of Artificial Sequence: Synthetic oligonucleotide
  Sense strand starting at position 3009 of SEQ ID NO: 318027
ugacaaggguaucuaacua

SEQ ID NO: 531196 - RNA, 19 nt, Artificial Sequence
  Description of Artificial Sequence: Synthetic oligonucleotide
  Antisense strand to SEQ ID NO: 531195
uaguuagauacccuuguca

SEQ ID NO: 531197 - RNA, 19 nt, Artificial Sequence
  Description of Artificial Sequence: Synthetic oligonucleotide
  Sense strand starting at position 3409 of SEQ ID NO: 318027
agauacauaucugaggaca

SEQ ID NO: 531198 - RNA, 19 nt, Artificial Sequence
  Description of Artificial Sequence: Synthetic oligonucleotide
  Antisense strand to SEQ ID NO: 531197
uguccucagauauguaucu

SEQ ID NO: 531199 - RNA, 19 nt, Artificial Sequence
  Description of Artificial Sequence: Synthetic oligonucleotide
  Sense strand starting at position 3492 of SEQ ID NO: 318027
gggcucaguccauaacaga

SEQ ID NO: 531200 - RNA, 19 nt, Artificial Sequence
  Description of Artificial Sequence: Synthetic oligonucleotide
  Antisense strand to SEQ ID NO: 531199
ucuguuauggacugagccc

SEQ ID NO: 531201 - RNA, 19 nt, Artificial Sequence
  Description of Artificial Sequence: Synthetic oligonucleotide
  Sense strand starting at position 3506 of SEQ ID NO: 318027
acagaauugcauuauguga

SEQ ID NO: 531202 - RNA, 19 nt, Artificial Sequence
  Description of Artificial Sequence: Synthetic oligonucleotide
  Antisense strand to SEQ ID NO: 531201
ucacauaaugcaauucugu

SEQ ID NO: 531203 - RNA, 19 nt, Artificial Sequence
  Description of Artificial Sequence: Synthetic oligonucleotide
  Sense strand starting at position 3540 of SEQ ID NO: 318027
ggcugaggcauugaaauau

SEQ ID NO: 531204 - RNA, 19 nt, Artificial Sequence
  Description of Artificial Sequence: Synthetic oligonucleotide
  Antisense strand to SEQ ID NO: 531203
auauuucaaugccucagcc

SEQ ID NO: 531205 - RNA, 19 nt, Artificial Sequence
  Description of Artificial Sequence: Synthetic oligonucleotide
  Sense strand starting at position 3756 of SEQ ID NO: 318027
agcccucuuuaaguagaga

SEQ ID NO: 531206 - RNA, 19 nt, Artificial Sequence
  Description of Artificial Sequence: Synthetic oligonucleotide
  Antisense strand to SEQ ID NO: 531205
ucucuacuuaaagagggcu

SEQ ID NO: 531207 - RNA, 19 nt, Artificial Sequence
  Description of Artificial Sequence: Synthetic oligonucleotide
  Sense strand starting at position 3765 of SEQ ID NO: 318027
uaaguagagacuggguaua

SEQ ID NO: 531208 - RNA, 19 nt, Artificial Sequence
  Description of Artificial Sequence: Synthetic oligonucleotide
  Antisense strand to SEQ ID NO: 531207
uauacccagucucuacuua

SEQ ID NO: 531209 - RNA, 19 nt, Artificial Sequence
  Description of Artificial Sequence: Synthetic oligonucleotide
  Sense strand starting at position 3867 of SEQ ID NO: 318027
ggagcuguccuauacagca

SEQ ID NO: 531210 - RNA, 19 nt, Artificial Sequence
  Description of Artificial Sequence: Synthetic oligonucleotide
  Antisense strand to SEQ ID NO: 531209
ugcuguauaggacagcucc

SEQ ID NO: 531211 - RNA, 19 nt, Artificial Sequence
  Description of Artificial Sequence: Synthetic oligonucleotide
  Sense strand starting at position 3917 of SEQ ID NO: 318027
gugcuccuggcagagauaa

SEQ ID NO: 531212 - RNA, 19 nt, Artificial Sequence
  Description of Artificial Sequence: Synthetic oligonucleotide
  Antisense strand to SEQ ID NO: 531211
uuaucucugccaggagcac

SEQ ID NO: 531213 - RNA, 19 nt, Artificial Sequence
  Description of Artificial Sequence: Synthetic oligonucleotide
  Sense strand starting at position 82 of SEQ ID NO: 318028
ccuccucugcaaugaauga

SEQ ID NO: 531214 - RNA, 19 nt, Artificial Sequence
  Description of Artificial Sequence: Synthetic oligonucleotide
  Antisense strand to SEQ ID NO: 531213
ucauucauugcagaggagg

SEQ ID NO: 531215 - RNA, 19 nt, Artificial Sequence
  Description of Artificial Sequence: Synthetic oligonucleotide
  Sense strand starting at position 86 of SEQ ID NO: 318028
cucugcaaugaaugaaaga

SEQ ID NO: 531216 - RNA, 19 nt, Artificial Sequence
  Description of Artificial Sequence: Synthetic oligonucleotide
  Antisense strand to SEQ ID NO: 531215
ucuuucauucauugcagag

SEQ ID NO: 531217 - RNA, 19 nt, Artificial Sequence
  Description of Artificial Sequence: Synthetic oligonucleotide
  Sense strand starting at position 185 of SEQ ID NO: 318028
cguguuaggcacuaacaca

SEQ ID NO: 531218 - RNA, 19 nt, Artificial Sequence
  Description of Artificial Sequence: Synthetic oligonucleotide
  Antisense strand to SEQ ID NO: 531217
uguguuagugccuaacacg

SEQ ID NO: 531219 - RNA, 19 nt, Artificial Sequence
  Description of Artificial Sequence: Synthetic oligonucleotide
  Sense strand starting at position 405 of SEQ ID NO: 318028
gcgaacuuucccuagugga

SEQ ID NO: 531220 - RNA, 19 nt, Artificial Sequence
  Description of Artificial Sequence: Synthetic oligonucleotide
  Antisense strand to SEQ ID NO: 531219
uccacuagggaaaguucgc

SEQ ID NO: 531221 - RNA, 19 nt, Artificial Sequence
  Description of Artificial Sequence: Synthetic oligonucleotide
  Sense strand starting at position 421 of SEQ ID NO: 318028
ggagcuaucucccuaccag

SEQ ID NO: 531222 - RNA, 19 nt, Artificial Sequence
  Description of Artificial Sequence: Synthetic oligonucleotide
  Antisense strand to SEQ ID NO: 531221
cugguagggagauagcucc

SEQ ID NO: 531223 - RNA, 19 nt, Artificial Sequence
  Description of Artificial Sequence: Synthetic oligonucleotide
  Sense strand starting at position 572 of SEQ ID NO: 318028
gguguuauugcuucuguuu

SEQ ID NO: 531224 - RNA, 19 nt, Artificial Sequence
  Description of Artificial Sequence: Synthetic oligonucleotide
  Antisense strand to SEQ ID NO: 531223
aaacagaagcaauaacacc

SEQ ID NO: 531225 - RNA, 19 nt, Artificial Sequence
  Description of Artificial Sequence: Synthetic oligonucleotide
  Sense strand starting at position 573 of SEQ ID NO: 318028
guguuauugcuucuguuug

SEQ ID NO: 531226 - RNA, 19 nt, Artificial Sequence
  Description of Artificial Sequence: Synthetic oligonucleotide
  Antisense strand to SEQ ID NO: 531225
caaacagaagcaauaacac

SEQ ID NO: 531227 - RNA, 19 nt, Artificial Sequence
  Description of Artificial Sequence: Synthetic oligonucleotide
  Sense strand starting at position 666 of SEQ ID NO: 318028
gccuuugagaaguguaaca

SEQ ID NO: 531228 - RNA, 19 nt, Artificial Sequence
  Description of Artificial Sequence: Synthetic oligonucleotide
  Antisense strand to SEQ ID NO: 531227
uguuacacuucucaaaggc

SEQ ID NO: 531229 - RNA, 19 nt, Artificial Sequence
  Description of Artificial Sequence: Synthetic oligonucleotide
  Sense strand starting at position 834 of SEQ ID NO: 318028
aagguagaccucuguggau

SEQ ID NO: 531230 - RNA, 19 nt, Artificial Sequence
  Description of Artificial Sequence: Synthetic oligonucleotide
  Antisense strand to SEQ ID NO: 531229
auccacagaggucuaccuu

SEQ ID NO: 531231 - RNA, 19 nt, Artificial Sequence
  Description of Artificial Sequence: Synthetic oligonucleotide
  Sense strand starting at position 836 of SEQ ID NO: 318028
gguagaccucuguggauag

SEQ ID NO: 531232 - RNA, 19 nt, Artificial Sequence
  Description of Artificial Sequence: Synthetic oligonucleotide
  Antisense strand to SEQ ID NO: 531231
cuauccacagaggucuacc

SEQ ID NO: 531233 - RNA, 19 nt, Artificial Sequence
  Description of Artificial Sequence: Synthetic oligonucleotide
  Sense strand starting at position 1287 of SEQ ID NO: 318028
agcgaugguuccuccauuu

SEQ ID NO: 531234 - RNA, 19 nt, Artificial Sequence
  Description of Artificial Sequence: Synthetic oligonucleotide
  Antisense strand to SEQ ID NO: 531233
aaauggaggaaccaucgcu

SEQ ID NO: 531235 - RNA, 19 nt, Artificial Sequence
  Description of Artificial Sequence: Synthetic oligonucleotide
  Sense strand starting at position 1335 of SEQ ID NO: 318028
guaugugugcgugugugaa

SEQ ID NO: 531236 - RNA, 19 nt, Artificial Sequence
  Description of Artificial Sequence: Synthetic oligonucleotide
  Antisense strand to SEQ ID NO: 531235
uucacacacgcacacauac

SEQ ID NO: 531237 - RNA, 19 nt, Artificial Sequence
  Description of Artificial Sequence: Synthetic oligonucleotide
  Sense strand starting at position 2239 of SEQ ID NO: 318028
uggguucagcuguaaguca

SEQ ID NO: 531238 - RNA, 19 nt, Artificial Sequence
  Description of Artificial Sequence: Synthetic oligonucleotide
  Antisense strand to SEQ ID NO: 531237
ugacuuacagcugaaccca

SEQ ID NO: 531239 - RNA, 19 nt, Artificial Sequence
  Description of Artificial Sequence: Synthetic oligonucleotide
  Sense strand starting at position 2293 of SEQ ID NO: 318028
ccaccagcugcuugaucua

SEQ ID NO: 531240 - RNA, 19 nt, Artificial Sequence
  Description of Artificial Sequence: Synthetic oligonucleotide
  Antisense strand to SEQ ID NO: 531239
uagaucaagcagcuggugg

SEQ ID NO: 531241 - RNA, 19 nt, Artificial Sequence
  Description of Artificial Sequence: Synthetic oligonucleotide
  Sense strand starting at position 2300 of SEQ ID NO: 318028
cugcuugaucuaggucacu

SEQ ID NO: 531242 - RNA, 19 nt, Artificial Sequence
  Description of Artificial Sequence: Synthetic oligonucleotide
  Antisense strand to SEQ ID NO: 531241
agugaccuagaucaagcag

SEQ ID NO: 531243 - RNA, 19 nt, Artificial Sequence
  Description of Artificial Sequence: Synthetic oligonucleotide
  Sense strand starting at position 2410 of SEQ ID NO: 318028
agaaaucccuccuaggaaa

SEQ ID NO: 531244 - RNA, 19 nt, Artificial Sequence
  Description of Artificial Sequence: Synthetic oligonucleotide
  Antisense strand to SEQ ID NO: 531243
uuuccuaggagggauuucu

SEQ ID NO: 531245 - RNA, 19 nt, Artificial Sequence
  Description of Artificial Sequence: Synthetic oligonucleotide
  Sense strand starting at position 2544 of SEQ ID NO: 318028
ccugucuaccuuuacaagu

SEQ ID NO: 531246 - RNA, 19 nt, Artificial Sequence
  Description of Artificial Sequence: Synthetic oligonucleotide
  Antisense strand to SEQ ID NO: 531245
acuuguaaagguagacagg

SEQ ID NO: 531247 - RNA, 19 nt, Artificial Sequence
  Description of Artificial Sequence: Synthetic oligonucleotide
  Sense strand starting at position 2635 of SEQ ID NO: 318028
agucuauagcaucagaauc

SEQ ID NO: 531248 - RNA, 19 nt, Artificial Sequence
  Description of Artificial Sequence: Synthetic oligonucleotide
  Antisense strand to SEQ ID NO: 531247
gauucugaugcuauagacu

SEQ ID NO: 531249 - RNA, 19 nt, Artificial Sequence
  Description of Artificial Sequence: Synthetic oligonucleotide
  Sense strand starting at position 2691 of SEQ ID NO: 318028
gagcaauuacaugagucau

SEQ ID NO: 531250 - RNA, 19 nt, Artificial Sequence
  Description of Artificial Sequence: Synthetic oligonucleotide
  Antisense strand to SEQ ID NO: 531249
augacucauguaauugcuc

SEQ ID NO: 531251 - RNA, 19 nt, Artificial Sequence
  Description of Artificial Sequence: Synthetic oligonucleotide
  Sense strand starting at position 2810 of SEQ ID NO: 318028
agggcuucugcugaaauaa

SEQ ID NO: 531252 - RNA, 19 nt, Artificial Sequence
  Description of Artificial Sequence: Synthetic oligonucleotide
  Antisense strand to SEQ ID NO: 531251
uuauuucagcagaagcccu

SEQ ID NO: 531253 - RNA, 19 nt, Artificial Sequence
  Description of Artificial Sequence: Synthetic oligonucleotide
  Sense strand starting at position 2819 of SEQ ID NO: 318028
gcugaaauaaccuguagag

SEQ ID NO: 531254 - RNA, 19 nt, Artificial Sequence
  Description of Artificial Sequence: Synthetic oligonucleotide
  Antisense strand to SEQ ID NO: 531253
cucuacagguuauuucagc

SEQ ID NO: 531255 - RNA, 19 nt, Artificial Sequence
  Description of Artificial Sequence: Synthetic oligonucleotide
  Sense strand starting at position 2843 of SEQ ID NO: 318028
agcuguguucaggauagua

SEQ ID NO: 531256 - RNA, 19 nt, Artificial Sequence
  Description of Artificial Sequence: Synthetic oligonucleotide
  Antisense strand to SEQ ID NO: 531255
uacuauccugaacacagcu

SEQ ID NO: 531257 - RNA, 19 nt, Artificial Sequence
  Description of Artificial Sequence: Synthetic oligonucleotide
  Sense strand starting at position 2845 of SEQ ID NO: 318028
cuguguucaggauaguagu

SEQ ID NO: 531258 - RNA, 19 nt, Artificial Sequence
  Description of Artificial Sequence: Synthetic oligonucleotide
  Antisense strand to SEQ ID NO: 531257
acuacuauccugaacacag

SEQ ID NO: 531259 - RNA, 19 nt, Artificial Sequence
  Description of Artificial Sequence: Synthetic oligonucleotide
  Sense strand starting at position 2858 of SEQ ID NO: 318028
aguaguguuaaaugcaaag

SEQ ID NO: 531260 - RNA, 19 nt, Artificial Sequence
  Description of Artificial Sequence: Synthetic oligonucleotide
  Antisense strand to SEQ ID NO: 531259
cuuugcauuuaacacuacu

SEQ ID NO: 531261 - RNA, 19 nt, Artificial Sequence
  Description of Artificial Sequence: Synthetic oligonucleotide
  Sense strand starting at position 2996 of SEQ ID NO: 318028
uaagacuucugggauuaag

SEQ ID NO: 531262 - RNA, 19 nt, Artificial Sequence
  Description of Artificial Sequence: Synthetic oligonucleotide
  Antisense strand to SEQ ID NO: 531261
cuuaaucccagaagucuua

SEQ ID NO: 531263 - RNA, 19 nt, Artificial Sequence
  Description of Artificial Sequence: Synthetic oligonucleotide
  Sense strand starting at position 3006 of SEQ ID NO: 318028
gggauuaagucauaaagac

SEQ ID NO: 531264 - RNA, 19 nt, Artificial Sequence
  Description of Artificial Sequence: Synthetic oligonucleotide
  Antisense strand to SEQ ID NO: 531263
gucuuuaugacuuaauccc

SEQ ID NO: 531265 - RNA, 19 nt, Artificial Sequence
  Description of Artificial Sequence: Synthetic oligonucleotide
  Sense strand starting at position 3053 of SEQ ID NO: 318028
cuacaaacuugagugcuuu

SEQ ID NO: 531266 - RNA, 19 nt, Artificial Sequence
  Description of Artificial Sequence: Synthetic oligonucleotide
  Antisense strand to SEQ ID NO: 531265
aaagcacucaaguuuguag

SEQ ID NO: 531267 - RNA, 19 nt, Artificial Sequence
  Description of Artificial Sequence: Synthetic oligonucleotide
  Sense strand starting at position 3142 of SEQ ID NO: 318028
agucaacuuugucuuuagu

SEQ ID NO: 531268 - RNA, 19 nt, Artificial Sequence
  Description of Artificial Sequence: Synthetic oligonucleotide
  Antisense strand to SEQ ID NO: 531267
acuaaagacaaaguugacu

SEQ ID NO: 531269 - RNA, 19 nt, Artificial Sequence
  Description of Artificial Sequence: Synthetic oligonucleotide
  Sense strand starting at position 3191 of SEQ ID NO: 318028
uuugcuuugccauaugaau

SEQ ID NO: 531270 - RNA, 19 nt, Artificial Sequence
  Description of Artificial Sequence: Synthetic oligonucleotide
  Antisense strand to SEQ ID NO: 531269
auucauauggcaaagcaaa

SEQ ID NO: 531271 - RNA, 19 nt, Artificial Sequence
  Description of Artificial Sequence: Synthetic oligonucleotide
  Sense strand starting at position 3253 of SEQ ID NO: 318028
guauaucauguggacuuga

SEQ ID NO: 531272 - RNA, 19 nt, Artificial Sequence
  Description of Artificial Sequence: Synthetic oligonucleotide
  Antisense strand to SEQ ID NO: 531271
ucaaguccacaugauauac

SEQ ID NO: 531273 - RNA, 19 nt, Artificial Sequence
  Description of Artificial Sequence: Synthetic oligonucleotide
  Sense strand starting at position 3348 of SEQ ID NO: 318028
gaggucaaaugcuuuguga

SEQ ID NO: 531274 - RNA, 19 nt, Artificial Sequence
  Description of Artificial Sequence: Synthetic oligonucleotide
  Antisense strand to SEQ ID NO: 531273
ucacaaagcauuugaccuc

SEQ ID NO: 531275 - RNA, 19 nt, Artificial Sequence
  Description of Artificial Sequence: Synthetic oligonucleotide
  Sense strand starting at position 3350 of SEQ ID NO: 318028
ggucaaaugcuuugugauu

SEQ ID NO: 531276 - RNA, 19 nt, Artificial Sequence
  Description of Artificial Sequence: Synthetic oligonucleotide
  Antisense strand to SEQ ID NO: 531275
aaucacaaagcauuugacc

SEQ ID NO: 531277 - RNA, 19 nt, Artificial Sequence
  Description of Artificial Sequence: Synthetic oligonucleotide
  Sense strand starting at position 3351 of SEQ ID NO: 318028
gucaaaugcuuugugauuu

SEQ ID NO: 531278 - RNA, 19 nt, Artificial Sequence
  Description of Artificial Sequence: Synthetic oligonucleotide
  Antisense strand to SEQ ID NO: 531277
aaaucacaaagcauuugac

SEQ ID NO: 531279 - RNA, 19 nt, Artificial Sequence
  Description of Artificial Sequence: Synthetic oligonucleotide
  Sense strand starting at position 3359 of SEQ ID NO: 318028
cuuugugauuuccuaugca

SEQ ID NO: 531280 - RNA, 19 nt, Artificial Sequence
  Description of Artificial Sequence: Synthetic oligonucleotide
  Antisense strand to SEQ ID NO: 531279
ugcauaggaaaucacaaag

SEQ ID NO: 531281 - RNA, 19 nt, Artificial Sequence
  Description of Artificial Sequence: Synthetic oligonucleotide
  Sense strand starting at position 3362 of SEQ ID NO: 318028
ugugauuuccuaugcacuu

SEQ ID NO: 531282 - RNA, 19 nt, Artificial Sequence
  Description of Artificial Sequence: Synthetic oligonucleotide
  Antisense strand to SEQ ID NO: 531281
aagugcauaggaaaucaca

SEQ ID NO: 531283 - RNA, 19 nt, Artificial Sequence
  Description of Artificial Sequence: Synthetic oligonucleotide
  Sense strand starting at position 3363 of SEQ ID NO: 318028
gugauuuccuaugcacuuu

SEQ ID NO: 531284 - RNA, 19 nt, Artificial Sequence
  Description of Artificial Sequence: Synthetic oligonucleotide
  Antisense strand to SEQ ID NO: 531283
aaagugcauaggaaaucac

SEQ ID NO: 531285 - RNA, 19 nt, Artificial Sequence
  Description of Artificial Sequence: Synthetic oligonucleotide
  Sense strand starting at position 3488 of SEQ ID NO: 318028
guacaauaccuguguaggu

SEQ ID NO: 531286 - RNA, 19 nt, Artificial Sequence
  Description of Artificial Sequence: Synthetic oligonucleotide
  Antisense strand to SEQ ID NO: 531285
accuacacagguauuguac

SEQ ID NO: 531287 - RNA, 19 nt, Artificial Sequence
  Description of Artificial Sequence: Synthetic oligonucleotide
  Sense strand starting at position 3489 of SEQ ID NO: 318028
uacaauaccuguguaggua

SEQ ID NO: 531288 - RNA, 19 nt, Artificial Sequence
  Description of Artificial Sequence: Synthetic oligonucleotide
  Antisense strand to SEQ ID NO: 531287
uaccuacacagguauugua

SEQ ID NO: 531289 - RNA, 19 nt, Artificial Sequence
  Description of Artificial Sequence: Synthetic oligonucleotide
  Sense strand starting at position 3731 of SEQ ID NO: 318028
cuucuaaggucucugccaa

SEQ ID NO: 531290 - RNA, 19 nt, Artificial Sequence
  Description of Artificial Sequence: Synthetic oligonucleotide
  Antisense strand to SEQ ID NO: 531289
uuggcagagaccuuagaag

SEQ ID NO: 531291 - RNA, 19 nt, Artificial Sequence
  Description of Artificial Sequence: Synthetic oligonucleotide
  Sense strand starting at position 3752 of SEQ ID NO: 318028
uuaagagucucugauuuaa

SEQ ID NO: 531292 - RNA, 19 nt, Artificial Sequence
  Description of Artificial Sequence: Synthetic oligonucleotide
  Antisense strand to SEQ ID NO: 531291
uuaaaucagagacucuuaa

SEQ ID NO: 531293 - RNA, 19 nt, Artificial Sequence
  Description of Artificial Sequence: Synthetic oligonucleotide
  Sense strand starting at position 304 of SEQ ID NO: 318029
cgacucacuccagaugagu

SEQ ID NO: 531294 - RNA, 19 nt, Artificial Sequence
  Description of Artificial Sequence: Synthetic oligonucleotide
  Antisense strand to SEQ ID NO: 531293
acucaucuggagugagucg

SEQ ID NO: 531295 - RNA, 19 nt, Artificial Sequence
  Description of Artificial Sequence: Synthetic oligonucleotide
  Sense strand starting at position 565 of SEQ ID NO: 318029
aggagcugcuauucucuua

SEQ ID NO: 531296 - RNA, 19 nt, Artificial Sequence
  Description of Artificial Sequence: Synthetic oligonucleotide
  Antisense strand to SEQ ID NO: 531295
uaagagaauagcagcuccu

SEQ ID NO: 531297 - RNA, 19 nt, Artificial Sequence
  Description of Artificial Sequence: Synthetic oligonucleotide
  Sense strand starting at position 658 of SEQ ID NO: 318029
gagagccuuacgggaagua

SEQ ID NO: 531298 - RNA, 19 nt, Artificial Sequence
  Description of Artificial Sequence: Synthetic oligonucleotide
  Antisense strand to SEQ ID NO: 531297
uacuucccguaaggcucuc

SEQ ID NO: 531299 - RNA, 19 nt, Artificial Sequence
  Description of Artificial Sequence: Synthetic oligonucleotide
  Sense strand starting at position 667 of SEQ ID NO: 318029
acgggaaguagguacuaau

SEQ ID NO: 531300 - RNA, 19 nt, Artificial Sequence
  Description of Artificial Sequence: Synthetic oligonucleotide
  Antisense strand to SEQ ID NO: 531299
auuaguaccuacuucccgu

SEQ ID NO: 531301 - RNA, 19 nt, Artificial Sequence
  Description of Artificial Sequence: Synthetic oligonucleotide
  Sense strand starting at position 690 of SEQ ID NO: 318029
gcugcagggugauugaaau

SEQ ID NO: 531302 - RNA, 19 nt, Artificial Sequence
  Description of Artificial Sequence: Synthetic oligonucleotide
  Antisense strand to SEQ ID NO: 531301
auuucaaucacccugcagc

SEQ ID NO: 531303 - RNA, 19 nt, Artificial Sequence
  Description of Artificial Sequence: Synthetic oligonucleotide
  Sense strand starting at position 727 of SEQ ID NO: 318029
gggcuucuccacuacuaua

SEQ ID NO: 531304 - RNA, 19 nt, Artificial Sequence
  Description of Artificial Sequence: Synthetic oligonucleotide
  Antisense strand to SEQ ID NO: 531303
uauaguaguggagaagccc

SEQ ID NO: 531305 - RNA, 19 nt, Artificial Sequence
  Description of Artificial Sequence: Synthetic oligonucleotide
  Sense strand starting at position 745 of SEQ ID NO: 318029
aacuguuuacauggacagu

SEQ ID NO: 531306 - RNA, 19 nt, Artificial Sequence
  Description of Artificial Sequence: Synthetic oligonucleotide
  Antisense strand to SEQ ID NO: 531305
acuguccauguaaacaguu

SEQ ID NO: 531307 - RNA, 19 nt, Artificial Sequence
  Description of Artificial Sequence: Synthetic oligonucleotide
  Sense strand starting at position 781 of SEQ ID NO: 318029
gcaagaccugcaugcaauu

SEQ ID NO: 531308 - RNA, 19 nt, Artificial Sequence
  Description of Artificial Sequence: Synthetic oligonucleotide
  Antisense strand to SEQ ID NO: 531307
aauugcaugcaggucuugc

SEQ ID NO: 531309 - RNA, 19 nt, Artificial Sequence
  Description of Artificial Sequence: Synthetic oligonucleotide
  Sense strand starting at position 898 of SEQ ID NO: 318029
cccaguuaccuaggaauga

SEQ ID NO: 531310 - RNA, 19 nt, Artificial Sequence
  Description of Artificial Sequence: Synthetic oligonucleotide
  Antisense strand to SEQ ID NO: 531309
ucauuccuagguaacuggg

SEQ ID NO: 531311 - RNA, 19 nt, Artificial Sequence
  Description of Artificial Sequence: Synthetic oligonucleotide
  Sense strand starting at position 909 of SEQ ID NO: 318029
aggaaugacuuguuacaua

SEQ ID NO: 531312 - RNA, 19 nt, Artificial Sequence
  Description of Artificial Sequence: Synthetic oligonucleotide
  Antisense strand to SEQ ID NO: 531311
uauguaacaagucauuccu

SEQ ID NO: 531313 - RNA, 19 nt, Artificial Sequence
  Description of Artificial Sequence: Synthetic oligonucleotide
  Sense strand starting at position 934 of SEQ ID NO: 318029
ugccauuguguguuugcau

SEQ ID NO: 531314 - RNA, 19 nt, Artificial Sequence
  Description of Artificial Sequence: Synthetic oligonucleotide
  Antisense strand to SEQ ID NO: 531313
augcaaacacacaauggca

SEQ ID NO: 531315 - RNA, 19 nt, Artificial Sequence
  Description of Artificial Sequence: Synthetic oligonucleotide
  Sense strand starting at position 1047 of SEQ ID NO: 318029
ugggaugccuguuccgaga

SEQ ID NO: 531316 - RNA, 19 nt, Artificial Sequence
  Description of Artificial Sequence: Synthetic oligonucleotide
  Antisense strand to SEQ ID NO: 531315
ucucggaacaggcauccca

SEQ ID NO: 531317 - RNA, 19 nt, Artificial Sequence
  Description of Artificial Sequence: Synthetic oligonucleotide
  Sense strand starting at position 1077 of SEQ ID NO: 318029
auggcuuaccuuuguauuu

SEQ ID NO: 531318 - RNA, 19 nt, Artificial Sequence
  Description of Artificial Sequence: Synthetic oligonucleotide
  Antisense strand to SEQ ID NO: 531317
aaauacaaagguaagccau

SEQ ID NO: 531319 - RNA, 19 nt, Artificial Sequence
  Description of Artificial Sequence: Synthetic oligonucleotide
  Sense strand starting at position 1078 of SEQ ID NO: 318029
uggcuuaccuuuguauuua

SEQ ID NO: 531320 - RNA, 19 nt, Artificial Sequence
  Description of Artificial Sequence: Synthetic oligonucleotide
  Antisense strand to SEQ ID NO: 531319
uaaauacaaagguaagcca

SEQ ID NO: 531321 - RNA, 19 nt, Artificial Sequence
  Description of Artificial Sequence: Synthetic oligonucleotide
  Sense strand starting at position 1089 of SEQ ID NO: 318029
uguauuuacugucaacaug

SEQ ID NO: 531322 - RNA, 19 nt, Artificial Sequence
  Description of Artificial Sequence: Synthetic oligonucleotide
  Antisense strand to SEQ ID NO: 531321
cauguugacaguaaauaca

SEQ ID NO: 531323 - RNA, 19 nt, Artificial Sequence
  Description of Artificial Sequence: Synthetic oligonucleotide
  Sense strand starting at position 1192 of SEQ ID NO: 318029
aucugacaguaaucacagu

SEQ ID NO: 531324 - RNA, 19 nt, Artificial Sequence
  Description of Artificial Sequence: Synthetic oligonucleotide
  Antisense strand to SEQ ID NO: 531323
acugugauuacugucagau

SEQ ID NO: 531325 - RNA, 19 nt, Artificial Sequence
  Description of Artificial Sequence: Synthetic oligonucleotide
  Sense strand starting at position 1320 of SEQ ID NO: 318029
accugauggcagugauauu

SEQ ID NO: 531326 - RNA, 19 nt, Artificial Sequence
  Description of Artificial Sequence: Synthetic oligonucleotide
  Antisense strand to SEQ ID NO: 531325
aauaucacugccaucaggu

SEQ ID NO: 531327 - RNA, 19 nt, Artificial Sequence
  Description of Artificial Sequence: Synthetic oligonucleotide
  Sense strand starting at position 1394 of SEQ ID NO: 318029
uagcaauggcuuuaucagu

SEQ ID NO: 531328 - RNA, 19 nt, Artificial Sequence
  Description of Artificial Sequence: Synthetic oligonucleotide
  Antisense strand to SEQ ID NO: 531327
acugauaaagccauugcua

SEQ ID NO: 531329 - RNA, 19 nt, Artificial Sequence
  Description of Artificial Sequence: Synthetic oligonucleotide
  Sense strand starting at position 1399 of SEQ ID NO: 318029
auggcuuuaucaguugaac

SEQ ID NO: 531330 - RNA, 19 nt, Artificial Sequence
  Description of Artificial Sequence: Synthetic oligonucleotide
  Antisense strand to SEQ ID NO: 531329
guucaacugauaaagccau

SEQ ID NO: 531331 - RNA, 19 nt, Artificial Sequence
  Description of Artificial Sequence: Synthetic oligonucleotide
  Sense strand starting at position 1402 of SEQ ID NO: 318029
gcuuuaucaguugaacaac

SEQ ID NO: 531332 - RNA, 19 nt, Artificial Sequence
  Description of Artificial Sequence: Synthetic oligonucleotide
  Antisense strand to SEQ ID NO: 531331
guuguucaacugauaaagc

SEQ ID NO: 531333 - RNA, 19 nt, Artificial Sequence
  Description of Artificial Sequence: Synthetic oligonucleotide
  Sense strand starting at position 1420 of SEQ ID NO: 318029
ccaaguuagggcuaaauau

SEQ ID NO: 531334 - RNA, 19 nt, Artificial Sequence
  Description of Artificial Sequence: Synthetic oligonucleotide
  Antisense strand to SEQ ID NO: 531333
auauuuagcccuaacuugg

SEQ ID NO: 531335 - RNA, 19 nt, Artificial Sequence
  Description of Artificial Sequence: Synthetic oligonucleotide
  Sense strand starting at position 1563 of SEQ ID NO: 318029
gguaguauauaagcacaaa

SEQ ID NO: 531336 - RNA, 19 nt, Artificial Sequence
  Description of Artificial Sequence: Synthetic oligonucleotide
  Antisense strand to SEQ ID NO: 531335
uuugugcuuauauacuacc

SEQ ID NO: 531337 - RNA, 19 nt, Artificial Sequence
  Description of Artificial Sequence: Synthetic oligonucleotide
  Sense strand starting at position 1566 of SEQ ID NO: 318029
aguauauaagcacaaaugu

SEQ ID NO: 531338 - RNA, 19 nt, Artificial Sequence
  Description of Artificial Sequence: Synthetic oligonucleotide
  Antisense strand to SEQ ID NO: 531337
acauuugugcuuauauacu

SEQ ID NO: 531339 - RNA, 19 nt, Artificial Sequence
  Description of Artificial Sequence: Synthetic oligonucleotide
  Sense strand starting at position 1595 of SEQ ID NO: 318029
acauguaagagccagugau

SEQ ID NO: 531340 - RNA, 19 nt, Artificial Sequence
  Description of Artificial Sequence: Synthetic oligonucleotide
  Antisense strand to SEQ ID NO: 531339
aucacuggcucuuacaugu

SEQ ID NO: 531341 - RNA, 19 nt, Artificial Sequence
  Description of Artificial Sequence: Synthetic oligonucleotide
  Sense strand starting at position 1730 of SEQ ID NO: 318029
ccuccucugcaaugaauga

SEQ ID NO: 531342 - RNA, 19 nt, Artificial Sequence
  Description of Artificial Sequence: Synthetic oligonucleotide
  Antisense strand to SEQ ID NO: 531341
ucauucauugcagaggagg

SEQ ID NO: 531343 - RNA, 19 nt, Artificial Sequence
  Description of Artificial Sequence: Synthetic oligonucleotide
  Sense strand starting at position 1734 of SEQ ID NO: 318029
cucugcaaugaaugaaaga

SEQ ID NO: 531344 - RNA, 19 nt, Artificial Sequence
  Description of Artificial Sequence: Synthetic oligonucleotide
  Antisense strand to SEQ ID NO: 531343
ucuuucauucauugcagag

SEQ ID NO: 531345 - RNA, 19 nt, Artificial Sequence
  Description of Artificial Sequence: Synthetic oligonucleotide
  Sense strand starting at position 1833 of SEQ ID NO: 318029
cguguuaggcacuaacaca

SEQ ID NO: 531346 - RNA, 19 nt, Artificial Sequence
  Description of Artificial Sequence: Synthetic oligonucleotide
  Antisense strand to SEQ ID NO: 531345
uguguuagugccuaacacg

SEQ ID NO: 531347 - RNA, 19 nt, Artificial Sequence
  Description of Artificial Sequence: Synthetic oligonucleotide
  Sense strand starting at position 2053 of SEQ ID NO: 318029
gcgaacuuucccuagugga

SEQ ID NO: 531348 - RNA, 19 nt, Artificial Sequence
  Description of Artificial Sequence: Synthetic oligonucleotide
  Antisense strand to SEQ ID NO: 531347
uccacuagggaaaguucgc

SEQ ID NO: 531349 - RNA, 19 nt, Artificial Sequence
  Description of Artificial Sequence: Synthetic oligonucleotide
  Sense strand starting at position 2069 of SEQ ID NO: 318029
ggagcuaucucccuaccag

SEQ ID NO: 531350 - RNA, 19 nt, Artificial Sequence
  Description of Artificial Sequence: Synthetic oligonucleotide
  Antisense strand to SEQ ID NO: 531349
cugguagggagauagcucc

SEQ ID NO: 531351 - RNA, 19 nt, Artificial Sequence
  Description of Artificial Sequence: Synthetic oligonucleotide
  Sense strand starting at position 2201 of SEQ ID NO: 318029
guggacaugcuuugugauu

SEQ ID NO: 531352 - RNA, 19 nt, Artificial Sequence
  Description of Artificial Sequence: Synthetic oligonucleotide
  Antisense strand to SEQ ID NO: 531351
aaucacaaagcauguccac

SEQ ID NO: 531353 - RNA, 19 nt, Artificial Sequence
  Description of Artificial Sequence: Synthetic oligonucleotide
  Sense strand starting at position 2220 of SEQ ID NO: 318029
gguguuauugcuucuguuu

SEQ ID NO: 531354 - RNA, 19 nt, Artificial Sequence
  Description of Artificial Sequence: Synthetic oligonucleotide
  Antisense strand to SEQ ID NO: 531353
aaacagaagcaauaacacc

SEQ ID NO: 531355 - RNA, 19 nt, Artificial Sequence
  Description of Artificial Sequence: Synthetic oligonucleotide
  Sense strand starting at position 2221 of SEQ ID NO: 318029
guguuauugcuucuguuug

SEQ ID NO: 531356 - RNA, 19 nt, Artificial Sequence
  Description of Artificial Sequence: Synthetic oligonucleotide
  Antisense strand to SEQ ID NO: 531355
caaacagaagcaauaacac

SEQ ID NO: 531357 - RNA, 19 nt, Artificial Sequence
  Description of Artificial Sequence: Synthetic oligonucleotide
  Sense strand starting at position 2314 of SEQ ID NO: 318029
gccuuugagaaguguaaca

SEQ ID NO: 531358 - RNA, 19 nt, Artificial Sequence
  Description of Artificial Sequence: Synthetic oligonucleotide
  Antisense strand to SEQ ID NO: 531357
uguuacacuucucaaaggc

SEQ ID NO: 531359 - RNA, 19 nt, Artificial Sequence
  Description of Artificial Sequence: Synthetic oligonucleotide
  Sense strand starting at position 2482 of SEQ ID NO: 318029
aagguagaccucuguggau

SEQ ID NO: 531360 - RNA, 19 nt, Artificial Sequence
  Description of Artificial Sequence: Synthetic oligonucleotide
  Antisense strand to SEQ ID NO: 531359
auccacagaggucuaccuu

SEQ ID NO: 531361 - RNA, 19 nt, Artificial Sequence
  Description of Artificial Sequence: Synthetic oligonucleotide
  Sense strand starting at position 2484 of SEQ ID NO: 318029
gguagaccucuguggauag

SEQ ID NO: 531362 - RNA, 19 nt, Artificial Sequence
  Description of Artificial Sequence: Synthetic oligonucleotide
  Antisense strand to SEQ ID NO: 531361
cuauccacagaggucuacc

SEQ ID NO: 531363 - RNA, 19 nt, Artificial Sequence
  Description of Artificial Sequence: Synthetic oligonucleotide
  Sense strand starting at position 2935 of SEQ ID NO: 318029
agcgaugguuccuccauuu

SEQ ID NO: 531364 - RNA, 19 nt, Artificial Sequence
  Description of Artificial Sequence: Synthetic oligonucleotide
  Antisense strand to SEQ ID NO: 531363
aaauggaggaaccaucgcu

SEQ ID NO: 531365 - RNA, 19 nt, Artificial Sequence
  Description of Artificial Sequence: Synthetic oligonucleotide
  Sense strand starting at position 2983 of SEQ ID NO: 318029
guaugugugcgugugugaa

SEQ ID NO: 531366 - RNA, 19 nt, Artificial Sequence
  Description of Artificial Sequence: Synthetic oligonucleotide
  Antisense strand to SEQ ID NO: 531365
uucacacacgcacacauac

SEQ ID NO: 531367 - RNA, 19 nt, Artificial Sequence
  Description of Artificial Sequence: Synthetic oligonucleotide
  Sense strand starting at position 3887 of SEQ ID NO: 318029
uggguucagcuguaaguca

SEQ ID NO: 531368 - RNA, 19 nt, Artificial Sequence
  Description of Artificial Sequence: Synthetic oligonucleotide
  Antisense strand to SEQ ID NO: 531367
ugacuuacagcugaaccca

SEQ ID NO: 531369 - RNA, 19 nt, Artificial Sequence
  Description of Artificial Sequence: Synthetic oligonucleotide
  Sense strand starting at position 3941 of SEQ ID NO: 318029
ccaccagcugcuugaucua

SEQ ID NO: 531370 - RNA, 19 nt, Artificial Sequence
  Description of Artificial Sequence: Synthetic oligonucleotide
  Antisense strand to SEQ ID NO: 531369
uagaucaagcagcuggugg

SEQ ID NO: 531371 - RNA, 19 nt, Artificial Sequence
  Description of Artificial Sequence: Synthetic oligonucleotide
  Sense strand starting at position 3948 of SEQ ID NO: 318029
cugcuugaucuaggucacu

SEQ ID NO: 531372 - RNA, 19 nt, Artificial Sequence
  Description of Artificial Sequence: Synthetic oligonucleotide
  Antisense strand to SEQ ID NO: 531371
agugaccuagaucaagcag

SEQ ID NO: 531373 - RNA, 19 nt, Artificial Sequence
  Description of Artificial Sequence: Synthetic oligonucleotide
  Sense strand starting at position 23 of SEQ ID NO: 318030
cccaguuaccuaggaauga

SEQ ID NO: 531374 - RNA, 19 nt, Artificial Sequence
  Description of Artificial Sequence: Synthetic oligonucleotide
  Antisense strand to SEQ ID NO: 531373
ucauuccuagguaacuggg

SEQ ID NO: 531375 - RNA, 19 nt, Artificial Sequence
  Description of Artificial Sequence: Synthetic oligonucleotide
  Sense strand starting at position 34 of SEQ ID NO: 318030
aggaaugacuuguuacaua

SEQ ID NO: 531376 - RNA, 19 nt, Artificial Sequence
  Description of Artificial Sequence: Synthetic oligonucleotide
  Antisense strand to SEQ ID NO: 531375
uauguaacaagucauuccu

SEQ ID NO: 531377 - RNA, 19 nt, Artificial Sequence
  Description of Artificial Sequence: Synthetic oligonucleotide
  Sense strand starting at position 59 of SEQ ID NO: 318030
ugccauuguguguuugcau

SEQ ID NO: 531378 - RNA, 19 nt, Artificial Sequence
  Description of Artificial Sequence: Synthetic oligonucleotide
  Antisense strand to SEQ ID NO: 531377
augcaaacacacaauggca

SEQ ID NO: 531379 - RNA, 19 nt, Artificial Sequence
  Description of Artificial Sequence: Synthetic oligonucleotide
  Sense strand starting at position 172 of SEQ ID NO: 318030
ugggaugccuguuccgaga

SEQ ID NO: 531380 - RNA, 19 nt, Artificial Sequence
  Description of Artificial Sequence: Synthetic oligonucleotide
  Antisense strand to SEQ ID NO: 531379
ucucggaacaggcauccca

SEQ ID NO: 531381 - RNA, 19 nt, Artificial Sequence
  Description of Artificial Sequence: Synthetic oligonucleotide
  Sense strand starting at position 202 of SEQ ID NO: 318030
auggcuuaccuuuguauuu

SEQ ID NO: 531382 - RNA, 19 nt, Artificial Sequence
  Description of Artificial Sequence: Synthetic oligonucleotide
  Antisense strand to SEQ ID NO: 531381
aaauacaaagguaagccau

SEQ ID NO: 531383 - RNA, 19 nt, Artificial Sequence
  Description of Artificial Sequence: Synthetic oligonucleotide
  Sense strand starting at position 203 of SEQ ID NO: 318030
uggcuuaccuuuguauuua

SEQ ID NO: 531384 - RNA, 19 nt, Artificial Sequence
  Description of Artificial Sequence: Synthetic oligonucleotide
  Antisense strand to SEQ ID NO: 531383
uaaauacaaagguaagcca

SEQ ID NO: 531385 - RNA, 19 nt, Artificial Sequence
  Description of Artificial Sequence: Synthetic oligonucleotide
  Sense strand starting at position 317 of SEQ ID NO: 318030
aucugacaguaaucacagu

SEQ ID NO: 531386 - RNA, 19 nt, Artificial Sequence
  Description of Artificial Sequence: Synthetic oligonucleotide
  Antisense strand to SEQ ID NO: 531385
acugugauuacugucagau

SEQ ID NO: 531387 - RNA, 19 nt, Artificial Sequence
  Description of Artificial Sequence: Synthetic oligonucleotide
  Sense strand starting at position 445 of SEQ ID NO: 318030
accugauggcagugauauu

SEQ ID NO: 531388 - RNA, 19 nt, Artificial Sequence
  Description of Artificial Sequence: Synthetic oligonucleotide
  Antisense strand to SEQ ID NO: 531387
aauaucacugccaucaggu

SEQ ID NO: 531389 - RNA, 19 nt, Artificial Sequence
  Description of Artificial Sequence: Synthetic oligonucleotide
  Sense strand starting at position 519 of SEQ ID NO: 318030
uagcaauggcuuuaucagu

SEQ ID NO: 531390 - RNA, 19 nt, Artificial Sequence
  Description of Artificial Sequence: Synthetic oligonucleotide
  Antisense strand to SEQ ID NO: 531389
acugauaaagccauugcua

SEQ ID NO: 531391 - RNA, 19 nt, Artificial Sequence
  Description of Artificial Sequence: Synthetic oligonucleotide
  Sense strand starting at position 524 of SEQ ID NO: 318030
auggcuuuaucaguugaac

SEQ ID NO: 531392 - RNA, 19 nt, Artificial Sequence
  Description of Artificial Sequence: Synthetic oligonucleotide
  Antisense strand to SEQ ID NO: 531391
guucaacugauaaagccau

SEQ ID NO: 531393 - RNA, 19 nt, Artificial Sequence
  Description of Artificial Sequence: Synthetic oligonucleotide
  Sense strand starting at position 527 of SEQ ID NO: 318030
gcuuuaucaguugaacaac

SEQ ID NO: 531394 - RNA, 19 nt, Artificial Sequence
  Description of Artificial Sequence: Synthetic oligonucleotide
  Antisense strand to SEQ ID NO: 531393
guuguucaacugauaaagc

SEQ ID NO: 531395 - RNA, 19 nt, Artificial Sequence
  Description of Artificial Sequence: Synthetic oligonucleotide
  Sense strand starting at position 545 of SEQ ID NO: 318030
ccaaguuagggcuaaauau

SEQ ID NO: 531396 - RNA, 19 nt, Artificial Sequence
  Description of Artificial Sequence: Synthetic oligonucleotide
  Antisense strand to SEQ ID NO: 531395
auauuuagcccuaacuugg

SEQ ID NO: 531397 - RNA, 19 nt, Artificial Sequence
  Description of Artificial Sequence: Synthetic oligonucleotide
  Sense strand starting at position 688 of SEQ ID NO: 318030
gguaguauauaagcacaaa

SEQ ID NO: 531398 - RNA, 19 nt, Artificial Sequence
  Description of Artificial Sequence: Synthetic oligonucleotide
  Antisense strand to SEQ ID NO: 531397
uuugugcuuauauacuacc

SEQ ID NO: 531399 - RNA, 19 nt, Artificial Sequence
  Description of Artificial Sequence: Synthetic oligonucleotide
  Sense strand starting at position 691 of SEQ ID NO: 318030
aguauauaagcacaaaugu

SEQ ID NO: 531400 - RNA, 19 nt, Artificial Sequence
  Description of Artificial Sequence: Synthetic oligonucleotide
  Antisense strand to SEQ ID NO: 531399
acauuugugcuuauauacu

SEQ ID NO: 531401 - RNA, 19 nt, Artificial Sequence
  Description of Artificial Sequence: Synthetic oligonucleotide
  Sense strand starting at position 720 of SEQ ID NO: 318030
acauguaagagccagugau

SEQ ID NO: 531402 - RNA, 19 nt, Artificial Sequence
  Description of Artificial Sequence: Synthetic oligonucleotide
  Antisense strand to SEQ ID NO: 531401
aucacuggcucuuacaugu

SEQ ID NO: 531403 - RNA, 19 nt, Artificial Sequence
  Description of Artificial Sequence: Synthetic oligonucleotide
  Sense strand starting at position 855 of SEQ ID NO: 318030
ccuccucugcaaugaauga

SEQ ID NO: 531404 - RNA, 19 nt, Artificial Sequence
  Description of Artificial Sequence: Synthetic oligonucleotide
  Antisense strand to SEQ ID NO: 531403
ucauucauugcagaggagg

SEQ ID NO: 531405 - RNA, 19 nt, Artificial Sequence
  Description of Artificial Sequence: Synthetic oligonucleotide
  Sense strand starting at position 859 of SEQ ID NO: 318030
cucugcaaugaaugaaaga

SEQ ID NO: 531406 - RNA, 19 nt, Artificial Sequence
  Description of Artificial Sequence: Synthetic oligonucleotide
  Antisense strand to SEQ ID NO: 531405
ucuuucauucauugcagag

SEQ ID NO: 531407 - RNA, 19 nt, Artificial Sequence
  Description of Artificial Sequence: Synthetic oligonucleotide
  Sense strand starting at position 958 of SEQ ID NO: 318030
cguguuaggcacuaacaca

SEQ ID NO: 531408 - RNA, 19 nt, Artificial Sequence
  Description of Artificial Sequence: Synthetic oligonucleotide
  Antisense strand to SEQ ID NO: 531407
uguguuagugccuaacacg

SEQ ID NO: 531409 - RNA, 19 nt, Artificial Sequence
  Description of Artificial Sequence: Synthetic oligonucleotide
  Sense strand starting at position 1178 of SEQ ID NO: 318030
gcgaacuuucccuagugga

SEQ ID NO: 531410 - RNA, 19 nt, Artificial Sequence
  Description of Artificial Sequence: Synthetic oligonucleotide
  Antisense strand to SEQ ID NO: 531409
uccacuagggaaaguucgc

SEQ ID NO: 531411 - RNA, 19 nt, Artificial Sequence
  Description of Artificial Sequence: Synthetic oligonucleotide
  Sense strand starting at position 1194 of SEQ ID NO: 318030
ggagcuaucucccuaccag

SEQ ID NO: 531412 - RNA, 19 nt, Artificial Sequence
  Description of Artificial Sequence: Synthetic oligonucleotide
  Antisense strand to SEQ ID NO: 531411
cugguagggagauagcucc

SEQ ID NO: 531413 - RNA, 19 nt, Artificial Sequence
  Description of Artificial Sequence: Synthetic oligonucleotide
  Sense strand starting at position 1345 of SEQ ID NO: 318030
gguguuauugcuucuguuu

SEQ ID NO: 531414 - RNA, 19 nt, Artificial Sequence
  Description of Artificial Sequence: Synthetic oligonucleotide
  Antisense strand to SEQ ID NO: 531413
aaacagaagcaauaacacc

SEQ ID NO: 531415 - RNA, 19 nt, Artificial Sequence
  Description of Artificial Sequence: Synthetic oligonucleotide
  Sense strand starting at position 1346 of SEQ ID NO: 318030
guguuauugcuucuguuug

SEQ ID NO: 531416 - RNA, 19 nt, Artificial Sequence
  Description of Artificial Sequence: Synthetic oligonucleotide
  Antisense strand to SEQ ID NO: 531415
caaacagaagcaauaacac

SEQ ID NO: 531417 - RNA, 19 nt, Artificial Sequence
  Description of Artificial Sequence: Synthetic oligonucleotide
  Sense strand starting at position 1439 of SEQ ID NO: 318030
gccuuugagaaguguaaca

SEQ ID NO: 531418 - RNA, 19 nt, Artificial Sequence
  Description of Artificial Sequence: Synthetic oligonucleotide
  Antisense strand to SEQ ID NO: 531417
uguuacacuucucaaaggc

SEQ ID NO: 531419 - RNA, 19 nt, Artificial Sequence
  Description of Artificial Sequence: Synthetic oligonucleotide
  Sense strand starting at position 1607 of SEQ ID NO: 318030
aagguagaccucuguggau

SEQ ID NO: 531420 - RNA, 19 nt, Artificial Sequence
  Description of Artificial Sequence: Synthetic oligonucleotide
  Antisense strand to SEQ ID NO: 531419
auccacagaggucuaccuu

SEQ ID NO: 531421 - RNA, 19 nt, Artificial Sequence
  Description of Artificial Sequence: Synthetic oligonucleotide
  Sense strand starting at position 1609 of SEQ ID NO: 318030
gguagaccucuguggauag

SEQ ID NO: 531422 - RNA, 19 nt, Artificial Sequence
  Description of Artificial Sequence: Synthetic oligonucleotide
  Antisense strand to SEQ ID NO: 531421
cuauccacagaggucuacc

SEQ ID NO: 531423 - RNA, 19 nt, Artificial Sequence
  Description of Artificial Sequence: Synthetic oligonucleotide
  Sense strand starting at position 2060 of SEQ ID NO: 318030
agcgaugguuccuccauuu

SEQ ID NO: 531424 - RNA, 19 nt, Artificial Sequence
  Description of Artificial Sequence: Synthetic oligonucleotide
  Antisense strand to SEQ ID NO: 531423
aaauggaggaaccaucgcu

SEQ ID NO: 531425 - RNA, 19 nt, Artificial Sequence
  Description of Artificial Sequence: Synthetic oligonucleotide
  Sense strand starting at position 2108 of SEQ ID NO: 318030
guaugugugcgugugugaa

SEQ ID NO: 531426 - RNA, 19 nt, Artificial Sequence
  Description of Artificial Sequence: Synthetic oligonucleotide
  Antisense strand to SEQ ID NO: 531425
uucacacacgcacacauac

SEQ ID NO: 531427 - RNA, 19 nt, Artificial Sequence
  Description of Artificial Sequence: Synthetic oligonucleotide
  Sense strand starting at position 3012 of SEQ ID NO: 318030
uggguucagcuguaaguca

SEQ ID NO: 531428 - RNA, 19 nt, Artificial Sequence
  Description of Artificial Sequence: Synthetic oligonucleotide
  Antisense strand to SEQ ID NO: 531427
ugacuuacagcugaaccca

SEQ ID NO: 531429 - RNA, 19 nt, Artificial Sequence
  Description of Artificial Sequence: Synthetic oligonucleotide
  Sense strand starting at position 3073 of SEQ ID NO: 318030
cugcuugaucuaggucacu

SEQ ID NO: 531430 - RNA, 19 nt, Artificial Sequence
  Description of Artificial Sequence: Synthetic oligonucleotide
  Antisense strand to SEQ ID NO: 531429
agugaccuagaucaagcag

SEQ ID NO: 531431 - RNA, 19 nt, Artificial Sequence
  Description of Artificial Sequence: Synthetic oligonucleotide
  Sense strand starting at position 3183 of SEQ ID NO: 318030
agaaaucccuccuaggaaa

SEQ ID NO: 531432 - RNA, 19 nt, Artificial Sequence
  Description of Artificial Sequence: Synthetic oligonucleotide
  Antisense strand to SEQ ID NO: 531431
uuuccuaggagggauuucu

SEQ ID NO: 531433 - RNA, 19 nt, Artificial Sequence
  Description of Artificial Sequence: Synthetic oligonucleotide
  Sense strand starting at position 3317 of SEQ ID NO: 318030
ccugucuaccuuuacaagu

SEQ ID NO: 531434 - RNA, 19 nt, Artificial Sequence
  Description of Artificial Sequence: Synthetic oligonucleotide
  Antisense strand to SEQ ID NO: 531433
acuuguaaagguagacagg

SEQ ID NO: 531435 - RNA, 19 nt, Artificial Sequence
  Description of Artificial Sequence: Synthetic oligonucleotide
  Sense strand starting at position 3408 of SEQ ID NO: 318030
agucuauagcaucagaauc

SEQ ID NO: 531436 - RNA, 19 nt, Artificial Sequence
  Description of Artificial Sequence: Synthetic oligonucleotide
  Antisense strand to SEQ ID NO: 531435
gauucugaugcuauagacu

SEQ ID NO: 531437 - RNA, 19 nt, Artificial Sequence
  Description of Artificial Sequence: Synthetic oligonucleotide
  Sense strand starting at position 3464 of SEQ ID NO: 318030
gagcaauuacaugagucau

SEQ ID NO: 531438 - RNA, 19 nt, Artificial Sequence
  Description of Artificial Sequence: Synthetic oligonucleotide
  Antisense strand to SEQ ID NO: 531437
augacucauguaauugcuc

SEQ ID NO: 531439 - RNA, 19 nt, Artificial Sequence
  Description of Artificial Sequence: Synthetic oligonucleotide
  Sense strand starting at position 3583 of SEQ ID NO: 318030
agggcuucugcugaaauaa

SEQ ID NO: 531440 - RNA, 19 nt, Artificial Sequence
  Description of Artificial Sequence: Synthetic oligonucleotide
  Antisense strand to SEQ ID NO: 531439
uuauuucagcagaagcccu

SEQ ID NO: 531441 - RNA, 19 nt, Artificial Sequence
  Description of Artificial Sequence: Synthetic oligonucleotide
  Sense strand starting at position 3592 of SEQ ID NO: 318030
gcugaaauaaccuguagag

SEQ ID NO: 531442 - RNA, 19 nt, Artificial Sequence
  Description of Artificial Sequence: Synthetic oligonucleotide
  Antisense strand to SEQ ID NO: 531441
cucuacagguuauuucagc

SEQ ID NO: 531443 - RNA, 19 nt, Artificial Sequence
  Description of Artificial Sequence: Synthetic oligonucleotide
  Sense strand starting at position 3616 of SEQ ID NO: 318030
agcuguguucaggauagua

SEQ ID NO: 531444 - RNA, 19 nt, Artificial Sequence
  Description of Artificial Sequence: Synthetic oligonucleotide
  Antisense strand to SEQ ID NO: 531443
uacuauccugaacacagcu

SEQ ID NO: 531445 - RNA, 19 nt, Artificial Sequence
  Description of Artificial Sequence: Synthetic oligonucleotide
  Sense strand starting at position 3618 of SEQ ID NO: 318030
cuguguucaggauaguagu

SEQ ID NO: 531446 - RNA, 19 nt, Artificial Sequence
  Description of Artificial Sequence: Synthetic oligonucleotide
  Antisense strand to SEQ ID NO: 531445
acuacuauccugaacacag

SEQ ID NO: 531447 - RNA, 19 nt, Artificial Sequence
  Description of Artificial Sequence: Synthetic oligonucleotide
  Sense strand starting at position 3631 of SEQ ID NO: 318030
aguaguguuaaaugcaaag

SEQ ID NO: 531448 - RNA, 19 nt, Artificial Sequence
  Description of Artificial Sequence: Synthetic oligonucleotide
  Antisense strand to SEQ ID NO: 531447
cuuugcauuuaacacuacu

SEQ ID NO: 531449 - RNA, 19 nt, Artificial Sequence
  Description of Artificial Sequence: Synthetic oligonucleotide
  Sense strand starting at position 3826 of SEQ ID NO: 318030
cuacaaacuugagugcuuu

SEQ ID NO: 531450 - RNA, 19 nt, Artificial Sequence
  Description of Artificial Sequence: Synthetic oligonucleotide
  Antisense strand to SEQ ID NO: 531449
aaagcacucaaguuuguag

SEQ ID NO: 531451 - RNA, 19 nt, Artificial Sequence
  Description of Artificial Sequence: Synthetic oligonucleotide
  Sense strand starting at position 3964 of SEQ ID NO: 318030
uuugcuuugccauaugaau

SEQ ID NO: 531452 - RNA, 19 nt, Artificial Sequence
  Description of Artificial Sequence: Synthetic oligonucleotide
  Antisense strand to SEQ ID NO: 531451
auucauauggcaaagcaaa

SEQ ID NO: 531453 - RNA, 19 nt, Artificial Sequence
  Description of Artificial Sequence: Synthetic oligonucleotide
  Sense strand starting at position 286 of SEQ ID NO: 318031
ggguucucuaguggaggua

SEQ ID NO: 531454 - RNA, 19 nt, Artificial Sequence
  Description of Artificial Sequence: Synthetic oligonucleotide
  Antisense strand to SEQ ID NO: 531453
uaccuccacuagagaaccc

SEQ ID NO: 531455 - RNA, 19 nt, Artificial Sequence
  Description of Artificial Sequence: Synthetic oligonucleotide
  Sense strand starting at position 348 of SEQ ID NO: 318031
ccugacaaagcuuguccaa

SEQ ID NO: 531456 - RNA, 19 nt, Artificial Sequence
  Description of Artificial Sequence: Synthetic oligonucleotide
  Antisense strand to SEQ ID NO: 531455
uuggacaagcuuugucagg

SEQ ID NO: 531457 - RNA, 19 nt, Artificial Sequence
  Description of Artificial Sequence: Synthetic oligonucleotide
  Sense strand starting at position 350 of SEQ ID NO: 318031
ugacaaagcuuguccaaag

SEQ ID NO: 531458 - RNA, 19 nt, Artificial Sequence
  Description of Artificial Sequence: Synthetic oligonucleotide
  Antisense strand to SEQ ID NO: 531457
cuuuggacaagcuuuguca

SEQ ID NO: 531459 - RNA, 19 nt, Artificial Sequence
  Description of Artificial Sequence: Synthetic oligonucleotide
  Sense strand starting at position 719 of SEQ ID NO: 318031
ugucuuaggcccgagucaa

SEQ ID NO: 531460 - RNA, 19 nt, Artificial Sequence
  Description of Artificial Sequence: Synthetic oligonucleotide
  Antisense strand to SEQ ID NO: 531459
uugacucgggccuaagaca

SEQ ID NO: 531461 - RNA, 19 nt, Artificial Sequence
  Description of Artificial Sequence: Synthetic oligonucleotide
  Sense strand starting at position 740 of SEQ ID NO: 318031
acaaucuugcugugugacu

SEQ ID NO: 531462 - RNA, 19 nt, Artificial Sequence
  Description of Artificial Sequence: Synthetic oligonucleotide
  Antisense strand to SEQ ID NO: 531461
agucacacagcaagauugu

SEQ ID NO: 531463 - RNA, 19 nt, Artificial Sequence
  Description of Artificial Sequence: Synthetic oligonucleotide
  Sense strand starting at position 742 of SEQ ID NO: 318031
aaucuugcugugugacuga

SEQ ID NO: 531464 - RNA, 19 nt, Artificial Sequence
  Description of Artificial Sequence: Synthetic oligonucleotide
  Antisense strand to SEQ ID NO: 531463
ucagucacacagcaagauu

SEQ ID NO: 531465 - RNA, 19 nt, Artificial Sequence
  Description of Artificial Sequence: Synthetic oligonucleotide
  Sense strand starting at position 747 of SEQ ID NO: 318031
ugcugugugacugaugcua

SEQ ID NO: 531466 - RNA, 19 nt, Artificial Sequence
  Description of Artificial Sequence: Synthetic oligonucleotide
  Antisense strand to SEQ ID NO: 531465
uagcaucagucacacagca

SEQ ID NO: 531467 - RNA, 19 nt, Artificial Sequence
  Description of Artificial Sequence: Synthetic oligonucleotide
  Sense strand starting at position 760 of SEQ ID NO: 318031
augcuaaucccugguuuga

SEQ ID NO: 531468 - RNA, 19 nt, Artificial Sequence
  Description of Artificial Sequence: Synthetic oligonucleotide
  Antisense strand to SEQ ID NO: 531467
ucaaaccagggauuagcau

SEQ ID NO: 531469 - RNA, 19 nt, Artificial Sequence
  Description of Artificial Sequence: Synthetic oligonucleotide
  Sense strand starting at position 958 of SEQ ID NO: 318031
gguggucagugaucauguu

SEQ ID NO: 531470 - RNA, 19 nt, Artificial Sequence
  Description of Artificial Sequence: Synthetic oligonucleotide
  Antisense strand to SEQ ID NO: 531469
aacaugaucacugaccacc

SEQ ID NO: 531471 - RNA, 19 nt, Artificial Sequence
  Description of Artificial Sequence: Synthetic oligonucleotide
  Sense strand starting at position 959 of SEQ ID NO: 318031
guggucagugaucauguua

SEQ ID NO: 531472 - RNA, 19 nt, Artificial Sequence
  Description of Artificial Sequence: Synthetic oligonucleotide
  Antisense strand to SEQ ID NO: 531471
uaacaugaucacugaccac

SEQ ID NO: 531473 - RNA, 19 nt, Artificial Sequence
  Description of Artificial Sequence: Synthetic oligonucleotide
  Sense strand starting at position 1065 of SEQ ID NO: 318031
cagagcaagugccugauaa

SEQ ID NO: 531474 - RNA, 19 nt, Artificial Sequence
  Description of Artificial Sequence: Synthetic oligonucleotide
  Antisense strand to SEQ ID NO: 531473
uuaucaggcacuugcucug

SEQ ID NO: 531475 - RNA, 19 nt, Artificial Sequence
  Description of Artificial Sequence: Synthetic oligonucleotide
  Sense strand starting at position 1066 of SEQ ID NO: 318031
agagcaagugccugauaac

SEQ ID NO: 531476 - RNA, 19 nt, Artificial Sequence
  Description of Artificial Sequence: Synthetic oligonucleotide
  Antisense strand to SEQ ID NO: 531475
guuaucaggcacuugcucu

SEQ ID NO: 531477 - RNA, 19 nt, Artificial Sequence
  Description of Artificial Sequence: Synthetic oligonucleotide
  Sense strand starting at position 1067 of SEQ ID NO: 318031
gagcaagugccugauaaca

SEQ ID NO: 531478 - RNA, 19 nt, Artificial Sequence
  Description of Artificial Sequence: Synthetic oligonucleotide
  Antisense strand to SEQ ID NO: 531477
uguuaucaggcacuugcuc

SEQ ID NO: 531479 - RNA, 19 nt, Artificial Sequence
  Description of Artificial Sequence: Synthetic oligonucleotide
  Sense strand starting at position 1144 of SEQ ID NO: 318031
cagccagaccucugagcuu

SEQ ID NO: 531480 - RNA, 19 nt, Artificial Sequence
  Description of Artificial Sequence: Synthetic oligonucleotide
  Antisense strand to SEQ ID NO: 531479
aagcucagaggucuggcug

SEQ ID NO: 531481 - RNA, 19 nt, Artificial Sequence
  Description of Artificial Sequence: Synthetic oligonucleotide
  Sense strand starting at position 1232 of SEQ ID NO: 318031
gcucccugagggcaaauau

SEQ ID NO: 531482 - RNA, 19 nt, Artificial Sequence
  Description of Artificial Sequence: Synthetic oligonucleotide
  Antisense strand to SEQ ID NO: 531481
auauuugcccucagggagc

SEQ ID NO: 531483 - RNA, 19 nt, Artificial Sequence
  Description of Artificial Sequence: Synthetic oligonucleotide
  Sense strand starting at position 1291 of SEQ ID NO: 318031
guggcaguccuauaaguag

SEQ ID NO: 531484 - RNA, 19 nt, Artificial Sequence
  Description of Artificial Sequence: Synthetic oligonucleotide
  Antisense strand to SEQ ID NO: 531483
cuacuuauaggacugccac

SEQ ID NO: 531485 - RNA, 19 nt, Artificial Sequence
  Description of Artificial Sequence: Synthetic oligonucleotide
  Sense strand starting at position 2075 of SEQ ID NO: 318031
gaccaaucaccgggcagaa

SEQ ID NO: 531486 - RNA, 19 nt, Artificial Sequence
  Description of Artificial Sequence: Synthetic oligonucleotide
  Antisense strand to SEQ ID NO: 531485
uucugcccggugauugguc

SEQ ID NO: 531487 - RNA, 19 nt, Artificial Sequence
  Description of Artificial Sequence: Synthetic oligonucleotide
  Sense strand starting at position 2103 of SEQ ID NO: 318031
gccgucuucccauuagucu

SEQ ID NO: 531488 - RNA, 19 nt, Artificial Sequence
  Description of Artificial Sequence: Synthetic oligonucleotide
  Antisense strand to SEQ ID NO: 531487
agacuaaugggaagacggc

SEQ ID NO: 531489 - RNA, 19 nt, Artificial Sequence
  Description of Artificial Sequence: Synthetic oligonucleotide
  Sense strand starting at position 2104 of SEQ ID NO: 318031
ccgucuucccauuagucuu

SEQ ID NO: 531490 - RNA, 19 nt, Artificial Sequence
  Description of Artificial Sequence: Synthetic oligonucleotide
  Antisense strand to SEQ ID NO: 531489
aagacuaaugggaagacgg

SEQ ID NO: 531491 - RNA, 19 nt, Artificial Sequence
  Description of Artificial Sequence: Synthetic oligonucleotide
  Sense strand starting at position 2252 of SEQ ID NO: 318031
gcuuucguaggauaccaaa

SEQ ID NO: 531492 - RNA, 19 nt, Artificial Sequence
  Description of Artificial Sequence: Synthetic oligonucleotide
  Antisense strand to SEQ ID NO: 531491
uuugguauccuacgaaagc

SEQ ID NO: 531493 - RNA, 19 nt, Artificial Sequence
  Description of Artificial Sequence: Synthetic oligonucleotide
  Sense strand starting at position 2333 of SEQ ID NO: 318031
ggaggccgaauaugugauu

SEQ ID NO: 531494 - RNA, 19 nt, Artificial Sequence
  Description of Artificial Sequence: Synthetic oligonucleotide
  Antisense strand to SEQ ID NO: 531493
aaucacauauucggccucc

SEQ ID NO: 531495 - RNA, 19 nt, Artificial Sequence
  Description of Artificial Sequence: Synthetic oligonucleotide
  Sense strand starting at position 2339 of SEQ ID NO: 318031
cgaauaugugauuggguga

SEQ ID NO: 531496 - RNA, 19 nt, Artificial Sequence
  Description of Artificial Sequence: Synthetic oligonucleotide
  Antisense strand to SEQ ID NO: 531495
ucacccaaucacauauucg

SEQ ID NO: 531497 - RNA, 19 nt, Artificial Sequence
  Description of Artificial Sequence: Synthetic oligonucleotide
  Sense strand starting at position 2340 of SEQ ID NO: 318031
gaauaugugauugggugaa

SEQ ID NO: 531498 - RNA, 19 nt, Artificial Sequence
  Description of Artificial Sequence: Synthetic oligonucleotide
  Antisense strand to SEQ ID NO: 531497
uucacccaaucacauauuc

SEQ ID NO: 531499 - RNA, 19 nt, Artificial Sequence
  Description of Artificial Sequence: Synthetic oligonucleotide
  Sense strand starting at position 2342 of SEQ ID NO: 318031
auaugugauugggugaaga

SEQ ID NO: 531500 - RNA, 19 nt, Artificial Sequence
  Description of Artificial Sequence: Synthetic oligonucleotide
  Antisense strand to SEQ ID NO: 531499
ucuucacccaaucacauau

SEQ ID NO: 531501 - RNA, 19 nt, Artificial Sequence
  Description of Artificial Sequence: Synthetic oligonucleotide
  Sense strand starting at position 2503 of SEQ ID NO: 318031
gaguuuguuugguccacuu

SEQ ID NO: 531502 - RNA, 19 nt, Artificial Sequence
  Description of Artificial Sequence: Synthetic oligonucleotide
  Antisense strand to SEQ ID NO: 531501
aaguggaccaaacaaacuc

SEQ ID NO: 531503 - RNA, 19 nt, Artificial Sequence
  Description of Artificial Sequence: Synthetic oligonucleotide
  Sense strand starting at position 2708 of SEQ ID NO: 318031
cggccucugccgccuuaua

SEQ ID NO: 531504 - RNA, 19 nt, Artificial Sequence
  Description of Artificial Sequence: Synthetic oligonucleotide
  Antisense strand to SEQ ID NO: 531503
uauaaggcggcagaggccg

SEQ ID NO: 531505 - RNA, 19 nt, Artificial Sequence
  Description of Artificial Sequence: Synthetic oligonucleotide
  Sense strand starting at position 2709 of SEQ ID NO: 318031
ggccucugccgccuuauaa

SEQ ID NO: 531506 - RNA, 19 nt, Artificial Sequence
  Description of Artificial Sequence: Synthetic oligonucleotide
  Antisense strand to SEQ ID NO: 531505
uuauaaggcggcagaggcc

SEQ ID NO: 531507 - RNA, 19 nt, Artificial Sequence
  Description of Artificial Sequence: Synthetic oligonucleotide
  Sense strand starting at position 2743 of SEQ ID NO: 318031
ccuagaccucgggaugagu

SEQ ID NO: 531508 - RNA, 19 nt, Artificial Sequence
  Description of Artificial Sequence: Synthetic oligonucleotide
  Antisense strand to SEQ ID NO: 531507
acucaucccgaggucuagg

SEQ ID NO: 531509 - RNA, 19 nt, Artificial Sequence
  Description of Artificial Sequence: Synthetic oligonucleotide
  Sense strand starting at position 2954 of SEQ ID NO: 318031
gccggauccaucuaggcuu

SEQ ID NO: 531510 - RNA, 19 nt, Artificial Sequence
  Description of Artificial Sequence: Synthetic oligonucleotide
  Antisense strand to SEQ ID NO: 531509
aagccuagauggauccggc

SEQ ID NO: 531511 - RNA, 19 nt, Artificial Sequence
  Description of Artificial Sequence: Synthetic oligonucleotide
  Sense strand starting at position 2967 of SEQ ID NO: 318031
aggcuucucuaguuccuau

SEQ ID NO: 531512 - RNA, 19 nt, Artificial Sequence
  Description of Artificial Sequence: Synthetic oligonucleotide
  Antisense strand to SEQ ID NO: 531511
auaggaacuagagaagccu

SEQ ID NO: 531513 - RNA, 19 nt, Artificial Sequence
  Description of Artificial Sequence: Synthetic oligonucleotide
  Sense strand starting at position 3054 of SEQ ID NO: 318031
cagugauggcagcaagaua

SEQ ID NO: 531514 - RNA, 19 nt, Artificial Sequence
  Description of Artificial Sequence: Synthetic oligonucleotide
  Antisense strand to SEQ ID NO: 531513
uaucuugcugccaucacug

SEQ ID NO: 531515 - RNA, 19 nt, Artificial Sequence
  Description of Artificial Sequence: Synthetic oligonucleotide
  Sense strand starting at position 3082 of SEQ ID NO: 318031
ccugcuuacuugcuagaag

SEQ ID NO: 531516 - RNA, 19 nt, Artificial Sequence
  Description of Artificial Sequence: Synthetic oligonucleotide
  Antisense strand to SEQ ID NO: 531515
cuucuagcaaguaagcagg

SEQ ID NO: 531517 - RNA, 19 nt, Artificial Sequence
  Description of Artificial Sequence: Synthetic oligonucleotide
  Sense strand starting at position 3122 of SEQ ID NO: 318031
gggugagauaaagguaauu

SEQ ID NO: 531518 - RNA, 19 nt, Artificial Sequence
  Description of Artificial Sequence: Synthetic oligonucleotide
  Antisense strand to SEQ ID NO: 531517
aauuaccuuuaucucaccc

SEQ ID NO: 531519 - RNA, 19 nt, Artificial Sequence
  Description of Artificial Sequence: Synthetic oligonucleotide
  Sense strand starting at position 3193 of SEQ ID NO: 318031
acguuaagagaguguguga

SEQ ID NO: 531520 - RNA, 19 nt, Artificial Sequence
  Description of Artificial Sequence: Synthetic oligonucleotide
  Antisense strand to SEQ ID NO: 531519
ucacacacucucuuaacgu

SEQ ID NO: 531521 - RNA, 19 nt, Artificial Sequence
  Description of Artificial Sequence: Synthetic oligonucleotide
  Sense strand starting at position 3222 of SEQ ID NO: 318031
gugugacauuugagcggau

SEQ ID NO: 531522 - RNA, 19 nt, Artificial Sequence
  Description of Artificial Sequence: Synthetic oligonucleotide
  Antisense strand to SEQ ID NO: 531521
auccgcucaaaugucacac

SEQ ID NO: 531523 - RNA, 19 nt, Artificial Sequence
  Description of Artificial Sequence: Synthetic oligonucleotide
  Sense strand starting at position 3279 of SEQ ID NO: 318031
gacuaagugguguguucag

SEQ ID NO: 531524 - RNA, 19 nt, Artificial Sequence
  Description of Artificial Sequence: Synthetic oligonucleotide
  Antisense strand to SEQ ID NO: 531523
cugaacacaccacuuaguc

SEQ ID NO: 531525 - RNA, 19 nt, Artificial Sequence
  Description of Artificial Sequence: Synthetic oligonucleotide
  Sense strand starting at position 3327 of SEQ ID NO: 318031
ggcccaguggucugagaug

SEQ ID NO: 531526 - RNA, 19 nt, Artificial Sequence
  Description of Artificial Sequence: Synthetic oligonucleotide
  Antisense strand to SEQ ID NO: 531525
caucucagaccacugggcc

SEQ ID NO: 531527 - RNA, 19 nt, Artificial Sequence
  Description of Artificial Sequence: Synthetic oligonucleotide
  Sense strand starting at position 3332 of SEQ ID NO: 318031
aguggucugagaugagaca

SEQ ID NO: 531528 - RNA, 19 nt, Artificial Sequence
  Description of Artificial Sequence: Synthetic oligonucleotide
  Antisense strand to SEQ ID NO: 531527
ugucucaucucagaccacu

SEQ ID NO: 531529 - RNA, 19 nt, Artificial Sequence
  Description of Artificial Sequence: Synthetic oligonucleotide
  Sense strand starting at position 3505 of SEQ ID NO: 318031
cagagcagucaggaguuua

SEQ ID NO: 531530 - RNA, 19 nt, Artificial Sequence
  Description of Artificial Sequence: Synthetic oligonucleotide
  Antisense strand to SEQ ID NO: 531529
uaaacuccugacugcucug

SEQ ID NO: 531531 - RNA, 19 nt, Artificial Sequence
  Description of Artificial Sequence: Synthetic oligonucleotide
  Sense strand starting at position 3903 of SEQ ID NO: 318031
ggcuguuguguccaaguga

SEQ ID NO: 531532 - RNA, 19 nt, Artificial Sequence
  Description of Artificial Sequence: Synthetic oligonucleotide
  Antisense strand to SEQ ID NO: 531531
ucacuuggacacaacagcc

SEQ ID NO: 531533 - RNA, 19 nt, Artificial Sequence
  Description of Artificial Sequence: Synthetic oligonucleotide
  Sense strand starting at position 178 of SEQ ID NO: 318032
cuggaaucucugcauucga

SEQ ID NO: 531534 - RNA, 19 nt, Artificial Sequence
  Description of Artificial Sequence: Synthetic oligonucleotide
  Antisense strand to SEQ ID NO: 531533
ucgaaugcagagauuccag

SEQ ID NO: 531535 - RNA, 19 nt, Artificial Sequence
  Description of Artificial Sequence: Synthetic oligonucleotide
  Sense strand starting at position 187 of SEQ ID NO: 318032
cugcauucgaccuagagga

SEQ ID NO: 531536 - RNA, 19 nt, Artificial Sequence
  Description of Artificial Sequence: Synthetic oligonucleotide
  Antisense strand to SEQ ID NO: 531535
uccucuaggucgaaugcag

SEQ ID NO: 531537 - RNA, 19 nt, Artificial Sequence
  Description of Artificial Sequence: Synthetic oligonucleotide
  Sense strand starting at position 319 of SEQ ID NO: 318032
cugccaauccgaggaaaca

SEQ ID NO: 531538 - RNA, 19 nt, Artificial Sequence
  Description of Artificial Sequence: Synthetic oligonucleotide
  Antisense strand to SEQ ID NO: 531537
uguuuccucggauuggcag

SEQ ID NO: 531539 - RNA, 19 nt, Artificial Sequence
  Description of Artificial Sequence: Synthetic oligonucleotide
  Sense strand starting at position 345 of SEQ ID NO: 318032
gggcuuucaugugcgcaga

SEQ ID NO: 531540 - RNA, 19 nt, Artificial Sequence
  Description of Artificial Sequence: Synthetic oligonucleotide
  Antisense strand to SEQ ID NO: 531539
ucugcgcacaugaaagccc

SEQ ID NO: 531541 - RNA, 19 nt, Artificial Sequence
  Description of Artificial Sequence: Synthetic oligonucleotide
  Sense strand starting at position 419 of SEQ ID NO: 318032
cggagaagcucucaggaaa

SEQ ID NO: 531542 - RNA, 19 nt, Artificial Sequence
  Description of Artificial Sequence: Synthetic oligonucleotide
  Antisense strand to SEQ ID NO: 531541
uuuccugagagcuucuccg

SEQ ID NO: 531543 - RNA, 19 nt, Artificial Sequence
  Description of Artificial Sequence: Synthetic oligonucleotide
  Sense strand starting at position 443 of SEQ ID NO: 318032
guuccucuccuagguagau

SEQ ID NO: 531544 - RNA, 19 nt, Artificial Sequence
  Description of Artificial Sequence: Synthetic oligonucleotide
  Antisense strand to SEQ ID NO: 531543
aucuaccuaggagaggaac

SEQ ID NO: 531545 - RNA, 19 nt, Artificial Sequence
  Description of Artificial Sequence: Synthetic oligonucleotide
  Sense strand starting at position 650 of SEQ ID NO: 318032
acgggacaguucccuacau

SEQ ID NO: 531546 - RNA, 19 nt, Artificial Sequence
  Description of Artificial Sequence: Synthetic oligonucleotide
  Antisense strand to SEQ ID NO: 531545
auguagggaacugucccgu

SEQ ID NO: 531547 - RNA, 19 nt, Artificial Sequence
  Description of Artificial Sequence: Synthetic oligonucleotide
  Sense strand starting at position 651 of SEQ ID NO: 318032
cgggacaguucccuacauu

SEQ ID NO: 531548 - RNA, 19 nt, Artificial Sequence
  Description of Artificial Sequence: Synthetic oligonucleotide
  Antisense strand to SEQ ID NO: 531547
aauguagggaacugucccg

SEQ ID NO: 531549 - RNA, 19 nt, Artificial Sequence
  Description of Artificial Sequence: Synthetic oligonucleotide
  Sense strand starting at position 661 of SEQ ID NO: 318032
cccuacauuugaggacaga

SEQ ID NO: 531550 - RNA, 19 nt, Artificial Sequence
  Description of Artificial Sequence: Synthetic oligonucleotide
  Antisense strand to SEQ ID NO: 531549
ucuguccucaaauguaggg

SEQ ID NO: 531551 - RNA, 19 nt, Artificial Sequence
  Description of Artificial Sequence: Synthetic oligonucleotide
  Sense strand starting at position 873 of SEQ ID NO: 318032
cccaguugcugcucuggaa

SEQ ID NO: 531552 - RNA, 19 nt, Artificial Sequence
  Description of Artificial Sequence: Synthetic oligonucleotide
  Antisense strand to SEQ ID NO: 531551
uuccagagcagcaacuggg

SEQ ID NO: 531553 - RNA, 19 nt, Artificial Sequence
  Description of Artificial Sequence: Synthetic oligonucleotide
  Sense strand starting at position 1184 of SEQ ID NO: 318032
cuuugacgcugugugaauu

SEQ ID NO: 531554 - RNA, 19 nt, Artificial Sequence
  Description of Artificial Sequence: Synthetic oligonucleotide
  Antisense strand to SEQ ID NO: 531553
aauucacacagcgucaaag

SEQ ID NO: 531555 - RNA, 19 nt, Artificial Sequence
  Description of Artificial Sequence: Synthetic oligonucleotide
  Sense strand starting at position 1195 of SEQ ID NO: 318032
ugugaauucgagugauuaa

SEQ ID NO: 531556 - RNA, 19 nt, Artificial Sequence
  Description of Artificial Sequence: Synthetic oligonucleotide
  Antisense strand to SEQ ID NO: 531555
uuaaucacucgaauucaca

SEQ ID NO: 531557 - RNA, 19 nt, Artificial Sequence
  Description of Artificial Sequence: Synthetic oligonucleotide
  Sense strand starting at position 1196 of SEQ ID NO: 318032
gugaauucgagugauuaaa

SEQ ID NO: 531558 - RNA, 19 nt, Artificial Sequence
  Description of Artificial Sequence: Synthetic oligonucleotide
  Antisense strand to SEQ ID NO: 531557
uuuaaucacucgaauucac

SEQ ID NO: 531559 - RNA, 19 nt, Artificial Sequence
  Description of Artificial Sequence: Synthetic oligonucleotide
  Sense strand starting at position 1996 of SEQ ID NO: 318032
cuccgucucgcucuuacaa

SEQ ID NO: 531560 - RNA, 19 nt, Artificial Sequence
  Description of Artificial Sequence: Synthetic oligonucleotide
  Antisense strand to SEQ ID NO: 531559
uuguaagagcgagacggag

SEQ ID NO: 531561 - RNA, 19 nt, Artificial Sequence
  Description of Artificial Sequence: Synthetic oligonucleotide
  Sense strand starting at position 2173 of SEQ ID NO: 318032
ucaggacaagucugugaca

SEQ ID NO: 531562 - RNA, 19 nt, Artificial Sequence
  Description of Artificial Sequence: Synthetic oligonucleotide
  Antisense strand to SEQ ID NO: 531561
ugucacagacuuguccuga

SEQ ID NO: 531563 - RNA, 19 nt, Artificial Sequence
  Description of Artificial Sequence: Synthetic oligonucleotide
  Sense strand starting at position 2175 of SEQ ID NO: 318032
aggacaagucugugacaga

SEQ ID NO: 531564 - RNA, 19 nt, Artificial Sequence
  Description of Artificial Sequence: Synthetic oligonucleotide
  Antisense strand to SEQ ID NO: 531563
ucugucacagacuuguccu

SEQ ID NO: 531565 - RNA, 19 nt, Artificial Sequence
  Description of Artificial Sequence: Synthetic oligonucleotide
  Sense strand starting at position 2176 of SEQ ID NO: 318032
ggacaagucugugacagau

SEQ ID NO: 531566 - RNA, 19 nt, Artificial Sequence
  Description of Artificial Sequence: Synthetic oligonucleotide
  Antisense strand to SEQ ID NO: 531565
aucugucacagacuugucc

SEQ ID NO: 531567 - RNA, 19 nt, Artificial Sequence
  Description of Artificial Sequence: Synthetic oligonucleotide
  Sense strand starting at position 2205 of SEQ ID NO: 318032
cccugagcgagagaggauu

SEQ ID NO: 531568 - RNA, 19 nt, Artificial Sequence
  Description of Artificial Sequence: Synthetic oligonucleotide
  Antisense strand to SEQ ID NO: 531567
aauccucucucgcucaggg

SEQ ID NO: 531569 - RNA, 19 nt, Artificial Sequence
  Description of Artificial Sequence: Synthetic oligonucleotide
  Sense strand starting at position 2224 of SEQ ID NO: 318032
uaaggauucuagggaggga

SEQ ID NO: 531570 - RNA, 19 nt, Artificial Sequence
  Description of Artificial Sequence: Synthetic oligonucleotide
  Antisense strand to SEQ ID NO: 531569
ucccucccuagaauccuua

SEQ ID NO: 531571 - RNA, 19 nt, Artificial Sequence
  Description of Artificial Sequence: Synthetic oligonucleotide
  Sense strand starting at position 2365 of SEQ ID NO: 318032
uugguuugcgucugacuca

SEQ ID NO: 531572 - RNA, 19 nt, Artificial Sequence
  Description of Artificial Sequence: Synthetic oligonucleotide
  Antisense strand to SEQ ID NO: 531571
ugagucagacgcaaaccaa

SEQ ID NO: 531573 - RNA, 19 nt, Artificial Sequence
  Description of Artificial Sequence: Synthetic oligonucleotide
  Sense strand starting at position 2497 of SEQ ID NO: 318032
ucuguccucuucuuggaaa

SEQ ID NO: 531574 - RNA, 19 nt, Artificial Sequence
  Description of Artificial Sequence: Synthetic oligonucleotide
  Antisense strand to SEQ ID NO: 531573
uuuccaagaagaggacaga

SEQ ID NO: 531575 - RNA, 19 nt, Artificial Sequence
  Description of Artificial Sequence: Synthetic oligonucleotide
  Sense strand starting at position 2499 of SEQ ID NO: 318032
uguccucuucuuggaaauc

SEQ ID NO: 531576 - RNA, 19 nt, Artificial Sequence
  Description of Artificial Sequence: Synthetic oligonucleotide
  Antisense strand to SEQ ID NO: 531575
gauuuccaagaagaggaca

SEQ ID NO: 531577 - RNA, 19 nt, Artificial Sequence
  Description of Artificial Sequence: Synthetic oligonucleotide
  Sense strand starting at position 2620 of SEQ ID NO: 318032
acugcaguugccuaaggua

SEQ ID NO: 531578 - RNA, 19 nt, Artificial Sequence
  Description of Artificial Sequence: Synthetic oligonucleotide
  Antisense strand to SEQ ID NO: 531577
uaccuuaggcaacugcagu

SEQ ID NO: 531579 - RNA, 19 nt, Artificial Sequence
  Description of Artificial Sequence: Synthetic oligonucleotide
  Sense strand starting at position 2643 of SEQ ID NO: 318032
ccagcuuucuccuugcaga

SEQ ID NO: 531580 - RNA, 19 nt, Artificial Sequence
  Description of Artificial Sequence: Synthetic oligonucleotide
  Antisense strand to SEQ ID NO: 531579
ucugcaaggagaaagcugg

SEQ ID NO: 531581 - RNA, 19 nt, Artificial Sequence
  Description of Artificial Sequence: Synthetic oligonucleotide
  Sense strand starting at position 2743 of SEQ ID NO: 318032
gggagaagccuuuaguauu

SEQ ID NO: 531582 - RNA, 19 nt, Artificial Sequence
  Description of Artificial Sequence: Synthetic oligonucleotide
  Antisense strand to SEQ ID NO: 531581
aauacuaaaggcuucuccc

SEQ ID NO: 531583 - RNA, 19 nt, Artificial Sequence
  Description of Artificial Sequence: Synthetic oligonucleotide
  Sense strand starting at position 2751 of SEQ ID NO: 318032
ccuuuaguauuagcgaacu

SEQ ID NO: 531584 - RNA, 19 nt, Artificial Sequence
  Description of Artificial Sequence: Synthetic oligonucleotide
  Antisense strand to SEQ ID NO: 531583
aguucgcuaauacuaaagg

SEQ ID NO: 531585 - RNA, 19 nt, Artificial Sequence
  Description of Artificial Sequence: Synthetic oligonucleotide
  Sense strand starting at position 2774 of SEQ ID NO: 318032
acacccugcagucgagaaa

SEQ ID NO: 531586 - RNA, 19 nt, Artificial Sequence
  Description of Artificial Sequence: Synthetic oligonucleotide
  Antisense strand to SEQ ID NO: 531585
uuucucgacugcagggugu

SEQ ID NO: 531587 - RNA, 19 nt, Artificial Sequence
  Description of Artificial Sequence: Synthetic oligonucleotide
  Sense strand starting at position 2807 of SEQ ID NO: 318032
ugaguugaguugcccaagu

SEQ ID NO: 531588 - RNA, 19 nt, Artificial Sequence
  Description of Artificial Sequence: Synthetic oligonucleotide
  Antisense strand to SEQ ID NO: 531587
acuugggcaacucaacuca

SEQ ID NO: 531589 - RNA, 19 nt, Artificial Sequence
  Description of Artificial Sequence: Synthetic oligonucleotide
  Sense strand starting at position 2839 of SEQ ID NO: 318032
augugugggcaucaggauu

SEQ ID NO: 531590 - RNA, 19 nt, Artificial Sequence
  Description of Artificial Sequence: Synthetic oligonucleotide
  Antisense strand to SEQ ID NO: 531589
aauccugaugcccacacau

SEQ ID NO: 531591 - RNA, 19 nt, Artificial Sequence
  Description of Artificial Sequence: Synthetic oligonucleotide
  Sense strand starting at position 2862 of SEQ ID NO: 318032
cccagaauggcaugaaaca

SEQ ID NO: 531592 - RNA, 19 nt, Artificial Sequence
  Description of Artificial Sequence: Synthetic oligonucleotide
  Antisense strand to SEQ ID NO: 531591
uguuucaugccauucuggg

SEQ ID NO: 531593 - RNA, 19 nt, Artificial Sequence
  Description of Artificial Sequence: Synthetic oligonucleotide
  Sense strand starting at position 2945 of SEQ ID NO: 318032
cgccuauugcuugggagga

SEQ ID NO: 531594 - RNA, 19 nt, Artificial Sequence
  Description of Artificial Sequence: Synthetic oligonucleotide
  Antisense strand to SEQ ID NO: 531593
uccucccaagcaauaggcg

SEQ ID NO: 531595 - RNA, 19 nt, Artificial Sequence
  Description of Artificial Sequence: Synthetic oligonucleotide
  Sense strand starting at position 2978 of SEQ ID NO: 318032
gucguucuggcuccguaua

SEQ ID NO: 531596 - RNA, 19 nt, Artificial Sequence
  Description of Artificial Sequence: Synthetic oligonucleotide
  Antisense strand to SEQ ID NO: 531595
uauacggagccagaacgac

SEQ ID NO: 531597 - RNA, 19 nt, Artificial Sequence
  Description of Artificial Sequence: Synthetic oligonucleotide
  Sense strand starting at position 2979 of SEQ ID NO: 318032
ucguucuggcuccguauaa

SEQ ID NO: 531598 - RNA, 19 nt, Artificial Sequence
  Description of Artificial Sequence: Synthetic oligonucleotide
  Antisense strand to SEQ ID NO: 531597
uuauacggagccagaacga

SEQ ID NO: 531599 - RNA, 19 nt, Artificial Sequence
  Description of Artificial Sequence: Synthetic oligonucleotide
  Sense strand starting at position 2980 of SEQ ID NO: 318032
cguucuggcuccguauaaa

SEQ ID NO: 531600 - RNA, 19 nt, Artificial Sequence
  Description of Artificial Sequence: Synthetic oligonucleotide
  Antisense strand to SEQ ID NO: 531599
uuuauacggagccagaacg

SEQ ID NO: 531601 - RNA, 19 nt, Artificial Sequence
  Description of Artificial Sequence: Synthetic oligonucleotide
  Sense strand starting at position 3253 of SEQ ID NO: 318032
cggcuugggcuccauuaga

SEQ ID NO: 531602 - RNA, 19 nt, Artificial Sequence
  Description of Artificial Sequence: Synthetic oligonucleotide
  Antisense strand to SEQ ID NO: 531601
ucuaauggagcccaagccg

SEQ ID NO: 531603 - RNA, 19 nt, Artificial Sequence
  Description of Artificial Sequence: Synthetic oligonucleotide
  Sense strand starting at position 3393 of SEQ ID NO: 318032
accacuucuccugguggaa

SEQ ID NO: 531604 - RNA, 19 nt, Artificial Sequence
  Description of Artificial Sequence: Synthetic oligonucleotide
  Antisense strand to SEQ ID NO: 531603
uuccaccaggagaaguggu

SEQ ID NO: 531605 - RNA, 19 nt, Artificial Sequence
  Description of Artificial Sequence: Synthetic oligonucleotide
  Sense strand starting at position 3820 of SEQ ID NO: 318032
ggcauucccugagaauaug

SEQ ID NO: 531606 - RNA, 19 nt, Artificial Sequence
  Description of Artificial Sequence: Synthetic oligonucleotide
  Antisense strand to SEQ ID NO: 531605
cauauucucagggaaugcc

SEQ ID NO: 531607 - RNA, 19 nt, Artificial Sequence
  Description of Artificial Sequence: Synthetic oligonucleotide
  Sense strand starting at position 3889 of SEQ ID NO: 318032
cggguuugggcaggaaagu

SEQ ID NO: 531608 - RNA, 19 nt, Artificial Sequence
  Description of Artificial Sequence: Synthetic oligonucleotide
  Antisense strand to SEQ ID NO: 531607
acuuuccugcccaaacccg

SEQ ID NO: 531609 - RNA, 19 nt, Artificial Sequence
  Description of Artificial Sequence: Synthetic oligonucleotide
  Sense strand starting at position 3909 of SEQ ID NO: 318032
gaggcuucgugguucauga

SEQ ID NO: 531610 - RNA, 19 nt, Artificial Sequence
  Description of Artificial Sequence: Synthetic oligonucleotide
  Antisense strand to SEQ ID NO: 531609
ucaugaaccacgaagccuc

SEQ ID NO: 531611 - RNA, 19 nt, Artificial Sequence
  Description of Artificial Sequence: Synthetic oligonucleotide
  Sense strand starting at position 3919 of SEQ ID NO: 318032
gguucaugagccuggaacu

SEQ ID NO: 531612 - RNA, 19 nt, Artificial Sequence
  Description of Artificial Sequence: Synthetic oligonucleotide
  Antisense strand to SEQ ID NO: 531611
aguuccaggcucaugaacc

SEQ ID NO: 531613 - RNA, 19 nt, Artificial Sequence
  Description of Artificial Sequence: Synthetic oligonucleotide
  Sense strand starting at position 14 of SEQ ID NO: 318033
ucaaucugugaguacauga

SEQ ID NO: 531614 - RNA, 19 nt, Artificial Sequence
  Description of Artificial Sequence: Synthetic oligonucleotide
  Antisense strand to SEQ ID NO: 531613
ucauguacucacagauuga

SEQ ID NO: 531615 - RNA, 19 nt, Artificial Sequence
  Description of Artificial Sequence: Synthetic oligonucleotide
  Sense strand starting at position 112 of SEQ ID NO: 318033
ggguaaaggagucagcuuu

SEQ ID NO: 531616 - RNA, 19 nt, Artificial Sequence
  Description of Artificial Sequence: Synthetic oligonucleotide
  Antisense strand to SEQ ID NO: 531615
aaagcugacuccuuuaccc

SEQ ID NO: 531617 - RNA, 19 nt, Artificial Sequence
  Description of Artificial Sequence: Synthetic oligonucleotide
  Sense strand starting at position 168 of SEQ ID NO: 318033
aguuuaaagguguaagcaa

SEQ ID NO: 531618 - RNA, 19 nt, Artificial Sequence
  Description of Artificial Sequence: Synthetic oligonucleotide
  Antisense strand to SEQ ID NO: 531617
uugcuuacaccuuuaaacu

SEQ ID NO: 531619 - RNA, 19 nt, Artificial Sequence
  Description of Artificial Sequence: Synthetic oligonucleotide
  Sense strand starting at position 310 of SEQ ID NO: 318033
cuaauuacacacggugaaa

SEQ ID NO: 531620 - RNA, 19 nt, Artificial Sequence
  Description of Artificial Sequence: Synthetic oligonucleotide
  Antisense strand to SEQ ID NO: 531619
uuucaccguguguaauuag

SEQ ID NO: 531621 - RNA, 19 nt, Artificial Sequence
  Description of Artificial Sequence: Synthetic oligonucleotide
  Sense strand starting at position 322 of SEQ ID NO: 318033
ggugaaacaucuucucccu

SEQ ID NO: 531622 - RNA, 19 nt, Artificial Sequence
  Description of Artificial Sequence: Synthetic oligonucleotide
  Antisense strand to SEQ ID NO: 531621
agggagaagauguuucacc

SEQ ID NO: 531623 - RNA, 19 nt, Artificial Sequence
  Description of Artificial Sequence: Synthetic oligonucleotide
  Sense strand starting at position 876 of SEQ ID NO: 318033
acuugagaacgguaagcaa

SEQ ID NO: 531624 - RNA, 19 nt, Artificial Sequence
  Description of Artificial Sequence: Synthetic oligonucleotide
  Antisense strand to SEQ ID NO: 531623
uugcuuaccguucucaagu

SEQ ID NO: 531625 - RNA, 19 nt, Artificial Sequence
  Description of Artificial Sequence: Synthetic oligonucleotide
  Sense strand starting at position 974 of SEQ ID NO: 318033
aagggugacauauguaguu

SEQ ID NO: 531626 - RNA, 19 nt, Artificial Sequence
  Description of Artificial Sequence: Synthetic oligonucleotide
  Antisense strand to SEQ ID NO: 531625
aacuacauaugucacccuu

SEQ ID NO: 531627 - RNA, 19 nt, Artificial Sequence
  Description of Artificial Sequence: Synthetic oligonucleotide
  Sense strand starting at position 976 of SEQ ID NO: 318033
gggugacauauguaguuaa

SEQ ID NO: 531628 - RNA, 19 nt, Artificial Sequence
  Description of Artificial Sequence: Synthetic oligonucleotide
  Antisense strand to SEQ ID NO: 531627
uuaacuacauaugucaccc

SEQ ID NO: 531629 - RNA, 19 nt, Artificial Sequence
  Description of Artificial Sequence: Synthetic oligonucleotide
  Sense strand starting at position 1071 of SEQ ID NO: 318033
uucucuaucccaggaagaa

SEQ ID NO: 531630 - RNA, 19 nt, Artificial Sequence
  Description of Artificial Sequence: Synthetic oligonucleotide
  Antisense strand to SEQ ID NO: 531629
uucuuccugggauagagaa

SEQ ID NO: 531631 - RNA, 19 nt, Artificial Sequence
  Description of Artificial Sequence: Synthetic oligonucleotide
  Sense strand starting at position 1099 of SEQ ID NO: 318033
gggcaacagucucugagaa

SEQ ID NO: 531632 - RNA, 19 nt, Artificial Sequence
  Description of Artificial Sequence: Synthetic oligonucleotide
  Antisense strand to SEQ ID NO: 531631
uucucagagacuguugccc

SEQ ID NO: 531633 - RNA, 19 nt, Artificial Sequence
  Description of Artificial Sequence: Synthetic oligonucleotide
  Sense strand starting at position 1100 of SEQ ID NO: 318033
ggcaacagucucugagaaa

SEQ ID NO: 531634 - RNA, 19 nt, Artificial Sequence
  Description of Artificial Sequence: Synthetic oligonucleotide
  Antisense strand to SEQ ID NO: 531633
uuucucagagacuguugcc

SEQ ID NO: 531635 - RNA, 19 nt, Artificial Sequence
  Description of Artificial Sequence: Synthetic oligonucleotide
  Sense strand starting at position 1210 of SEQ ID NO: 318033
uuuggaaguuacucaacuu

SEQ ID NO: 531636 - RNA, 19 nt, Artificial Sequence
  Description of Artificial Sequence: Synthetic oligonucleotide
  Antisense strand to SEQ ID NO: 531635
aaguugaguaacuuccaaa

SEQ ID NO: 531637 - RNA, 19 nt, Artificial Sequence
  Description of Artificial Sequence: Synthetic oligonucleotide
  Sense strand starting at position 1301 of SEQ ID NO: 318033
cucguaagcgaccaauaaa

SEQ ID NO: 531638 - RNA, 19 nt, Artificial Sequence
  Description of Artificial Sequence: Synthetic oligonucleotide
  Antisense strand to SEQ ID NO: 531637
uuuauuggucgcuuacgag

SEQ ID NO: 531639 - RNA, 19 nt, Artificial Sequence
  Description of Artificial Sequence: Synthetic oligonucleotide
  Sense strand starting at position 1424 of SEQ ID NO: 318033
ggagaaaggacuggccuua

SEQ ID NO: 531640 - RNA, 19 nt, Artificial Sequence
  Description of Artificial Sequence: Synthetic oligonucleotide
  Antisense strand to SEQ ID NO: 531639
uaaggccaguccuuucucc

SEQ ID NO: 531641 - RNA, 19 nt, Artificial Sequence
  Description of Artificial Sequence: Synthetic oligonucleotide
  Sense strand starting at position 1589 of SEQ ID NO: 318033
ccuuccucggccuaagaaa

SEQ ID NO: 531642 - RNA, 19 nt, Artificial Sequence
  Description of Artificial Sequence: Synthetic oligonucleotide
  Antisense strand to SEQ ID NO: 531641
uuucuuaggccgaggaagg

SEQ ID NO: 531643 - RNA, 19 nt, Artificial Sequence
  Description of Artificial Sequence: Synthetic oligonucleotide
  Sense strand starting at position 2085 of SEQ ID NO: 318033
aggcgagguccuaguagua

SEQ ID NO: 531644 - RNA, 19 nt, Artificial Sequence
  Description of Artificial Sequence: Synthetic oligonucleotide
  Antisense strand to SEQ ID NO: 531643
uacuacuaggaccucgccu

SEQ ID NO: 531645 - RNA, 19 nt, Artificial Sequence
  Description of Artificial Sequence: Synthetic oligonucleotide
  Sense strand starting at position 2166 of SEQ ID NO: 318033
cauggagcuuacuugauau

SEQ ID NO: 531646 - RNA, 19 nt, Artificial Sequence
  Description of Artificial Sequence: Synthetic oligonucleotide
  Antisense strand to SEQ ID NO: 531645
auaucaaguaagcuccaug

SEQ ID NO: 531647 - RNA, 19 nt, Artificial Sequence
  Description of Artificial Sequence: Synthetic oligonucleotide
  Sense strand starting at position 2168 of SEQ ID NO: 318033
uggagcuuacuugauauua

SEQ ID NO: 531648 - RNA, 19 nt, Artificial Sequence
  Description of Artificial Sequence: Synthetic oligonucleotide
  Antisense strand to SEQ ID NO: 531647
uaauaucaaguaagcucca

SEQ ID NO: 531649 - RNA, 19 nt, Artificial Sequence
  Description of Artificial Sequence: Synthetic oligonucleotide
  Sense strand starting at position 2178 of SEQ ID NO: 318033
uugauauuaugagcgauaa

SEQ ID NO: 531650 - RNA, 19 nt, Artificial Sequence
  Description of Artificial Sequence: Synthetic oligonucleotide
  Antisense strand to SEQ ID NO: 531649
uuaucgcucauaauaucaa

SEQ ID NO: 531651 - RNA, 19 nt, Artificial Sequence
  Description of Artificial Sequence: Synthetic oligonucleotide
  Sense strand starting at position 2179 of SEQ ID NO: 318033
ugauauuaugagcgauaaa

SEQ ID NO: 531652 - RNA, 19 nt, Artificial Sequence
  Description of Artificial Sequence: Synthetic oligonucleotide
  Antisense strand to SEQ ID NO: 531651
uuuaucgcucauaauauca

SEQ ID NO: 531653 - RNA, 19 nt, Artificial Sequence
  Description of Artificial Sequence: Synthetic oligonucleotide
  Sense strand starting at position 2259 of SEQ ID NO: 318033
cgcggaagccuagaauaga

SEQ ID NO: 531654 - RNA, 19 nt, Artificial Sequence
  Description of Artificial Sequence: Synthetic oligonucleotide
  Antisense strand to SEQ ID NO: 531653
ucuauucuaggcuuccgcg

SEQ ID NO: 531655 - RNA, 19 nt, Artificial Sequence
  Description of Artificial Sequence: Synthetic oligonucleotide
  Sense strand starting at position 2273 of SEQ ID NO: 318033
auagaaaucuagccuugug

SEQ ID NO: 531656 - RNA, 19 nt, Artificial Sequence
  Description of Artificial Sequence: Synthetic oligonucleotide
  Antisense strand to SEQ ID NO: 531655
cacaaggcuagauuucuau

SEQ ID NO: 531657 - RNA, 19 nt, Artificial Sequence
  Description of Artificial Sequence: Synthetic oligonucleotide
  Sense strand starting at position 2276 of SEQ ID NO: 318033
gaaaucuagccuuguggaa

SEQ ID NO: 531658 - RNA, 19 nt, Artificial Sequence
  Description of Artificial Sequence: Synthetic oligonucleotide
  Antisense strand to SEQ ID NO: 531657
uuccacaaggcuagauuuc

SEQ ID NO: 531659 - RNA, 19 nt, Artificial Sequence
  Description of Artificial Sequence: Synthetic oligonucleotide
  Sense strand starting at position 2359 of SEQ ID NO: 318033
ucugcagaagccuaauaaa

SEQ ID NO: 531660 - RNA, 19 nt, Artificial Sequence
  Description of Artificial Sequence: Synthetic oligonucleotide
  Antisense strand to SEQ ID NO: 531659
uuuauuaggcuucugcaga

SEQ ID NO: 531661 - RNA, 19 nt, Artificial Sequence
  Description of Artificial Sequence: Synthetic oligonucleotide
  Sense strand starting at position 2383 of SEQ ID NO: 318033
aagaguauugcauguaagg

SEQ ID NO: 531662 - RNA, 19 nt, Artificial Sequence
  Description of Artificial Sequence: Synthetic oligonucleotide
  Antisense strand to SEQ ID NO: 531661
ccuuacaugcaauacucuu

SEQ ID NO: 531663 - RNA, 19 nt, Artificial Sequence
  Description of Artificial Sequence: Synthetic oligonucleotide
  Sense strand starting at position 2385 of SEQ ID NO: 318033
gaguauugcauguaaggga

SEQ ID NO: 531664 - RNA, 19 nt, Artificial Sequence
  Description of Artificial Sequence: Synthetic oligonucleotide
  Antisense strand to SEQ ID NO: 531663
ucccuuacaugcaauacuc

SEQ ID NO: 531665 - RNA, 19 nt, Artificial Sequence
  Description of Artificial Sequence: Synthetic oligonucleotide
  Sense strand starting at position 2531 of SEQ ID NO: 318033
cuucuuaucgacugaauug

SEQ ID NO: 531666 - RNA, 19 nt, Artificial Sequence
  Description of Artificial Sequence: Synthetic oligonucleotide
  Antisense strand to SEQ ID NO: 531665
caauucagucgauaagaag

SEQ ID NO: 531667 - RNA, 19 nt, Artificial Sequence
  Description of Artificial Sequence: Synthetic oligonucleotide
  Sense strand starting at position 2977 of SEQ ID NO: 318033
ugcaauuuagucugauucu

SEQ ID NO: 531668 - RNA, 19 nt, Artificial Sequence
  Description of Artificial Sequence: Synthetic oligonucleotide
  Antisense strand to SEQ ID NO: 531667
agaaucagacuaaauugca

SEQ ID NO: 531669 - RNA, 19 nt, Artificial Sequence
  Description of Artificial Sequence: Synthetic oligonucleotide
  Sense strand starting at position 2992 of SEQ ID NO: 318033
uucugauugcaauggaaug

SEQ ID NO: 531670 - RNA, 19 nt, Artificial Sequence
  Description of Artificial Sequence: Synthetic oligonucleotide
  Antisense strand to SEQ ID NO: 531669
cauuccauugcaaucagaa

SEQ ID NO: 531671 - RNA, 19 nt, Artificial Sequence
  Description of Artificial Sequence: Synthetic oligonucleotide
  Sense strand starting at position 2997 of SEQ ID NO: 318033
auugcaauggaaugugaaa

SEQ ID NO: 531672 - RNA, 19 nt, Artificial Sequence
  Description of Artificial Sequence: Synthetic oligonucleotide
  Antisense strand to SEQ ID NO: 531671
uuucacauuccauugcaau

SEQ ID NO: 531673 - RNA, 19 nt, Artificial Sequence
  Description of Artificial Sequence: Synthetic oligonucleotide
  Sense strand starting at position 3292 of SEQ ID NO: 318033
acaguuacaucugcaggau

SEQ ID NO: 531674 - RNA, 19 nt, Artificial Sequence
  Description of Artificial Sequence: Synthetic oligonucleotide
  Antisense strand to SEQ ID NO: 531673
auccugcagauguaacugu

SEQ ID NO: 531675 - RNA, 19 nt, Artificial Sequence
  Description of Artificial Sequence: Synthetic oligonucleotide
  Sense strand starting at position 3366 of SEQ ID NO: 318033
auuguaacugugcauuaag

SEQ ID NO: 531676 - RNA, 19 nt, Artificial Sequence
  Description of Artificial Sequence: Synthetic oligonucleotide
  Antisense strand to SEQ ID NO: 531675
cuuaaugcacaguuacaau

SEQ ID NO: 531677 - RNA, 19 nt, Artificial Sequence
  Description of Artificial Sequence: Synthetic oligonucleotide
  Sense strand starting at position 3388 of SEQ ID NO: 318033
ugcauagaaagauguugaa

SEQ ID NO: 531678 - RNA, 19 nt, Artificial Sequence
  Description of Artificial Sequence: Synthetic oligonucleotide
  Antisense strand to SEQ ID NO: 531677
uucaacaucuuucuaugca

SEQ ID NO: 531679 - RNA, 19 nt, Artificial Sequence
  Description of Artificial Sequence: Synthetic oligonucleotide
  Sense strand starting at position 3743 of SEQ ID NO: 318033
uccuaaccacuguaaagua

SEQ ID NO: 531680 - RNA, 19 nt, Artificial Sequence
  Description of Artificial Sequence: Synthetic oligonucleotide
  Antisense strand to SEQ ID NO: 531679
uacuuuacagugguuagga

SEQ ID NO: 531681 - RNA, 19 nt, Artificial Sequence
  Description of Artificial Sequence: Synthetic oligonucleotide
  Sense strand starting at position 3874 of SEQ ID NO: 318033
acugauuucugacaucuag

SEQ ID NO: 531682 - RNA, 19 nt, Artificial Sequence
  Description of Artificial Sequence: Synthetic oligonucleotide
  Antisense strand to SEQ ID NO: 531681
cuagaugucagaaaucagu

SEQ ID NO: 531683 - RNA, 19 nt, Artificial Sequence
  Description of Artificial Sequence: Synthetic oligonucleotide
  Sense strand starting at position 3921 of SEQ ID NO: 318033
ugacuuaauuaaguuggau

SEQ ID NO: 531684 - RNA, 19 nt, Artificial Sequence
  Description of Artificial Sequence: Synthetic oligonucleotide
  Antisense strand to SEQ ID NO: 531683
auccaacuuaauuaaguca

SEQ ID NO: 531685 - RNA, 19 nt, Artificial Sequence
  Description of Artificial Sequence: Synthetic oligonucleotide
  Sense strand starting at position 3924 of SEQ ID NO: 318033
cuuaauuaaguuggauagu

SEQ ID NO: 531686 - RNA, 19 nt, Artificial Sequence
  Description of Artificial Sequence: Synthetic oligonucleotide
  Antisense strand to SEQ ID NO: 531685
acuauccaacuuaauuaag

SEQ ID NO: 531687 - RNA, 19 nt, Artificial Sequence
  Description of Artificial Sequence: Synthetic oligonucleotide
  Sense strand starting at position 3935 of SEQ ID NO: 318033
uggauagugucagugaaga

SEQ ID NO: 531688 - RNA, 19 nt, Artificial Sequence
  Description of Artificial Sequence: Synthetic oligonucleotide
  Antisense strand to SEQ ID NO: 531687
ucuucacugacacuaucca

SEQ ID NO: 531689 - RNA, 19 nt, Artificial Sequence
  Description of Artificial Sequence: Synthetic oligonucleotide
  Sense strand starting at position 3937 of SEQ ID NO: 318033
gauagugucagugaagaua

SEQ ID NO: 531690 - RNA, 19 nt, Artificial Sequence
  Description of Artificial Sequence: Synthetic oligonucleotide
  Antisense strand to SEQ ID NO: 531689
uaucuucacugacacuauc

SEQ ID NO: 531691 - RNA, 19 nt, Artificial Sequence
  Description of Artificial Sequence: Synthetic oligonucleotide
  Sense strand starting at position 3973 of SEQ ID NO: 318033
uuuagagauuuaggaugga

SEQ ID NO: 531692 - RNA, 19 nt, Artificial Sequence
  Description of Artificial Sequence: Synthetic oligonucleotide
  Antisense strand to SEQ ID NO: 531691
uccauccuaaaucucuaaa

SEQ ID NO: 531693 - RNA, 19 nt, Artificial Sequence
  Description of Artificial Sequence: Synthetic oligonucleotide
  Sense strand starting at position 39 of SEQ ID NO: 318034
auugcugugaguuaugauc

SEQ ID NO: 531694 - RNA, 19 nt, Artificial Sequence
  Description of Artificial Sequence: Synthetic oligonucleotide
  Antisense strand to SEQ ID NO: 531693
gaucauaacucacagcaau

SEQ ID NO: 531695 - RNA, 19 nt, Artificial Sequence
  Description of Artificial Sequence: Synthetic oligonucleotide
  Sense strand starting at position 211 of SEQ ID NO: 318034
caugaacugugacuuugua

SEQ ID NO: 531696 - RNA, 19 nt, Artificial Sequence
  Description of Artificial Sequence: Synthetic oligonucleotide
  Antisense strand to SEQ ID NO: 531695
uacaaagucacaguucaug

SEQ ID NO: 531697 - RNA, 19 nt, Artificial Sequence
  Description of Artificial Sequence: Synthetic oligonucleotide
  Sense strand starting at position 341 of SEQ ID NO: 318034
guaauaauaugguucucua

SEQ ID NO: 531698 - RNA, 19 nt, Artificial Sequence
  Description of Artificial Sequence: Synthetic oligonucleotide
  Antisense strand to SEQ ID NO: 531697
uagagaaccauauuauuac

SEQ ID NO: 531699 - RNA, 19 nt, Artificial Sequence
  Description of Artificial Sequence: Synthetic oligonucleotide
  Sense strand starting at position 406 of SEQ ID NO: 318034
ucuggauucuuauucugac

SEQ ID NO: 531700 - RNA, 19 nt, Artificial Sequence
  Description of Artificial Sequence: Synthetic oligonucleotide
  Antisense strand to SEQ ID NO: 531699
gucagaauaagaauccaga

SEQ ID NO: 531701 - RNA, 19 nt, Artificial Sequence
  Description of Artificial Sequence: Synthetic oligonucleotide
  Sense strand starting at position 412 of SEQ ID NO: 318034
uucuuauucugacucugua

SEQ ID NO: 531702 - RNA, 19 nt, Artificial Sequence
  Description of Artificial Sequence: Synthetic oligonucleotide
  Antisense strand to SEQ ID NO: 531701
uacagagucagaauaagaa

SEQ ID NO: 531703 - RNA, 19 nt, Artificial Sequence
  Description of Artificial Sequence: Synthetic oligonucleotide
  Sense strand starting at position 430 of SEQ ID NO: 318034
acccaaugacccuguagua

SEQ ID NO: 531704 - RNA, 19 nt, Artificial Sequence
  Description of Artificial Sequence: Synthetic oligonucleotide
  Antisense strand to SEQ ID NO: 531703
uacuacagggucauugggu

SEQ ID NO: 531705 - RNA, 19 nt, Artificial Sequence
  Description of Artificial Sequence: Synthetic oligonucleotide
  Sense strand starting at position 680 of SEQ ID NO: 318034
uugugaacaugcccauaau

SEQ ID NO: 531706 - RNA, 19 nt, Artificial Sequence
  Description of Artificial Sequence: Synthetic oligonucleotide
  Antisense strand to SEQ ID NO: 531705
auuaugggcauguucacaa

SEQ ID NO: 531707 - RNA, 19 nt, Artificial Sequence
  Description of Artificial Sequence: Synthetic oligonucleotide
  Sense strand starting at position 681 of SEQ ID NO: 318034
ugugaacaugcccauaauu

SEQ ID NO: 531708 - RNA, 19 nt, Artificial Sequence
  Description of Artificial Sequence: Synthetic oligonucleotide
  Antisense strand to SEQ ID NO: 531707
aauuaugggcauguucaca

SEQ ID NO: 531709 - RNA, 19 nt, Artificial Sequence
  Description of Artificial Sequence: Synthetic oligonucleotide
  Sense strand starting at position 745 of SEQ ID NO: 318034
auagauguguuaucuauuc

SEQ ID NO: 531710 - RNA, 19 nt, Artificial Sequence
  Description of Artificial Sequence: Synthetic oligonucleotide
  Antisense strand to SEQ ID NO: 531709
gaauagauaacacaucuau

SEQ ID NO: 531711 - RNA, 19 nt, Artificial Sequence
  Description of Artificial Sequence: Synthetic oligonucleotide
  Sense strand starting at position 793 of SEQ ID NO: 318034
aagaguaauuaucuggcuu

SEQ ID NO: 531712 - RNA, 19 nt, Artificial Sequence
  Description of Artificial Sequence: Synthetic oligonucleotide
  Antisense strand to SEQ ID NO: 531711
aagccagauaauuacucuu

SEQ ID NO: 531713 - RNA, 19 nt, Artificial Sequence
  Description of Artificial Sequence: Synthetic oligonucleotide
  Sense strand starting at position 851 of SEQ ID NO: 318034
cauuaauaacguggauaca

SEQ ID NO: 531714 - RNA, 19 nt, Artificial Sequence
  Description of Artificial Sequence: Synthetic oligonucleotide
  Antisense strand to SEQ ID NO: 531713
uguauccacguuauuaaug

SEQ ID NO: 531715 - RNA, 19 nt, Artificial Sequence
  Description of Artificial Sequence: Synthetic oligonucleotide
  Sense strand starting at position 949 of SEQ ID NO: 318034
uggauaccaguguauguuu

SEQ ID NO: 531716 - RNA, 19 nt, Artificial Sequence
  Description of Artificial Sequence: Synthetic oligonucleotide
  Antisense strand to SEQ ID NO: 531715
aaacauacacugguaucca

SEQ ID NO: 531717 - RNA, 19 nt, Artificial Sequence
  Description of Artificial Sequence: Synthetic oligonucleotide
  Sense strand starting at position 1005 of SEQ ID NO: 318034
uuugauuauccaugguacu

SEQ ID NO: 531718 - RNA, 19 nt, Artificial Sequence
  Description of Artificial Sequence: Synthetic oligonucleotide
  Antisense strand to SEQ ID NO: 531717
aguaccauggauaaucaaa

SEQ ID NO: 531719 - RNA, 19 nt, Artificial Sequence
  Description of Artificial Sequence: Synthetic oligonucleotide
  Sense strand starting at position 1257 of SEQ ID NO: 318034
ugaguaauuggcuggagua

SEQ ID NO: 531720 - RNA, 19 nt, Artificial Sequence
  Description of Artificial Sequence: Synthetic oligonucleotide
  Antisense strand to SEQ ID NO: 531719
uacuccagccaauuacuca

SEQ ID NO: 531721 - RNA, 19 nt, Artificial Sequence
  Description of Artificial Sequence: Synthetic oligonucleotide
  Sense strand starting at position 1258 of SEQ ID NO: 318034
gaguaauuggcuggaguaa

SEQ ID NO: 531722 - RNA, 19 nt, Artificial Sequence
  Description of Artificial Sequence: Synthetic oligonucleotide
  Antisense strand to SEQ ID NO: 531721
uuacuccagccaauuacuc

SEQ ID NO: 531723 - RNA, 19 nt, Artificial Sequence
  Description of Artificial Sequence: Synthetic oligonucleotide
  Sense strand starting at position 1259 of SEQ ID NO: 318034
aguaauuggcuggaguaaa

SEQ ID NO: 531724 - RNA, 19 nt, Artificial Sequence
  Description of Artificial Sequence: Synthetic oligonucleotide
  Antisense strand to SEQ ID NO: 531723
uuuacuccagccaauuacu

SEQ ID NO: 531725 - RNA, 19 nt, Artificial Sequence
  Description of Artificial Sequence: Synthetic oligonucleotide
  Sense strand starting at position 1419 of SEQ ID NO: 318034
auguauuaccuuggaugga

SEQ ID NO: 531726 - RNA, 19 nt, Artificial Sequence
  Description of Artificial Sequence: Synthetic oligonucleotide
  Antisense strand to SEQ ID NO: 531725
uccauccaagguaauacau

SEQ ID NO: 531727 - RNA, 19 nt, Artificial Sequence
  Description of Artificial Sequence: Synthetic oligonucleotide
  Sense strand starting at position 1472 of SEQ ID NO: 318034
auuaguagucaacaagcau

SEQ ID NO: 531728 - RNA, 19 nt, Artificial Sequence
  Description of Artificial Sequence: Synthetic oligonucleotide
  Antisense strand to SEQ ID NO: 531727
augcuuguugacuacuaau

SEQ ID NO: 531729 - RNA, 19 nt, Artificial Sequence
  Description of Artificial Sequence: Synthetic oligonucleotide
  Sense strand starting at position 1503 of SEQ ID NO: 318034
ccagaaauauucgucuaau

SEQ ID NO: 531730 - RNA, 19 nt, Artificial Sequence
  Description of Artificial Sequence: Synthetic oligonucleotide
  Antisense strand to SEQ ID NO: 531729
auuagacgaauauuucugg

SEQ ID NO: 531731 - RNA, 19 nt, Artificial Sequence
  Description of Artificial Sequence: Synthetic oligonucleotide
  Sense strand starting at position 1677 of SEQ ID NO: 318034
cgccuuguaaucguugaac

SEQ ID NO: 531732 - RNA, 19 nt, Artificial Sequence
  Description of Artificial Sequence: Synthetic oligonucleotide
  Antisense strand to SEQ ID NO: 531731
guucaacgauuacaaggcg

SEQ ID NO: 531733 - RNA, 19 nt, Artificial Sequence
  Description of Artificial Sequence: Synthetic oligonucleotide
  Sense strand starting at position 1680 of SEQ ID NO: 318034
cuuguaaucguugaaccga

SEQ ID NO: 531734 - RNA, 19 nt, Artificial Sequence
  Description of Artificial Sequence: Synthetic oligonucleotide
  Antisense strand to SEQ ID NO: 531733
ucgguucaacgauuacaag

SEQ ID NO: 531735 - RNA, 19 nt, Artificial Sequence
  Description of Artificial Sequence: Synthetic oligonucleotide
  Sense strand starting at position 1860 of SEQ ID NO: 318034
cuccuuuggugacucuaau

SEQ ID NO: 531736 - RNA, 19 nt, Artificial Sequence
  Description of Artificial Sequence: Synthetic oligonucleotide
  Antisense strand to SEQ ID NO: 531735
auuagagucaccaaaggag

SEQ ID NO: 531737 - RNA, 19 nt, Artificial Sequence
  Description of Artificial Sequence: Synthetic oligonucleotide
  Sense strand starting at position 1991 of SEQ ID NO: 318034
gguccuccaucagcagaaa

SEQ ID NO: 531738 - RNA, 19 nt, Artificial Sequence
  Description of Artificial Sequence: Synthetic oligonucleotide
  Antisense strand to SEQ ID NO: 531737
uuucugcugauggaggacc

SEQ ID NO: 531739 - RNA, 19 nt, Artificial Sequence
  Description of Artificial Sequence: Synthetic oligonucleotide
  Sense strand starting at position 1994 of SEQ ID NO: 318034
ccuccaucagcagaaaguu

SEQ ID NO: 531740 - RNA, 19 nt, Artificial Sequence
  Description of Artificial Sequence: Synthetic oligonucleotide
  Antisense strand to SEQ ID NO: 531739
aacuuucugcugauggagg

SEQ ID NO: 531741 - RNA, 19 nt, Artificial Sequence
  Description of Artificial Sequence: Synthetic oligonucleotide
  Sense strand starting at position 2127 of SEQ ID NO: 318034
gucaguuuacagcaacuga

SEQ ID NO: 531742 - RNA, 19 nt, Artificial Sequence
  Description of Artificial Sequence: Synthetic oligonucleotide
  Antisense strand to SEQ ID NO: 531741
ucaguugcuguaaacugac

SEQ ID NO: 531743 - RNA, 19 nt, Artificial Sequence
  Description of Artificial Sequence: Synthetic oligonucleotide
  Sense strand starting at position 2186 of SEQ ID NO: 318034
aggugauucugguuugaug

SEQ ID NO: 531744 - RNA, 19 nt, Artificial Sequence
  Description of Artificial Sequence: Synthetic oligonucleotide
  Antisense strand to SEQ ID NO: 531743
caucaaaccagaaucaccu

SEQ ID NO: 531745 - RNA, 19 nt, Artificial Sequence
  Description of Artificial Sequence: Synthetic oligonucleotide
  Sense strand starting at position 2188 of SEQ ID NO: 318034
gugauucugguuugaugga

SEQ ID NO: 531746 - RNA, 19 nt, Artificial Sequence
  Description of Artificial Sequence: Synthetic oligonucleotide
  Antisense strand to SEQ ID NO: 531745
uccaucaaaccagaaucac

SEQ ID NO: 531747 - RNA, 19 nt, Artificial Sequence
  Description of Artificial Sequence: Synthetic oligonucleotide
  Sense strand starting at position 2210 of SEQ ID NO: 318034
gauggaauauaagacaaga

SEQ ID NO: 531748 - RNA, 19 nt, Artificial Sequence
  Description of Artificial Sequence: Synthetic oligonucleotide
  Antisense strand to SEQ ID NO: 531747
ucuugucuuauauuccauc

SEQ ID NO: 531749 - RNA, 19 nt, Artificial Sequence
  Description of Artificial Sequence: Synthetic oligonucleotide
  Sense strand starting at position 2301 of SEQ ID NO: 318034
gaaguuuauuuagacugaa

SEQ ID NO: 531750 - RNA, 19 nt, Artificial Sequence
  Description of Artificial Sequence: Synthetic oligonucleotide
  Antisense strand to SEQ ID NO: 531749
uucagucuaaauaaacuuc

SEQ ID NO: 531751 - RNA, 19 nt, Artificial Sequence
  Description of Artificial Sequence: Synthetic oligonucleotide
  Sense strand starting at position 2313 of SEQ ID NO: 318034
gacugaacaugugccaauu

SEQ ID NO: 531752 - RNA, 19 nt, Artificial Sequence
  Description of Artificial Sequence: Synthetic oligonucleotide
  Antisense strand to SEQ ID NO: 531751
aauuggcacauguucaguc

SEQ ID NO: 531753 - RNA, 19 nt, Artificial Sequence
  Description of Artificial Sequence: Synthetic oligonucleotide
  Sense strand starting at position 2369 of SEQ ID NO: 318034
uucuuauuguuagcaauga

SEQ ID NO: 531754 - RNA, 19 nt, Artificial Sequence
  Description of Artificial Sequence: Synthetic oligonucleotide
  Antisense strand to SEQ ID NO: 531753
ucauugcuaacaauaagaa

SEQ ID NO: 531755 - RNA, 19 nt, Artificial Sequence
  Description of Artificial Sequence: Synthetic oligonucleotide
  Sense strand starting at position 2415 of SEQ ID NO: 318034
aguaccagagauuguuaca

SEQ ID NO: 531756 - RNA, 19 nt, Artificial Sequence
  Description of Artificial Sequence: Synthetic oligonucleotide
  Antisense strand to SEQ ID NO: 531755
uguaacaaucucugguacu

SEQ ID NO: 531757 - RNA, 19 nt, Artificial Sequence
  Description of Artificial Sequence: Synthetic oligonucleotide
  Sense strand starting at position 2515 of SEQ ID NO: 318034
agccacuugucauuuaucu

SEQ ID NO: 531758 - RNA, 19 nt, Artificial Sequence
  Description of Artificial Sequence: Synthetic oligonucleotide
  Antisense strand to SEQ ID NO: 531757
agauaaaugacaaguggcu

SEQ ID NO: 531759 - RNA, 19 nt, Artificial Sequence
  Description of Artificial Sequence: Synthetic oligonucleotide
  Sense strand starting at position 2534 of SEQ ID NO: 318034
ucaucauuugucugcucua

SEQ ID NO: 531760 - RNA, 19 nt, Artificial Sequence
  Description of Artificial Sequence: Synthetic oligonucleotide
  Antisense strand to SEQ ID NO: 531759
uagagcagacaaaugauga

SEQ ID NO: 531761 - RNA, 19 nt, Artificial Sequence
  Description of Artificial Sequence: Synthetic oligonucleotide
  Sense strand starting at position 2537 of SEQ ID NO: 318034
ucauuugucugcucuauua

SEQ ID NO: 531762 - RNA, 19 nt, Artificial Sequence
  Description of Artificial Sequence: Synthetic oligonucleotide
  Antisense strand to SEQ ID NO: 531761
uaauagagcagacaaauga

SEQ ID NO: 531763 - RNA, 19 nt, Artificial Sequence
  Description of Artificial Sequence: Synthetic oligonucleotide
  Sense strand starting at position 2879 of SEQ ID NO: 318034
gugaauagcacagaagcau

SEQ ID NO: 531764 - RNA, 19 nt, Artificial Sequence
  Description of Artificial Sequence: Synthetic oligonucleotide
  Antisense strand to SEQ ID NO: 531763
augcuucugugcuauucac

SEQ ID NO: 531765 - RNA, 19 nt, Artificial Sequence
  Description of Artificial Sequence: Synthetic oligonucleotide
  Sense strand starting at position 2956 of SEQ ID NO: 318034
auaaccucaugcuuagaga

SEQ ID NO: 531766 - RNA, 19 nt, Artificial Sequence
  Description of Artificial Sequence: Synthetic oligonucleotide
  Antisense strand to SEQ ID NO: 531765
ucucuaagcaugagguuau

SEQ ID NO: 531767 - RNA, 19 nt, Artificial Sequence
  Description of Artificial Sequence: Synthetic oligonucleotide
  Sense strand starting at position 3672 of SEQ ID NO: 318034
uccauauugaugugagagc

SEQ ID NO: 531768 - RNA, 19 nt, Artificial Sequence
  Description of Artificial Sequence: Synthetic oligonucleotide
  Antisense strand to SEQ ID NO: 531767
gcucucacaucaauaugga

SEQ ID NO: 531769 - RNA, 19 nt, Artificial Sequence
  Description of Artificial Sequence: Synthetic oligonucleotide
  Sense strand starting at position 3767 of SEQ ID NO: 318034
uuaacuguuccaugugaca

SEQ ID NO: 531770 - RNA, 19 nt, Artificial Sequence
  Description of Artificial Sequence: Synthetic oligonucleotide
  Antisense strand to SEQ ID NO: 531769
ugucacauggaacaguuaa

SEQ ID NO: 531771 - RNA, 19 nt, Artificial Sequence
  Description of Artificial Sequence: Synthetic oligonucleotide
  Sense strand starting at position 3868 of SEQ ID NO: 318034
ugguguuccaguuacacca

SEQ ID NO: 531772 - RNA, 19 nt, Artificial Sequence
  Description of Artificial Sequence: Synthetic oligonucleotide
  Antisense strand to SEQ ID NO: 531771
ugguguaacuggaacacca

SEQ ID NO: 531773 - RNA, 19 nt, Artificial Sequence
  Description of Artificial Sequence: Synthetic oligonucleotide
  Sense strand starting at position 2441 of SEQ ID NO: 318035
augucuaagcacugaagaa

SEQ ID NO: 531774 - RNA, 19 nt, Artificial Sequence
  Description of Artificial Sequence: Synthetic oligonucleotide
  Antisense strand to SEQ ID NO: 531773
uucuucagugcuuagacau

SEQ ID NO: 531775 - RNA, 19 nt, Artificial Sequence
  Description of Artificial Sequence: Synthetic oligonucleotide
  Sense strand starting at position 2971 of SEQ ID NO: 318035
ggguguuaacccuacugau

SEQ ID NO: 531776 - RNA, 19 nt, Artificial Sequence
  Description of Artificial Sequence: Synthetic oligonucleotide
  Antisense strand to SEQ ID NO: 531775
aucaguaggguuaacaccc

SEQ ID NO: 531777 - RNA, 19 nt, Artificial Sequence
  Description of Artificial Sequence: Synthetic oligonucleotide
  Sense strand starting at position 3346 of SEQ ID NO: 318035
uuggacaaguugucugacu

SEQ ID NO: 531778 - RNA, 19 nt, Artificial Sequence
  Description of Artificial Sequence: Synthetic oligonucleotide
  Antisense strand to SEQ ID NO: 531777
agucagacaacuuguccaa

SEQ ID NO: 531779 - RNA, 19 nt, Artificial Sequence
  Description of Artificial Sequence: Synthetic oligonucleotide
  Sense strand starting at position 3351 of SEQ ID NO: 318035
caaguugucugacugccaa

SEQ ID NO: 531780 - RNA, 19 nt, Artificial Sequence
  Description of Artificial Sequence: Synthetic oligonucleotide
  Antisense strand to SEQ ID NO: 531779
uuggcagucagacaacuug

SEQ ID NO: 531781 - RNA, 19 nt, Artificial Sequence
  Description of Artificial Sequence: Synthetic oligonucleotide
  Sense strand starting at position 3355 of SEQ ID NO: 318035
uugucugacugccaauuaa

SEQ ID NO: 531782 - RNA, 19 nt, Artificial Sequence
  Description of Artificial Sequence: Synthetic oligonucleotide
  Antisense strand to SEQ ID NO: 531781
uuaauuggcagucagacaa

SEQ ID NO: 531783 - RNA, 19 nt, Artificial Sequence
  Description of Artificial Sequence: Synthetic oligonucleotide
  Sense strand starting at position 383 of SEQ ID NO: 318036
gggcaauaaccuugucucu

SEQ ID NO: 531784 - RNA, 19 nt, Artificial Sequence
  Description of Artificial Sequence: Synthetic oligonucleotide
  Antisense strand to SEQ ID NO: 531783
agagacaagguuauugccc

SEQ ID NO: 531785 - RNA, 19 nt, Artificial Sequence
  Description of Artificial Sequence: Synthetic oligonucleotide
  Sense strand starting at position 608 of SEQ ID NO: 318036
guaaauagcaacugagaga

SEQ ID NO: 531786 - RNA, 19 nt, Artificial Sequence
  Description of Artificial Sequence: Synthetic oligonucleotide
  Antisense strand to SEQ ID NO: 531785
ucucucaguugcuauuuac

SEQ ID NO: 531787 - RNA, 19 nt, Artificial Sequence
  Description of Artificial Sequence: Synthetic oligonucleotide
  Sense strand starting at position 629 of SEQ ID NO: 318036
uuuggcugaccauaucaaa

SEQ ID NO: 531788 - RNA, 19 nt, Artificial Sequence
  Description of Artificial Sequence: Synthetic oligonucleotide
  Antisense strand to SEQ ID NO: 531787
uuugauauggucagccaaa

SEQ ID NO: 531789 - RNA, 19 nt, Artificial Sequence
  Description of Artificial Sequence: Synthetic oligonucleotide
  Sense strand starting at position 878 of SEQ ID NO: 318036
ucgaauuccugaccacaac

SEQ ID NO: 531790 - RNA, 19 nt, Artificial Sequence
  Description of Artificial Sequence: Synthetic oligonucleotide
  Antisense strand to SEQ ID NO: 531789
guuguggucaggaauucga

SEQ ID NO: 531791 - RNA, 19 nt, Artificial Sequence
  Description of Artificial Sequence: Synthetic oligonucleotide
  Sense strand starting at position 1046 of SEQ ID NO: 318036
ugggaagucugauuguaaa

SEQ ID NO: 531792 - RNA, 19 nt, Artificial Sequence
  Description of Artificial Sequence: Synthetic oligonucleotide
  Antisense strand to SEQ ID NO: 531791
uuuacaaucagacuuccca

SEQ ID NO: 531793 - RNA, 19 nt, Artificial Sequence
  Description of Artificial Sequence: Synthetic oligonucleotide
  Sense strand starting at position 1066 of SEQ ID NO: 318036
augcaugcuguuuaaagga

SEQ ID NO: 531794 - RNA, 19 nt, Artificial Sequence
  Description of Artificial Sequence: Synthetic oligonucleotide
  Antisense strand to SEQ ID NO: 531793
uccuuuaaacagcaugcau

SEQ ID NO: 531795 - RNA, 19 nt, Artificial Sequence
  Description of Artificial Sequence: Synthetic oligonucleotide
  Sense strand starting at position 1472 of SEQ ID NO: 318036
agugaucuguuuccuggaa

SEQ ID NO: 531796 - RNA, 19 nt, Artificial Sequence
  Description of Artificial Sequence: Synthetic oligonucleotide
  Antisense strand to SEQ ID NO: 531795
uuccaggaaacagaucacu

SEQ ID NO: 531797 - RNA, 19 nt, Artificial Sequence
  Description of Artificial Sequence: Synthetic oligonucleotide
  Sense strand starting at position 1473 of SEQ ID NO: 318036
gugaucuguuuccuggaau

SEQ ID NO: 531798 - RNA, 19 nt, Artificial Sequence
  Description of Artificial Sequence: Synthetic oligonucleotide
  Antisense strand to SEQ ID NO: 531797
auuccaggaaacagaucac

SEQ ID NO: 531799 - RNA, 19 nt, Artificial Sequence
  Description of Artificial Sequence: Synthetic oligonucleotide
  Sense strand starting at position 1476 of SEQ ID NO: 318036
aucuguuuccuggaaucca

SEQ ID NO: 531800 - RNA, 19 nt, Artificial Sequence
  Description of Artificial Sequence: Synthetic oligonucleotide
  Antisense strand to SEQ ID NO: 531799
uggauuccaggaaacagau

SEQ ID NO: 531801 - RNA, 19 nt, Artificial Sequence
  Description of Artificial Sequence: Synthetic oligonucleotide
  Sense strand starting at position 1534 of SEQ ID NO: 318036
ugugauucccguuacauga

SEQ ID NO: 531802 - RNA, 19 nt, Artificial Sequence
  Description of Artificial Sequence: Synthetic oligonucleotide
  Antisense strand to SEQ ID NO: 531801
ucauguaacgggaaucaca

SEQ ID NO: 531803 - RNA, 19 nt, Artificial Sequence
  Description of Artificial Sequence: Synthetic oligonucleotide
  Sense strand starting at position 1544 of SEQ ID NO: 318036
guuacaugagcucggaaug

SEQ ID NO: 531804 - RNA, 19 nt, Artificial Sequence
  Description of Artificial Sequence: Synthetic oligonucleotide
  Antisense strand to SEQ ID NO: 531803
cauuccgagcucauguaac

SEQ ID NO: 531805 - RNA, 19 nt, Artificial Sequence
  Description of Artificial Sequence: Synthetic oligonucleotide
  Sense strand starting at position 1555 of SEQ ID NO: 318036
ucggaaugcuaucugccaa

SEQ ID NO: 531806 - RNA, 19 nt, Artificial Sequence
  Description of Artificial Sequence: Synthetic oligonucleotide
  Antisense strand to SEQ ID NO: 531805
uuggcagauagcauuccga

SEQ ID NO: 531807 - RNA, 19 nt, Artificial Sequence
  Description of Artificial Sequence: Synthetic oligonucleotide
  Sense strand starting at position 1562 of SEQ ID NO: 318036
gcuaucugccaacaaauga

SEQ ID NO: 531808 - RNA, 19 nt, Artificial Sequence
  Description of Artificial Sequence: Synthetic oligonucleotide
  Antisense strand to SEQ ID NO: 531807
ucauuuguuggcagauagc

SEQ ID NO: 531809 - RNA, 19 nt, Artificial Sequence
  Description of Artificial Sequence: Synthetic oligonucleotide
  Sense strand starting at position 1621 of SEQ ID NO: 318036
cuuaccaagcuaugugaaa

SEQ ID NO: 531810 - RNA, 19 nt, Artificial Sequence
  Description of Artificial Sequence: Synthetic oligonucleotide
  Antisense strand to SEQ ID NO: 531809
uuucacauagcuugguaag

SEQ ID NO: 531811 - RNA, 19 nt, Artificial Sequence
  Description of Artificial Sequence: Synthetic oligonucleotide
  Sense strand starting at position 1687 of SEQ ID NO: 318036
cucagagguuggucacuuu

SEQ ID NO: 531812 - RNA, 19 nt, Artificial Sequence
  Description of Artificial Sequence: Synthetic oligonucleotide
  Antisense strand to SEQ ID NO: 531811
aaagugaccaaccucugag

SEQ ID NO: 531813 - RNA, 19 nt, Artificial Sequence
  Description of Artificial Sequence: Synthetic oligonucleotide
  Sense strand starting at position 1996 of SEQ ID NO: 318036
gaaggacucucagccggaa

SEQ ID NO: 531814 - RNA, 19 nt, Artificial Sequence
  Description of Artificial Sequence: Synthetic oligonucleotide
  Antisense strand to SEQ ID NO: 531813
uuccggcugagaguccuuc

SEQ ID NO: 531815 - RNA, 19 nt, Artificial Sequence
  Description of Artificial Sequence: Synthetic oligonucleotide
  Sense strand starting at position 1999 of SEQ ID NO: 318036
ggacucucagccggaaacu

SEQ ID NO: 531816 - RNA, 19 nt, Artificial Sequence
  Description of Artificial Sequence: Synthetic oligonucleotide
  Antisense strand to SEQ ID NO: 531815
aguuuccggcugagagucc

SEQ ID NO: 531817 - RNA, 19 nt, Artificial Sequence
  Description of Artificial Sequence: Synthetic oligonucleotide
  Sense strand starting at position 2209 of SEQ ID NO: 318036
cggaaagagugaucgccau

SEQ ID NO: 531818 - RNA, 19 nt, Artificial Sequence
  Description of Artificial Sequence: Synthetic oligonucleotide
  Antisense strand to SEQ ID NO: 531817
auggcgaucacucuuuccg

SEQ ID NO: 531819 - RNA, 19 nt, Artificial Sequence
  Description of Artificial Sequence: Synthetic oligonucleotide
  Sense strand starting at position 2215 of SEQ ID NO: 318036
gagugaucgccauucgcuc

SEQ ID NO: 531820 - RNA, 19 nt, Artificial Sequence
  Description of Artificial Sequence: Synthetic oligonucleotide
  Antisense strand to SEQ ID NO: 531819
gagcgaauggcgaucacuc

SEQ ID NO: 531821 - RNA, 19 nt, Artificial Sequence
  Description of Artificial Sequence: Synthetic oligonucleotide
  Sense strand starting at position 2221 of SEQ ID NO: 318036
ucgccauucgcucucggaa

SEQ ID NO: 531822 - RNA, 19 nt, Artificial Sequence
  Description of Artificial Sequence: Synthetic oligonucleotide
  Antisense strand to SEQ ID NO: 531821
uuccgagagcgaauggcga

SEQ ID NO: 531823 - RNA, 19 nt, Artificial Sequence
  Description of Artificial Sequence: Synthetic oligonucleotide
  Sense strand starting at position 2354 of SEQ ID NO: 318036
uugcuucuugcuguguauu

SEQ ID NO: 531824 - RNA, 19 nt, Artificial Sequence
  Description of Artificial Sequence: Synthetic oligonucleotide
  Antisense strand to SEQ ID NO: 531823
aauacacagcaagaagcaa

SEQ ID NO: 531825 - RNA, 19 nt, Artificial Sequence
  Description of Artificial Sequence: Synthetic oligonucleotide
  Sense strand starting at position 2355 of SEQ ID NO: 318036
ugcuucuugcuguguauuu

SEQ ID NO: 531826 - RNA, 19 nt, Artificial Sequence
  Description of Artificial Sequence: Synthetic oligonucleotide
  Antisense strand to SEQ ID NO: 531825
aaauacacagcaagaagca

SEQ ID NO: 531827 - RNA, 19 nt, Artificial Sequence
  Description of Artificial Sequence: Synthetic oligonucleotide
  Sense strand starting at position 2422 of SEQ ID NO: 318036
cuacuuugagccugaugca

SEQ ID NO: 531828 - RNA, 19 nt, Artificial Sequence
  Description of Artificial Sequence: Synthetic oligonucleotide
  Antisense strand to SEQ ID NO: 531827
ugcaucaggcucaaaguag

SEQ ID NO: 531829 - RNA, 19 nt, Artificial Sequence
  Description of Artificial Sequence: Synthetic oligonucleotide
  Sense strand starting at position 2423 of SEQ ID NO: 318036
uacuuugagccugaugcau

SEQ ID NO: 531830 - RNA, 19 nt, Artificial Sequence
  Description of Artificial Sequence: Synthetic oligonucleotide
  Antisense strand to SEQ ID NO: 531829
augcaucaggcucaaagua

SEQ ID NO: 531831 - RNA, 19 nt, Artificial Sequence
  Description of Artificial Sequence: Synthetic oligonucleotide
  Sense strand starting at position 2429 of SEQ ID NO: 318036
gagccugaugcaugucuaa

SEQ ID NO: 531832 - RNA, 19 nt, Artificial Sequence
  Description of Artificial Sequence: Synthetic oligonucleotide
  Antisense strand to SEQ ID NO: 531831
uuagacaugcaucaggcuc

SEQ ID NO: 531833 - RNA, 19 nt, Artificial Sequence
  Description of Artificial Sequence: Synthetic oligonucleotide
  Sense strand starting at position 2440 of SEQ ID NO: 318036
augucuaagcacugaagaa

SEQ ID NO: 531834 - RNA, 19 nt, Artificial Sequence
  Description of Artificial Sequence: Synthetic oligonucleotide
  Antisense strand to SEQ ID NO: 531833
uucuucagugcuuagacau

SEQ ID NO: 531835 - RNA, 19 nt, Artificial Sequence
  Description of Artificial Sequence: Synthetic oligonucleotide
  Sense strand starting at position 2554 of SEQ ID NO: 318036
gugauaaugcuguggagaa

SEQ ID NO: 531836 - RNA, 19 nt, Artificial Sequence
  Description of Artificial Sequence: Synthetic oligonucleotide
  Antisense strand to SEQ ID NO: 531835
uucuccacagcauuaucac

SEQ ID NO: 531837 - RNA, 19 nt, Artificial Sequence
  Description of Artificial Sequence: Synthetic oligonucleotide
  Sense strand starting at position 2924 of SEQ ID NO: 318036
ggaguccucgcugggaaga

SEQ ID NO: 531838 - RNA, 19 nt, Artificial Sequence
  Description of Artificial Sequence: Synthetic oligonucleotide
  Antisense strand to SEQ ID NO: 531837
ucuucccagcgaggacucc

SEQ ID NO: 531839 - RNA, 19 nt, Artificial Sequence
  Description of Artificial Sequence: Synthetic oligonucleotide
  Sense strand starting at position 2970 of SEQ ID NO: 318036
ggguguuaacccuacugau

SEQ ID NO: 531840 - RNA, 19 nt, Artificial Sequence
  Description of Artificial Sequence: Synthetic oligonucleotide
  Antisense strand to SEQ ID NO: 531839
aucaguaggguuaacaccc

SEQ ID NO: 531841 - RNA, 19 nt, Artificial Sequence
  Description of Artificial Sequence: Synthetic oligonucleotide
  Sense strand starting at position 3191 of SEQ ID NO: 318036
gugagaagugacugaauuc

SEQ ID NO: 531842 - RNA, 19 nt, Artificial Sequence
  Description of Artificial Sequence: Synthetic oligonucleotide
  Antisense strand to SEQ ID NO: 531841
gaauucagucacuucucac

SEQ ID NO: 531843 - RNA, 19 nt, Artificial Sequence
  Description of Artificial Sequence: Synthetic oligonucleotide
  Sense strand starting at position 3255 of SEQ ID NO: 318036
aggauaccuccauagucuu

SEQ ID NO: 531844 - RNA, 19 nt, Artificial Sequence
  Description of Artificial Sequence: Synthetic oligonucleotide
  Antisense strand to SEQ ID NO: 531843
aagacuauggagguauccu

SEQ ID NO: 531845 - RNA, 19 nt, Artificial Sequence
  Description of Artificial Sequence: Synthetic oligonucleotide
  Sense strand starting at position 3262 of SEQ ID NO: 318036
cuccauagucuuuagcuga

SEQ ID NO: 531846 - RNA, 19 nt, Artificial Sequence
  Description of Artificial Sequence: Synthetic oligonucleotide
  Antisense strand to SEQ ID NO: 531845
ucagcuaaagacuauggag

SEQ ID NO: 531847 - RNA, 19 nt, Artificial Sequence
  Description of Artificial Sequence: Synthetic oligonucleotide
  Sense strand starting at position 3267 of SEQ ID NO: 318036
uagucuuuagcugagcaac

SEQ ID NO: 531848 - RNA, 19 nt, Artificial Sequence
  Description of Artificial Sequence: Synthetic oligonucleotide
  Antisense strand to SEQ ID NO: 531847
guugcucagcuaaagacua

SEQ ID NO: 531849 - RNA, 19 nt, Artificial Sequence
  Description of Artificial Sequence: Synthetic oligonucleotide
  Sense strand starting at position 3345 of SEQ ID NO: 318036
uuggacaaguugucugacu

SEQ ID NO: 531850 - RNA, 19 nt, Artificial Sequence
  Description of Artificial Sequence: Synthetic oligonucleotide
  Antisense strand to SEQ ID NO: 531849
agucagacaacuuguccaa

SEQ ID NO: 531851 - RNA, 19 nt, Artificial Sequence
  Description of Artificial Sequence: Synthetic oligonucleotide
  Sense strand starting at position 3350 of SEQ ID NO: 318036
caaguugucugacugccaa

SEQ ID NO: 531852 - RNA, 19 nt, Artificial Sequence
  Description of Artificial Sequence: Synthetic oligonucleotide
  Antisense strand to SEQ ID NO: 531851
uuggcagucagacaacuug

SEQ ID NO: 531853 - RNA, 19 nt, Artificial Sequence
  Description of Artificial Sequence: Synthetic oligonucleotide
  Sense strand starting at position 3576 of SEQ ID NO: 318036
aacagaagguaucuugcau

SEQ ID NO: 531854 - RNA, 19 nt, Artificial Sequence
  Description of Artificial Sequence: Synthetic oligonucleotide
  Antisense strand to SEQ ID NO: 531853
augcaagauaccuucuguu

SEQ ID NO: 531855 - RNA, 19 nt, Artificial Sequence
  Description of Artificial Sequence: Synthetic oligonucleotide
  Sense strand starting at position 3582 of SEQ ID NO: 318036
agguaucuugcauagcagu

SEQ ID NO: 531856 - RNA, 19 nt, Artificial Sequence
  Description of Artificial Sequence: Synthetic oligonucleotide
  Antisense strand to SEQ ID NO: 531855
acugcuaugcaagauaccu

SEQ ID NO: 531857 - RNA, 19 nt, Artificial Sequence
  Description of Artificial Sequence: Synthetic oligonucleotide
  Sense strand starting at position 3589 of SEQ ID NO: 318036
uugcauagcaguggaaaga

SEQ ID NO: 531858 - RNA, 19 nt, Artificial Sequence
  Description of Artificial Sequence: Synthetic oligonucleotide
  Antisense strand to SEQ ID NO: 531857
ucuuuccacugcuaugcaa

SEQ ID NO: 531859 - RNA, 19 nt, Artificial Sequence
  Description of Artificial Sequence: Synthetic oligonucleotide
  Sense strand starting at position 3960 of SEQ ID NO: 318036
gaugcauuccucuaggaca

SEQ ID NO: 531860 - RNA, 19 nt, Artificial Sequence
  Description of Artificial Sequence: Synthetic oligonucleotide
  Antisense strand to SEQ ID NO: 531859
uguccuagaggaaugcauc

SEQ ID NO: 531861 - RNA, 19 nt, Artificial Sequence
  Description of Artificial Sequence: Synthetic oligonucleotide
  Sense strand starting at position 3962 of SEQ ID NO: 318036
ugcauuccucuaggacaaa

SEQ ID NO: 531862 - RNA, 19 nt, Artificial Sequence
  Description of Artificial Sequence: Synthetic oligonucleotide
  Antisense strand to SEQ ID NO: 531861
uuuguccuagaggaaugca

SEQ ID NO: 531863 - RNA, 19 nt, Artificial Sequence
  Description of Artificial Sequence: Synthetic oligonucleotide
  Sense strand starting at position 2268 of SEQ ID NO: 318037
uucugaggagcucgaucuu

SEQ ID NO: 531864 - RNA, 19 nt, Artificial Sequence
  Description of Artificial Sequence: Synthetic oligonucleotide
  Antisense strand to SEQ ID NO: 531863
aagaucgagcuccucagaa

SEQ ID NO: 531865 - RNA, 19 nt, Artificial Sequence
  Description of Artificial Sequence: Synthetic oligonucleotide
  Sense strand starting at position 2274 of SEQ ID NO: 318037
ggagcucgaucuugucuuu

SEQ ID NO: 531866 - RNA, 19 nt, Artificial Sequence
  Description of Artificial Sequence: Synthetic oligonucleotide
  Antisense strand to SEQ ID NO: 531865
aaagacaagaucgagcucc

SEQ ID NO: 531867 - RNA, 19 nt, Artificial Sequence
  Description of Artificial Sequence: Synthetic oligonucleotide
  Sense strand starting at position 2277 of SEQ ID NO: 318037
gcucgaucuugucuuucua

SEQ ID NO: 531868 - RNA, 19 nt, Artificial Sequence
  Description of Artificial Sequence: Synthetic oligonucleotide
  Antisense strand to SEQ ID NO: 531867
uagaaagacaagaucgagc

SEQ ID NO: 531869 - RNA, 19 nt, Artificial Sequence
  Description of Artificial Sequence: Synthetic oligonucleotide
  Sense strand starting at position 2438 of SEQ ID NO: 318037
augucuaagcacugaggaa

SEQ ID NO: 531870 - RNA, 19 nt, Artificial Sequence
  Description of Artificial Sequence: Synthetic oligonucleotide
  Antisense strand to SEQ ID NO: 531869
uuccucagugcuuagacau

SEQ ID NO: 531871 - RNA, 19 nt, Artificial Sequence
  Description of Artificial Sequence: Synthetic oligonucleotide
  Sense strand starting at position 2587 of SEQ ID NO: 318037
gggagaaguuugcaguuua

SEQ ID NO: 531872 - RNA, 19 nt, Artificial Sequence
  Description of Artificial Sequence: Synthetic oligonucleotide
  Antisense strand to SEQ ID NO: 531871
uaaacugcaaacuucuccc

SEQ ID NO: 531873 - RNA, 19 nt, Artificial Sequence
  Description of Artificial Sequence: Synthetic oligonucleotide
  Sense strand starting at position 2968 of SEQ ID NO: 318037
ggguguuaacccugcugau

SEQ ID NO: 531874 - RNA, 19 nt, Artificial Sequence
  Description of Artificial Sequence: Synthetic oligonucleotide
  Antisense strand to SEQ ID NO: 531873
aucagcaggguuaacaccc

SEQ ID NO: 531875 - RNA, 19 nt, Artificial Sequence
  Description of Artificial Sequence: Synthetic oligonucleotide
  Sense strand starting at position 3343 of SEQ ID NO: 318037
uuggacaaguuguaugacu

SEQ ID NO: 531876 - RNA, 19 nt, Artificial Sequence
  Description of Artificial Sequence: Synthetic oligonucleotide
  Antisense strand to SEQ ID NO: 531875
agucauacaacuuguccaa

SEQ ID NO: 531877 - RNA, 19 nt, Artificial Sequence
  Description of Artificial Sequence: Synthetic oligonucleotide
  Sense strand starting at position 3348 of SEQ ID NO: 318037
caaguuguaugacugccaa

SEQ ID NO: 531878 - RNA, 19 nt, Artificial Sequence
  Description of Artificial Sequence: Synthetic oligonucleotide
  Antisense strand to SEQ ID NO: 531877
uuggcagucauacaacuug

SEQ ID NO: 531879 - RNA, 19 nt, Artificial Sequence
  Description of Artificial Sequence: Synthetic oligonucleotide
  Sense strand starting at position 3352 of SEQ ID NO: 318037
uuguaugacugccaauuaa

SEQ ID NO: 531880 - RNA, 19 nt, Artificial Sequence
  Description of Artificial Sequence: Synthetic oligonucleotide
  Antisense strand to SEQ ID NO: 531879
uuaauuggcagucauacaa

SEQ ID NO: 531881 - RNA, 19 nt, Artificial Sequence
  Description of Artificial Sequence: Synthetic oligonucleotide
  Sense strand starting at position 380 of SEQ ID NO: 318038
gggcaauaaccuugucucu

SEQ ID NO: 531882 - RNA, 19 nt, Artificial Sequence
  Description of Artificial Sequence: Synthetic oligonucleotide
  Antisense strand to SEQ ID NO: 531881
agagacaagguuauugccc

SEQ ID NO: 531883 - RNA, 19 nt, Artificial Sequence
  Description of Artificial Sequence: Synthetic oligonucleotide
  Sense strand starting at position 605 of SEQ ID NO: 318038
guaaauagcaacugagaga

SEQ ID NO: 531884 - RNA, 19 nt, Artificial Sequence
  Description of Artificial Sequence: Synthetic oligonucleotide
  Antisense strand to SEQ ID NO: 531883
ucucucaguugcuauuuac

SEQ ID NO: 531885 - RNA, 19 nt, Artificial Sequence
  Description of Artificial Sequence: Synthetic oligonucleotide
  Sense strand starting at position 626 of SEQ ID NO: 318038
uuuggcugaccauaucaaa

SEQ ID NO: 531886 - RNA, 19 nt, Artificial Sequence
  Description of Artificial Sequence: Synthetic oligonucleotide
  Antisense strand to SEQ ID NO: 531885
uuugauauggucagccaaa

SEQ ID NO: 531887 - RNA, 19 nt, Artificial Sequence
  Description of Artificial Sequence: Synthetic oligonucleotide
  Sense strand starting at position 875 of SEQ ID NO: 318038
ucgaauuccugaccacaac

SEQ ID NO: 531888 - RNA, 19 nt, Artificial Sequence
  Description of Artificial Sequence: Synthetic oligonucleotide
  Antisense strand to SEQ ID NO: 531887
guuguggucaggaauucga

SEQ ID NO: 531889 - RNA, 19 nt, Artificial Sequence
  Description of Artificial Sequence: Synthetic oligonucleotide
  Sense strand starting at position 1043 of SEQ ID NO: 318038
ugggaagucugauuguaaa

SEQ ID NO: 531890 - RNA, 19 nt, Artificial Sequence
  Description of Artificial Sequence: Synthetic oligonucleotide
  Antisense strand to SEQ ID NO: 531889
uuuacaaucagacuuccca

SEQ ID NO: 531891 - RNA, 19 nt, Artificial Sequence
  Description of Artificial Sequence: Synthetic oligonucleotide
  Sense strand starting at position 1063 of SEQ ID NO: 318038
augcaugcuguuuaaagga

SEQ ID NO: 531892 - RNA, 19 nt, Artificial Sequence
  Description of Artificial Sequence: Synthetic oligonucleotide
  Antisense strand to SEQ ID NO: 531891
uccuuuaaacagcaugcau

SEQ ID NO: 531893 - RNA, 19 nt, Artificial Sequence
  Description of Artificial Sequence: Synthetic oligonucleotide
  Sense strand starting at position 1469 of SEQ ID NO: 318038
agugaucuguuuccuggaa

SEQ ID NO: 531894 - RNA, 19 nt, Artificial Sequence
  Description of Artificial Sequence: Synthetic oligonucleotide
  Antisense strand to SEQ ID NO: 531893
uuccaggaaacagaucacu

SEQ ID NO: 531895 - RNA, 19 nt, Artificial Sequence
  Description of Artificial Sequence: Synthetic oligonucleotide
  Sense strand starting at position 1470 of SEQ ID NO: 318038
gugaucuguuuccuggaau

SEQ ID NO: 531896 - RNA, 19 nt, Artificial Sequence
  Description of Artificial Sequence: Synthetic oligonucleotide
  Antisense strand to SEQ ID NO: 531895
auuccaggaaacagaucac

SEQ ID NO: 531897 - RNA, 19 nt, Artificial Sequence
  Description of Artificial Sequence: Synthetic oligonucleotide
  Sense strand starting at position 1473 of SEQ ID NO: 318038
aucuguuuccuggaaucca

SEQ ID NO: 531898 - RNA, 19 nt, Artificial Sequence
  Description of Artificial Sequence: Synthetic oligonucleotide
  Antisense strand to SEQ ID NO: 531897
uggauuccaggaaacagau

SEQ ID NO: 531899 - RNA, 19 nt, Artificial Sequence
  Description of Artificial Sequence: Synthetic oligonucleotide
  Sense strand starting at position 1531 of SEQ ID NO: 318038
ugugauucccguuacauga

SEQ ID NO: 531900 - RNA, 19 nt, Artificial Sequence
  Description of Artificial Sequence: Synthetic oligonucleotide
  Antisense strand to SEQ ID NO: 531899
ucauguaacgggaaucaca

SEQ ID NO: 531901 - RNA, 19 nt, Artificial Sequence
  Description of Artificial Sequence: Synthetic oligonucleotide
  Sense strand starting at position 1541 of SEQ ID NO: 318038
guuacaugagcucggaaug

SEQ ID NO: 531902 - RNA, 19 nt, Artificial Sequence
  Description of Artificial Sequence: Synthetic oligonucleotide
  Antisense strand to SEQ ID NO: 531901
cauuccgagcucauguaac

SEQ ID NO: 531903 - RNA, 19 nt, Artificial Sequence
  Description of Artificial Sequence: Synthetic oligonucleotide
  Sense strand starting at position 1552 of SEQ ID NO: 318038
ucggaaugcuaucugccaa

SEQ ID NO: 531904 - RNA, 19 nt, Artificial Sequence
  Description of Artificial Sequence: Synthetic oligonucleotide
  Antisense strand to SEQ ID NO: 531903
uuggcagauagcauuccga

SEQ ID NO: 531905 - RNA, 19 nt, Artificial Sequence
  Description of Artificial Sequence: Synthetic oligonucleotide
  Sense strand starting at position 1559 of SEQ ID NO: 318038
gcuaucugccaacaaauga

SEQ ID NO: 531906 - RNA, 19 nt, Artificial Sequence
  Description of Artificial Sequence: Synthetic oligonucleotide
  Antisense strand to SEQ ID NO: 531905
ucauuuguuggcagauagc

SEQ ID NO: 531907 - RNA, 19 nt, Artificial Sequence
  Description of Artificial Sequence: Synthetic oligonucleotide
  Sense strand starting at position 1618 of SEQ ID NO: 318038
cuuaccaagcuaugugaaa

SEQ ID NO: 531908 - RNA, 19 nt, Artificial Sequence
  Description of Artificial Sequence: Synthetic oligonucleotide
  Antisense strand to SEQ ID NO: 531907
uuucacauagcuugguaag

SEQ ID NO: 531909 - RNA, 19 nt, Artificial Sequence
  Description of Artificial Sequence: Synthetic oligonucleotide
  Sense strand starting at position 1684 of SEQ ID NO: 318038
cucagagguuggucacuuu

SEQ ID NO: 531910 - RNA, 19 nt, Artificial Sequence
  Description of Artificial Sequence: Synthetic oligonucleotide
  Antisense strand to SEQ ID NO: 531909
aaagugaccaaccucugag

SEQ ID NO: 531911 - RNA, 19 nt, Artificial Sequence
  Description of Artificial Sequence: Synthetic oligonucleotide
  Sense strand starting at position 1993 of SEQ ID NO: 318038
gaaggacucucagccggaa

SEQ ID NO: 531912 - RNA, 19 nt, Artificial Sequence
  Description of Artificial Sequence: Synthetic oligonucleotide
  Antisense strand to SEQ ID NO: 531911
uuccggcugagaguccuuc

SEQ ID NO: 531913 - RNA, 19 nt, Artificial Sequence
  Description of Artificial Sequence: Synthetic oligonucleotide
  Sense strand starting at position 1996 of SEQ ID NO: 318038
ggacucucagccggaaacu

SEQ ID NO: 531914 - RNA, 19 nt, Artificial Sequence
  Description of Artificial Sequence: Synthetic oligonucleotide
  Antisense strand to SEQ ID NO: 531913
aguuuccggcugagagucc

SEQ ID NO: 531915 - RNA, 19 nt, Artificial Sequence
  Description of Artificial Sequence: Synthetic oligonucleotide
  Sense strand starting at position 2206 of SEQ ID NO: 318038
cggaaagagugaucgccau

SEQ ID NO: 531916 - RNA, 19 nt, Artificial Sequence
  Description of Artificial Sequence: Synthetic oligonucleotide
  Antisense strand to SEQ ID NO: 531915
auggcgaucacucuuuccg

SEQ ID NO: 531917 - RNA, 19 nt, Artificial Sequence
  Description of Artificial Sequence: Synthetic oligonucleotide
  Sense strand starting at position 2212 of SEQ ID NO: 318038
gagugaucgccauucgcuc

SEQ ID NO: 531918 - RNA, 19 nt, Artificial Sequence
  Description of Artificial Sequence: Synthetic oligonucleotide
  Antisense strand to SEQ ID NO: 531917
gagcgaauggcgaucacuc

SEQ ID NO: 531919 - RNA, 19 nt, Artificial Sequence
  Description of Artificial Sequence: Synthetic oligonucleotide
  Sense strand starting at position 2218 of SEQ ID NO: 318038
ucgccauucgcucucggaa

SEQ ID NO: 531920 - RNA, 19 nt, Artificial Sequence
  Description of Artificial Sequence: Synthetic oligonucleotide
  Antisense strand to SEQ ID NO: 531919
uuccgagagcgaauggcga

SEQ ID NO: 531921 - RNA, 19 nt, Artificial Sequence
  Description of Artificial Sequence: Synthetic oligonucleotide
  Sense strand starting at position 2351 of SEQ ID NO: 318038
uugcuucuugcuguguauu

SEQ ID NO: 531922 - RNA, 19 nt, Artificial Sequence
  Description of Artificial Sequence: Synthetic oligonucleotide
  Antisense strand to SEQ ID NO: 531921
aauacacagcaagaagcaa

SEQ ID NO: 531923 - RNA, 19 nt, Artificial Sequence
  Description of Artificial Sequence: Synthetic oligonucleotide
  Sense strand starting at position 2352 of SEQ ID NO: 318038
ugcuucuugcuguguauuu

SEQ ID NO: 531924 - RNA, 19 nt, Artificial Sequence
  Description of Artificial Sequence: Synthetic oligonucleotide
  Antisense strand to SEQ ID NO: 531923
aaauacacagcaagaagca

SEQ ID NO: 531925 - RNA, 19 nt, Artificial Sequence
  Description of Artificial Sequence: Synthetic oligonucleotide
  Sense strand starting at position 2419 of SEQ ID NO: 318038
cuacuuugagccugaugca

SEQ ID NO: 531926 - RNA, 19 nt, Artificial Sequence
  Description of Artificial Sequence: Synthetic oligonucleotide
  Antisense strand to SEQ ID NO: 531925
ugcaucaggcucaaaguag

SEQ ID NO: 531927 - RNA, 19 nt, Artificial Sequence
  Description of Artificial Sequence: Synthetic oligonucleotide
  Sense strand starting at position 2420 of SEQ ID NO: 318038
uacuuugagccugaugcau

SEQ ID NO: 531928 - RNA, 19 nt, Artificial Sequence
  Description of Artificial Sequence: Synthetic oligonucleotide
  Antisense strand to SEQ ID NO: 531927
augcaucaggcucaaagua

SEQ ID NO: 531929 - RNA, 19 nt, Artificial Sequence
  Description of Artificial Sequence: Synthetic oligonucleotide
  Sense strand starting at position 2426 of SEQ ID NO: 318038
gagccugaugcaugucuaa

SEQ ID NO: 531930 - RNA, 19 nt, Artificial Sequence
  Description of Artificial Sequence: Synthetic oligonucleotide
  Antisense strand to SEQ ID NO: 531929
uuagacaugcaucaggcuc

SEQ ID NO: 531931 - RNA, 19 nt, Artificial Sequence
  Description of Artificial Sequence: Synthetic oligonucleotide
  Sense strand starting at position 2437 of SEQ ID NO: 318038
augucuaagcacugaagaa

SEQ ID NO: 531932 - RNA, 19 nt, Artificial Sequence
  Description of Artificial Sequence: Synthetic oligonucleotide
  Antisense strand to SEQ ID NO: 531931
uucuucagugcuuagacau

SEQ ID NO: 531933 - RNA, 19 nt, Artificial Sequence
  Description of Artificial Sequence: Synthetic oligonucleotide
  Sense strand starting at position 2551 of SEQ ID NO: 318038
gugauaaugcuguggagaa

SEQ ID NO: 531934 - RNA, 19 nt, Artificial Sequence
  Description of Artificial Sequence: Synthetic oligonucleotide
  Antisense strand to SEQ ID NO: 531933
uucuccacagcauuaucac

SEQ ID NO: 531935 - RNA, 19 nt, Artificial Sequence
  Description of Artificial Sequence: Synthetic oligonucleotide
  Sense strand starting at position 2921 of SEQ ID NO: 318038
ggaguccucgcugggaaga

SEQ ID NO: 531936 - RNA, 19 nt, Artificial Sequence
  Description of Artificial Sequence: Synthetic oligonucleotide
  Antisense strand to SEQ ID NO: 531935
ucuucccagcgaggacucc

SEQ ID NO: 531937 - RNA, 19 nt, Artificial Sequence
  Description of Artificial Sequence: Synthetic oligonucleotide
  Sense strand starting at position 2967 of SEQ ID NO: 318038
ggguguuaacccuacugau

SEQ ID NO: 531938 - RNA, 19 nt, Artificial Sequence
  Description of Artificial Sequence: Synthetic oligonucleotide
  Antisense strand to SEQ ID NO: 531937
aucaguaggguuaacaccc

SEQ ID NO: 531939 - RNA, 19 nt, Artificial Sequence
  Description of Artificial Sequence: Synthetic oligonucleotide
  Sense strand starting at position 3188 of SEQ ID NO: 318038
gugagaagugacugaauuc

SEQ ID NO: 531940 - RNA, 19 nt, Artificial Sequence
  Description of Artificial Sequence: Synthetic oligonucleotide
  Antisense strand to SEQ ID NO: 531939
gaauucagucacuucucac

SEQ ID NO: 531941 - RNA, 19 nt, Artificial Sequence
  Description of Artificial Sequence: Synthetic oligonucleotide
  Sense strand starting at position 3252 of SEQ ID NO: 318038
aggauaccuccauagucuu

SEQ ID NO: 531942 - RNA, 19 nt, Artificial Sequence
  Description of Artificial Sequence: Synthetic oligonucleotide
  Antisense strand to SEQ ID NO: 531941
aagacuauggagguauccu

SEQ ID NO: 531943 - RNA, 19 nt, Artificial Sequence
  Description of Artificial Sequence: Synthetic oligonucleotide
  Sense strand starting at position 3259 of SEQ ID NO: 318038
cuccauagucuuuagcuga

SEQ ID NO: 531944 - RNA, 19 nt, Artificial Sequence
  Description of Artificial Sequence: Synthetic oligonucleotide
  Antisense strand to SEQ ID NO: 531943
ucagcuaaagacuauggag

SEQ ID NO: 531945 - RNA, 19 nt, Artificial Sequence
  Description of Artificial Sequence: Synthetic oligonucleotide
  Sense strand starting at position 3264 of SEQ ID NO: 318038
uagucuuuagcugagcaac

SEQ ID NO: 531946 - RNA, 19 nt, Artificial Sequence
  Description of Artificial Sequence: Synthetic oligonucleotide
  Antisense strand to SEQ ID NO: 531945
guugcucagcuaaagacua

SEQ ID NO: 531947 - RNA, 19 nt, Artificial Sequence
  Description of Artificial Sequence: Synthetic oligonucleotide
  Sense strand starting at position 3342 of SEQ ID NO: 318038
uuggacaaguugucugacu

SEQ ID NO: 531948 - RNA, 19 nt, Artificial Sequence
  Description of Artificial Sequence: Synthetic oligonucleotide
  Antisense strand to SEQ ID NO: 531947
agucagacaacuuguccaa

SEQ ID NO: 531949 - RNA, 19 nt, Artificial Sequence
  Description of Artificial Sequence: Synthetic oligonucleotide
  Sense strand starting at position 3347 of SEQ ID NO: 318038
caaguugucugacugccaa

SEQ ID NO: 531950 - RNA, 19 nt, Artificial Sequence
  Description of Artificial Sequence: Synthetic oligonucleotide
  Antisense strand to SEQ ID NO: 531949
uuggcagucagacaacuug

SEQ ID NO: 531951 - RNA, 19 nt, Artificial Sequence
  Description of Artificial Sequence: Synthetic oligonucleotide
  Sense strand starting at position 3573 of SEQ ID NO: 318038
aacagaagguaucuugcau

SEQ ID NO: 531952 - RNA, 19 nt, Artificial Sequence
  Description of Artificial Sequence: Synthetic oligonucleotide
  Antisense strand to SEQ ID NO: 531951
augcaagauaccuucuguu

SEQ ID NO: 531953 - RNA, 19 nt, Artificial Sequence
  Description of Artificial Sequence: Synthetic oligonucleotide
  Sense strand starting at position 3579 of SEQ ID NO: 318038
agguaucuugcauagcagu

SEQ ID NO: 531954 - RNA, 19 nt, Artificial Sequence
  Description of Artificial Sequence: Synthetic oligonucleotide
  Antisense strand to SEQ ID NO: 531953
acugcuaugcaagauaccu

SEQ ID NO: 531955 - RNA, 19 nt, Artificial Sequence
  Description of Artificial Sequence: Synthetic oligonucleotide
  Sense strand starting at position 3586 of SEQ ID NO: 318038
uugcauagcaguggaaaga

SEQ ID NO: 531956 - RNA, 19 nt, Artificial Sequence
  Description of Artificial Sequence: Synthetic oligonucleotide
  Antisense strand to SEQ ID NO: 531955
ucuuuccacugcuaugcaa

SEQ ID NO: 531957 - RNA, 19 nt, Artificial Sequence
  Description of Artificial Sequence: Synthetic oligonucleotide
  Sense strand starting at position 3957 of SEQ ID NO: 318038
gaugcauuccucuaggaca

SEQ ID NO: 531958 - RNA, 19 nt, Artificial Sequence
  Description of Artificial Sequence: Synthetic oligonucleotide
  Antisense strand to SEQ ID NO: 531957
uguccuagaggaaugcauc

SEQ ID NO: 531959 - RNA, 19 nt, Artificial Sequence
  Description of Artificial Sequence: Synthetic oligonucleotide
  Sense strand starting at position 3959 of SEQ ID NO: 318038
ugcauuccucuaggacaaa

SEQ ID NO: 531960 - RNA, 19 nt, Artificial Sequence
  Description of Artificial Sequence: Synthetic oligonucleotide
  Antisense strand to SEQ ID NO: 531959
uuuguccuagaggaaugca

SEQ ID NO: 531961 - RNA, 19 nt, Artificial Sequence
  Description of Artificial Sequence: Synthetic oligonucleotide
  Sense strand starting at position 2291 of SEQ ID NO: 318039
uucugaggagcucgaucuu

SEQ ID NO: 531962 - RNA, 19 nt, Artificial Sequence
  Description of Artificial Sequence: Synthetic oligonucleotide
  Antisense strand to SEQ ID NO: 531961
aagaucgagcuccucagaa

SEQ ID NO: 531963 - RNA, 19 nt, Artificial Sequence
  Description of Artificial Sequence: Synthetic oligonucleotide
  Sense strand starting at position 2297 of SEQ ID NO: 318039
ggagcucgaucuugucuuu

SEQ ID NO: 531964 - RNA, 19 nt, Artificial Sequence
  Description of Artificial Sequence: Synthetic oligonucleotide
  Antisense strand to SEQ ID NO: 531963
aaagacaagaucgagcucc

SEQ ID NO: 531965 - RNA, 19 nt, Artificial Sequence
  Description of Artificial Sequence: Synthetic oligonucleotide
  Sense strand starting at position 2300 of SEQ ID NO: 318039
gcucgaucuugucuuucua

SEQ ID NO: 531966 - RNA, 19 nt, Artificial Sequence
  Description of Artificial Sequence: Synthetic oligonucleotide
  Antisense strand to SEQ ID NO: 531965
uagaaagacaagaucgagc

SEQ ID NO: 531967 - RNA, 19 nt, Artificial Sequence
  Description of Artificial Sequence: Synthetic oligonucleotide
  Sense strand starting at position 2461 of SEQ ID NO: 318039
augucuaagcacugaggaa

SEQ ID NO: 531968 - RNA, 19 nt, Artificial Sequence
  Description of Artificial Sequence: Synthetic oligonucleotide
  Antisense strand to SEQ ID NO: 531967
uuccucagugcuuagacau

SEQ ID NO: 531969 - RNA, 19 nt, Artificial Sequence
  Description of Artificial Sequence: Synthetic oligonucleotide
  Sense strand starting at position 2610 of SEQ ID NO: 318039
gggagaaguuugcaguuua

SEQ ID NO: 531970 - RNA, 19 nt, Artificial Sequence
  Description of Artificial Sequence: Synthetic oligonucleotide
  Antisense strand to SEQ ID NO: 531969
uaaacugcaaacuucuccc

SEQ ID NO: 531971 - RNA, 19 nt, Artificial Sequence
  Description of Artificial Sequence: Synthetic oligonucleotide
  Sense strand starting at position 2991 of SEQ ID NO: 318039
ggguguuaacccugcugau

SEQ ID NO: 531972 - RNA, 19 nt, Artificial Sequence
  Description of Artificial Sequence: Synthetic oligonucleotide
  Antisense strand to SEQ ID NO: 531971
aucagcaggguuaacaccc

SEQ ID NO: 531973 - RNA, 19 nt, Artificial Sequence
  Description of Artificial Sequence: Synthetic oligonucleotide
  Sense strand starting at position 3366 of SEQ ID NO: 318039
uuggacaaguuguaugacu

SEQ ID NO: 531974 - RNA, 19 nt, Artificial Sequence
  Description of Artificial Sequence: Synthetic oligonucleotide
  Antisense strand to SEQ ID NO: 531973
agucauacaacuuguccaa

SEQ ID NO: 531975 - RNA, 19 nt, Artificial Sequence
  Description of Artificial Sequence: Synthetic oligonucleotide
  Sense strand starting at position 3371 of SEQ ID NO: 318039
caaguuguaugacugccaa

SEQ ID NO: 531976 - RNA, 19 nt, Artificial Sequence
  Description of Artificial Sequence: Synthetic oligonucleotide
  Antisense strand to SEQ ID NO: 531975
uuggcagucauacaacuug

SEQ ID NO: 531977 - RNA, 19 nt, Artificial Sequence
  Description of Artificial Sequence: Synthetic oligonucleotide
  Sense strand starting at position 3375 of SEQ ID NO: 318039
uuguaugacugccaauuaa

SEQ ID NO: 531978 - RNA, 19 nt, Artificial Sequence
  Description of Artificial Sequence: Synthetic oligonucleotide
  Antisense strand to SEQ ID NO: 531977
uuaauuggcagucauacaa

SEQ ID NO: 531979 - RNA, 19 nt, Artificial Sequence
  Description of Artificial Sequence: Synthetic oligonucleotide
  Sense strand starting at position 403 of SEQ ID NO: 318040
gggcaauaaccuugucucu

SEQ ID NO: 531980 - RNA, 19 nt, Artificial Sequence
  Description of Artificial Sequence: Synthetic oligonucleotide
  Antisense strand to SEQ ID NO: 531979
agagacaagguuauugccc

SEQ ID NO: 531981 - RNA, 19 nt, Artificial Sequence
  Description of Artificial Sequence: Synthetic oligonucleotide
  Sense strand starting at position 628 of SEQ ID NO: 318040
guaaauagcaacugagaga

SEQ ID NO: 531982 - RNA, 19 nt, Artificial Sequence
  Description of Artificial Sequence: Synthetic oligonucleotide
  Antisense strand to SEQ ID NO: 531981
ucucucaguugcuauuuac

SEQ ID NO: 531983 - RNA, 19 nt, Artificial Sequence
  Description of Artificial Sequence: Synthetic oligonucleotide
  Sense strand starting at position 649 of SEQ ID NO: 318040
uuuggcugaccauaucaaa

SEQ ID NO: 531984 - RNA, 19 nt, Artificial Sequence
  Description of Artificial Sequence: Synthetic oligonucleotide
  Antisense strand to SEQ ID NO: 531983
uuugauauggucagccaaa

SEQ ID NO: 531985 - RNA, 19 nt, Artificial Sequence
  Description of Artificial Sequence: Synthetic oligonucleotide
  Sense strand starting at position 898 of SEQ ID NO: 318040
ucgaauuccugaccacaac

SEQ ID NO: 531986 - RNA, 19 nt, Artificial Sequence
  Description of Artificial Sequence: Synthetic oligonucleotide
  Antisense strand to SEQ ID NO: 531985
guuguggucaggaauucga

SEQ ID NO: 531987 - RNA, 19 nt, Artificial Sequence
  Description of Artificial Sequence: Synthetic oligonucleotide
  Sense strand starting at position 1066 of SEQ ID NO: 318040
ugggaagucugauuguaaa

SEQ ID NO: 531988 - RNA, 19 nt, Artificial Sequence
  Description of Artificial Sequence: Synthetic oligonucleotide
  Antisense strand to SEQ ID NO: 531987
uuuacaaucagacuuccca

SEQ ID NO: 531989 - RNA, 19 nt, Artificial Sequence
  Description of Artificial Sequence: Synthetic oligonucleotide
  Sense strand starting at position 1086 of SEQ ID NO: 318040
augcaugcuguuuaaagga

SEQ ID NO: 531990 - RNA, 19 nt, Artificial Sequence
  Description of Artificial Sequence: Synthetic oligonucleotide
  Antisense strand to SEQ ID NO: 531989
uccuuuaaacagcaugcau

SEQ ID NO: 531991 - RNA, 19 nt, Artificial Sequence
  Description of Artificial Sequence: Synthetic oligonucleotide
  Sense strand starting at position 1492 of SEQ ID NO: 318040
agugaucuguuuccuggaa

SEQ ID NO: 531992 - RNA, 19 nt, Artificial Sequence
  Description of Artificial Sequence: Synthetic oligonucleotide
  Antisense strand to SEQ ID NO: 531991
uuccaggaaacagaucacu

SEQ ID NO: 531993 - RNA, 19 nt, Artificial Sequence
  Description of Artificial Sequence: Synthetic oligonucleotide
  Sense strand starting at position 1493 of SEQ ID NO: 318040
gugaucuguuuccuggaau

SEQ ID NO: 531994 - RNA, 19 nt, Artificial Sequence
  Description of Artificial Sequence: Synthetic oligonucleotide
  Antisense strand to SEQ ID NO: 531993
auuccaggaaacagaucac

SEQ ID NO: 531995 - RNA, 19 nt, Artificial Sequence
  Description of Artificial Sequence: Synthetic oligonucleotide
  Sense strand starting at position 1496 of SEQ ID NO: 318040
aucuguuuccuggaaucca

SEQ ID NO: 531996 - RNA, 19 nt, Artificial Sequence
  Description of Artificial Sequence: Synthetic oligonucleotide
  Antisense strand to SEQ ID NO: 531995
uggauuccaggaaacagau

SEQ ID NO: 531997 - RNA, 19 nt, Artificial Sequence
  Description of Artificial Sequence: Synthetic oligonucleotide
  Sense strand starting at position 1554 of SEQ ID NO: 318040
ugugauucccguuacauga

SEQ ID NO: 531998 - RNA, 19 nt, Artificial Sequence
  Description of Artificial Sequence: Synthetic oligonucleotide
  Antisense strand to SEQ ID NO: 531997
ucauguaacgggaaucaca

SEQ ID NO: 531999 - RNA, 19 nt, Artificial Sequence
  Description of Artificial Sequence: Synthetic oligonucleotide
  Sense strand starting at position 1564 of SEQ ID NO: 318040
guuacaugagcucggaaug

SEQ ID NO: 532000 - RNA, 19 nt, Artificial Sequence
  Description of Artificial Sequence: Synthetic oligonucleotide
  Antisense strand to SEQ ID NO: 531999
cauuccgagcucauguaac

SEQ ID NO: 532001 - RNA, 19 nt, Artificial Sequence
  Description of Artificial Sequence: Synthetic oligonucleotide
  Sense strand starting at position 1575 of SEQ ID NO: 318040
ucggaaugcuaucugccaa

SEQ ID NO: 532002 - RNA, 19 nt, Artificial Sequence
  Description of Artificial Sequence: Synthetic oligonucleotide
  Antisense strand to SEQ ID NO: 532001
uuggcagauagcauuccga

SEQ ID NO: 532003 - RNA, 19 nt, Artificial Sequence
  Description of Artificial Sequence: Synthetic oligonucleotide
  Sense strand starting at position 1582 of SEQ ID NO: 318040
gcuaucugccaacaaauga

SEQ ID NO: 532004 - RNA, 19 nt, Artificial Sequence
  Description of Artificial Sequence: Synthetic oligonucleotide
  Antisense strand to SEQ ID NO: 532003
ucauuuguuggcagauagc

SEQ ID NO: 532005 - RNA, 19 nt, Artificial Sequence
  Description of Artificial Sequence: Synthetic oligonucleotide
  Sense strand starting at position 1641 of SEQ ID NO: 318040
cuuaccaagcuaugugaaa

SEQ ID NO: 532006 - RNA, 19 nt, Artificial Sequence
  Description of Artificial Sequence: Synthetic oligonucleotide
  Antisense strand to SEQ ID NO: 532005
uuucacauagcuugguaag

SEQ ID NO: 532007 - RNA, 19 nt, Artificial Sequence
  Description of Artificial Sequence: Synthetic oligonucleotide
  Sense strand starting at position 1707 of SEQ ID NO: 318040
cucagagguuggucacuuu

SEQ ID NO: 532008 - RNA, 19 nt, Artificial Sequence
  Description of Artificial Sequence: Synthetic oligonucleotide
  Antisense strand to SEQ ID NO: 532007
aaagugaccaaccucugag

SEQ ID NO: 532009 - RNA, 19 nt, Artificial Sequence
  Description of Artificial Sequence: Synthetic oligonucleotide
  Sense strand starting at position 2016 of SEQ ID NO: 318040
gaaggacucucagccggaa

SEQ ID NO: 532010 - RNA, 19 nt, Artificial Sequence
  Description of Artificial Sequence: Synthetic oligonucleotide
  Antisense strand to SEQ ID NO: 532009
uuccggcugagaguccuuc

SEQ ID NO: 532011 - RNA, 19 nt, Artificial Sequence
  Description of Artificial Sequence: Synthetic oligonucleotide
  Sense strand starting at position 2019 of SEQ ID NO: 318040
ggacucucagccggaaacu

SEQ ID NO: 532012 - RNA, 19 nt, Artificial Sequence
  Description of Artificial Sequence: Synthetic oligonucleotide
  Antisense strand to SEQ ID NO: 532011
aguuuccggcugagagucc

SEQ ID NO: 532013 - RNA, 19 nt, Artificial Sequence
  Description of Artificial Sequence: Synthetic oligonucleotide
  Sense strand starting at position 2229 of SEQ ID NO: 318040
cggaaagagugaucgccau

SEQ ID NO: 532014 - RNA, 19 nt, Artificial Sequence
  Description of Artificial Sequence: Synthetic oligonucleotide
  Antisense strand to SEQ ID NO: 532013
auggcgaucacucuuuccg

SEQ ID NO: 532015 - RNA, 19 nt, Artificial Sequence
  Description of Artificial Sequence: Synthetic oligonucleotide
  Sense strand starting at position 2235 of SEQ ID NO: 318040
gagugaucgccauucgcuc

SEQ ID NO: 532016 - RNA, 19 nt, Artificial Sequence
  Description of Artificial Sequence: Synthetic oligonucleotide
  Antisense strand to SEQ ID NO: 532015
gagcgaauggcgaucacuc

SEQ ID NO: 532017 - RNA, 19 nt, Artificial Sequence
  Description of Artificial Sequence: Synthetic oligonucleotide
  Sense strand starting at position 2241 of SEQ ID NO: 318040
ucgccauucgcucucggaa

SEQ ID NO: 532018 - RNA, 19 nt, Artificial Sequence
  Description of Artificial Sequence: Synthetic oligonucleotide
  Antisense strand to SEQ ID NO: 532017
uuccgagagcgaauggcga

SEQ ID NO: 532019 - RNA, 19 nt, Artificial Sequence
  Description of Artificial Sequence: Synthetic oligonucleotide
  Sense strand starting at position 2374 of SEQ ID NO: 318040
uugcuucuugcuguguauu

SEQ ID NO: 532020 - RNA, 19 nt, Artificial Sequence
  Description of Artificial Sequence: Synthetic oligonucleotide
  Antisense strand to SEQ ID NO: 532019
aauacacagcaagaagcaa

SEQ ID NO: 532021 - RNA, 19 nt, Artificial Sequence
  Description of Artificial Sequence: Synthetic oligonucleotide
  Sense strand starting at position 2375 of SEQ ID NO: 318040
ugcuucuugcuguguauuu

SEQ ID NO: 532022 - RNA, 19 nt, Artificial Sequence
  Description of Artificial Sequence: Synthetic oligonucleotide
  Antisense strand to SEQ ID NO: 532021
aaauacacagcaagaagca

SEQ ID NO: 532023 - RNA, 19 nt, Artificial Sequence
  Description of Artificial Sequence: Synthetic oligonucleotide
  Sense strand starting at position 2442 of SEQ ID NO: 318040
cuacuuugagccugaugca

SEQ ID NO: 532024 - RNA, 19 nt, Artificial Sequence
  Description of Artificial Sequence: Synthetic oligonucleotide
  Antisense strand to SEQ ID NO: 532023
ugcaucaggcucaaaguag

SEQ ID NO: 532025 - RNA, 19 nt, Artificial Sequence
  Description of Artificial Sequence: Synthetic oligonucleotide
  Sense strand starting at position 2443 of SEQ ID NO: 318040
uacuuugagccugaugcau

SEQ ID NO: 532026 - RNA, 19 nt, Artificial Sequence
  Description of Artificial Sequence: Synthetic oligonucleotide
  Antisense strand to SEQ ID NO: 532025
augcaucaggcucaaagua

SEQ ID NO: 532027 - RNA, 19 nt, Artificial Sequence
  Description of Artificial Sequence: Synthetic oligonucleotide
  Sense strand starting at position 2449 of SEQ ID NO: 318040
gagccugaugcaugucuaa

SEQ ID NO: 532028 - RNA, 19 nt, Artificial Sequence
  Description of Artificial Sequence: Synthetic oligonucleotide
  Antisense strand to SEQ ID NO: 532027
uuagacaugcaucaggcuc

SEQ ID NO: 532029 - RNA, 19 nt, Artificial Sequence
  Description of Artificial Sequence: Synthetic oligonucleotide
  Sense strand starting at position 2460 of SEQ ID NO: 318040
augucuaagcacugaagaa

SEQ ID NO: 532030 - RNA, 19 nt, Artificial Sequence
  Description of Artificial Sequence: Synthetic oligonucleotide
  Antisense strand to SEQ ID NO: 532029
uucuucagugcuuagacau

SEQ ID NO: 532031 - RNA, 19 nt, Artificial Sequence
  Description of Artificial Sequence: Synthetic oligonucleotide
  Sense strand starting at position 2574 of SEQ ID NO: 318040
gugauaaugcuguggagaa

SEQ ID NO: 532032 - RNA, 19 nt, Artificial Sequence
  Description of Artificial Sequence: Synthetic oligonucleotide
  Antisense strand to SEQ ID NO: 532031
uucuccacagcauuaucac

SEQ ID NO: 532033 - RNA, 19 nt, Artificial Sequence
  Description of Artificial Sequence: Synthetic oligonucleotide
  Sense strand starting at position 2944 of SEQ ID NO: 318040
ggaguccucgcugggaaga

SEQ ID NO: 532034 - RNA, 19 nt, Artificial Sequence
  Description of Artificial Sequence: Synthetic oligonucleotide
  Antisense strand to SEQ ID NO: 532033
ucuucccagcgaggacucc

SEQ ID NO: 532035 - RNA, 19 nt, Artificial Sequence
  Description of Artificial Sequence: Synthetic oligonucleotide
  Sense strand starting at position 2990 of SEQ ID NO: 318040
ggguguuaacccuacugau

SEQ ID NO: 532036 - RNA, 19 nt, Artificial Sequence
  Description of Artificial Sequence: Synthetic oligonucleotide
  Antisense strand to SEQ ID NO: 532035
aucaguaggguuaacaccc

SEQ ID NO: 532037 - RNA, 19 nt, Artificial Sequence
  Description of Artificial Sequence: Synthetic oligonucleotide
  Sense strand starting at position 3211 of SEQ ID NO: 318040
gugagaagugacugaauuc

SEQ ID NO: 532038 - RNA, 19 nt, Artificial Sequence
  Description of Artificial Sequence: Synthetic oligonucleotide
  Antisense strand to SEQ ID NO: 532037
gaauucagucacuucucac

SEQ ID NO: 532039 - RNA, 19 nt, Artificial Sequence
  Description of Artificial Sequence: Synthetic oligonucleotide
  Sense strand starting at position 3275 of SEQ ID NO: 318040
aggauaccuccauagucuu

SEQ ID NO: 532040 - RNA, 19 nt, Artificial Sequence
  Description of Artificial Sequence: Synthetic oligonucleotide
  Antisense strand to SEQ ID NO: 532039
aagacuauggagguauccu

SEQ ID NO: 532041 - RNA, 19 nt, Artificial Sequence
  Description of Artificial Sequence: Synthetic oligonucleotide
  Sense strand starting at position 3282 of SEQ ID NO: 318040
cuccauagucuuuagcuga

SEQ ID NO: 532042 - RNA, 19 nt, Artificial Sequence
  Description of Artificial Sequence: Synthetic oligonucleotide
  Antisense strand to SEQ ID NO: 532041
ucagcuaaagacuauggag

SEQ ID NO: 532043 - RNA, 19 nt, Artificial Sequence
  Description of Artificial Sequence: Synthetic oligonucleotide
  Sense strand starting at position 3287 of SEQ ID NO: 318040
uagucuuuagcugagcaac

SEQ ID NO: 532044 - RNA, 19 nt, Artificial Sequence
  Description of Artificial Sequence: Synthetic oligonucleotide
  Antisense strand to SEQ ID NO: 532043
guugcucagcuaaagacua

SEQ ID NO: 532045 - RNA, 19 nt, Artificial Sequence
  Description of Artificial Sequence: Synthetic oligonucleotide
  Sense strand starting at position 3365 of SEQ ID NO: 318040
uuggacaaguugucugacu

SEQ ID NO: 532046 - RNA, 19 nt, Artificial Sequence
  Description of Artificial Sequence: Synthetic oligonucleotide
  Antisense strand to SEQ ID NO: 532045
agucagacaacuuguccaa

SEQ ID NO: 532047 - RNA, 19 nt, Artificial Sequence
  Description of Artificial Sequence: Synthetic oligonucleotide
  Sense strand starting at position 3370 of SEQ ID NO: 318040
caaguugucugacugccaa

SEQ ID NO: 532048 - RNA, 19 nt, Artificial Sequence
  Description of Artificial Sequence: Synthetic oligonucleotide
  Antisense strand to SEQ ID NO: 532047
uuggcagucagacaacuug

SEQ ID NO: 532049 - RNA, 19 nt, Artificial Sequence
  Description of Artificial Sequence: Synthetic oligonucleotide
  Sense strand starting at position 3596 of SEQ ID NO: 318040
aacagaagguaucuugcau

SEQ ID NO: 532050 - RNA, 19 nt, Artificial Sequence
  Description of Artificial Sequence: Synthetic oligonucleotide
  Antisense strand to SEQ ID NO: 532049
augcaagauaccuucuguu

SEQ ID NO: 532051 - RNA, 19 nt, Artificial Sequence
  Description of Artificial Sequence: Synthetic oligonucleotide
  Sense strand starting at position 3602 of SEQ ID NO: 318040
agguaucuugcauagcagu

SEQ ID NO: 532052 - RNA, 19 nt, Artificial Sequence
  Description of Artificial Sequence: Synthetic oligonucleotide
  Antisense strand to SEQ ID NO: 532051
acugcuaugcaagauaccu

SEQ ID NO: 532053 - RNA, 19 nt, Artificial Sequence
  Description of Artificial Sequence: Synthetic oligonucleotide
  Sense strand starting at position 3609 of SEQ ID NO: 318040
uugcauagcaguggaaaga

SEQ ID NO: 532054 - RNA, 19 nt, Artificial Sequence
  Description of Artificial Sequence: Synthetic oligonucleotide
  Antisense strand to SEQ ID NO: 532053
ucuuuccacugcuaugcaa

SEQ ID NO: 532055 - RNA, 19 nt, Artificial Sequence
  Description of Artificial Sequence: Synthetic oligonucleotide
  Sense strand starting at position 3980 of SEQ ID NO: 318040
gaugcauuccucuaggaca

SEQ ID NO: 532056 - RNA, 19 nt, Artificial Sequence
  Description of Artificial Sequence: Synthetic oligonucleotide
  Antisense strand to SEQ ID NO: 532055
uguccuagaggaaugcauc

SEQ ID NO: 532057 - RNA, 19 nt, Artificial Sequence
  Description of Artificial Sequence: Synthetic oligonucleotide
  Sense strand starting at position 3982 of SEQ ID NO: 318040
ugcauuccucuaggacaaa

SEQ ID NO: 532058 - RNA, 19 nt, Artificial Sequence
  Description of Artificial Sequence: Synthetic oligonucleotide
  Antisense strand to SEQ ID NO: 532057
uuuguccuagaggaaugca

SEQ ID NO: 532059 - RNA, 19 nt, Artificial Sequence
  Description of Artificial Sequence: Synthetic oligonucleotide
  Sense strand starting at position 2 of SEQ ID NO: 318041
ccagauguucuuggauucu

SEQ ID NO: 532060 - RNA, 19 nt, Artificial Sequence
  Description of Artificial Sequence: Synthetic oligonucleotide
  Antisense strand to SEQ ID NO: 532059
agaauccaagaacaucugg

SEQ ID NO: 532061 - RNA, 19 nt, Artificial Sequence
  Description of Artificial Sequence: Synthetic oligonucleotide
  Sense strand starting at position 40 of SEQ ID NO: 318041
gacucaugguuucuugaau

SEQ ID NO: 532062 - RNA, 19 nt, Artificial Sequence
  Description of Artificial Sequence: Synthetic oligonucleotide
  Antisense strand to SEQ ID NO: 532061
auucaagaaaccaugaguc

SEQ ID NO: 532063 - RNA, 19 nt, Artificial Sequence
  Description of Artificial Sequence: Synthetic oligonucleotide
  Sense strand starting at position 41 of SEQ ID NO: 318041
acucaugguuucuugaaua

SEQ ID NO: 532064 - RNA, 19 nt, Artificial Sequence
  Description of Artificial Sequence: Synthetic oligonucleotide
  Antisense strand to SEQ ID NO: 532063
uauucaagaaaccaugagu

SEQ ID NO: 532065 - RNA, 19 nt, Artificial Sequence
  Description of Artificial Sequence: Synthetic oligonucleotide
  Sense strand starting at position 87 of SEQ ID NO: 318041
aggacuaagucauugccaa

SEQ ID NO: 532066 - RNA, 19 nt, Artificial Sequence
  Description of Artificial Sequence: Synthetic oligonucleotide
  Antisense strand to SEQ ID NO: 532065
uuggcaaugacuuaguccu

SEQ ID NO: 532067 - RNA, 19 nt, Artificial Sequence
  Description of Artificial Sequence: Synthetic oligonucleotide
  Sense strand starting at position 88 of SEQ ID NO: 318041
ggacuaagucauugccaaa

SEQ ID NO: 532068 - RNA, 19 nt, Artificial Sequence
  Description of Artificial Sequence: Synthetic oligonucleotide
  Antisense strand to SEQ ID NO: 532067
uuuggcaaugacuuagucc

SEQ ID NO: 532069 - RNA, 19 nt, Artificial Sequence
  Description of Artificial Sequence: Synthetic oligonucleotide
  Sense strand starting at position 148 of SEQ ID NO: 318041
aagauuugaugaggguaag

SEQ ID NO: 532070 - RNA, 19 nt, Artificial Sequence
  Description of Artificial Sequence: Synthetic oligonucleotide
  Antisense strand to SEQ ID NO: 532069
cuuacccucaucaaaucuu

SEQ ID NO: 532071 - RNA, 19 nt, Artificial Sequence
  Description of Artificial Sequence: Synthetic oligonucleotide
  Sense strand starting at position 481 of SEQ ID NO: 318041
ggauuuaucugcccugugu

SEQ ID NO: 532072 - RNA, 19 nt, Artificial Sequence
  Description of Artificial Sequence: Synthetic oligonucleotide
  Antisense strand to SEQ ID NO: 532071
acacagggcagauaaaucc

SEQ ID NO: 532073 - RNA, 19 nt, Artificial Sequence
  Description of Artificial Sequence: Synthetic oligonucleotide
  Sense strand starting at position 483 of SEQ ID NO: 318041
auuuaucugcccuguguuu

SEQ ID NO: 532074 - RNA, 19 nt, Artificial Sequence
  Description of Artificial Sequence: Synthetic oligonucleotide
  Antisense strand to SEQ ID NO: 532073
aaacacagggcagauaaau

SEQ ID NO: 532075 - RNA, 19 nt, Artificial Sequence
  Description of Artificial Sequence: Synthetic oligonucleotide
  Sense strand starting at position 525 of SEQ ID NO: 318041
gccugaauauagucauacu

SEQ ID NO: 532076 - RNA, 19 nt, Artificial Sequence
  Description of Artificial Sequence: Synthetic oligonucleotide
  Antisense strand to SEQ ID NO: 532075
aguaugacuauauucaggc

SEQ ID NO: 532077 - RNA, 19 nt, Artificial Sequence
  Description of Artificial Sequence: Synthetic oligonucleotide
  Sense strand starting at position 933 of SEQ ID NO: 318041
aaaccagaguucuuuggga

SEQ ID NO: 532078 - RNA, 19 nt, Artificial Sequence
  Description of Artificial Sequence: Synthetic oligonucleotide
  Antisense strand to SEQ ID NO: 532077
ucccaaagaacucugguuu

SEQ ID NO: 532079 - RNA, 19 nt, Artificial Sequence
  Description of Artificial Sequence: Synthetic oligonucleotide
  Sense strand starting at position 935 of SEQ ID NO: 318041
accagaguucuuugggaau

SEQ ID NO: 532080 - RNA, 19 nt, Artificial Sequence
  Description of Artificial Sequence: Synthetic oligonucleotide
  Antisense strand to SEQ ID NO: 532079
auucccaaagaacucuggu

SEQ ID NO: 532081 - RNA, 19 nt, Artificial Sequence
  Description of Artificial Sequence: Synthetic oligonucleotide
  Sense strand starting at position 960 of SEQ ID NO: 318041
caaggcagguuauuacaua

SEQ ID NO: 532082 - RNA, 19 nt, Artificial Sequence
  Description of Artificial Sequence: Synthetic oligonucleotide
  Antisense strand to SEQ ID NO: 532081
uauguaauaaccugccuug

SEQ ID NO: 532083 - RNA, 19 nt, Artificial Sequence
  Description of Artificial Sequence: Synthetic oligonucleotide
  Sense strand starting at position 1118 of SEQ ID NO: 318041
gugguaauaccaugaauua

SEQ ID NO: 532084 - RNA, 19 nt, Artificial Sequence
  Description of Artificial Sequence: Synthetic oligonucleotide
  Antisense strand to SEQ ID NO: 532083
uaauucaugguauuaccac

SEQ ID NO: 532085 - RNA, 19 nt, Artificial Sequence
  Description of Artificial Sequence: Synthetic oligonucleotide
  Sense strand starting at position 1176 of SEQ ID NO: 318041
gcagaaauauugguuacca

SEQ ID NO: 532086 - RNA, 19 nt, Artificial Sequence
  Description of Artificial Sequence: Synthetic oligonucleotide
  Antisense strand to SEQ ID NO: 532085
ugguaaccaauauuucugc

SEQ ID NO: 532087 - RNA, 19 nt, Artificial Sequence
  Description of Artificial Sequence: Synthetic oligonucleotide
  Sense strand starting at position 1262 of SEQ ID NO: 318041
ggccucacgccuuaauuua

SEQ ID NO: 532088 - RNA, 19 nt, Artificial Sequence
  Description of Artificial Sequence: Synthetic oligonucleotide
  Antisense strand to SEQ ID NO: 532087
uaaauuaaggcgugaggcc

SEQ ID NO: 532089 - RNA, 19 nt, Artificial Sequence
  Description of Artificial Sequence: Synthetic oligonucleotide
  Sense strand starting at position 1269 of SEQ ID NO: 318041
cgccuuaauuuauugccaa

SEQ ID NO: 532090 - RNA, 19 nt, Artificial Sequence
  Description of Artificial Sequence: Synthetic oligonucleotide
  Antisense strand to SEQ ID NO: 532089
uuggcaauaaauuaaggcg

SEQ ID NO: 532091 - RNA, 19 nt, Artificial Sequence
  Description of Artificial Sequence: Synthetic oligonucleotide
  Sense strand starting at position 1273 of SEQ ID NO: 318041
uuaauuuauugccaaagag

SEQ ID NO: 532092 - RNA, 19 nt, Artificial Sequence
  Description of Artificial Sequence: Synthetic oligonucleotide
  Antisense strand to SEQ ID NO: 532091
cucuuuggcaauaaauuaa

SEQ ID NO: 532093 - RNA, 19 nt, Artificial Sequence
  Description of Artificial Sequence: Synthetic oligonucleotide
  Sense strand starting at position 1372 of SEQ ID NO: 318041
ugucuuuaucuaugcauuu

SEQ ID NO: 532094 - RNA, 19 nt, Artificial Sequence
  Description of Artificial Sequence: Synthetic oligonucleotide
  Antisense strand to SEQ ID NO: 532093
aaaugcauagauaaagaca

SEQ ID NO: 532095 - RNA, 19 nt, Artificial Sequence
  Description of Artificial Sequence: Synthetic oligonucleotide
  Sense strand starting at position 1429 of SEQ ID NO: 318041
auuccuuuccuggaaggua

SEQ ID NO: 532096 - RNA, 19 nt, Artificial Sequence
  Description of Artificial Sequence: Synthetic oligonucleotide
  Antisense strand to SEQ ID NO: 532095
uaccuuccaggaaaggaau

SEQ ID NO: 532097 - RNA, 19 nt, Artificial Sequence
  Description of Artificial Sequence: Synthetic oligonucleotide
  Sense strand starting at position 1802 of SEQ ID NO: 318041
ucaguauaggaagguaaua

SEQ ID NO: 532098 - RNA, 19 nt, Artificial Sequence
  Description of Artificial Sequence: Synthetic oligonucleotide
  Antisense strand to SEQ ID NO: 532097
uauuaccuuccuauacuga

SEQ ID NO: 532099 - RNA, 19 nt, Artificial Sequence
  Description of Artificial Sequence: Synthetic oligonucleotide
  Sense strand starting at position 1835 of SEQ ID NO: 318041
uugaaagucugcuccauuu

SEQ ID NO: 532100 - RNA, 19 nt, Artificial Sequence
  Description of Artificial Sequence: Synthetic oligonucleotide
  Antisense strand to SEQ ID NO: 532099
aaauggagcagacuuucaa

SEQ ID NO: 532101 - RNA, 19 nt, Artificial Sequence
  Description of Artificial Sequence: Synthetic oligonucleotide
  Sense strand starting at position 1876 of SEQ ID NO: 318041
ugagaagaaucagucuuac

SEQ ID NO: 532102 - RNA, 19 nt, Artificial Sequence
  Description of Artificial Sequence: Synthetic oligonucleotide
  Antisense strand to SEQ ID NO: 532101
guaagacugauucuucuca

SEQ ID NO: 532103 - RNA, 19 nt, Artificial Sequence
  Description of Artificial Sequence: Synthetic oligonucleotide
  Sense strand starting at position 2112 of SEQ ID NO: 318041
auaagugagaaugguggau

SEQ ID NO: 532104 - RNA, 19 nt, Artificial Sequence
  Description of Artificial Sequence: Synthetic oligonucleotide
  Antisense strand to SEQ ID NO: 532103
auccaccauucucacuuau

SEQ ID NO: 532105 - RNA, 19 nt, Artificial Sequence
  Description of Artificial Sequence: Synthetic oligonucleotide
  Sense strand starting at position 2185 of SEQ ID NO: 318041
gcuggaauucuacagggua

SEQ ID NO: 532106 - RNA, 19 nt, Artificial Sequence
  Description of Artificial Sequence: Synthetic oligonucleotide
  Antisense strand to SEQ ID NO: 532105
uacccuguagaauuccagc

SEQ ID NO: 532107 - RNA, 19 nt, Artificial Sequence
  Description of Artificial Sequence: Synthetic oligonucleotide
  Sense strand starting at position 2220 of SEQ ID NO: 318041
ccuuguugccaucagagua

SEQ ID NO: 532108 - RNA, 19 nt, Artificial Sequence
  Description of Artificial Sequence: Synthetic oligonucleotide
  Antisense strand to SEQ ID NO: 532107
uacucugauggcaacaagg

SEQ ID NO: 532109 - RNA, 19 nt, Artificial Sequence
  Description of Artificial Sequence: Synthetic oligonucleotide
  Sense strand starting at position 2307 of SEQ ID NO: 318041
uguaguauccaugacugga

SEQ ID NO: 532110 - RNA, 19 nt, Artificial Sequence
  Description of Artificial Sequence: Synthetic oligonucleotide
  Antisense strand to SEQ ID NO: 532109
uccagucauggauacuaca

SEQ ID NO: 532111 - RNA, 19 nt, Artificial Sequence
  Description of Artificial Sequence: Synthetic oligonucleotide
  Sense strand starting at position 2309 of SEQ ID NO: 318041
uaguauccaugacuggaaa

SEQ ID NO: 532112 - RNA, 19 nt, Artificial Sequence
  Description of Artificial Sequence: Synthetic oligonucleotide
  Antisense strand to SEQ ID NO: 532111
uuuccagucauggauacua

SEQ ID NO: 532113 - RNA, 19 nt, Artificial Sequence
  Description of Artificial Sequence: Synthetic oligonucleotide
  Sense strand starting at position 2400 of SEQ ID NO: 318041
gucuccuuggguuauauaa

SEQ ID NO: 532114 - RNA, 19 nt, Artificial Sequence
  Description of Artificial Sequence: Synthetic oligonucleotide
  Antisense strand to SEQ ID NO: 532113
uuauauaacccaaggagac

SEQ ID NO: 532115 - RNA, 19 nt, Artificial Sequence
  Description of Artificial Sequence: Synthetic oligonucleotide
  Sense strand starting at position 2770 of SEQ ID NO: 318041
gggaaugucucacucuaag

SEQ ID NO: 532116 - RNA, 19 nt, Artificial Sequence
  Description of Artificial Sequence: Synthetic oligonucleotide
  Antisense strand to SEQ ID NO: 532115
cuuagagugagacauuccc

SEQ ID NO: 532117 - RNA, 19 nt, Artificial Sequence
  Description of Artificial Sequence: Synthetic oligonucleotide
  Sense strand starting at position 2797 of SEQ ID NO: 318041
accucagucccuggaggaa

SEQ ID NO: 532118 - RNA, 19 nt, Artificial Sequence
  Description of Artificial Sequence: Synthetic oligonucleotide
  Antisense strand to SEQ ID NO: 532117
uuccuccagggacugaggu

SEQ ID NO: 532119 - RNA, 19 nt, Artificial Sequence
  Description of Artificial Sequence: Synthetic oligonucleotide
  Sense strand starting at position 2818 of SEQ ID NO: 318041
guaugcagugugcuuucua

SEQ ID NO: 532120 - RNA, 19 nt, Artificial Sequence
  Description of Artificial Sequence: Synthetic oligonucleotide
  Antisense strand to SEQ ID NO: 532119
uagaaagcacacugcauac

SEQ ID NO: 532121 - RNA, 19 nt, Artificial Sequence
  Description of Artificial Sequence: Synthetic oligonucleotide
  Sense strand starting at position 2873 of SEQ ID NO: 318041
uguggucuccgauacaaua

SEQ ID NO: 532122 - RNA, 19 nt, Artificial Sequence
  Description of Artificial Sequence: Synthetic oligonucleotide
  Antisense strand to SEQ ID NO: 532121
uauuguaucggagaccaca

SEQ ID NO: 532123 - RNA, 19 nt, Artificial Sequence
  Description of Artificial Sequence: Synthetic oligonucleotide
  Sense strand starting at position 2887 of SEQ ID NO: 318041
caauauacauggucagaug

SEQ ID NO: 532124 - RNA, 19 nt, Artificial Sequence
  Description of Artificial Sequence: Synthetic oligonucleotide
  Antisense strand to SEQ ID NO: 532123
caucugaccauguauauug

SEQ ID NO: 532125 - RNA, 19 nt, Artificial Sequence
  Description of Artificial Sequence: Synthetic oligonucleotide
  Sense strand starting at position 2972 of SEQ ID NO: 318041
agugguuacuucuuuagaa

SEQ ID NO: 532126 - RNA, 19 nt, Artificial Sequence
  Description of Artificial Sequence: Synthetic oligonucleotide
  Antisense strand to SEQ ID NO: 532125
uucuaaagaaguaaccacu

SEQ ID NO: 532127 - RNA, 19 nt, Artificial Sequence
  Description of Artificial Sequence: Synthetic oligonucleotide
  Sense strand starting at position 2973 of SEQ ID NO: 318041
gugguuacuucuuuagaaa

SEQ ID NO: 532128 - RNA, 19 nt, Artificial Sequence
  Description of Artificial Sequence: Synthetic oligonucleotide
  Antisense strand to SEQ ID NO: 532127
uuucuaaagaaguaaccac

SEQ ID NO: 532129 - RNA, 19 nt, Artificial Sequence
  Description of Artificial Sequence: Synthetic oligonucleotide
  Sense strand starting at position 2974 of SEQ ID NO: 318041
ugguuacuucuuuagaaau

SEQ ID NO: 532130 - RNA, 19 nt, Artificial Sequence
  Description of Artificial Sequence: Synthetic oligonucleotide
  Antisense strand to SEQ ID NO: 532129
auuucuaaagaaguaacca

SEQ ID NO: 532131 - RNA, 19 nt, Artificial Sequence
  Description of Artificial Sequence: Synthetic oligonucleotide
  Sense strand starting at position 3056 of SEQ ID NO: 318041
uguaucaaagguuaaucau

SEQ ID NO: 532132 - RNA, 19 nt, Artificial Sequence
  Description of Artificial Sequence: Synthetic oligonucleotide
  Antisense strand to SEQ ID NO: 532131
augauuaaccuuugauaca

SEQ ID NO: 532133 - RNA, 19 nt, Artificial Sequence
  Description of Artificial Sequence: Synthetic oligonucleotide
  Sense strand starting at position 3087 of SEQ ID NO: 318041
cagugaggacccugcuauu

SEQ ID NO: 532134 - RNA, 19 nt, Artificial Sequence
  Description of Artificial Sequence: Synthetic oligonucleotide
  Antisense strand to SEQ ID NO: 532133
aauagcaggguccucacug

SEQ ID NO: 532135 - RNA, 19 nt, Artificial Sequence
  Description of Artificial Sequence: Synthetic oligonucleotide
  Sense strand starting at position 3291 of SEQ ID NO: 318041
gaguguaugagucaaugga

SEQ ID NO: 532136 - RNA, 19 nt, Artificial Sequence
  Description of Artificial Sequence: Synthetic oligonucleotide
  Antisense strand to SEQ ID NO: 532135
uccauugacucauacacuc

SEQ ID NO: 532137 - RNA, 19 nt, Artificial Sequence
  Description of Artificial Sequence: Synthetic oligonucleotide
  Sense strand starting at position 3657 of SEQ ID NO: 318041
uguagcucucauugaagag

SEQ ID NO: 532138 - RNA, 19 nt, Artificial Sequence
  Description of Artificial Sequence: Synthetic oligonucleotide
  Antisense strand to SEQ ID NO: 532137
cucuucaaugagagcuaca

SEQ ID NO: 532139 - RNA, 19 nt, Artificial Sequence
  Description of Artificial Sequence: Synthetic oligonucleotide
  Sense strand starting at position 3 of SEQ ID NO: 318042
aacacuuuauggcuaguga

SEQ ID NO: 532140 - RNA, 19 nt, Artificial Sequence
  Description of Artificial Sequence: Synthetic oligonucleotide
  Antisense strand to SEQ ID NO: 532139
ucacuagccauaaaguguu

SEQ ID NO: 532141 - RNA, 19 nt, Artificial Sequence
  Description of Artificial Sequence: Synthetic oligonucleotide
  Sense strand starting at position 4 of SEQ ID NO: 318042
acacuuuauggcuagugaa

SEQ ID NO: 532142 - RNA, 19 nt, Artificial Sequence
  Description of Artificial Sequence: Synthetic oligonucleotide
  Antisense strand to SEQ ID NO: 532141
uucacuagccauaaagugu

SEQ ID NO: 532143 - RNA, 19 nt, Artificial Sequence
  Description of Artificial Sequence: Synthetic oligonucleotide
  Sense strand starting at position 89 of SEQ ID NO: 318042
guguauuucuuucuuucca

SEQ ID NO: 532144 - RNA, 19 nt, Artificial Sequence
  Description of Artificial Sequence: Synthetic oligonucleotide
  Antisense strand to SEQ ID NO: 532143
uggaaagaaagaaauacac

SEQ ID NO: 532145 - RNA, 19 nt, Artificial Sequence
  Description of Artificial Sequence: Synthetic oligonucleotide
  Sense strand starting at position 105 of SEQ ID NO: 318042
ccauccaaaguuuguugaa

SEQ ID NO: 532146 - RNA, 19 nt, Artificial Sequence
  Description of Artificial Sequence: Synthetic oligonucleotide
  Antisense strand to SEQ ID NO: 532145
uucaacaaacuuuggaugg

SEQ ID NO: 532147 - RNA, 19 nt, Artificial Sequence
  Description of Artificial Sequence: Synthetic oligonucleotide
  Sense strand starting at position 107 of SEQ ID NO: 318042
auccaaaguuuguugaaca

SEQ ID NO: 532148 - RNA, 19 nt, Artificial Sequence
  Description of Artificial Sequence: Synthetic oligonucleotide
  Antisense strand to SEQ ID NO: 532147
uguucaacaaacuuuggau

SEQ ID NO: 532149 - RNA, 19 nt, Artificial Sequence
  Description of Artificial Sequence: Synthetic oligonucleotide
  Sense strand starting at position 217 of SEQ ID NO: 318042
ugaacauucgcugacaguu

SEQ ID NO: 532150 - RNA, 19 nt, Artificial Sequence
  Description of Artificial Sequence: Synthetic oligonucleotide
  Antisense strand to SEQ ID NO: 532149
aacugucagcgaauguuca

SEQ ID NO: 532151 - RNA, 19 nt, Artificial Sequence
  Description of Artificial Sequence: Synthetic oligonucleotide
  Sense strand starting at position 263 of SEQ ID NO: 318042
gggcaaaugcccuggagaa

SEQ ID NO: 532152 - RNA, 19 nt, Artificial Sequence
  Description of Artificial Sequence: Synthetic oligonucleotide
  Antisense strand to SEQ ID NO: 532151
uucuccagggcauuugccc

SEQ ID NO: 532153 - RNA, 19 nt, Artificial Sequence
  Description of Artificial Sequence: Synthetic oligonucleotide
  Sense strand starting at position 264 of SEQ ID NO: 318042
ggcaaaugcccuggagaag

SEQ ID NO: 532154 - RNA, 19 nt, Artificial Sequence
  Description of Artificial Sequence: Synthetic oligonucleotide
  Antisense strand to SEQ ID NO: 532153
cuucuccagggcauuugcc

SEQ ID NO: 532155 - RNA, 19 nt, Artificial Sequence
  Description of Artificial Sequence: Synthetic oligonucleotide
  Sense strand starting at position 304 of SEQ ID NO: 318042
gugugauuucuaugagggc

SEQ ID NO: 532156 - RNA, 19 nt, Artificial Sequence
  Description of Artificial Sequence: Synthetic oligonucleotide
  Antisense strand to SEQ ID NO: 532155
gcccucauagaaaucacac

SEQ ID NO: 532157 - RNA, 19 nt, Artificial Sequence
  Description of Artificial Sequence: Synthetic oligonucleotide
  Sense strand starting at position 322 of SEQ ID NO: 318042
caagaacccuguguaaaug

SEQ ID NO: 532158 - RNA, 19 nt, Artificial Sequence
  Description of Artificial Sequence: Synthetic oligonucleotide
  Antisense strand to SEQ ID NO: 532157
cauuuacacaggguucuug

SEQ ID NO: 532159 - RNA, 19 nt, Artificial Sequence
  Description of Artificial Sequence: Synthetic oligonucleotide
  Sense strand starting at position 363 of SEQ ID NO: 318042
aucaguggcuugcuauuua

SEQ ID NO: 532160 - RNA, 19 nt, Artificial Sequence
  Description of Artificial Sequence: Synthetic oligonucleotide
  Antisense strand to SEQ ID NO: 532159
uaaauagcaagccacugau

SEQ ID NO: 532161 - RNA, 19 nt, Artificial Sequence
  Description of Artificial Sequence: Synthetic oligonucleotide
  Sense strand starting at position 367 of SEQ ID NO: 318042
guggcuugcuauuuagaga

SEQ ID NO: 532162 - RNA, 19 nt, Artificial Sequence
  Description of Artificial Sequence: Synthetic oligonucleotide
  Antisense strand to SEQ ID NO: 532161
ucucuaaauagcaagccac

SEQ ID NO: 532163 - RNA, 19 nt, Artificial Sequence
  Description of Artificial Sequence: Synthetic oligonucleotide
  Sense strand starting at position 387 of SEQ ID NO: 318042
agcagaagaucucccaguu

SEQ ID NO: 532164 - RNA, 19 nt, Artificial Sequence
  Description of Artificial Sequence: Synthetic oligonucleotide
  Antisense strand to SEQ ID NO: 532163
aacugggagaucuucugcu

SEQ ID NO: 532165 - RNA, 19 nt, Artificial Sequence
  Description of Artificial Sequence: Synthetic oligonucleotide
  Sense strand starting at position 746 of SEQ ID NO: 318042
gcuuuauuagcugaaguaa

SEQ ID NO: 532166 - RNA, 19 nt, Artificial Sequence
  Description of Artificial Sequence: Synthetic oligonucleotide
  Antisense strand to SEQ ID NO: 532165
uuacuucagcuaauaaagc

SEQ ID NO: 532167 - RNA, 19 nt, Artificial Sequence
  Description of Artificial Sequence: Synthetic oligonucleotide
  Sense strand starting at position 1080 of SEQ ID NO: 318042
gcagguaugauaugauuau

SEQ ID NO: 532168 - RNA, 19 nt, Artificial Sequence
  Description of Artificial Sequence: Synthetic oligonucleotide
  Antisense strand to SEQ ID NO: 532167
auaaucauaucauaccugc

SEQ ID NO: 532169 - RNA, 19 nt, Artificial Sequence
  Description of Artificial Sequence: Synthetic oligonucleotide
  Sense strand starting at position 1138 of SEQ ID NO: 318042
agcucagguugucugauuu

SEQ ID NO: 532170 - RNA, 19 nt, Artificial Sequence
  Description of Artificial Sequence: Synthetic oligonucleotide
  Antisense strand to SEQ ID NO: 532169
aaaucagacaaccugagcu

SEQ ID NO: 532171 - RNA, 19 nt, Artificial Sequence
  Description of Artificial Sequence: Synthetic oligonucleotide
  Sense strand starting at position 1142 of SEQ ID NO: 318042
cagguugucugauuuccuu

SEQ ID NO: 532172 - RNA, 19 nt, Artificial Sequence
  Description of Artificial Sequence: Synthetic oligonucleotide
  Antisense strand to SEQ ID NO: 532171
aaggaaaucagacaaccug

SEQ ID NO: 532173 - RNA, 19 nt, Artificial Sequence
  Description of Artificial Sequence: Synthetic oligonucleotide
  Sense strand starting at position 1164 of SEQ ID NO: 318042
agcagugugaucuaacaag

SEQ ID NO: 532174 - RNA, 19 nt, Artificial Sequence
  Description of Artificial Sequence: Synthetic oligonucleotide
  Antisense strand to SEQ ID NO: 532173
cuuguuagaucacacugcu

SEQ ID NO: 532175 - RNA, 19 nt, Artificial Sequence
  Description of Artificial Sequence: Synthetic oligonucleotide
  Sense strand starting at position 1228 of SEQ ID NO: 318042
gcauuauacagaggacuug

SEQ ID NO: 532176 - RNA, 19 nt, Artificial Sequence
  Description of Artificial Sequence: Synthetic oligonucleotide
  Antisense strand to SEQ ID NO: 532175
caaguccucuguauaaugc

SEQ ID NO: 532177 - RNA, 19 nt, Artificial Sequence
  Description of Artificial Sequence: Synthetic oligonucleotide
  Sense strand starting at position 1789 of SEQ ID NO: 318042
ucagaaagauaggaaugau

SEQ ID NO: 532178 - RNA, 19 nt, Artificial Sequence
  Description of Artificial Sequence: Synthetic oligonucleotide
  Antisense strand to SEQ ID NO: 532177
aucauuccuaucuuucuga

SEQ ID NO: 532179 - RNA, 19 nt, Artificial Sequence
  Description of Artificial Sequence: Synthetic oligonucleotide
  Sense strand starting at position 2019 of SEQ ID NO: 318042
gauucugaagacugaguuu

SEQ ID NO: 532180 - RNA, 19 nt, Artificial Sequence
  Description of Artificial Sequence: Synthetic oligonucleotide
  Antisense strand to SEQ ID NO: 532179
aaacucagucuucagaauc

SEQ ID NO: 532181 - RNA, 19 nt, Artificial Sequence
  Description of Artificial Sequence: Synthetic oligonucleotide
  Sense strand starting at position 2345 of SEQ ID NO: 318042
gggagagguauguaugcca

SEQ ID NO: 532182 - RNA, 19 nt, Artificial Sequence
  Description of Artificial Sequence: Synthetic oligonucleotide
  Antisense strand to SEQ ID NO: 532181
uggcauacauaccucuccc

SEQ ID NO: 532183 - RNA, 19 nt, Artificial Sequence
  Description of Artificial Sequence: Synthetic oligonucleotide
  Sense strand starting at position 2348 of SEQ ID NO: 318042
agagguauguaugccauaa

SEQ ID NO: 532184 - RNA, 19 nt, Artificial Sequence
  Description of Artificial Sequence: Synthetic oligonucleotide
  Antisense strand to SEQ ID NO: 532183
uuauggcauacauaccucu

SEQ ID NO: 532185 - RNA, 19 nt, Artificial Sequence
  Description of Artificial Sequence: Synthetic oligonucleotide
  Sense strand starting at position 2352 of SEQ ID NO: 318042
guauguaugccauaaagaa

SEQ ID NO: 532186 - RNA, 19 nt, Artificial Sequence
  Description of Artificial Sequence: Synthetic oligonucleotide
  Antisense strand to SEQ ID NO: 532185
uucuuuauggcauacauac

SEQ ID NO: 532187 - RNA, 19 nt, Artificial Sequence
  Description of Artificial Sequence: Synthetic oligonucleotide
  Sense strand starting at position 2399 of SEQ ID NO: 318042
ccuguaucagaguacuuau

SEQ ID NO: 532188 - RNA, 19 nt, Artificial Sequence
  Description of Artificial Sequence: Synthetic oligonucleotide
  Antisense strand to SEQ ID NO: 532187
auaaguacucugauacagg

SEQ ID NO: 532189 - RNA, 19 nt, Artificial Sequence
  Description of Artificial Sequence: Synthetic oligonucleotide
  Sense strand starting at position 2410 of SEQ ID NO: 318042
guacuuaugcuauaaagaa

SEQ ID NO: 532190 - RNA, 19 nt, Artificial Sequence
  Description of Artificial Sequence: Synthetic oligonucleotide
  Antisense strand to SEQ ID NO: 532189
uucuuuauagcauaaguac

SEQ ID NO: 532191 - RNA, 19 nt, Artificial Sequence
  Description of Artificial Sequence: Synthetic oligonucleotide
  Sense strand starting at position 2475 of SEQ ID NO: 318042
augccauaagaauguaaug

SEQ ID NO: 532192 - RNA, 19 nt, Artificial Sequence
  Description of Artificial Sequence: Synthetic oligonucleotide
  Antisense strand to SEQ ID NO: 532191
cauuacauucuuauggcau

SEQ ID NO: 532193 - RNA, 19 nt, Artificial Sequence
  Description of Artificial Sequence: Synthetic oligonucleotide
  Sense strand starting at position 2492 of SEQ ID NO: 318042
ugaaguugcagacagaguu

SEQ ID NO: 532194 - RNA, 19 nt, Artificial Sequence
  Description of Artificial Sequence: Synthetic oligonucleotide
  Antisense strand to SEQ ID NO: 532193
aacucugucugcaacuuca

SEQ ID NO: 532195 - RNA, 19 nt, Artificial Sequence
  Description of Artificial Sequence: Synthetic oligonucleotide
  Sense strand starting at position 2606 of SEQ ID NO: 318042
auagauuuaugaugaagag

SEQ ID NO: 532196 - RNA, 19 nt, Artificial Sequence
  Description of Artificial Sequence: Synthetic oligonucleotide
  Antisense strand to SEQ ID NO: 532195
cucuucaucauaaaucuau

SEQ ID NO: 532197 - RNA, 19 nt, Artificial Sequence
  Description of Artificial Sequence: Synthetic oligonucleotide
  Sense strand starting at position 2657 of SEQ ID NO: 318042
cacaauguggcuuagcuaa

SEQ ID NO: 532198 - RNA, 19 nt, Artificial Sequence
  Description of Artificial Sequence: Synthetic oligonucleotide
  Antisense strand to SEQ ID NO: 532197
uuagcuaagccacauugug

SEQ ID NO: 532199 - RNA, 19 nt, Artificial Sequence
  Description of Artificial Sequence: Synthetic oligonucleotide
  Sense strand starting at position 2797 of SEQ ID NO: 318042
guuguuaaaggugaacauu

SEQ ID NO: 532200 - RNA, 19 nt, Artificial Sequence
  Description of Artificial Sequence: Synthetic oligonucleotide
  Antisense strand to SEQ ID NO: 532199
aauguucaccuuuaacaac

SEQ ID NO: 532201 - RNA, 19 nt, Artificial Sequence
  Description of Artificial Sequence: Synthetic oligonucleotide
  Sense strand starting at position 2805 of SEQ ID NO: 318042
aggugaacauuggcaacua

SEQ ID NO: 532202 - RNA, 19 nt, Artificial Sequence
  Description of Artificial Sequence: Synthetic oligonucleotide
  Antisense strand to SEQ ID NO: 532201
uaguugccaauguucaccu

SEQ ID NO: 532203 - RNA, 19 nt, Artificial Sequence
  Description of Artificial Sequence: Synthetic oligonucleotide
  Sense strand starting at position 2927 of SEQ ID NO: 318042
uuguaauucuucccaggaa

SEQ ID NO: 532204 - RNA, 19 nt, Artificial Sequence
  Description of Artificial Sequence: Synthetic oligonucleotide
  Antisense strand to SEQ ID NO: 532203
uuccugggaagaauuacaa

SEQ ID NO: 532205 - RNA, 19 nt, Artificial Sequence
  Description of Artificial Sequence: Synthetic oligonucleotide
  Sense strand starting at position 3027 of SEQ ID NO: 318042
ugaucagcagugcaaauau

SEQ ID NO: 532206 - RNA, 19 nt, Artificial Sequence
  Description of Artificial Sequence: Synthetic oligonucleotide
  Antisense strand to SEQ ID NO: 532205
auauuugcacugcugauca

SEQ ID NO: 532207 - RNA, 19 nt, Artificial Sequence
  Description of Artificial Sequence: Synthetic oligonucleotide
  Sense strand starting at position 3364 of SEQ ID NO: 318042
augucuaugucuuugagga

SEQ ID NO: 532208 - RNA, 19 nt, Artificial Sequence
  Description of Artificial Sequence: Synthetic oligonucleotide
  Antisense strand to SEQ ID NO: 532207
uccucaaagacauagacau

SEQ ID NO: 532209 - RNA, 19 nt, Artificial Sequence
  Description of Artificial Sequence: Synthetic oligonucleotide
  Sense strand starting at position 3369 of SEQ ID NO: 318042
uaugucuuugaggaaagca

SEQ ID NO: 532210 - RNA, 19 nt, Artificial Sequence
  Description of Artificial Sequence: Synthetic oligonucleotide
  Antisense strand to SEQ ID NO: 532209
ugcuuuccucaaagacaua

SEQ ID NO: 532211 - RNA, 19 nt, Artificial Sequence
  Description of Artificial Sequence: Synthetic oligonucleotide
  Sense strand starting at position 3418 of SEQ ID NO: 318042
guuccaagaggcuaaguaa

SEQ ID NO: 532212 - RNA, 19 nt, Artificial Sequence
  Description of Artificial Sequence: Synthetic oligonucleotide
  Antisense strand to SEQ ID NO: 532211
uuacuuagccucuuggaac

SEQ ID NO: 532213 - RNA, 19 nt, Artificial Sequence
  Description of Artificial Sequence: Synthetic oligonucleotide
  Sense strand starting at position 3482 of SEQ ID NO: 318042
cugaccucccuguauguua

SEQ ID NO: 532214 - RNA, 19 nt, Artificial Sequence
  Description of Artificial Sequence: Synthetic oligonucleotide
  Antisense strand to SEQ ID NO: 532213
uaacauacagggaggucag

SEQ ID NO: 532215 - RNA, 19 nt, Artificial Sequence
  Description of Artificial Sequence: Synthetic oligonucleotide
  Sense strand starting at position 3717 of SEQ ID NO: 318042
acucaaaugucccugugaa

SEQ ID NO: 532216 - RNA, 19 nt, Artificial Sequence
  Description of Artificial Sequence: Synthetic oligonucleotide
  Antisense strand to SEQ ID NO: 532215
uucacagggacauuugagu

SEQ ID NO: 532217 - RNA, 19 nt, Artificial Sequence
  Description of Artificial Sequence: Synthetic oligonucleotide
  Sense strand starting at position 3787 of SEQ ID NO: 318042
gccauuguuccacauugga

SEQ ID NO: 532218 - RNA, 19 nt, Artificial Sequence
  Description of Artificial Sequence: Synthetic oligonucleotide
  Antisense strand to SEQ ID NO: 532217
uccaauguggaacaauggc

SEQ ID NO: 532219 - RNA, 19 nt, Artificial Sequence
  Description of Artificial Sequence: Synthetic oligonucleotide
  Sense strand starting at position 59 of SEQ ID NO: 318043
aucagauggagauguguca

SEQ ID NO: 532220 - RNA, 19 nt, Artificial Sequence
  Description of Artificial Sequence: Synthetic oligonucleotide
  Antisense strand to SEQ ID NO: 532219
ugacacaucuccaucugau

SEQ ID NO: 532221 - RNA, 19 nt, Artificial Sequence
  Description of Artificial Sequence: Synthetic oligonucleotide
  Sense strand starting at position 122 of SEQ ID NO: 318043
gguuguauacuagaauguc

SEQ ID NO: 532222 - RNA, 19 nt, Artificial Sequence
  Description of Artificial Sequence: Synthetic oligonucleotide
  Antisense strand to SEQ ID NO: 532221
gacauucuaguauacaacc

SEQ ID NO: 532223 - RNA, 19 nt, Artificial Sequence
  Description of Artificial Sequence: Synthetic oligonucleotide
  Sense strand starting at position 125 of SEQ ID NO: 318043
uguauacuagaaugucaca

SEQ ID NO: 532224 - RNA, 19 nt, Artificial Sequence
  Description of Artificial Sequence: Synthetic oligonucleotide
  Antisense strand to SEQ ID NO: 532223
ugugacauucuaguauaca

SEQ ID NO: 532225 - RNA, 19 nt, Artificial Sequence
  Description of Artificial Sequence: Synthetic oligonucleotide
  Sense strand starting at position 144 of SEQ ID NO: 318043
ugugaaguuccagacaauu

SEQ ID NO: 532226 - RNA, 19 nt, Artificial Sequence
  Description of Artificial Sequence: Synthetic oligonucleotide
  Antisense strand to SEQ ID NO: 532225
aauugucuggaacuucaca

SEQ ID NO: 532227 - RNA, 19 nt, Artificial Sequence
  Description of Artificial Sequence: Synthetic oligonucleotide
  Sense strand starting at position 247 of SEQ ID NO: 318043
augccuuaucuagggauca

SEQ ID NO: 532228 - RNA, 19 nt, Artificial Sequence
  Description of Artificial Sequence: Synthetic oligonucleotide
  Antisense strand to SEQ ID NO: 532227
ugaucccuagauaaggcau

SEQ ID NO: 532229 - RNA, 19 nt, Artificial Sequence
  Description of Artificial Sequence: Synthetic oligonucleotide
  Sense strand starting at position 252 of SEQ ID NO: 318043
uuaucuagggaucagcauu

SEQ ID NO: 532230 - RNA, 19 nt, Artificial Sequence
  Description of Artificial Sequence: Synthetic oligonucleotide
  Antisense strand to SEQ ID NO: 532229
aaugcugaucccuagauaa

SEQ ID NO: 532231 - RNA, 19 nt, Artificial Sequence
  Description of Artificial Sequence: Synthetic oligonucleotide
  Sense strand starting at position 419 of SEQ ID NO: 318043
gagucucuugugcaagacu

SEQ ID NO: 532232 - RNA, 19 nt, Artificial Sequence
  Description of Artificial Sequence: Synthetic oligonucleotide
  Antisense strand to SEQ ID NO: 532231
agucuugcacaagagacuc

SEQ ID NO: 532233 - RNA, 19 nt, Artificial Sequence
  Description of Artificial Sequence: Synthetic oligonucleotide
  Sense strand starting at position 449 of SEQ ID NO: 318043
gcccaacucuaguuaaaug

SEQ ID NO: 532234 - RNA, 19 nt, Artificial Sequence
  Description of Artificial Sequence: Synthetic oligonucleotide
  Antisense strand to SEQ ID NO: 532233
cauuuaacuagaguugggc

SEQ ID NO: 532235 - RNA, 19 nt, Artificial Sequence
  Description of Artificial Sequence: Synthetic oligonucleotide
  Sense strand starting at position 457 of SEQ ID NO: 318043
cuaguuaaauguguacaau

SEQ ID NO: 532236 - RNA, 19 nt, Artificial Sequence
  Description of Artificial Sequence: Synthetic oligonucleotide
  Antisense strand to SEQ ID NO: 532235
auuguacacauuuaacuag

SEQ ID NO: 532237 - RNA, 19 nt, Artificial Sequence
  Description of Artificial Sequence: Synthetic oligonucleotide
  Sense strand starting at position 458 of SEQ ID NO: 318043
uaguuaaauguguacaaug

SEQ ID NO: 532238 - RNA, 19 nt, Artificial Sequence
  Description of Artificial Sequence: Synthetic oligonucleotide
  Antisense strand to SEQ ID NO: 532237
cauuguacacauuuaacua

SEQ ID NO: 532239 - RNA, 19 nt, Artificial Sequence
  Description of Artificial Sequence: Synthetic oligonucleotide
  Sense strand starting at position 463 of SEQ ID NO: 318043
aaauguguacaauggguau

SEQ ID NO: 532240 - RNA, 19 nt, Artificial Sequence
  Description of Artificial Sequence: Synthetic oligonucleotide
  Antisense strand to SEQ ID NO: 532239
auacccauuguacacauuu

SEQ ID NO: 532241 - RNA, 19 nt, Artificial Sequence
  Description of Artificial Sequence: Synthetic oligonucleotide
  Sense strand starting at position 465 of SEQ ID NO: 318043
auguguacaauggguauua

SEQ ID NO: 532242 - RNA, 19 nt, Artificial Sequence
  Description of Artificial Sequence: Synthetic oligonucleotide
  Antisense strand to SEQ ID NO: 532241
uaauacccauuguacacau

SEQ ID NO: 532243 - RNA, 19 nt, Artificial Sequence
  Description of Artificial Sequence: Synthetic oligonucleotide
  Sense strand starting at position 466 of SEQ ID NO: 318043
uguguacaauggguauuaa

SEQ ID NO: 532244 - RNA, 19 nt, Artificial Sequence
  Description of Artificial Sequence: Synthetic oligonucleotide
  Antisense strand to SEQ ID NO: 532243
uuaauacccauuguacaca

SEQ ID NO: 532245 - RNA, 19 nt, Artificial Sequence
  Description of Artificial Sequence: Synthetic oligonucleotide
  Sense strand starting at position 467 of SEQ ID NO: 318043
guguacaauggguauuaau

SEQ ID NO: 532246 - RNA, 19 nt, Artificial Sequence
  Description of Artificial Sequence: Synthetic oligonucleotide
  Antisense strand to SEQ ID NO: 532245
auuaauacccauuguacac

SEQ ID NO: 532247 - RNA, 19 nt, Artificial Sequence
  Description of Artificial Sequence: Synthetic oligonucleotide
  Sense strand starting at position 767 of SEQ ID NO: 318043
gcuguuuacugggucauua

SEQ ID NO: 532248 - RNA, 19 nt, Artificial Sequence
  Description of Artificial Sequence: Synthetic oligonucleotide
  Antisense strand to SEQ ID NO: 532247
uaaugacccaguaaacagc

SEQ ID NO: 532249 - RNA, 19 nt, Artificial Sequence
  Description of Artificial Sequence: Synthetic oligonucleotide
  Sense strand starting at position 769 of SEQ ID NO: 318043
uguuuacugggucauuaaa

SEQ ID NO: 532250 - RNA, 19 nt, Artificial Sequence
  Description of Artificial Sequence: Synthetic oligonucleotide
  Antisense strand to SEQ ID NO: 532249
uuuaaugacccaguaaaca

SEQ ID NO: 532251 - RNA, 19 nt, Artificial Sequence
  Description of Artificial Sequence: Synthetic oligonucleotide
  Sense strand starting at position 799 of SEQ ID NO: 318043
ccuuuauagucauuguaau

SEQ ID NO: 532252 - RNA, 19 nt, Artificial Sequence
  Description of Artificial Sequence: Synthetic oligonucleotide
  Antisense strand to SEQ ID NO: 532251
auuacaaugacuauaaagg

SEQ ID NO: 532253 - RNA, 19 nt, Artificial Sequence
  Description of Artificial Sequence: Synthetic oligonucleotide
  Sense strand starting at position 805 of SEQ ID NO: 318043
uagucauuguaauuguuga

SEQ ID NO: 532254 - RNA, 19 nt, Artificial Sequence
  Description of Artificial Sequence: Synthetic oligonucleotide
  Antisense strand to SEQ ID NO: 532253
ucaacaauuacaaugacua

SEQ ID NO: 532255 - RNA, 19 nt, Artificial Sequence
  Description of Artificial Sequence: Synthetic oligonucleotide
  Sense strand starting at position 841 of SEQ ID NO: 318043
guuguuuguacagaagucu

SEQ ID NO: 532256 - RNA, 19 nt, Artificial Sequence
  Description of Artificial Sequence: Synthetic oligonucleotide
  Antisense strand to SEQ ID NO: 532255
agacuucuguacaaacaac

SEQ ID NO: 532257 - RNA, 19 nt, Artificial Sequence
  Description of Artificial Sequence: Synthetic oligonucleotide
  Sense strand starting at position 852 of SEQ ID NO: 318043
agaagucucucacuuugaa

SEQ ID NO: 532258 - RNA, 19 nt, Artificial Sequence
  Description of Artificial Sequence: Synthetic oligonucleotide
  Antisense strand to SEQ ID NO: 532257
uucaaagugagagacuucu

SEQ ID NO: 532259 - RNA, 19 nt, Artificial Sequence
  Description of Artificial Sequence: Synthetic oligonucleotide
  Sense strand starting at position 926 of SEQ ID NO: 318043
ugaccaacuccuugaguga

SEQ ID NO: 532260 - RNA, 19 nt, Artificial Sequence
  Description of Artificial Sequence: Synthetic oligonucleotide
  Antisense strand to SEQ ID NO: 532259
ucacucaaggaguugguca

SEQ ID NO: 532261 - RNA, 19 nt, Artificial Sequence
  Description of Artificial Sequence: Synthetic oligonucleotide
  Sense strand starting at position 991 of SEQ ID NO: 318043
ccuguugucaggugacacu

SEQ ID NO: 532262 - RNA, 19 nt, Artificial Sequence
  Description of Artificial Sequence: Synthetic oligonucleotide
  Antisense strand to SEQ ID NO: 532261
agugucaccugacaacagg

SEQ ID NO: 532263 - RNA, 19 nt, Artificial Sequence
  Description of Artificial Sequence: Synthetic oligonucleotide
  Sense strand starting at position 1160 of SEQ ID NO: 318043
ggcugauaccgagacaauc

SEQ ID NO: 532264 - RNA, 19 nt, Artificial Sequence
  Description of Artificial Sequence: Synthetic oligonucleotide
  Antisense strand to SEQ ID NO: 532263
gauugucucgguaucagcc

SEQ ID NO: 532265 - RNA, 19 nt, Artificial Sequence
  Description of Artificial Sequence: Synthetic oligonucleotide
  Sense strand starting at position 1257 of SEQ ID NO: 318043
ggcuucaaucccgcgagua

SEQ ID NO: 532266 - RNA, 19 nt, Artificial Sequence
  Description of Artificial Sequence: Synthetic oligonucleotide
  Antisense strand to SEQ ID NO: 532265
uacucgcgggauugaagcc

SEQ ID NO: 532267 - RNA, 19 nt, Artificial Sequence
  Description of Artificial Sequence: Synthetic oligonucleotide
  Sense strand starting at position 1568 of SEQ ID NO: 318043
ggaugcguuucgaagagaa

SEQ ID NO: 532268 - RNA, 19 nt, Artificial Sequence
  Description of Artificial Sequence: Synthetic oligonucleotide
  Antisense strand to SEQ ID NO: 532267
uucucuucgaaacgcaucc

SEQ ID NO: 532269 - RNA, 19 nt, Artificial Sequence
  Description of Artificial Sequence: Synthetic oligonucleotide
  Sense strand starting at position 1570 of SEQ ID NO: 318043
augcguuucgaagagaagu

SEQ ID NO: 532270 - RNA, 19 nt, Artificial Sequence
  Description of Artificial Sequence: Synthetic oligonucleotide
  Antisense strand to SEQ ID NO: 532269
acuucucuucgaaacgcau

SEQ ID NO: 532271 - RNA, 19 nt, Artificial Sequence
  Description of Artificial Sequence: Synthetic oligonucleotide
  Sense strand starting at position 1583 of SEQ ID NO: 318043
agaaguugguuuccagguu

SEQ ID NO: 532272 - RNA, 19 nt, Artificial Sequence
  Description of Artificial Sequence: Synthetic oligonucleotide
  Antisense strand to SEQ ID NO: 532271
aaccuggaaaccaacuucu

SEQ ID NO: 532273 - RNA, 19 nt, Artificial Sequence
  Description of Artificial Sequence: Synthetic oligonucleotide
  Sense strand starting at position 2640 of SEQ ID NO: 318043
uguagacagugauuccuua

SEQ ID NO: 532274 - RNA, 19 nt, Artificial Sequence
  Description of Artificial Sequence: Synthetic oligonucleotide
  Antisense strand to SEQ ID NO: 532273
uaaggaaucacugucuaca

SEQ ID NO: 532275 - RNA, 19 nt, Artificial Sequence
  Description of Artificial Sequence: Synthetic oligonucleotide
  Sense strand starting at position 2647 of SEQ ID NO: 318043
agugauuccuuaucaucac

SEQ ID NO: 532276 - RNA, 19 nt, Artificial Sequence
  Description of Artificial Sequence: Synthetic oligonucleotide
  Antisense strand to SEQ ID NO: 532275
gugaugauaaggaaucacu

SEQ ID NO: 532277 - RNA, 19 nt, Artificial Sequence
  Description of Artificial Sequence: Synthetic oligonucleotide
  Sense strand starting at position 2840 of SEQ ID NO: 318043
uccauccagcugugaacua

SEQ ID NO: 532278 - RNA, 19 nt, Artificial Sequence
  Description of Artificial Sequence: Synthetic oligonucleotide
  Antisense strand to SEQ ID NO: 532277
uaguucacagcuggaugga

SEQ ID NO: 532279 - RNA, 19 nt, Artificial Sequence
  Description of Artificial Sequence: Synthetic oligonucleotide
  Sense strand starting at position 2890 of SEQ ID NO: 318043
ugaugugaaguuuaaagug

SEQ ID NO: 532280 - RNA, 19 nt, Artificial Sequence
  Description of Artificial Sequence: Synthetic oligonucleotide
  Antisense strand to SEQ ID NO: 532279
cacuuuaaacuucacauca

SEQ ID NO: 532281 - RNA, 19 nt, Artificial Sequence
  Description of Artificial Sequence: Synthetic oligonucleotide
  Sense strand starting at position 3073 of SEQ ID NO: 318043
cguuaauucgauuaaguac

SEQ ID NO: 532282 - RNA, 19 nt, Artificial Sequence
  Description of Artificial Sequence: Synthetic oligonucleotide
  Antisense strand to SEQ ID NO: 532281
guacuuaaucgaauuaacg

SEQ ID NO: 532283 - RNA, 19 nt, Artificial Sequence
  Description of Artificial Sequence: Synthetic oligonucleotide
  Sense strand starting at position 3114 of SEQ ID NO: 318043
caucgauuugggugcugga

SEQ ID NO: 532284 - RNA, 19 nt, Artificial Sequence
  Description of Artificial Sequence: Synthetic oligonucleotide
  Antisense strand to SEQ ID NO: 532283
uccagcacccaaaucgaug

SEQ ID NO: 532285 - RNA, 19 nt, Artificial Sequence
  Description of Artificial Sequence: Synthetic oligonucleotide
  Sense strand starting at position 3121 of SEQ ID NO: 318043
uugggugcuggauaugaaa

SEQ ID NO: 532286 - RNA, 19 nt, Artificial Sequence
  Description of Artificial Sequence: Synthetic oligonucleotide
  Antisense strand to SEQ ID NO: 532285
uuucauauccagcacccaa

SEQ ID NO: 532287 - RNA, 19 nt, Artificial Sequence
  Description of Artificial Sequence: Synthetic oligonucleotide
  Sense strand starting at position 3123 of SEQ ID NO: 318043
gggugcuggauaugaaaca

SEQ ID NO: 532288 - RNA, 19 nt, Artificial Sequence
  Description of Artificial Sequence: Synthetic oligonucleotide
  Antisense strand to SEQ ID NO: 532287
uguuucauauccagcaccc

SEQ ID NO: 532289 - RNA, 19 nt, Artificial Sequence
  Description of Artificial Sequence: Synthetic oligonucleotide
  Sense strand starting at position 3269 of SEQ ID NO: 318043
uaggaagugugagauaaga

SEQ ID NO: 532290 - RNA, 19 nt, Artificial Sequence
  Description of Artificial Sequence: Synthetic oligonucleotide
  Antisense strand to SEQ ID NO: 532289
ucuuaucucacacuuccua

SEQ ID NO: 532291 - RNA, 19 nt, Artificial Sequence
  Description of Artificial Sequence: Synthetic oligonucleotide
  Sense strand starting at position 3455 of SEQ ID NO: 318043
cgagugugagguuggagua

SEQ ID NO: 532292 - RNA, 19 nt, Artificial Sequence
  Description of Artificial Sequence: Synthetic oligonucleotide
  Antisense strand to SEQ ID NO: 532291
uacuccaaccucacacucg

SEQ ID NO: 532293 - RNA, 19 nt, Artificial Sequence
  Description of Artificial Sequence: Synthetic oligonucleotide
  Sense strand starting at position 3529 of SEQ ID NO: 318043
ugaugcuucuggucccaaa

SEQ ID NO: 532294 - RNA, 19 nt, Artificial Sequence
  Description of Artificial Sequence: Synthetic oligonucleotide
  Antisense strand to SEQ ID NO: 532293
uuugggaccagaagcauca

SEQ ID NO: 532295 - RNA, 19 nt, Artificial Sequence
  Description of Artificial Sequence: Synthetic oligonucleotide
  Sense strand starting at position 3550 of SEQ ID NO: 318043
aaagcauuaugguucuaug

SEQ ID NO: 532296 - RNA, 19 nt, Artificial Sequence
  Description of Artificial Sequence: Synthetic oligonucleotide
  Antisense strand to SEQ ID NO: 532295
cauagaaccauaaugcuuu

SEQ ID NO: 532297 - RNA, 19 nt, Artificial Sequence
  Description of Artificial Sequence: Synthetic oligonucleotide
  Sense strand starting at position 3964 of SEQ ID NO: 318043
gcuucuucuucuguuaaag

SEQ ID NO: 532298 - RNA, 19 nt, Artificial Sequence
  Description of Artificial Sequence: Synthetic oligonucleotide
  Antisense strand to SEQ ID NO: 532297
cuuuaacagaagaagaagc

SEQ ID NO: 532299 - RNA, 19 nt, Artificial Sequence
  Description of Artificial Sequence: Synthetic oligonucleotide
  Sense strand starting at position 118 of SEQ ID NO: 318044
gcuguuuacugggucauua

SEQ ID NO: 532300 - RNA, 19 nt, Artificial Sequence
  Description of Artificial Sequence: Synthetic oligonucleotide
  Antisense strand to SEQ ID NO: 532299
uaaugacccaguaaacagc

SEQ ID NO: 532301 - RNA, 19 nt, Artificial Sequence
  Description of Artificial Sequence: Synthetic oligonucleotide
  Sense strand starting at position 120 of SEQ ID NO: 318044
uguuuacugggucauuaaa

SEQ ID NO: 532302 - RNA, 19 nt, Artificial Sequence
  Description of Artificial Sequence: Synthetic oligonucleotide
  Antisense strand to SEQ ID NO: 532301
uuuaaugacccaguaaaca

SEQ ID NO: 532303 - RNA, 19 nt, Artificial Sequence
  Description of Artificial Sequence: Synthetic oligonucleotide
  Sense strand starting at position 150 of SEQ ID NO: 318044
ccuuuauagucauuguaau

SEQ ID NO: 532304 - RNA, 19 nt, Artificial Sequence
  Description of Artificial Sequence: Synthetic oligonucleotide
  Antisense strand to SEQ ID NO: 532303
auuacaaugacuauaaagg

SEQ ID NO: 532305 - RNA, 19 nt, Artificial Sequence
  Description of Artificial Sequence: Synthetic oligonucleotide
  Sense strand starting at position 156 of SEQ ID NO: 318044
uagucauuguaauuguuga

SEQ ID NO: 532306 - RNA, 19 nt, Artificial Sequence
  Description of Artificial Sequence: Synthetic oligonucleotide
  Antisense strand to SEQ ID NO: 532305
ucaacaauuacaaugacua

SEQ ID NO: 532307 - RNA, 19 nt, Artificial Sequence
  Description of Artificial Sequence: Synthetic oligonucleotide
  Sense strand starting at position 192 of SEQ ID NO: 318044
guuguuuguacagaagucu

SEQ ID NO: 532308 - RNA, 19 nt, Artificial Sequence
  Description of Artificial Sequence: Synthetic oligonucleotide
  Antisense strand to SEQ ID NO: 532307
agacuucuguacaaacaac

SEQ ID NO: 532309 - RNA, 19 nt, Artificial Sequence
  Description of Artificial Sequence: Synthetic oligonucleotide
  Sense strand starting at position 203 of SEQ ID NO: 318044
agaagucucucacuuugaa

SEQ ID NO: 532310 - RNA, 19 nt, Artificial Sequence
  Description of Artificial Sequence: Synthetic oligonucleotide
  Antisense strand to SEQ ID NO: 532309
uucaaagugagagacuucu

SEQ ID NO: 532311 - RNA, 19 nt, Artificial Sequence
  Description of Artificial Sequence: Synthetic oligonucleotide
  Sense strand starting at position 277 of SEQ ID NO: 318044
ugaccaacuccuugaguga

SEQ ID NO: 532312 - RNA, 19 nt, Artificial Sequence
  Description of Artificial Sequence: Synthetic oligonucleotide
  Antisense strand to SEQ ID NO: 532311
ucacucaaggaguugguca

SEQ ID NO: 532313 - RNA, 19 nt, Artificial Sequence
  Description of Artificial Sequence: Synthetic oligonucleotide
  Sense strand starting at position 342 of SEQ ID NO: 318044
ccuguugucaggugacacu

SEQ ID NO: 532314 - RNA, 19 nt, Artificial Sequence
  Description of Artificial Sequence: Synthetic oligonucleotide
  Antisense strand to SEQ ID NO: 532313
agugucaccugacaacagg

SEQ ID NO: 532315 - RNA, 19 nt, Artificial Sequence
  Description of Artificial Sequence: Synthetic oligonucleotide
  Sense strand starting at position 511 of SEQ ID NO: 318044
ggcugauaccgagacaauc

SEQ ID NO: 532316 - RNA, 19 nt, Artificial Sequence
  Description of Artificial Sequence: Synthetic oligonucleotide
  Antisense strand to SEQ ID NO: 532315
gauugucucgguaucagcc

SEQ ID NO: 532317 - RNA, 19 nt, Artificial Sequence
  Description of Artificial Sequence: Synthetic oligonucleotide
  Sense strand starting at position 608 of SEQ ID NO: 318044
ggcuucaaucccgcgagua

SEQ ID NO: 532318 - RNA, 19 nt, Artificial Sequence
  Description of Artificial Sequence: Synthetic oligonucleotide
  Antisense strand to SEQ ID NO: 532317
uacucgcgggauugaagcc

SEQ ID NO: 532319 - RNA, 19 nt, Artificial Sequence
  Description of Artificial Sequence: Synthetic oligonucleotide
  Sense strand starting at position 919 of SEQ ID NO: 318044
ggaugcguuucgaagagaa

SEQ ID NO: 532320 - RNA, 19 nt, Artificial Sequence
  Description of Artificial Sequence: Synthetic oligonucleotide
  Antisense strand to SEQ ID NO: 532319
uucucuucgaaacgcaucc

SEQ ID NO: 532321 - RNA, 19 nt, Artificial Sequence
  Description of Artificial Sequence: Synthetic oligonucleotide
  Sense strand starting at position 921 of SEQ ID NO: 318044
augcguuucgaagagaagu

SEQ ID NO: 532322 - RNA, 19 nt, Artificial Sequence
  Description of Artificial Sequence: Synthetic oligonucleotide
  Antisense strand to SEQ ID NO: 532321
acuucucuucgaaacgcau

SEQ ID NO: 532323 - RNA, 19 nt, Artificial Sequence
  Description of Artificial Sequence: Synthetic oligonucleotide
  Sense strand starting at position 934 of SEQ ID NO: 318044
agaaguugguuuccagguu

SEQ ID NO: 532324 - RNA, 19 nt, Artificial Sequence
  Description of Artificial Sequence: Synthetic oligonucleotide
  Antisense strand to SEQ ID NO: 532323
aaccuggaaaccaacuucu

SEQ ID NO: 532325 - RNA, 19 nt, Artificial Sequence
  Description of Artificial Sequence: Synthetic oligonucleotide
  Sense strand starting at position 1991 of SEQ ID NO: 318044
uguagacagugauuccuua

SEQ ID NO: 532326 - RNA, 19 nt, Artificial Sequence
  Description of Artificial Sequence: Synthetic oligonucleotide
  Antisense strand to SEQ ID NO: 532325
uaaggaaucacugucuaca

SEQ ID NO: 532327 - RNA, 19 nt, Artificial Sequence
  Description of Artificial Sequence: Synthetic oligonucleotide
  Sense strand starting at position 1998 of SEQ ID NO: 318044
agugauuccuuaucaucac

SEQ ID NO: 532328 - RNA, 19 nt, Artificial Sequence
  Description of Artificial Sequence: Synthetic oligonucleotide
  Antisense strand to SEQ ID NO: 532327
gugaugauaaggaaucacu

SEQ ID NO: 532329 - RNA, 19 nt, Artificial Sequence
  Description of Artificial Sequence: Synthetic oligonucleotide
  Sense strand starting at position 2191 of SEQ ID NO: 318044
uccauccagcugugaacua

SEQ ID NO: 532330 - RNA, 19 nt, Artificial Sequence
  Description of Artificial Sequence: Synthetic oligonucleotide
  Antisense strand to SEQ ID NO: 532329
uaguucacagcuggaugga

SEQ ID NO: 532331 - RNA, 19 nt, Artificial Sequence
  Description of Artificial Sequence: Synthetic oligonucleotide
  Sense strand starting at position 2241 of SEQ ID NO: 318044
ugaugugaaguuuaaagug

SEQ ID NO: 532332 - RNA, 19 nt, Artificial Sequence
  Description of Artificial Sequence: Synthetic oligonucleotide
  Antisense strand to SEQ ID NO: 532331
cacuuuaaacuucacauca

SEQ ID NO: 532333 - RNA, 19 nt, Artificial Sequence
  Description of Artificial Sequence: Synthetic oligonucleotide
  Sense strand starting at position 2424 of SEQ ID NO: 318044
cguuaauucgauuaaguac

SEQ ID NO: 532334 - RNA, 19 nt, Artificial Sequence
  Description of Artificial Sequence: Synthetic oligonucleotide
  Antisense strand to SEQ ID NO: 532333
guacuuaaucgaauuaacg

SEQ ID NO: 532335 - RNA, 19 nt, Artificial Sequence
  Description of Artificial Sequence: Synthetic oligonucleotide
  Sense strand starting at position 2465 of SEQ ID NO: 318044
caucgauuugggugcugga

SEQ ID NO: 532336 - RNA, 19 nt, Artificial Sequence
  Description of Artificial Sequence: Synthetic oligonucleotide
  Antisense strand to SEQ ID NO: 532335
uccagcacccaaaucgaug

SEQ ID NO: 532337 - RNA, 19 nt, Artificial Sequence
  Description of Artificial Sequence: Synthetic oligonucleotide
  Sense strand starting at position 2472 of SEQ ID NO: 318044
uugggugcuggauaugaaa

SEQ ID NO: 532338 - RNA, 19 nt, Artificial Sequence
  Description of Artificial Sequence: Synthetic oligonucleotide
  Antisense strand to SEQ ID NO: 532337
uuucauauccagcacccaa

SEQ ID NO: 532339 - RNA, 19 nt, Artificial Sequence
  Description of Artificial Sequence: Synthetic oligonucleotide
  Sense strand starting at position 2474 of SEQ ID NO: 318044
gggugcuggauaugaaaca

SEQ ID NO: 532340 - RNA, 19 nt, Artificial Sequence
  Description of Artificial Sequence: Synthetic oligonucleotide
  Antisense strand to SEQ ID NO: 532339
uguuucauauccagcaccc

SEQ ID NO: 532341 - RNA, 19 nt, Artificial Sequence
  Description of Artificial Sequence: Synthetic oligonucleotide
  Sense strand starting at position 2620 of SEQ ID NO: 318044
uaggaagugugagauaaga

SEQ ID NO: 532342 - RNA, 19 nt, Artificial Sequence
  Description of Artificial Sequence: Synthetic oligonucleotide
  Antisense strand to SEQ ID NO: 532341
ucuuaucucacacuuccua

SEQ ID NO: 532343 - RNA, 19 nt, Artificial Sequence
  Description of Artificial Sequence: Synthetic oligonucleotide
  Sense strand starting at position 2806 of SEQ ID NO: 318044
cgagugugagguuggagua

SEQ ID NO: 532344 - RNA, 19 nt, Artificial Sequence
  Description of Artificial Sequence: Synthetic oligonucleotide
  Antisense strand to SEQ ID NO: 532343
uacuccaaccucacacucg

SEQ ID NO: 532345 - RNA, 19 nt, Artificial Sequence
  Description of Artificial Sequence: Synthetic oligonucleotide
  Sense strand starting at position 2880 of SEQ ID NO: 318044
ugaugcuucuggucccaaa

SEQ ID NO: 532346 - RNA, 19 nt, Artificial Sequence
  Description of Artificial Sequence: Synthetic oligonucleotide
  Antisense strand to SEQ ID NO: 532345
uuugggaccagaagcauca

SEQ ID NO: 532347 - RNA, 19 nt, Artificial Sequence
  Description of Artificial Sequence: Synthetic oligonucleotide
  Sense strand starting at position 2901 of SEQ ID NO: 318044
aaagcauuaugguucuaug

SEQ ID NO: 532348 - RNA, 19 nt, Artificial Sequence
  Description of Artificial Sequence: Synthetic oligonucleotide
  Antisense strand to SEQ ID NO: 532347
cauagaaccauaaugcuuu

SEQ ID NO: 532349 - RNA, 19 nt, Artificial Sequence
  Description of Artificial Sequence: Synthetic oligonucleotide
  Sense strand starting at position 3315 of SEQ ID NO: 318044
gcuucuucuucuguuaaag

SEQ ID NO: 532350 - RNA, 19 nt, Artificial Sequence
  Description of Artificial Sequence: Synthetic oligonucleotide
  Antisense strand to SEQ ID NO: 532349
cuuuaacagaagaagaagc

SEQ ID NO: 532351 - RNA, 19 nt, Artificial Sequence
  Description of Artificial Sequence: Synthetic oligonucleotide
  Sense strand starting at position 3352 of SEQ ID NO: 318044
augacaaagcuaugcucau

SEQ ID NO: 532352 - RNA, 19 nt, Artificial Sequence
  Description of Artificial Sequence: Synthetic oligonucleotide
  Antisense strand to SEQ ID NO: 532351
augagcauagcuuugucau

SEQ ID NO: 532353 - RNA, 19 nt, Artificial Sequence
  Description of Artificial Sequence: Synthetic oligonucleotide
  Sense strand starting at position 3353 of SEQ ID NO: 318044
ugacaaagcuaugcucauu

SEQ ID NO: 532354 - RNA, 19 nt, Artificial Sequence
  Description of Artificial Sequence: Synthetic oligonucleotide
  Antisense strand to SEQ ID NO: 532353
aaugagcauagcuuuguca

SEQ ID NO: 532355 - RNA, 19 nt, Artificial Sequence
  Description of Artificial Sequence: Synthetic oligonucleotide
  Sense strand starting at position 3510 of SEQ ID NO: 318044
uagugauugucaccugcac

SEQ ID NO: 532356 - RNA, 19 nt, Artificial Sequence
  Description of Artificial Sequence: Synthetic oligonucleotide
  Antisense strand to SEQ ID NO: 532355
gugcaggugacaaucacua

SEQ ID NO: 532357 - RNA, 19 nt, Artificial Sequence
  Description of Artificial Sequence: Synthetic oligonucleotide
  Sense strand starting at position 3534 of SEQ ID NO: 318044
acuuaaugguucuuuauga

SEQ ID NO: 532358 - RNA, 19 nt, Artificial Sequence
  Description of Artificial Sequence: Synthetic oligonucleotide
  Antisense strand to SEQ ID NO: 532357
ucauaaagaaccauuaagu

SEQ ID NO: 532359 - RNA, 19 nt, Artificial Sequence
  Description of Artificial Sequence: Synthetic oligonucleotide
  Sense strand starting at position 3535 of SEQ ID NO: 318044
cuuaaugguucuuuaugag

SEQ ID NO: 532360 - RNA, 19 nt, Artificial Sequence
  Description of Artificial Sequence: Synthetic oligonucleotide
  Antisense strand to SEQ ID NO: 532359
cucauaaagaaccauuaag

SEQ ID NO: 532361 - RNA, 19 nt, Artificial Sequence
  Description of Artificial Sequence: Synthetic oligonucleotide
  Sense strand starting at position 3561 of SEQ ID NO: 318044
cuggguaguuguucuacaa

SEQ ID NO: 532362 - RNA, 19 nt, Artificial Sequence
  Description of Artificial Sequence: Synthetic oligonucleotide
  Antisense strand to SEQ ID NO: 532361
uuguagaacaacuacccag

SEQ ID NO: 532363 - RNA, 19 nt, Artificial Sequence
  Description of Artificial Sequence: Synthetic oligonucleotide
  Sense strand starting at position 3565 of SEQ ID NO: 318044
guaguuguucuacaauaac

SEQ ID NO: 532364 - RNA, 19 nt, Artificial Sequence
  Description of Artificial Sequence: Synthetic oligonucleotide
  Antisense strand to SEQ ID NO: 532363
guuauuguagaacaacuac

SEQ ID NO: 532365 - RNA, 19 nt, Artificial Sequence
  Description of Artificial Sequence: Synthetic oligonucleotide
  Sense strand starting at position 3568 of SEQ ID NO: 318044
guuguucuacaauaacauu

SEQ ID NO: 532366 - RNA, 19 nt, Artificial Sequence
  Description of Artificial Sequence: Synthetic oligonucleotide
  Antisense strand to SEQ ID NO: 532365
aauguuauuguagaacaac

SEQ ID NO: 532367 - RNA, 19 nt, Artificial Sequence
  Description of Artificial Sequence: Synthetic oligonucleotide
  Sense strand starting at position 3855 of SEQ ID NO: 318044
gaaugucugguguaauaga

SEQ ID NO: 532368 - RNA, 19 nt, Artificial Sequence
  Description of Artificial Sequence: Synthetic oligonucleotide
  Antisense strand to SEQ ID NO: 532367
ucuauuacaccagacauuc

SEQ ID NO: 532369 - RNA, 19 nt, Artificial Sequence
  Description of Artificial Sequence: Synthetic oligonucleotide
  Sense strand starting at position 3863 of SEQ ID NO: 318044
gguguaauagaagauagcu

SEQ ID NO: 532370 - RNA, 19 nt, Artificial Sequence
  Description of Artificial Sequence: Synthetic oligonucleotide
  Antisense strand to SEQ ID NO: 532369
agcuaucuucuauuacacc

SEQ ID NO: 532371 - RNA, 19 nt, Artificial Sequence
  Description of Artificial Sequence: Synthetic oligonucleotide
  Sense strand starting at position 3927 of SEQ ID NO: 318044
uuguuugaaguaugugaag

SEQ ID NO: 532372 - RNA, 19 nt, Artificial Sequence
  Description of Artificial Sequence: Synthetic oligonucleotide
  Antisense strand to SEQ ID NO: 532371
cuucacauacuucaaacaa

SEQ ID NO: 532373 - RNA, 19 nt, Artificial Sequence
  Description of Artificial Sequence: Synthetic oligonucleotide
  Sense strand starting at position 3929 of SEQ ID NO: 318044
guuugaaguaugugaagaa

SEQ ID NO: 532374 - RNA, 19 nt, Artificial Sequence
  Description of Artificial Sequence: Synthetic oligonucleotide
  Antisense strand to SEQ ID NO: 532373
uucuucacauacuucaaac

SEQ ID NO: 532375 - RNA, 19 nt, Artificial Sequence
  Description of Artificial Sequence: Synthetic oligonucleotide
  Sense strand starting at position 3952 of SEQ ID NO: 318044
cagccuuauguagauaugu

SEQ ID NO: 532376 - RNA, 19 nt, Artificial Sequence
  Description of Artificial Sequence: Synthetic oligonucleotide
  Antisense strand to SEQ ID NO: 532375
acauaucuacauaaggcug

SEQ ID NO: 532377 - RNA, 19 nt, Artificial Sequence
  Description of Artificial Sequence: Synthetic oligonucleotide
  Sense strand starting at position 3965 of SEQ ID NO: 318044
auauguauaugggaaagaa

SEQ ID NO: 532378 - RNA, 19 nt, Artificial Sequence
  Description of Artificial Sequence: Synthetic oligonucleotide
  Antisense strand to SEQ ID NO: 532377
uucuuucccauauacauau

SEQ ID NO: 532379 - RNA, 19 nt, Artificial Sequence
  Description of Artificial Sequence: Synthetic oligonucleotide
  Sense strand starting at position 332 of SEQ ID NO: 318045
ggaugagcuuucgucaguu

SEQ ID NO: 532380 - RNA, 19 nt, Artificial Sequence
  Description of Artificial Sequence: Synthetic oligonucleotide
  Antisense strand to SEQ ID NO: 532379
aacugacgaaagcucaucc

SEQ ID NO: 532381 - RNA, 19 nt, Artificial Sequence
  Description of Artificial Sequence: Synthetic oligonucleotide
  Sense strand starting at position 334 of SEQ ID NO: 318045
augagcuuucgucaguuua

SEQ ID NO: 532382 - RNA, 19 nt, Artificial Sequence
  Description of Artificial Sequence: Synthetic oligonucleotide
  Antisense strand to SEQ ID NO: 532381
uaaacugacgaaagcucau

SEQ ID NO: 532383 - RNA, 19 nt, Artificial Sequence
  Description of Artificial Sequence: Synthetic oligonucleotide
  Sense strand starting at position 507 of SEQ ID NO: 318045
caggaagugucacccuaac

SEQ ID NO: 532384 - RNA, 19 nt, Artificial Sequence
  Description of Artificial Sequence: Synthetic oligonucleotide
  Antisense strand to SEQ ID NO: 532383
guuagggugacacuuccug

SEQ ID NO: 532385 - RNA, 19 nt, Artificial Sequence
  Description of Artificial Sequence: Synthetic oligonucleotide
  Sense strand starting at position 575 of SEQ ID NO: 318045
agaaguggcucuuauuuac

SEQ ID NO: 532386 - RNA, 19 nt, Artificial Sequence
  Description of Artificial Sequence: Synthetic oligonucleotide
  Antisense strand to SEQ ID NO: 532385
guaaauaagagccacuucu

SEQ ID NO: 532387 - RNA, 19 nt, Artificial Sequence
  Description of Artificial Sequence: Synthetic oligonucleotide
  Sense strand starting at position 581 of SEQ ID NO: 318045
ggcucuuauuuacaugcaa

SEQ ID NO: 532388 - RNA, 19 nt, Artificial Sequence
  Description of Artificial Sequence: Synthetic oligonucleotide
  Antisense strand to SEQ ID NO: 532387
uugcauguaaauaagagcc

SEQ ID NO: 532389 - RNA, 19 nt, Artificial Sequence
  Description of Artificial Sequence: Synthetic oligonucleotide
  Sense strand starting at position 696 of SEQ ID NO: 318045
cuggacuccucagauaggu

SEQ ID NO: 532390 - RNA, 19 nt, Artificial Sequence
  Description of Artificial Sequence: Synthetic oligonucleotide
  Antisense strand to SEQ ID NO: 532389
accuaucugaggaguccag

SEQ ID NO: 532391 - RNA, 19 nt, Artificial Sequence
  Description of Artificial Sequence: Synthetic oligonucleotide
  Sense strand starting at position 958 of SEQ ID NO: 318045
cgaggcuccaaacagauua

SEQ ID NO: 532392 - RNA, 19 nt, Artificial Sequence
  Description of Artificial Sequence: Synthetic oligonucleotide
  Antisense strand to SEQ ID NO: 532391
uaaucuguuuggagccucg

SEQ ID NO: 532393 - RNA, 19 nt, Artificial Sequence
  Description of Artificial Sequence: Synthetic oligonucleotide
  Sense strand starting at position 1014 of SEQ ID NO: 318045
ugaauucuaugacgaaucu

SEQ ID NO: 532394 - RNA, 19 nt, Artificial Sequence
  Description of Artificial Sequence: Synthetic oligonucleotide
  Antisense strand to SEQ ID NO: 532393
agauucgucauagaauuca

SEQ ID NO: 532395 - RNA, 19 nt, Artificial Sequence
  Description of Artificial Sequence: Synthetic oligonucleotide
  Sense strand starting at position 1339 of SEQ ID NO: 318045
gagucuugaucuuggagag

SEQ ID NO: 532396 - RNA, 19 nt, Artificial Sequence
  Description of Artificial Sequence: Synthetic oligonucleotide
  Antisense strand to SEQ ID NO: 532395
cucuccaagaucaagacuc

SEQ ID NO: 532397 - RNA, 19 nt, Artificial Sequence
  Description of Artificial Sequence: Synthetic oligonucleotide
  Sense strand starting at position 1399 of SEQ ID NO: 318045
ccgcgaaugcgcuguuaau

SEQ ID NO: 532398 - RNA, 19 nt, Artificial Sequence
  Description of Artificial Sequence: Synthetic oligonucleotide
  Antisense strand to SEQ ID NO: 532397
auuaacagcgcauucgcgg

SEQ ID NO: 532399 - RNA, 19 nt, Artificial Sequence
  Description of Artificial Sequence: Synthetic oligonucleotide
  Sense strand starting at position 1400 of SEQ ID NO: 318045
cgcgaaugcgcuguuaaug

SEQ ID NO: 532400 - RNA, 19 nt, Artificial Sequence
  Description of Artificial Sequence: Synthetic oligonucleotide
  Antisense strand to SEQ ID NO: 532399
cauuaacagcgcauucgcg

SEQ ID NO: 532401 - RNA, 19 nt, Artificial Sequence
  Description of Artificial Sequence: Synthetic oligonucleotide
  Sense strand starting at position 1408 of SEQ ID NO: 318045
cgcuguuaaugcucucagu

SEQ ID NO: 532402 - RNA, 19 nt, Artificial Sequence
  Description of Artificial Sequence: Synthetic oligonucleotide
  Antisense strand to SEQ ID NO: 532401
acugagagcauuaacagcg

SEQ ID NO: 532403 - RNA, 19 nt, Artificial Sequence
  Description of Artificial Sequence: Synthetic oligonucleotide
  Sense strand starting at position 1624 of SEQ ID NO: 318045
agggccuuuccugaugaca

SEQ ID NO: 532404 - RNA, 19 nt, Artificial Sequence
  Description of Artificial Sequence: Synthetic oligonucleotide
  Antisense strand to SEQ ID NO: 532403
ugucaucaggaaaggcccu

SEQ ID NO: 532405 - RNA, 19 nt, Artificial Sequence
  Description of Artificial Sequence: Synthetic oligonucleotide
  Sense strand starting at position 1663 of SEQ ID NO: 318045
ggaaggguucguggagcau

SEQ ID NO: 532406 - RNA, 19 nt, Artificial Sequence
  Description of Artificial Sequence: Synthetic oligonucleotide
  Antisense strand to SEQ ID NO: 532405
augcuccacgaacccuucc

SEQ ID NO: 532407 - RNA, 19 nt, Artificial Sequence
  Description of Artificial Sequence: Synthetic oligonucleotide
  Sense strand starting at position 1976 of SEQ ID NO: 318045
gcggaucuggcuuauauaa

SEQ ID NO: 532408 - RNA, 19 nt, Artificial Sequence
  Description of Artificial Sequence: Synthetic oligonucleotide
  Antisense strand to SEQ ID NO: 532407
uuauauaagccagauccgc

SEQ ID NO: 532409 - RNA, 19 nt, Artificial Sequence
  Description of Artificial Sequence: Synthetic oligonucleotide
  Sense strand starting at position 1978 of SEQ ID NO: 318045
ggaucuggcuuauauaaga

SEQ ID NO: 532410 - RNA, 19 nt, Artificial Sequence
  Description of Artificial Sequence: Synthetic oligonucleotide
  Antisense strand to SEQ ID NO: 532409
ucuuauauaagccagaucc

SEQ ID NO: 532411 - RNA, 19 nt, Artificial Sequence
  Description of Artificial Sequence: Synthetic oligonucleotide
  Sense strand starting at position 2378 of SEQ ID NO: 318045
aagaaagguucuuguuucu

SEQ ID NO: 532412 - RNA, 19 nt, Artificial Sequence
  Description of Artificial Sequence: Synthetic oligonucleotide
  Antisense strand to SEQ ID NO: 532411
agaaacaagaaccuuucuu

SEQ ID NO: 532413 - RNA, 19 nt, Artificial Sequence
  Description of Artificial Sequence: Synthetic oligonucleotide
  Sense strand starting at position 2381 of SEQ ID NO: 318045
aaagguucuuguuucuaga

SEQ ID NO: 532414 - RNA, 19 nt, Artificial Sequence
  Description of Artificial Sequence: Synthetic oligonucleotide
  Antisense strand to SEQ ID NO: 532413
ucuagaaacaagaaccuuu

SEQ ID NO: 532415 - RNA, 19 nt, Artificial Sequence
  Description of Artificial Sequence: Synthetic oligonucleotide
  Sense strand starting at position 2383 of SEQ ID NO: 318045
agguucuuguuucuagacu

SEQ ID NO: 532416 - RNA, 19 nt, Artificial Sequence
  Description of Artificial Sequence: Synthetic oligonucleotide
  Antisense strand to SEQ ID NO: 532415
agucuagaaacaagaaccu

SEQ ID NO: 532417 - RNA, 19 nt, Artificial Sequence
  Description of Artificial Sequence: Synthetic oligonucleotide
  Sense strand starting at position 2392 of SEQ ID NO: 318045
uuucuagacugucuagaag

SEQ ID NO: 532418 - RNA, 19 nt, Artificial Sequence
  Description of Artificial Sequence: Synthetic oligonucleotide
  Antisense strand to SEQ ID NO: 532417
cuucuagacagucuagaaa

SEQ ID NO: 532419 - RNA, 19 nt, Artificial Sequence
  Description of Artificial Sequence: Synthetic oligonucleotide
  Sense strand starting at position 2462 of SEQ ID NO: 318045
cggcgucagagcuagaaga

SEQ ID NO: 532420 - RNA, 19 nt, Artificial Sequence
  Description of Artificial Sequence: Synthetic oligonucleotide
  Antisense strand to SEQ ID NO: 532419
ucuucuagcucugacgccg

SEQ ID NO: 532421 - RNA, 19 nt, Artificial Sequence
  Description of Artificial Sequence: Synthetic oligonucleotide
  Sense strand starting at position 2464 of SEQ ID NO: 318045
gcgucagagcuagaagaug

SEQ ID NO: 532422 - RNA, 19 nt, Artificial Sequence
  Description of Artificial Sequence: Synthetic oligonucleotide
  Antisense strand to SEQ ID NO: 532421
caucuucuagcucugacgc

SEQ ID NO: 532423 - RNA, 19 nt, Artificial Sequence
  Description of Artificial Sequence: Synthetic oligonucleotide
  Sense strand starting at position 2511 of SEQ ID NO: 318045
cgcuaacguucuucccuaa

SEQ ID NO: 532424 - RNA, 19 nt, Artificial Sequence
  Description of Artificial Sequence: Synthetic oligonucleotide
  Antisense strand to SEQ ID NO: 532423
uuagggaagaacguuagcg

SEQ ID NO: 532425 - RNA, 19 nt, Artificial Sequence
  Description of Artificial Sequence: Synthetic oligonucleotide
  Sense strand starting at position 2662 of SEQ ID NO: 318045
gcuacugaccagcgaagaa

SEQ ID NO: 532426 - RNA, 19 nt, Artificial Sequence
  Description of Artificial Sequence: Synthetic oligonucleotide
  Antisense strand to SEQ ID NO: 532425
uucuucgcuggucaguagc

SEQ ID NO: 532427 - RNA, 19 nt, Artificial Sequence
  Description of Artificial Sequence: Synthetic oligonucleotide
  Sense strand starting at position 2750 of SEQ ID NO: 318045
ggguuuguucccggcuuga

SEQ ID NO: 532428 - RNA, 19 nt, Artificial Sequence
  Description of Artificial Sequence: Synthetic oligonucleotide
  Antisense strand to SEQ ID NO: 532427
ucaagccgggaacaaaccc

SEQ ID NO: 532429 - RNA, 19 nt, Artificial Sequence
  Description of Artificial Sequence: Synthetic oligonucleotide
  Sense strand starting at position 2964 of SEQ ID NO: 318045
uuaagaaucuuugguucuu

SEQ ID NO: 532430 - RNA, 19 nt, Artificial Sequence
  Description of Artificial Sequence: Synthetic oligonucleotide
  Antisense strand to SEQ ID NO: 532429
aagaaccaaagauucuuaa

SEQ ID NO: 532431 - RNA, 19 nt, Artificial Sequence
  Description of Artificial Sequence: Synthetic oligonucleotide
  Sense strand starting at position 2970 of SEQ ID NO: 318045
aucuuugguucuuuaaaga

SEQ ID NO: 532432 - RNA, 19 nt, Artificial Sequence
  Description of Artificial Sequence: Synthetic oligonucleotide
  Antisense strand to SEQ ID NO: 532431
ucuuuaaagaaccaaagau

SEQ ID NO: 532433 - RNA, 19 nt, Artificial Sequence
  Description of Artificial Sequence: Synthetic oligonucleotide
  Sense strand starting at position 3018 of SEQ ID NO: 318045
accagcauucggcguuaga

SEQ ID NO: 532434 - RNA, 19 nt, Artificial Sequence
  Description of Artificial Sequence: Synthetic oligonucleotide
  Antisense strand to SEQ ID NO: 532433
ucuaacgccgaaugcuggu

SEQ ID NO: 532435 - RNA, 19 nt, Artificial Sequence
  Description of Artificial Sequence: Synthetic oligonucleotide
  Sense strand starting at position 3019 of SEQ ID NO: 318045
ccagcauucggcguuagac

SEQ ID NO: 532436 - RNA, 19 nt, Artificial Sequence
  Description of Artificial Sequence: Synthetic oligonucleotide
  Antisense strand to SEQ ID NO: 532435
gucuaacgccgaaugcugg

SEQ ID NO: 532437 - RNA, 19 nt, Artificial Sequence
  Description of Artificial Sequence: Synthetic oligonucleotide
  Sense strand starting at position 3140 of SEQ ID NO: 318045
gcacgacccuccgagauuu

SEQ ID NO: 532438 - RNA, 19 nt, Artificial Sequence
  Description of Artificial Sequence: Synthetic oligonucleotide
  Antisense strand to SEQ ID NO: 532437
aaaucucggagggucgugc

SEQ ID NO: 532439 - RNA, 19 nt, Artificial Sequence
  Description of Artificial Sequence: Synthetic oligonucleotide
  Sense strand starting at position 3223 of SEQ ID NO: 318045
cgcguuggaaucugggaau

SEQ ID NO: 532440 - RNA, 19 nt, Artificial Sequence
  Description of Artificial Sequence: Synthetic oligonucleotide
  Antisense strand to SEQ ID NO: 532439
auucccagauuccaacgcg

SEQ ID NO: 532441 - RNA, 19 nt, Artificial Sequence
  Description of Artificial Sequence: Synthetic oligonucleotide
  Sense strand starting at position 3426 of SEQ ID NO: 318045
aggagaaguuaaugugagu

SEQ ID NO: 532442 - RNA, 19 nt, Artificial Sequence
  Description of Artificial Sequence: Synthetic oligonucleotide
  Antisense strand to SEQ ID NO: 532441
acucacauuaacuucuccu

SEQ ID NO: 532443 - RNA, 19 nt, Artificial Sequence
  Description of Artificial Sequence: Synthetic oligonucleotide
  Sense strand starting at position 3432 of SEQ ID NO: 318045
aguuaaugugagugcucuu

SEQ ID NO: 532444 - RNA, 19 nt, Artificial Sequence
  Description of Artificial Sequence: Synthetic oligonucleotide
  Antisense strand to SEQ ID NO: 532443
aagagcacucacauuaacu

SEQ ID NO: 532445 - RNA, 19 nt, Artificial Sequence
  Description of Artificial Sequence: Synthetic oligonucleotide
  Sense strand starting at position 3501 of SEQ ID NO: 318045
cuacuaugugccuaucaua

SEQ ID NO: 532446 - RNA, 19 nt, Artificial Sequence
  Description of Artificial Sequence: Synthetic oligonucleotide
  Antisense strand to SEQ ID NO: 532445
uaugauaggcacauaguag

SEQ ID NO: 532447 - RNA, 19 nt, Artificial Sequence
  Description of Artificial Sequence: Synthetic oligonucleotide
  Sense strand starting at position 3548 of SEQ ID NO: 318045
ggcccauucucuccuugaa

SEQ ID NO: 532448 - RNA, 19 nt, Artificial Sequence
  Description of Artificial Sequence: Synthetic oligonucleotide
  Antisense strand to SEQ ID NO: 532447
uucaaggagagaaugggcc

SEQ ID NO: 532449 - RNA, 19 nt, Artificial Sequence
  Description of Artificial Sequence: Synthetic oligonucleotide
  Sense strand starting at position 3622 of SEQ ID NO: 318045
ggaguggaugaguggaauu

SEQ ID NO: 532450 - RNA, 19 nt, Artificial Sequence
  Description of Artificial Sequence: Synthetic oligonucleotide
  Antisense strand to SEQ ID NO: 532449
aauuccacucauccacucc

SEQ ID NO: 532451 - RNA, 19 nt, Artificial Sequence
  Description of Artificial Sequence: Synthetic oligonucleotide
  Sense strand starting at position 3675 of SEQ ID NO: 318045
ggguuacauacaggaguga

SEQ ID NO: 532452 - RNA, 19 nt, Artificial Sequence
  Description of Artificial Sequence: Synthetic oligonucleotide
  Antisense strand to SEQ ID NO: 532451
ucacuccuguauguaaccc

SEQ ID NO: 532453 - RNA, 19 nt, Artificial Sequence
  Description of Artificial Sequence: Synthetic oligonucleotide
  Sense strand starting at position 3980 of SEQ ID NO: 318045
gaguaauuacgcuguggag

SEQ ID NO: 532454 - RNA, 19 nt, Artificial Sequence
  Description of Artificial Sequence: Synthetic oligonucleotide
  Antisense strand to SEQ ID NO: 532453
cuccacagcguaauuacuc

SEQ ID NO: 532455 - RNA, 19 nt, Artificial Sequence
  Description of Artificial Sequence: Synthetic oligonucleotide
  Sense strand starting at position 3982 of SEQ ID NO: 318045
guaauuacgcuguggagag

SEQ ID NO: 532456 - RNA, 19 nt, Artificial Sequence
  Description of Artificial Sequence: Synthetic oligonucleotide
  Antisense strand to SEQ ID NO: 532455
cucuccacagcguaauuac

SEQ ID NO: 532457 - RNA, 19 nt, Artificial Sequence
  Description of Artificial Sequence: Synthetic oligonucleotide
  Sense strand starting at position 3983 of SEQ ID NO: 318045
uaauuacgcuguggagaga

SEQ ID NO: 532458 - RNA, 19 nt, Artificial Sequence
  Description of Artificial Sequence: Synthetic oligonucleotide
  Antisense strand to SEQ ID NO: 532457
ucucuccacagcguaauua

SEQ ID NO: 532459 - RNA, 19 nt, Artificial Sequence
  Description of Artificial Sequence: Synthetic oligonucleotide
  Sense strand starting at position 32 of SEQ ID NO: 318046
ugaauugauucuucucugu

SEQ ID NO: 532460 - RNA, 19 nt, Artificial Sequence
  Description of Artificial Sequence: Synthetic oligonucleotide
  Antisense strand to SEQ ID NO: 532459
acagagaagaaucaauuca

SEQ ID NO: 532461 - RNA, 19 nt, Artificial Sequence
  Description of Artificial Sequence: Synthetic oligonucleotide
  Sense strand starting at position 36 of SEQ ID NO: 318046
uugauucuucucugugaaa

SEQ ID NO: 532462 - RNA, 19 nt, Artificial Sequence
  Description of Artificial Sequence: Synthetic oligonucleotide
  Antisense strand to SEQ ID NO: 532461
uuucacagagaagaaucaa

SEQ ID NO: 532463 - RNA, 19 nt, Artificial Sequence
  Description of Artificial Sequence: Synthetic oligonucleotide
  Sense strand starting at position 37 of SEQ ID NO: 318046
ugauucuucucugugaaag

SEQ ID NO: 532464 - RNA, 19 nt, Artificial Sequence
  Description of Artificial Sequence: Synthetic oligonucleotide
  Antisense strand to SEQ ID NO: 532463
cuuucacagagaagaauca

SEQ ID NO: 532465 - RNA, 19 nt, Artificial Sequence
  Description of Artificial Sequence: Synthetic oligonucleotide
  Sense strand starting at position 38 of SEQ ID NO: 318046
gauucuucucugugaaagu

SEQ ID NO: 532466 - RNA, 19 nt, Artificial Sequence
  Description of Artificial Sequence: Synthetic oligonucleotide
  Antisense strand to SEQ ID NO: 532465
acuuucacagagaagaauc

SEQ ID NO: 532467 - RNA, 19 nt, Artificial Sequence
  Description of Artificial Sequence: Synthetic oligonucleotide
  Sense strand starting at position 69 of SEQ ID NO: 318046
ucuaaauuacagugucagu

SEQ ID NO: 532468 - RNA, 19 nt, Artificial Sequence
  Description of Artificial Sequence: Synthetic oligonucleotide
  Antisense strand to SEQ ID NO: 532467
acugacacuguaauuuaga

SEQ ID NO: 532469 - RNA, 19 nt, Artificial Sequence
  Description of Artificial Sequence: Synthetic oligonucleotide
  Sense strand starting at position 82 of SEQ ID NO: 318046
gucagucauuccucugaga

SEQ ID NO: 532470 - RNA, 19 nt, Artificial Sequence
  Description of Artificial Sequence: Synthetic oligonucleotide
  Antisense strand to SEQ ID NO: 532469
ucucagaggaaugacugac

SEQ ID NO: 532471 - RNA, 19 nt, Artificial Sequence
  Description of Artificial Sequence: Synthetic oligonucleotide
  Sense strand starting at position 84 of SEQ ID NO: 318046
cagucauuccucugagaga

SEQ ID NO: 532472 - RNA, 19 nt, Artificial Sequence
  Description of Artificial Sequence: Synthetic oligonucleotide
  Antisense strand to SEQ ID NO: 532471
ucucucagaggaaugacug

SEQ ID NO: 532473 - RNA, 19 nt, Artificial Sequence
  Description of Artificial Sequence: Synthetic oligonucleotide
  Sense strand starting at position 196 of SEQ ID NO: 318046
ggcauuccugucgagaaua

SEQ ID NO: 532474 - RNA, 19 nt, Artificial Sequence
  Description of Artificial Sequence: Synthetic oligonucleotide
  Antisense strand to SEQ ID NO: 532473
uauucucgacaggaaugcc

SEQ ID NO: 532475 - RNA, 19 nt, Artificial Sequence
  Description of Artificial Sequence: Synthetic oligonucleotide
  Sense strand starting at position 198 of SEQ ID NO: 318046
cauuccugucgagaauacu

SEQ ID NO: 532476 - RNA, 19 nt, Artificial Sequence
  Description of Artificial Sequence: Synthetic oligonucleotide
  Antisense strand to SEQ ID NO: 532475
aguauucucgacaggaaug

SEQ ID NO: 532477 - RNA, 19 nt, Artificial Sequence
  Description of Artificial Sequence: Synthetic oligonucleotide
  Sense strand starting at position 223 of SEQ ID NO: 318046
uggguacauuccuccugua

SEQ ID NO: 532478 - RNA, 19 nt, Artificial Sequence
  Description of Artificial Sequence: Synthetic oligonucleotide
  Antisense strand to SEQ ID NO: 532477
uacaggaggaauguaccca

SEQ ID NO: 532479 - RNA, 19 nt, Artificial Sequence
  Description of Artificial Sequence: Synthetic oligonucleotide
  Sense strand starting at position 447 of SEQ ID NO: 318046
ucugaagaguccuuuggua

SEQ ID NO: 532480 - RNA, 19 nt, Artificial Sequence
  Description of Artificial Sequence: Synthetic oligonucleotide
  Antisense strand to SEQ ID NO: 532479
uaccaaaggacucuucaga

SEQ ID NO: 532481 - RNA, 19 nt, Artificial Sequence
  Description of Artificial Sequence: Synthetic oligonucleotide
  Sense strand starting at position 449 of SEQ ID NO: 318046
ugaagaguccuuugguaua

SEQ ID NO: 532482 - RNA, 19 nt, Artificial Sequence
  Description of Artificial Sequence: Synthetic oligonucleotide
  Antisense strand to SEQ ID NO: 532481
uauaccaaaggacucuuca

SEQ ID NO: 532483 - RNA, 19 nt, Artificial Sequence
  Description of Artificial Sequence: Synthetic oligonucleotide
  Sense strand starting at position 451 of SEQ ID NO: 318046
aagaguccuuugguauaca

SEQ ID NO: 532484 - RNA, 19 nt, Artificial Sequence
  Description of Artificial Sequence: Synthetic oligonucleotide
  Antisense strand to SEQ ID NO: 532483
uguauaccaaaggacucuu

SEQ ID NO: 532485 - RNA, 19 nt, Artificial Sequence
  Description of Artificial Sequence: Synthetic oligonucleotide
  Sense strand starting at position 454 of SEQ ID NO: 318046
aguccuuugguauacauua

SEQ ID NO: 532486 - RNA, 19 nt, Artificial Sequence
  Description of Artificial Sequence: Synthetic oligonucleotide
  Antisense strand to SEQ ID NO: 532485
uaauguauaccaaaggacu

SEQ ID NO: 532487 - RNA, 19 nt, Artificial Sequence
  Description of Artificial Sequence: Synthetic oligonucleotide
  Sense strand starting at position 792 of SEQ ID NO: 318046
cagccaguauguuugauuu

SEQ ID NO: 532488 - RNA, 19 nt, Artificial Sequence
  Description of Artificial Sequence: Synthetic oligonucleotide
  Antisense strand to SEQ ID NO: 532487
aaaucaaacauacuggcug

SEQ ID NO: 532489 - RNA, 19 nt, Artificial Sequence
  Description of Artificial Sequence: Synthetic oligonucleotide
  Sense strand starting at position 1205 of SEQ ID NO: 318046
uggcaacauuucuaagauu

SEQ ID NO: 532490 - RNA, 19 nt, Artificial Sequence
  Description of Artificial Sequence: Synthetic oligonucleotide
  Antisense strand to SEQ ID NO: 532489
aaucuuagaaauguugcca

SEQ ID NO: 532491 - RNA, 19 nt, Artificial Sequence
  Description of Artificial Sequence: Synthetic oligonucleotide
  Sense strand starting at position 1235 of SEQ ID NO: 318046
agguauuaccuaugccuaa

SEQ ID NO: 532492 - RNA, 19 nt, Artificial Sequence
  Description of Artificial Sequence: Synthetic oligonucleotide
  Antisense strand to SEQ ID NO: 532491
uuaggcauagguaauaccu

SEQ ID NO: 532493 - RNA, 19 nt, Artificial Sequence
  Description of Artificial Sequence: Synthetic oligonucleotide
  Sense strand starting at position 1236 of SEQ ID NO: 318046
gguauuaccuaugccuaaa

SEQ ID NO: 532494 - RNA, 19 nt, Artificial Sequence
  Description of Artificial Sequence: Synthetic oligonucleotide
  Antisense strand to SEQ ID NO: 532493
uuuaggcauagguaauacc

SEQ ID NO: 532495 - RNA, 19 nt, Artificial Sequence
  Description of Artificial Sequence: Synthetic oligonucleotide
  Sense strand starting at position 1494 of SEQ ID NO: 318046
uuagacugagccuguuuau

SEQ ID NO: 532496 - RNA, 19 nt, Artificial Sequence
  Description of Artificial Sequence: Synthetic oligonucleotide
  Antisense strand to SEQ ID NO: 532495
auaaacaggcucagucuaa

SEQ ID NO: 532497 - RNA, 19 nt, Artificial Sequence
  Description of Artificial Sequence: Synthetic oligonucleotide
  Sense strand starting at position 1690 of SEQ ID NO: 318046
ggaaacaauuugcaaguuu

SEQ ID NO: 532498 - RNA, 19 nt, Artificial Sequence
  Description of Artificial Sequence: Synthetic oligonucleotide
  Antisense strand to SEQ ID NO: 532497
aaacuugcaaauuguuucc

SEQ ID NO: 532499 - RNA, 19 nt, Artificial Sequence
  Description of Artificial Sequence: Synthetic oligonucleotide
  Sense strand starting at position 1716 of SEQ ID NO: 318046
uccugaaauccaggaguuc

SEQ ID NO: 532500 - RNA, 19 nt, Artificial Sequence
  Description of Artificial Sequence: Synthetic oligonucleotide
  Antisense strand to SEQ ID NO: 532499
gaacuccuggauuucagga

SEQ ID NO: 532501 - RNA, 19 nt, Artificial Sequence
  Description of Artificial Sequence: Synthetic oligonucleotide
  Sense strand starting at position 1743 of SEQ ID NO: 318046
ucaaguucugcuuaaguug

SEQ ID NO: 532502 - RNA, 19 nt, Artificial Sequence
  Description of Artificial Sequence: Synthetic oligonucleotide
  Antisense strand to SEQ ID NO: 532501
caacuuaagcagaacuuga

SEQ ID NO: 532503 - RNA, 19 nt, Artificial Sequence
  Description of Artificial Sequence: Synthetic oligonucleotide
  Sense strand starting at position 1897 of SEQ ID NO: 318046
gguccugauccugggaaga

SEQ ID NO: 532504 - RNA, 19 nt, Artificial Sequence
  Description of Artificial Sequence: Synthetic oligonucleotide
  Antisense strand to SEQ ID NO: 532503
ucuucccaggaucaggacc

SEQ ID NO: 532505 - RNA, 19 nt, Artificial Sequence
  Description of Artificial Sequence: Synthetic oligonucleotide
  Sense strand starting at position 1920 of SEQ ID NO: 318046
ggcacuuucucaccaagag

SEQ ID NO: 532506 - RNA, 19 nt, Artificial Sequence
  Description of Artificial Sequence: Synthetic oligonucleotide
  Antisense strand to SEQ ID NO: 532505
cucuuggugagaaagugcc

SEQ ID NO: 532507 - RNA, 19 nt, Artificial Sequence
  Description of Artificial Sequence: Synthetic oligonucleotide
  Sense strand starting at position 1952 of SEQ ID NO: 318046
aagcgucaccaggaaaguu

SEQ ID NO: 532508 - RNA, 19 nt, Artificial Sequence
  Description of Artificial Sequence: Synthetic oligonucleotide
  Antisense strand to SEQ ID NO: 532507
aacuuuccuggugacgcuu

SEQ ID NO: 532509 - RNA, 19 nt, Artificial Sequence
  Description of Artificial Sequence: Synthetic oligonucleotide
  Sense strand starting at position 2279 of SEQ ID NO: 318046
gucaguuugcgcuuuguuu

SEQ ID NO: 532510 - RNA, 19 nt, Artificial Sequence
  Description of Artificial Sequence: Synthetic oligonucleotide
  Antisense strand to SEQ ID NO: 532509
aaacaaagcgcaaacugac

SEQ ID NO: 532511 - RNA, 19 nt, Artificial Sequence
  Description of Artificial Sequence: Synthetic oligonucleotide
  Sense strand starting at position 2412 of SEQ ID NO: 318046
gcuucuuaaacuggagaug

SEQ ID NO: 532512 - RNA, 19 nt, Artificial Sequence
  Description of Artificial Sequence: Synthetic oligonucleotide
  Antisense strand to SEQ ID NO: 532511
caucuccaguuuaagaagc

SEQ ID NO: 532513 - RNA, 19 nt, Artificial Sequence
  Description of Artificial Sequence: Synthetic oligonucleotide
  Sense strand starting at position 2474 of SEQ ID NO: 318046
gacucaguauugguguuga

SEQ ID NO: 532514 - RNA, 19 nt, Artificial Sequence
  Description of Artificial Sequence: Synthetic oligonucleotide
  Antisense strand to SEQ ID NO: 532513
ucaacaccaauacugaguc

SEQ ID NO: 532515 - RNA, 19 nt, Artificial Sequence
  Description of Artificial Sequence: Synthetic oligonucleotide
  Sense strand starting at position 2479 of SEQ ID NO: 318046
aguauugguguugaguuua

SEQ ID NO: 532516 - RNA, 19 nt, Artificial Sequence
  Description of Artificial Sequence: Synthetic oligonucleotide
  Antisense strand to SEQ ID NO: 532515
uaaacucaacaccaauacu

SEQ ID NO: 532517 - RNA, 19 nt, Artificial Sequence
  Description of Artificial Sequence: Synthetic oligonucleotide
  Sense strand starting at position 2519 of SEQ ID NO: 318046
gcuauuguauccuuggaug

SEQ ID NO: 532518 - RNA, 19 nt, Artificial Sequence
  Description of Artificial Sequence: Synthetic oligonucleotide
  Antisense strand to SEQ ID NO: 532517
cauccaaggauacaauagc

SEQ ID NO: 532519 - RNA, 19 nt, Artificial Sequence
  Description of Artificial Sequence: Synthetic oligonucleotide
  Sense strand starting at position 2521 of SEQ ID NO: 318046
uauuguauccuuggaugac

SEQ ID NO: 532520 - RNA, 19 nt, Artificial Sequence
  Description of Artificial Sequence: Synthetic oligonucleotide
  Antisense strand to SEQ ID NO: 532519
gucauccaaggauacaaua

SEQ ID NO: 532521 - RNA, 19 nt, Artificial Sequence
  Description of Artificial Sequence: Synthetic oligonucleotide
  Sense strand starting at position 2524 of SEQ ID NO: 318046
uguauccuuggaugacaga

SEQ ID NO: 532522 - RNA, 19 nt, Artificial Sequence
  Description of Artificial Sequence: Synthetic oligonucleotide
  Antisense strand to SEQ ID NO: 532521
ucugucauccaaggauaca

SEQ ID NO: 532523 - RNA, 19 nt, Artificial Sequence
  Description of Artificial Sequence: Synthetic oligonucleotide
  Sense strand starting at position 2780 of SEQ ID NO: 318046
auuuauaacuucugggaga

SEQ ID NO: 532524 - RNA, 19 nt, Artificial Sequence
  Description of Artificial Sequence: Synthetic oligonucleotide
  Antisense strand to SEQ ID NO: 532523
ucucccagaaguuauaaau

SEQ ID NO: 532525 - RNA, 19 nt, Artificial Sequence
  Description of Artificial Sequence: Synthetic oligonucleotide
  Sense strand starting at position 2782 of SEQ ID NO: 318046
uuauaacuucugggagagu

SEQ ID NO: 532526 - RNA, 19 nt, Artificial Sequence
  Description of Artificial Sequence: Synthetic oligonucleotide
  Antisense strand to SEQ ID NO: 532525
acucucccagaaguuauaa

SEQ ID NO: 532527 - RNA, 19 nt, Artificial Sequence
  Description of Artificial Sequence: Synthetic oligonucleotide
  Sense strand starting at position 2795 of SEQ ID NO: 318046
gagaguauauagguccauu

SEQ ID NO: 532528 - RNA, 19 nt, Artificial Sequence
  Description of Artificial Sequence: Synthetic oligonucleotide
  Antisense strand to SEQ ID NO: 532527
aauggaccuauauacucuc

SEQ ID NO: 532529 - RNA, 19 nt, Artificial Sequence
  Description of Artificial Sequence: Synthetic oligonucleotide
  Sense strand starting at position 2798 of SEQ ID NO: 318046
aguauauagguccauugau

SEQ ID NO: 532530 - RNA, 19 nt, Artificial Sequence
  Description of Artificial Sequence: Synthetic oligonucleotide
  Antisense strand to SEQ ID NO: 532529
aucaauggaccuauauacu

SEQ ID NO: 532531 - RNA, 19 nt, Artificial Sequence
  Description of Artificial Sequence: Synthetic oligonucleotide
  Sense strand starting at position 3228 of SEQ ID NO: 318046
gacugagggagucguaagu

SEQ ID NO: 532532 - RNA, 19 nt, Artificial Sequence
  Description of Artificial Sequence: Synthetic oligonucleotide
  Antisense strand to SEQ ID NO: 532531
acuuacgacucccucaguc

SEQ ID NO: 532533 - RNA, 19 nt, Artificial Sequence
  Description of Artificial Sequence: Synthetic oligonucleotide
  Sense strand starting at position 3237 of SEQ ID NO: 318046
agucguaagucgaugagcu

SEQ ID NO: 532534 - RNA, 19 nt, Artificial Sequence
  Description of Artificial Sequence: Synthetic oligonucleotide
  Antisense strand to SEQ ID NO: 532533
agcucaucgacuuacgacu

SEQ ID NO: 532535 - RNA, 19 nt, Artificial Sequence
  Description of Artificial Sequence: Synthetic oligonucleotide
  Sense strand starting at position 3609 of SEQ ID NO: 318046
ccauucugucuuugguaaa

SEQ ID NO: 532536 - RNA, 19 nt, Artificial Sequence
  Description of Artificial Sequence: Synthetic oligonucleotide
  Antisense strand to SEQ ID NO: 532535
uuuaccaaagacagaaugg

SEQ ID NO: 532537 - RNA, 19 nt, Artificial Sequence
  Description of Artificial Sequence: Synthetic oligonucleotide
  Sense strand starting at position 3768 of SEQ ID NO: 318046
gagggcgcuucucuuauuu

SEQ ID NO: 532538 - RNA, 19 nt, Artificial Sequence
  Description of Artificial Sequence: Synthetic oligonucleotide
  Antisense strand to SEQ ID NO: 532537
aaauaagagaagcgcccuc

SEQ ID NO: 532539 - RNA, 19 nt, Artificial Sequence
  Description of Artificial Sequence: Synthetic oligonucleotide
  Sense strand starting at position 25 of SEQ ID NO: 318047
uacuuaaaguugguguaau

SEQ ID NO: 532540 - RNA, 19 nt, Artificial Sequence
  Description of Artificial Sequence: Synthetic oligonucleotide
  Antisense strand to SEQ ID NO: 532539
auuacaccaacuuuaagua

SEQ ID NO: 532541 - RNA, 19 nt, Artificial Sequence
  Description of Artificial Sequence: Synthetic oligonucleotide
  Sense strand starting at position 190 of SEQ ID NO: 318047
ccauguagaucauccucua

SEQ ID NO: 532542 - RNA, 19 nt, Artificial Sequence
  Description of Artificial Sequence: Synthetic oligonucleotide
  Antisense strand to SEQ ID NO: 532541
uagaggaugaucuacaugg

SEQ ID NO: 532543 - RNA, 19 nt, Artificial Sequence
  Description of Artificial Sequence: Synthetic oligonucleotide
  Sense strand starting at position 238 of SEQ ID NO: 318047
acuuuaggguuuccauacu

SEQ ID NO: 532544 - RNA, 19 nt, Artificial Sequence
  Description of Artificial Sequence: Synthetic oligonucleotide
  Antisense strand to SEQ ID NO: 532543
aguauggaaacccuaaagu

SEQ ID NO: 532545 - RNA, 19 nt, Artificial Sequence
  Description of Artificial Sequence: Synthetic oligonucleotide
  Sense strand starting at position 262 of SEQ ID NO: 318047
uggaccuaucuuugucaca

SEQ ID NO: 532546 - RNA, 19 nt, Artificial Sequence
  Description of Artificial Sequence: Synthetic oligonucleotide
  Antisense strand to SEQ ID NO: 532545
ugugacaaagauaggucca

SEQ ID NO: 532547 - RNA, 19 nt, Artificial Sequence
  Description of Artificial Sequence: Synthetic oligonucleotide
  Sense strand starting at position 263 of SEQ ID NO: 318047
ggaccuaucuuugucacac

SEQ ID NO: 532548 - RNA, 19 nt, Artificial Sequence
  Description of Artificial Sequence: Synthetic oligonucleotide
  Antisense strand to SEQ ID NO: 532547
gugugacaaagauaggucc

SEQ ID NO: 532549 - RNA, 19 nt, Artificial Sequence
  Description of Artificial Sequence: Synthetic oligonucleotide
  Sense strand starting at position 311 of SEQ ID NO: 318047
uuagaucaguuaguauauc

SEQ ID NO: 532550 - RNA, 19 nt, Artificial Sequence
  Description of Artificial Sequence: Synthetic oligonucleotide
  Antisense strand to SEQ ID NO: 532549
gauauacuaacugaucuaa

SEQ ID NO: 532551 - RNA, 19 nt, Artificial Sequence
  Description of Artificial Sequence: Synthetic oligonucleotide
  Sense strand starting at position 706 of SEQ ID NO: 318047
agaggauacucuguuuaaa

SEQ ID NO: 532552 - RNA, 19 nt, Artificial Sequence
  Description of Artificial Sequence: Synthetic oligonucleotide
  Antisense strand to SEQ ID NO: 532551
uuuaaacagaguauccucu

SEQ ID NO: 532553 - RNA, 19 nt, Artificial Sequence
  Description of Artificial Sequence: Synthetic oligonucleotide
  Sense strand starting at position 839 of SEQ ID NO: 318047
uguauagugcuagagacau

SEQ ID NO: 532554 - RNA, 19 nt, Artificial Sequence
  Description of Artificial Sequence: Synthetic oligonucleotide
  Antisense strand to SEQ ID NO: 532553
augucucuagcacuauaca

SEQ ID NO: 532555 - RNA, 19 nt, Artificial Sequence
  Description of Artificial Sequence: Synthetic oligonucleotide
  Sense strand starting at position 851 of SEQ ID NO: 318047
gagacauagcgcuaaauac

SEQ ID NO: 532556 - RNA, 19 nt, Artificial Sequence
  Description of Artificial Sequence: Synthetic oligonucleotide
  Antisense strand to SEQ ID NO: 532555
guauuuagcgcuaugucuc

SEQ ID NO: 532557 - RNA, 19 nt, Artificial Sequence
  Description of Artificial Sequence: Synthetic oligonucleotide
  Sense strand starting at position 1086 of SEQ ID NO: 318047
guuagagacuuucucagug

SEQ ID NO: 532558 - RNA, 19 nt, Artificial Sequence
  Description of Artificial Sequence: Synthetic oligonucleotide
  Antisense strand to SEQ ID NO: 532557
cacugagaaagucucuaac

SEQ ID NO: 532559 - RNA, 19 nt, Artificial Sequence
  Description of Artificial Sequence: Synthetic oligonucleotide
  Sense strand starting at position 1107 of SEQ ID NO: 318047
ucccuacaggaaugauauu

SEQ ID NO: 532560 - RNA, 19 nt, Artificial Sequence
  Description of Artificial Sequence: Synthetic oligonucleotide
  Antisense strand to SEQ ID NO: 532559
aauaucauuccuguaggga

SEQ ID NO: 532561 - RNA, 19 nt, Artificial Sequence
  Description of Artificial Sequence: Synthetic oligonucleotide
  Sense strand starting at position 1142 of SEQ ID NO: 318047
gcacaaauuucuguuugcu

SEQ ID NO: 532562 - RNA, 19 nt, Artificial Sequence
  Description of Artificial Sequence: Synthetic oligonucleotide
  Antisense strand to SEQ ID NO: 532561
agcaaacagaaauuugugc

SEQ ID NO: 532563 - RNA, 19 nt, Artificial Sequence
  Description of Artificial Sequence: Synthetic oligonucleotide
  Sense strand starting at position 1211 of SEQ ID NO: 318047
ccucgaucuguggagggaa

SEQ ID NO: 532564 - RNA, 19 nt, Artificial Sequence
  Description of Artificial Sequence: Synthetic oligonucleotide
  Antisense strand to SEQ ID NO: 532563
uucccuccacagaucgagg

SEQ ID NO: 532565 - RNA, 19 nt, Artificial Sequence
  Description of Artificial Sequence: Synthetic oligonucleotide
  Sense strand starting at position 1214 of SEQ ID NO: 318047
cgaucuguggagggaaaga

SEQ ID NO: 532566 - RNA, 19 nt, Artificial Sequence
  Description of Artificial Sequence: Synthetic oligonucleotide
  Antisense strand to SEQ ID NO: 532565
ucuuucccuccacagaucg

SEQ ID NO: 532567 - RNA, 19 nt, Artificial Sequence
  Description of Artificial Sequence: Synthetic oligonucleotide
  Sense strand starting at position 2028 of SEQ ID NO: 318047
aggugagcgagacagaauu

SEQ ID NO: 532568 - RNA, 19 nt, Artificial Sequence
  Description of Artificial Sequence: Synthetic oligonucleotide
  Antisense strand to SEQ ID NO: 532567
aauucugucucgcucaccu

SEQ ID NO: 532569 - RNA, 19 nt, Artificial Sequence
  Description of Artificial Sequence: Synthetic oligonucleotide
  Sense strand starting at position 2030 of SEQ ID NO: 318047
gugagcgagacagaauuau

SEQ ID NO: 532570 - RNA, 19 nt, Artificial Sequence
  Description of Artificial Sequence: Synthetic oligonucleotide
  Antisense strand to SEQ ID NO: 532569
auaauucugucucgcucac

SEQ ID NO: 532571 - RNA, 19 nt, Artificial Sequence
  Description of Artificial Sequence: Synthetic oligonucleotide
  Sense strand starting at position 2034 of SEQ ID NO: 318047
gcgagacagaauuaucucu

SEQ ID NO: 532572 - RNA, 19 nt, Artificial Sequence
  Description of Artificial Sequence: Synthetic oligonucleotide
  Antisense strand to SEQ ID NO: 532571
agagauaauucugucucgc

SEQ ID NO: 532573 - RNA, 19 nt, Artificial Sequence
  Description of Artificial Sequence: Synthetic oligonucleotide
  Sense strand starting at position 2039 of SEQ ID NO: 318047
acagaauuaucucuggucu

SEQ ID NO: 532574 - RNA, 19 nt, Artificial Sequence
  Description of Artificial Sequence: Synthetic oligonucleotide
  Antisense strand to SEQ ID NO: 532573
agaccagagauaauucugu

SEQ ID NO: 532575 - RNA, 19 nt, Artificial Sequence
  Description of Artificial Sequence: Synthetic oligonucleotide
  Sense strand starting at position 2040 of SEQ ID NO: 318047
cagaauuaucucuggucug

SEQ ID NO: 532576 - RNA, 19 nt, Artificial Sequence
  Description of Artificial Sequence: Synthetic oligonucleotide
  Antisense strand to SEQ ID NO: 532575
cagaccagagauaauucug

SEQ ID NO: 532577 - RNA, 19 nt, Artificial Sequence
  Description of Artificial Sequence: Synthetic oligonucleotide
  Sense strand starting at position 2098 of SEQ ID NO: 318047
gccuguauuccaguagugu

SEQ ID NO: 532578 - RNA, 19 nt, Artificial Sequence
  Description of Artificial Sequence: Synthetic oligonucleotide
  Antisense strand to SEQ ID NO: 532577
acacuacuggaauacaggc

SEQ ID NO: 532579 - RNA, 19 nt, Artificial Sequence
  Description of Artificial Sequence: Synthetic oligonucleotide
  Sense strand starting at position 2145 of SEQ ID NO: 318047
auguacugacacugaacua

SEQ ID NO: 532580 - RNA, 19 nt, Artificial Sequence
  Description of Artificial Sequence: Synthetic oligonucleotide
  Antisense strand to SEQ ID NO: 532579
uaguucagugucaguacau

SEQ ID NO: 532581 - RNA, 19 nt, Artificial Sequence
  Description of Artificial Sequence: Synthetic oligonucleotide
  Sense strand starting at position 2184 of SEQ ID NO: 318047
auuuaauccuuggagcaau

SEQ ID NO: 532582 - RNA, 19 nt, Artificial Sequence
  Description of Artificial Sequence: Synthetic oligonucleotide
  Antisense strand to SEQ ID NO: 532581
auugcuccaaggauuaaau

SEQ ID NO: 532583 - RNA, 19 nt, Artificial Sequence
  Description of Artificial Sequence: Synthetic oligonucleotide
  Sense strand starting at position 2194 of SEQ ID NO: 318047
uggagcaaucuugagaggu

SEQ ID NO: 532584 - RNA, 19 nt, Artificial Sequence
  Description of Artificial Sequence: Synthetic oligonucleotide
  Antisense strand to SEQ ID NO: 532583
accucucaagauugcucca

SEQ ID NO: 532585 - RNA, 19 nt, Artificial Sequence
  Description of Artificial Sequence: Synthetic oligonucleotide
  Sense strand starting at position 2198 of SEQ ID NO: 318047
gcaaucuugagagguugga

SEQ ID NO: 532586 - RNA, 19 nt, Artificial Sequence
  Description of Artificial Sequence: Synthetic oligonucleotide
  Antisense strand to SEQ ID NO: 532585
uccaaccucucaagauugc

SEQ ID NO: 532587 - RNA, 19 nt, Artificial Sequence
  Description of Artificial Sequence: Synthetic oligonucleotide
  Sense strand starting at position 2202 of SEQ ID NO: 318047
ucuugagagguuggaguuu

SEQ ID NO: 532588 - RNA, 19 nt, Artificial Sequence
  Description of Artificial Sequence: Synthetic oligonucleotide
  Antisense strand to SEQ ID NO: 532587
aaacuccaaccucucaaga

SEQ ID NO: 532589 - RNA, 19 nt, Artificial Sequence
  Description of Artificial Sequence: Synthetic oligonucleotide
  Sense strand starting at position 2227 of SEQ ID NO: 318047
ccauucugcaguugaggaa

SEQ ID NO: 532590 - RNA, 19 nt, Artificial Sequence
  Description of Artificial Sequence: Synthetic oligonucleotide
  Antisense strand to SEQ ID NO: 532589
uuccucaacugcagaaugg

SEQ ID NO: 532591 - RNA, 19 nt, Artificial Sequence
  Description of Artificial Sequence: Synthetic oligonucleotide
  Sense strand starting at position 2270 of SEQ ID NO: 318047
ugacuuauacacggauaug

SEQ ID NO: 532592 - RNA, 19 nt, Artificial Sequence
  Description of Artificial Sequence: Synthetic oligonucleotide
  Antisense strand to SEQ ID NO: 532591
cauauccguguauaaguca

SEQ ID NO: 532593 - RNA, 19 nt, Artificial Sequence
  Description of Artificial Sequence: Synthetic oligonucleotide
  Sense strand starting at position 2284 of SEQ ID NO: 318047
auauguaguaagggaguau

SEQ ID NO: 532594 - RNA, 19 nt, Artificial Sequence
  Description of Artificial Sequence: Synthetic oligonucleotide
  Antisense strand to SEQ ID NO: 532593
auacucccuuacuacauau

SEQ ID NO: 532595 - RNA, 19 nt, Artificial Sequence
  Description of Artificial Sequence: Synthetic oligonucleotide
  Sense strand starting at position 2285 of SEQ ID NO: 318047
uauguaguaagggaguauu

SEQ ID NO: 532596 - RNA, 19 nt, Artificial Sequence
  Description of Artificial Sequence: Synthetic oligonucleotide
  Antisense strand to SEQ ID NO: 532595
aauacucccuuacuacaua

SEQ ID NO: 532597 - RNA, 19 nt, Artificial Sequence
  Description of Artificial Sequence: Synthetic oligonucleotide
  Sense strand starting at position 2326 of SEQ ID NO: 318047
ccugaaacucuuggacuca

SEQ ID NO: 532598 - RNA, 19 nt, Artificial Sequence
  Description of Artificial Sequence: Synthetic oligonucleotide
  Antisense strand to SEQ ID NO: 532597
ugaguccaagaguuucagg

SEQ ID NO: 532599 - RNA, 19 nt, Artificial Sequence
  Description of Artificial Sequence: Synthetic oligonucleotide
  Sense strand starting at position 2497 of SEQ ID NO: 318047
cagauaagggauuguguac

SEQ ID NO: 532600 - RNA, 19 nt, Artificial Sequence
  Description of Artificial Sequence: Synthetic oligonucleotide
  Antisense strand to SEQ ID NO: 532599
guacacaaucccuuaucug

SEQ ID NO: 532601 - RNA, 19 nt, Artificial Sequence
  Description of Artificial Sequence: Synthetic oligonucleotide
  Sense strand starting at position 2504 of SEQ ID NO: 318047
gggauuguguacuugaacu

SEQ ID NO: 532602 - RNA, 19 nt, Artificial Sequence
  Description of Artificial Sequence: Synthetic oligonucleotide
  Antisense strand to SEQ ID NO: 532601
aguucaaguacacaauccc

SEQ ID NO: 532603 - RNA, 19 nt, Artificial Sequence
  Description of Artificial Sequence: Synthetic oligonucleotide
  Sense strand starting at position 2538 of SEQ ID NO: 318047
gcagauaaucgccauagua

SEQ ID NO: 532604 - RNA, 19 nt, Artificial Sequence
  Description of Artificial Sequence: Synthetic oligonucleotide
  Antisense strand to SEQ ID NO: 532603
uacuauggcgauuaucugc

SEQ ID NO: 532605 - RNA, 19 nt, Artificial Sequence
  Description of Artificial Sequence: Synthetic oligonucleotide
  Sense strand starting at position 2540 of SEQ ID NO: 318047
agauaaucgccauaguaug

SEQ ID NO: 532606 - RNA, 19 nt, Artificial Sequence
  Description of Artificial Sequence: Synthetic oligonucleotide
  Antisense strand to SEQ ID NO: 532605
cauacuauggcgauuaucu

SEQ ID NO: 532607 - RNA, 19 nt, Artificial Sequence
  Description of Artificial Sequence: Synthetic oligonucleotide
  Sense strand starting at position 2600 of SEQ ID NO: 318047
cugguaaugucacugauua

SEQ ID NO: 532608 - RNA, 19 nt, Artificial Sequence
  Description of Artificial Sequence: Synthetic oligonucleotide
  Antisense strand to SEQ ID NO: 532607
uaaucagugacauuaccag

SEQ ID NO: 532609 - RNA, 19 nt, Artificial Sequence
  Description of Artificial Sequence: Synthetic oligonucleotide
  Sense strand starting at position 2601 of SEQ ID NO: 318047
ugguaaugucacugauuaa

SEQ ID NO: 532610 - RNA, 19 nt, Artificial Sequence
  Description of Artificial Sequence: Synthetic oligonucleotide
  Antisense strand to SEQ ID NO: 532609
uuaaucagugacauuacca

SEQ ID NO: 532611 - RNA, 19 nt, Artificial Sequence
  Description of Artificial Sequence: Synthetic oligonucleotide
  Sense strand starting at position 2663 of SEQ ID NO: 318047
ugcuuugugcuaucgugaa

SEQ ID NO: 532612 - RNA, 19 nt, Artificial Sequence
  Description of Artificial Sequence: Synthetic oligonucleotide
  Antisense strand to SEQ ID NO: 532611
uucacgauagcacaaagca

SEQ ID NO: 532613 - RNA, 19 nt, Artificial Sequence
  Description of Artificial Sequence: Synthetic oligonucleotide
  Sense strand starting at position 2780 of SEQ ID NO: 318047
gcuuguucuguguccuuga

SEQ ID NO: 532614 - RNA, 19 nt, Artificial Sequence
  Description of Artificial Sequence: Synthetic oligonucleotide
  Antisense strand to SEQ ID NO: 532613
ucaaggacacagaacaagc

SEQ ID NO: 532615 - RNA, 19 nt, Artificial Sequence
  Description of Artificial Sequence: Synthetic oligonucleotide
  Sense strand starting at position 3669 of SEQ ID NO: 318047
auauuacacguguaauugu

SEQ ID NO: 532616 - RNA, 19 nt, Artificial Sequence
  Description of Artificial Sequence: Synthetic oligonucleotide
  Antisense strand to SEQ ID NO: 532615
acaauuacacguguaauau

SEQ ID NO: 532617 - RNA, 19 nt, Artificial Sequence
  Description of Artificial Sequence: Synthetic oligonucleotide
  Sense strand starting at position 3965 of SEQ ID NO: 318047
auuagagugccuuggagga

SEQ ID NO: 532618 - RNA, 19 nt, Artificial Sequence
  Description of Artificial Sequence: Synthetic oligonucleotide
  Antisense strand to SEQ ID NO: 532617
uccuccaaggcacucuaau

SEQ ID NO: 532619 - RNA, 19 nt, Artificial Sequence
  Description of Artificial Sequence: Synthetic oligonucleotide
  Sense strand starting at position 398 of SEQ ID NO: 318048
cuuuaagaaucugagaaua

SEQ ID NO: 532620 - RNA, 19 nt, Artificial Sequence
  Description of Artificial Sequence: Synthetic oligonucleotide
  Antisense strand to SEQ ID NO: 532619
uauucucagauucuuaaag

SEQ ID NO: 532621 - RNA, 19 nt, Artificial Sequence
  Description of Artificial Sequence: Synthetic oligonucleotide
  Sense strand starting at position 468 of SEQ ID NO: 318048
ggauuauggugaucuucuc

SEQ ID NO: 532622 - RNA, 19 nt, Artificial Sequence
  Description of Artificial Sequence: Synthetic oligonucleotide
  Antisense strand to SEQ ID NO: 532621
gagaagaucaccauaaucc

SEQ ID NO: 532623 - RNA, 19 nt, Artificial Sequence
  Description of Artificial Sequence: Synthetic oligonucleotide
  Sense strand starting at position 475 of SEQ ID NO: 318048
ggugaucuucuccagguca

SEQ ID NO: 532624 - RNA, 19 nt, Artificial Sequence
  Description of Artificial Sequence: Synthetic oligonucleotide
  Antisense strand to SEQ ID NO: 532623
ugaccuggagaagaucacc

SEQ ID NO: 532625 - RNA, 19 nt, Artificial Sequence
  Description of Artificial Sequence: Synthetic oligonucleotide
  Sense strand starting at position 976 of SEQ ID NO: 318048
agaugcugugauugaauau

SEQ ID NO: 532626 - RNA, 19 nt, Artificial Sequence
  Description of Artificial Sequence: Synthetic oligonucleotide
  Antisense strand to SEQ ID NO: 532625
auauucaaucacagcaucu

SEQ ID NO: 532627 - RNA, 19 nt, Artificial Sequence
  Description of Artificial Sequence: Synthetic oligonucleotide
  Sense strand starting at position 1002 of SEQ ID NO: 318048
agaucugugcccuauuguu

SEQ ID NO: 532628 - RNA, 19 nt, Artificial Sequence
  Description of Artificial Sequence: Synthetic oligonucleotide
  Antisense strand to SEQ ID NO: 532627
aacaauagggcacagaucu

SEQ ID NO: 532629 - RNA, 19 nt, Artificial Sequence
  Description of Artificial Sequence: Synthetic oligonucleotide
  Sense strand starting at position 1039 of SEQ ID NO: 318048
cugcuaagagagcauuaga

SEQ ID NO: 532630 - RNA, 19 nt, Artificial Sequence
  Description of Artificial Sequence: Synthetic oligonucleotide
  Antisense strand to SEQ ID NO: 532629
ucuaaugcucucuuagcag

SEQ ID NO: 532631 - RNA, 19 nt, Artificial Sequence
  Description of Artificial Sequence: Synthetic oligonucleotide
  Sense strand starting at position 1050 of SEQ ID NO: 318048
gcauuagaaucuuuccgaa

SEQ ID NO: 532632 - RNA, 19 nt, Artificial Sequence
  Description of Artificial Sequence: Synthetic oligonucleotide
  Antisense strand to SEQ ID NO: 532631
uucggaaagauucuaaugc

SEQ ID NO: 532633 - RNA, 19 nt, Artificial Sequence
  Description of Artificial Sequence: Synthetic oligonucleotide
  Sense strand starting at position 1052 of SEQ ID NO: 318048
auuagaaucuuuccgaagu

SEQ ID NO: 532634 - RNA, 19 nt, Artificial Sequence
  Description of Artificial Sequence: Synthetic oligonucleotide
  Antisense strand to SEQ ID NO: 532633
acuucggaaagauucuaau

SEQ ID NO: 532635 - RNA, 19 nt, Artificial Sequence
  Description of Artificial Sequence: Synthetic oligonucleotide
  Sense strand starting at position 1151 of SEQ ID NO: 318048
gcgauuaucugcccuaaga

SEQ ID NO: 532636 - RNA, 19 nt, Artificial Sequence
  Description of Artificial Sequence: Synthetic oligonucleotide
  Antisense strand to SEQ ID NO: 532635
ucuuagggcagauaaucgc

SEQ ID NO: 532637 - RNA, 19 nt, Artificial Sequence
  Description of Artificial Sequence: Synthetic oligonucleotide
  Sense strand starting at position 1289 of SEQ ID NO: 318048
acuucugaucuuuagucau

SEQ ID NO: 532638 - RNA, 19 nt, Artificial Sequence
  Description of Artificial Sequence: Synthetic oligonucleotide
  Antisense strand to SEQ ID NO: 532637
augacuaaagaucagaagu

SEQ ID NO: 532639 - RNA, 19 nt, Artificial Sequence
  Description of Artificial Sequence: Synthetic oligonucleotide
  Sense strand starting at position 1343 of SEQ ID NO: 318048
aaauguuacuguuugaguc

SEQ ID NO: 532640 - RNA, 19 nt, Artificial Sequence
  Description of Artificial Sequence: Synthetic oligonucleotide
  Antisense strand to SEQ ID NO: 532639
gacucaaacaguaacauuu

SEQ ID NO: 532641 - RNA, 19 nt, Artificial Sequence
  Description of Artificial Sequence: Synthetic oligonucleotide
  Sense strand starting at position 1350 of SEQ ID NO: 318048
acuguuugaguccaagagu

SEQ ID NO: 532642 - RNA, 19 nt, Artificial Sequence
  Description of Artificial Sequence: Synthetic oligonucleotide
  Antisense strand to SEQ ID NO: 532641
acucuuggacucaaacagu

SEQ ID NO: 532643 - RNA, 19 nt, Artificial Sequence
  Description of Artificial Sequence: Synthetic oligonucleotide
  Sense strand starting at position 1353 of SEQ ID NO: 318048
guuugaguccaagaguuuc

SEQ ID NO: 532644 - RNA, 19 nt, Artificial Sequence
  Description of Artificial Sequence: Synthetic oligonucleotide
  Antisense strand to SEQ ID NO: 532643
gaaacucuuggacucaaac

SEQ ID NO: 532645 - RNA, 19 nt, Artificial Sequence
  Description of Artificial Sequence: Synthetic oligonucleotide
  Sense strand starting at position 1408 of SEQ ID NO: 318048
acuacauauccguguauaa

SEQ ID NO: 532646 - RNA, 19 nt, Artificial Sequence
  Description of Artificial Sequence: Synthetic oligonucleotide
  Antisense strand to SEQ ID NO: 532645
uuauacacggauauguagu

SEQ ID NO: 532647 - RNA, 19 nt, Artificial Sequence
  Description of Artificial Sequence: Synthetic oligonucleotide
  Sense strand starting at position 1410 of SEQ ID NO: 318048
uacauauccguguauaagu

SEQ ID NO: 532648 - RNA, 19 nt, Artificial Sequence
  Description of Artificial Sequence: Synthetic oligonucleotide
  Antisense strand to SEQ ID NO: 532647
acuuauacacggauaugua

SEQ ID NO: 532649 - RNA, 19 nt, Artificial Sequence
  Description of Artificial Sequence: Synthetic oligonucleotide
  Sense strand starting at position 1607 of SEQ ID NO: 318048
aggcuaugcguucagaucu

SEQ ID NO: 532650 - RNA, 19 nt, Artificial Sequence
  Description of Artificial Sequence: Synthetic oligonucleotide
  Antisense strand to SEQ ID NO: 532649
agaucugaacgcauagccu

SEQ ID NO: 532651 - RNA, 19 nt, Artificial Sequence
  Description of Artificial Sequence: Synthetic oligonucleotide
  Sense strand starting at position 2039 of SEQ ID NO: 318048
acucgauagccggaaguca

SEQ ID NO: 532652 - RNA, 19 nt, Artificial Sequence
  Description of Artificial Sequence: Synthetic oligonucleotide
  Antisense strand to SEQ ID NO: 532651
ugacuuccggcuaucgagu

SEQ ID NO: 532653 - RNA, 19 nt, Artificial Sequence
  Description of Artificial Sequence: Synthetic oligonucleotide
  Sense strand starting at position 2203 of SEQ ID NO: 318048
cgccgagcuggugagauuu

SEQ ID NO: 532654 - RNA, 19 nt, Artificial Sequence
  Description of Artificial Sequence: Synthetic oligonucleotide
  Antisense strand to SEQ ID NO: 532653
aaaucucaccagcucggcg

SEQ ID NO: 532655 - RNA, 19 nt, Artificial Sequence
  Description of Artificial Sequence: Synthetic oligonucleotide
  Sense strand starting at position 2497 of SEQ ID NO: 318048
ggcgaaacuccugaaacug

SEQ ID NO: 532656 - RNA, 19 nt, Artificial Sequence
  Description of Artificial Sequence: Synthetic oligonucleotide
  Antisense strand to SEQ ID NO: 532655
caguuucaggaguuucgcc

SEQ ID NO: 532657 - RNA, 19 nt, Artificial Sequence
  Description of Artificial Sequence: Synthetic oligonucleotide
  Sense strand starting at position 2598 of SEQ ID NO: 318048
cugagaaagucucuaacuc

SEQ ID NO: 532658 - RNA, 19 nt, Artificial Sequence
  Description of Artificial Sequence: Synthetic oligonucleotide
  Antisense strand to SEQ ID NO: 532657
gaguuagagacuuucucag

SEQ ID NO: 532659 - RNA, 19 nt, Artificial Sequence
  Description of Artificial Sequence: Synthetic oligonucleotide
  Sense strand starting at position 2718 of SEQ ID NO: 318048
uggacucuaccugagucau

SEQ ID NO: 532660 - RNA, 19 nt, Artificial Sequence
  Description of Artificial Sequence: Synthetic oligonucleotide
  Antisense strand to SEQ ID NO: 532659
augacucagguagagucca

SEQ ID NO: 532661 - RNA, 19 nt, Artificial Sequence
  Description of Artificial Sequence: Synthetic oligonucleotide
  Sense strand starting at position 2732 of SEQ ID NO: 318048
gucauucugggauggcaaa

SEQ ID NO: 532662 - RNA, 19 nt, Artificial Sequence
  Description of Artificial Sequence: Synthetic oligonucleotide
  Antisense strand to SEQ ID NO: 532661
uuugccaucccagaaugac

SEQ ID NO: 532663 - RNA, 19 nt, Artificial Sequence
  Description of Artificial Sequence: Synthetic oligonucleotide
  Sense strand starting at position 2744 of SEQ ID NO: 318048
uggcaaagugauggcagaa

SEQ ID NO: 532664 - RNA, 19 nt, Artificial Sequence
  Description of Artificial Sequence: Synthetic oligonucleotide
  Antisense strand to SEQ ID NO: 532663
uucugccaucacuuugcca

SEQ ID NO: 532665 - RNA, 19 nt, Artificial Sequence
  Description of Artificial Sequence: Synthetic oligonucleotide
  Sense strand starting at position 2830 of SEQ ID NO: 318048
uguauuuagcgcuaugucu

SEQ ID NO: 532666 - RNA, 19 nt, Artificial Sequence
  Description of Artificial Sequence: Synthetic oligonucleotide
  Antisense strand to SEQ ID NO: 532665
agacauagcgcuaaauaca

SEQ ID NO: 532667 - RNA, 19 nt, Artificial Sequence
  Description of Artificial Sequence: Synthetic oligonucleotide
  Sense strand starting at position 2983 of SEQ ID NO: 318048
agaguauccucuguugcac

SEQ ID NO: 532668 - RNA, 19 nt, Artificial Sequence
  Description of Artificial Sequence: Synthetic oligonucleotide
  Antisense strand to SEQ ID NO: 532667
gugcaacagaggauacucu

SEQ ID NO: 532669 - RNA, 19 nt, Artificial Sequence
  Description of Artificial Sequence: Synthetic oligonucleotide
  Sense strand starting at position 3257 of SEQ ID NO: 318048
caccacaugugguuaugua

SEQ ID NO: 532670 - RNA, 19 nt, Artificial Sequence
  Description of Artificial Sequence: Synthetic oligonucleotide
  Antisense strand to SEQ ID NO: 532669
uacauaaccacauguggug

SEQ ID NO: 532671 - RNA, 19 nt, Artificial Sequence
  Description of Artificial Sequence: Synthetic oligonucleotide
  Sense strand starting at position 3258 of SEQ ID NO: 318048
accacaugugguuauguaa

SEQ ID NO: 532672 - RNA, 19 nt, Artificial Sequence
  Description of Artificial Sequence: Synthetic oligonucleotide
  Antisense strand to SEQ ID NO: 532671
uuacauaaccacauguggu

SEQ ID NO: 532673 - RNA, 19 nt, Artificial Sequence
  Description of Artificial Sequence: Synthetic oligonucleotide
  Sense strand starting at position 3261 of SEQ ID NO: 318048
acaugugguuauguaauua

SEQ ID NO: 532674 - RNA, 19 nt, Artificial Sequence
  Description of Artificial Sequence: Synthetic oligonucleotide
  Antisense strand to SEQ ID NO: 532673
uaauuacauaaccacaugu

SEQ ID NO: 532675 - RNA, 19 nt, Artificial Sequence
  Description of Artificial Sequence: Synthetic oligonucleotide
  Sense strand starting at position 3265 of SEQ ID NO: 318048
gugguuauguaauuacaua

SEQ ID NO: 532676 - RNA, 19 nt, Artificial Sequence
  Description of Artificial Sequence: Synthetic oligonucleotide
  Antisense strand to SEQ ID NO: 532675
uauguaauuacauaaccac

SEQ ID NO: 532677 - RNA, 19 nt, Artificial Sequence
  Description of Artificial Sequence: Synthetic oligonucleotide
  Sense strand starting at position 3305 of SEQ ID NO: 318048
aauuaagguugcucugaga

SEQ ID NO: 532678 - RNA, 19 nt, Artificial Sequence
  Description of Artificial Sequence: Synthetic oligonucleotide
  Antisense strand to SEQ ID NO: 532677
ucucagagcaaccuuaauu

SEQ ID NO: 532679 - RNA, 19 nt, Artificial Sequence
  Description of Artificial Sequence: Synthetic oligonucleotide
  Sense strand starting at position 3369 of SEQ ID NO: 318048
gugauauacuaacugaucu

SEQ ID NO: 532680 - RNA, 19 nt, Artificial Sequence
  Description of Artificial Sequence: Synthetic oligonucleotide
  Antisense strand to SEQ ID NO: 532679
agaucaguuaguauaucac

SEQ ID NO: 532681 - RNA, 19 nt, Artificial Sequence
  Description of Artificial Sequence: Synthetic oligonucleotide
  Sense strand starting at position 3427 of SEQ ID NO: 318048
aagauagguccagguagag

SEQ ID NO: 532682 - RNA, 19 nt, Artificial Sequence
  Description of Artificial Sequence: Synthetic oligonucleotide
  Antisense strand to SEQ ID NO: 532681
cucuaccuggaccuaucuu

SEQ ID NO: 532683 - RNA, 19 nt, Artificial Sequence
  Description of Artificial Sequence: Synthetic oligonucleotide
  Sense strand starting at position 3463 of SEQ ID NO: 318048
gggaaagaacuuugguagu

SEQ ID NO: 532684 - RNA, 19 nt, Artificial Sequence
  Description of Artificial Sequence: Synthetic oligonucleotide
  Antisense strand to SEQ ID NO: 532683
acuaccaaaguucuuuccc

SEQ ID NO: 532685 - RNA, 19 nt, Artificial Sequence
  Description of Artificial Sequence: Synthetic oligonucleotide
  Sense strand starting at position 3465 of SEQ ID NO: 318048
gaaagaacuuugguaguuu

SEQ ID NO: 532686 - RNA, 19 nt, Artificial Sequence
  Description of Artificial Sequence: Synthetic oligonucleotide
  Antisense strand to SEQ ID NO: 532685
aaacuaccaaaguucuuuc

SEQ ID NO: 532687 - RNA, 19 nt, Artificial Sequence
  Description of Artificial Sequence: Synthetic oligonucleotide
  Sense strand starting at position 3496 of SEQ ID NO: 318048
ggaugaucuacauggcuag

SEQ ID NO: 532688 - RNA, 19 nt, Artificial Sequence
  Description of Artificial Sequence: Synthetic oligonucleotide
  Antisense strand to SEQ ID NO: 532687
cuagccauguagaucaucc

SEQ ID NO: 532689 - RNA, 19 nt, Artificial Sequence
  Description of Artificial Sequence: Synthetic oligonucleotide
  Sense strand starting at position 3497 of SEQ ID NO: 318048
gaugaucuacauggcuaga

SEQ ID NO: 532690 - RNA, 19 nt, Artificial Sequence
  Description of Artificial Sequence: Synthetic oligonucleotide
  Antisense strand to SEQ ID NO: 532689
ucuagccauguagaucauc

SEQ ID NO: 532691 - RNA, 19 nt, Artificial Sequence
  Description of Artificial Sequence: Synthetic oligonucleotide
  Sense strand starting at position 3536 of SEQ ID NO: 318048
guggaaugagguuggagau

SEQ ID NO: 532692 - RNA, 19 nt, Artificial Sequence
  Description of Artificial Sequence: Synthetic oligonucleotide
  Antisense strand to SEQ ID NO: 532691
aucuccaaccucauuccac

SEQ ID NO: 532693 - RNA, 19 nt, Artificial Sequence
  Description of Artificial Sequence: Synthetic oligonucleotide
  Sense strand starting at position 3548 of SEQ ID NO: 318048
uggagauucugagcucauc

SEQ ID NO: 532694 - RNA, 19 nt, Artificial Sequence
  Description of Artificial Sequence: Synthetic oligonucleotide
  Antisense strand to SEQ ID NO: 532693
gaugagcucagaaucucca

SEQ ID NO: 532695 - RNA, 19 nt, Artificial Sequence
  Description of Artificial Sequence: Synthetic oligonucleotide
  Sense strand starting at position 3587 of SEQ ID NO: 318048
cuguaaguucuauaaacag

SEQ ID NO: 532696 - RNA, 19 nt, Artificial Sequence
  Description of Artificial Sequence: Synthetic oligonucleotide
  Antisense strand to SEQ ID NO: 532695
cuguuuauagaacuuacag

SEQ ID NO: 532697 - RNA, 19 nt, Artificial Sequence
  Description of Artificial Sequence: Synthetic oligonucleotide
  Sense strand starting at position 3673 of SEQ ID NO: 318048
guaguuauuuaugucguuu

SEQ ID NO: 532698 - RNA, 19 nt, Artificial Sequence
  Description of Artificial Sequence: Synthetic oligonucleotide
  Antisense strand to SEQ ID NO: 532697
aaacgacauaaauaacuac

SEQ ID NO: 532699 - RNA, 19 nt, Artificial Sequence
  Description of Artificial Sequence: Synthetic oligonucleotide
  Sense strand starting at position 278 of SEQ ID NO: 318049
acaauuugguuauagaagu

SEQ ID NO: 532700 - RNA, 19 nt, Artificial Sequence
  Description of Artificial Sequence: Synthetic oligonucleotide
  Antisense strand to SEQ ID NO: 532699
acuucuauaaccaaauugu

SEQ ID NO: 532701 - RNA, 19 nt, Artificial Sequence
  Description of Artificial Sequence: Synthetic oligonucleotide
  Sense strand starting at position 333 of SEQ ID NO: 318049
aggcauauaucacuccaga

SEQ ID NO: 532702 - RNA, 19 nt, Artificial Sequence
  Description of Artificial Sequence: Synthetic oligonucleotide
  Antisense strand to SEQ ID NO: 532701
ucuggagugauauaugccu

SEQ ID NO: 532703 - RNA, 19 nt, Artificial Sequence
  Description of Artificial Sequence: Synthetic oligonucleotide
  Sense strand starting at position 537 of SEQ ID NO: 318049
gugaaucaagauugcccaa

SEQ ID NO: 532704 - RNA, 19 nt, Artificial Sequence
  Description of Artificial Sequence: Synthetic oligonucleotide
  Antisense strand to SEQ ID NO: 532703
uugggcaaucuugauucac

SEQ ID NO: 532705 - RNA, 19 nt, Artificial Sequence
  Description of Artificial Sequence: Synthetic oligonucleotide
  Sense strand starting at position 985 of SEQ ID NO: 318049
aagagaauugaauguggcu

SEQ ID NO: 532706 - RNA, 19 nt, Artificial Sequence
  Description of Artificial Sequence: Synthetic oligonucleotide
  Antisense strand to SEQ ID NO: 532705
agccacauucaauucucuu

SEQ ID NO: 532707 - RNA, 19 nt, Artificial Sequence
  Description of Artificial Sequence: Synthetic oligonucleotide
  Sense strand starting at position 1112 of SEQ ID NO: 318049
ugugucuaugcauauacau

SEQ ID NO: 532708 - RNA, 19 nt, Artificial Sequence
  Description of Artificial Sequence: Synthetic oligonucleotide
  Antisense strand to SEQ ID NO: 532707
auguauaugcauagacaca

SEQ ID NO: 532709 - RNA, 19 nt, Artificial Sequence
  Description of Artificial Sequence: Synthetic oligonucleotide
  Sense strand starting at position 1264 of SEQ ID NO: 318049
ugguccugcucacuaguua

SEQ ID NO: 532710 - RNA, 19 nt, Artificial Sequence
  Description of Artificial Sequence: Synthetic oligonucleotide
  Antisense strand to SEQ ID NO: 532709
uaacuagugagcaggacca

SEQ ID NO: 532711 - RNA, 19 nt, Artificial Sequence
  Description of Artificial Sequence: Synthetic oligonucleotide
  Sense strand starting at position 1265 of SEQ ID NO: 318049
gguccugcucacuaguuaa

SEQ ID NO: 532712 - RNA, 19 nt, Artificial Sequence
  Description of Artificial Sequence: Synthetic oligonucleotide
  Antisense strand to SEQ ID NO: 532711
uuaacuagugagcaggacc

SEQ ID NO: 532713 - RNA, 19 nt, Artificial Sequence
  Description of Artificial Sequence: Synthetic oligonucleotide
  Sense strand starting at position 1451 of SEQ ID NO: 318049
accacuugaggaugcauua

SEQ ID NO: 532714 - RNA, 19 nt, Artificial Sequence
  Description of Artificial Sequence: Synthetic oligonucleotide
  Antisense strand to SEQ ID NO: 532713
uaaugcauccucaaguggu

SEQ ID NO: 532715 - RNA, 19 nt, Artificial Sequence
  Description of Artificial Sequence: Synthetic oligonucleotide
  Sense strand starting at position 1469 of SEQ ID NO: 318049
augggaucagccugaagga

SEQ ID NO: 532716 - RNA, 19 nt, Artificial Sequence
  Description of Artificial Sequence: Synthetic oligonucleotide
  Antisense strand to SEQ ID NO: 532715
uccuucaggcugaucccau

SEQ ID NO: 532717 - RNA, 19 nt, Artificial Sequence
  Description of Artificial Sequence: Synthetic oligonucleotide
  Sense strand starting at position 1519 of SEQ ID NO: 318049
accagaugguaucugauca

SEQ ID NO: 532718 - RNA, 19 nt, Artificial Sequence
  Description of Artificial Sequence: Synthetic oligonucleotide
  Antisense strand to SEQ ID NO: 532717
ugaucagauaccaucuggu

SEQ ID NO: 532719 - RNA, 19 nt, Artificial Sequence
  Description of Artificial Sequence: Synthetic oligonucleotide
  Sense strand starting at position 1523 of SEQ ID NO: 318049
gaugguaucugaucaaguc

SEQ ID NO: 532720 - RNA, 19 nt, Artificial Sequence
  Description of Artificial Sequence: Synthetic oligonucleotide
  Antisense strand to SEQ ID NO: 532719
gacuugaucagauaccauc

SEQ ID NO: 532721 - RNA, 19 nt, Artificial Sequence
  Description of Artificial Sequence: Synthetic oligonucleotide
  Sense strand starting at position 1524 of SEQ ID NO: 318049
augguaucugaucaagucu

SEQ ID NO: 532722 - RNA, 19 nt, Artificial Sequence
  Description of Artificial Sequence: Synthetic oligonucleotide
  Antisense strand to SEQ ID NO: 532721
agacuugaucagauaccau

SEQ ID NO: 532723 - RNA, 19 nt, Artificial Sequence
  Description of Artificial Sequence: Synthetic oligonucleotide
  Sense strand starting at position 1595 of SEQ ID NO: 318049
ccugcucugcuggaaauga

SEQ ID NO: 532724 - RNA, 19 nt, Artificial Sequence
  Description of Artificial Sequence: Synthetic oligonucleotide
  Antisense strand to SEQ ID NO: 532723
ucauuuccagcagagcagg

SEQ ID NO: 532725 - RNA, 19 nt, Artificial Sequence
  Description of Artificial Sequence: Synthetic oligonucleotide
  Sense strand starting at position 1646 of SEQ ID NO: 318049
guuaguucccugcagcuga

SEQ ID NO: 532726 - RNA, 19 nt, Artificial Sequence
  Description of Artificial Sequence: Synthetic oligonucleotide
  Antisense strand to SEQ ID NO: 532725
ucagcugcagggaacuaac

SEQ ID NO: 532727 - RNA, 19 nt, Artificial Sequence
  Description of Artificial Sequence: Synthetic oligonucleotide
  Sense strand starting at position 1688 of SEQ ID NO: 318049
agggaaagcuguccacaga

SEQ ID NO: 532728 - RNA, 19 nt, Artificial Sequence
  Description of Artificial Sequence: Synthetic oligonucleotide
  Antisense strand to SEQ ID NO: 532727
ucuguggacagcuuucccu

SEQ ID NO: 532729 - RNA, 19 nt, Artificial Sequence
  Description of Artificial Sequence: Synthetic oligonucleotide
  Sense strand starting at position 2261 of SEQ ID NO: 318049
acgacuuaucccuagccuu

SEQ ID NO: 532730 - RNA, 19 nt, Artificial Sequence
  Description of Artificial Sequence: Synthetic oligonucleotide
  Antisense strand to SEQ ID NO: 532729
aaggcuagggauaagucgu

SEQ ID NO: 532731 - RNA, 19 nt, Artificial Sequence
  Description of Artificial Sequence: Synthetic oligonucleotide
  Sense strand starting at position 2281 of SEQ ID NO: 318049
acagucauauugccaaguu

SEQ ID NO: 532732 - RNA, 19 nt, Artificial Sequence
  Description of Artificial Sequence: Synthetic oligonucleotide
  Antisense strand to SEQ ID NO: 532731
aacuuggcaauaugacugu

SEQ ID NO: 532733 - RNA, 19 nt, Artificial Sequence
  Description of Artificial Sequence: Synthetic oligonucleotide
  Sense strand starting at position 2294 of SEQ ID NO: 318049
caaguuugccauuagcaag

SEQ ID NO: 532734 - RNA, 19 nt, Artificial Sequence
  Description of Artificial Sequence: Synthetic oligonucleotide
  Antisense strand to SEQ ID NO: 532733
cuugcuaauggcaaacuug

SEQ ID NO: 532735 - RNA, 19 nt, Artificial Sequence
  Description of Artificial Sequence: Synthetic oligonucleotide
  Sense strand starting at position 2300 of SEQ ID NO: 318049
ugccauuagcaagagaaau

SEQ ID NO: 532736 - RNA, 19 nt, Artificial Sequence
  Description of Artificial Sequence: Synthetic oligonucleotide
  Antisense strand to SEQ ID NO: 532735
auuucucuugcuaauggca

SEQ ID NO: 532737 - RNA, 19 nt, Artificial Sequence
  Description of Artificial Sequence: Synthetic oligonucleotide
  Sense strand starting at position 2310 of SEQ ID NO: 318049
aagagaaauugagagugaa

SEQ ID NO: 532738 - RNA, 19 nt, Artificial Sequence
  Description of Artificial Sequence: Synthetic oligonucleotide
  Antisense strand to SEQ ID NO: 532737
uucacucucaauuucucuu

SEQ ID NO: 532739 - RNA, 19 nt, Artificial Sequence
  Description of Artificial Sequence: Synthetic oligonucleotide
  Sense strand starting at position 2329 of SEQ ID NO: 318049
ugugaaucacugugccuaa

SEQ ID NO: 532740 - RNA, 19 nt, Artificial Sequence
  Description of Artificial Sequence: Synthetic oligonucleotide
  Antisense strand to SEQ ID NO: 532739
uuaggcacagugauucaca

SEQ ID NO: 532741 - RNA, 19 nt, Artificial Sequence
  Description of Artificial Sequence: Synthetic oligonucleotide
  Sense strand starting at position 2475 of SEQ ID NO: 318049
cuggguaacccugagaguu

SEQ ID NO: 532742 - RNA, 19 nt, Artificial Sequence
  Description of Artificial Sequence: Synthetic oligonucleotide
  Antisense strand to SEQ ID NO: 532741
aacucucaggguuacccag

SEQ ID NO: 532743 - RNA, 19 nt, Artificial Sequence
  Description of Artificial Sequence: Synthetic oligonucleotide
  Sense strand starting at position 2483 of SEQ ID NO: 318049
cccugagaguuccugaguu

SEQ ID NO: 532744 - RNA, 19 nt, Artificial Sequence
  Description of Artificial Sequence: Synthetic oligonucleotide
  Antisense strand to SEQ ID NO: 532743
aacucaggaacucucaggg

SEQ ID NO: 532745 - RNA, 19 nt, Artificial Sequence
  Description of Artificial Sequence: Synthetic oligonucleotide
  Sense strand starting at position 2485 of SEQ ID NO: 318049
cugagaguuccugaguucu

SEQ ID NO: 532746 - RNA, 19 nt, Artificial Sequence
  Description of Artificial Sequence: Synthetic oligonucleotide
  Antisense strand to SEQ ID NO: 532745
agaacucaggaacucucag

SEQ ID NO: 532747 - RNA, 19 nt, Artificial Sequence
  Description of Artificial Sequence: Synthetic oligonucleotide
  Sense strand starting at position 2487 of SEQ ID NO: 318049
gagaguuccugaguucucu

SEQ ID NO: 532748 - RNA, 19 nt, Artificial Sequence
  Description of Artificial Sequence: Synthetic oligonucleotide
  Antisense strand to SEQ ID NO: 532747
agagaacucaggaacucuc

SEQ ID NO: 532749 - RNA, 19 nt, Artificial Sequence
  Description of Artificial Sequence: Synthetic oligonucleotide
  Sense strand starting at position 2631 of SEQ ID NO: 318049
caguaauagcacuagcuga

SEQ ID NO: 532750 - RNA, 19 nt, Artificial Sequence
  Description of Artificial Sequence: Synthetic oligonucleotide
  Antisense strand to SEQ ID NO: 532749
ucagcuagugcuauuacug

SEQ ID NO: 532751 - RNA, 19 nt, Artificial Sequence
  Description of Artificial Sequence: Synthetic oligonucleotide
  Sense strand starting at position 2654 of SEQ ID NO: 318049
uuuggagaauacuauauag

SEQ ID NO: 532752 - RNA, 19 nt, Artificial Sequence
  Description of Artificial Sequence: Synthetic oligonucleotide
  Antisense strand to SEQ ID NO: 532751
cuauauaguauucuccaaa

SEQ ID NO: 532753 - RNA, 19 nt, Artificial Sequence
  Description of Artificial Sequence: Synthetic oligonucleotide
  Sense strand starting at position 2698 of SEQ ID NO: 318049
gcguuaaaucgggcuguug

SEQ ID NO: 532754 - RNA, 19 nt, Artificial Sequence
  Description of Artificial Sequence: Synthetic oligonucleotide
  Antisense strand to SEQ ID NO: 532753
caacagcccgauuuaacgc

SEQ ID NO: 532755 - RNA, 19 nt, Artificial Sequence
  Description of Artificial Sequence: Synthetic oligonucleotide
  Sense strand starting at position 2700 of SEQ ID NO: 318049
guuaaaucgggcuguugac

SEQ ID NO: 532756 - RNA, 19 nt, Artificial Sequence
  Description of Artificial Sequence: Synthetic oligonucleotide
  Antisense strand to SEQ ID NO: 532755
gucaacagcccgauuuaac

SEQ ID NO: 532757 - RNA, 19 nt, Artificial Sequence
  Description of Artificial Sequence: Synthetic oligonucleotide
  Sense strand starting at position 2750 of SEQ ID NO: 318049
ugaguaagcuugccuagua

SEQ ID NO: 532758 - RNA, 19 nt, Artificial Sequence
  Description of Artificial Sequence: Synthetic oligonucleotide
  Antisense strand to SEQ ID NO: 532757
uacuaggcaagcuuacuca

SEQ ID NO: 532759 - RNA, 19 nt, Artificial Sequence
  Description of Artificial Sequence: Synthetic oligonucleotide
  Sense strand starting at position 2778 of SEQ ID NO: 318049
cuccucuucuggucuaaga

SEQ ID NO: 532760 - RNA, 19 nt, Artificial Sequence
  Description of Artificial Sequence: Synthetic oligonucleotide
  Antisense strand to SEQ ID NO: 532759
ucuuagaccagaagaggag

SEQ ID NO: 532761 - RNA, 19 nt, Artificial Sequence
  Description of Artificial Sequence: Synthetic oligonucleotide
  Sense strand starting at position 2780 of SEQ ID NO: 318049
ccucuucuggucuaagaau

SEQ ID NO: 532762 - RNA, 19 nt, Artificial Sequence
  Description of Artificial Sequence: Synthetic oligonucleotide
  Antisense strand to SEQ ID NO: 532761
auucuuagaccagaagagg

SEQ ID NO: 532763 - RNA, 19 nt, Artificial Sequence
  Description of Artificial Sequence: Synthetic oligonucleotide
  Sense strand starting at position 2866 of SEQ ID NO: 318049
ggaugaucucagcauagug

SEQ ID NO: 532764 - RNA, 19 nt, Artificial Sequence
  Description of Artificial Sequence: Synthetic oligonucleotide
  Antisense strand to SEQ ID NO: 532763
cacuaugcugagaucaucc

SEQ ID NO: 532765 - RNA, 19 nt, Artificial Sequence
  Description of Artificial Sequence: Synthetic oligonucleotide
  Sense strand starting at position 3439 of SEQ ID NO: 318049
gcaguuggaggcuaugauu

SEQ ID NO: 532766 - RNA, 19 nt, Artificial Sequence
  Description of Artificial Sequence: Synthetic oligonucleotide
  Antisense strand to SEQ ID NO: 532765
aaucauagccuccaacugc

SEQ ID NO: 532767 - RNA, 19 nt, Artificial Sequence
  Description of Artificial Sequence: Synthetic oligonucleotide
  Sense strand starting at position 3445 of SEQ ID NO: 318049
ggaggcuaugauugugcca

SEQ ID NO: 532768 - RNA, 19 nt, Artificial Sequence
  Description of Artificial Sequence: Synthetic oligonucleotide
  Antisense strand to SEQ ID NO: 532767
uggcacaaucauagccucc

SEQ ID NO: 532769 - RNA, 19 nt, Artificial Sequence
  Description of Artificial Sequence: Synthetic oligonucleotide
  Sense strand starting at position 3491 of SEQ ID NO: 318049
agacccuguuucuuaagga

SEQ ID NO: 532770 - RNA, 19 nt, Artificial Sequence
  Description of Artificial Sequence: Synthetic oligonucleotide
  Antisense strand to SEQ ID NO: 532769
uccuuaagaaacagggucu

SEQ ID NO: 532771 - RNA, 19 nt, Artificial Sequence
  Description of Artificial Sequence: Synthetic oligonucleotide
  Sense strand starting at position 3587 of SEQ ID NO: 318049
auauacuagggacgucaaa

SEQ ID NO: 532772 - RNA, 19 nt, Artificial Sequence
  Description of Artificial Sequence: Synthetic oligonucleotide
  Antisense strand to SEQ ID NO: 532771
uuugacgucccuaguauau

SEQ ID NO: 532773 - RNA, 19 nt, Artificial Sequence
  Description of Artificial Sequence: Synthetic oligonucleotide
  Sense strand starting at position 3667 of SEQ ID NO: 318049
aagugagguaaagguaaau

SEQ ID NO: 532774 - RNA, 19 nt, Artificial Sequence
  Description of Artificial Sequence: Synthetic oligonucleotide
  Antisense strand to SEQ ID NO: 532773
auuuaccuuuaccucacuu

SEQ ID NO: 532775 - RNA, 19 nt, Artificial Sequence
  Description of Artificial Sequence: Synthetic oligonucleotide
  Sense strand starting at position 3919 of SEQ ID NO: 318049
ggcuguguucuccaucuag

SEQ ID NO: 532776 - RNA, 19 nt, Artificial Sequence
  Description of Artificial Sequence: Synthetic oligonucleotide
  Antisense strand to SEQ ID NO: 532775
cuagauggagaacacagcc

SEQ ID NO: 532777 - RNA, 19 nt, Artificial Sequence
  Description of Artificial Sequence: Synthetic oligonucleotide
  Sense strand starting at position 3977 of SEQ ID NO: 318049
uuuaucccggcuuaaauau

SEQ ID NO: 532778 - RNA, 19 nt, Artificial Sequence
  Description of Artificial Sequence: Synthetic oligonucleotide
  Antisense strand to SEQ ID NO: 532777
auauuuaagccgggauaaa

SEQ ID NO: 532779 - RNA, 19 nt, Artificial Sequence
  Description of Artificial Sequence: Synthetic oligonucleotide
  Sense strand starting at position 54 of SEQ ID NO: 318050
gugaaucaagauugcccaa

SEQ ID NO: 532780 - RNA, 19 nt, Artificial Sequence
  Description of Artificial Sequence: Synthetic oligonucleotide
  Antisense strand to SEQ ID NO: 532779
uugggcaaucuugauucac

SEQ ID NO: 532781 - RNA, 19 nt, Artificial Sequence
  Description of Artificial Sequence: Synthetic oligonucleotide
  Sense strand starting at position 502 of SEQ ID NO: 318050
aagagaauugaauguggcu

SEQ ID NO: 532782 - RNA, 19 nt, Artificial Sequence
  Description of Artificial Sequence: Synthetic oligonucleotide
  Antisense strand to SEQ ID NO: 532781
agccacauucaauucucuu

SEQ ID NO: 532783 - RNA, 19 nt, Artificial Sequence
  Description of Artificial Sequence: Synthetic oligonucleotide
  Sense strand starting at position 629 of SEQ ID NO: 318050
ugugucuaugcauauacau

SEQ ID NO: 532784 - RNA, 19 nt, Artificial Sequence
  Description of Artificial Sequence: Synthetic oligonucleotide
  Antisense strand to SEQ ID NO: 532783
auguauaugcauagacaca

SEQ ID NO: 532785 - RNA, 19 nt, Artificial Sequence
  Description of Artificial Sequence: Synthetic oligonucleotide
  Sense strand starting at position 782 of SEQ ID NO: 318050
gguccugcucacuaguuaa

SEQ ID NO: 532786 - RNA, 19 nt, Artificial Sequence
  Description of Artificial Sequence: Synthetic oligonucleotide
  Antisense strand to SEQ ID NO: 532785
uuaacuagugagcaggacc

SEQ ID NO: 532787 - RNA, 19 nt, Artificial Sequence
  Description of Artificial Sequence: Synthetic oligonucleotide
  Sense strand starting at position 968 of SEQ ID NO: 318050
accacuugaggaugcauua

SEQ ID NO: 532788 - RNA, 19 nt, Artificial Sequence
  Description of Artificial Sequence: Synthetic oligonucleotide
  Antisense strand to SEQ ID NO: 532787
uaaugcauccucaaguggu

SEQ ID NO: 532789 - RNA, 19 nt, Artificial Sequence
  Description of Artificial Sequence: Synthetic oligonucleotide
  Sense strand starting at position 986 of SEQ ID NO: 318050
augggaucagccugaagga

SEQ ID NO: 532790 - RNA, 19 nt, Artificial Sequence
  Description of Artificial Sequence: Synthetic oligonucleotide
  Antisense strand to SEQ ID NO: 532789
uccuucaggcugaucccau

SEQ ID NO: 532791 - RNA, 19 nt, Artificial Sequence
  Description of Artificial Sequence: Synthetic oligonucleotide
  Sense strand starting at position 1036 of SEQ ID NO: 318050
accagaugguaucugauca

SEQ ID NO: 532792 - RNA, 19 nt, Artificial Sequence
  Description of Artificial Sequence: Synthetic oligonucleotide
  Antisense strand to SEQ ID NO: 532791
ugaucagauaccaucuggu

SEQ ID NO: 532793 - RNA, 19 nt, Artificial Sequence
  Description of Artificial Sequence: Synthetic oligonucleotide
  Sense strand starting at position 1040 of SEQ ID NO: 318050
gaugguaucugaucaaguc

SEQ ID NO: 532794 - RNA, 19 nt, Artificial Sequence
  Description of Artificial Sequence: Synthetic oligonucleotide
  Antisense strand to SEQ ID NO: 532793
gacuugaucagauaccauc

SEQ ID NO: 532795 - RNA, 19 nt, Artificial Sequence
  Description of Artificial Sequence: Synthetic oligonucleotide
  Sense strand starting at position 1041 of SEQ ID NO: 318050
augguaucugaucaagucu

SEQ ID NO: 532796 - RNA, 19 nt, Artificial Sequence
  Description of Artificial Sequence: Synthetic oligonucleotide
  Antisense strand to SEQ ID NO: 532795
agacuugaucagauaccau

SEQ ID NO: 532797 - RNA, 19 nt, Artificial Sequence
  Description of Artificial Sequence: Synthetic oligonucleotide
  Sense strand starting at position 1112 of SEQ ID NO: 318050
ccugcucugcuggaaauga

SEQ ID NO: 532798 - RNA, 19 nt, Artificial Sequence
  Description of Artificial Sequence: Synthetic oligonucleotide
  Antisense strand to SEQ ID NO: 532797
ucauuuccagcagagcagg

SEQ ID NO: 532799 - RNA, 19 nt, Artificial Sequence
  Description of Artificial Sequence: Synthetic oligonucleotide
  Sense strand starting at position 1205 of SEQ ID NO: 318050
agggaaagcuguccacaga

SEQ ID NO: 532800 - RNA, 19 nt, Artificial Sequence
  Description of Artificial Sequence: Synthetic oligonucleotide
  Antisense strand to SEQ ID NO: 532799
ucuguggacagcuuucccu

SEQ ID NO: 532801 - RNA, 19 nt, Artificial Sequence
  Description of Artificial Sequence: Synthetic oligonucleotide
  Sense strand starting at position 1778 of SEQ ID NO: 318050
acgacuuaucccuagccuu

SEQ ID NO: 532802 - RNA, 19 nt, Artificial Sequence
  Description of Artificial Sequence: Synthetic oligonucleotide
  Antisense strand to SEQ ID NO: 532801
aaggcuagggauaagucgu

SEQ ID NO: 532803 - RNA, 19 nt, Artificial Sequence
  Description of Artificial Sequence: Synthetic oligonucleotide
  Sense strand starting at position 1798 of SEQ ID NO: 318050
acagucauauugccaaguu

SEQ ID NO: 532804 - RNA, 19 nt, Artificial Sequence
  Description of Artificial Sequence: Synthetic oligonucleotide
  Antisense strand to SEQ ID NO: 532803
aacuuggcaauaugacugu

SEQ ID NO: 532805 - RNA, 19 nt, Artificial Sequence
  Description of Artificial Sequence: Synthetic oligonucleotide
  Sense strand starting at position 1811 of SEQ ID NO: 318050
caaguuugccauuagcaag

SEQ ID NO: 532806 - RNA, 19 nt, Artificial Sequence
  Description of Artificial Sequence: Synthetic oligonucleotide
  Antisense strand to SEQ ID NO: 532805
cuugcuaauggcaaacuug

SEQ ID NO: 532807 - RNA, 19 nt, Artificial Sequence
  Description of Artificial Sequence: Synthetic oligonucleotide
  Sense strand starting at position 1817 of SEQ ID NO: 318050
ugccauuagcaagagaaau

SEQ ID NO: 532808 - RNA, 19 nt, Artificial Sequence
  Description of Artificial Sequence: Synthetic oligonucleotide
  Antisense strand to SEQ ID NO: 532807
auuucucuugcuaauggca

SEQ ID NO: 532809 - RNA, 19 nt, Artificial Sequence
  Description of Artificial Sequence: Synthetic oligonucleotide
  Sense strand starting at position 1827 of SEQ ID NO: 318050
aagagaaauugagagugaa

SEQ ID NO: 532810 - RNA, 19 nt, Artificial Sequence
  Description of Artificial Sequence: Synthetic oligonucleotide
  Antisense strand to SEQ ID NO: 532809
uucacucucaauuucucuu

SEQ ID NO: 532811 - RNA, 19 nt, Artificial Sequence
  Description of Artificial Sequence: Synthetic oligonucleotide
  Sense strand starting at position 1992 of SEQ ID NO: 318050
cuggguaacccugagaguu

SEQ ID NO: 532812 - RNA, 19 nt, Artificial Sequence
  Description of Artificial Sequence: Synthetic oligonucleotide
  Antisense strand to SEQ ID NO: 532811
aacucucaggguuacccag

SEQ ID NO: 532813 - RNA, 19 nt, Artificial Sequence
  Description of Artificial Sequence: Synthetic oligonucleotide
  Sense strand starting at position 2000 of SEQ ID NO: 318050
cccugagaguuccugaguu

SEQ ID NO: 532814 - RNA, 19 nt, Artificial Sequence
  Description of Artificial Sequence: Synthetic oligonucleotide
  Antisense strand to SEQ ID NO: 532813
aacucaggaacucucaggg

SEQ ID NO: 532815 - RNA, 19 nt, Artificial Sequence
  Description of Artificial Sequence: Synthetic oligonucleotide
  Sense strand starting at position 2002 of SEQ ID NO: 318050
cugagaguuccugaguucu

SEQ ID NO: 532816 - RNA, 19 nt, Artificial Sequence
  Description of Artificial Sequence: Synthetic oligonucleotide
  Antisense strand to SEQ ID NO: 532815
agaacucaggaacucucag

SEQ ID NO: 532817 - RNA, 19 nt, Artificial Sequence
  Description of Artificial Sequence: Synthetic oligonucleotide
  Sense strand starting at position 2004 of SEQ ID NO: 318050
gagaguuccugaguucucu

SEQ ID NO: 532818 - RNA, 19 nt, Artificial Sequence
  Description of Artificial Sequence: Synthetic oligonucleotide
  Antisense strand to SEQ ID NO: 532817
agagaacucaggaacucuc

SEQ ID NO: 532819 - RNA, 19 nt, Artificial Sequence
  Description of Artificial Sequence: Synthetic oligonucleotide
  Sense strand starting at position 2148 of SEQ ID NO: 318050
caguaauagcacuagcuga

SEQ ID NO: 532820 - RNA, 19 nt, Artificial Sequence
  Description of Artificial Sequence: Synthetic oligonucleotide
  Antisense strand to SEQ ID NO: 532819
ucagcuagugcuauuacug

SEQ ID NO: 532821 - RNA, 19 nt, Artificial Sequence
  Description of Artificial Sequence: Synthetic oligonucleotide
  Sense strand starting at position 2215 of SEQ ID NO: 318050
gcguuaaaucgggcuguug

SEQ ID NO: 532822 - RNA, 19 nt, Artificial Sequence
  Description of Artificial Sequence: Synthetic oligonucleotide
  Antisense strand to SEQ ID NO: 532821
caacagcccgauuuaacgc

SEQ ID NO: 532823 - RNA, 19 nt, Artificial Sequence
  Description of Artificial Sequence: Synthetic oligonucleotide
  Sense strand starting at position 2295 of SEQ ID NO: 318050
cuccucuucuggucuaaga

SEQ ID NO: 532824 - RNA, 19 nt, Artificial Sequence
  Description of Artificial Sequence: Synthetic oligonucleotide
  Antisense strand to SEQ ID NO: 532823
ucuuagaccagaagaggag

SEQ ID NO: 532825 - RNA, 19 nt, Artificial Sequence
  Description of Artificial Sequence: Synthetic oligonucleotide
  Sense strand starting at position 2297 of SEQ ID NO: 318050
ccucuucuggucuaagaau

SEQ ID NO: 532826 - RNA, 19 nt, Artificial Sequence
  Description of Artificial Sequence: Synthetic oligonucleotide
  Antisense strand to SEQ ID NO: 532825
auucuuagaccagaagagg

SEQ ID NO: 532827 - RNA, 19 nt, Artificial Sequence
  Description of Artificial Sequence: Synthetic oligonucleotide
  Sense strand starting at position 2383 of SEQ ID NO: 318050
ggaugaucucagcauagug

SEQ ID NO: 532828 - RNA, 19 nt, Artificial Sequence
  Description of Artificial Sequence: Synthetic oligonucleotide
  Antisense strand to SEQ ID NO: 532827
cacuaugcugagaucaucc

SEQ ID NO: 532829 - RNA, 19 nt, Artificial Sequence
  Description of Artificial Sequence: Synthetic oligonucleotide
  Sense strand starting at position 2956 of SEQ ID NO: 318050
gcaguuggaggcuaugauu

SEQ ID NO: 532830 - RNA, 19 nt, Artificial Sequence
  Description of Artificial Sequence: Synthetic oligonucleotide
  Antisense strand to SEQ ID NO: 532829
aaucauagccuccaacugc

SEQ ID NO: 532831 - RNA, 19 nt, Artificial Sequence
  Description of Artificial Sequence: Synthetic oligonucleotide
  Sense strand starting at position 2962 of SEQ ID NO: 318050
ggaggcuaugauugugcca

SEQ ID NO: 532832 - RNA, 19 nt, Artificial Sequence
  Description of Artificial Sequence: Synthetic oligonucleotide
  Antisense strand to SEQ ID NO: 532831
uggcacaaucauagccucc

SEQ ID NO: 532833 - RNA, 19 nt, Artificial Sequence
  Description of Artificial Sequence: Synthetic oligonucleotide
  Sense strand starting at position 3008 of SEQ ID NO: 318050
agacccuguuucuuaagga

SEQ ID NO: 532834 - RNA, 19 nt, Artificial Sequence
  Description of Artificial Sequence: Synthetic oligonucleotide
  Antisense strand to SEQ ID NO: 532833
uccuuaagaaacagggucu

SEQ ID NO: 532835 - RNA, 19 nt, Artificial Sequence
  Description of Artificial Sequence: Synthetic oligonucleotide
  Sense strand starting at position 3104 of SEQ ID NO: 318050
auauacuagggacgucaaa

SEQ ID NO: 532836 - RNA, 19 nt, Artificial Sequence
  Description of Artificial Sequence: Synthetic oligonucleotide
  Antisense strand to SEQ ID NO: 532835
uuugacgucccuaguauau

SEQ ID NO: 532837 - RNA, 19 nt, Artificial Sequence
  Description of Artificial Sequence: Synthetic oligonucleotide
  Sense strand starting at position 3184 of SEQ ID NO: 318050
aagugagguaaagguaaau

SEQ ID NO: 532838 - RNA, 19 nt, Artificial Sequence
  Description of Artificial Sequence: Synthetic oligonucleotide
  Antisense strand to SEQ ID NO: 532837
auuuaccuuuaccucacuu

SEQ ID NO: 532839 - RNA, 19 nt, Artificial Sequence
  Description of Artificial Sequence: Synthetic oligonucleotide
  Sense strand starting at position 3436 of SEQ ID NO: 318050
ggcuguguucuccaucuag

SEQ ID NO: 532840 - RNA, 19 nt, Artificial Sequence
  Description of Artificial Sequence: Synthetic oligonucleotide
  Antisense strand to SEQ ID NO: 532839
cuagauggagaacacagcc

SEQ ID NO: 532841 - RNA, 19 nt, Artificial Sequence
  Description of Artificial Sequence: Synthetic oligonucleotide
  Sense strand starting at position 3494 of SEQ ID NO: 318050
uuuaucccggcuuaaauau

SEQ ID NO: 532842 - RNA, 19 nt, Artificial Sequence
  Description of Artificial Sequence: Synthetic oligonucleotide
  Antisense strand to SEQ ID NO: 532841
auauuuaagccgggauaaa

SEQ ID NO: 532843 - RNA, 19 nt, Artificial Sequence
  Description of Artificial Sequence: Synthetic oligonucleotide
  Sense strand starting at position 3509 of SEQ ID NO: 318050
auaugaccucccuggacau

SEQ ID NO: 532844 - RNA, 19 nt, Artificial Sequence
  Description of Artificial Sequence: Synthetic oligonucleotide
  Antisense strand to SEQ ID NO: 532843
auguccagggaggucauau

SEQ ID NO: 532845 - RNA, 19 nt, Artificial Sequence
  Description of Artificial Sequence: Synthetic oligonucleotide
  Sense strand starting at position 3685 of SEQ ID NO: 318050
uauucugguaacggaguua

SEQ ID NO: 532846 - RNA, 19 nt, Artificial Sequence
  Description of Artificial Sequence: Synthetic oligonucleotide
  Antisense strand to SEQ ID NO: 532845
uaacuccguuaccagaaua

SEQ ID NO: 532847 - RNA, 19 nt, Artificial Sequence
  Description of Artificial Sequence: Synthetic oligonucleotide
  Sense strand starting at position 3746 of SEQ ID NO: 318050
gagccagugcucugagaug

SEQ ID NO: 532848 - RNA, 19 nt, Artificial Sequence
  Description of Artificial Sequence: Synthetic oligonucleotide
  Antisense strand to SEQ ID NO: 532847
caucucagagcacuggcuc

SEQ ID NO: 532849 - RNA, 19 nt, Artificial Sequence
  Description of Artificial Sequence: Synthetic oligonucleotide
  Sense strand starting at position 3751 of SEQ ID NO: 318050
agugcucugagauguuaca

SEQ ID NO: 532850 - RNA, 19 nt, Artificial Sequence
  Description of Artificial Sequence: Synthetic oligonucleotide
  Antisense strand to SEQ ID NO: 532849
uguaacaucucagagcacu

SEQ ID NO: 532851 - RNA, 19 nt, Artificial Sequence
  Description of Artificial Sequence: Synthetic oligonucleotide
  Sense strand starting at position 3798 of SEQ ID NO: 318050
uugaauuccauaggaucga

SEQ ID NO: 532852 - RNA, 19 nt, Artificial Sequence
  Description of Artificial Sequence: Synthetic oligonucleotide
  Antisense strand to SEQ ID NO: 532851
ucgauccuauggaauucaa

SEQ ID NO: 532853 - RNA, 19 nt, Artificial Sequence
  Description of Artificial Sequence: Synthetic oligonucleotide
  Sense strand starting at position 3814 of SEQ ID NO: 318050
cgauucugucuccaguaga

SEQ ID NO: 532854 - RNA, 19 nt, Artificial Sequence
  Description of Artificial Sequence: Synthetic oligonucleotide
  Antisense strand to SEQ ID NO: 532853
ucuacuggagacagaaucg

SEQ ID NO: 532855 - RNA, 19 nt, Artificial Sequence
  Description of Artificial Sequence: Synthetic oligonucleotide
  Sense strand starting at position 3817 of SEQ ID NO: 318050
uucugucuccaguagaaua

SEQ ID NO: 532856 - RNA, 19 nt, Artificial Sequence
  Description of Artificial Sequence: Synthetic oligonucleotide
  Antisense strand to SEQ ID NO: 532855
uauucuacuggagacagaa

SEQ ID NO: 532857 - RNA, 19 nt, Artificial Sequence
  Description of Artificial Sequence: Synthetic oligonucleotide
  Sense strand starting at position 3843 of SEQ ID NO: 318050
cagaguuauucugugugag

SEQ ID NO: 532858 - RNA, 19 nt, Artificial Sequence
  Description of Artificial Sequence: Synthetic oligonucleotide
  Antisense strand to SEQ ID NO: 532857
cucacacagaauaacucug

SEQ ID NO: 532859 - RNA, 19 nt, Artificial Sequence
  Description of Artificial Sequence: Synthetic oligonucleotide
  Sense strand starting at position 11 of SEQ ID NO: 318051
ugaaguggcuggucucaga

SEQ ID NO: 532860 - RNA, 19 nt, Artificial Sequence
  Description of Artificial Sequence: Synthetic oligonucleotide
  Antisense strand to SEQ ID NO: 532859
ucugagaccagccacuuca

SEQ ID NO: 532861 - RNA, 19 nt, Artificial Sequence
  Description of Artificial Sequence: Synthetic oligonucleotide
  Sense strand starting at position 58 of SEQ ID NO: 318051
agagaauuguggcccaauu

SEQ ID NO: 532862 - RNA, 19 nt, Artificial Sequence
  Description of Artificial Sequence: Synthetic oligonucleotide
  Antisense strand to SEQ ID NO: 532861
aauugggccacaauucucu

SEQ ID NO: 532863 - RNA, 19 nt, Artificial Sequence
  Description of Artificial Sequence: Synthetic oligonucleotide
  Sense strand starting at position 60 of SEQ ID NO: 318051
agaauuguggcccaauucu

SEQ ID NO: 532864 - RNA, 19 nt, Artificial Sequence
  Description of Artificial Sequence: Synthetic oligonucleotide
  Antisense strand to SEQ ID NO: 532863
agaauugggccacaauucu

SEQ ID NO: 532865 - RNA, 19 nt, Artificial Sequence
  Description of Artificial Sequence: Synthetic oligonucleotide
  Sense strand starting at position 67 of SEQ ID NO: 318051
uggcccaauucugugaaca

SEQ ID NO: 532866 - RNA, 19 nt, Artificial Sequence
  Description of Artificial Sequence: Synthetic oligonucleotide
  Antisense strand to SEQ ID NO: 532865
uguucacagaauugggcca

SEQ ID NO: 532867 - RNA, 19 nt, Artificial Sequence
  Description of Artificial Sequence: Synthetic oligonucleotide
  Sense strand starting at position 68 of SEQ ID NO: 318051
ggcccaauucugugaacac

SEQ ID NO: 532868 - RNA, 19 nt, Artificial Sequence
  Description of Artificial Sequence: Synthetic oligonucleotide
  Antisense strand to SEQ ID NO: 532867
guguucacagaauugggcc

SEQ ID NO: 532869 - RNA, 19 nt, Artificial Sequence
  Description of Artificial Sequence: Synthetic oligonucleotide
  Sense strand starting at position 184 of SEQ ID NO: 318051
aagggaggcucuccuaaca

SEQ ID NO: 532870 - RNA, 19 nt, Artificial Sequence
  Description of Artificial Sequence: Synthetic oligonucleotide
  Antisense strand to SEQ ID NO: 532869
uguuaggagagccucccuu

SEQ ID NO: 532871 - RNA, 19 nt, Artificial Sequence
  Description of Artificial Sequence: Synthetic oligonucleotide
  Sense strand starting at position 273 of SEQ ID NO: 318051
gaaacuacucauggaguug

SEQ ID NO: 532872 - RNA, 19 nt, Artificial Sequence
  Description of Artificial Sequence: Synthetic oligonucleotide
  Antisense strand to SEQ ID NO: 532871
caacuccaugaguaguuuc

SEQ ID NO: 532873 - RNA, 19 nt, Artificial Sequence
  Description of Artificial Sequence: Synthetic oligonucleotide
  Sense strand starting at position 467 of SEQ ID NO: 318051
ggaaauuccuggucagcug

SEQ ID NO: 532874 - RNA, 19 nt, Artificial Sequence
  Description of Artificial Sequence: Synthetic oligonucleotide
  Antisense strand to SEQ ID NO: 532873
cagcugaccaggaauuucc

SEQ ID NO: 532875 - RNA, 19 nt, Artificial Sequence
  Description of Artificial Sequence: Synthetic oligonucleotide
  Sense strand starting at position 492 of SEQ ID NO: 318051
gcagauugauagcucaucu

SEQ ID NO: 532876 - RNA, 19 nt, Artificial Sequence
  Description of Artificial Sequence: Synthetic oligonucleotide
  Antisense strand to SEQ ID NO: 532875
agaugagcuaucaaucugc

SEQ ID NO: 532877 - RNA, 19 nt, Artificial Sequence
  Description of Artificial Sequence: Synthetic oligonucleotide
  Sense strand starting at position 536 of SEQ ID NO: 318051
acacaaaugcguuaucuga

SEQ ID NO: 532878 - RNA, 19 nt, Artificial Sequence
  Description of Artificial Sequence: Synthetic oligonucleotide
  Antisense strand to SEQ ID NO: 532877
ucagauaacgcauuugugu

SEQ ID NO: 532879 - RNA, 19 nt, Artificial Sequence
  Description of Artificial Sequence: Synthetic oligonucleotide
  Sense strand starting at position 538 of SEQ ID NO: 318051
acaaaugcguuaucugauu

SEQ ID NO: 532880 - RNA, 19 nt, Artificial Sequence
  Description of Artificial Sequence: Synthetic oligonucleotide
  Antisense strand to SEQ ID NO: 532879
aaucagauaacgcauuugu

SEQ ID NO: 532881 - RNA, 19 nt, Artificial Sequence
  Description of Artificial Sequence: Synthetic oligonucleotide
  Sense strand starting at position 547 of SEQ ID NO: 318051
uuaucugauuguuucccua

SEQ ID NO: 532882 - RNA, 19 nt, Artificial Sequence
  Description of Artificial Sequence: Synthetic oligonucleotide
  Antisense strand to SEQ ID NO: 532881
uagggaaacaaucagauaa

SEQ ID NO: 532883 - RNA, 19 nt, Artificial Sequence
  Description of Artificial Sequence: Synthetic oligonucleotide
  Sense strand starting at position 1484 of SEQ ID NO: 318051
auucuauaccaguauguuu

SEQ ID NO: 532884 - RNA, 19 nt, Artificial Sequence
  Description of Artificial Sequence: Synthetic oligonucleotide
  Antisense strand to SEQ ID NO: 532883
aaacauacugguauagaau

SEQ ID NO: 532885 - RNA, 19 nt, Artificial Sequence
  Description of Artificial Sequence: Synthetic oligonucleotide
  Sense strand starting at position 1507 of SEQ ID NO: 318051
agacucacuguuuguauca

SEQ ID NO: 532886 - RNA, 19 nt, Artificial Sequence
  Description of Artificial Sequence: Synthetic oligonucleotide
  Antisense strand to SEQ ID NO: 532885
ugauacaaacagugagucu

SEQ ID NO: 532887 - RNA, 19 nt, Artificial Sequence
  Description of Artificial Sequence: Synthetic oligonucleotide
  Sense strand starting at position 1651 of SEQ ID NO: 318051
accauuaugucauuguaaa

SEQ ID NO: 532888 - RNA, 19 nt, Artificial Sequence
  Description of Artificial Sequence: Synthetic oligonucleotide
  Antisense strand to SEQ ID NO: 532887
uuuacaaugacauaauggu

SEQ ID NO: 532889 - RNA, 19 nt, Artificial Sequence
  Description of Artificial Sequence: Synthetic oligonucleotide
  Sense strand starting at position 1652 of SEQ ID NO: 318051
ccauuaugucauuguaaau

SEQ ID NO: 532890 - RNA, 19 nt, Artificial Sequence
  Description of Artificial Sequence: Synthetic oligonucleotide
  Antisense strand to SEQ ID NO: 532889
auuuacaaugacauaaugg

SEQ ID NO: 532891 - RNA, 19 nt, Artificial Sequence
  Description of Artificial Sequence: Synthetic oligonucleotide
  Sense strand starting at position 1664 of SEQ ID NO: 318051
uguaaauauccaugccgag

SEQ ID NO: 532892 - RNA, 19 nt, Artificial Sequence
  Description of Artificial Sequence: Synthetic oligonucleotide
  Antisense strand to SEQ ID NO: 532891
cucggcauggauauuuaca

SEQ ID NO: 532893 - RNA, 19 nt, Artificial Sequence
  Description of Artificial Sequence: Synthetic oligonucleotide
  Sense strand starting at position 1678 of SEQ ID NO: 318051
ccgagacuuacuuguaagu

SEQ ID NO: 532894 - RNA, 19 nt, Artificial Sequence
  Description of Artificial Sequence: Synthetic oligonucleotide
  Antisense strand to SEQ ID NO: 532893
acuuacaaguaagucucgg

SEQ ID NO: 532895 - RNA, 19 nt, Artificial Sequence
  Description of Artificial Sequence: Synthetic oligonucleotide
  Sense strand starting at position 1811 of SEQ ID NO: 318051
cuggguacuucuuccaacu

SEQ ID NO: 532896 - RNA, 19 nt, Artificial Sequence
  Description of Artificial Sequence: Synthetic oligonucleotide
  Antisense strand to SEQ ID NO: 532895
aguuggaagaaguacccag

SEQ ID NO: 532897 - RNA, 19 nt, Artificial Sequence
  Description of Artificial Sequence: Synthetic oligonucleotide
  Sense strand starting at position 1898 of SEQ ID NO: 318051
gauugccagugauucuuau

SEQ ID NO: 532898 - RNA, 19 nt, Artificial Sequence
  Description of Artificial Sequence: Synthetic oligonucleotide
  Antisense strand to SEQ ID NO: 532897
auaagaaucacuggcaauc

SEQ ID NO: 532899 - RNA, 19 nt, Artificial Sequence
  Description of Artificial Sequence: Synthetic oligonucleotide
  Sense strand starting at position 1953 of SEQ ID NO: 318051
accaaaguucucugucaug

SEQ ID NO: 532900 - RNA, 19 nt, Artificial Sequence
  Description of Artificial Sequence: Synthetic oligonucleotide
  Antisense strand to SEQ ID NO: 532899
caugacagagaacuuuggu

SEQ ID NO: 532901 - RNA, 19 nt, Artificial Sequence
  Description of Artificial Sequence: Synthetic oligonucleotide
  Sense strand starting at position 1979 of SEQ ID NO: 318051
acacacauccuguaagugu

SEQ ID NO: 532902 - RNA, 19 nt, Artificial Sequence
  Description of Artificial Sequence: Synthetic oligonucleotide
  Antisense strand to SEQ ID NO: 532901
acacuuacaggaugugugu

SEQ ID NO: 532903 - RNA, 19 nt, Artificial Sequence
  Description of Artificial Sequence: Synthetic oligonucleotide
  Sense strand starting at position 2167 of SEQ ID NO: 318051
augcaucauccauggauuc

SEQ ID NO: 532904 - RNA, 19 nt, Artificial Sequence
  Description of Artificial Sequence: Synthetic oligonucleotide
  Antisense strand to SEQ ID NO: 532903
gaauccauggaugaugcau

SEQ ID NO: 532905 - RNA, 19 nt, Artificial Sequence
  Description of Artificial Sequence: Synthetic oligonucleotide
  Sense strand starting at position 2206 of SEQ ID NO: 318051
ucaucaggccugugaccaa

SEQ ID NO: 532906 - RNA, 19 nt, Artificial Sequence
  Description of Artificial Sequence: Synthetic oligonucleotide
  Antisense strand to SEQ ID NO: 532905
uuggucacaggccugauga

SEQ ID NO: 532907 - RNA, 19 nt, Artificial Sequence
  Description of Artificial Sequence: Synthetic oligonucleotide
  Sense strand starting at position 2370 of SEQ ID NO: 318051
gguuguauccuauaaccuu

SEQ ID NO: 532908 - RNA, 19 nt, Artificial Sequence
  Description of Artificial Sequence: Synthetic oligonucleotide
  Antisense strand to SEQ ID NO: 532907
aagguuauaggauacaacc

SEQ ID NO: 532909 - RNA, 19 nt, Artificial Sequence
  Description of Artificial Sequence: Synthetic oligonucleotide
  Sense strand starting at position 2548 of SEQ ID NO: 318051
cucuacucugaguagaauu

SEQ ID NO: 532910 - RNA, 19 nt, Artificial Sequence
  Description of Artificial Sequence: Synthetic oligonucleotide
  Antisense strand to SEQ ID NO: 532909
aauucuacucagaguagag

SEQ ID NO: 532911 - RNA, 19 nt, Artificial Sequence
  Description of Artificial Sequence: Synthetic oligonucleotide
  Sense strand starting at position 2629 of SEQ ID NO: 318051
agaggcuuuggccaugaau

SEQ ID NO: 532912 - RNA, 19 nt, Artificial Sequence
  Description of Artificial Sequence: Synthetic oligonucleotide
  Antisense strand to SEQ ID NO: 532911
auucauggccaaagccucu

SEQ ID NO: 532913 - RNA, 19 nt, Artificial Sequence
  Description of Artificial Sequence: Synthetic oligonucleotide
  Sense strand starting at position 2631 of SEQ ID NO: 318051
aggcuuuggccaugaauga

SEQ ID NO: 532914 - RNA, 19 nt, Artificial Sequence
  Description of Artificial Sequence: Synthetic oligonucleotide
  Antisense strand to SEQ ID NO: 532913
ucauucauggccaaagccu

SEQ ID NO: 532915 - RNA, 19 nt, Artificial Sequence
  Description of Artificial Sequence: Synthetic oligonucleotide
  Sense strand starting at position 2632 of SEQ ID NO: 318051
ggcuuuggccaugaaugau

SEQ ID NO: 532916 - RNA, 19 nt, Artificial Sequence
  Description of Artificial Sequence: Synthetic oligonucleotide
  Antisense strand to SEQ ID NO: 532915
aucauucauggccaaagcc

SEQ ID NO: 532917 - RNA, 19 nt, Artificial Sequence
  Description of Artificial Sequence: Synthetic oligonucleotide
  Sense strand starting at position 2720 of SEQ ID NO: 318051
cugggagugugaccuuuau

SEQ ID NO: 532918 - RNA, 19 nt, Artificial Sequence
  Description of Artificial Sequence: Synthetic oligonucleotide
  Antisense strand to SEQ ID NO: 532917
auaaaggucacacucccag

SEQ ID NO: 532919 - RNA, 19 nt, Artificial Sequence
  Description of Artificial Sequence: Synthetic oligonucleotide
  Sense strand starting at position 2871 of SEQ ID NO: 318051
cauuaaaugcauuggguau

SEQ ID NO: 532920 - RNA, 19 nt, Artificial Sequence
  Description of Artificial Sequence: Synthetic oligonucleotide
  Antisense strand to SEQ ID NO: 532919
auacccaaugcauuuaaug

SEQ ID NO: 532921 - RNA, 19 nt, Artificial Sequence
  Description of Artificial Sequence: Synthetic oligonucleotide
  Sense strand starting at position 2884 of SEQ ID NO: 318051
ggguauaaauaccaaauuu

SEQ ID NO: 532922 - RNA, 19 nt, Artificial Sequence
  Description of Artificial Sequence: Synthetic oligonucleotide
  Antisense strand to SEQ ID NO: 532921
aaauuugguauuuauaccc

SEQ ID NO: 532923 - RNA, 19 nt, Artificial Sequence
  Description of Artificial Sequence: Synthetic oligonucleotide
  Sense strand starting at position 2954 of SEQ ID NO: 318051
guguacuucccauagcauu

SEQ ID NO: 532924 - RNA, 19 nt, Artificial Sequence
  Description of Artificial Sequence: Synthetic oligonucleotide
  Antisense strand to SEQ ID NO: 532923
aaugcuaugggaaguacac

SEQ ID NO: 532925 - RNA, 19 nt, Artificial Sequence
  Description of Artificial Sequence: Synthetic oligonucleotide
  Sense strand starting at position 2978 of SEQ ID NO: 318051
guggcaguuacucaagaga

SEQ ID NO: 532926 - RNA, 19 nt, Artificial Sequence
  Description of Artificial Sequence: Synthetic oligonucleotide
  Antisense strand to SEQ ID NO: 532925
ucucuugaguaacugccac

SEQ ID NO: 532927 - RNA, 19 nt, Artificial Sequence
  Description of Artificial Sequence: Synthetic oligonucleotide
  Sense strand starting at position 2981 of SEQ ID NO: 318051
gcaguuacucaagagauca

SEQ ID NO: 532928 - RNA, 19 nt, Artificial Sequence
  Description of Artificial Sequence: Synthetic oligonucleotide
  Antisense strand to SEQ ID NO: 532927
ugaucucuugaguaacugc

SEQ ID NO: 532929 - RNA, 19 nt, Artificial Sequence
  Description of Artificial Sequence: Synthetic oligonucleotide
  Sense strand starting at position 3382 of SEQ ID NO: 318051
ugccgaaaggcacaugauu

SEQ ID NO: 532930 - RNA, 19 nt, Artificial Sequence
  Description of Artificial Sequence: Synthetic oligonucleotide
  Antisense strand to SEQ ID NO: 532929
aaucaugugccuuucggca

SEQ ID NO: 532931 - RNA, 19 nt, Artificial Sequence
  Description of Artificial Sequence: Synthetic oligonucleotide
  Sense strand starting at position 3389 of SEQ ID NO: 318051
aggcacaugauuggugauu

SEQ ID NO: 532932 - RNA, 19 nt, Artificial Sequence
  Description of Artificial Sequence: Synthetic oligonucleotide
  Antisense strand to SEQ ID NO: 532931
aaucaccaaucaugugccu

SEQ ID NO: 532933 - RNA, 19 nt, Artificial Sequence
  Description of Artificial Sequence: Synthetic oligonucleotide
  Sense strand starting at position 3404 of SEQ ID NO: 318051
gauuuagaaugagagcaua

SEQ ID NO: 532934 - RNA, 19 nt, Artificial Sequence
  Description of Artificial Sequence: Synthetic oligonucleotide
  Antisense strand to SEQ ID NO: 532933
uaugcucucauucuaaauc

SEQ ID NO: 532935 - RNA, 19 nt, Artificial Sequence
  Description of Artificial Sequence: Synthetic oligonucleotide
  Sense strand starting at position 3475 of SEQ ID NO: 318051
auguuugucuucccacaua

SEQ ID NO: 532936 - RNA, 19 nt, Artificial Sequence
  Description of Artificial Sequence: Synthetic oligonucleotide
  Antisense strand to SEQ ID NO: 532935
uaugugggaagacaaacau

SEQ ID NO: 532937 - RNA, 19 nt, Artificial Sequence
  Description of Artificial Sequence: Synthetic oligonucleotide
  Sense strand starting at position 3571 of SEQ ID NO: 318051
gcagcaugaacuuggucaa

SEQ ID NO: 532938 - RNA, 19 nt, Artificial Sequence
  Description of Artificial Sequence: Synthetic oligonucleotide
  Antisense strand to SEQ ID NO: 532937
uugaccaaguucaugcugc

SEQ ID NO: 532939 - RNA, 19 nt, Artificial Sequence
  Description of Artificial Sequence: Synthetic oligonucleotide
  Sense strand starting at position 67 of SEQ ID NO: 318052
cagagcucagaaggugaua

SEQ ID NO: 532940 - RNA, 19 nt, Artificial Sequence
  Description of Artificial Sequence: Synthetic oligonucleotide
  Antisense strand to SEQ ID NO: 532939
uaucaccuucugagcucug

SEQ ID NO: 532941 - RNA, 19 nt, Artificial Sequence
  Description of Artificial Sequence: Synthetic oligonucleotide
  Sense strand starting at position 79 of SEQ ID NO: 318052
ggugauacagguggucaga

SEQ ID NO: 532942 - RNA, 19 nt, Artificial Sequence
  Description of Artificial Sequence: Synthetic oligonucleotide
  Antisense strand to SEQ ID NO: 532941
ucugaccaccuguaucacc

SEQ ID NO: 532943 - RNA, 19 nt, Artificial Sequence
  Description of Artificial Sequence: Synthetic oligonucleotide
  Sense strand starting at position 217 of SEQ ID NO: 318052
caggucugcagagguaaga

SEQ ID NO: 532944 - RNA, 19 nt, Artificial Sequence
  Description of Artificial Sequence: Synthetic oligonucleotide
  Antisense strand to SEQ ID NO: 532943
ucuuaccucugcagaccug

SEQ ID NO: 532945 - RNA, 19 nt, Artificial Sequence
  Description of Artificial Sequence: Synthetic oligonucleotide
  Sense strand starting at position 393 of SEQ ID NO: 318052
uuuggaguaugugcuugau

SEQ ID NO: 532946 - RNA, 19 nt, Artificial Sequence
  Description of Artificial Sequence: Synthetic oligonucleotide
  Antisense strand to SEQ ID NO: 532945
aucaagcacauacuccaaa

SEQ ID NO: 532947 - RNA, 19 nt, Artificial Sequence
  Description of Artificial Sequence: Synthetic oligonucleotide
  Sense strand starting at position 395 of SEQ ID NO: 318052
uggaguaugugcuugauuu

SEQ ID NO: 532948 - RNA, 19 nt, Artificial Sequence
  Description of Artificial Sequence: Synthetic oligonucleotide
  Antisense strand to SEQ ID NO: 532947
aaaucaagcacauacucca

SEQ ID NO: 532949 - RNA, 19 nt, Artificial Sequence
  Description of Artificial Sequence: Synthetic oligonucleotide
  Sense strand starting at position 396 of SEQ ID NO: 318052
ggaguaugugcuugauuua

SEQ ID NO: 532950 - RNA, 19 nt, Artificial Sequence
  Description of Artificial Sequence: Synthetic oligonucleotide
  Antisense strand to SEQ ID NO: 532949
uaaaucaagcacauacucc

SEQ ID NO: 532951 - RNA, 19 nt, Artificial Sequence
  Description of Artificial Sequence: Synthetic oligonucleotide
  Sense strand starting at position 399 of SEQ ID NO: 318052
guaugugcuugauuuauac

SEQ ID NO: 532952 - RNA, 19 nt, Artificial Sequence
  Description of Artificial Sequence: Synthetic oligonucleotide
  Antisense strand to SEQ ID NO: 532951
guauaaaucaagcacauac

SEQ ID NO: 532953 - RNA, 19 nt, Artificial Sequence
  Description of Artificial Sequence: Synthetic oligonucleotide
  Sense strand starting at position 403 of SEQ ID NO: 318052
gugcuugauuuauacaaag

SEQ ID NO: 532954 - RNA, 19 nt, Artificial Sequence
  Description of Artificial Sequence: Synthetic oligonucleotide
  Antisense strand to SEQ ID NO: 532953
cuuuguauaaaucaagcac

SEQ ID NO: 532955 - RNA, 19 nt, Artificial Sequence
  Description of Artificial Sequence: Synthetic oligonucleotide
  Sense strand starting at position 437 of SEQ ID NO: 318052
aggaaagcuccugggaaug

SEQ ID NO: 532956 - RNA, 19 nt, Artificial Sequence
  Description of Artificial Sequence: Synthetic oligonucleotide
  Antisense strand to SEQ ID NO: 532955
cauucccaggagcuuuccu

SEQ ID NO: 532957 - RNA, 19 nt, Artificial Sequence
  Description of Artificial Sequence: Synthetic oligonucleotide
  Sense strand starting at position 497 of SEQ ID NO: 318052
ugggcaucuguccaaccaa

SEQ ID NO: 532958 - RNA, 19 nt, Artificial Sequence
  Description of Artificial Sequence: Synthetic oligonucleotide
  Antisense strand to SEQ ID NO: 532957
uugguuggacagaugccca

SEQ ID NO: 532959 - RNA, 19 nt, Artificial Sequence
  Description of Artificial Sequence: Synthetic oligonucleotide
  Sense strand starting at position 518 of SEQ ID NO: 318052
auagucauuccaggguaca

SEQ ID NO: 532960 - RNA, 19 nt, Artificial Sequence
  Description of Artificial Sequence: Synthetic oligonucleotide
  Antisense strand to SEQ ID NO: 532959
uguacccuggaaugacuau

SEQ ID NO: 532961 - RNA, 19 nt, Artificial Sequence
  Description of Artificial Sequence: Synthetic oligonucleotide
  Sense strand starting at position 519 of SEQ ID NO: 318052
uagucauuccaggguacag

SEQ ID NO: 532962 - RNA, 19 nt, Artificial Sequence
  Description of Artificial Sequence: Synthetic oligonucleotide
  Antisense strand to SEQ ID NO: 532961
cuguacccuggaaugacua

SEQ ID NO: 532963 - RNA, 19 nt, Artificial Sequence
  Description of Artificial Sequence: Synthetic oligonucleotide
  Sense strand starting at position 547 of SEQ ID NO: 318052
cuugcucuacucuggauaa

SEQ ID NO: 532964 - RNA, 19 nt, Artificial Sequence
  Description of Artificial Sequence: Synthetic oligonucleotide
  Antisense strand to SEQ ID NO: 532963
uuauccagaguagagcaag

SEQ ID NO: 532965 - RNA, 19 nt, Artificial Sequence
  Description of Artificial Sequence: Synthetic oligonucleotide
  Sense strand starting at position 549 of SEQ ID NO: 318052
ugcucuacucuggauaauc

SEQ ID NO: 532966 - RNA, 19 nt, Artificial Sequence
  Description of Artificial Sequence: Synthetic oligonucleotide
  Antisense strand to SEQ ID NO: 532965
gauuauccagaguagagca

SEQ ID NO: 532967 - RNA, 19 nt, Artificial Sequence
  Description of Artificial Sequence: Synthetic oligonucleotide
  Sense strand starting at position 559 of SEQ ID NO: 318052
uggauaaucuccucagguu

SEQ ID NO: 532968 - RNA, 19 nt, Artificial Sequence
  Description of Artificial Sequence: Synthetic oligonucleotide
  Antisense strand to SEQ ID NO: 532967
aaccugaggagauuaucca

SEQ ID NO: 532969 - RNA, 19 nt, Artificial Sequence
  Description of Artificial Sequence: Synthetic oligonucleotide
  Sense strand starting at position 560 of SEQ ID NO: 318052
ggauaaucuccucagguuu

SEQ ID NO: 532970 - RNA, 19 nt, Artificial Sequence
  Description of Artificial Sequence: Synthetic oligonucleotide
  Antisense strand to SEQ ID NO: 532969
aaaccugaggagauuaucc

SEQ ID NO: 532971 - RNA, 19 nt, Artificial Sequence
  Description of Artificial Sequence: Synthetic oligonucleotide
  Sense strand starting at position 676 of SEQ ID NO: 318052
uuuggagucuccucaggaa

SEQ ID NO: 532972 - RNA, 19 nt, Artificial Sequence
  Description of Artificial Sequence: Synthetic oligonucleotide
  Antisense strand to SEQ ID NO: 532971
uuccugaggagacuccaaa

SEQ ID NO: 532973 - RNA, 19 nt, Artificial Sequence
  Description of Artificial Sequence: Synthetic oligonucleotide
  Sense strand starting at position 680 of SEQ ID NO: 318052
gagucuccucaggaaugca

SEQ ID NO: 532974 - RNA, 19 nt, Artificial Sequence
  Description of Artificial Sequence: Synthetic oligonucleotide
  Antisense strand to SEQ ID NO: 532973
ugcauuccugaggagacuc

SEQ ID NO: 532975 - RNA, 19 nt, Artificial Sequence
  Description of Artificial Sequence: Synthetic oligonucleotide
  Sense strand starting at position 693 of SEQ ID NO: 318052
aaugcaaggugcucaguaa

SEQ ID NO: 532976 - RNA, 19 nt, Artificial Sequence
  Description of Artificial Sequence: Synthetic oligonucleotide
  Antisense strand to SEQ ID NO: 532975
uuacugagcaccuugcauu

SEQ ID NO: 532977 - RNA, 19 nt, Artificial Sequence
  Description of Artificial Sequence: Synthetic oligonucleotide
  Sense strand starting at position 768 of SEQ ID NO: 318052
gggcucagugcucaccauu

SEQ ID NO: 532978 - RNA, 19 nt, Artificial Sequence
  Description of Artificial Sequence: Synthetic oligonucleotide
  Antisense strand to SEQ ID NO: 532977
aauggugagcacugagccc

SEQ ID NO: 532979 - RNA, 19 nt, Artificial Sequence
  Description of Artificial Sequence: Synthetic oligonucleotide
  Sense strand starting at position 873 of SEQ ID NO: 318052
gcacacuuucuagagaugu

SEQ ID NO: 532980 - RNA, 19 nt, Artificial Sequence
  Description of Artificial Sequence: Synthetic oligonucleotide
  Antisense strand to SEQ ID NO: 532979
acaucucuagaaagugugc

SEQ ID NO: 532981 - RNA, 19 nt, Artificial Sequence
  Description of Artificial Sequence: Synthetic oligonucleotide
  Sense strand starting at position 883 of SEQ ID NO: 318052
uagagaugugccugggcau

SEQ ID NO: 532982 - RNA, 19 nt, Artificial Sequence
  Description of Artificial Sequence: Synthetic oligonucleotide
  Antisense strand to SEQ ID NO: 532981
augcccaggcacaucucua

SEQ ID NO: 532983 - RNA, 19 nt, Artificial Sequence
  Description of Artificial Sequence: Synthetic oligonucleotide
  Sense strand starting at position 933 of SEQ ID NO: 318052
auagucauuugauauggga

SEQ ID NO: 532984 - RNA, 19 nt, Artificial Sequence
  Description of Artificial Sequence: Synthetic oligonucleotide
  Antisense strand to SEQ ID NO: 532983
ucccauaucaaaugacuau

SEQ ID NO: 532985 - RNA, 19 nt, Artificial Sequence
  Description of Artificial Sequence: Synthetic oligonucleotide
  Sense strand starting at position 976 of SEQ ID NO: 318052
auaguagcucuagggaaag

SEQ ID NO: 532986 - RNA, 19 nt, Artificial Sequence
  Description of Artificial Sequence: Synthetic oligonucleotide
  Antisense strand to SEQ ID NO: 532985
cuuucccuagagcuacuau

SEQ ID NO: 532987 - RNA, 19 nt, Artificial Sequence
  Description of Artificial Sequence: Synthetic oligonucleotide
  Sense strand starting at position 1192 of SEQ ID NO: 318052
cgagguucuccaugaauac

SEQ ID NO: 532988 - RNA, 19 nt, Artificial Sequence
  Description of Artificial Sequence: Synthetic oligonucleotide
  Antisense strand to SEQ ID NO: 532987
guauucauggagaaccucg

SEQ ID NO: 532989 - RNA, 19 nt, Artificial Sequence
  Description of Artificial Sequence: Synthetic oligonucleotide
  Sense strand starting at position 1245 of SEQ ID NO: 318052
cuuggaucugcuuauucuu

SEQ ID NO: 532990 - RNA, 19 nt, Artificial Sequence
  Description of Artificial Sequence: Synthetic oligonucleotide
  Antisense strand to SEQ ID NO: 532989
aagaauaagcagauccaag

SEQ ID NO: 532991 - RNA, 19 nt, Artificial Sequence
  Description of Artificial Sequence: Synthetic oligonucleotide
  Sense strand starting at position 1898 of SEQ ID NO: 318052
gugucuugucuugcucacu

SEQ ID NO: 532992 - RNA, 19 nt, Artificial Sequence
  Description of Artificial Sequence: Synthetic oligonucleotide
  Antisense strand to SEQ ID NO: 532991
agugagcaagacaagacac

SEQ ID NO: 532993 - RNA, 19 nt, Artificial Sequence
  Description of Artificial Sequence: Synthetic oligonucleotide
  Sense strand starting at position 2377 of SEQ ID NO: 318052
ccugucacccucuaaguuu

SEQ ID NO: 532994 - RNA, 19 nt, Artificial Sequence
  Description of Artificial Sequence: Synthetic oligonucleotide
  Antisense strand to SEQ ID NO: 532993
aaacuuagagggugacagg

SEQ ID NO: 532995 - RNA, 19 nt, Artificial Sequence
  Description of Artificial Sequence: Synthetic oligonucleotide
  Sense strand starting at position 2556 of SEQ ID NO: 318052
ggaaguuaguacucucuua

SEQ ID NO: 532996 - RNA, 19 nt, Artificial Sequence
  Description of Artificial Sequence: Synthetic oligonucleotide
  Antisense strand to SEQ ID NO: 532995
uaagagaguacuaacuucc

SEQ ID NO: 532997 - RNA, 19 nt, Artificial Sequence
  Description of Artificial Sequence: Synthetic oligonucleotide
  Sense strand starting at position 2623 of SEQ ID NO: 318052
uuugaacuauggguuguaa

SEQ ID NO: 532998 - RNA, 19 nt, Artificial Sequence
  Description of Artificial Sequence: Synthetic oligonucleotide
  Antisense strand to SEQ ID NO: 532997
uuacaacccauaguucaaa

SEQ ID NO: 532999 - RNA, 19 nt, Artificial Sequence
  Description of Artificial Sequence: Synthetic oligonucleotide
  Sense strand starting at position 2625 of SEQ ID NO: 318052
ugaacuauggguuguaauu

SEQ ID NO: 533000 - RNA, 19 nt, Artificial Sequence
  Description of Artificial Sequence: Synthetic oligonucleotide
  Antisense strand to SEQ ID NO: 532999
aauuacaacccauaguuca

SEQ ID NO: 533001 - RNA, 19 nt, Artificial Sequence
  Description of Artificial Sequence: Synthetic oligonucleotide
  Sense strand starting at position 2636 of SEQ ID NO: 318052
uuguaauucccaggcuucu

SEQ ID NO: 533002 - RNA, 19 nt, Artificial Sequence
  Description of Artificial Sequence: Synthetic oligonucleotide
  Antisense strand to SEQ ID NO: 533001
agaagccugggaauuacaa

SEQ ID NO: 533003 - RNA, 19 nt, Artificial Sequence
  Description of Artificial Sequence: Synthetic oligonucleotide
  Sense strand starting at position 2649 of SEQ ID NO: 318052
gcuucugagauuggagaga

SEQ ID NO: 533004 - RNA, 19 nt, Artificial Sequence
  Description of Artificial Sequence: Synthetic oligonucleotide
  Antisense strand to SEQ ID NO: 533003
ucucuccaaucucagaagc

SEQ ID NO: 533005 - RNA, 19 nt, Artificial Sequence
  Description of Artificial Sequence: Synthetic oligonucleotide
  Sense strand starting at position 2794 of SEQ ID NO: 318052
cuagguguuucucuuccaa

SEQ ID NO: 533006 - RNA, 19 nt, Artificial Sequence
  Description of Artificial Sequence: Synthetic oligonucleotide
  Antisense strand to SEQ ID NO: 533005
uuggaagagaaacaccuag

SEQ ID NO: 533007 - RNA, 19 nt, Artificial Sequence
  Description of Artificial Sequence: Synthetic oligonucleotide
  Sense strand starting at position 2860 of SEQ ID NO: 318052
agaaaugagugucucagua

SEQ ID NO: 533008 - RNA, 19 nt, Artificial Sequence
  Description of Artificial Sequence: Synthetic oligonucleotide
  Antisense strand to SEQ ID NO: 533007
uacugagacacucauuucu

SEQ ID NO: 533009 - RNA, 19 nt, Artificial Sequence
  Description of Artificial Sequence: Synthetic oligonucleotide
  Sense strand starting at position 2864 of SEQ ID NO: 318052
augagugucucaguaggua

SEQ ID NO: 533010 - RNA, 19 nt, Artificial Sequence
  Description of Artificial Sequence: Synthetic oligonucleotide
  Antisense strand to SEQ ID NO: 533009
uaccuacugagacacucau

SEQ ID NO: 533011 - RNA, 19 nt, Artificial Sequence
  Description of Artificial Sequence: Synthetic oligonucleotide
  Sense strand starting at position 2906 of SEQ ID NO: 318052
gggagagaguuguuugaca

SEQ ID NO: 533012 - RNA, 19 nt, Artificial Sequence
  Description of Artificial Sequence: Synthetic oligonucleotide
  Antisense strand to SEQ ID NO: 533011
ugucaaacaacucucuccc

SEQ ID NO: 533013 - RNA, 19 nt, Artificial Sequence
  Description of Artificial Sequence: Synthetic oligonucleotide
  Sense strand starting at position 2908 of SEQ ID NO: 318052
gagagaguuguuugacaca

SEQ ID NO: 533014 - RNA, 19 nt, Artificial Sequence
  Description of Artificial Sequence: Synthetic oligonucleotide
  Antisense strand to SEQ ID NO: 533013
ugugucaaacaacucucuc

SEQ ID NO: 533015 - RNA, 19 nt, Artificial Sequence
  Description of Artificial Sequence: Synthetic oligonucleotide
  Sense strand starting at position 2948 of SEQ ID NO: 318052
cccugaaauugugccagau

SEQ ID NO: 533016 - RNA, 19 nt, Artificial Sequence
  Description of Artificial Sequence: Synthetic oligonucleotide
  Antisense strand to SEQ ID NO: 533015
aucuggcacaauuucaggg

SEQ ID NO: 533017 - RNA, 19 nt, Artificial Sequence
  Description of Artificial Sequence: Synthetic oligonucleotide
  Sense strand starting at position 2978 of SEQ ID NO: 318052
cggauucugccugugugua

SEQ ID NO: 533018 - RNA, 19 nt, Artificial Sequence
  Description of Artificial Sequence: Synthetic oligonucleotide
  Antisense strand to SEQ ID NO: 533017
uacacacaggcagaauccg

SEQ ID NO: 533019 - RNA, 19 nt, Artificial Sequence
  Description of Artificial Sequence: Synthetic oligonucleotide
  Sense strand starting at position 115 of SEQ ID NO: 318053
cuauaaacgucauuagguu

SEQ ID NO: 533020 - RNA, 19 nt, Artificial Sequence
  Description of Artificial Sequence: Synthetic oligonucleotide
  Antisense strand to SEQ ID NO: 533019
aaccuaaugacguuuauag

SEQ ID NO: 533021 - RNA, 19 nt, Artificial Sequence
  Description of Artificial Sequence: Synthetic oligonucleotide
  Sense strand starting at position 116 of SEQ ID NO: 318053
uauaaacgucauuagguuu

SEQ ID NO: 533022 - RNA, 19 nt, Artificial Sequence
  Description of Artificial Sequence: Synthetic oligonucleotide
  Antisense strand to SEQ ID NO: 533021
aaaccuaaugacguuuaua

SEQ ID NO: 533023 - RNA, 19 nt, Artificial Sequence
  Description of Artificial Sequence: Synthetic oligonucleotide
  Sense strand starting at position 363 of SEQ ID NO: 318053
cauguaguuggugacaauu

SEQ ID NO: 533024 - RNA, 19 nt, Artificial Sequence
  Description of Artificial Sequence: Synthetic oligonucleotide
  Antisense strand to SEQ ID NO: 533023
aauugucaccaacuacaug

SEQ ID NO: 533025 - RNA, 19 nt, Artificial Sequence
  Description of Artificial Sequence: Synthetic oligonucleotide
  Sense strand starting at position 516 of SEQ ID NO: 318053
auaucacccugaguuauua

SEQ ID NO: 533026 - RNA, 19 nt, Artificial Sequence
  Description of Artificial Sequence: Synthetic oligonucleotide
  Antisense strand to SEQ ID NO: 533025
uaauaacucagggugauau

SEQ ID NO: 533027 - RNA, 19 nt, Artificial Sequence
  Description of Artificial Sequence: Synthetic oligonucleotide
  Sense strand starting at position 528 of SEQ ID NO: 318053
guuauuaggaguuacuagu

SEQ ID NO: 533028 - RNA, 19 nt, Artificial Sequence
  Description of Artificial Sequence: Synthetic oligonucleotide
  Antisense strand to SEQ ID NO: 533027
acuaguaacuccuaauaac

SEQ ID NO: 533029 - RNA, 19 nt, Artificial Sequence
  Description of Artificial Sequence: Synthetic oligonucleotide
  Sense strand starting at position 534 of SEQ ID NO: 318053
aggaguuacuaguucugga

SEQ ID NO: 533030 - RNA, 19 nt, Artificial Sequence
  Description of Artificial Sequence: Synthetic oligonucleotide
  Antisense strand to SEQ ID NO: 533029
uccagaacuaguaacuccu

SEQ ID NO: 533031 - RNA, 19 nt, Artificial Sequence
  Description of Artificial Sequence: Synthetic oligonucleotide
  Sense strand starting at position 667 of SEQ ID NO: 318053
acgaauacuugagcgacaa

SEQ ID NO: 533032 - RNA, 19 nt, Artificial Sequence
  Description of Artificial Sequence: Synthetic oligonucleotide
  Antisense strand to SEQ ID NO: 533031
uugucgcucaaguauucgu

SEQ ID NO: 533033 - RNA, 19 nt, Artificial Sequence
  Description of Artificial Sequence: Synthetic oligonucleotide
  Sense strand starting at position 668 of SEQ ID NO: 318053
cgaauacuugagcgacaag

SEQ ID NO: 533034 - RNA, 19 nt, Artificial Sequence
  Description of Artificial Sequence: Synthetic oligonucleotide
  Antisense strand to SEQ ID NO: 533033
cuugucgcucaaguauucg

SEQ ID NO: 533035 - RNA, 19 nt, Artificial Sequence
  Description of Artificial Sequence: Synthetic oligonucleotide
  Sense strand starting at position 671 of SEQ ID NO: 318053
auacuugagcgacaaguaa

SEQ ID NO: 533036 - RNA, 19 nt, Artificial Sequence
  Description of Artificial Sequence: Synthetic oligonucleotide
  Antisense strand to SEQ ID NO: 533035
uuacuugucgcucaaguau

SEQ ID NO: 533037 - RNA, 19 nt, Artificial Sequence
  Description of Artificial Sequence: Synthetic oligonucleotide
  Sense strand starting at position 800 of SEQ ID NO: 318053
ugcagucaaggucaagaaa

SEQ ID NO: 533038 - RNA, 19 nt, Artificial Sequence
  Description of Artificial Sequence: Synthetic oligonucleotide
  Antisense strand to SEQ ID NO: 533037
uuucuugaccuugacugca

SEQ ID NO: 533039 - RNA, 19 nt, Artificial Sequence
  Description of Artificial Sequence: Synthetic oligonucleotide
  Sense strand starting at position 987 of SEQ ID NO: 318053
gcuguuucugaguaaacac

SEQ ID NO: 533040 - RNA, 19 nt, Artificial Sequence
  Description of Artificial Sequence: Synthetic oligonucleotide
  Antisense strand to SEQ ID NO: 533039
guguuuacucagaaacagc

SEQ ID NO: 533041 - RNA, 19 nt, Artificial Sequence
  Description of Artificial Sequence: Synthetic oligonucleotide
  Sense strand starting at position 1549 of SEQ ID NO: 318053
accugaaaucacuguaagg

SEQ ID NO: 533042 - RNA, 19 nt, Artificial Sequence
  Description of Artificial Sequence: Synthetic oligonucleotide
  Antisense strand to SEQ ID NO: 533041
ccuuacagugauuucaggu

SEQ ID NO: 533043 - RNA, 19 nt, Artificial Sequence
  Description of Artificial Sequence: Synthetic oligonucleotide
  Sense strand starting at position 1558 of SEQ ID NO: 318053
cacuguaaggguggauaau

SEQ ID NO: 533044 - RNA, 19 nt, Artificial Sequence
  Description of Artificial Sequence: Synthetic oligonucleotide
  Antisense strand to SEQ ID NO: 533043
auuauccacccuuacagug

SEQ ID NO: 533045 - RNA, 19 nt, Artificial Sequence
  Description of Artificial Sequence: Synthetic oligonucleotide
  Sense strand starting at position 1568 of SEQ ID NO: 318053
guggauaauccagaagccu

SEQ ID NO: 533046 - RNA, 19 nt, Artificial Sequence
  Description of Artificial Sequence: Synthetic oligonucleotide
  Antisense strand to SEQ ID NO: 533045
aggcuucuggauuauccac

SEQ ID NO: 533047 - RNA, 19 nt, Artificial Sequence
  Description of Artificial Sequence: Synthetic oligonucleotide
  Sense strand starting at position 1681 of SEQ ID NO: 318053
ugaacugccucugcaugaa

SEQ ID NO: 533048 - RNA, 19 nt, Artificial Sequence
  Description of Artificial Sequence: Synthetic oligonucleotide
  Antisense strand to SEQ ID NO: 533047
uucaugcagaggcaguuca

SEQ ID NO: 533049 - RNA, 19 nt, Artificial Sequence
  Description of Artificial Sequence: Synthetic oligonucleotide
  Sense strand starting at position 1935 of SEQ ID NO: 318053
cggcuguuagacgaagagu

SEQ ID NO: 533050 - RNA, 19 nt, Artificial Sequence
  Description of Artificial Sequence: Synthetic oligonucleotide
  Antisense strand to SEQ ID NO: 533049
acucuucgucuaacagccg

SEQ ID NO: 533051 - RNA, 19 nt, Artificial Sequence
  Description of Artificial Sequence: Synthetic oligonucleotide
  Sense strand starting at position 2421 of SEQ ID NO: 318053
uggagaaggacucggugua

SEQ ID NO: 533052 - RNA, 19 nt, Artificial Sequence
  Description of Artificial Sequence: Synthetic oligonucleotide
  Antisense strand to SEQ ID NO: 533051
uacaccgaguccuucucca

SEQ ID NO: 533053 - RNA, 19 nt, Artificial Sequence
  Description of Artificial Sequence: Synthetic oligonucleotide
  Sense strand starting at position 2422 of SEQ ID NO: 318053
ggagaaggacucgguguau

SEQ ID NO: 533054 - RNA, 19 nt, Artificial Sequence
  Description of Artificial Sequence: Synthetic oligonucleotide
  Antisense strand to SEQ ID NO: 533053
auacaccgaguccuucucc

SEQ ID NO: 533055 - RNA, 19 nt, Artificial Sequence
  Description of Artificial Sequence: Synthetic oligonucleotide
  Sense strand starting at position 2426 of SEQ ID NO: 318053
aaggacucgguguauguuu

SEQ ID NO: 533056 - RNA, 19 nt, Artificial Sequence
  Description of Artificial Sequence: Synthetic oligonucleotide
  Antisense strand to SEQ ID NO: 533055
aaacauacaccgaguccuu

SEQ ID NO: 533057 - RNA, 19 nt, Artificial Sequence
  Description of Artificial Sequence: Synthetic oligonucleotide
  Sense strand starting at position 2437 of SEQ ID NO: 318053
guauguuugcaugaaagac

SEQ ID NO: 533058 - RNA, 19 nt, Artificial Sequence
  Description of Artificial Sequence: Synthetic oligonucleotide
  Antisense strand to SEQ ID NO: 533057
gucuuucaugcaaacauac

SEQ ID NO: 533059 - RNA, 19 nt, Artificial Sequence
  Description of Artificial Sequence: Synthetic oligonucleotide
  Sense strand starting at position 2529 of SEQ ID NO: 318053
ucaugaagacauugucuga

SEQ ID NO: 533060 - RNA, 19 nt, Artificial Sequence
  Description of Artificial Sequence: Synthetic oligonucleotide
  Antisense strand to SEQ ID NO: 533059
ucagacaaugucuucauga

SEQ ID NO: 533061 - RNA, 19 nt, Artificial Sequence
  Description of Artificial Sequence: Synthetic oligonucleotide
  Sense strand starting at position 2555 of SEQ ID NO: 318053
uuugaauaacguuacagau

SEQ ID NO: 533062 - RNA, 19 nt, Artificial Sequence
  Description of Artificial Sequence: Synthetic oligonucleotide
  Antisense strand to SEQ ID NO: 533061
aucuguaacguuauucaaa

SEQ ID NO: 533063 - RNA, 19 nt, Artificial Sequence
  Description of Artificial Sequence: Synthetic oligonucleotide
  Sense strand starting at position 2584 of SEQ ID NO: 318053
ggacaagcugacuaugcau

SEQ ID NO: 533064 - RNA, 19 nt, Artificial Sequence
  Description of Artificial Sequence: Synthetic oligonucleotide
  Antisense strand to SEQ ID NO: 533063
augcauagucagcuugucc

SEQ ID NO: 533065 - RNA, 19 nt, Artificial Sequence
  Description of Artificial Sequence: Synthetic oligonucleotide
  Sense strand starting at position 2638 of SEQ ID NO: 318053
gaaaguaaaguuugacaau

SEQ ID NO: 533066 - RNA, 19 nt, Artificial Sequence
  Description of Artificial Sequence: Synthetic oligonucleotide
  Antisense strand to SEQ ID NO: 533065
auugucaaacuuuacuuuc

SEQ ID NO: 533067 - RNA, 19 nt, Artificial Sequence
  Description of Artificial Sequence: Synthetic oligonucleotide
  Sense strand starting at position 2709 of SEQ ID NO: 318053
gcguguguacuagaaagag

SEQ ID NO: 533068 - RNA, 19 nt, Artificial Sequence
  Description of Artificial Sequence: Synthetic oligonucleotide
  Antisense strand to SEQ ID NO: 533067
cucuuucuaguacacacgc

SEQ ID NO: 533069 - RNA, 19 nt, Artificial Sequence
  Description of Artificial Sequence: Synthetic oligonucleotide
  Sense strand starting at position 2754 of SEQ ID NO: 318053
uguguaauccuagguaacc

SEQ ID NO: 533070 - RNA, 19 nt, Artificial Sequence
  Description of Artificial Sequence: Synthetic oligonucleotide
  Antisense strand to SEQ ID NO: 533069
gguuaccuaggauuacaca

SEQ ID NO: 533071 - RNA, 19 nt, Artificial Sequence
  Description of Artificial Sequence: Synthetic oligonucleotide
  Sense strand starting at position 2755 of SEQ ID NO: 318053
guguaauccuagguaacca

SEQ ID NO: 533072 - RNA, 19 nt, Artificial Sequence
  Description of Artificial Sequence: Synthetic oligonucleotide
  Antisense strand to SEQ ID NO: 533071
ugguuaccuaggauuacac

SEQ ID NO: 533073 - RNA, 19 nt, Artificial Sequence
  Description of Artificial Sequence: Synthetic oligonucleotide
  Sense strand starting at position 3084 of SEQ ID NO: 318053
uggaaucucucgucagaau

SEQ ID NO: 533074 - RNA, 19 nt, Artificial Sequence
  Description of Artificial Sequence: Synthetic oligonucleotide
  Antisense strand to SEQ ID NO: 533073
auucugacgagagauucca

SEQ ID NO: 533075 - RNA, 19 nt, Artificial Sequence
  Description of Artificial Sequence: Synthetic oligonucleotide
  Sense strand starting at position 3085 of SEQ ID NO: 318053
ggaaucucucgucagaaug

SEQ ID NO: 533076 - RNA, 19 nt, Artificial Sequence
  Description of Artificial Sequence: Synthetic oligonucleotide
  Antisense strand to SEQ ID NO: 533075
cauucugacgagagauucc

SEQ ID NO: 533077 - RNA, 19 nt, Artificial Sequence
  Description of Artificial Sequence: Synthetic oligonucleotide
  Sense strand starting at position 3095 of SEQ ID NO: 318053
gucagaaugucauuaccau

SEQ ID NO: 533078 - RNA, 19 nt, Artificial Sequence
  Description of Artificial Sequence: Synthetic oligonucleotide
  Antisense strand to SEQ ID NO: 533077
augguaaugacauucugac

SEQ ID NO: 533079 - RNA, 19 nt, Artificial Sequence
  Description of Artificial Sequence: Synthetic oligonucleotide
  Sense strand starting at position 3166 of SEQ ID NO: 318053
ugaggaaagcauuauccgu

SEQ ID NO: 533080 - RNA, 19 nt, Artificial Sequence
  Description of Artificial Sequence: Synthetic oligonucleotide
  Antisense strand to SEQ ID NO: 533079
acggauaaugcuuuccuca

SEQ ID NO: 533081 - RNA, 19 nt, Artificial Sequence
  Description of Artificial Sequence: Synthetic oligonucleotide
  Sense strand starting at position 3168 of SEQ ID NO: 318053
aggaaagcauuauccguuu

SEQ ID NO: 533082 - RNA, 19 nt, Artificial Sequence
  Description of Artificial Sequence: Synthetic oligonucleotide
  Antisense strand to SEQ ID NO: 533081
aaacggauaaugcuuuccu

SEQ ID NO: 533083 - RNA, 19 nt, Artificial Sequence
  Description of Artificial Sequence: Synthetic oligonucleotide
  Sense strand starting at position 3207 of SEQ ID NO: 318053
ucugaaacccacuggauua

SEQ ID NO: 533084 - RNA, 19 nt, Artificial Sequence
  Description of Artificial Sequence: Synthetic oligonucleotide
  Antisense strand to SEQ ID NO: 533083
uaauccaguggguuucaga

SEQ ID NO: 533085 - RNA, 19 nt, Artificial Sequence
  Description of Artificial Sequence: Synthetic oligonucleotide
  Sense strand starting at position 3369 of SEQ ID NO: 318053
aggaaaucuugcccugcca

SEQ ID NO: 533086 - RNA, 19 nt, Artificial Sequence
  Description of Artificial Sequence: Synthetic oligonucleotide
  Antisense strand to SEQ ID NO: 533085
uggcagggcaagauuuccu

SEQ ID NO: 533087 - RNA, 19 nt, Artificial Sequence
  Description of Artificial Sequence: Synthetic oligonucleotide
  Sense strand starting at position 3479 of SEQ ID NO: 318053
ggcaacuagugagcuauca

SEQ ID NO: 533088 - RNA, 19 nt, Artificial Sequence
  Description of Artificial Sequence: Synthetic oligonucleotide
  Antisense strand to SEQ ID NO: 533087
ugauagcucacuaguugcc

SEQ ID NO: 533089 - RNA, 19 nt, Artificial Sequence
  Description of Artificial Sequence: Synthetic oligonucleotide
  Sense strand starting at position 3688 of SEQ ID NO: 318053
agccauuaggccuaacuca

SEQ ID NO: 533090 - RNA, 19 nt, Artificial Sequence
  Description of Artificial Sequence: Synthetic oligonucleotide
  Antisense strand to SEQ ID NO: 533089
ugaguuaggccuaauggcu

SEQ ID NO: 533091 - RNA, 19 nt, Artificial Sequence
  Description of Artificial Sequence: Synthetic oligonucleotide
  Sense strand starting at position 3695 of SEQ ID NO: 318053
aggccuaacucaguugcaa

SEQ ID NO: 533092 - RNA, 19 nt, Artificial Sequence
  Description of Artificial Sequence: Synthetic oligonucleotide
  Antisense strand to SEQ ID NO: 533091
uugcaacugaguuaggccu

SEQ ID NO: 533093 - RNA, 19 nt, Artificial Sequence
  Description of Artificial Sequence: Synthetic oligonucleotide
  Sense strand starting at position 3706 of SEQ ID NO: 318053
aguugcaauucuguaagau

SEQ ID NO: 533094 - RNA, 19 nt, Artificial Sequence
  Description of Artificial Sequence: Synthetic oligonucleotide
  Antisense strand to SEQ ID NO: 533093
aucuuacagaauugcaacu

SEQ ID NO: 533095 - RNA, 19 nt, Artificial Sequence
  Description of Artificial Sequence: Synthetic oligonucleotide
  Sense strand starting at position 3707 of SEQ ID NO: 318053
guugcaauucuguaagauu

SEQ ID NO: 533096 - RNA, 19 nt, Artificial Sequence
  Description of Artificial Sequence: Synthetic oligonucleotide
  Antisense strand to SEQ ID NO: 533095
aaucuuacagaauugcaac

SEQ ID NO: 533097 - RNA, 19 nt, Artificial Sequence
  Description of Artificial Sequence: Synthetic oligonucleotide
  Sense strand starting at position 3776 of SEQ ID NO: 318053
gagcuauguccugacucag

SEQ ID NO: 533098 - RNA, 19 nt, Artificial Sequence
  Description of Artificial Sequence: Synthetic oligonucleotide
  Antisense strand to SEQ ID NO: 533097
cugagucaggacauagcuc

SEQ ID NO: 533099 - RNA, 19 nt, Artificial Sequence
  Description of Artificial Sequence: Synthetic oligonucleotide
  Sense strand starting at position 13 of SEQ ID NO: 318054
ggcugacucucugcaggaa

SEQ ID NO: 533100 - RNA, 19 nt, Artificial Sequence
  Description of Artificial Sequence: Synthetic oligonucleotide
  Antisense strand to SEQ ID NO: 533099
uuccugcagagagucagcc

SEQ ID NO: 533101 - RNA, 19 nt, Artificial Sequence
  Description of Artificial Sequence: Synthetic oligonucleotide
  Sense strand starting at position 25 of SEQ ID NO: 318054
gcaggaagucaauguaguc

SEQ ID NO: 533102 - RNA, 19 nt, Artificial Sequence
  Description of Artificial Sequence: Synthetic oligonucleotide
  Antisense strand to SEQ ID NO: 533101
gacuacauugacuuccugc

SEQ ID NO: 533103 - RNA, 19 nt, Artificial Sequence
  Description of Artificial Sequence: Synthetic oligonucleotide
  Sense strand starting at position 79 of SEQ ID NO: 318054
ccugguauggcuugaagac

SEQ ID NO: 533104 - RNA, 19 nt, Artificial Sequence
  Description of Artificial Sequence: Synthetic oligonucleotide
  Antisense strand to SEQ ID NO: 533103
gucuucaagccauaccagg

SEQ ID NO: 533105 - RNA, 19 nt, Artificial Sequence
  Description of Artificial Sequence: Synthetic oligonucleotide
  Sense strand starting at position 236 of SEQ ID NO: 318054
uagagagacuccgauuaac

SEQ ID NO: 533106 - RNA, 19 nt, Artificial Sequence
  Description of Artificial Sequence: Synthetic oligonucleotide
  Antisense strand to SEQ ID NO: 533105
guuaaucggagucucucua

SEQ ID NO: 533107 - RNA, 19 nt, Artificial Sequence
  Description of Artificial Sequence: Synthetic oligonucleotide
  Sense strand starting at position 245 of SEQ ID NO: 318054
uccgauuaaccagguaagu

SEQ ID NO: 533108 - RNA, 19 nt, Artificial Sequence
  Description of Artificial Sequence: Synthetic oligonucleotide
  Antisense strand to SEQ ID NO: 533107
acuuaccugguuaaucgga

SEQ ID NO: 533109 - RNA, 19 nt, Artificial Sequence
  Description of Artificial Sequence: Synthetic oligonucleotide
  Sense strand starting at position 247 of SEQ ID NO: 318054
cgauuaaccagguaaguua

SEQ ID NO: 533110 - RNA, 19 nt, Artificial Sequence
  Description of Artificial Sequence: Synthetic oligonucleotide
  Antisense strand to SEQ ID NO: 533109
uaacuuaccugguuaaucg

SEQ ID NO: 533111 - RNA, 19 nt, Artificial Sequence
  Description of Artificial Sequence: Synthetic oligonucleotide
  Sense strand starting at position 254 of SEQ ID NO: 318054
ccagguaaguuauuacaaa

SEQ ID NO: 533112 - RNA, 19 nt, Artificial Sequence
  Description of Artificial Sequence: Synthetic oligonucleotide
  Antisense strand to SEQ ID NO: 533111
uuuguaauaacuuaccugg

SEQ ID NO: 533113 - RNA, 19 nt, Artificial Sequence
  Description of Artificial Sequence: Synthetic oligonucleotide
  Sense strand starting at position 416 of SEQ ID NO: 318054
cucugauucuguccucuuu

SEQ ID NO: 533114 - RNA, 19 nt, Artificial Sequence
  Description of Artificial Sequence: Synthetic oligonucleotide
  Antisense strand to SEQ ID NO: 533113
aaagaggacagaaucagag

SEQ ID NO: 533115 - RNA, 19 nt, Artificial Sequence
  Description of Artificial Sequence: Synthetic oligonucleotide
  Sense strand starting at position 438 of SEQ ID NO: 318054
cuggauucuucuuucugga

SEQ ID NO: 533116 - RNA, 19 nt, Artificial Sequence
  Description of Artificial Sequence: Synthetic oligonucleotide
  Antisense strand to SEQ ID NO: 533115
uccagaaagaagaauccag

SEQ ID NO: 533117 - RNA, 19 nt, Artificial Sequence
  Description of Artificial Sequence: Synthetic oligonucleotide
  Sense strand starting at position 440 of SEQ ID NO: 318054
ggauucuucuuucuggagu

SEQ ID NO: 533118 - RNA, 19 nt, Artificial Sequence
  Description of Artificial Sequence: Synthetic oligonucleotide
  Antisense strand to SEQ ID NO: 533117
acuccagaaagaagaaucc

SEQ ID NO: 533119 - RNA, 19 nt, Artificial Sequence
  Description of Artificial Sequence: Synthetic oligonucleotide
  Sense strand starting at position 442 of SEQ ID NO: 318054
auucuucuuucuggaguca

SEQ ID NO: 533120 - RNA, 19 nt, Artificial Sequence
  Description of Artificial Sequence: Synthetic oligonucleotide
  Antisense strand to SEQ ID NO: 533119
ugacuccagaaagaagaau

SEQ ID NO: 533121 - RNA, 19 nt, Artificial Sequence
  Description of Artificial Sequence: Synthetic oligonucleotide
  Sense strand starting at position 443 of SEQ ID NO: 318054
uucuucuuucuggagucaa

SEQ ID NO: 533122 - RNA, 19 nt, Artificial Sequence
  Description of Artificial Sequence: Synthetic oligonucleotide
  Antisense strand to SEQ ID NO: 533121
uugacuccagaaagaagaa

SEQ ID NO: 533123 - RNA, 19 nt, Artificial Sequence
  Description of Artificial Sequence: Synthetic oligonucleotide
  Sense strand starting at position 456 of SEQ ID NO: 318054
agucaaauauaugggauau

SEQ ID NO: 533124 - RNA, 19 nt, Artificial Sequence
  Description of Artificial Sequence: Synthetic oligonucleotide
  Antisense strand to SEQ ID NO: 533123
auaucccauauauuugacu

SEQ ID NO: 533125 - RNA, 19 nt, Artificial Sequence
  Description of Artificial Sequence: Synthetic oligonucleotide
  Sense strand starting at position 467 of SEQ ID NO: 318054
ugggauauaugucaacuuu

SEQ ID NO: 533126 - RNA, 19 nt, Artificial Sequence
  Description of Artificial Sequence: Synthetic oligonucleotide
  Antisense strand to SEQ ID NO: 533125
aaaguugacauauauccca

SEQ ID NO: 533127 - RNA, 19 nt, Artificial Sequence
  Description of Artificial Sequence: Synthetic oligonucleotide
  Sense strand starting at position 503 of SEQ ID NO: 318054
uuuauuaucuuuggaaggu

SEQ ID NO: 533128 - RNA, 19 nt, Artificial Sequence
  Description of Artificial Sequence: Synthetic oligonucleotide
  Antisense strand to SEQ ID NO: 533127
accuuccaaagauaauaaa

SEQ ID NO: 533129 - RNA, 19 nt, Artificial Sequence
  Description of Artificial Sequence: Synthetic oligonucleotide
  Sense strand starting at position 619 of SEQ ID NO: 318054
ggauauagauuccugcacu

SEQ ID NO: 533130 - RNA, 19 nt, Artificial Sequence
  Description of Artificial Sequence: Synthetic oligonucleotide
  Antisense strand to SEQ ID NO: 533129
agugcaggaaucuauaucc

SEQ ID NO: 533131 - RNA, 19 nt, Artificial Sequence
  Description of Artificial Sequence: Synthetic oligonucleotide
  Sense strand starting at position 735 of SEQ ID NO: 318054
cacauaaagccuggguuua

SEQ ID NO: 533132 - RNA, 19 nt, Artificial Sequence
  Description of Artificial Sequence: Synthetic oligonucleotide
  Antisense strand to SEQ ID NO: 533131
uaaacccaggcuuuaugug

SEQ ID NO: 533133 - RNA, 19 nt, Artificial Sequence
  Description of Artificial Sequence: Synthetic oligonucleotide
  Sense strand starting at position 802 of SEQ ID NO: 318054
ucaggcugcugaucauaga

SEQ ID NO: 533134 - RNA, 19 nt, Artificial Sequence
  Description of Artificial Sequence: Synthetic oligonucleotide
  Antisense strand to SEQ ID NO: 533133
ucuaugaucagcagccuga

SEQ ID NO: 533135 - RNA, 19 nt, Artificial Sequence
  Description of Artificial Sequence: Synthetic oligonucleotide
  Sense strand starting at position 805 of SEQ ID NO: 318054
ggcugcugaucauagauca

SEQ ID NO: 533136 - RNA, 19 nt, Artificial Sequence
  Description of Artificial Sequence: Synthetic oligonucleotide
  Antisense strand to SEQ ID NO: 533135
ugaucuaugaucagcagcc

SEQ ID NO: 533137 - RNA, 19 nt, Artificial Sequence
  Description of Artificial Sequence: Synthetic oligonucleotide
  Sense strand starting at position 1052 of SEQ ID NO: 318054
uggcuuaacuguuacuauc

SEQ ID NO: 533138 - RNA, 19 nt, Artificial Sequence
  Description of Artificial Sequence: Synthetic oligonucleotide
  Antisense strand to SEQ ID NO: 533137
gauaguaacaguuaagcca

SEQ ID NO: 533139 - RNA, 19 nt, Artificial Sequence
  Description of Artificial Sequence: Synthetic oligonucleotide
  Sense strand starting at position 1111 of SEQ ID NO: 318054
guguaugucugguagauga

SEQ ID NO: 533140 - RNA, 19 nt, Artificial Sequence
  Description of Artificial Sequence: Synthetic oligonucleotide
  Antisense strand to SEQ ID NO: 533139
ucaucuaccagacauacac

SEQ ID NO: 533141 - RNA, 19 nt, Artificial Sequence
  Description of Artificial Sequence: Synthetic oligonucleotide
  Sense strand starting at position 1113 of SEQ ID NO: 318054
guaugucugguagaugaaa

SEQ ID NO: 533142 - RNA, 19 nt, Artificial Sequence
  Description of Artificial Sequence: Synthetic oligonucleotide
  Antisense strand to SEQ ID NO: 533141
uuucaucuaccagacauac

SEQ ID NO: 533143 - RNA, 19 nt, Artificial Sequence
  Description of Artificial Sequence: Synthetic oligonucleotide
  Sense strand starting at position 1140 of SEQ ID NO: 318054
agcgauuaagcagaaccau

SEQ ID NO: 533144 - RNA, 19 nt, Artificial Sequence
  Description of Artificial Sequence: Synthetic oligonucleotide
  Antisense strand to SEQ ID NO: 533143
augguucugcuuaaucgcu

SEQ ID NO: 533145 - RNA, 19 nt, Artificial Sequence
  Description of Artificial Sequence: Synthetic oligonucleotide
  Sense strand starting at position 1161 of SEQ ID NO: 318054
agagguauuccaggcugaa

SEQ ID NO: 533146 - RNA, 19 nt, Artificial Sequence
  Description of Artificial Sequence: Synthetic oligonucleotide
  Antisense strand to SEQ ID NO: 533145
uucagccuggaauaccucu

SEQ ID NO: 533147 - RNA, 19 nt, Artificial Sequence
  Description of Artificial Sequence: Synthetic oligonucleotide
  Sense strand starting at position 1275 of SEQ ID NO: 318054
gguaaagaaaggugguaaa

SEQ ID NO: 533148 - RNA, 19 nt, Artificial Sequence
  Description of Artificial Sequence: Synthetic oligonucleotide
  Antisense strand to SEQ ID NO: 533147
uuuaccaccuuucuuuacc

SEQ ID NO: 533149 - RNA, 19 nt, Artificial Sequence
  Description of Artificial Sequence: Synthetic oligonucleotide
  Sense strand starting at position 1496 of SEQ ID NO: 318054
gugagaaaguacuuuccau

SEQ ID NO: 533150 - RNA, 19 nt, Artificial Sequence
  Description of Artificial Sequence: Synthetic oligonucleotide
  Antisense strand to SEQ ID NO: 533149
auggaaaguacuuucucac

SEQ ID NO: 533151 - RNA, 19 nt, Artificial Sequence
  Description of Artificial Sequence: Synthetic oligonucleotide
  Sense strand starting at position 1503 of SEQ ID NO: 318054
aguacuuuccauuaagcag

SEQ ID NO: 533152 - RNA, 19 nt, Artificial Sequence
  Description of Artificial Sequence: Synthetic oligonucleotide
  Antisense strand to SEQ ID NO: 533151
cugcuuaauggaaaguacu

SEQ ID NO: 533153 - RNA, 19 nt, Artificial Sequence
  Description of Artificial Sequence: Synthetic oligonucleotide
  Sense strand starting at position 1551 of SEQ ID NO: 318054
caagguacuccuggugacu

SEQ ID NO: 533154 - RNA, 19 nt, Artificial Sequence
  Description of Artificial Sequence: Synthetic oligonucleotide
  Antisense strand to SEQ ID NO: 533153
agucaccaggaguaccuug

SEQ ID NO: 533155 - RNA, 19 nt, Artificial Sequence
  Description of Artificial Sequence: Synthetic oligonucleotide
  Sense strand starting at position 1690 of SEQ ID NO: 318054
acgaucaucuucuuauaga

SEQ ID NO: 533156 - RNA, 19 nt, Artificial Sequence
  Description of Artificial Sequence: Synthetic oligonucleotide
  Antisense strand to SEQ ID NO: 533155
ucuauaagaagaugaucgu

SEQ ID NO: 533157 - RNA, 19 nt, Artificial Sequence
  Description of Artificial Sequence: Synthetic oligonucleotide
  Sense strand starting at position 1691 of SEQ ID NO: 318054
cgaucaucuucuuauagag

SEQ ID NO: 533158 - RNA, 19 nt, Artificial Sequence
  Description of Artificial Sequence: Synthetic oligonucleotide
  Antisense strand to SEQ ID NO: 533157
cucuauaagaagaugaucg

SEQ ID NO: 533159 - RNA, 19 nt, Artificial Sequence
  Description of Artificial Sequence: Synthetic oligonucleotide
  Sense strand starting at position 1789 of SEQ ID NO: 318054
aagagaguucgucagcucu

SEQ ID NO: 533160 - RNA, 19 nt, Artificial Sequence
  Description of Artificial Sequence: Synthetic oligonucleotide
  Antisense strand to SEQ ID NO: 533159
agagcugacgaacucucuu

SEQ ID NO: 533161 - RNA, 19 nt, Artificial Sequence
  Description of Artificial Sequence: Synthetic oligonucleotide
  Sense strand starting at position 1791 of SEQ ID NO: 318054
gagaguucgucagcucuca

SEQ ID NO: 533162 - RNA, 19 nt, Artificial Sequence
  Description of Artificial Sequence: Synthetic oligonucleotide
  Antisense strand to SEQ ID NO: 533161
ugagagcugacgaacucuc

SEQ ID NO: 533163 - RNA, 19 nt, Artificial Sequence
  Description of Artificial Sequence: Synthetic oligonucleotide
  Sense strand starting at position 3673 of SEQ ID NO: 318054
augcacucuugaguuagca

SEQ ID NO: 533164 - RNA, 19 nt, Artificial Sequence
  Description of Artificial Sequence: Synthetic oligonucleotide
  Antisense strand to SEQ ID NO: 533163
ugcuaacucaagagugcau

SEQ ID NO: 533165 - RNA, 19 nt, Artificial Sequence
  Description of Artificial Sequence: Synthetic oligonucleotide
  Sense strand starting at position 3675 of SEQ ID NO: 318054
gcacucuugaguuagcaag

SEQ ID NO: 533166 - RNA, 19 nt, Artificial Sequence
  Description of Artificial Sequence: Synthetic oligonucleotide
  Antisense strand to SEQ ID NO: 533165
cuugcuaacucaagagugc

SEQ ID NO: 533167 - RNA, 19 nt, Artificial Sequence
  Description of Artificial Sequence: Synthetic oligonucleotide
  Sense strand starting at position 3740 of SEQ ID NO: 318054
caggaacgguccucuggau

SEQ ID NO: 533168 - RNA, 19 nt, Artificial Sequence
  Description of Artificial Sequence: Synthetic oligonucleotide
  Antisense strand to SEQ ID NO: 533167
auccagaggaccguuccug

SEQ ID NO: 533169 - RNA, 19 nt, Artificial Sequence
  Description of Artificial Sequence: Synthetic oligonucleotide
  Sense strand starting at position 3840 of SEQ ID NO: 318054
aaggguauguccuaagcaa

SEQ ID NO: 533170 - RNA, 19 nt, Artificial Sequence
  Description of Artificial Sequence: Synthetic oligonucleotide
  Antisense strand to SEQ ID NO: 533169
uugcuuaggacauacccuu

SEQ ID NO: 533171 - RNA, 19 nt, Artificial Sequence
  Description of Artificial Sequence: Synthetic oligonucleotide
  Sense strand starting at position 3847 of SEQ ID NO: 318054
uguccuaagcaauaaauga

SEQ ID NO: 533172 - RNA, 19 nt, Artificial Sequence
  Description of Artificial Sequence: Synthetic oligonucleotide
  Antisense strand to SEQ ID NO: 533171
ucauuuauugcuuaggaca

SEQ ID NO: 533173 - RNA, 19 nt, Artificial Sequence
  Description of Artificial Sequence: Synthetic oligonucleotide
  Sense strand starting at position 3868 of SEQ ID NO: 318054
ggagccaccagguaauauu

SEQ ID NO: 533174 - RNA, 19 nt, Artificial Sequence
  Description of Artificial Sequence: Synthetic oligonucleotide
  Antisense strand to SEQ ID NO: 533173
aauauuaccugguggcucc

SEQ ID NO: 533175 - RNA, 19 nt, Artificial Sequence
  Description of Artificial Sequence: Synthetic oligonucleotide
  Sense strand starting at position 71 of SEQ ID NO: 318055
ccgcacaugccuugaaaua

SEQ ID NO: 533176 - RNA, 19 nt, Artificial Sequence
  Description of Artificial Sequence: Synthetic oligonucleotide
  Antisense strand to SEQ ID NO: 533175
uauuucaaggcaugugcgg

SEQ ID NO: 533177 - RNA, 19 nt, Artificial Sequence
  Description of Artificial Sequence: Synthetic oligonucleotide
  Sense strand starting at position 72 of SEQ ID NO: 318055
cgcacaugccuugaaauac

SEQ ID NO: 533178 - RNA, 19 nt, Artificial Sequence
  Description of Artificial Sequence: Synthetic oligonucleotide
  Antisense strand to SEQ ID NO: 533177
guauuucaaggcaugugcg

SEQ ID NO: 533179 - RNA, 19 nt, Artificial Sequence
  Description of Artificial Sequence: Synthetic oligonucleotide
  Sense strand starting at position 104 of SEQ ID NO: 318055
cgaaccaucucagcugauu

SEQ ID NO: 533180 - RNA, 19 nt, Artificial Sequence
  Description of Artificial Sequence: Synthetic oligonucleotide
  Antisense strand to SEQ ID NO: 533179
aaucagcugagaugguucg

SEQ ID NO: 533181 - RNA, 19 nt, Artificial Sequence
  Description of Artificial Sequence: Synthetic oligonucleotide
  Sense strand starting at position 129 of SEQ ID NO: 318055
cugguuaucuaccuauugu

SEQ ID NO: 533182 - RNA, 19 nt, Artificial Sequence
  Description of Artificial Sequence: Synthetic oligonucleotide
  Antisense strand to SEQ ID NO: 533181
acaauagguagauaaccag

SEQ ID NO: 533183 - RNA, 19 nt, Artificial Sequence
  Description of Artificial Sequence: Synthetic oligonucleotide
  Sense strand starting at position 208 of SEQ ID NO: 318055
uuuacuuagcaguaugaca

SEQ ID NO: 533184 - RNA, 19 nt, Artificial Sequence
  Description of Artificial Sequence: Synthetic oligonucleotide
  Antisense strand to SEQ ID NO: 533183
ugucauacugcuaaguaaa

SEQ ID NO: 533185 - RNA, 19 nt, Artificial Sequence
  Description of Artificial Sequence: Synthetic oligonucleotide
  Sense strand starting at position 308 of SEQ ID NO: 318055
uagucaugaucuucugaga

SEQ ID NO: 533186 - RNA, 19 nt, Artificial Sequence
  Description of Artificial Sequence: Synthetic oligonucleotide
  Antisense strand to SEQ ID NO: 533185
ucucagaagaucaugacua

SEQ ID NO: 533187 - RNA, 19 nt, Artificial Sequence
  Description of Artificial Sequence: Synthetic oligonucleotide
  Sense strand starting at position 311 of SEQ ID NO: 318055
ucaugaucuucugagacaa

SEQ ID NO: 533188 - RNA, 19 nt, Artificial Sequence
  Description of Artificial Sequence: Synthetic oligonucleotide
  Antisense strand to SEQ ID NO: 533187
uugucucagaagaucauga

SEQ ID NO: 533189 - RNA, 19 nt, Artificial Sequence
  Description of Artificial Sequence: Synthetic oligonucleotide
  Sense strand starting at position 426 of SEQ ID NO: 318055
auaccaaaggcucauuagu

SEQ ID NO: 533190 - RNA, 19 nt, Artificial Sequence
  Description of Artificial Sequence: Synthetic oligonucleotide
  Antisense strand to SEQ ID NO: 533189
acuaaugagccuuugguau

SEQ ID NO: 533191 - RNA, 19 nt, Artificial Sequence
  Description of Artificial Sequence: Synthetic oligonucleotide
  Sense strand starting at position 506 of SEQ ID NO: 318055
ugagccuucugauuguaga

SEQ ID NO: 533192 - RNA, 19 nt, Artificial Sequence
  Description of Artificial Sequence: Synthetic oligonucleotide
  Antisense strand to SEQ ID NO: 533191
ucuacaaucagaaggcuca

SEQ ID NO: 533193 - RNA, 19 nt, Artificial Sequence
  Description of Artificial Sequence: Synthetic oligonucleotide
  Sense strand starting at position 507 of SEQ ID NO: 318055
gagccuucugauuguagag

SEQ ID NO: 533194 - RNA, 19 nt, Artificial Sequence
  Description of Artificial Sequence: Synthetic oligonucleotide
  Antisense strand to SEQ ID NO: 533193
cucuacaaucagaaggcuc

SEQ ID NO: 533195 - RNA, 19 nt, Artificial Sequence
  Description of Artificial Sequence: Synthetic oligonucleotide
  Sense strand starting at position 803 of SEQ ID NO: 318055
caguguguggcgucuucaa

SEQ ID NO: 533196 - RNA, 19 nt, Artificial Sequence
  Description of Artificial Sequence: Synthetic oligonucleotide
  Antisense strand to SEQ ID NO: 533195
uugaagacgccacacacug

SEQ ID NO: 533197 - RNA, 19 nt, Artificial Sequence
  Description of Artificial Sequence: Synthetic oligonucleotide
  Sense strand starting at position 805 of SEQ ID NO: 318055
guguguggcgucuucaaac

SEQ ID NO: 533198 - RNA, 19 nt, Artificial Sequence
  Description of Artificial Sequence: Synthetic oligonucleotide
  Antisense strand to SEQ ID NO: 533197
guuugaagacgccacacac

SEQ ID NO: 533199 - RNA, 19 nt, Artificial Sequence
  Description of Artificial Sequence: Synthetic oligonucleotide
  Sense strand starting at position 862 of SEQ ID NO: 318055
ggcugacucccaugacaaa

SEQ ID NO: 533200 - RNA, 19 nt, Artificial Sequence
  Description of Artificial Sequence: Synthetic oligonucleotide
  Antisense strand to SEQ ID NO: 533199
uuugucaugggagucagcc

SEQ ID NO: 533201 - RNA, 19 nt, Artificial Sequence
  Description of Artificial Sequence: Synthetic oligonucleotide
  Sense strand starting at position 962 of SEQ ID NO: 318055
gcaacaugaucgguguuga

SEQ ID NO: 533202 - RNA, 19 nt, Artificial Sequence
  Description of Artificial Sequence: Synthetic oligonucleotide
  Antisense strand to SEQ ID NO: 533201
ucaacaccgaucauguugc

SEQ ID NO: 533203 - RNA, 19 nt, Artificial Sequence
  Description of Artificial Sequence: Synthetic oligonucleotide
  Sense strand starting at position 963 of SEQ ID NO: 318055
caacaugaucgguguugag

SEQ ID NO: 533204 - RNA, 19 nt, Artificial Sequence
  Description of Artificial Sequence: Synthetic oligonucleotide
  Antisense strand to SEQ ID NO: 533203
cucaacaccgaucauguug

SEQ ID NO: 533205 - RNA, 19 nt, Artificial Sequence
  Description of Artificial Sequence: Synthetic oligonucleotide
  Sense strand starting at position 973 of SEQ ID NO: 318055
gguguugagaaacaaaguu

SEQ ID NO: 533206 - RNA, 19 nt, Artificial Sequence
  Description of Artificial Sequence: Synthetic oligonucleotide
  Antisense strand to SEQ ID NO: 533205
aacuuuguuucucaacacc

SEQ ID NO: 533207 - RNA, 19 nt, Artificial Sequence
  Description of Artificial Sequence: Synthetic oligonucleotide
  Sense strand starting at position 989 of SEQ ID NO: 318055
guuggauacugccuaacca

SEQ ID NO: 533208 - RNA, 19 nt, Artificial Sequence
  Description of Artificial Sequence: Synthetic oligonucleotide
  Antisense strand to SEQ ID NO: 533207
ugguuaggcaguauccaac

SEQ ID NO: 533209 - RNA, 19 nt, Artificial Sequence
  Description of Artificial Sequence: Synthetic oligonucleotide
  Sense strand starting at position 1014 of SEQ ID NO: 318055
gcagaaacguagucagaug

SEQ ID NO: 533210 - RNA, 19 nt, Artificial Sequence
  Description of Artificial Sequence: Synthetic oligonucleotide
  Antisense strand to SEQ ID NO: 533209
caucugacuacguuucugc

SEQ ID NO: 533211 - RNA, 19 nt, Artificial Sequence
  Description of Artificial Sequence: Synthetic oligonucleotide
  Sense strand starting at position 1021 of SEQ ID NO: 318055
cguagucagaugcaaacau

SEQ ID NO: 533212 - RNA, 19 nt, Artificial Sequence
  Description of Artificial Sequence: Synthetic oligonucleotide
  Antisense strand to SEQ ID NO: 533211
auguuugcaucugacuacg

SEQ ID NO: 533213 - RNA, 19 nt, Artificial Sequence
  Description of Artificial Sequence: Synthetic oligonucleotide
  Sense strand starting at position 1082 of SEQ ID NO: 318055
uuaggcagugcucgaaacu

SEQ ID NO: 533214 - RNA, 19 nt, Artificial Sequence
  Description of Artificial Sequence: Synthetic oligonucleotide
  Antisense strand to SEQ ID NO: 533213
aguuucgagcacugccuaa

SEQ ID NO: 533215 - RNA, 19 nt, Artificial Sequence
  Description of Artificial Sequence: Synthetic oligonucleotide
  Sense strand starting at position 1101 of SEQ ID NO: 318055
gaggacuucugccauuuga

SEQ ID NO: 533216 - RNA, 19 nt, Artificial Sequence
  Description of Artificial Sequence: Synthetic oligonucleotide
  Antisense strand to SEQ ID NO: 533215
ucaaauggcagaaguccuc

SEQ ID NO: 533217 - RNA, 19 nt, Artificial Sequence
  Description of Artificial Sequence: Synthetic oligonucleotide
  Sense strand starting at position 1119 of SEQ ID NO: 318055
agcuguuaccaggagaugu

SEQ ID NO: 533218 - RNA, 19 nt, Artificial Sequence
  Description of Artificial Sequence: Synthetic oligonucleotide
  Antisense strand to SEQ ID NO: 533217
acaucuccugguaacagcu

SEQ ID NO: 533219 - RNA, 19 nt, Artificial Sequence
  Description of Artificial Sequence: Synthetic oligonucleotide
  Sense strand starting at position 1152 of SEQ ID NO: 318055
gggcgaaacuggccuauaa

SEQ ID NO: 533220 - RNA, 19 nt, Artificial Sequence
  Description of Artificial Sequence: Synthetic oligonucleotide
  Antisense strand to SEQ ID NO: 533219
uuauaggccaguuucgccc

SEQ ID NO: 533221 - RNA, 19 nt, Artificial Sequence
  Description of Artificial Sequence: Synthetic oligonucleotide
  Sense strand starting at position 1154 of SEQ ID NO: 318055
gcgaaacuggccuauaaau

SEQ ID NO: 533222 - RNA, 19 nt, Artificial Sequence
  Description of Artificial Sequence: Synthetic oligonucleotide
  Antisense strand to SEQ ID NO: 533221
auuuauaggccaguuucgc

SEQ ID NO: 533223 - RNA, 19 nt, Artificial Sequence
  Description of Artificial Sequence: Synthetic oligonucleotide
  Sense strand starting at position 1190 of SEQ ID NO: 318055
gauuccuggucccucaaga

SEQ ID NO: 533224 - RNA, 19 nt, Artificial Sequence
  Description of Artificial Sequence: Synthetic oligonucleotide
  Antisense strand to SEQ ID NO: 533223
ucuugagggaccaggaauc

SEQ ID NO: 533225 - RNA, 19 nt, Artificial Sequence
  Description of Artificial Sequence: Synthetic oligonucleotide
  Sense strand starting at position 1215 of SEQ ID NO: 318055
gucuaagcccuucggguaa

SEQ ID NO: 533226 - RNA, 19 nt, Artificial Sequence
  Description of Artificial Sequence: Synthetic oligonucleotide
  Antisense strand to SEQ ID NO: 533225
uuacccgaagggcuuagac

SEQ ID NO: 533227 - RNA, 19 nt, Artificial Sequence
  Description of Artificial Sequence: Synthetic oligonucleotide
  Sense strand starting at position 1219 of SEQ ID NO: 318055
aagcccuucggguaacuua

SEQ ID NO: 533228 - RNA, 19 nt, Artificial Sequence
  Description of Artificial Sequence: Synthetic oligonucleotide
  Antisense strand to SEQ ID NO: 533227
uaaguuacccgaagggcuu

SEQ ID NO: 533229 - RNA, 19 nt, Artificial Sequence
  Description of Artificial Sequence: Synthetic oligonucleotide
  Sense strand starting at position 1226 of SEQ ID NO: 318055
ucggguaacuuaucccuuu

SEQ ID NO: 533230 - RNA, 19 nt, Artificial Sequence
  Description of Artificial Sequence: Synthetic oligonucleotide
  Antisense strand to SEQ ID NO: 533229
aaagggauaaguuacccga

SEQ ID NO: 533231 - RNA, 19 nt, Artificial Sequence
  Description of Artificial Sequence: Synthetic oligonucleotide
  Sense strand starting at position 1229 of SEQ ID NO: 318055
gguaacuuaucccuuugca

SEQ ID NO: 533232 - RNA, 19 nt, Artificial Sequence
  Description of Artificial Sequence: Synthetic oligonucleotide
  Antisense strand to SEQ ID NO: 533231
ugcaaagggauaaguuacc

SEQ ID NO: 533233 - RNA, 19 nt, Artificial Sequence
  Description of Artificial Sequence: Synthetic oligonucleotide
  Sense strand starting at position 2063 of SEQ ID NO: 318055
ccaggucaccucgagaauu

SEQ ID NO: 533234 - RNA, 19 nt, Artificial Sequence
  Description of Artificial Sequence: Synthetic oligonucleotide
  Antisense strand to SEQ ID NO: 533233
aauucucgaggugaccugg

SEQ ID NO: 533235 - RNA, 19 nt, Artificial Sequence
  Description of Artificial Sequence: Synthetic oligonucleotide
  Sense strand starting at position 2642 of SEQ ID NO: 318055
cgagaugagagcugaguuu

SEQ ID NO: 533236 - RNA, 19 nt, Artificial Sequence
  Description of Artificial Sequence: Synthetic oligonucleotide
  Antisense strand to SEQ ID NO: 533235
aaacucagcucucaucucg

SEQ ID NO: 533237 - RNA, 19 nt, Artificial Sequence
  Description of Artificial Sequence: Synthetic oligonucleotide
  Sense strand starting at position 2653 of SEQ ID NO: 318055
cugaguuuauuugcuccua

SEQ ID NO: 533238 - RNA, 19 nt, Artificial Sequence
  Description of Artificial Sequence: Synthetic oligonucleotide
  Antisense strand to SEQ ID NO: 533237
uaggagcaaauaaacucag

SEQ ID NO: 533239 - RNA, 19 nt, Artificial Sequence
  Description of Artificial Sequence: Synthetic oligonucleotide
  Sense strand starting at position 2654 of SEQ ID NO: 318055
ugaguuuauuugcuccuaa

SEQ ID NO: 533240 - RNA, 19 nt, Artificial Sequence
  Description of Artificial Sequence: Synthetic oligonucleotide
  Antisense strand to SEQ ID NO: 533239
uuaggagcaaauaaacuca

SEQ ID NO: 533241 - RNA, 19 nt, Artificial Sequence
  Description of Artificial Sequence: Synthetic oligonucleotide
  Sense strand starting at position 2766 of SEQ ID NO: 318055
agagaacaucuuggcucau

SEQ ID NO: 533242 - RNA, 19 nt, Artificial Sequence
  Description of Artificial Sequence: Synthetic oligonucleotide
  Antisense strand to SEQ ID NO: 533241
augagccaagauguucucu

SEQ ID NO: 533243 - RNA, 19 nt, Artificial Sequence
  Description of Artificial Sequence: Synthetic oligonucleotide
  Sense strand starting at position 2856 of SEQ ID NO: 318055
agugaagucacaugacgaa

SEQ ID NO: 533244 - RNA, 19 nt, Artificial Sequence
  Description of Artificial Sequence: Synthetic oligonucleotide
  Antisense strand to SEQ ID NO: 533243
uucgucaugugacuucacu

SEQ ID NO: 533245 - RNA, 19 nt, Artificial Sequence
  Description of Artificial Sequence: Synthetic oligonucleotide
  Sense strand starting at position 2904 of SEQ ID NO: 318055
gguguucucuuaccagaag

SEQ ID NO: 533246 - RNA, 19 nt, Artificial Sequence
  Description of Artificial Sequence: Synthetic oligonucleotide
  Antisense strand to SEQ ID NO: 533245
cuucugguaagagaacacc

SEQ ID NO: 533247 - RNA, 19 nt, Artificial Sequence
  Description of Artificial Sequence: Synthetic oligonucleotide
  Sense strand starting at position 2949 of SEQ ID NO: 318055
acagaucugcuauauaagu

SEQ ID NO: 533248 - RNA, 19 nt, Artificial Sequence
  Description of Artificial Sequence: Synthetic oligonucleotide
  Antisense strand to SEQ ID NO: 533247
acuuauauagcagaucugu

SEQ ID NO: 533249 - RNA, 19 nt, Artificial Sequence
  Description of Artificial Sequence: Synthetic oligonucleotide
  Sense strand starting at position 3392 of SEQ ID NO: 318055
guugaauacuuggaacuga

SEQ ID NO: 533250 - RNA, 19 nt, Artificial Sequence
  Description of Artificial Sequence: Synthetic oligonucleotide
  Antisense strand to SEQ ID NO: 533249
ucaguuccaaguauucaac

SEQ ID NO: 533251 - RNA, 19 nt, Artificial Sequence
  Description of Artificial Sequence: Synthetic oligonucleotide
  Sense strand starting at position 3421 of SEQ ID NO: 318055
gucagaagaucuuucugac

SEQ ID NO: 533252 - RNA, 19 nt, Artificial Sequence
  Description of Artificial Sequence: Synthetic oligonucleotide
  Antisense strand to SEQ ID NO: 533251
gucagaaagaucuucugac

SEQ ID NO: 533253 - RNA, 19 nt, Artificial Sequence
  Description of Artificial Sequence: Synthetic oligonucleotide
  Sense strand starting at position 3959 of SEQ ID NO: 318055
gucugauaguggcucucaa

SEQ ID NO: 533254 - RNA, 19 nt, Artificial Sequence
  Description of Artificial Sequence: Synthetic oligonucleotide
  Antisense strand to SEQ ID NO: 533253
uugagagccacuaucagac

SEQ ID NO: 533255 - RNA, 19 nt, Artificial Sequence
  Description of Artificial Sequence: Synthetic oligonucleotide
  Sense strand starting at position 100 of SEQ ID NO: 318056
gggacauuguugcuaagug

SEQ ID NO: 533256 - RNA, 19 nt, Artificial Sequence
  Description of Artificial Sequence: Synthetic oligonucleotide
  Antisense strand to SEQ ID NO: 533255
cacuuagcaacaauguccc

SEQ ID NO: 533257 - RNA, 19 nt, Artificial Sequence
  Description of Artificial Sequence: Synthetic oligonucleotide
  Sense strand starting at position 266 of SEQ ID NO: 318056
acaagccucuaguugcaaa

SEQ ID NO: 533258 - RNA, 19 nt, Artificial Sequence
  Description of Artificial Sequence: Synthetic oligonucleotide
  Antisense strand to SEQ ID NO: 533257
uuugcaacuagaggcuugu

SEQ ID NO: 533259 - RNA, 19 nt, Artificial Sequence
  Description of Artificial Sequence: Synthetic oligonucleotide
  Sense strand starting at position 303 of SEQ ID NO: 318056
aagugaucaccacgcgaga

SEQ ID NO: 533260 - RNA, 19 nt, Artificial Sequence
  Description of Artificial Sequence: Synthetic oligonucleotide
  Antisense strand to SEQ ID NO: 533259
ucucgcguggugaucacuu

SEQ ID NO: 533261 - RNA, 19 nt, Artificial Sequence
  Description of Artificial Sequence: Synthetic oligonucleotide
  Sense strand starting at position 306 of SEQ ID NO: 318056
ugaucaccacgcgagauua

SEQ ID NO: 533262 - RNA, 19 nt, Artificial Sequence
  Description of Artificial Sequence: Synthetic oligonucleotide
  Antisense strand to SEQ ID NO: 533261
uaaucucgcguggugauca

SEQ ID NO: 533263 - RNA, 19 nt, Artificial Sequence
  Description of Artificial Sequence: Synthetic oligonucleotide
  Sense strand starting at position 439 of SEQ ID NO: 318056
gaaggugauggaggcuuaa

SEQ ID NO: 533264 - RNA, 19 nt, Artificial Sequence
  Description of Artificial Sequence: Synthetic oligonucleotide
  Antisense strand to SEQ ID NO: 533263
uuaagccuccaucaccuuc

SEQ ID NO: 533265 - RNA, 19 nt, Artificial Sequence
  Description of Artificial Sequence: Synthetic oligonucleotide
  Sense strand starting at position 449 of SEQ ID NO: 318056
gaggcuuaaucgcuaggag

SEQ ID NO: 533266 - RNA, 19 nt, Artificial Sequence
  Description of Artificial Sequence: Synthetic oligonucleotide
  Antisense strand to SEQ ID NO: 533265
cuccuagcgauuaagccuc

SEQ ID NO: 533267 - RNA, 19 nt, Artificial Sequence
  Description of Artificial Sequence: Synthetic oligonucleotide
  Sense strand starting at position 450 of SEQ ID NO: 318056
aggcuuaaucgcuaggaga

SEQ ID NO: 533268 - RNA, 19 nt, Artificial Sequence
  Description of Artificial Sequence: Synthetic oligonucleotide
  Antisense strand to SEQ ID NO: 533267
ucuccuagcgauuaagccu

SEQ ID NO: 533269 - RNA, 19 nt, Artificial Sequence
  Description of Artificial Sequence: Synthetic oligonucleotide
  Sense strand starting at position 452 of SEQ ID NO: 318056
gcuuaaucgcuaggagagg

SEQ ID NO: 533270 - RNA, 19 nt, Artificial Sequence
  Description of Artificial Sequence: Synthetic oligonucleotide
  Antisense strand to SEQ ID NO: 533269
ccucuccuagcgauuaagc

SEQ ID NO: 533271 - RNA, 19 nt, Artificial Sequence
  Description of Artificial Sequence: Synthetic oligonucleotide
  Sense strand starting at position 483 of SEQ ID NO: 318056
ugcugcuuugaggaguuca

SEQ ID NO: 533272 - RNA, 19 nt, Artificial Sequence
  Description of Artificial Sequence: Synthetic oligonucleotide
  Antisense strand to SEQ ID NO: 533271
ugaacuccucaaagcagca

SEQ ID NO: 533273 - RNA, 19 nt, Artificial Sequence
  Description of Artificial Sequence: Synthetic oligonucleotide
  Sense strand starting at position 682 of SEQ ID NO: 318056
gcucucugccagcaagaaa

SEQ ID NO: 533274 - RNA, 19 nt, Artificial Sequence
  Description of Artificial Sequence: Synthetic oligonucleotide
  Antisense strand to SEQ ID NO: 533273
uuucuugcuggcagagagc

SEQ ID NO: 533275 - RNA, 19 nt, Artificial Sequence
  Description of Artificial Sequence: Synthetic oligonucleotide
  Sense strand starting at position 723 of SEQ ID NO: 318056
acccgagugucccuaaacu

SEQ ID NO: 533276 - RNA, 19 nt, Artificial Sequence
  Description of Artificial Sequence: Synthetic oligonucleotide
  Antisense strand to SEQ ID NO: 533275
aguuuagggacacucgggu

SEQ ID NO: 533277 - RNA, 19 nt, Artificial Sequence
  Description of Artificial Sequence: Synthetic oligonucleotide
  Sense strand starting at position 923 of SEQ ID NO: 318056
uaaggugggucccucagau

SEQ ID NO: 533278 - RNA, 19 nt, Artificial Sequence
  Description of Artificial Sequence: Synthetic oligonucleotide
  Antisense strand to SEQ ID NO: 533277
aucugagggacccaccuua

SEQ ID NO: 533279 - RNA, 19 nt, Artificial Sequence
  Description of Artificial Sequence: Synthetic oligonucleotide
  Sense strand starting at position 2181 of SEQ ID NO: 318056
ggcggaaaugucuauagag

SEQ ID NO: 533280 - RNA, 19 nt, Artificial Sequence
  Description of Artificial Sequence: Synthetic oligonucleotide
  Antisense strand to SEQ ID NO: 533279
cucuauagacauuuccgcc

SEQ ID NO: 533281 - RNA, 19 nt, Artificial Sequence
  Description of Artificial Sequence: Synthetic oligonucleotide
  Sense strand starting at position 2231 of SEQ ID NO: 318056
uuucuugaucugucguguu

SEQ ID NO: 533282 - RNA, 19 nt, Artificial Sequence
  Description of Artificial Sequence: Synthetic oligonucleotide
  Antisense strand to SEQ ID NO: 533281
aacacgacagaucaagaaa

SEQ ID NO: 533283 - RNA, 19 nt, Artificial Sequence
  Description of Artificial Sequence: Synthetic oligonucleotide
  Sense strand starting at position 2243 of SEQ ID NO: 318056
ucguguuaacauuauuagu

SEQ ID NO: 533284 - RNA, 19 nt, Artificial Sequence
  Description of Artificial Sequence: Synthetic oligonucleotide
  Antisense strand to SEQ ID NO: 533283
acuaauaauguuaacacga

SEQ ID NO: 533285 - RNA, 19 nt, Artificial Sequence
  Description of Artificial Sequence: Synthetic oligonucleotide
  Sense strand starting at position 2337 of SEQ ID NO: 318056
auggccagcuuguuaaaua

SEQ ID NO: 533286 - RNA, 19 nt, Artificial Sequence
  Description of Artificial Sequence: Synthetic oligonucleotide
  Antisense strand to SEQ ID NO: 533285
uauuuaacaagcuggccau

SEQ ID NO: 533287 - RNA, 19 nt, Artificial Sequence
  Description of Artificial Sequence: Synthetic oligonucleotide
  Sense strand starting at position 2355 of SEQ ID NO: 318056
agcguugcaaguguuaaua

SEQ ID NO: 533288 - RNA, 19 nt, Artificial Sequence
  Description of Artificial Sequence: Synthetic oligonucleotide
  Antisense strand to SEQ ID NO: 533287
uauuaacacuugcaacgcu

SEQ ID NO: 533289 - RNA, 19 nt, Artificial Sequence
  Description of Artificial Sequence: Synthetic oligonucleotide
  Sense strand starting at position 2425 of SEQ ID NO: 318056
uauuguuaccgguaaugua

SEQ ID NO: 533290 - RNA, 19 nt, Artificial Sequence
  Description of Artificial Sequence: Synthetic oligonucleotide
  Antisense strand to SEQ ID NO: 533289
uacauuaccgguaacaaua

SEQ ID NO: 533291 - RNA, 19 nt, Artificial Sequence
  Description of Artificial Sequence: Synthetic oligonucleotide
  Sense strand starting at position 2649 of SEQ ID NO: 318056
uaaguacaugugugcauuu

SEQ ID NO: 533292 - RNA, 19 nt, Artificial Sequence
  Description of Artificial Sequence: Synthetic oligonucleotide
  Antisense strand to SEQ ID NO: 533291
aaaugcacacauguacuua

SEQ ID NO: 533293 - RNA, 19 nt, Artificial Sequence
  Description of Artificial Sequence: Synthetic oligonucleotide
  Sense strand starting at position 2676 of SEQ ID NO: 318056
acuuacuugguaugcaaau

SEQ ID NO: 533294 - RNA, 19 nt, Artificial Sequence
  Description of Artificial Sequence: Synthetic oligonucleotide
  Antisense strand to SEQ ID NO: 533293
auuugcauaccaaguaagu

SEQ ID NO: 533295 - RNA, 19 nt, Artificial Sequence
  Description of Artificial Sequence: Synthetic oligonucleotide
  Sense strand starting at position 2682 of SEQ ID NO: 318056
uugguaugcaaaugugauu

SEQ ID NO: 533296 - RNA, 19 nt, Artificial Sequence
  Description of Artificial Sequence: Synthetic oligonucleotide
  Antisense strand to SEQ ID NO: 533295
aaucacauuugcauaccaa

SEQ ID NO: 533297 - RNA, 19 nt, Artificial Sequence
  Description of Artificial Sequence: Synthetic oligonucleotide
  Sense strand starting at position 2759 of SEQ ID NO: 318056
gugacuuguauacaugguu

SEQ ID NO: 533298 - RNA, 19 nt, Artificial Sequence
  Description of Artificial Sequence: Synthetic oligonucleotide
  Antisense strand to SEQ ID NO: 533297
aaccauguauacaagucac

SEQ ID NO: 533299 - RNA, 19 nt, Artificial Sequence
  Description of Artificial Sequence: Synthetic oligonucleotide
  Sense strand starting at position 2876 of SEQ ID NO: 318056
caagaauguugauugugau

SEQ ID NO: 533300 - RNA, 19 nt, Artificial Sequence
  Description of Artificial Sequence: Synthetic oligonucleotide
  Antisense strand to SEQ ID NO: 533299
aucacaaucaacauucuug

SEQ ID NO: 533301 - RNA, 19 nt, Artificial Sequence
  Description of Artificial Sequence: Synthetic oligonucleotide
  Sense strand starting at position 2877 of SEQ ID NO: 318056
aagaauguugauugugauu

SEQ ID NO: 533302 - RNA, 19 nt, Artificial Sequence
  Description of Artificial Sequence: Synthetic oligonucleotide
  Antisense strand to SEQ ID NO: 533301
aaucacaaucaacauucuu

SEQ ID NO: 533303 - RNA, 19 nt, Artificial Sequence
  Description of Artificial Sequence: Synthetic oligonucleotide
  Sense strand starting at position 3138 of SEQ ID NO: 318056
auuccagcucaauguguaa

SEQ ID NO: 533304 - RNA, 19 nt, Artificial Sequence
  Description of Artificial Sequence: Synthetic oligonucleotide
  Antisense strand to SEQ ID NO: 533303
uuacacauugagcuggaau

SEQ ID NO: 533305 - RNA, 19 nt, Artificial Sequence
  Description of Artificial Sequence: Synthetic oligonucleotide
  Sense strand starting at position 3142 of SEQ ID NO: 318056
cagcucaauguguaagcau

SEQ ID NO: 533306 - RNA, 19 nt, Artificial Sequence
  Description of Artificial Sequence: Synthetic oligonucleotide
  Antisense strand to SEQ ID NO: 533305
augcuuacacauugagcug

SEQ ID NO: 533307 - RNA, 19 nt, Artificial Sequence
  Description of Artificial Sequence: Synthetic oligonucleotide
  Sense strand starting at position 3212 of SEQ ID NO: 318056
ggcagcauuugcucugaga

SEQ ID NO: 533308 - RNA, 19 nt, Artificial Sequence
  Description of Artificial Sequence: Synthetic oligonucleotide
  Antisense strand to SEQ ID NO: 533307
ucucagagcaaaugcugcc

SEQ ID NO: 533309 - RNA, 19 nt, Artificial Sequence
  Description of Artificial Sequence: Synthetic oligonucleotide
  Sense strand starting at position 3215 of SEQ ID NO: 318056
agcauuugcucugagagag

SEQ ID NO: 533310 - RNA, 19 nt, Artificial Sequence
  Description of Artificial Sequence: Synthetic oligonucleotide
  Antisense strand to SEQ ID NO: 533309
cucucucagagcaaaugcu

SEQ ID NO: 533311 - RNA, 19 nt, Artificial Sequence
  Description of Artificial Sequence: Synthetic oligonucleotide
  Sense strand starting at position 3269 of SEQ ID NO: 318056
gagguuuagguuuaaaguc

SEQ ID NO: 533312 - RNA, 19 nt, Artificial Sequence
  Description of Artificial Sequence: Synthetic oligonucleotide
  Antisense strand to SEQ ID NO: 533311
gacuuuaaaccuaaaccuc

SEQ ID NO: 533313 - RNA, 19 nt, Artificial Sequence
  Description of Artificial Sequence: Synthetic oligonucleotide
  Sense strand starting at position 3296 of SEQ ID NO: 318056
gauacuccagauugaaugu

SEQ ID NO: 533314 - RNA, 19 nt, Artificial Sequence
  Description of Artificial Sequence: Synthetic oligonucleotide
  Antisense strand to SEQ ID NO: 533313
acauucaaucuggaguauc

SEQ ID NO: 533315 - RNA, 19 nt, Artificial Sequence
  Description of Artificial Sequence: Synthetic oligonucleotide
  Sense strand starting at position 3343 of SEQ ID NO: 318056
gagcauugagaaugcuaau

SEQ ID NO: 533316 - RNA, 19 nt, Artificial Sequence
  Description of Artificial Sequence: Synthetic oligonucleotide
  Antisense strand to SEQ ID NO: 533315
auuagcauucucaaugcuc

SEQ ID NO: 533317 - RNA, 19 nt, Artificial Sequence
  Description of Artificial Sequence: Synthetic oligonucleotide
  Sense strand starting at position 3387 of SEQ ID NO: 318056
gaugcauucccauagguuc

SEQ ID NO: 533318 - RNA, 19 nt, Artificial Sequence
  Description of Artificial Sequence: Synthetic oligonucleotide
  Antisense strand to SEQ ID NO: 533317
gaaccuaugggaaugcauc

SEQ ID NO: 533319 - RNA, 19 nt, Artificial Sequence
  Description of Artificial Sequence: Synthetic oligonucleotide
  Sense strand starting at position 3507 of SEQ ID NO: 318056
aucucaagucacuguggaa

SEQ ID NO: 533320 - RNA, 19 nt, Artificial Sequence
  Description of Artificial Sequence: Synthetic oligonucleotide
  Antisense strand to SEQ ID NO: 533319
uuccacagugacuugagau

SEQ ID NO: 533321 - RNA, 19 nt, Artificial Sequence
  Description of Artificial Sequence: Synthetic oligonucleotide
  Sense strand starting at position 3538 of SEQ ID NO: 318056
uuuguaaagucuuccuaac

SEQ ID NO: 533322 - RNA, 19 nt, Artificial Sequence
  Description of Artificial Sequence: Synthetic oligonucleotide
  Antisense strand to SEQ ID NO: 533321
guuaggaagacuuuacaaa

SEQ ID NO: 533323 - RNA, 19 nt, Artificial Sequence
  Description of Artificial Sequence: Synthetic oligonucleotide
  Sense strand starting at position 3540 of SEQ ID NO: 318056
uguaaagucuuccuaacac

SEQ ID NO: 533324 - RNA, 19 nt, Artificial Sequence
  Description of Artificial Sequence: Synthetic oligonucleotide
  Antisense strand to SEQ ID NO: 533323
guguuaggaagacuuuaca

SEQ ID NO: 533325 - RNA, 19 nt, Artificial Sequence
  Description of Artificial Sequence: Synthetic oligonucleotide
  Sense strand starting at position 3597 of SEQ ID NO: 318056
agccauguuuacucaucau

SEQ ID NO: 533326 - RNA, 19 nt, Artificial Sequence
  Description of Artificial Sequence: Synthetic oligonucleotide
  Antisense strand to SEQ ID NO: 533325
augaugaguaaacauggcu

SEQ ID NO: 533327 - RNA, 19 nt, Artificial Sequence
  Description of Artificial Sequence: Synthetic oligonucleotide
  Sense strand starting at position 3656 of SEQ ID NO: 318056
caccuaaugguaugaggua

SEQ ID NO: 533328 - RNA, 19 nt, Artificial Sequence
  Description of Artificial Sequence: Synthetic oligonucleotide
  Antisense strand to SEQ ID NO: 533327
uaccucauaccauuaggug

SEQ ID NO: 533329 - RNA, 19 nt, Artificial Sequence
  Description of Artificial Sequence: Synthetic oligonucleotide
  Sense strand starting at position 3661 of SEQ ID NO: 318056
aaugguaugagguauaugu

SEQ ID NO: 533330 - RNA, 19 nt, Artificial Sequence
  Description of Artificial Sequence: Synthetic oligonucleotide
  Antisense strand to SEQ ID NO: 533329
acauauaccucauaccauu

SEQ ID NO: 533331 - RNA, 19 nt, Artificial Sequence
  Description of Artificial Sequence: Synthetic oligonucleotide
  Sense strand starting at position 3741 of SEQ ID NO: 318056
ggaggugcagguuaguauu

SEQ ID NO: 533332 - RNA, 19 nt, Artificial Sequence
  Description of Artificial Sequence: Synthetic oligonucleotide
  Antisense strand to SEQ ID NO: 533331
aauacuaaccugcaccucc

SEQ ID NO: 533333 - RNA, 19 nt, Artificial Sequence
  Description of Artificial Sequence: Synthetic oligonucleotide
  Sense strand starting at position 3880 of SEQ ID NO: 318056
cuguuaugugucuggaaca

SEQ ID NO: 533334 - RNA, 19 nt, Artificial Sequence
  Description of Artificial Sequence: Synthetic oligonucleotide
  Antisense strand to SEQ ID NO: 533333
uguuccagacacauaacag

SEQ ID NO: 533335 - RNA, 19 nt, Artificial Sequence
  Description of Artificial Sequence: Synthetic oligonucleotide
  Sense strand starting at position 5 of SEQ ID NO: 318057
ucuucuauacugugucaag

SEQ ID NO: 533336 - RNA, 19 nt, Artificial Sequence
  Description of Artificial Sequence: Synthetic oligonucleotide
  Antisense strand to SEQ ID NO: 533335
cuugacacaguauagaaga

SEQ ID NO: 533337 - RNA, 19 nt, Artificial Sequence
  Description of Artificial Sequence: Synthetic oligonucleotide
  Sense strand starting at position 6 of SEQ ID NO: 318057
cuucuauacugugucaaga

SEQ ID NO: 533338 - RNA, 19 nt, Artificial Sequence
  Description of Artificial Sequence: Synthetic oligonucleotide
  Antisense strand to SEQ ID NO: 533337
ucuugacacaguauagaag

SEQ ID NO: 533339 - RNA, 19 nt, Artificial Sequence
  Description of Artificial Sequence: Synthetic oligonucleotide
  Sense strand starting at position 346 of SEQ ID NO: 318057
cuagauggucuagaucagu

SEQ ID NO: 533340 - RNA, 19 nt, Artificial Sequence
  Description of Artificial Sequence: Synthetic oligonucleotide
  Antisense strand to SEQ ID NO: 533339
acugaucuagaccaucuag

SEQ ID NO: 533341 - RNA, 19 nt, Artificial Sequence
  Description of Artificial Sequence: Synthetic oligonucleotide
  Sense strand starting at position 403 of SEQ ID NO: 318057
ggagguuaugcggagugga

SEQ ID NO: 533342 - RNA, 19 nt, Artificial Sequence
  Description of Artificial Sequence: Synthetic oligonucleotide
  Antisense strand to SEQ ID NO: 533341
uccacuccgcauaaccucc

SEQ ID NO: 533343 - RNA, 19 nt, Artificial Sequence
  Description of Artificial Sequence: Synthetic oligonucleotide
  Sense strand starting at position 467 of SEQ ID NO: 318057
gaaggaagguuguccuacu

SEQ ID NO: 533344 - RNA, 19 nt, Artificial Sequence
  Description of Artificial Sequence: Synthetic oligonucleotide
  Antisense strand to SEQ ID NO: 533343
aguaggacaaccuuccuuc

SEQ ID NO: 533345 - RNA, 19 nt, Artificial Sequence
  Description of Artificial Sequence: Synthetic oligonucleotide
  Sense strand starting at position 548 of SEQ ID NO: 318057
gaacuagaaucucaaggag

SEQ ID NO: 533346 - RNA, 19 nt, Artificial Sequence
  Description of Artificial Sequence: Synthetic oligonucleotide
  Antisense strand to SEQ ID NO: 533345
cuccuugagauucuaguuc

SEQ ID NO: 533347 - RNA, 19 nt, Artificial Sequence
  Description of Artificial Sequence: Synthetic oligonucleotide
  Sense strand starting at position 1588 of SEQ ID NO: 318057
aggucuuccuaguuacaga

SEQ ID NO: 533348 - RNA, 19 nt, Artificial Sequence
  Description of Artificial Sequence: Synthetic oligonucleotide
  Antisense strand to SEQ ID NO: 533347
ucuguaacuaggaagaccu

SEQ ID NO: 533349 - RNA, 19 nt, Artificial Sequence
  Description of Artificial Sequence: Synthetic oligonucleotide
  Sense strand starting at position 1599 of SEQ ID NO: 318057
guuacagaguccucccaau

SEQ ID NO: 533350 - RNA, 19 nt, Artificial Sequence
  Description of Artificial Sequence: Synthetic oligonucleotide
  Antisense strand to SEQ ID NO: 533349
auugggaggacucuguaac

SEQ ID NO: 533351 - RNA, 19 nt, Artificial Sequence
  Description of Artificial Sequence: Synthetic oligonucleotide
  Sense strand starting at position 2012 of SEQ ID NO: 318057
cccggugaaggucaugaaa

SEQ ID NO: 533352 - RNA, 19 nt, Artificial Sequence
  Description of Artificial Sequence: Synthetic oligonucleotide
  Antisense strand to SEQ ID NO: 533351
uuucaugaccuucaccggg

SEQ ID NO: 533353 - RNA, 19 nt, Artificial Sequence
  Description of Artificial Sequence: Synthetic oligonucleotide
  Sense strand starting at position 2068 of SEQ ID NO: 318057
gcgcaaaugcucguugcau

SEQ ID NO: 533354 - RNA, 19 nt, Artificial Sequence
  Description of Artificial Sequence: Synthetic oligonucleotide
  Antisense strand to SEQ ID NO: 533353
augcaacgagcauuugcgc

SEQ ID NO: 533355 - RNA, 19 nt, Artificial Sequence
  Description of Artificial Sequence: Synthetic oligonucleotide
  Sense strand starting at position 2163 of SEQ ID NO: 318057
acgccuuccggaaggaguu

SEQ ID NO: 533356 - RNA, 19 nt, Artificial Sequence
  Description of Artificial Sequence: Synthetic oligonucleotide
  Antisense strand to SEQ ID NO: 533355
aacuccuuccggaaggcgu

SEQ ID NO: 533357 - RNA, 19 nt, Artificial Sequence
  Description of Artificial Sequence: Synthetic oligonucleotide
  Sense strand starting at position 2170 of SEQ ID NO: 318057
ccggaaggaguuuguuaca

SEQ ID NO: 533358 - RNA, 19 nt, Artificial Sequence
  Description of Artificial Sequence: Synthetic oligonucleotide
  Antisense strand to SEQ ID NO: 533357
uguaacaaacuccuuccgg

SEQ ID NO: 533359 - RNA, 19 nt, Artificial Sequence
  Description of Artificial Sequence: Synthetic oligonucleotide
  Sense strand starting at position 2177 of SEQ ID NO: 318057
gaguuuguuacacgagguc

SEQ ID NO: 533360 - RNA, 19 nt, Artificial Sequence
  Description of Artificial Sequence: Synthetic oligonucleotide
  Antisense strand to SEQ ID NO: 533359
gaccucguguaacaaacuc

SEQ ID NO: 533361 - RNA, 19 nt, Artificial Sequence
  Description of Artificial Sequence: Synthetic oligonucleotide
  Sense strand starting at position 2273 of SEQ ID NO: 318057
ggcagaaguuugguuacag

SEQ ID NO: 533362 - RNA, 19 nt, Artificial Sequence
  Description of Artificial Sequence: Synthetic oligonucleotide
  Antisense strand to SEQ ID NO: 533361
cuguaaccaaacuucugcc

SEQ ID NO: 533363 - RNA, 19 nt, Artificial Sequence
  Description of Artificial Sequence: Synthetic oligonucleotide
  Sense strand starting at position 2274 of SEQ ID NO: 318057
gcagaaguuugguuacagu

SEQ ID NO: 533364 - RNA, 19 nt, Artificial Sequence
  Description of Artificial Sequence: Synthetic oligonucleotide
  Antisense strand to SEQ ID NO: 533363
acuguaaccaaacuucugc

SEQ ID NO: 533365 - RNA, 19 nt, Artificial Sequence
  Description of Artificial Sequence: Synthetic oligonucleotide
  Sense strand starting at position 2312 of SEQ ID NO: 318057
accggaaugcucgacggaa

SEQ ID NO: 533366 - RNA, 19 nt, Artificial Sequence
  Description of Artificial Sequence: Synthetic oligonucleotide
  Antisense strand to SEQ ID NO: 533365
uuccgucgagcauuccggu

SEQ ID NO: 533367 - RNA, 19 nt, Artificial Sequence
  Description of Artificial Sequence: Synthetic oligonucleotide
  Sense strand starting at position 2469 of SEQ ID NO: 318057
gcuaaaucgguacggcaga

SEQ ID NO: 533368 - RNA, 19 nt, Artificial Sequence
  Description of Artificial Sequence: Synthetic oligonucleotide
  Antisense strand to SEQ ID NO: 533367
ucugccguaccgauuuagc

SEQ ID NO: 533369 - RNA, 19 nt, Artificial Sequence
  Description of Artificial Sequence: Synthetic oligonucleotide
  Sense strand starting at position 2795 of SEQ ID NO: 318057
uuagcaucucaacgguauu

SEQ ID NO: 533370 - RNA, 19 nt, Artificial Sequence
  Description of Artificial Sequence: Synthetic oligonucleotide
  Antisense strand to SEQ ID NO: 533369
aauaccguugagaugcuaa

SEQ ID NO: 533371 - RNA, 19 nt, Artificial Sequence
  Description of Artificial Sequence: Synthetic oligonucleotide
  Sense strand starting at position 2851 of SEQ ID NO: 318057
auuaguacucccuaagagu

SEQ ID NO: 533372 - RNA, 19 nt, Artificial Sequence
  Description of Artificial Sequence: Synthetic oligonucleotide
  Antisense strand to SEQ ID NO: 533371
acucuuagggaguacuaau

SEQ ID NO: 533373 - RNA, 19 nt, Artificial Sequence
  Description of Artificial Sequence: Synthetic oligonucleotide
  Sense strand starting at position 2858 of SEQ ID NO: 318057
cucccuaagaguuggagau

SEQ ID NO: 533374 - RNA, 19 nt, Artificial Sequence
  Description of Artificial Sequence: Synthetic oligonucleotide
  Antisense strand to SEQ ID NO: 533373
aucuccaacucuuagggag

SEQ ID NO: 533375 - RNA, 19 nt, Artificial Sequence
  Description of Artificial Sequence: Synthetic oligonucleotide
  Sense strand starting at position 2868 of SEQ ID NO: 318057
guuggagaucuuuacuuac

SEQ ID NO: 533376 - RNA, 19 nt, Artificial Sequence
  Description of Artificial Sequence: Synthetic oligonucleotide
  Antisense strand to SEQ ID NO: 533375
guaaguaaagaucuccaac

SEQ ID NO: 533377 - RNA, 19 nt, Artificial Sequence
  Description of Artificial Sequence: Synthetic oligonucleotide
  Sense strand starting at position 2870 of SEQ ID NO: 318057
uggagaucuuuacuuacac

SEQ ID NO: 533378 - RNA, 19 nt, Artificial Sequence
  Description of Artificial Sequence: Synthetic oligonucleotide
  Antisense strand to SEQ ID NO: 533377
guguaaguaaagaucucca

SEQ ID NO: 533379 - RNA, 19 nt, Artificial Sequence
  Description of Artificial Sequence: Synthetic oligonucleotide
  Sense strand starting at position 2903 of SEQ ID NO: 318057
ucaaucauccuuggucuga

SEQ ID NO: 533380 - RNA, 19 nt, Artificial Sequence
  Description of Artificial Sequence: Synthetic oligonucleotide
  Antisense strand to SEQ ID NO: 533379
ucagaccaaggaugauuga

SEQ ID NO: 533381 - RNA, 19 nt, Artificial Sequence
  Description of Artificial Sequence: Synthetic oligonucleotide
  Sense strand starting at position 3208 of SEQ ID NO: 318057
ugccuuagggacuaucuaa

SEQ ID NO: 533382 - RNA, 19 nt, Artificial Sequence
  Description of Artificial Sequence: Synthetic oligonucleotide
  Antisense strand to SEQ ID NO: 533381
uuagauagucccuaaggca

SEQ ID NO: 533383 - RNA, 19 nt, Artificial Sequence
  Description of Artificial Sequence: Synthetic oligonucleotide
  Sense strand starting at position 3273 of SEQ ID NO: 318057
uuuccucuggcaugaaaga

SEQ ID NO: 533384 - RNA, 19 nt, Artificial Sequence
  Description of Artificial Sequence: Synthetic oligonucleotide
  Antisense strand to SEQ ID NO: 533383
ucuuucaugccagaggaaa

SEQ ID NO: 533385 - RNA, 19 nt, Artificial Sequence
  Description of Artificial Sequence: Synthetic oligonucleotide
  Sense strand starting at position 3351 of SEQ ID NO: 318057
guuaacuacuuauugagaa

SEQ ID NO: 533386 - RNA, 19 nt, Artificial Sequence
  Description of Artificial Sequence: Synthetic oligonucleotide
  Antisense strand to SEQ ID NO: 533385
uucucaauaaguaguuaac

SEQ ID NO: 533387 - RNA, 19 nt, Artificial Sequence
  Description of Artificial Sequence: Synthetic oligonucleotide
  Sense strand starting at position 3355 of SEQ ID NO: 318057
acuacuuauugagaacaug

SEQ ID NO: 533388 - RNA, 19 nt, Artificial Sequence
  Description of Artificial Sequence: Synthetic oligonucleotide
  Antisense strand to SEQ ID NO: 533387
cauguucucaauaaguagu

SEQ ID NO: 533389 - RNA, 19 nt, Artificial Sequence
  Description of Artificial Sequence: Synthetic oligonucleotide
  Sense strand starting at position 3419 of SEQ ID NO: 318057
aguccuugucaccaagauu

SEQ ID NO: 533390 - RNA, 19 nt, Artificial Sequence
  Description of Artificial Sequence: Synthetic oligonucleotide
  Antisense strand to SEQ ID NO: 533389
aaucuuggugacaaggacu

SEQ ID NO: 533391 - RNA, 19 nt, Artificial Sequence
  Description of Artificial Sequence: Synthetic oligonucleotide
  Sense strand starting at position 3731 of SEQ ID NO: 318057
gggcauuaguucucauugu

SEQ ID NO: 533392 - RNA, 19 nt, Artificial Sequence
  Description of Artificial Sequence: Synthetic oligonucleotide
  Antisense strand to SEQ ID NO: 533391
acaaugagaacuaaugccc

SEQ ID NO: 533393 - RNA, 19 nt, Artificial Sequence
  Description of Artificial Sequence: Synthetic oligonucleotide
  Sense strand starting at position 3776 of SEQ ID NO: 318057
gggauucuuauggguuagu

SEQ ID NO: 533394 - RNA, 19 nt, Artificial Sequence
  Description of Artificial Sequence: Synthetic oligonucleotide
  Antisense strand to SEQ ID NO: 533393
acuaacccauaagaauccc

SEQ ID NO: 533395 - RNA, 19 nt, Artificial Sequence
  Description of Artificial Sequence: Synthetic oligonucleotide
  Sense strand starting at position 3777 of SEQ ID NO: 318057
ggauucuuauggguuagua

SEQ ID NO: 533396 - RNA, 19 nt, Artificial Sequence
  Description of Artificial Sequence: Synthetic oligonucleotide
  Antisense strand to SEQ ID NO: 533395
uacuaacccauaagaaucc

SEQ ID NO: 533397 - RNA, 19 nt, Artificial Sequence
  Description of Artificial Sequence: Synthetic oligonucleotide
  Sense strand starting at position 3779 of SEQ ID NO: 318057
auucuuauggguuaguagu

SEQ ID NO: 533398 - RNA, 19 nt, Artificial Sequence
  Description of Artificial Sequence: Synthetic oligonucleotide
  Antisense strand to SEQ ID NO: 533397
acuacuaacccauaagaau

SEQ ID NO: 533399 - RNA, 19 nt, Artificial Sequence
  Description of Artificial Sequence: Synthetic oligonucleotide
  Sense strand starting at position 3789 of SEQ ID NO: 318057
guuaguaguuguguuggga

SEQ ID NO: 533400 - RNA, 19 nt, Artificial Sequence
  Description of Artificial Sequence: Synthetic oligonucleotide
  Antisense strand to SEQ ID NO: 533399
ucccaacacaacuacuaac

SEQ ID NO: 533401 - RNA, 19 nt, Artificial Sequence
  Description of Artificial Sequence: Synthetic oligonucleotide
  Sense strand starting at position 3792 of SEQ ID NO: 318057
aguaguuguguugggauaa

SEQ ID NO: 533402 - RNA, 19 nt, Artificial Sequence
  Description of Artificial Sequence: Synthetic oligonucleotide
  Antisense strand to SEQ ID NO: 533401
uuaucccaacacaacuacu

SEQ ID NO: 533403 - RNA, 19 nt, Artificial Sequence
  Description of Artificial Sequence: Synthetic oligonucleotide
  Sense strand starting at position 3808 of SEQ ID NO: 318057
uaagcaggagucuauaacu

SEQ ID NO: 533404 - RNA, 19 nt, Artificial Sequence
  Description of Artificial Sequence: Synthetic oligonucleotide
  Antisense strand to SEQ ID NO: 533403
aguuauagacuccugcuua

SEQ ID NO: 533405 - RNA, 19 nt, Artificial Sequence
  Description of Artificial Sequence: Synthetic oligonucleotide
  Sense strand starting at position 3860 of SEQ ID NO: 318057
cucuguucucugcagguga

SEQ ID NO: 533406 - RNA, 19 nt, Artificial Sequence
  Description of Artificial Sequence: Synthetic oligonucleotide
  Antisense strand to SEQ ID NO: 533405
ucaccugcagagaacagag

SEQ ID NO: 533407 - RNA, 19 nt, Artificial Sequence
  Description of Artificial Sequence: Synthetic oligonucleotide
  Sense strand starting at position 3928 of SEQ ID NO: 318057
gcccuaugugcugaauggu

SEQ ID NO: 533408 - RNA, 19 nt, Artificial Sequence
  Description of Artificial Sequence: Synthetic oligonucleotide
  Antisense strand to SEQ ID NO: 533407
accauucagcacauagggc

SEQ ID NO: 533409 - RNA, 19 nt, Artificial Sequence
  Description of Artificial Sequence: Synthetic oligonucleotide
  Sense strand starting at position 3945 of SEQ ID NO: 318057
gugggugugguccauauau

SEQ ID NO: 533410 - RNA, 19 nt, Artificial Sequence
  Description of Artificial Sequence: Synthetic oligonucleotide
  Antisense strand to SEQ ID NO: 533409
auauauggaccacacccac

SEQ ID NO: 533411 - RNA, 19 nt, Artificial Sequence
  Description of Artificial Sequence: Synthetic oligonucleotide
  Sense strand starting at position 3947 of SEQ ID NO: 318057
gggugugguccauauauuc

SEQ ID NO: 533412 - RNA, 19 nt, Artificial Sequence
  Description of Artificial Sequence: Synthetic oligonucleotide
  Antisense strand to SEQ ID NO: 533411
gaauauauggaccacaccc

SEQ ID NO: 533413 - RNA, 19 nt, Artificial Sequence
  Description of Artificial Sequence: Synthetic oligonucleotide
  Sense strand starting at position 3955 of SEQ ID NO: 318057
uccauauauuccuuuaggu

SEQ ID NO: 533414 - RNA, 19 nt, Artificial Sequence
  Description of Artificial Sequence: Synthetic oligonucleotide
  Antisense strand to SEQ ID NO: 533413
accuaaaggaauauaugga

SEQ ID NO: 533415 - RNA, 19 nt, Artificial Sequence
  Description of Artificial Sequence: Synthetic oligonucleotide
  Sense strand starting at position 134 of SEQ ID NO: 318058
auacaugauuucugggaga

SEQ ID NO: 533416 - RNA, 19 nt, Artificial Sequence
  Description of Artificial Sequence: Synthetic oligonucleotide
  Antisense strand to SEQ ID NO: 533415
ucucccagaaaucauguau

SEQ ID NO: 533417 - RNA, 19 nt, Artificial Sequence
  Description of Artificial Sequence: Synthetic oligonucleotide
  Sense strand starting at position 196 of SEQ ID NO: 318058
ccauuacucccaggucaga

SEQ ID NO: 533418 - RNA, 19 nt, Artificial Sequence
  Description of Artificial Sequence: Synthetic oligonucleotide
  Antisense strand to SEQ ID NO: 533417
ucugaccugggaguaaugg

SEQ ID NO: 533419 - RNA, 19 nt, Artificial Sequence
  Description of Artificial Sequence: Synthetic oligonucleotide
  Sense strand starting at position 214 of SEQ ID NO: 318058
aguccuaguugugcaauuu

SEQ ID NO: 533420 - RNA, 19 nt, Artificial Sequence
  Description of Artificial Sequence: Synthetic oligonucleotide
  Antisense strand to SEQ ID NO: 533419
aaauugcacaacuaggacu

SEQ ID NO: 533421 - RNA, 19 nt, Artificial Sequence
  Description of Artificial Sequence: Synthetic oligonucleotide
  Sense strand starting at position 215 of SEQ ID NO: 318058
guccuaguugugcaauuuc

SEQ ID NO: 533422 - RNA, 19 nt, Artificial Sequence
  Description of Artificial Sequence: Synthetic oligonucleotide
  Antisense strand to SEQ ID NO: 533421
gaaauugcacaacuaggac

SEQ ID NO: 533423 - RNA, 19 nt, Artificial Sequence
  Description of Artificial Sequence: Synthetic oligonucleotide
  Sense strand starting at position 278 of SEQ ID NO: 318058
acauauuugucugauacuu

SEQ ID NO: 533424 - RNA, 19 nt, Artificial Sequence
  Description of Artificial Sequence: Synthetic oligonucleotide
  Antisense strand to SEQ ID NO: 533423
aaguaucagacaaauaugu

SEQ ID NO: 533425 - RNA, 19 nt, Artificial Sequence
  Description of Artificial Sequence: Synthetic oligonucleotide
  Sense strand starting at position 280 of SEQ ID NO: 318058
auauuugucugauacuuga

SEQ ID NO: 533426 - RNA, 19 nt, Artificial Sequence
  Description of Artificial Sequence: Synthetic oligonucleotide
  Antisense strand to SEQ ID NO: 533425
ucaaguaucagacaaauau

SEQ ID NO: 533427 - RNA, 19 nt, Artificial Sequence
  Description of Artificial Sequence: Synthetic oligonucleotide
  Sense strand starting at position 283 of SEQ ID NO: 318058
uuugucugauacuugauua

SEQ ID NO: 533428 - RNA, 19 nt, Artificial Sequence
  Description of Artificial Sequence: Synthetic oligonucleotide
  Antisense strand to SEQ ID NO: 533427
uaaucaaguaucagacaaa

SEQ ID NO: 533429 - RNA, 19 nt, Artificial Sequence
  Description of Artificial Sequence: Synthetic oligonucleotide
  Sense strand starting at position 350 of SEQ ID NO: 318058
uuguguaaagcugaagagu

SEQ ID NO: 533430 - RNA, 19 nt, Artificial Sequence
  Description of Artificial Sequence: Synthetic oligonucleotide
  Antisense strand to SEQ ID NO: 533429
acucuucagcuuuacacaa

SEQ ID NO: 533431 - RNA, 19 nt, Artificial Sequence
  Description of Artificial Sequence: Synthetic oligonucleotide
  Sense strand starting at position 353 of SEQ ID NO: 318058
uguaaagcugaagaguaua

SEQ ID NO: 533432 - RNA, 19 nt, Artificial Sequence
  Description of Artificial Sequence: Synthetic oligonucleotide
  Antisense strand to SEQ ID NO: 533431
uauacucuucagcuuuaca

SEQ ID NO: 533433 - RNA, 19 nt, Artificial Sequence
  Description of Artificial Sequence: Synthetic oligonucleotide
  Sense strand starting at position 506 of SEQ ID NO: 318058
uugucucaggaguaauucu

SEQ ID NO: 533434 - RNA, 19 nt, Artificial Sequence
  Description of Artificial Sequence: Synthetic oligonucleotide
  Antisense strand to SEQ ID NO: 533433
agaauuacuccugagacaa

SEQ ID NO: 533435 - RNA, 19 nt, Artificial Sequence
  Description of Artificial Sequence: Synthetic oligonucleotide
  Sense strand starting at position 584 of SEQ ID NO: 318058
ggacuucggugguucaaau

SEQ ID NO: 533436 - RNA, 19 nt, Artificial Sequence
  Description of Artificial Sequence: Synthetic oligonucleotide
  Antisense strand to SEQ ID NO: 533435
auuugaaccaccgaagucc

SEQ ID NO: 533437 - RNA, 19 nt, Artificial Sequence
  Description of Artificial Sequence: Synthetic oligonucleotide
  Sense strand starting at position 755 of SEQ ID NO: 318058
gaaucuaaccgacauuagu

SEQ ID NO: 533438 - RNA, 19 nt, Artificial Sequence
  Description of Artificial Sequence: Synthetic oligonucleotide
  Antisense strand to SEQ ID NO: 533437
acuaaugucgguuagauuc

SEQ ID NO: 533439 - RNA, 19 nt, Artificial Sequence
  Description of Artificial Sequence: Synthetic oligonucleotide
  Sense strand starting at position 858 of SEQ ID NO: 318058
ugcccagcuuuaucugaga

SEQ ID NO: 533440 - RNA, 19 nt, Artificial Sequence
  Description of Artificial Sequence: Synthetic oligonucleotide
  Antisense strand to SEQ ID NO: 533439
ucucagauaaagcugggca

SEQ ID NO: 533441 - RNA, 19 nt, Artificial Sequence
  Description of Artificial Sequence: Synthetic oligonucleotide
  Sense strand starting at position 980 of SEQ ID NO: 318058
cuuagucucuuggcauaaa

SEQ ID NO: 533442 - RNA, 19 nt, Artificial Sequence
  Description of Artificial Sequence: Synthetic oligonucleotide
  Antisense strand to SEQ ID NO: 533441
uuuaugccaagagacuaag

SEQ ID NO: 533443 - RNA, 19 nt, Artificial Sequence
  Description of Artificial Sequence: Synthetic oligonucleotide
  Sense strand starting at position 1325 of SEQ ID NO: 318058
ggagauugggccugaguca

SEQ ID NO: 533444 - RNA, 19 nt, Artificial Sequence
  Description of Artificial Sequence: Synthetic oligonucleotide
  Antisense strand to SEQ ID NO: 533443
ugacucaggcccaaucucc

SEQ ID NO: 533445 - RNA, 19 nt, Artificial Sequence
  Description of Artificial Sequence: Synthetic oligonucleotide
  Sense strand starting at position 1688 of SEQ ID NO: 318058
cgaggauccgcggacgaua

SEQ ID NO: 533446 - RNA, 19 nt, Artificial Sequence
  Description of Artificial Sequence: Synthetic oligonucleotide
  Antisense strand to SEQ ID NO: 533445
uaucguccgcggauccucg

SEQ ID NO: 533447 - RNA, 19 nt, Artificial Sequence
  Description of Artificial Sequence: Synthetic oligonucleotide
  Sense strand starting at position 1772 of SEQ ID NO: 318058
gcugguauuuccuugcgga

SEQ ID NO: 533448 - RNA, 19 nt, Artificial Sequence
  Description of Artificial Sequence: Synthetic oligonucleotide
  Antisense strand to SEQ ID NO: 533447
uccgcaaggaaauaccagc

SEQ ID NO: 533449 - RNA, 19 nt, Artificial Sequence
  Description of Artificial Sequence: Synthetic oligonucleotide
  Sense strand starting at position 1773 of SEQ ID NO: 318058
cugguauuuccuugcggau

SEQ ID NO: 533450 - RNA, 19 nt, Artificial Sequence
  Description of Artificial Sequence: Synthetic oligonucleotide
  Antisense strand to SEQ ID NO: 533449
auccgcaaggaaauaccag

SEQ ID NO: 533451 - RNA, 19 nt, Artificial Sequence
  Description of Artificial Sequence: Synthetic oligonucleotide
  Sense strand starting at position 1785 of SEQ ID NO: 318058
ugcggaugaucuucccaaa

SEQ ID NO: 533452 - RNA, 19 nt, Artificial Sequence
  Description of Artificial Sequence: Synthetic oligonucleotide
  Antisense strand to SEQ ID NO: 533451
uuugggaagaucauccgca

SEQ ID NO: 533453 - RNA, 19 nt, Artificial Sequence
  Description of Artificial Sequence: Synthetic oligonucleotide
  Sense strand starting at position 2061 of SEQ ID NO: 318058
ggaaguuccuggucuugag

SEQ ID NO: 533454 - RNA, 19 nt, Artificial Sequence
  Description of Artificial Sequence: Synthetic oligonucleotide
  Antisense strand to SEQ ID NO: 533453
cucaagaccaggaacuucc

SEQ ID NO: 533455 - RNA, 19 nt, Artificial Sequence
  Description of Artificial Sequence: Synthetic oligonucleotide
  Sense strand starting at position 2086 of SEQ ID NO: 318058
ggagauuccuaagucguuu

SEQ ID NO: 533456 - RNA, 19 nt, Artificial Sequence
  Description of Artificial Sequence: Synthetic oligonucleotide
  Antisense strand to SEQ ID NO: 533455
aaacgacuuaggaaucucc

SEQ ID NO: 533457 - RNA, 19 nt, Artificial Sequence
  Description of Artificial Sequence: Synthetic oligonucleotide
  Sense strand starting at position 2410 of SEQ ID NO: 318058
uaagaaucuuuggagauga

SEQ ID NO: 533458 - RNA, 19 nt, Artificial Sequence
  Description of Artificial Sequence: Synthetic oligonucleotide
  Antisense strand to SEQ ID NO: 533457
ucaucuccaaagauucuua

SEQ ID NO: 533459 - RNA, 19 nt, Artificial Sequence
  Description of Artificial Sequence: Synthetic oligonucleotide
  Sense strand starting at position 2458 of SEQ ID NO: 318058
ccuagacugcucugcaaag

SEQ ID NO: 533460 - RNA, 19 nt, Artificial Sequence
  Description of Artificial Sequence: Synthetic oligonucleotide
  Antisense strand to SEQ ID NO: 533459
cuuugcagagcagucuagg

SEQ ID NO: 533461 - RNA, 19 nt, Artificial Sequence
  Description of Artificial Sequence: Synthetic oligonucleotide
  Sense strand starting at position 2459 of SEQ ID NO: 318058
cuagacugcucugcaaaga

SEQ ID NO: 533462 - RNA, 19 nt, Artificial Sequence
  Description of Artificial Sequence: Synthetic oligonucleotide
  Antisense strand to SEQ ID NO: 533461
ucuuugcagagcagucuag

SEQ ID NO: 533463 - RNA, 19 nt, Artificial Sequence
  Description of Artificial Sequence: Synthetic oligonucleotide
  Sense strand starting at position 2703 of SEQ ID NO: 318058
auaccagaccucuaagugu

SEQ ID NO: 533464 - RNA, 19 nt, Artificial Sequence
  Description of Artificial Sequence: Synthetic oligonucleotide
  Antisense strand to SEQ ID NO: 533463
acacuuagaggucugguau

SEQ ID NO: 533465 - RNA, 19 nt, Artificial Sequence
  Description of Artificial Sequence: Synthetic oligonucleotide
  Sense strand starting at position 2709 of SEQ ID NO: 318058
gaccucuaaguguacguau

SEQ ID NO: 533466 - RNA, 19 nt, Artificial Sequence
  Description of Artificial Sequence: Synthetic oligonucleotide
  Antisense strand to SEQ ID NO: 533465
auacguacacuuagagguc

SEQ ID NO: 533467 - RNA, 19 nt, Artificial Sequence
  Description of Artificial Sequence: Synthetic oligonucleotide
  Sense strand starting at position 3090 of SEQ ID NO: 318058
gguugccuuuaaucucaaa

SEQ ID NO: 533468 - RNA, 19 nt, Artificial Sequence
  Description of Artificial Sequence: Synthetic oligonucleotide
  Antisense strand to SEQ ID NO: 533467
uuugagauuaaaggcaacc

SEQ ID NO: 533469 - RNA, 19 nt, Artificial Sequence
  Description of Artificial Sequence: Synthetic oligonucleotide
  Sense strand starting at position 3264 of SEQ ID NO: 318058
ccuacaaguuagguuucua

SEQ ID NO: 533470 - RNA, 19 nt, Artificial Sequence
  Description of Artificial Sequence: Synthetic oligonucleotide
  Antisense strand to SEQ ID NO: 533469
uagaaaccuaacuuguagg

SEQ ID NO: 533471 - RNA, 19 nt, Artificial Sequence
  Description of Artificial Sequence: Synthetic oligonucleotide
  Sense strand starting at position 3279 of SEQ ID NO: 318058
ucuaacuuuccaggugaua

SEQ ID NO: 533472 - RNA, 19 nt, Artificial Sequence
  Description of Artificial Sequence: Synthetic oligonucleotide
  Antisense strand to SEQ ID NO: 533471
uaucaccuggaaaguuaga

SEQ ID NO: 533473 - RNA, 19 nt, Artificial Sequence
  Description of Artificial Sequence: Synthetic oligonucleotide
  Sense strand starting at position 3338 of SEQ ID NO: 318058
gauacaagggaaugucuuu

SEQ ID NO: 533474 - RNA, 19 nt, Artificial Sequence
  Description of Artificial Sequence: Synthetic oligonucleotide
  Antisense strand to SEQ ID NO: 533473
aaagacauucccuuguauc

SEQ ID NO: 533475 - RNA, 19 nt, Artificial Sequence
  Description of Artificial Sequence: Synthetic oligonucleotide
  Sense strand starting at position 3344 of SEQ ID NO: 318058
agggaaugucuuuguagga

SEQ ID NO: 533476 - RNA, 19 nt, Artificial Sequence
  Description of Artificial Sequence: Synthetic oligonucleotide
  Antisense strand to SEQ ID NO: 533475
uccuacaaagacauucccu

SEQ ID NO: 533477 - RNA, 19 nt, Artificial Sequence
  Description of Artificial Sequence: Synthetic oligonucleotide
  Sense strand starting at position 3345 of SEQ ID NO: 318058
gggaaugucuuuguaggaa

SEQ ID NO: 533478 - RNA, 19 nt, Artificial Sequence
  Description of Artificial Sequence: Synthetic oligonucleotide
  Antisense strand to SEQ ID NO: 533477
uuccuacaaagacauuccc

SEQ ID NO: 533479 - RNA, 19 nt, Artificial Sequence
  Description of Artificial Sequence: Synthetic oligonucleotide
  Sense strand starting at position 3392 of SEQ ID NO: 318058
guaucauguccgcaacuua

SEQ ID NO: 533480 - RNA, 19 nt, Artificial Sequence
  Description of Artificial Sequence: Synthetic oligonucleotide
  Antisense strand to SEQ ID NO: 533479
uaaguugcggacaugauac

SEQ ID NO: 533481 - RNA, 19 nt, Artificial Sequence
  Description of Artificial Sequence: Synthetic oligonucleotide
  Sense strand starting at position 3433 of SEQ ID NO: 318058
agugucugucuauagguaa

SEQ ID NO: 533482 - RNA, 19 nt, Artificial Sequence
  Description of Artificial Sequence: Synthetic oligonucleotide
  Antisense strand to SEQ ID NO: 533481
uuaccuauagacagacacu

SEQ ID NO: 533483 - RNA, 19 nt, Artificial Sequence
  Description of Artificial Sequence: Synthetic oligonucleotide
  Sense strand starting at position 3436 of SEQ ID NO: 318058
gucugucuauagguaauua

SEQ ID NO: 533484 - RNA, 19 nt, Artificial Sequence
  Description of Artificial Sequence: Synthetic oligonucleotide
  Antisense strand to SEQ ID NO: 533483
uaauuaccuauagacagac

SEQ ID NO: 533485 - RNA, 19 nt, Artificial Sequence
  Description of Artificial Sequence: Synthetic oligonucleotide
  Sense strand starting at position 3440 of SEQ ID NO: 318058
gucuauagguaauuagaga

SEQ ID NO: 533486 - RNA, 19 nt, Artificial Sequence
  Description of Artificial Sequence: Synthetic oligonucleotide
  Antisense strand to SEQ ID NO: 533485
ucucuaauuaccuauagac

SEQ ID NO: 533487 - RNA, 19 nt, Artificial Sequence
  Description of Artificial Sequence: Synthetic oligonucleotide
  Sense strand starting at position 3694 of SEQ ID NO: 318058
cccuuaauuccagacuggu

SEQ ID NO: 533488 - RNA, 19 nt, Artificial Sequence
  Description of Artificial Sequence: Synthetic oligonucleotide
  Antisense strand to SEQ ID NO: 533487
accagucuggaauuaaggg

SEQ ID NO: 533489 - RNA, 19 nt, Artificial Sequence
  Description of Artificial Sequence: Synthetic oligonucleotide
  Sense strand starting at position 3700 of SEQ ID NO: 318058
auuccagacuggucuguga

SEQ ID NO: 533490 - RNA, 19 nt, Artificial Sequence
  Description of Artificial Sequence: Synthetic oligonucleotide
  Antisense strand to SEQ ID NO: 533489
ucacagaccagucuggaau

SEQ ID NO: 533491 - RNA, 19 nt, Artificial Sequence
  Description of Artificial Sequence: Synthetic oligonucleotide
  Sense strand starting at position 3704 of SEQ ID NO: 318058
cagacuggucugugacaua

SEQ ID NO: 533492 - RNA, 19 nt, Artificial Sequence
  Description of Artificial Sequence: Synthetic oligonucleotide
  Antisense strand to SEQ ID NO: 533491
uaugucacagaccagucug

SEQ ID NO: 533493 - RNA, 19 nt, Artificial Sequence
  Description of Artificial Sequence: Synthetic oligonucleotide
  Sense strand starting at position 3978 of SEQ ID NO: 318058
aucucuuuccuggaguacu

SEQ ID NO: 533494 - RNA, 19 nt, Artificial Sequence
  Description of Artificial Sequence: Synthetic oligonucleotide
  Antisense strand to SEQ ID NO: 533493
aguacuccaggaaagagau

SEQ ID NO: 533495 - RNA, 19 nt, Artificial Sequence
  Description of Artificial Sequence: Synthetic oligonucleotide
  Sense strand starting at position 68 of SEQ ID NO: 318059
ggaagagacaucuguccac

SEQ ID NO: 533496 - RNA, 19 nt, Artificial Sequence
  Description of Artificial Sequence: Synthetic oligonucleotide
  Antisense strand to SEQ ID NO: 533495
guggacagaugucucuucc

SEQ ID NO: 533497 - RNA, 19 nt, Artificial Sequence
  Description of Artificial Sequence: Synthetic oligonucleotide
  Sense strand starting at position 75 of SEQ ID NO: 318059
acaucuguccacugaguca

SEQ ID NO: 533498 - RNA, 19 nt, Artificial Sequence
  Description of Artificial Sequence: Synthetic oligonucleotide
  Antisense strand to SEQ ID NO: 533497
ugacucaguggacagaugu

SEQ ID NO: 533499 - RNA, 19 nt, Artificial Sequence
  Description of Artificial Sequence: Synthetic oligonucleotide
  Sense strand starting at position 280 of SEQ ID NO: 318059
augcaaagccaguagucau

SEQ ID NO: 533500 - RNA, 19 nt, Artificial Sequence
  Description of Artificial Sequence: Synthetic oligonucleotide
  Antisense strand to SEQ ID NO: 533499
augacuacuggcuuugcau

SEQ ID NO: 533501 - RNA, 19 nt, Artificial Sequence
  Description of Artificial Sequence: Synthetic oligonucleotide
  Sense strand starting at position 384 of SEQ ID NO: 318059
ucaguaauuucuguuccuu

SEQ ID NO: 533502 - RNA, 19 nt, Artificial Sequence
  Description of Artificial Sequence: Synthetic oligonucleotide
  Antisense strand to SEQ ID NO: 533501
aaggaacagaaauuacuga

SEQ ID NO: 533503 - RNA, 19 nt, Artificial Sequence
  Description of Artificial Sequence: Synthetic oligonucleotide
  Sense strand starting at position 531 of SEQ ID NO: 318059
aaaucccaguggucuguua

SEQ ID NO: 533504 - RNA, 19 nt, Artificial Sequence
  Description of Artificial Sequence: Synthetic oligonucleotide
  Antisense strand to SEQ ID NO: 533503
uaacagaccacugggauuu

SEQ ID NO: 533505 - RNA, 19 nt, Artificial Sequence
  Description of Artificial Sequence: Synthetic oligonucleotide
  Sense strand starting at position 533 of SEQ ID NO: 318059
aucccaguggucuguuaga

SEQ ID NO: 533506 - RNA, 19 nt, Artificial Sequence
  Description of Artificial Sequence: Synthetic oligonucleotide
  Antisense strand to SEQ ID NO: 533505
ucuaacagaccacugggau

SEQ ID NO: 533507 - RNA, 19 nt, Artificial Sequence
  Description of Artificial Sequence: Synthetic oligonucleotide
  Sense strand starting at position 569 of SEQ ID NO: 318059
uggagaagcuccucaaauu

SEQ ID NO: 533508 - RNA, 19 nt, Artificial Sequence
  Description of Artificial Sequence: Synthetic oligonucleotide
  Antisense strand to SEQ ID NO: 533507
aauuugaggagcuucucca

SEQ ID NO: 533509 - RNA, 19 nt, Artificial Sequence
  Description of Artificial Sequence: Synthetic oligonucleotide
  Sense strand starting at position 921 of SEQ ID NO: 318059
ugguauagguaugugcuaa

SEQ ID NO: 533510 - RNA, 19 nt, Artificial Sequence
  Description of Artificial Sequence: Synthetic oligonucleotide
  Antisense strand to SEQ ID NO: 533509
uuagcacauaccuauacca

SEQ ID NO: 533511 - RNA, 19 nt, Artificial Sequence
  Description of Artificial Sequence: Synthetic oligonucleotide
  Sense strand starting at position 1046 of SEQ ID NO: 318059
guuuccaaaucugucaaau

SEQ ID NO: 533512 - RNA, 19 nt, Artificial Sequence
  Description of Artificial Sequence: Synthetic oligonucleotide
  Antisense strand to SEQ ID NO: 533511
auuugacagauuuggaaac

SEQ ID NO: 533513 - RNA, 19 nt, Artificial Sequence
  Description of Artificial Sequence: Synthetic oligonucleotide
  Sense strand starting at position 1071 of SEQ ID NO: 318059
guggaauucuuguucuaug

SEQ ID NO: 533514 - RNA, 19 nt, Artificial Sequence
  Description of Artificial Sequence: Synthetic oligonucleotide
  Antisense strand to SEQ ID NO: 533513
cauagaacaagaauuccac

SEQ ID NO: 533515 - RNA, 19 nt, Artificial Sequence
  Description of Artificial Sequence: Synthetic oligonucleotide
  Sense strand starting at position 1157 of SEQ ID NO: 318059
acacacgugucuuucucaa

SEQ ID NO: 533516 - RNA, 19 nt, Artificial Sequence
  Description of Artificial Sequence: Synthetic oligonucleotide
  Antisense strand to SEQ ID NO: 533515
uugagaaagacacgugugu

SEQ ID NO: 533517 - RNA, 19 nt, Artificial Sequence
  Description of Artificial Sequence: Synthetic oligonucleotide
  Sense strand starting at position 1292 of SEQ ID NO: 318059
uuuauaugcuagguaaaug

SEQ ID NO: 533518 - RNA, 19 nt, Artificial Sequence
  Description of Artificial Sequence: Synthetic oligonucleotide
  Antisense strand to SEQ ID NO: 533517
cauuuaccuagcauauaaa

SEQ ID NO: 533519 - RNA, 19 nt, Artificial Sequence
  Description of Artificial Sequence: Synthetic oligonucleotide
  Sense strand starting at position 1322 of SEQ ID NO: 318059
gucucuucccacugagauu

SEQ ID NO: 533520 - RNA, 19 nt, Artificial Sequence
  Description of Artificial Sequence: Synthetic oligonucleotide
  Antisense strand to SEQ ID NO: 533519
aaucucagugggaagagac

SEQ ID NO: 533521 - RNA, 19 nt, Artificial Sequence
  Description of Artificial Sequence: Synthetic oligonucleotide
  Sense strand starting at position 1926 of SEQ ID NO: 318059
agugcuuaccugggacaca

SEQ ID NO: 533522 - RNA, 19 nt, Artificial Sequence
  Description of Artificial Sequence: Synthetic oligonucleotide
  Antisense strand to SEQ ID NO: 533521
ugugucccagguaagcacu

SEQ ID NO: 533523 - RNA, 19 nt, Artificial Sequence
  Description of Artificial Sequence: Synthetic oligonucleotide
  Sense strand starting at position 2025 of SEQ ID NO: 318059
ggugacccgaguuauaaua

SEQ ID NO: 533524 - RNA, 19 nt, Artificial Sequence
  Description of Artificial Sequence: Synthetic oligonucleotide
  Antisense strand to SEQ ID NO: 533523
uauuauaacucgggucacc

SEQ ID NO: 533525 - RNA, 19 nt, Artificial Sequence
  Description of Artificial Sequence: Synthetic oligonucleotide
  Sense strand starting at position 2170 of SEQ ID NO: 318059
gcaagaugauuaccgcgaa

SEQ ID NO: 533526 - RNA, 19 nt, Artificial Sequence
  Description of Artificial Sequence: Synthetic oligonucleotide
  Antisense strand to SEQ ID NO: 533525
uucgcgguaaucaucuugc

SEQ ID NO: 533527 - RNA, 19 nt, Artificial Sequence
  Description of Artificial Sequence: Synthetic oligonucleotide
  Sense strand starting at position 2173 of SEQ ID NO: 318059
agaugauuaccgcgaagug

SEQ ID NO: 533528 - RNA, 19 nt, Artificial Sequence
  Description of Artificial Sequence: Synthetic oligonucleotide
  Antisense strand to SEQ ID NO: 533527
cacuucgcgguaaucaucu

SEQ ID NO: 533529 - RNA, 19 nt, Artificial Sequence
  Description of Artificial Sequence: Synthetic oligonucleotide
  Sense strand starting at position 2219 of SEQ ID NO: 318059
ggccauucccucuacaaug

SEQ ID NO: 533530 - RNA, 19 nt, Artificial Sequence
  Description of Artificial Sequence: Synthetic oligonucleotide
  Antisense strand to SEQ ID NO: 533529
cauuguagagggaauggcc

SEQ ID NO: 533531 - RNA, 19 nt, Artificial Sequence
  Description of Artificial Sequence: Synthetic oligonucleotide
  Sense strand starting at position 2257 of SEQ ID NO: 318059
caaauauagugaguucuga

SEQ ID NO: 533532 - RNA, 19 nt, Artificial Sequence
  Description of Artificial Sequence: Synthetic oligonucleotide
  Antisense strand to SEQ ID NO: 533531
ucagaacucacuauauuug

SEQ ID NO: 533533 - RNA, 19 nt, Artificial Sequence
  Description of Artificial Sequence: Synthetic oligonucleotide
  Sense strand starting at position 2322 of SEQ ID NO: 318059
agguuaugguaaguacuuu

SEQ ID NO: 533534 - RNA, 19 nt, Artificial Sequence
  Description of Artificial Sequence: Synthetic oligonucleotide
  Antisense strand to SEQ ID NO: 533533
aaaguacuuaccauaaccu

SEQ ID NO: 533535 - RNA, 19 nt, Artificial Sequence
  Description of Artificial Sequence: Synthetic oligonucleotide
  Sense strand starting at position 2642 of SEQ ID NO: 318059
uuaggucuucucuacugga

SEQ ID NO: 533536 - RNA, 19 nt, Artificial Sequence
  Description of Artificial Sequence: Synthetic oligonucleotide
  Antisense strand to SEQ ID NO: 533535
uccaguagagaagaccuaa

SEQ ID NO: 533537 - RNA, 19 nt, Artificial Sequence
  Description of Artificial Sequence: Synthetic oligonucleotide
  Sense strand starting at position 2685 of SEQ ID NO: 318059
ggagcuauuggcgaacaag

SEQ ID NO: 533538 - RNA, 19 nt, Artificial Sequence
  Description of Artificial Sequence: Synthetic oligonucleotide
  Antisense strand to SEQ ID NO: 533537
cuuguucgccaauagcucc

SEQ ID NO: 533539 - RNA, 19 nt, Artificial Sequence
  Description of Artificial Sequence: Synthetic oligonucleotide
  Sense strand starting at position 2774 of SEQ ID NO: 318059
cugcaacaaucuuuguuga

SEQ ID NO: 533540 - RNA, 19 nt, Artificial Sequence
  Description of Artificial Sequence: Synthetic oligonucleotide
  Antisense strand to SEQ ID NO: 533539
ucaacaaagauuguugcag

SEQ ID NO: 533541 - RNA, 19 nt, Artificial Sequence
  Description of Artificial Sequence: Synthetic oligonucleotide
  Sense strand starting at position 2775 of SEQ ID NO: 318059
ugcaacaaucuuuguugaa

SEQ ID NO: 533542 - RNA, 19 nt, Artificial Sequence
  Description of Artificial Sequence: Synthetic oligonucleotide
  Antisense strand to SEQ ID NO: 533541
uucaacaaagauuguugca

SEQ ID NO: 533543 - RNA, 19 nt, Artificial Sequence
  Description of Artificial Sequence: Synthetic oligonucleotide
  Sense strand starting at position 2776 of SEQ ID NO: 318059
gcaacaaucuuuguugaag

SEQ ID NO: 533544 - RNA, 19 nt, Artificial Sequence
  Description of Artificial Sequence: Synthetic oligonucleotide
  Antisense strand to SEQ ID NO: 533543
cuucaacaaagauuguugc

SEQ ID NO: 533545 - RNA, 19 nt, Artificial Sequence
  Description of Artificial Sequence: Synthetic oligonucleotide
  Sense strand starting at position 2889 of SEQ ID NO: 318059
gauaguggcuccucuauca

SEQ ID NO: 533546 - RNA, 19 nt, Artificial Sequence
  Description of Artificial Sequence: Synthetic oligonucleotide
  Antisense strand to SEQ ID NO: 533545
ugauagaggagccacuauc

SEQ ID NO: 533547 - RNA, 19 nt, Artificial Sequence
  Description of Artificial Sequence: Synthetic oligonucleotide
  Sense strand starting at position 2905 of SEQ ID NO: 318059
ucaguaguggcaugaagag

SEQ ID NO: 533548 - RNA, 19 nt, Artificial Sequence
  Description of Artificial Sequence: Synthetic oligonucleotide
  Antisense strand to SEQ ID NO: 533547
cucuucaugccacuacuga

SEQ ID NO: 533549 - RNA, 19 nt, Artificial Sequence
  Description of Artificial Sequence: Synthetic oligonucleotide
  Sense strand starting at position 2953 of SEQ ID NO: 318059
cugugaaguuuacugggua

SEQ ID NO: 533550 - RNA, 19 nt, Artificial Sequence
  Description of Artificial Sequence: Synthetic oligonucleotide
  Antisense strand to SEQ ID NO: 533549
uacccaguaaacuucacag

SEQ ID NO: 533551 - RNA, 19 nt, Artificial Sequence
  Description of Artificial Sequence: Synthetic oligonucleotide
  Sense strand starting at position 2956 of SEQ ID NO: 318059
ugaaguuuacuggguacca

SEQ ID NO: 533552 - RNA, 19 nt, Artificial Sequence
  Description of Artificial Sequence: Synthetic oligonucleotide
  Antisense strand to SEQ ID NO: 533551
ugguacccaguaaacuuca

SEQ ID NO: 533553 - RNA, 19 nt, Artificial Sequence
  Description of Artificial Sequence: Synthetic oligonucleotide
  Sense strand starting at position 2957 of SEQ ID NO: 318059
gaaguuuacuggguaccaa

SEQ ID NO: 533554 - RNA, 19 nt, Artificial Sequence
  Description of Artificial Sequence: Synthetic oligonucleotide
  Antisense strand to SEQ ID NO: 533553
uugguacccaguaaacuuc

SEQ ID NO: 533555 - RNA, 19 nt, Artificial Sequence
  Description of Artificial Sequence: Synthetic oligonucleotide
  Sense strand starting at position 2978 of SEQ ID NO: 318059
aggcauauaggcugugaaa

SEQ ID NO: 533556 - RNA, 19 nt, Artificial Sequence
  Description of Artificial Sequence: Synthetic oligonucleotide
  Antisense strand to SEQ ID NO: 533555
uuucacagccuauaugccu

SEQ ID NO: 533557 - RNA, 19 nt, Artificial Sequence
  Description of Artificial Sequence: Synthetic oligonucleotide
  Sense strand starting at position 3266 of SEQ ID NO: 318059
cugguucccuagucagaau

SEQ ID NO: 533558 - RNA, 19 nt, Artificial Sequence
  Description of Artificial Sequence: Synthetic oligonucleotide
  Antisense strand to SEQ ID NO: 533557
auucugacuagggaaccag

SEQ ID NO: 533559 - RNA, 19 nt, Artificial Sequence
  Description of Artificial Sequence: Synthetic oligonucleotide
  Sense strand starting at position 3278 of SEQ ID NO: 318059
ucagaaugccagggaaagu

SEQ ID NO: 533560 - RNA, 19 nt, Artificial Sequence
  Description of Artificial Sequence: Synthetic oligonucleotide
  Antisense strand to SEQ ID NO: 533559
acuuucccuggcauucuga

SEQ ID NO: 533561 - RNA, 19 nt, Artificial Sequence
  Description of Artificial Sequence: Synthetic oligonucleotide
  Sense strand starting at position 3288 of SEQ ID NO: 318059
agggaaagucugggucaag

SEQ ID NO: 533562 - RNA, 19 nt, Artificial Sequence
  Description of Artificial Sequence: Synthetic oligonucleotide
  Antisense strand to SEQ ID NO: 533561
cuugacccagacuuucccu

SEQ ID NO: 533563 - RNA, 19 nt, Artificial Sequence
  Description of Artificial Sequence: Synthetic oligonucleotide
  Sense strand starting at position 3674 of SEQ ID NO: 318059
ccuuuauaccgugaaugug

SEQ ID NO: 533564 - RNA, 19 nt, Artificial Sequence
  Description of Artificial Sequence: Synthetic oligonucleotide
  Antisense strand to SEQ ID NO: 533563
cacauucacgguauaaagg

SEQ ID NO: 533565 - RNA, 19 nt, Artificial Sequence
  Description of Artificial Sequence: Synthetic oligonucleotide
  Sense strand starting at position 3742 of SEQ ID NO: 318059
ugcacugacuugucuggaa

SEQ ID NO: 533566 - RNA, 19 nt, Artificial Sequence
  Description of Artificial Sequence: Synthetic oligonucleotide
  Antisense strand to SEQ ID NO: 533565
uuccagacaagucagugca

SEQ ID NO: 533567 - RNA, 19 nt, Artificial Sequence
  Description of Artificial Sequence: Synthetic oligonucleotide
  Sense strand starting at position 3744 of SEQ ID NO: 318059
cacugacuugucuggaaug

SEQ ID NO: 533568 - RNA, 19 nt, Artificial Sequence
  Description of Artificial Sequence: Synthetic oligonucleotide
  Antisense strand to SEQ ID NO: 533567
cauuccagacaagucagug

SEQ ID NO: 533569 - RNA, 19 nt, Artificial Sequence
  Description of Artificial Sequence: Synthetic oligonucleotide
  Sense strand starting at position 3889 of SEQ ID NO: 318059
cugcuuauugguuccguau

SEQ ID NO: 533570 - RNA, 19 nt, Artificial Sequence
  Description of Artificial Sequence: Synthetic oligonucleotide
  Antisense strand to SEQ ID NO: 533569
auacggaaccaauaagcag

SEQ ID NO: 533571 - RNA, 19 nt, Artificial Sequence
  Description of Artificial Sequence: Synthetic oligonucleotide
  Sense strand starting at position 3890 of SEQ ID NO: 318059
ugcuuauugguuccguauu

SEQ ID NO: 533572 - RNA, 19 nt, Artificial Sequence
  Description of Artificial Sequence: Synthetic oligonucleotide
  Antisense strand to SEQ ID NO: 533571
aauacggaaccaauaagca

SEQ ID NO: 533573 - RNA, 19 nt, Artificial Sequence
  Description of Artificial Sequence: Synthetic oligonucleotide
  Sense strand starting at position 3930 of SEQ ID NO: 318059
cugcauuuauaucuguuua

SEQ ID NO: 533574 - RNA, 19 nt, Artificial Sequence
  Description of Artificial Sequence: Synthetic oligonucleotide
  Antisense strand to SEQ ID NO: 533573
uaaacagauauaaaugcag

SEQ ID NO: 533575 - RNA, 19 nt, Artificial Sequence
  Description of Artificial Sequence: Synthetic oligonucleotide
  Sense strand starting at position 107 of SEQ ID NO: 318060
aucucacaguguucucaaa

SEQ ID NO: 533576 - RNA, 19 nt, Artificial Sequence
  Description of Artificial Sequence: Synthetic oligonucleotide
  Antisense strand to SEQ ID NO: 533575
uuugagaacacugugagau

SEQ ID NO: 533577 - RNA, 19 nt, Artificial Sequence
  Description of Artificial Sequence: Synthetic oligonucleotide
  Sense strand starting at position 167 of SEQ ID NO: 318060
gcgucuuauauggcaguca

SEQ ID NO: 533578 - RNA, 19 nt, Artificial Sequence
  Description of Artificial Sequence: Synthetic oligonucleotide
  Antisense strand to SEQ ID NO: 533577
ugacugccauauaagacgc

SEQ ID NO: 533579 - RNA, 19 nt, Artificial Sequence
  Description of Artificial Sequence: Synthetic oligonucleotide
  Sense strand starting at position 370 of SEQ ID NO: 318060
aagcuagagcuccaaaguu

SEQ ID NO: 533580 - RNA, 19 nt, Artificial Sequence
  Description of Artificial Sequence: Synthetic oligonucleotide
  Antisense strand to SEQ ID NO: 533579
aacuuuggagcucuagcuu

SEQ ID NO: 533581 - RNA, 19 nt, Artificial Sequence
  Description of Artificial Sequence: Synthetic oligonucleotide
  Sense strand starting at position 484 of SEQ ID NO: 318060
cuaaguagaccauguaauu

SEQ ID NO: 533582 - RNA, 19 nt, Artificial Sequence
  Description of Artificial Sequence: Synthetic oligonucleotide
  Antisense strand to SEQ ID NO: 533581
aauuacauggucuacuuag

SEQ ID NO: 533583 - RNA, 19 nt, Artificial Sequence
  Description of Artificial Sequence: Synthetic oligonucleotide
  Sense strand starting at position 503 of SEQ ID NO: 318060
ccauaauguggcuaucuau

SEQ ID NO: 533584 - RNA, 19 nt, Artificial Sequence
  Description of Artificial Sequence: Synthetic oligonucleotide
  Antisense strand to SEQ ID NO: 533583
auagauagccacauuaugg

SEQ ID NO: 533585 - RNA, 19 nt, Artificial Sequence
  Description of Artificial Sequence: Synthetic oligonucleotide
  Sense strand starting at position 512 of SEQ ID NO: 318060
ggcuaucuauagucuagaa

SEQ ID NO: 533586 - RNA, 19 nt, Artificial Sequence
  Description of Artificial Sequence: Synthetic oligonucleotide
  Antisense strand to SEQ ID NO: 533585
uucuagacuauagauagcc

SEQ ID NO: 533587 - RNA, 19 nt, Artificial Sequence
  Description of Artificial Sequence: Synthetic oligonucleotide
  Sense strand starting at position 587 of SEQ ID NO: 318060
ucuugaaaugguuauccca

SEQ ID NO: 533588 - RNA, 19 nt, Artificial Sequence
  Description of Artificial Sequence: Synthetic oligonucleotide
  Antisense strand to SEQ ID NO: 533587
ugggauaaccauuucaaga

SEQ ID NO: 533589 - RNA, 19 nt, Artificial Sequence
  Description of Artificial Sequence: Synthetic oligonucleotide
  Sense strand starting at position 589 of SEQ ID NO: 318060
uugaaaugguuaucccaca

SEQ ID NO: 533590 - RNA, 19 nt, Artificial Sequence
  Description of Artificial Sequence: Synthetic oligonucleotide
  Antisense strand to SEQ ID NO: 533589
ugugggauaaccauuucaa

SEQ ID NO: 533591 - RNA, 19 nt, Artificial Sequence
  Description of Artificial Sequence: Synthetic oligonucleotide
  Sense strand starting at position 590 of SEQ ID NO: 318060
ugaaaugguuaucccacau

SEQ ID NO: 533592 - RNA, 19 nt, Artificial Sequence
  Description of Artificial Sequence: Synthetic oligonucleotide
  Antisense strand to SEQ ID NO: 533591
augugggauaaccauuuca

SEQ ID NO: 533593 - RNA, 19 nt, Artificial Sequence
  Description of Artificial Sequence: Synthetic oligonucleotide
  Sense strand starting at position 623 of SEQ ID NO: 318060
auguuaaugcuguaaccua

SEQ ID NO: 533594 - RNA, 19 nt, Artificial Sequence
  Description of Artificial Sequence: Synthetic oligonucleotide
  Antisense strand to SEQ ID NO: 533593
uagguuacagcauuaacau

SEQ ID NO: 533595 - RNA, 19 nt, Artificial Sequence
  Description of Artificial Sequence: Synthetic oligonucleotide
  Sense strand starting at position 688 of SEQ ID NO: 318060
ggccaccaaguuuaucaua

SEQ ID NO: 533596 - RNA, 19 nt, Artificial Sequence
  Description of Artificial Sequence: Synthetic oligonucleotide
  Antisense strand to SEQ ID NO: 533595
uaugauaaacuugguggcc

SEQ ID NO: 533597 - RNA, 19 nt, Artificial Sequence
  Description of Artificial Sequence: Synthetic oligonucleotide
  Sense strand starting at position 772 of SEQ ID NO: 318060
aggucuuugcuagauuauc

SEQ ID NO: 533598 - RNA, 19 nt, Artificial Sequence
  Description of Artificial Sequence: Synthetic oligonucleotide
  Antisense strand to SEQ ID NO: 533597
gauaaucuagcaaagaccu

SEQ ID NO: 533599 - RNA, 19 nt, Artificial Sequence
  Description of Artificial Sequence: Synthetic oligonucleotide
  Sense strand starting at position 930 of SEQ ID NO: 318060
gcaggaccaugucuaagaa

SEQ ID NO: 533600 - RNA, 19 nt, Artificial Sequence
  Description of Artificial Sequence: Synthetic oligonucleotide
  Antisense strand to SEQ ID NO: 533599
uucuuagacaugguccugc

SEQ ID NO: 533601 - RNA, 19 nt, Artificial Sequence
  Description of Artificial Sequence: Synthetic oligonucleotide
  Sense strand starting at position 1018 of SEQ ID NO: 318060
ugcagaaauuaacuguucu

SEQ ID NO: 533602 - RNA, 19 nt, Artificial Sequence
  Description of Artificial Sequence: Synthetic oligonucleotide
  Antisense strand to SEQ ID NO: 533601
agaacaguuaauuucugca

SEQ ID NO: 533603 - RNA, 19 nt, Artificial Sequence
  Description of Artificial Sequence: Synthetic oligonucleotide
  Sense strand starting at position 1486 of SEQ ID NO: 318060
ugccuacucugacugaaca

SEQ ID NO: 533604 - RNA, 19 nt, Artificial Sequence
  Description of Artificial Sequence: Synthetic oligonucleotide
  Antisense strand to SEQ ID NO: 533603
uguucagucagaguaggca

SEQ ID NO: 533605 - RNA, 19 nt, Artificial Sequence
  Description of Artificial Sequence: Synthetic oligonucleotide
  Sense strand starting at position 1606 of SEQ ID NO: 318060
ggguuacuccggcacugau

SEQ ID NO: 533606 - RNA, 19 nt, Artificial Sequence
  Description of Artificial Sequence: Synthetic oligonucleotide
  Antisense strand to SEQ ID NO: 533605
aucagugccggaguaaccc

SEQ ID NO: 533607 - RNA, 19 nt, Artificial Sequence
  Description of Artificial Sequence: Synthetic oligonucleotide
  Sense strand starting at position 1653 of SEQ ID NO: 318060
caaggacauuccuugcagu

SEQ ID NO: 533608 - RNA, 19 nt, Artificial Sequence
  Description of Artificial Sequence: Synthetic oligonucleotide
  Antisense strand to SEQ ID NO: 533607
acugcaaggaauguccuug

SEQ ID NO: 533609 - RNA, 19 nt, Artificial Sequence
  Description of Artificial Sequence: Synthetic oligonucleotide
  Sense strand starting at position 1984 of SEQ ID NO: 318060
gccuucgaccaauaagaga

SEQ ID NO: 533610 - RNA, 19 nt, Artificial Sequence
  Description of Artificial Sequence: Synthetic oligonucleotide
  Antisense strand to SEQ ID NO: 533609
ucucuuauuggucgaaggc

SEQ ID NO: 533611 - RNA, 19 nt, Artificial Sequence
  Description of Artificial Sequence: Synthetic oligonucleotide
  Sense strand starting at position 1997 of SEQ ID NO: 318060
aagagaggaucguucgauu

SEQ ID NO: 533612 - RNA, 19 nt, Artificial Sequence
  Description of Artificial Sequence: Synthetic oligonucleotide
  Antisense strand to SEQ ID NO: 533611
aaucgaacgauccucucuu

SEQ ID NO: 533613 - RNA, 19 nt, Artificial Sequence
  Description of Artificial Sequence: Synthetic oligonucleotide
  Sense strand starting at position 2359 of SEQ ID NO: 318060
gggucaggucgaugacuga

SEQ ID NO: 533614 - RNA, 19 nt, Artificial Sequence
  Description of Artificial Sequence: Synthetic oligonucleotide
  Antisense strand to SEQ ID NO: 533613
ucagucaucgaccugaccc

SEQ ID NO: 533615 - RNA, 19 nt, Artificial Sequence
  Description of Artificial Sequence: Synthetic oligonucleotide
  Sense strand starting at position 2373 of SEQ ID NO: 318060
acugaaagcucaguuacua

SEQ ID NO: 533616 - RNA, 19 nt, Artificial Sequence
  Description of Artificial Sequence: Synthetic oligonucleotide
  Antisense strand to SEQ ID NO: 533615
uaguaacugagcuuucagu

SEQ ID NO: 533617 - RNA, 19 nt, Artificial Sequence
  Description of Artificial Sequence: Synthetic oligonucleotide
  Sense strand starting at position 2505 of SEQ ID NO: 318060
cagcgcuuucccgagauuu

SEQ ID NO: 533618 - RNA, 19 nt, Artificial Sequence
  Description of Artificial Sequence: Synthetic oligonucleotide
  Antisense strand to SEQ ID NO: 533617
aaaucucgggaaagcgcug

SEQ ID NO: 533619 - RNA, 19 nt, Artificial Sequence
  Description of Artificial Sequence: Synthetic oligonucleotide
  Sense strand starting at position 2507 of SEQ ID NO: 318060
gcgcuuucccgagauuuac

SEQ ID NO: 533620 - RNA, 19 nt, Artificial Sequence
  Description of Artificial Sequence: Synthetic oligonucleotide
  Antisense strand to SEQ ID NO: 533619
guaaaucucgggaaagcgc

SEQ ID NO: 533621 - RNA, 19 nt, Artificial Sequence
  Description of Artificial Sequence: Synthetic oligonucleotide
  Sense strand starting at position 2589 of SEQ ID NO: 318060
acuggauucucucugaaau

SEQ ID NO: 533622 - RNA, 19 nt, Artificial Sequence
  Description of Artificial Sequence: Synthetic oligonucleotide
  Antisense strand to SEQ ID NO: 533621
auuucagagagaauccagu

SEQ ID NO: 533623 - RNA, 19 nt, Artificial Sequence
  Description of Artificial Sequence: Synthetic oligonucleotide
  Sense strand starting at position 2590 of SEQ ID NO: 318060
cuggauucucucugaaaug

SEQ ID NO: 533624 - RNA, 19 nt, Artificial Sequence
  Description of Artificial Sequence: Synthetic oligonucleotide
  Antisense strand to SEQ ID NO: 533623
cauuucagagagaauccag

SEQ ID NO: 533625 - RNA, 19 nt, Artificial Sequence
  Description of Artificial Sequence: Synthetic oligonucleotide
  Sense strand starting at position 2764 of SEQ ID NO: 318060
caguauguggcauacuacu

SEQ ID NO: 533626 - RNA, 19 nt, Artificial Sequence
  Description of Artificial Sequence: Synthetic oligonucleotide
  Antisense strand to SEQ ID NO: 533625
aguaguaugccacauacug

SEQ ID NO: 533627 - RNA, 19 nt, Artificial Sequence
  Description of Artificial Sequence: Synthetic oligonucleotide
  Sense strand starting at position 2970 of SEQ ID NO: 318060
gcuuauguucucuuuguuu

SEQ ID NO: 533628 - RNA, 19 nt, Artificial Sequence
  Description of Artificial Sequence: Synthetic oligonucleotide
  Antisense strand to SEQ ID NO: 533627
aaacaaagagaacauaagc

SEQ ID NO: 533629 - RNA, 19 nt, Artificial Sequence
  Description of Artificial Sequence: Synthetic oligonucleotide
  Sense strand starting at position 2982 of SEQ ID NO: 318060
uuuguuuaccuuggauaug

SEQ ID NO: 533630 - RNA, 19 nt, Artificial Sequence
  Description of Artificial Sequence: Synthetic oligonucleotide
  Antisense strand to SEQ ID NO: 533629
cauauccaagguaaacaaa

SEQ ID NO: 533631 - RNA, 19 nt, Artificial Sequence
  Description of Artificial Sequence: Synthetic oligonucleotide
  Sense strand starting at position 2991 of SEQ ID NO: 318060
cuuggauaugccuacccau

SEQ ID NO: 533632 - RNA, 19 nt, Artificial Sequence
  Description of Artificial Sequence: Synthetic oligonucleotide
  Antisense strand to SEQ ID NO: 533631
auggguaggcauauccaag

SEQ ID NO: 533633 - RNA, 19 nt, Artificial Sequence
  Description of Artificial Sequence: Synthetic oligonucleotide
  Sense strand starting at position 3133 of SEQ ID NO: 318060
uuauuugucuuacuaucgu

SEQ ID NO: 533634 - RNA, 19 nt, Artificial Sequence
  Description of Artificial Sequence: Synthetic oligonucleotide
  Antisense strand to SEQ ID NO: 533633
acgauaguaagacaaauaa

SEQ ID NO: 533635 - RNA, 19 nt, Artificial Sequence
  Description of Artificial Sequence: Synthetic oligonucleotide
  Sense strand starting at position 3142 of SEQ ID NO: 318060
uuacuaucguauguggaaa

SEQ ID NO: 533636 - RNA, 19 nt, Artificial Sequence
  Description of Artificial Sequence: Synthetic oligonucleotide
  Antisense strand to SEQ ID NO: 533635
uuuccacauacgauaguaa

SEQ ID NO: 533637 - RNA, 19 nt, Artificial Sequence
  Description of Artificial Sequence: Synthetic oligonucleotide
  Sense strand starting at position 3154 of SEQ ID NO: 318060
guggaaauuuauuaaggac

SEQ ID NO: 533638 - RNA, 19 nt, Artificial Sequence
  Description of Artificial Sequence: Synthetic oligonucleotide
  Antisense strand to SEQ ID NO: 533637
guccuuaauaaauuuccac

SEQ ID NO: 533639 - RNA, 19 nt, Artificial Sequence
  Description of Artificial Sequence: Synthetic oligonucleotide
  Sense strand starting at position 3336 of SEQ ID NO: 318060
agcaacuugcuguagauca

SEQ ID NO: 533640 - RNA, 19 nt, Artificial Sequence
  Description of Artificial Sequence: Synthetic oligonucleotide
  Antisense strand to SEQ ID NO: 533639
ugaucuacagcaaguugcu

SEQ ID NO: 533641 - RNA, 19 nt, Artificial Sequence
  Description of Artificial Sequence: Synthetic oligonucleotide
  Sense strand starting at position 3458 of SEQ ID NO: 318060
accaaauguugccuuugaa

SEQ ID NO: 533642 - RNA, 19 nt, Artificial Sequence
  Description of Artificial Sequence: Synthetic oligonucleotide
  Antisense strand to SEQ ID NO: 533641
uucaaaggcaacauuuggu

SEQ ID NO: 533643 - RNA, 19 nt, Artificial Sequence
  Description of Artificial Sequence: Synthetic oligonucleotide
  Sense strand starting at position 3470 of SEQ ID NO: 318060
cuuugaaaugcucauuaug

SEQ ID NO: 533644 - RNA, 19 nt, Artificial Sequence
  Description of Artificial Sequence: Synthetic oligonucleotide
  Antisense strand to SEQ ID NO: 533643
cauaaugagcauuucaaag

SEQ ID NO: 533645 - RNA, 19 nt, Artificial Sequence
  Description of Artificial Sequence: Synthetic oligonucleotide
  Sense strand starting at position 3472 of SEQ ID NO: 318060
uugaaaugcucauuaugug

SEQ ID NO: 533646 - RNA, 19 nt, Artificial Sequence
  Description of Artificial Sequence: Synthetic oligonucleotide
  Antisense strand to SEQ ID NO: 533645
cacauaaugagcauuucaa

SEQ ID NO: 533647 - RNA, 19 nt, Artificial Sequence
  Description of Artificial Sequence: Synthetic oligonucleotide
  Sense strand starting at position 3473 of SEQ ID NO: 318060
ugaaaugcucauuauguga

SEQ ID NO: 533648 - RNA, 19 nt, Artificial Sequence
  Description of Artificial Sequence: Synthetic oligonucleotide
  Antisense strand to SEQ ID NO: 533647
ucacauaaugagcauuuca

SEQ ID NO: 533649 - RNA, 19 nt, Artificial Sequence
  Description of Artificial Sequence: Synthetic oligonucleotide
  Sense strand starting at position 3502 of SEQ ID NO: 318060
gugguuggcaugggagaua

SEQ ID NO: 533650 - RNA, 19 nt, Artificial Sequence
  Description of Artificial Sequence: Synthetic oligonucleotide
  Antisense strand to SEQ ID NO: 533649
uaucucccaugccaaccac

SEQ ID NO: 533651 - RNA, 19 nt, Artificial Sequence
  Description of Artificial Sequence: Synthetic oligonucleotide
  Sense strand starting at position 3724 of SEQ ID NO: 318060
ucagaaguuacagguugua

SEQ ID NO: 533652 - RNA, 19 nt, Artificial Sequence
  Description of Artificial Sequence: Synthetic oligonucleotide
  Antisense strand to SEQ ID NO: 533651
uacaaccuguaacuucuga

SEQ ID NO: 533653 - RNA, 19 nt, Artificial Sequence
  Description of Artificial Sequence: Synthetic oligonucleotide
  Sense strand starting at position 3771 of SEQ ID NO: 318060
ggacuaaaguuguuaccaa

SEQ ID NO: 533654 - RNA, 19 nt, Artificial Sequence
  Description of Artificial Sequence: Synthetic oligonucleotide
  Antisense strand to SEQ ID NO: 533653
uugguaacaacuuuagucc

SEQ ID NO: 533655 - RNA, 19 nt, Artificial Sequence
  Description of Artificial Sequence: Synthetic oligonucleotide
  Sense strand starting at position 131 of SEQ ID NO: 318061
uugcguuuauuucuucuga

SEQ ID NO: 533656 - RNA, 19 nt, Artificial Sequence
  Description of Artificial Sequence: Synthetic oligonucleotide
  Antisense strand to SEQ ID NO: 533655
ucagaagaaauaaacgcaa

SEQ ID NO: 533657 - RNA, 19 nt, Artificial Sequence
  Description of Artificial Sequence: Synthetic oligonucleotide
  Sense strand starting at position 133 of SEQ ID NO: 318061
gcguuuauuucuucugaga

SEQ ID NO: 533658 - RNA, 19 nt, Artificial Sequence
  Description of Artificial Sequence: Synthetic oligonucleotide
  Antisense strand to SEQ ID NO: 533657
ucucagaagaaauaaacgc

SEQ ID NO: 533659 - RNA, 19 nt, Artificial Sequence
  Description of Artificial Sequence: Synthetic oligonucleotide
  Sense strand starting at position 218 of SEQ ID NO: 318061
agcaaucuggagggauauu

SEQ ID NO: 533660 - RNA, 19 nt, Artificial Sequence
  Description of Artificial Sequence: Synthetic oligonucleotide
  Antisense strand to SEQ ID NO: 533659
aauaucccuccagauugcu

SEQ ID NO: 533661 - RNA, 19 nt, Artificial Sequence
  Description of Artificial Sequence: Synthetic oligonucleotide
  Sense strand starting at position 277 of SEQ ID NO: 318061
ggccuauggcuccaaacau

SEQ ID NO: 533662 - RNA, 19 nt, Artificial Sequence
  Description of Artificial Sequence: Synthetic oligonucleotide
  Antisense strand to SEQ ID NO: 533661
auguuuggagccauaggcc

SEQ ID NO: 533663 - RNA, 19 nt, Artificial Sequence
  Description of Artificial Sequence: Synthetic oligonucleotide
  Sense strand starting at position 352 of SEQ ID NO: 318061
gguuacugaugauuauacu

SEQ ID NO: 533664 - RNA, 19 nt, Artificial Sequence
  Description of Artificial Sequence: Synthetic oligonucleotide
  Antisense strand to SEQ ID NO: 533663
aguauaaucaucaguaacc

SEQ ID NO: 533665 - RNA, 19 nt, Artificial Sequence
  Description of Artificial Sequence: Synthetic oligonucleotide
  Sense strand starting at position 559 of SEQ ID NO: 318061
gugucucaagugcaaagaa

SEQ ID NO: 533666 - RNA, 19 nt, Artificial Sequence
  Description of Artificial Sequence: Synthetic oligonucleotide
  Antisense strand to SEQ ID NO: 533665
uucuuugcacuugagacac

SEQ ID NO: 533667 - RNA, 19 nt, Artificial Sequence
  Description of Artificial Sequence: Synthetic oligonucleotide
  Sense strand starting at position 579 of SEQ ID NO: 318061
uacugacacggauaauguu

SEQ ID NO: 533668 - RNA, 19 nt, Artificial Sequence
  Description of Artificial Sequence: Synthetic oligonucleotide
  Antisense strand to SEQ ID NO: 533667
aacauuauccgugucagua

SEQ ID NO: 533669 - RNA, 19 nt, Artificial Sequence
  Description of Artificial Sequence: Synthetic oligonucleotide
  Sense strand starting at position 624 of SEQ ID NO: 318061
auaguaucugugcaauaaa

SEQ ID NO: 533670 - RNA, 19 nt, Artificial Sequence
  Description of Artificial Sequence: Synthetic oligonucleotide
  Antisense strand to SEQ ID NO: 533669
uuuauugcacagauacuau

SEQ ID NO: 533671 - RNA, 19 nt, Artificial Sequence
  Description of Artificial Sequence: Synthetic oligonucleotide
  Sense strand starting at position 805 of SEQ ID NO: 318061
gcaagagcauccucgggaa

SEQ ID NO: 533672 - RNA, 19 nt, Artificial Sequence
  Description of Artificial Sequence: Synthetic oligonucleotide
  Antisense strand to SEQ ID NO: 533671
uucccgaggaugcucuugc

SEQ ID NO: 533673 - RNA, 19 nt, Artificial Sequence
  Description of Artificial Sequence: Synthetic oligonucleotide
  Sense strand starting at position 850 of SEQ ID NO: 318061
agugaaagcagcuacugau

SEQ ID NO: 533674 - RNA, 19 nt, Artificial Sequence
  Description of Artificial Sequence: Synthetic oligonucleotide
  Antisense strand to SEQ ID NO: 533673
aucaguagcugcuuucacu

SEQ ID NO: 533675 - RNA, 19 nt, Artificial Sequence
  Description of Artificial Sequence: Synthetic oligonucleotide
  Sense strand starting at position 950 of SEQ ID NO: 318061
aguggaucagaauaaucgu

SEQ ID NO: 533676 - RNA, 19 nt, Artificial Sequence
  Description of Artificial Sequence: Synthetic oligonucleotide
  Antisense strand to SEQ ID NO: 533675
acgauuauucugauccacu

SEQ ID NO: 533677 - RNA, 19 nt, Artificial Sequence
  Description of Artificial Sequence: Synthetic oligonucleotide
  Sense strand starting at position 1049 of SEQ ID NO: 318061
aaaccuauuugugggagga

SEQ ID NO: 533678 - RNA, 19 nt, Artificial Sequence
  Description of Artificial Sequence: Synthetic oligonucleotide
  Antisense strand to SEQ ID NO: 533677
uccucccacaaauagguuu

SEQ ID NO: 533679 - RNA, 19 nt, Artificial Sequence
  Description of Artificial Sequence: Synthetic oligonucleotide
  Sense strand starting at position 1051 of SEQ ID NO: 318061
accuauuugugggaggacu

SEQ ID NO: 533680 - RNA, 19 nt, Artificial Sequence
  Description of Artificial Sequence: Synthetic oligonucleotide
  Antisense strand to SEQ ID NO: 533679
aguccucccacaaauaggu

SEQ ID NO: 533681 - RNA, 19 nt, Artificial Sequence
  Description of Artificial Sequence: Synthetic oligonucleotide
  Sense strand starting at position 1059 of SEQ ID NO: 318061
gugggaggacucugugagu

SEQ ID NO: 533682 - RNA, 19 nt, Artificial Sequence
  Description of Artificial Sequence: Synthetic oligonucleotide
  Antisense strand to SEQ ID NO: 533681
acucacagaguccucccac

SEQ ID NO: 533683 - RNA, 19 nt, Artificial Sequence
  Description of Artificial Sequence: Synthetic oligonucleotide
  Sense strand starting at position 1070 of SEQ ID NO: 318061
cugugagugccugcccauu

SEQ ID NO: 533684 - RNA, 19 nt, Artificial Sequence
  Description of Artificial Sequence: Synthetic oligonucleotide
  Antisense strand to SEQ ID NO: 533683
aaugggcaggcacucacag

SEQ ID NO: 533685 - RNA, 19 nt, Artificial Sequence
  Description of Artificial Sequence: Synthetic oligonucleotide
  Sense strand starting at position 1217 of SEQ ID NO: 318061
agugaucuaugagauuuga

SEQ ID NO: 533686 - RNA, 19 nt, Artificial Sequence
  Description of Artificial Sequence: Synthetic oligonucleotide
  Antisense strand to SEQ ID NO: 533685
ucaaaucucauagaucacu

SEQ ID NO: 533687 - RNA, 19 nt, Artificial Sequence
  Description of Artificial Sequence: Synthetic oligonucleotide
  Sense strand starting at position 1283 of SEQ ID NO: 318061
uugugaacgcuuucuugca

SEQ ID NO: 533688 - RNA, 19 nt, Artificial Sequence
  Description of Artificial Sequence: Synthetic oligonucleotide
  Antisense strand to SEQ ID NO: 533687
ugcaagaaagcguucacaa

SEQ ID NO: 533689 - RNA, 19 nt, Artificial Sequence
  Description of Artificial Sequence: Synthetic oligonucleotide
  Sense strand starting at position 1547 of SEQ ID NO: 318061
cuccucugucguuagaaua

SEQ ID NO: 533690 - RNA, 19 nt, Artificial Sequence
  Description of Artificial Sequence: Synthetic oligonucleotide
  Antisense strand to SEQ ID NO: 533689
uauucuaacgacagaggag

SEQ ID NO: 533691 - RNA, 19 nt, Artificial Sequence
  Description of Artificial Sequence: Synthetic oligonucleotide
  Sense strand starting at position 2145 of SEQ ID NO: 318061
gaggaaguggugugagaga

SEQ ID NO: 533692 - RNA, 19 nt, Artificial Sequence
  Description of Artificial Sequence: Synthetic oligonucleotide
  Antisense strand to SEQ ID NO: 533691
ucucucacaccacuuccuc

SEQ ID NO: 533693 - RNA, 19 nt, Artificial Sequence
  Description of Artificial Sequence: Synthetic oligonucleotide
  Sense strand starting at position 2396 of SEQ ID NO: 318061
cugaaagauuucugaaaua

SEQ ID NO: 533694 - RNA, 19 nt, Artificial Sequence
  Description of Artificial Sequence: Synthetic oligonucleotide
  Antisense strand to SEQ ID NO: 533693
uauuucagaaaucuuucag

SEQ ID NO: 533695 - RNA, 19 nt, Artificial Sequence
  Description of Artificial Sequence: Synthetic oligonucleotide
  Sense strand starting at position 2493 of SEQ ID NO: 318061
ccagaacuuguauaugugu

SEQ ID NO: 533696 - RNA, 19 nt, Artificial Sequence
  Description of Artificial Sequence: Synthetic oligonucleotide
  Antisense strand to SEQ ID NO: 533695
acacauauacaaguucugg

SEQ ID NO: 533697 - RNA, 19 nt, Artificial Sequence
  Description of Artificial Sequence: Synthetic oligonucleotide
  Sense strand starting at position 2496 of SEQ ID NO: 318061
gaacuuguauauguguaaa

SEQ ID NO: 533698 - RNA, 19 nt, Artificial Sequence
  Description of Artificial Sequence: Synthetic oligonucleotide
  Antisense strand to SEQ ID NO: 533697
uuuacacauauacaaguuc

SEQ ID NO: 533699 - RNA, 19 nt, Artificial Sequence
  Description of Artificial Sequence: Synthetic oligonucleotide
  Sense strand starting at position 2499 of SEQ ID NO: 318061
cuuguauauguguaaauag

SEQ ID NO: 533700 - RNA, 19 nt, Artificial Sequence
  Description of Artificial Sequence: Synthetic oligonucleotide
  Antisense strand to SEQ ID NO: 533699
cuauuuacacauauacaag

SEQ ID NO: 533701 - RNA, 19 nt, Artificial Sequence
  Description of Artificial Sequence: Synthetic oligonucleotide
  Sense strand starting at position 2602 of SEQ ID NO: 318061
gugcucuugagacaaagcu

SEQ ID NO: 533702 - RNA, 19 nt, Artificial Sequence
  Description of Artificial Sequence: Synthetic oligonucleotide
  Antisense strand to SEQ ID NO: 533701
agcuuugucucaagagcac

SEQ ID NO: 533703 - RNA, 19 nt, Artificial Sequence
  Description of Artificial Sequence: Synthetic oligonucleotide
  Sense strand starting at position 2729 of SEQ ID NO: 318061
ggccaugcacucugaggaa

SEQ ID NO: 533704 - RNA, 19 nt, Artificial Sequence
  Description of Artificial Sequence: Synthetic oligonucleotide
  Antisense strand to SEQ ID NO: 533703
uuccucagagugcauggcc

SEQ ID NO: 533705 - RNA, 19 nt, Artificial Sequence
  Description of Artificial Sequence: Synthetic oligonucleotide
  Sense strand starting at position 2846 of SEQ ID NO: 318061
uaguaaauccaucggauac

SEQ ID NO: 533706 - RNA, 19 nt, Artificial Sequence
  Description of Artificial Sequence: Synthetic oligonucleotide
  Antisense strand to SEQ ID NO: 533705
guauccgauggauuuacua

SEQ ID NO: 533707 - RNA, 19 nt, Artificial Sequence
  Description of Artificial Sequence: Synthetic oligonucleotide
  Sense strand starting at position 2959 of SEQ ID NO: 318061
guggcuuugcaauaaacuc

SEQ ID NO: 533708 - RNA, 19 nt, Artificial Sequence
  Description of Artificial Sequence: Synthetic oligonucleotide
  Antisense strand to SEQ ID NO: 533707
gaguuuauugcaaagccac

SEQ ID NO: 533709 - RNA, 19 nt, Artificial Sequence
  Description of Artificial Sequence: Synthetic oligonucleotide
  Sense strand starting at position 2979 of SEQ ID NO: 318061
gccucuaucuggucagaga

SEQ ID NO: 533710 - RNA, 19 nt, Artificial Sequence
  Description of Artificial Sequence: Synthetic oligonucleotide
  Antisense strand to SEQ ID NO: 533709
ucucugaccagauagaggc

SEQ ID NO: 533711 - RNA, 19 nt, Artificial Sequence
  Description of Artificial Sequence: Synthetic oligonucleotide
  Sense strand starting at position 3131 of SEQ ID NO: 318061
auuauuguuaugggagauu

SEQ ID NO: 533712 - RNA, 19 nt, Artificial Sequence
  Description of Artificial Sequence: Synthetic oligonucleotide
  Antisense strand to SEQ ID NO: 533711
aaucucccauaacaauaau

SEQ ID NO: 533713 - RNA, 19 nt, Artificial Sequence
  Description of Artificial Sequence: Synthetic oligonucleotide
  Sense strand starting at position 3350 of SEQ ID NO: 318061
gagagacauugccugauua

SEQ ID NO: 533714 - RNA, 19 nt, Artificial Sequence
  Description of Artificial Sequence: Synthetic oligonucleotide
  Antisense strand to SEQ ID NO: 533713
uaaucaggcaaugucucuc

SEQ ID NO: 533715 - RNA, 19 nt, Artificial Sequence
  Description of Artificial Sequence: Synthetic oligonucleotide
  Sense strand starting at position 3351 of SEQ ID NO: 318061
agagacauugccugauuau

SEQ ID NO: 533716 - RNA, 19 nt, Artificial Sequence
  Description of Artificial Sequence: Synthetic oligonucleotide
  Antisense strand to SEQ ID NO: 533715
auaaucaggcaaugucucu

SEQ ID NO: 533717 - RNA, 19 nt, Artificial Sequence
  Description of Artificial Sequence: Synthetic oligonucleotide
  Sense strand starting at position 3354 of SEQ ID NO: 318061
gacauugccugauuaugau

SEQ ID NO: 533718 - RNA, 19 nt, Artificial Sequence
  Description of Artificial Sequence: Synthetic oligonucleotide
  Antisense strand to SEQ ID NO: 533717
aucauaaucaggcaauguc

SEQ ID NO: 533719 - RNA, 19 nt, Artificial Sequence
  Description of Artificial Sequence: Synthetic oligonucleotide
  Sense strand starting at position 3360 of SEQ ID NO: 318061
gccugauuaugaucaacag

SEQ ID NO: 533720 - RNA, 19 nt, Artificial Sequence
  Description of Artificial Sequence: Synthetic oligonucleotide
  Antisense strand to SEQ ID NO: 533719
cuguugaucauaaucaggc

SEQ ID NO: 533721 - RNA, 19 nt, Artificial Sequence
  Description of Artificial Sequence: Synthetic oligonucleotide
  Sense strand starting at position 3534 of SEQ ID NO: 318061
cggucaugagaaugaccau

SEQ ID NO: 533722 - RNA, 19 nt, Artificial Sequence
  Description of Artificial Sequence: Synthetic oligonucleotide
  Antisense strand to SEQ ID NO: 533721
auggucauucucaugaccg

SEQ ID NO: 533723 - RNA, 19 nt, Artificial Sequence
  Description of Artificial Sequence: Synthetic oligonucleotide
  Sense strand starting at position 3616 of SEQ ID NO: 318061
aagcaaagugagcaugauu

SEQ ID NO: 533724 - RNA, 19 nt, Artificial Sequence
  Description of Artificial Sequence: Synthetic oligonucleotide
  Antisense strand to SEQ ID NO: 533723
aaucaugcucacuuugcuu

SEQ ID NO: 533725 - RNA, 19 nt, Artificial Sequence
  Description of Artificial Sequence: Synthetic oligonucleotide
  Sense strand starting at position 3619 of SEQ ID NO: 318061
caaagugagcaugauuauu

SEQ ID NO: 533726 - RNA, 19 nt, Artificial Sequence
  Description of Artificial Sequence: Synthetic oligonucleotide
  Antisense strand to SEQ ID NO: 533725
aauaaucaugcucacuuug

SEQ ID NO: 533727 - RNA, 19 nt, Artificial Sequence
  Description of Artificial Sequence: Synthetic oligonucleotide
  Sense strand starting at position 3621 of SEQ ID NO: 318061
aagugagcaugauuauuga

SEQ ID NO: 533728 - RNA, 19 nt, Artificial Sequence
  Description of Artificial Sequence: Synthetic oligonucleotide
  Antisense strand to SEQ ID NO: 533727
ucaauaaucaugcucacuu

SEQ ID NO: 533729 - RNA, 19 nt, Artificial Sequence
  Description of Artificial Sequence: Synthetic oligonucleotide
  Sense strand starting at position 3670 of SEQ ID NO: 318061
aaggguuaguaauuagaua

SEQ ID NO: 533730 - RNA, 19 nt, Artificial Sequence
  Description of Artificial Sequence: Synthetic oligonucleotide
  Antisense strand to SEQ ID NO: 533729
uaucuaauuacuaacccuu

SEQ ID NO: 533731 - RNA, 19 nt, Artificial Sequence
  Description of Artificial Sequence: Synthetic oligonucleotide
  Sense strand starting at position 3883 of SEQ ID NO: 318061
ugcugugucguucccuuau

SEQ ID NO: 533732 - RNA, 19 nt, Artificial Sequence
  Description of Artificial Sequence: Synthetic oligonucleotide
  Antisense strand to SEQ ID NO: 533731
auaagggaacgacacagca

SEQ ID NO: 533733 - RNA, 19 nt, Artificial Sequence
  Description of Artificial Sequence: Synthetic oligonucleotide
  Sense strand starting at position 3929 of SEQ ID NO: 318061
acuaauuccgauggacuaa

SEQ ID NO: 533734 - RNA, 19 nt, Artificial Sequence
  Description of Artificial Sequence: Synthetic oligonucleotide
  Antisense strand to SEQ ID NO: 533733
uuaguccaucggaauuagu

SEQ ID NO: 533735 - RNA, 19 nt, Artificial Sequence
  Description of Artificial Sequence: Synthetic oligonucleotide
  Sense strand starting at position 67 of SEQ ID NO: 318062
aauuuagaauucugggaag

SEQ ID NO: 533736 - RNA, 19 nt, Artificial Sequence
  Description of Artificial Sequence: Synthetic oligonucleotide
  Antisense strand to SEQ ID NO: 533735
cuucccagaauucuaaauu

SEQ ID NO: 533737 - RNA, 19 nt, Artificial Sequence
  Description of Artificial Sequence: Synthetic oligonucleotide
  Sense strand starting at position 97 of SEQ ID NO: 318062
gugguaaauaugggacuga

SEQ ID NO: 533738 - RNA, 19 nt, Artificial Sequence
  Description of Artificial Sequence: Synthetic oligonucleotide
  Antisense strand to SEQ ID NO: 533737
ucagucccauauuuaccac

SEQ ID NO: 533739 - RNA, 19 nt, Artificial Sequence
  Description of Artificial Sequence: Synthetic oligonucleotide
  Sense strand starting at position 110 of SEQ ID NO: 318062
gacugauacgugcaguaca

SEQ ID NO: 533740 - RNA, 19 nt, Artificial Sequence
  Description of Artificial Sequence: Synthetic oligonucleotide
  Antisense strand to SEQ ID NO: 533739
uguacugcacguaucaguc

SEQ ID NO: 533741 - RNA, 19 nt, Artificial Sequence
  Description of Artificial Sequence: Synthetic oligonucleotide
  Sense strand starting at position 227 of SEQ ID NO: 318062
agagaagucuauuccacau

SEQ ID NO: 533742 - RNA, 19 nt, Artificial Sequence
  Description of Artificial Sequence: Synthetic oligonucleotide
  Antisense strand to SEQ ID NO: 533741
auguggaauagacuucucu

SEQ ID NO: 533743 - RNA, 19 nt, Artificial Sequence
  Description of Artificial Sequence: Synthetic oligonucleotide
  Sense strand starting at position 258 of SEQ ID NO: 318062
cuguuucuacugugagaaa

SEQ ID NO: 533744 - RNA, 19 nt, Artificial Sequence
  Description of Artificial Sequence: Synthetic oligonucleotide
  Antisense strand to SEQ ID NO: 533743
uuucucacaguagaaacag

SEQ ID NO: 533745 - RNA, 19 nt, Artificial Sequence
  Description of Artificial Sequence: Synthetic oligonucleotide
  Sense strand starting at position 429 of SEQ ID NO: 318062
ccagguaaagcacacauua

SEQ ID NO: 533746 - RNA, 19 nt, Artificial Sequence
  Description of Artificial Sequence: Synthetic oligonucleotide
  Antisense strand to SEQ ID NO: 533745
uaaugugugcuuuaccugg

SEQ ID NO: 533747 - RNA, 19 nt, Artificial Sequence
  Description of Artificial Sequence: Synthetic oligonucleotide
  Sense strand starting at position 440 of SEQ ID NO: 318062
acacauuauuccuuagguu

SEQ ID NO: 533748 - RNA, 19 nt, Artificial Sequence
  Description of Artificial Sequence: Synthetic oligonucleotide
  Antisense strand to SEQ ID NO: 533747
aaccuaaggaauaaugugu

SEQ ID NO: 533749 - RNA, 19 nt, Artificial Sequence
  Description of Artificial Sequence: Synthetic oligonucleotide
  Sense strand starting at position 607 of SEQ ID NO: 318062
gcaauaggccaguaaagga

SEQ ID NO: 533750 - RNA, 19 nt, Artificial Sequence
  Description of Artificial Sequence: Synthetic oligonucleotide
  Antisense strand to SEQ ID NO: 533749
uccuuuacuggccuauugc

SEQ ID NO: 533751 - RNA, 19 nt, Artificial Sequence
  Description of Artificial Sequence: Synthetic oligonucleotide
  Sense strand starting at position 731 of SEQ ID NO: 318062
aggagagcaucuguaauga

SEQ ID NO: 533752 - RNA, 19 nt, Artificial Sequence
  Description of Artificial Sequence: Synthetic oligonucleotide
  Antisense strand to SEQ ID NO: 533751
ucauuacagaugcucuccu

SEQ ID NO: 533753 - RNA, 19 nt, Artificial Sequence
  Description of Artificial Sequence: Synthetic oligonucleotide
  Sense strand starting at position 739 of SEQ ID NO: 318062
aucuguaaugaauggcaua

SEQ ID NO: 533754 - RNA, 19 nt, Artificial Sequence
  Description of Artificial Sequence: Synthetic oligonucleotide
  Antisense strand to SEQ ID NO: 533753
uaugccauucauuacagau

SEQ ID NO: 533755 - RNA, 19 nt, Artificial Sequence
  Description of Artificial Sequence: Synthetic oligonucleotide
  Sense strand starting at position 866 of SEQ ID NO: 318062
uguucuaagccugaguaca

SEQ ID NO: 533756 - RNA, 19 nt, Artificial Sequence
  Description of Artificial Sequence: Synthetic oligonucleotide
  Antisense strand to SEQ ID NO: 533755
uguacucaggcuuagaaca

SEQ ID NO: 533757 - RNA, 19 nt, Artificial Sequence
  Description of Artificial Sequence: Synthetic oligonucleotide
  Sense strand starting at position 882 of SEQ ID NO: 318062
acaaguuuguuaucagacu

SEQ ID NO: 533758 - RNA, 19 nt, Artificial Sequence
  Description of Artificial Sequence: Synthetic oligonucleotide
  Antisense strand to SEQ ID NO: 533757
agucugauaacaaacuugu

SEQ ID NO: 533759 - RNA, 19 nt, Artificial Sequence
  Description of Artificial Sequence: Synthetic oligonucleotide
  Sense strand starting at position 933 of SEQ ID NO: 318062
aggacaauuuaagguuaaa

SEQ ID NO: 533760 - RNA, 19 nt, Artificial Sequence
  Description of Artificial Sequence: Synthetic oligonucleotide
  Antisense strand to SEQ ID NO: 533759
uuuaaccuuaaauuguccu

SEQ ID NO: 533761 - RNA, 19 nt, Artificial Sequence
  Description of Artificial Sequence: Synthetic oligonucleotide
  Sense strand starting at position 980 of SEQ ID NO: 318062
cggguucuaguacagacua

SEQ ID NO: 533762 - RNA, 19 nt, Artificial Sequence
  Description of Artificial Sequence: Synthetic oligonucleotide
  Antisense strand to SEQ ID NO: 533761
uagucuguacuagaacccg

SEQ ID NO: 533763 - RNA, 19 nt, Artificial Sequence
  Description of Artificial Sequence: Synthetic oligonucleotide
  Sense strand starting at position 1047 of SEQ ID NO: 318062
cccuaagucuccguuauuu

SEQ ID NO: 533764 - RNA, 19 nt, Artificial Sequence
  Description of Artificial Sequence: Synthetic oligonucleotide
  Antisense strand to SEQ ID NO: 533763
aaauaacggagacuuaggg

SEQ ID NO: 533765 - RNA, 19 nt, Artificial Sequence
  Description of Artificial Sequence: Synthetic oligonucleotide
  Sense strand starting at position 1091 of SEQ ID NO: 318062
auaccugaaauaugcgaga

SEQ ID NO: 533766 - RNA, 19 nt, Artificial Sequence
  Description of Artificial Sequence: Synthetic oligonucleotide
  Antisense strand to SEQ ID NO: 533765
ucucgcauauuucagguau

SEQ ID NO: 533767 - RNA, 19 nt, Artificial Sequence
  Description of Artificial Sequence: Synthetic oligonucleotide
  Sense strand starting at position 1093 of SEQ ID NO: 318062
accugaaauaugcgagaca

SEQ ID NO: 533768 - RNA, 19 nt, Artificial Sequence
  Description of Artificial Sequence: Synthetic oligonucleotide
  Antisense strand to SEQ ID NO: 533767
ugucucgcauauuucaggu

SEQ ID NO: 533769 - RNA, 19 nt, Artificial Sequence
  Description of Artificial Sequence: Synthetic oligonucleotide
  Sense strand starting at position 1096 of SEQ ID NO: 318062
ugaaauaugcgagacacuu

SEQ ID NO: 533770 - RNA, 19 nt, Artificial Sequence
  Description of Artificial Sequence: Synthetic oligonucleotide
  Antisense strand to SEQ ID NO: 533769
aagugucucgcauauuuca

SEQ ID NO: 533771 - RNA, 19 nt, Artificial Sequence
  Description of Artificial Sequence: Synthetic oligonucleotide
  Sense strand starting at position 1125 of SEQ ID NO: 318062
aucagauccuccuuggaau

SEQ ID NO: 533772 - RNA, 19 nt, Artificial Sequence
  Description of Artificial Sequence: Synthetic oligonucleotide
  Antisense strand to SEQ ID NO: 533771
auuccaaggaggaucugau

SEQ ID NO: 533773 - RNA, 19 nt, Artificial Sequence
  Description of Artificial Sequence: Synthetic oligonucleotide
  Sense strand starting at position 1126 of SEQ ID NO: 318062
ucagauccuccuuggaauc

SEQ ID NO: 533774 - RNA, 19 nt, Artificial Sequence
  Description of Artificial Sequence: Synthetic oligonucleotide
  Antisense strand to SEQ ID NO: 533773
gauuccaaggaggaucuga

SEQ ID NO: 533775 - RNA, 19 nt, Artificial Sequence
  Description of Artificial Sequence: Synthetic oligonucleotide
  Sense strand starting at position 1215 of SEQ ID NO: 318062
cugggucaugaaugaagca

SEQ ID NO: 533776 - RNA, 19 nt, Artificial Sequence
  Description of Artificial Sequence: Synthetic oligonucleotide
  Antisense strand to SEQ ID NO: 533775
ugcuucauucaugacccag

SEQ ID NO: 533777 - RNA, 19 nt, Artificial Sequence
  Description of Artificial Sequence: Synthetic oligonucleotide
  Sense strand starting at position 1245 of SEQ ID NO: 318062
agacaaagucuuggucaag

SEQ ID NO: 533778 - RNA, 19 nt, Artificial Sequence
  Description of Artificial Sequence: Synthetic oligonucleotide
  Antisense strand to SEQ ID NO: 533777
cuugaccaagacuuugucu

SEQ ID NO: 533779 - RNA, 19 nt, Artificial Sequence
  Description of Artificial Sequence: Synthetic oligonucleotide
  Sense strand starting at position 1248 of SEQ ID NO: 318062
caaagucuuggucaagcua

SEQ ID NO: 533780 - RNA, 19 nt, Artificial Sequence
  Description of Artificial Sequence: Synthetic oligonucleotide
  Antisense strand to SEQ ID NO: 533779
uagcuugaccaagacuuug

SEQ ID NO: 533781 - RNA, 19 nt, Artificial Sequence
  Description of Artificial Sequence: Synthetic oligonucleotide
  Sense strand starting at position 1282 of SEQ ID NO: 318062
ccgaaugucccauacggau

SEQ ID NO: 533782 - RNA, 19 nt, Artificial Sequence
  Description of Artificial Sequence: Synthetic oligonucleotide
  Antisense strand to SEQ ID NO: 533781
auccguaugggacauucgg

SEQ ID NO: 533783 - RNA, 19 nt, Artificial Sequence
  Description of Artificial Sequence: Synthetic oligonucleotide
  Sense strand starting at position 1330 of SEQ ID NO: 318062
cccuacuuuguggaagacu

SEQ ID NO: 533784 - RNA, 19 nt, Artificial Sequence
  Description of Artificial Sequence: Synthetic oligonucleotide
  Antisense strand to SEQ ID NO: 533783
agucuuccacaaaguaggg

SEQ ID NO: 533785 - RNA, 19 nt, Artificial Sequence
  Description of Artificial Sequence: Synthetic oligonucleotide
  Sense strand starting at position 2304 of SEQ ID NO: 318062
cguagugccgcaucaagua

SEQ ID NO: 533786 - RNA, 19 nt, Artificial Sequence
  Description of Artificial Sequence: Synthetic oligonucleotide
  Antisense strand to SEQ ID NO: 533785
uacuugaugcggcacuacg

SEQ ID NO: 533787 - RNA, 19 nt, Artificial Sequence
  Description of Artificial Sequence: Synthetic oligonucleotide
  Sense strand starting at position 2406 of SEQ ID NO: 318062
gacucaagcugagcugaau

SEQ ID NO: 533788 - RNA, 19 nt, Artificial Sequence
  Description of Artificial Sequence: Synthetic oligonucleotide
  Antisense strand to SEQ ID NO: 533787
auucagcucagcuugaguc

SEQ ID NO: 533789 - RNA, 19 nt, Artificial Sequence
  Description of Artificial Sequence: Synthetic oligonucleotide
  Sense strand starting at position 2418 of SEQ ID NO: 318062
gcugaaugaccguauggag

SEQ ID NO: 533790 - RNA, 19 nt, Artificial Sequence
  Description of Artificial Sequence: Synthetic oligonucleotide
  Antisense strand to SEQ ID NO: 533789
cuccauacggucauucagc

SEQ ID NO: 533791 - RNA, 19 nt, Artificial Sequence
  Description of Artificial Sequence: Synthetic oligonucleotide
  Sense strand starting at position 2760 of SEQ ID NO: 318062
gaccaagacuugucugauu

SEQ ID NO: 533792 - RNA, 19 nt, Artificial Sequence
  Description of Artificial Sequence: Synthetic oligonucleotide
  Antisense strand to SEQ ID NO: 533791
aaucagacaagucuugguc

SEQ ID NO: 533793 - RNA, 19 nt, Artificial Sequence
  Description of Artificial Sequence: Synthetic oligonucleotide
  Sense strand starting at position 2805 of SEQ ID NO: 318062
gucuccucucaauauuagu

SEQ ID NO: 533794 - RNA, 19 nt, Artificial Sequence
  Description of Artificial Sequence: Synthetic oligonucleotide
  Antisense strand to SEQ ID NO: 533793
acuaauauugagaggagac

SEQ ID NO: 533795 - RNA, 19 nt, Artificial Sequence
  Description of Artificial Sequence: Synthetic oligonucleotide
  Sense strand starting at position 2856 of SEQ ID NO: 318062
guguuuggagugcuagcuu

SEQ ID NO: 533796 - RNA, 19 nt, Artificial Sequence
  Description of Artificial Sequence: Synthetic oligonucleotide
  Antisense strand to SEQ ID NO: 533795
aagcuagcacuccaaacac

SEQ ID NO: 533797 - RNA, 19 nt, Artificial Sequence
  Description of Artificial Sequence: Synthetic oligonucleotide
  Sense strand starting at position 3391 of SEQ ID NO: 318062
cugaucaugucauuccaga

SEQ ID NO: 533798 - RNA, 19 nt, Artificial Sequence
  Description of Artificial Sequence: Synthetic oligonucleotide
  Antisense strand to SEQ ID NO: 533797
ucuggaaugacaugaucag

SEQ ID NO: 533799 - RNA, 19 nt, Artificial Sequence
  Description of Artificial Sequence: Synthetic oligonucleotide
  Sense strand starting at position 3484 of SEQ ID NO: 318062
gugauuugguccuugcuuu

SEQ ID NO: 533800 - RNA, 19 nt, Artificial Sequence
  Description of Artificial Sequence: Synthetic oligonucleotide
  Antisense strand to SEQ ID NO: 533799
aaagcaaggaccaaaucac

SEQ ID NO: 533801 - RNA, 19 nt, Artificial Sequence
  Description of Artificial Sequence: Synthetic oligonucleotide
  Sense strand starting at position 3688 of SEQ ID NO: 318062
gcacauuuauguuccagua

SEQ ID NO: 533802 - RNA, 19 nt, Artificial Sequence
  Description of Artificial Sequence: Synthetic oligonucleotide
  Antisense strand to SEQ ID NO: 533801
uacuggaacauaaaugugc

SEQ ID NO: 533803 - RNA, 19 nt, Artificial Sequence
  Description of Artificial Sequence: Synthetic oligonucleotide
  Sense strand starting at position 3710 of SEQ ID NO: 318062
cuccguaaccucugauuua

SEQ ID NO: 533804 - RNA, 19 nt, Artificial Sequence
  Description of Artificial Sequence: Synthetic oligonucleotide
  Antisense strand to SEQ ID NO: 533803
uaaaucagagguuacggag

SEQ ID NO: 533805 - RNA, 19 nt, Artificial Sequence
  Description of Artificial Sequence: Synthetic oligonucleotide
  Sense strand starting at position 3713 of SEQ ID NO: 318062
cguaaccucugauuuaguu

SEQ ID NO: 533806 - RNA, 19 nt, Artificial Sequence
  Description of Artificial Sequence: Synthetic oligonucleotide
  Antisense strand to SEQ ID NO: 533805
aacuaaaucagagguuacg

SEQ ID NO: 533807 - RNA, 19 nt, Artificial Sequence
  Description of Artificial Sequence: Synthetic oligonucleotide
  Sense strand starting at position 3861 of SEQ ID NO: 318062
cauguauggaggugauagu

SEQ ID NO: 533808 - RNA, 19 nt, Artificial Sequence
  Description of Artificial Sequence: Synthetic oligonucleotide
  Antisense strand to SEQ ID NO: 533807
acuaucaccuccauacaug

SEQ ID NO: 533809 - RNA, 19 nt, Artificial Sequence
  Description of Artificial Sequence: Synthetic oligonucleotide
  Sense strand starting at position 3862 of SEQ ID NO: 318062
auguauggaggugauagua

SEQ ID NO: 533810 - RNA, 19 nt, Artificial Sequence
  Description of Artificial Sequence: Synthetic oligonucleotide
  Antisense strand to SEQ ID NO: 533809
uacuaucaccuccauacau

SEQ ID NO: 533811 - RNA, 19 nt, Artificial Sequence
  Description of Artificial Sequence: Synthetic oligonucleotide
  Sense strand starting at position 3930 of SEQ ID NO: 318062
ucucuuguccuuuaaggau

SEQ ID NO: 533812 - RNA, 19 nt, Artificial Sequence
  Description of Artificial Sequence: Synthetic oligonucleotide
  Antisense strand to SEQ ID NO: 533811
auccuuaaaggacaagaga

SEQ ID NO: 533813 - RNA, 19 nt, Artificial Sequence
  Description of Artificial Sequence: Synthetic oligonucleotide
  Sense strand starting at position 3939 of SEQ ID NO: 318062
cuuuaaggauucucaugau

SEQ ID NO: 533814 - RNA, 19 nt, Artificial Sequence
  Description of Artificial Sequence: Synthetic oligonucleotide
  Antisense strand to SEQ ID NO: 533813
aucaugagaauccuuaaag

SEQ ID NO: 533815 - RNA, 19 nt, Artificial Sequence
  Description of Artificial Sequence: Synthetic oligonucleotide
  Sense strand starting at position 111 of SEQ ID NO: 318063
caaugcaugucaguaagaa

SEQ ID NO: 533816 - RNA, 19 nt, Artificial Sequence
  Description of Artificial Sequence: Synthetic oligonucleotide
  Antisense strand to SEQ ID NO: 533815
uucuuacugacaugcauug

SEQ ID NO: 533817 - RNA, 19 nt, Artificial Sequence
  Description of Artificial Sequence: Synthetic oligonucleotide
  Sense strand starting at position 112 of SEQ ID NO: 318063
aaugcaugucaguaagaau

SEQ ID NO: 533818 - RNA, 19 nt, Artificial Sequence
  Description of Artificial Sequence: Synthetic oligonucleotide
  Antisense strand to SEQ ID NO: 533817
auucuuacugacaugcauu

SEQ ID NO: 533819 - RNA, 19 nt, Artificial Sequence
  Description of Artificial Sequence: Synthetic oligonucleotide
  Sense strand starting at position 119 of SEQ ID NO: 318063
gucaguaagaaugaugcua

SEQ ID NO: 533820 - RNA, 19 nt, Artificial Sequence
  Description of Artificial Sequence: Synthetic oligonucleotide
  Antisense strand to SEQ ID NO: 533819
uagcaucauucuuacugac

SEQ ID NO: 533821 - RNA, 19 nt, Artificial Sequence
  Description of Artificial Sequence: Synthetic oligonucleotide
  Sense strand starting at position 200 of SEQ ID NO: 318063
gcaauaguguuacucauag

SEQ ID NO: 533822 - RNA, 19 nt, Artificial Sequence
  Description of Artificial Sequence: Synthetic oligonucleotide
  Antisense strand to SEQ ID NO: 533821
cuaugaguaacacuauugc

SEQ ID NO: 533823 - RNA, 19 nt, Artificial Sequence
  Description of Artificial Sequence: Synthetic oligonucleotide
  Sense strand starting at position 267 of SEQ ID NO: 318063
ugaguuauaucuguacuuc

SEQ ID NO: 533824 - RNA, 19 nt, Artificial Sequence
  Description of Artificial Sequence: Synthetic oligonucleotide
  Antisense strand to SEQ ID NO: 533823
gaaguacagauauaacuca

SEQ ID NO: 533825 - RNA, 19 nt, Artificial Sequence
  Description of Artificial Sequence: Synthetic oligonucleotide
  Sense strand starting at position 295 of SEQ ID NO: 318063
acuguaauuggccaucuca

SEQ ID NO: 533826 - RNA, 19 nt, Artificial Sequence
  Description of Artificial Sequence: Synthetic oligonucleotide
  Antisense strand to SEQ ID NO: 533825
ugagauggccaauuacagu

SEQ ID NO: 533827 - RNA, 19 nt, Artificial Sequence
  Description of Artificial Sequence: Synthetic oligonucleotide
  Sense strand starting at position 524 of SEQ ID NO: 318063
ugcucaugagacugacaau

SEQ ID NO: 533828 - RNA, 19 nt, Artificial Sequence
  Description of Artificial Sequence: Synthetic oligonucleotide
  Antisense strand to SEQ ID NO: 533827
auugucagucucaugagca

SEQ ID NO: 533829 - RNA, 19 nt, Artificial Sequence
  Description of Artificial Sequence: Synthetic oligonucleotide
  Sense strand starting at position 530 of SEQ ID NO: 318063
ugagacugacaaugucuuu

SEQ ID NO: 533830 - RNA, 19 nt, Artificial Sequence
  Description of Artificial Sequence: Synthetic oligonucleotide
  Antisense strand to SEQ ID NO: 533829
aaagacauugucagucuca

SEQ ID NO: 533831 - RNA, 19 nt, Artificial Sequence
  Description of Artificial Sequence: Synthetic oligonucleotide
  Sense strand starting at position 555 of SEQ ID NO: 318063
uugaguuucugaguuaagg

SEQ ID NO: 533832 - RNA, 19 nt, Artificial Sequence
  Description of Artificial Sequence: Synthetic oligonucleotide
  Antisense strand to SEQ ID NO: 533831
ccuuaacucagaaacucaa

SEQ ID NO: 533833 - RNA, 19 nt, Artificial Sequence
  Description of Artificial Sequence: Synthetic oligonucleotide
  Sense strand starting at position 898 of SEQ ID NO: 318063
gguaguugucuguaugaaa

SEQ ID NO: 533834 - RNA, 19 nt, Artificial Sequence
  Description of Artificial Sequence: Synthetic oligonucleotide
  Antisense strand to SEQ ID NO: 533833
uuucauacagacaacuacc

SEQ ID NO: 533835 - RNA, 19 nt, Artificial Sequence
  Description of Artificial Sequence: Synthetic oligonucleotide
  Sense strand starting at position 941 of SEQ ID NO: 318063
aaagaaaguucuguuugua

SEQ ID NO: 533836 - RNA, 19 nt, Artificial Sequence
  Description of Artificial Sequence: Synthetic oligonucleotide
  Antisense strand to SEQ ID NO: 533835
uacaaacagaacuuucuuu

SEQ ID NO: 533837 - RNA, 19 nt, Artificial Sequence
  Description of Artificial Sequence: Synthetic oligonucleotide
  Sense strand starting at position 1232 of SEQ ID NO: 318063
gccauuuccuggcucugaa

SEQ ID NO: 533838 - RNA, 19 nt, Artificial Sequence
  Description of Artificial Sequence: Synthetic oligonucleotide
  Antisense strand to SEQ ID NO: 533837
uucagagccaggaaauggc

SEQ ID NO: 533839 - RNA, 19 nt, Artificial Sequence
  Description of Artificial Sequence: Synthetic oligonucleotide
  Sense strand starting at position 1321 of SEQ ID NO: 318063
ucaagugcuucugugagga

SEQ ID NO: 533840 - RNA, 19 nt, Artificial Sequence
  Description of Artificial Sequence: Synthetic oligonucleotide
  Antisense strand to SEQ ID NO: 533839
uccucacagaagcacuuga

SEQ ID NO: 533841 - RNA, 19 nt, Artificial Sequence
  Description of Artificial Sequence: Synthetic oligonucleotide
  Sense strand starting at position 1345 of SEQ ID NO: 318063
gagagaaaugcaugcaaag

SEQ ID NO: 533842 - RNA, 19 nt, Artificial Sequence
  Description of Artificial Sequence: Synthetic oligonucleotide
  Antisense strand to SEQ ID NO: 533841
cuuugcaugcauuucucuc

SEQ ID NO: 533843 - RNA, 19 nt, Artificial Sequence
  Description of Artificial Sequence: Synthetic oligonucleotide
  Sense strand starting at position 1488 of SEQ ID NO: 318063
gggcaagaacaaugugauc

SEQ ID NO: 533844 - RNA, 19 nt, Artificial Sequence
  Description of Artificial Sequence: Synthetic oligonucleotide
  Antisense strand to SEQ ID NO: 533843
gaucacauuguucuugccc

SEQ ID NO: 533845 - RNA, 19 nt, Artificial Sequence
  Description of Artificial Sequence: Synthetic oligonucleotide
  Sense strand starting at position 1670 of SEQ ID NO: 318063
uggaaacuauccgcccuaa

SEQ ID NO: 533846 - RNA, 19 nt, Artificial Sequence
  Description of Artificial Sequence: Synthetic oligonucleotide
  Antisense strand to SEQ ID NO: 533845
uuagggcggauaguuucca

SEQ ID NO: 533847 - RNA, 19 nt, Artificial Sequence
  Description of Artificial Sequence: Synthetic oligonucleotide
  Sense strand starting at position 2024 of SEQ ID NO: 318063
ccagaaugacucuggagug

SEQ ID NO: 533848 - RNA, 19 nt, Artificial Sequence
  Description of Artificial Sequence: Synthetic oligonucleotide
  Antisense strand to SEQ ID NO: 533847
cacuccagagucauucugg

SEQ ID NO: 533849 - RNA, 19 nt, Artificial Sequence
  Description of Artificial Sequence: Synthetic oligonucleotide
  Sense strand starting at position 2063 of SEQ ID NO: 318063
cguucuguuacauuguguu

SEQ ID NO: 533850 - RNA, 19 nt, Artificial Sequence
  Description of Artificial Sequence: Synthetic oligonucleotide
  Antisense strand to SEQ ID NO: 533849
aacacaauguaacagaacg

SEQ ID NO: 533851 - RNA, 19 nt, Artificial Sequence
  Description of Artificial Sequence: Synthetic oligonucleotide
  Sense strand starting at position 2241 of SEQ ID NO: 318063
auccacauccaauguguua

SEQ ID NO: 533852 - RNA, 19 nt, Artificial Sequence
  Description of Artificial Sequence: Synthetic oligonucleotide
  Antisense strand to SEQ ID NO: 533851
uaacacauuggauguggau

SEQ ID NO: 533853 - RNA, 19 nt, Artificial Sequence
  Description of Artificial Sequence: Synthetic oligonucleotide
  Sense strand starting at position 2252 of SEQ ID NO: 318063
auguguuauccacacagaa

SEQ ID NO: 533854 - RNA, 19 nt, Artificial Sequence
  Description of Artificial Sequence: Synthetic oligonucleotide
  Antisense strand to SEQ ID NO: 533853
uucuguguggauaacacau

SEQ ID NO: 533855 - RNA, 19 nt, Artificial Sequence
  Description of Artificial Sequence: Synthetic oligonucleotide
  Sense strand starting at position 2295 of SEQ ID NO: 318063
agaugagauugcucacuca

SEQ ID NO: 533856 - RNA, 19 nt, Artificial Sequence
  Description of Artificial Sequence: Synthetic oligonucleotide
  Antisense strand to SEQ ID NO: 533855
ugagugagcaaucucaucu

SEQ ID NO: 533857 - RNA, 19 nt, Artificial Sequence
  Description of Artificial Sequence: Synthetic oligonucleotide
  Sense strand starting at position 2350 of SEQ ID NO: 318063
aucauaggucccuguuuau

SEQ ID NO: 533858 - RNA, 19 nt, Artificial Sequence
  Description of Artificial Sequence: Synthetic oligonucleotide
  Antisense strand to SEQ ID NO: 533857
auaaacagggaccuaugau

SEQ ID NO: 533859 - RNA, 19 nt, Artificial Sequence
  Description of Artificial Sequence: Synthetic oligonucleotide
  Sense strand starting at position 2450 of SEQ ID NO: 318063
ugucuuccacacuagaaug

SEQ ID NO: 533860 - RNA, 19 nt, Artificial Sequence
  Description of Artificial Sequence: Synthetic oligonucleotide
  Antisense strand to SEQ ID NO: 533859
cauucuaguguggaagaca

SEQ ID NO: 533861 - RNA, 19 nt, Artificial Sequence
  Description of Artificial Sequence: Synthetic oligonucleotide
  Sense strand starting at position 2479 of SEQ ID NO: 318063
gagugauggacuugauugu

SEQ ID NO: 533862 - RNA, 19 nt, Artificial Sequence
  Description of Artificial Sequence: Synthetic oligonucleotide
  Antisense strand to SEQ ID NO: 533861
acaaucaaguccaucacuc

SEQ ID NO: 533863 - RNA, 19 nt, Artificial Sequence
  Description of Artificial Sequence: Synthetic oligonucleotide
  Sense strand starting at position 2492 of SEQ ID NO: 318063
gauugucucguuuacucca

SEQ ID NO: 533864 - RNA, 19 nt, Artificial Sequence
  Description of Artificial Sequence: Synthetic oligonucleotide
  Antisense strand to SEQ ID NO: 533863
uggaguaaacgagacaauc

SEQ ID NO: 533865 - RNA, 19 nt, Artificial Sequence
  Description of Artificial Sequence: Synthetic oligonucleotide
  Sense strand starting at position 2602 of SEQ ID NO: 318063
uugagaguauucucuccua

SEQ ID NO: 533866 - RNA, 19 nt, Artificial Sequence
  Description of Artificial Sequence: Synthetic oligonucleotide
  Antisense strand to SEQ ID NO: 533865
uaggagagaauacucucaa

SEQ ID NO: 533867 - RNA, 19 nt, Artificial Sequence
  Description of Artificial Sequence: Synthetic oligonucleotide
  Sense strand starting at position 2738 of SEQ ID NO: 318063
ucccaugggcuaugguaaa

SEQ ID NO: 533868 - RNA, 19 nt, Artificial Sequence
  Description of Artificial Sequence: Synthetic oligonucleotide
  Antisense strand to SEQ ID NO: 533867
uuuaccauagcccauggga

SEQ ID NO: 533869 - RNA, 19 nt, Artificial Sequence
  Description of Artificial Sequence: Synthetic oligonucleotide
  Sense strand starting at position 2751 of SEQ ID NO: 318063
gguaaagaacaauggcaau

SEQ ID NO: 533870 - RNA, 19 nt, Artificial Sequence
  Description of Artificial Sequence: Synthetic oligonucleotide
  Antisense strand to SEQ ID NO: 533869
auugccauuguucuuuacc

SEQ ID NO: 533871 - RNA, 19 nt, Artificial Sequence
  Description of Artificial Sequence: Synthetic oligonucleotide
  Sense strand starting at position 2769 of SEQ ID NO: 318063
ugaugaagcuaguucuucu

SEQ ID NO: 533872 - RNA, 19 nt, Artificial Sequence
  Description of Artificial Sequence: Synthetic oligonucleotide
  Antisense strand to SEQ ID NO: 533871
agaagaacuagcuucauca

SEQ ID NO: 533873 - RNA, 19 nt, Artificial Sequence
  Description of Artificial Sequence: Synthetic oligonucleotide
  Sense strand starting at position 2851 of SEQ ID NO: 318063
acuugaaucuaguuaauug

SEQ ID NO: 533874 - RNA, 19 nt, Artificial Sequence
  Description of Artificial Sequence: Synthetic oligonucleotide
  Antisense strand to SEQ ID NO: 533873
caauuaacuagauucaagu

SEQ ID NO: 533875 - RNA, 19 nt, Artificial Sequence
  Description of Artificial Sequence: Synthetic oligonucleotide
  Sense strand starting at position 2858 of SEQ ID NO: 318063
ucuaguuaauugucuuaca

SEQ ID NO: 533876 - RNA, 19 nt, Artificial Sequence
  Description of Artificial Sequence: Synthetic oligonucleotide
  Antisense strand to SEQ ID NO: 533875
uguaagacaauuaacuaga

SEQ ID NO: 533877 - RNA, 19 nt, Artificial Sequence
  Description of Artificial Sequence: Synthetic oligonucleotide
  Sense strand starting at position 2859 of SEQ ID NO: 318063
cuaguuaauugucuuacaa

SEQ ID NO: 533878 - RNA, 19 nt, Artificial Sequence
  Description of Artificial Sequence: Synthetic oligonucleotide
  Antisense strand to SEQ ID NO: 533877
uuguaagacaauuaacuag

SEQ ID NO: 533879 - RNA, 19 nt, Artificial Sequence
  Description of Artificial Sequence: Synthetic oligonucleotide
  Sense strand starting at position 2946 of SEQ ID NO: 318063
agauguuaggaguagccau

SEQ ID NO: 533880 - RNA, 19 nt, Artificial Sequence
  Description of Artificial Sequence: Synthetic oligonucleotide
  Antisense strand to SEQ ID NO: 533879
auggcuacuccuaacaucu

SEQ ID NO: 533881 - RNA, 19 nt, Artificial Sequence
  Description of Artificial Sequence: Synthetic oligonucleotide
  Sense strand starting at position 2980 of SEQ ID NO: 318063
ucuuuaaaguagguaaugu

SEQ ID NO: 533882 - RNA, 19 nt, Artificial Sequence
  Description of Artificial Sequence: Synthetic oligonucleotide
  Antisense strand to SEQ ID NO: 533881
acauuaccuacuuuaaaga

SEQ ID NO: 533883 - RNA, 19 nt, Artificial Sequence
  Description of Artificial Sequence: Synthetic oligonucleotide
  Sense strand starting at position 3167 of SEQ ID NO: 318063
agauuagauuacucugcau

SEQ ID NO: 533884 - RNA, 19 nt, Artificial Sequence
  Description of Artificial Sequence: Synthetic oligonucleotide
  Antisense strand to SEQ ID NO: 533883
augcagaguaaucuaaucu

SEQ ID NO: 533885 - RNA, 19 nt, Artificial Sequence
  Description of Artificial Sequence: Synthetic oligonucleotide
  Sense strand starting at position 3203 of SEQ ID NO: 318063
uuauaaauaccugaugcga

SEQ ID NO: 533886 - RNA, 19 nt, Artificial Sequence
  Description of Artificial Sequence: Synthetic oligonucleotide
  Antisense strand to SEQ ID NO: 533885
ucgcaucagguauuuauaa

SEQ ID NO: 533887 - RNA, 19 nt, Artificial Sequence
  Description of Artificial Sequence: Synthetic oligonucleotide
  Sense strand starting at position 3233 of SEQ ID NO: 318063
gugucuauuugcuuccauu

SEQ ID NO: 533888 - RNA, 19 nt, Artificial Sequence
  Description of Artificial Sequence: Synthetic oligonucleotide
  Antisense strand to SEQ ID NO: 533887
aauggaagcaaauagacac

SEQ ID NO: 533889 - RNA, 19 nt, Artificial Sequence
  Description of Artificial Sequence: Synthetic oligonucleotide
  Sense strand starting at position 3381 of SEQ ID NO: 318063
uauugaggaugagauauga

SEQ ID NO: 533890 - RNA, 19 nt, Artificial Sequence
  Description of Artificial Sequence: Synthetic oligonucleotide
  Antisense strand to SEQ ID NO: 533889
ucauaucucauccucaaua

SEQ ID NO: 533891 - RNA, 19 nt, Artificial Sequence
  Description of Artificial Sequence: Synthetic oligonucleotide
  Sense strand starting at position 3721 of SEQ ID NO: 318063
gagaaagacugggucugua

SEQ ID NO: 533892 - RNA, 19 nt, Artificial Sequence
  Description of Artificial Sequence: Synthetic oligonucleotide
  Antisense strand to SEQ ID NO: 533891
uacagacccagucuuucuc

SEQ ID NO: 533893 - RNA, 19 nt, Artificial Sequence
  Description of Artificial Sequence: Synthetic oligonucleotide
  Sense strand starting at position 3813 of SEQ ID NO: 318063
uugagaaugcauuggcuuu

SEQ ID NO: 533894 - RNA, 19 nt, Artificial Sequence
  Description of Artificial Sequence: Synthetic oligonucleotide
  Antisense strand to SEQ ID NO: 533893
aaagccaaugcauucucaa

SEQ ID NO: 533895 - RNA, 19 nt, Artificial Sequence
  Description of Artificial Sequence: Synthetic oligonucleotide
  Sense strand starting at position 73 of SEQ ID NO: 318064
uauguauguguagagauau

SEQ ID NO: 533896 - RNA, 19 nt, Artificial Sequence
  Description of Artificial Sequence: Synthetic oligonucleotide
  Antisense strand to SEQ ID NO: 533895
auaucucuacacauacaua

SEQ ID NO: 533897 - RNA, 19 nt, Artificial Sequence
  Description of Artificial Sequence: Synthetic oligonucleotide
  Sense strand starting at position 177 of SEQ ID NO: 318064
gcuggaguacuggaauaug

SEQ ID NO: 533898 - RNA, 19 nt, Artificial Sequence
  Description of Artificial Sequence: Synthetic oligonucleotide
  Antisense strand to SEQ ID NO: 533897
cauauuccaguacuccagc

SEQ ID NO: 533899 - RNA, 19 nt, Artificial Sequence
  Description of Artificial Sequence: Synthetic oligonucleotide
  Sense strand starting at position 258 of SEQ ID NO: 318064
aacugugagccugaaauac

SEQ ID NO: 533900 - RNA, 19 nt, Artificial Sequence
  Description of Artificial Sequence: Synthetic oligonucleotide
  Antisense strand to SEQ ID NO: 533899
guauuucaggcucacaguu

SEQ ID NO: 533901 - RNA, 19 nt, Artificial Sequence
  Description of Artificial Sequence: Synthetic oligonucleotide
  Sense strand starting at position 366 of SEQ ID NO: 318064
aagaguagguccuuugauu

SEQ ID NO: 533902 - RNA, 19 nt, Artificial Sequence
  Description of Artificial Sequence: Synthetic oligonucleotide
  Antisense strand to SEQ ID NO: 533901
aaucaaaggaccuacucuu

SEQ ID NO: 533903 - RNA, 19 nt, Artificial Sequence
  Description of Artificial Sequence: Synthetic oligonucleotide
  Sense strand starting at position 375 of SEQ ID NO: 318064
uccuuugauuacucgggaa

SEQ ID NO: 533904 - RNA, 19 nt, Artificial Sequence
  Description of Artificial Sequence: Synthetic oligonucleotide
  Antisense strand to SEQ ID NO: 533903
uucccgaguaaucaaagga

SEQ ID NO: 533905 - RNA, 19 nt, Artificial Sequence
  Description of Artificial Sequence: Synthetic oligonucleotide
  Sense strand starting at position 377 of SEQ ID NO: 318064
cuuugauuacucgggaaau

SEQ ID NO: 533906 - RNA, 19 nt, Artificial Sequence
  Description of Artificial Sequence: Synthetic oligonucleotide
  Antisense strand to SEQ ID NO: 533905
auuucccgaguaaucaaag

SEQ ID NO: 533907 - RNA, 19 nt, Artificial Sequence
  Description of Artificial Sequence: Synthetic oligonucleotide
  Sense strand starting at position 391 of SEQ ID NO: 318064
gaaaucauaugguccuuga

SEQ ID NO: 533908 - RNA, 19 nt, Artificial Sequence
  Description of Artificial Sequence: Synthetic oligonucleotide
  Antisense strand to SEQ ID NO: 533907
ucaaggaccauaugauuuc

SEQ ID NO: 533909 - RNA, 19 nt, Artificial Sequence
  Description of Artificial Sequence: Synthetic oligonucleotide
  Sense strand starting at position 529 of SEQ ID NO: 318064
cacgaaauaguguaugaua

SEQ ID NO: 533910 - RNA, 19 nt, Artificial Sequence
  Description of Artificial Sequence: Synthetic oligonucleotide
  Antisense strand to SEQ ID NO: 533909
uaucauacacuauuucgug

SEQ ID NO: 533911 - RNA, 19 nt, Artificial Sequence
  Description of Artificial Sequence: Synthetic oligonucleotide
  Sense strand starting at position 589 of SEQ ID NO: 318064
cugauugugcaagauacaa

SEQ ID NO: 533912 - RNA, 19 nt, Artificial Sequence
  Description of Artificial Sequence: Synthetic oligonucleotide
  Antisense strand to SEQ ID NO: 533911
uuguaucuugcacaaucag

SEQ ID NO: 533913 - RNA, 19 nt, Artificial Sequence
  Description of Artificial Sequence: Synthetic oligonucleotide
  Sense strand starting at position 1015 of SEQ ID NO: 318064
aaugaugagugccuaccaa

SEQ ID NO: 533914 - RNA, 19 nt, Artificial Sequence
  Description of Artificial Sequence: Synthetic oligonucleotide
  Antisense strand to SEQ ID NO: 533913
uugguaggcacucaucauu

SEQ ID NO: 533915 - RNA, 19 nt, Artificial Sequence
  Description of Artificial Sequence: Synthetic oligonucleotide
  Sense strand starting at position 1062 of SEQ ID NO: 318064
cugugcauugcgguguuaa

SEQ ID NO: 533916 - RNA, 19 nt, Artificial Sequence
  Description of Artificial Sequence: Synthetic oligonucleotide
  Antisense strand to SEQ ID NO: 533915
uuaacaccgcaaugcacag

SEQ ID NO: 533917 - RNA, 19 nt, Artificial Sequence
  Description of Artificial Sequence: Synthetic oligonucleotide
  Sense strand starting at position 1064 of SEQ ID NO: 318064
gugcauugcgguguuaaga

SEQ ID NO: 533918 - RNA, 19 nt, Artificial Sequence
  Description of Artificial Sequence: Synthetic oligonucleotide
  Antisense strand to SEQ ID NO: 533917
ucuuaacaccgcaaugcac

SEQ ID NO: 533919 - RNA, 19 nt, Artificial Sequence
  Description of Artificial Sequence: Synthetic oligonucleotide
  Sense strand starting at position 1191 of SEQ ID NO: 318064
cccuuagaguuggugggaa

SEQ ID NO: 533920 - RNA, 19 nt, Artificial Sequence
  Description of Artificial Sequence: Synthetic oligonucleotide
  Antisense strand to SEQ ID NO: 533919
uucccaccaacucuaaggg

SEQ ID NO: 533921 - RNA, 19 nt, Artificial Sequence
  Description of Artificial Sequence: Synthetic oligonucleotide
  Sense strand starting at position 1193 of SEQ ID NO: 318064
cuuagaguuggugggaaau

SEQ ID NO: 533922 - RNA, 19 nt, Artificial Sequence
  Description of Artificial Sequence: Synthetic oligonucleotide
  Antisense strand to SEQ ID NO: 533921
auuucccaccaacucuaag

SEQ ID NO: 533923 - RNA, 19 nt, Artificial Sequence
  Description of Artificial Sequence: Synthetic oligonucleotide
  Sense strand starting at position 1219 of SEQ ID NO: 318064
acuaauaaucgauguaaag

SEQ ID NO: 533924 - RNA, 19 nt, Artificial Sequence
  Description of Artificial Sequence: Synthetic oligonucleotide
  Antisense strand to SEQ ID NO: 533923
cuuuacaucgauuauuagu

SEQ ID NO: 533925 - RNA, 19 nt, Artificial Sequence
  Description of Artificial Sequence: Synthetic oligonucleotide
  Sense strand starting at position 1255 of SEQ ID NO: 318064
agguauaaguggucaauau

SEQ ID NO: 533926 - RNA, 19 nt, Artificial Sequence
  Description of Artificial Sequence: Synthetic oligonucleotide
  Antisense strand to SEQ ID NO: 533925
auauugaccacuuauaccu

SEQ ID NO: 533927 - RNA, 19 nt, Artificial Sequence
  Description of Artificial Sequence: Synthetic oligonucleotide
  Sense strand starting at position 1256 of SEQ ID NO: 318064
gguauaaguggucaauauc

SEQ ID NO: 533928 - RNA, 19 nt, Artificial Sequence
  Description of Artificial Sequence: Synthetic oligonucleotide
  Antisense strand to SEQ ID NO: 533927
gauauugaccacuuauacc

SEQ ID NO: 533929 - RNA, 19 nt, Artificial Sequence
  Description of Artificial Sequence: Synthetic oligonucleotide
  Sense strand starting at position 1264 of SEQ ID NO: 318064
uggucaauaucagccauaa

SEQ ID NO: 533930 - RNA, 19 nt, Artificial Sequence
  Description of Artificial Sequence: Synthetic oligonucleotide
  Antisense strand to SEQ ID NO: 533929
uuauggcugauauugacca

SEQ ID NO: 533931 - RNA, 19 nt, Artificial Sequence
  Description of Artificial Sequence: Synthetic oligonucleotide
  Sense strand starting at position 1615 of SEQ ID NO: 318064
guaacagaugcuuagagca

SEQ ID NO: 533932 - RNA, 19 nt, Artificial Sequence
  Description of Artificial Sequence: Synthetic oligonucleotide
  Antisense strand to SEQ ID NO: 533931
ugcucuaagcaucuguuac

SEQ ID NO: 533933 - RNA, 19 nt, Artificial Sequence
  Description of Artificial Sequence: Synthetic oligonucleotide
  Sense strand starting at position 1994 of SEQ ID NO: 318064
gaaagaaugcuggguucug

SEQ ID NO: 533934 - RNA, 19 nt, Artificial Sequence
  Description of Artificial Sequence: Synthetic oligonucleotide
  Antisense strand to SEQ ID NO: 533933
cagaacccagcauucuuuc

SEQ ID NO: 533935 - RNA, 19 nt, Artificial Sequence
  Description of Artificial Sequence: Synthetic oligonucleotide
  Sense strand starting at position 1995 of SEQ ID NO: 318064
aaagaaugcuggguucuga

SEQ ID NO: 533936 - RNA, 19 nt, Artificial Sequence
  Description of Artificial Sequence: Synthetic oligonucleotide
  Antisense strand to SEQ ID NO: 533935
ucagaacccagcauucuuu

SEQ ID NO: 533937 - RNA, 19 nt, Artificial Sequence
  Description of Artificial Sequence: Synthetic oligonucleotide
  Sense strand starting at position 2045 of SEQ ID NO: 318064
gcugccauccaauaggaga

SEQ ID NO: 533938 - RNA, 19 nt, Artificial Sequence
  Description of Artificial Sequence: Synthetic oligonucleotide
  Antisense strand to SEQ ID NO: 533937
ucuccuauuggauggcagc

SEQ ID NO: 533939 - RNA, 19 nt, Artificial Sequence
  Description of Artificial Sequence: Synthetic oligonucleotide
  Sense strand starting at position 2056 of SEQ ID NO: 318064
auaggagaccguuacuguu

SEQ ID NO: 533940 - RNA, 19 nt, Artificial Sequence
  Description of Artificial Sequence: Synthetic oligonucleotide
  Antisense strand to SEQ ID NO: 533939
aacaguaacggucuccuau

SEQ ID NO: 533941 - RNA, 19 nt, Artificial Sequence
  Description of Artificial Sequence: Synthetic oligonucleotide
  Sense strand starting at position 2105 of SEQ ID NO: 318064
guuacucaaguguaaccua

SEQ ID NO: 533942 - RNA, 19 nt, Artificial Sequence
  Description of Artificial Sequence: Synthetic oligonucleotide
  Antisense strand to SEQ ID NO: 533941
uagguuacacuugaguaac

SEQ ID NO: 533943 - RNA, 19 nt, Artificial Sequence
  Description of Artificial Sequence: Synthetic oligonucleotide
  Sense strand starting at position 2153 of SEQ ID NO: 318064
gacguuagaaagugcauuu

SEQ ID NO: 533944 - RNA, 19 nt, Artificial Sequence
  Description of Artificial Sequence: Synthetic oligonucleotide
  Antisense strand to SEQ ID NO: 533943
aaaugcacuuucuaacguc

SEQ ID NO: 533945 - RNA, 19 nt, Artificial Sequence
  Description of Artificial Sequence: Synthetic oligonucleotide
  Sense strand starting at position 2445 of SEQ ID NO: 318064
ccgggagggacuggauuau

SEQ ID NO: 533946 - RNA, 19 nt, Artificial Sequence
  Description of Artificial Sequence: Synthetic oligonucleotide
  Antisense strand to SEQ ID NO: 533945
auaauccagucccucccgg

SEQ ID NO: 533947 - RNA, 19 nt, Artificial Sequence
  Description of Artificial Sequence: Synthetic oligonucleotide
  Sense strand starting at position 2918 of SEQ ID NO: 318064
gauuaacuagguugcuaaa

SEQ ID NO: 533948 - RNA, 19 nt, Artificial Sequence
  Description of Artificial Sequence: Synthetic oligonucleotide
  Antisense strand to SEQ ID NO: 533947
uuuagcaaccuaguuaauc

SEQ ID NO: 533949 - RNA, 19 nt, Artificial Sequence
  Description of Artificial Sequence: Synthetic oligonucleotide
  Sense strand starting at position 3041 of SEQ ID NO: 318064
agauaaauauaggaaagga

SEQ ID NO: 533950 - RNA, 19 nt, Artificial Sequence
  Description of Artificial Sequence: Synthetic oligonucleotide
  Antisense strand to SEQ ID NO: 533949
uccuuuccuauauuuaucu

SEQ ID NO: 533951 - RNA, 19 nt, Artificial Sequence
  Description of Artificial Sequence: Synthetic oligonucleotide
  Sense strand starting at position 3103 of SEQ ID NO: 318064
gaugaugucaggugauuag

SEQ ID NO: 533952 - RNA, 19 nt, Artificial Sequence
  Description of Artificial Sequence: Synthetic oligonucleotide
  Antisense strand to SEQ ID NO: 533951
cuaaucaccugacaucauc

SEQ ID NO: 533953 - RNA, 19 nt, Artificial Sequence
  Description of Artificial Sequence: Synthetic oligonucleotide
  Sense strand starting at position 3309 of SEQ ID NO: 318064
cagguuagaugcccaagau

SEQ ID NO: 533954 - RNA, 19 nt, Artificial Sequence
  Description of Artificial Sequence: Synthetic oligonucleotide
  Antisense strand to SEQ ID NO: 533953
aucuugggcaucuaaccug

SEQ ID NO: 533955 - RNA, 19 nt, Artificial Sequence
  Description of Artificial Sequence: Synthetic oligonucleotide
  Sense strand starting at position 3313 of SEQ ID NO: 318064
uuagaugcccaagauguuu

SEQ ID NO: 533956 - RNA, 19 nt, Artificial Sequence
  Description of Artificial Sequence: Synthetic oligonucleotide
  Antisense strand to SEQ ID NO: 533955
aaacaucuugggcaucuaa

SEQ ID NO: 533957 - RNA, 19 nt, Artificial Sequence
  Description of Artificial Sequence: Synthetic oligonucleotide
  Sense strand starting at position 3341 of SEQ ID NO: 318064
guaauauggugaagggaga

SEQ ID NO: 533958 - RNA, 19 nt, Artificial Sequence
  Description of Artificial Sequence: Synthetic oligonucleotide
  Antisense strand to SEQ ID NO: 533957
ucucccuucaccauauuac

SEQ ID NO: 533959 - RNA, 19 nt, Artificial Sequence
  Description of Artificial Sequence: Synthetic oligonucleotide
  Sense strand starting at position 3355 of SEQ ID NO: 318064
ggagacuacuuguuuccua

SEQ ID NO: 533960 - RNA, 19 nt, Artificial Sequence
  Description of Artificial Sequence: Synthetic oligonucleotide
  Antisense strand to SEQ ID NO: 533959
uaggaaacaaguagucucc

SEQ ID NO: 533961 - RNA, 19 nt, Artificial Sequence
  Description of Artificial Sequence: Synthetic oligonucleotide
  Sense strand starting at position 3379 of SEQ ID NO: 318064
guaaacuugggcgagagau

SEQ ID NO: 533962 - RNA, 19 nt, Artificial Sequence
  Description of Artificial Sequence: Synthetic oligonucleotide
  Antisense strand to SEQ ID NO: 533961
aucucucgcccaaguuuac

SEQ ID NO: 533963 - RNA, 19 nt, Artificial Sequence
  Description of Artificial Sequence: Synthetic oligonucleotide
  Sense strand starting at position 3429 of SEQ ID NO: 318064
aagauaagguaguuauagu

SEQ ID NO: 533964 - RNA, 19 nt, Artificial Sequence
  Description of Artificial Sequence: Synthetic oligonucleotide
  Antisense strand to SEQ ID NO: 533963
acuauaacuaccuuaucuu

SEQ ID NO: 533965 - RNA, 19 nt, Artificial Sequence
  Description of Artificial Sequence: Synthetic oligonucleotide
  Sense strand starting at position 3493 of SEQ ID NO: 318064
uaugaagagcuuggaguau

SEQ ID NO: 533966 - RNA, 19 nt, Artificial Sequence
  Description of Artificial Sequence: Synthetic oligonucleotide
  Antisense strand to SEQ ID NO: 533965
auacuccaagcucuucaua

SEQ ID NO: 533967 - RNA, 19 nt, Artificial Sequence
  Description of Artificial Sequence: Synthetic oligonucleotide
  Sense strand starting at position 3584 of SEQ ID NO: 318064
cuuugagugccucaagauu

SEQ ID NO: 533968 - RNA, 19 nt, Artificial Sequence
  Description of Artificial Sequence: Synthetic oligonucleotide
  Antisense strand to SEQ ID NO: 533967
aaucuugaggcacucaaag

SEQ ID NO: 533969 - RNA, 19 nt, Artificial Sequence
  Description of Artificial Sequence: Synthetic oligonucleotide
  Sense strand starting at position 3600 of SEQ ID NO: 318064
auucgugugaaagacauua

SEQ ID NO: 533970 - RNA, 19 nt, Artificial Sequence
  Description of Artificial Sequence: Synthetic oligonucleotide
  Antisense strand to SEQ ID NO: 533969
uaaugucuuucacacgaau

SEQ ID NO: 533971 - RNA, 19 nt, Artificial Sequence
  Description of Artificial Sequence: Synthetic oligonucleotide
  Sense strand starting at position 3737 of SEQ ID NO: 318064
ugcugaauuugggauuucu

SEQ ID NO: 533972 - RNA, 19 nt, Artificial Sequence
  Description of Artificial Sequence: Synthetic oligonucleotide
  Antisense strand to SEQ ID NO: 533971
agaaaucccaaauucagca

SEQ ID NO: 533973 - RNA, 19 nt, Artificial Sequence
  Description of Artificial Sequence: Synthetic oligonucleotide
  Sense strand starting at position 3965 of SEQ ID NO: 318064
gagauuguagcucacagca

SEQ ID NO: 533974 - RNA, 19 nt, Artificial Sequence
  Description of Artificial Sequence: Synthetic oligonucleotide
  Antisense strand to SEQ ID NO: 533973
ugcugugagcuacaaucuc

SEQ ID NO: 533975 - RNA, 19 nt, Artificial Sequence
  Description of Artificial Sequence: Synthetic oligonucleotide
  Sense strand starting at position 203 of SEQ ID NO: 318065
cuuuguaaugcucagguau

SEQ ID NO: 533976 - RNA, 19 nt, Artificial Sequence
  Description of Artificial Sequence: Synthetic oligonucleotide
  Antisense strand to SEQ ID NO: 533975
auaccugagcauuacaaag

SEQ ID NO: 533977 - RNA, 19 nt, Artificial Sequence
  Description of Artificial Sequence: Synthetic oligonucleotide
  Sense strand starting at position 334 of SEQ ID NO: 318065
gcuuguuugagugaaucca

SEQ ID NO: 533978 - RNA, 19 nt, Artificial Sequence
  Description of Artificial Sequence: Synthetic oligonucleotide
  Antisense strand to SEQ ID NO: 533977
uggauucacucaaacaagc

SEQ ID NO: 533979 - RNA, 19 nt, Artificial Sequence
  Description of Artificial Sequence: Synthetic oligonucleotide
  Sense strand starting at position 431 of SEQ ID NO: 318065
ccuagaagcuuauuaguau

SEQ ID NO: 533980 - RNA, 19 nt, Artificial Sequence
  Description of Artificial Sequence: Synthetic oligonucleotide
  Antisense strand to SEQ ID NO: 533979
auacuaauaagcuucuagg

SEQ ID NO: 533981 - RNA, 19 nt, Artificial Sequence
  Description of Artificial Sequence: Synthetic oligonucleotide
  Sense strand starting at position 567 of SEQ ID NO: 318065
uuggcucuggaaggaauaa

SEQ ID NO: 533982 - RNA, 19 nt, Artificial Sequence
  Description of Artificial Sequence: Synthetic oligonucleotide
  Antisense strand to SEQ ID NO: 533981
uuauuccuuccagagccaa

SEQ ID NO: 533983 - RNA, 19 nt, Artificial Sequence
  Description of Artificial Sequence: Synthetic oligonucleotide
  Sense strand starting at position 605 of SEQ ID NO: 318065
gagcacauuuggcagauaa

SEQ ID NO: 533984 - RNA, 19 nt, Artificial Sequence
  Description of Artificial Sequence: Synthetic oligonucleotide
  Antisense strand to SEQ ID NO: 533983
uuaucugccaaaugugcuc

SEQ ID NO: 533985 - RNA, 19 nt, Artificial Sequence
  Description of Artificial Sequence: Synthetic oligonucleotide
  Sense strand starting at position 657 of SEQ ID NO: 318065
gcugcuuuauuuccugaga

SEQ ID NO: 533986 - RNA, 19 nt, Artificial Sequence
  Description of Artificial Sequence: Synthetic oligonucleotide
  Antisense strand to SEQ ID NO: 533985
ucucaggaaauaaagcagc

SEQ ID NO: 533987 - RNA, 19 nt, Artificial Sequence
  Description of Artificial Sequence: Synthetic oligonucleotide
  Sense strand starting at position 885 of SEQ ID NO: 318065
ugggauucugguuacagca

SEQ ID NO: 533988 - RNA, 19 nt, Artificial Sequence
  Description of Artificial Sequence: Synthetic oligonucleotide
  Antisense strand to SEQ ID NO: 533987
ugcuguaaccagaauccca

SEQ ID NO: 533989 - RNA, 19 nt, Artificial Sequence
  Description of Artificial Sequence: Synthetic oligonucleotide
  Sense strand starting at position 978 of SEQ ID NO: 318065
ucaaucuagugaucaguca

SEQ ID NO: 533990 - RNA, 19 nt, Artificial Sequence
  Description of Artificial Sequence: Synthetic oligonucleotide
  Antisense strand to SEQ ID NO: 533989
ugacugaucacuagauuga

SEQ ID NO: 533991 - RNA, 19 nt, Artificial Sequence
  Description of Artificial Sequence: Synthetic oligonucleotide
  Sense strand starting at position 985 of SEQ ID NO: 318065
agugaucagucauugaucu

SEQ ID NO: 533992 - RNA, 19 nt, Artificial Sequence
  Description of Artificial Sequence: Synthetic oligonucleotide
  Antisense strand to SEQ ID NO: 533991
agaucaaugacugaucacu

SEQ ID NO: 533993 - RNA, 19 nt, Artificial Sequence
  Description of Artificial Sequence: Synthetic oligonucleotide
  Sense strand starting at position 986 of SEQ ID NO: 318065
gugaucagucauugaucuu

SEQ ID NO: 533994 - RNA, 19 nt, Artificial Sequence
  Description of Artificial Sequence: Synthetic oligonucleotide
  Antisense strand to SEQ ID NO: 533993
aagaucaaugacugaucac

SEQ ID NO: 533995 - RNA, 19 nt, Artificial Sequence
  Description of Artificial Sequence: Synthetic oligonucleotide
  Sense strand starting at position 992 of SEQ ID NO: 318065
agucauugaucuuccacua

SEQ ID NO: 533996 - RNA, 19 nt, Artificial Sequence
  Description of Artificial Sequence: Synthetic oligonucleotide
  Antisense strand to SEQ ID NO: 533995
uaguggaagaucaaugacu

SEQ ID NO: 533997 - RNA, 19 nt, Artificial Sequence
  Description of Artificial Sequence: Synthetic oligonucleotide
  Sense strand starting at position 1174 of SEQ ID NO: 318065
gagcuaaagugcucacaca

SEQ ID NO: 533998 - RNA, 19 nt, Artificial Sequence
  Description of Artificial Sequence: Synthetic oligonucleotide
  Antisense strand to SEQ ID NO: 533997
ugugugagcacuuuagcuc

SEQ ID NO: 533999 - RNA, 19 nt, Artificial Sequence
  Description of Artificial Sequence: Synthetic oligonucleotide
  Sense strand starting at position 1175 of SEQ ID NO: 318065
agcuaaagugcucacacaa

SEQ ID NO: 534000 - RNA, 19 nt, Artificial Sequence
  Description of Artificial Sequence: Synthetic oligonucleotide
  Antisense strand to SEQ ID NO: 533999
uugugugagcacuuuagcu

SEQ ID NO: 534001 - RNA, 19 nt, Artificial Sequence
  Description of Artificial Sequence: Synthetic oligonucleotide
  Sense strand starting at position 1205 of SEQ ID NO: 318065
agauuauacuuagugcaaa

SEQ ID NO: 534002 - RNA, 19 nt, Artificial Sequence
  Description of Artificial Sequence: Synthetic oligonucleotide
  Antisense strand to SEQ ID NO: 534001
uuugcacuaaguauaaucu

SEQ ID NO: 534003 - RNA, 19 nt, Artificial Sequence
  Description of Artificial Sequence: Synthetic oligonucleotide
  Sense strand starting at position 1367 of SEQ ID NO: 318065
guuacaucauauguggauu

SEQ ID NO: 534004 - RNA, 19 nt, Artificial Sequence
  Description of Artificial Sequence: Synthetic oligonucleotide
  Antisense strand to SEQ ID NO: 534003
aauccacauaugauguaac

SEQ ID NO: 534005 - RNA, 19 nt, Artificial Sequence
  Description of Artificial Sequence: Synthetic oligonucleotide
  Sense strand starting at position 1370 of SEQ ID NO: 318065
acaucauauguggauugua

SEQ ID NO: 534006 - RNA, 19 nt, Artificial Sequence
  Description of Artificial Sequence: Synthetic oligonucleotide
  Antisense strand to SEQ ID NO: 534005
uacaauccacauaugaugu

SEQ ID NO: 534007 - RNA, 19 nt, Artificial Sequence
  Description of Artificial Sequence: Synthetic oligonucleotide
  Sense strand starting at position 1373 of SEQ ID NO: 318065
ucauauguggauuguacau

SEQ ID NO: 534008 - RNA, 19 nt, Artificial Sequence
  Description of Artificial Sequence: Synthetic oligonucleotide
  Antisense strand to SEQ ID NO: 534007
auguacaauccacauauga

SEQ ID NO: 534009 - RNA, 19 nt, Artificial Sequence
  Description of Artificial Sequence: Synthetic oligonucleotide
  Sense strand starting at position 1510 of SEQ ID NO: 318065
uuugguuccauggaaaguu

SEQ ID NO: 534010 - RNA, 19 nt, Artificial Sequence
  Description of Artificial Sequence: Synthetic oligonucleotide
  Antisense strand to SEQ ID NO: 534009
aacuuuccauggaaccaaa

SEQ ID NO: 534011 - RNA, 19 nt, Artificial Sequence
  Description of Artificial Sequence: Synthetic oligonucleotide
  Sense strand starting at position 1656 of SEQ ID NO: 318065
cucaauccugcugauggaa

SEQ ID NO: 534012 - RNA, 19 nt, Artificial Sequence
  Description of Artificial Sequence: Synthetic oligonucleotide
  Antisense strand to SEQ ID NO: 534011
uuccaucagcaggauugag

SEQ ID NO: 534013 - RNA, 19 nt, Artificial Sequence
  Description of Artificial Sequence: Synthetic oligonucleotide
  Sense strand starting at position 2122 of SEQ ID NO: 318065
acaaguaauccuugagccu

SEQ ID NO: 534014 - RNA, 19 nt, Artificial Sequence
  Description of Artificial Sequence: Synthetic oligonucleotide
  Antisense strand to SEQ ID NO: 534013
aggcucaaggauuacuugu

SEQ ID NO: 534015 - RNA, 19 nt, Artificial Sequence
  Description of Artificial Sequence: Synthetic oligonucleotide
  Sense strand starting at position 2254 of SEQ ID NO: 318065
cccuguggucaggacagaa

SEQ ID NO: 534016 - RNA, 19 nt, Artificial Sequence
  Description of Artificial Sequence: Synthetic oligonucleotide
  Antisense strand to SEQ ID NO: 534015
uucuguccugaccacaggg

SEQ ID NO: 534017 - RNA, 19 nt, Artificial Sequence
  Description of Artificial Sequence: Synthetic oligonucleotide
  Sense strand starting at position 2413 of SEQ ID NO: 318065
agggaaugcauguaguaca

SEQ ID NO: 534018 - RNA, 19 nt, Artificial Sequence
  Description of Artificial Sequence: Synthetic oligonucleotide
  Antisense strand to SEQ ID NO: 534017
uguacuacaugcauucccu

SEQ ID NO: 534019 - RNA, 19 nt, Artificial Sequence
  Description of Artificial Sequence: Synthetic oligonucleotide
  Sense strand starting at position 2477 of SEQ ID NO: 318065
ucaacauugcacugugauc

SEQ ID NO: 534020 - RNA, 19 nt, Artificial Sequence
  Description of Artificial Sequence: Synthetic oligonucleotide
  Antisense strand to SEQ ID NO: 534019
gaucacagugcaauguuga

SEQ ID NO: 534021 - RNA, 19 nt, Artificial Sequence
  Description of Artificial Sequence: Synthetic oligonucleotide
  Sense strand starting at position 2482 of SEQ ID NO: 318065
auugcacugugaucauaca

SEQ ID NO: 534022 - RNA, 19 nt, Artificial Sequence
  Description of Artificial Sequence: Synthetic oligonucleotide
  Antisense strand to SEQ ID NO: 534021
uguaugaucacagugcaau

SEQ ID NO: 534023 - RNA, 19 nt, Artificial Sequence
  Description of Artificial Sequence: Synthetic oligonucleotide
  Sense strand starting at position 2511 of SEQ ID NO: 318065
gguaaccagagcuggaauu

SEQ ID NO: 534024 - RNA, 19 nt, Artificial Sequence
  Description of Artificial Sequence: Synthetic oligonucleotide
  Antisense strand to SEQ ID NO: 534023
aauuccagcucugguuacc

SEQ ID NO: 534025 - RNA, 19 nt, Artificial Sequence
  Description of Artificial Sequence: Synthetic oligonucleotide
  Sense strand starting at position 2636 of SEQ ID NO: 318065
accaaauucuggcuguaug

SEQ ID NO: 534026 - RNA, 19 nt, Artificial Sequence
  Description of Artificial Sequence: Synthetic oligonucleotide
  Antisense strand to SEQ ID NO: 534025
cauacagccagaauuuggu

SEQ ID NO: 534027 - RNA, 19 nt, Artificial Sequence
  Description of Artificial Sequence: Synthetic oligonucleotide
  Sense strand starting at position 2639 of SEQ ID NO: 318065
aaauucuggcuguauggau

SEQ ID NO: 534028 - RNA, 19 nt, Artificial Sequence
  Description of Artificial Sequence: Synthetic oligonucleotide
  Antisense strand to SEQ ID NO: 534027
auccauacagccagaauuu

SEQ ID NO: 534029 - RNA, 19 nt, Artificial Sequence
  Description of Artificial Sequence: Synthetic oligonucleotide
  Sense strand starting at position 2735 of SEQ ID NO: 318065
agcgauuguaaauaugaga

SEQ ID NO: 534030 - RNA, 19 nt, Artificial Sequence
  Description of Artificial Sequence: Synthetic oligonucleotide
  Antisense strand to SEQ ID NO: 534029
ucucauauuuacaaucgcu

SEQ ID NO: 534031 - RNA, 19 nt, Artificial Sequence
  Description of Artificial Sequence: Synthetic oligonucleotide
  Sense strand starting at position 2751 of SEQ ID NO: 318065
agaagagauugugcucaag

SEQ ID NO: 534032 - RNA, 19 nt, Artificial Sequence
  Description of Artificial Sequence: Synthetic oligonucleotide
  Antisense strand to SEQ ID NO: 534031
cuugagcacaaucucuucu

SEQ ID NO: 534033 - RNA, 19 nt, Artificial Sequence
  Description of Artificial Sequence: Synthetic oligonucleotide
  Sense strand starting at position 2753 of SEQ ID NO: 318065
aagagauugugcucaagga

SEQ ID NO: 534034 - RNA, 19 nt, Artificial Sequence
  Description of Artificial Sequence: Synthetic oligonucleotide
  Antisense strand to SEQ ID NO: 534033
uccuugagcacaaucucuu

SEQ ID NO: 534035 - RNA, 19 nt, Artificial Sequence
  Description of Artificial Sequence: Synthetic oligonucleotide
  Sense strand starting at position 2855 of SEQ ID NO: 318065
ucugaauggcugcauuauu

SEQ ID NO: 534036 - RNA, 19 nt, Artificial Sequence
  Description of Artificial Sequence: Synthetic oligonucleotide
  Antisense strand to SEQ ID NO: 534035
aauaaugcagccauucaga

SEQ ID NO: 534037 - RNA, 19 nt, Artificial Sequence
  Description of Artificial Sequence: Synthetic oligonucleotide
  Sense strand starting at position 2952 of SEQ ID NO: 318065
gguucaagucacugauggu

SEQ ID NO: 534038 - RNA, 19 nt, Artificial Sequence
  Description of Artificial Sequence: Synthetic oligonucleotide
  Antisense strand to SEQ ID NO: 534037
accaucagugacuugaacc

SEQ ID NO: 534039 - RNA, 19 nt, Artificial Sequence
  Description of Artificial Sequence: Synthetic oligonucleotide
  Sense strand starting at position 2983 of SEQ ID NO: 318065
gcugcagugcugcuuauga

SEQ ID NO: 534040 - RNA, 19 nt, Artificial Sequence
  Description of Artificial Sequence: Synthetic oligonucleotide
  Antisense strand to SEQ ID NO: 534039
ucauaagcagcacugcagc

SEQ ID NO: 534041 - RNA, 19 nt, Artificial Sequence
  Description of Artificial Sequence: Synthetic oligonucleotide
  Sense strand starting at position 3062 of SEQ ID NO: 318065
aguauucuaguuuauguga

SEQ ID NO: 534042 - RNA, 19 nt, Artificial Sequence
  Description of Artificial Sequence: Synthetic oligonucleotide
  Antisense strand to SEQ ID NO: 534041
ucacauaaacuagaauacu

SEQ ID NO: 534043 - RNA, 19 nt, Artificial Sequence
  Description of Artificial Sequence: Synthetic oligonucleotide
  Sense strand starting at position 3101 of SEQ ID NO: 318065
guuagugcucaugugcuga

SEQ ID NO: 534044 - RNA, 19 nt, Artificial Sequence
  Description of Artificial Sequence: Synthetic oligonucleotide
  Antisense strand to SEQ ID NO: 534043
ucagcacaugagcacuaac

SEQ ID NO: 534045 - RNA, 19 nt, Artificial Sequence
  Description of Artificial Sequence: Synthetic oligonucleotide
  Sense strand starting at position 3267 of SEQ ID NO: 318065
gcugcacagggcuauauua

SEQ ID NO: 534046 - RNA, 19 nt, Artificial Sequence
  Description of Artificial Sequence: Synthetic oligonucleotide
  Antisense strand to SEQ ID NO: 534045
uaauauagcccugugcagc

SEQ ID NO: 534047 - RNA, 19 nt, Artificial Sequence
  Description of Artificial Sequence: Synthetic oligonucleotide
  Sense strand starting at position 3269 of SEQ ID NO: 318065
ugcacagggcuauauuaau

SEQ ID NO: 534048 - RNA, 19 nt, Artificial Sequence
  Description of Artificial Sequence: Synthetic oligonucleotide
  Antisense strand to SEQ ID NO: 534047
auuaauauagcccugugca

SEQ ID NO: 534049 - RNA, 19 nt, Artificial Sequence
  Description of Artificial Sequence: Synthetic oligonucleotide
  Sense strand starting at position 3322 of SEQ ID NO: 318065
aguaaauguuaguccucca

SEQ ID NO: 534050 - RNA, 19 nt, Artificial Sequence
  Description of Artificial Sequence: Synthetic oligonucleotide
  Antisense strand to SEQ ID NO: 534049
uggaggacuaacauuuacu

SEQ ID NO: 534051 - RNA, 19 nt, Artificial Sequence
  Description of Artificial Sequence: Synthetic oligonucleotide
  Sense strand starting at position 3374 of SEQ ID NO: 318065
aggugcaaucauugugaca

SEQ ID NO: 534052 - RNA, 19 nt, Artificial Sequence
  Description of Artificial Sequence: Synthetic oligonucleotide
  Antisense strand to SEQ ID NO: 534051
ugucacaaugauugcaccu

SEQ ID NO: 534053 - RNA, 19 nt, Artificial Sequence
  Description of Artificial Sequence: Synthetic oligonucleotide
  Sense strand starting at position 3550 of SEQ ID NO: 318065
ggaaauaauuaacagacua

SEQ ID NO: 534054 - RNA, 19 nt, Artificial Sequence
  Description of Artificial Sequence: Synthetic oligonucleotide
  Antisense strand to SEQ ID NO: 534053
uagucuguuaauuauuucc

SEQ ID NO: 534055 - RNA, 19 nt, Artificial Sequence
  Description of Artificial Sequence: Synthetic oligonucleotide
  Sense strand starting at position 1 of SEQ ID NO: 318066
gauaaacaauucgcuuagu

SEQ ID NO: 534056 - RNA, 19 nt, Artificial Sequence
  Description of Artificial Sequence: Synthetic oligonucleotide
  Antisense strand to SEQ ID NO: 534055
acuaagcgaauuguuuauc

SEQ ID NO: 534057 - RNA, 19 nt, Artificial Sequence
  Description of Artificial Sequence: Synthetic oligonucleotide
  Sense strand starting at position 2 of SEQ ID NO: 318066
auaaacaauucgcuuagua

SEQ ID NO: 534058 - RNA, 19 nt, Artificial Sequence
  Description of Artificial Sequence: Synthetic oligonucleotide
  Antisense strand to SEQ ID NO: 534057
uacuaagcgaauuguuuau

SEQ ID NO: 534059 - RNA, 19 nt, Artificial Sequence
  Description of Artificial Sequence: Synthetic oligonucleotide
  Sense strand starting at position 9 of SEQ ID NO: 318066
auucgcuuaguacaagaga

SEQ ID NO: 534060 - RNA, 19 nt, Artificial Sequence
  Description of Artificial Sequence: Synthetic oligonucleotide
  Antisense strand to SEQ ID NO: 534059
ucucuuguacuaagcgaau

SEQ ID NO: 534061 - RNA, 19 nt, Artificial Sequence
  Description of Artificial Sequence: Synthetic oligonucleotide
  Sense strand starting at position 35 of SEQ ID NO: 318066
acagaaacuuaagaguuua

SEQ ID NO: 534062 - RNA, 19 nt, Artificial Sequence
  Description of Artificial Sequence: Synthetic oligonucleotide
  Antisense strand to SEQ ID NO: 534061
uaaacucuuaaguuucugu

SEQ ID NO: 534063 - RNA, 19 nt, Artificial Sequence
  Description of Artificial Sequence: Synthetic oligonucleotide
  Sense strand starting at position 81 of SEQ ID NO: 318066
uuugccuguaagggauaua

SEQ ID NO: 534064 - RNA, 19 nt, Artificial Sequence
  Description of Artificial Sequence: Synthetic oligonucleotide
  Antisense strand to SEQ ID NO: 534063
uauaucccuuacaggcaaa

SEQ ID NO: 534065 - RNA, 19 nt, Artificial Sequence
  Description of Artificial Sequence: Synthetic oligonucleotide
  Sense strand starting at position 82 of SEQ ID NO: 318066
uugccuguaagggauauaa

SEQ ID NO: 534066 - RNA, 19 nt, Artificial Sequence
  Description of Artificial Sequence: Synthetic oligonucleotide
  Antisense strand to SEQ ID NO: 534065
uuauaucccuuacaggcaa

SEQ ID NO: 534067 - RNA, 19 nt, Artificial Sequence
  Description of Artificial Sequence: Synthetic oligonucleotide
  Sense strand starting at position 84 of SEQ ID NO: 318066
gccuguaagggauauaauu

SEQ ID NO: 534068 - RNA, 19 nt, Artificial Sequence
  Description of Artificial Sequence: Synthetic oligonucleotide
  Antisense strand to SEQ ID NO: 534067
aauuauaucccuuacaggc

SEQ ID NO: 534069 - RNA, 19 nt, Artificial Sequence
  Description of Artificial Sequence: Synthetic oligonucleotide
  Sense strand starting at position 152 of SEQ ID NO: 318066
cucuuaaguuucucuaagu

SEQ ID NO: 534070 - RNA, 19 nt, Artificial Sequence
  Description of Artificial Sequence: Synthetic oligonucleotide
  Antisense strand to SEQ ID NO: 534069
acuuagagaaacuuaagag

SEQ ID NO: 534071 - RNA, 19 nt, Artificial Sequence
  Description of Artificial Sequence: Synthetic oligonucleotide
  Sense strand starting at position 153 of SEQ ID NO: 318066
ucuuaaguuucucuaagua

SEQ ID NO: 534072 - RNA, 19 nt, Artificial Sequence
  Description of Artificial Sequence: Synthetic oligonucleotide
  Antisense strand to SEQ ID NO: 534071
uacuuagagaaacuuaaga

SEQ ID NO: 534073 - RNA, 19 nt, Artificial Sequence
  Description of Artificial Sequence: Synthetic oligonucleotide
  Sense strand starting at position 257 of SEQ ID NO: 318066
guuagacauguacggucaa

SEQ ID NO: 534074 - RNA, 19 nt, Artificial Sequence
  Description of Artificial Sequence: Synthetic oligonucleotide
  Antisense strand to SEQ ID NO: 534073
uugaccguacaugucuaac

SEQ ID NO: 534075 - RNA, 19 nt, Artificial Sequence
  Description of Artificial Sequence: Synthetic oligonucleotide
  Sense strand starting at position 370 of SEQ ID NO: 318066
cgcuguagccagguuauca

SEQ ID NO: 534076 - RNA, 19 nt, Artificial Sequence
  Description of Artificial Sequence: Synthetic oligonucleotide
  Antisense strand to SEQ ID NO: 534075
ugauaaccuggcuacagcg

SEQ ID NO: 534077 - RNA, 19 nt, Artificial Sequence
  Description of Artificial Sequence: Synthetic oligonucleotide
  Sense strand starting at position 382 of SEQ ID NO: 318066
guuaucaaguccuuacaac

SEQ ID NO: 534078 - RNA, 19 nt, Artificial Sequence
  Description of Artificial Sequence: Synthetic oligonucleotide
  Antisense strand to SEQ ID NO: 534077
guuguaaggacuugauaac

SEQ ID NO: 534079 - RNA, 19 nt, Artificial Sequence
  Description of Artificial Sequence: Synthetic oligonucleotide
  Sense strand starting at position 441 of SEQ ID NO: 318066
gcuacagaaucagcaaguu

SEQ ID NO: 534080 - RNA, 19 nt, Artificial Sequence
  Description of Artificial Sequence: Synthetic oligonucleotide
  Antisense strand to SEQ ID NO: 534079
aacuugcugauucuguagc

SEQ ID NO: 534081 - RNA, 19 nt, Artificial Sequence
  Description of Artificial Sequence: Synthetic oligonucleotide
  Sense strand starting at position 526 of SEQ ID NO: 318066
agguccaaguaauaauaaa

SEQ ID NO: 534082 - RNA, 19 nt, Artificial Sequence
  Description of Artificial Sequence: Synthetic oligonucleotide
  Antisense strand to SEQ ID NO: 534081
uuuauuauuacuuggaccu

SEQ ID NO: 534083 - RNA, 19 nt, Artificial Sequence
  Description of Artificial Sequence: Synthetic oligonucleotide
  Sense strand starting at position 832 of SEQ ID NO: 318066
gccauagccgccucuguaa

SEQ ID NO: 534084 - RNA, 19 nt, Artificial Sequence
  Description of Artificial Sequence: Synthetic oligonucleotide
  Antisense strand to SEQ ID NO: 534083
uuacagaggcggcuauggc

SEQ ID NO: 534085 - RNA, 19 nt, Artificial Sequence
  Description of Artificial Sequence: Synthetic oligonucleotide
  Sense strand starting at position 843 of SEQ ID NO: 318066
cucuguaagguccacuauu

SEQ ID NO: 534086 - RNA, 19 nt, Artificial Sequence
  Description of Artificial Sequence: Synthetic oligonucleotide
  Antisense strand to SEQ ID NO: 534085
aauaguggaccuuacagag

SEQ ID NO: 534087 - RNA, 19 nt, Artificial Sequence
  Description of Artificial Sequence: Synthetic oligonucleotide
  Sense strand starting at position 1173 of SEQ ID NO: 318066
cggaguagauauccuccuu

SEQ ID NO: 534088 - RNA, 19 nt, Artificial Sequence
  Description of Artificial Sequence: Synthetic oligonucleotide
  Antisense strand to SEQ ID NO: 534087
aaggaggauaucuacuccg

SEQ ID NO: 534089 - RNA, 19 nt, Artificial Sequence
  Description of Artificial Sequence: Synthetic oligonucleotide
  Sense strand starting at position 1223 of SEQ ID NO: 318066
cccugaaucggauggaacu

SEQ ID NO: 534090 - RNA, 19 nt, Artificial Sequence
  Description of Artificial Sequence: Synthetic oligonucleotide
  Antisense strand to SEQ ID NO: 534089
aguuccauccgauucaggg

SEQ ID NO: 534091 - RNA, 19 nt, Artificial Sequence
  Description of Artificial Sequence: Synthetic oligonucleotide
  Sense strand starting at position 1263 of SEQ ID NO: 318066
ccgcgucgugauucuggaa

SEQ ID NO: 534092 - RNA, 19 nt, Artificial Sequence
  Description of Artificial Sequence: Synthetic oligonucleotide
  Antisense strand to SEQ ID NO: 534091
uuccagaaucacgacgcgg

SEQ ID NO: 534093 - RNA, 19 nt, Artificial Sequence
  Description of Artificial Sequence: Synthetic oligonucleotide
  Sense strand starting at position 1264 of SEQ ID NO: 318066
cgcgucgugauucuggaaa

SEQ ID NO: 534094 - RNA, 19 nt, Artificial Sequence
  Description of Artificial Sequence: Synthetic oligonucleotide
  Antisense strand to SEQ ID NO: 534093
uuuccagaaucacgacgcg

SEQ ID NO: 534095 - RNA, 19 nt, Artificial Sequence
  Description of Artificial Sequence: Synthetic oligonucleotide
  Sense strand starting at position 1313 of SEQ ID NO: 318066
gacugcuugucggcaauaa

SEQ ID NO: 534096 - RNA, 19 nt, Artificial Sequence
  Description of Artificial Sequence: Synthetic oligonucleotide
  Antisense strand to SEQ ID NO: 534095
uuauugccgacaagcaguc

SEQ ID NO: 534097 - RNA, 19 nt, Artificial Sequence
  Description of Artificial Sequence: Synthetic oligonucleotide
  Sense strand starting at position 1314 of SEQ ID NO: 318066
acugcuugucggcaauaau

SEQ ID NO: 534098 - RNA, 19 nt, Artificial Sequence
  Description of Artificial Sequence: Synthetic oligonucleotide
  Antisense strand to SEQ ID NO: 534097
auuauugccgacaagcagu

SEQ ID NO: 534099 - RNA, 19 nt, Artificial Sequence
  Description of Artificial Sequence: Synthetic oligonucleotide
  Sense strand starting at position 1398 of SEQ ID NO: 318066
cuuuaaggccuccgacaaa

SEQ ID NO: 534100 - RNA, 19 nt, Artificial Sequence
  Description of Artificial Sequence: Synthetic oligonucleotide
  Antisense strand to SEQ ID NO: 534099
uuugucggaggccuuaaag

SEQ ID NO: 534101 - RNA, 19 nt, Artificial Sequence
  Description of Artificial Sequence: Synthetic oligonucleotide
  Sense strand starting at position 1655 of SEQ ID NO: 318066
gacucacucgucugcacau

SEQ ID NO: 534102 - RNA, 19 nt, Artificial Sequence
  Description of Artificial Sequence: Synthetic oligonucleotide
  Antisense strand to SEQ ID NO: 534101
augugcagacgagugaguc

SEQ ID NO: 534103 - RNA, 19 nt, Artificial Sequence
  Description of Artificial Sequence: Synthetic oligonucleotide
  Sense strand starting at position 2384 of SEQ ID NO: 318066
uugagagacaucugaguuc

SEQ ID NO: 534104 - RNA, 19 nt, Artificial Sequence
  Description of Artificial Sequence: Synthetic oligonucleotide
  Antisense strand to SEQ ID NO: 534103
gaacucagaugucucucaa

SEQ ID NO: 534105 - RNA, 19 nt, Artificial Sequence
  Description of Artificial Sequence: Synthetic oligonucleotide
  Sense strand starting at position 2777 of SEQ ID NO: 318066
cgacgugcgguuaaacuaa

SEQ ID NO: 534106 - RNA, 19 nt, Artificial Sequence
  Description of Artificial Sequence: Synthetic oligonucleotide
  Antisense strand to SEQ ID NO: 534105
uuaguuuaaccgcacgucg

SEQ ID NO: 534107 - RNA, 19 nt, Artificial Sequence
  Description of Artificial Sequence: Synthetic oligonucleotide
  Sense strand starting at position 2984 of SEQ ID NO: 318066
ggcacacuccagcagacau

SEQ ID NO: 534108 - RNA, 19 nt, Artificial Sequence
  Description of Artificial Sequence: Synthetic oligonucleotide
  Antisense strand to SEQ ID NO: 534107
augucugcuggagugugcc

SEQ ID NO: 534109 - RNA, 19 nt, Artificial Sequence
  Description of Artificial Sequence: Synthetic oligonucleotide
  Sense strand starting at position 3052 of SEQ ID NO: 318066
auguguugcuuucuuugaa

SEQ ID NO: 534110 - RNA, 19 nt, Artificial Sequence
  Description of Artificial Sequence: Synthetic oligonucleotide
  Antisense strand to SEQ ID NO: 534109
uucaaagaaagcaacacau

SEQ ID NO: 534111 - RNA, 19 nt, Artificial Sequence
  Description of Artificial Sequence: Synthetic oligonucleotide
  Sense strand starting at position 3062 of SEQ ID NO: 318066
uucuuugaacuagaauguu

SEQ ID NO: 534112 - RNA, 19 nt, Artificial Sequence
  Description of Artificial Sequence: Synthetic oligonucleotide
  Antisense strand to SEQ ID NO: 534111
aacauucuaguucaaagaa

SEQ ID NO: 534113 - RNA, 19 nt, Artificial Sequence
  Description of Artificial Sequence: Synthetic oligonucleotide
  Sense strand starting at position 3666 of SEQ ID NO: 318066
uaaagauguuggguuagac

SEQ ID NO: 534114 - RNA, 19 nt, Artificial Sequence
  Description of Artificial Sequence: Synthetic oligonucleotide
  Antisense strand to SEQ ID NO: 534113
gucuaacccaacaucuuua

SEQ ID NO: 534115 - RNA, 19 nt, Artificial Sequence
  Description of Artificial Sequence: Synthetic oligonucleotide
  Sense strand starting at position 3787 of SEQ ID NO: 318066
agccuuugugugccaagca

SEQ ID NO: 534116 - RNA, 19 nt, Artificial Sequence
  Description of Artificial Sequence: Synthetic oligonucleotide
  Antisense strand to SEQ ID NO: 534115
ugcuuggcacacaaaggcu

SEQ ID NO: 534117 - RNA, 19 nt, Artificial Sequence
  Description of Artificial Sequence: Synthetic oligonucleotide
  Sense strand starting at position 3792 of SEQ ID NO: 318066
uugugugccaagcaagaua

SEQ ID NO: 534118 - RNA, 19 nt, Artificial Sequence
  Description of Artificial Sequence: Synthetic oligonucleotide
  Antisense strand to SEQ ID NO: 534117
uaucuugcuuggcacacaa

SEQ ID NO: 534119 - RNA, 19 nt, Artificial Sequence
  Description of Artificial Sequence: Synthetic oligonucleotide
  Sense strand starting at position 3795 of SEQ ID NO: 318066
ugugccaagcaagauaaau

SEQ ID NO: 534120 - RNA, 19 nt, Artificial Sequence
  Description of Artificial Sequence: Synthetic oligonucleotide
  Antisense strand to SEQ ID NO: 534119
auuuaucuugcuuggcaca

SEQ ID NO: 534121 - RNA, 19 nt, Artificial Sequence
  Description of Artificial Sequence: Synthetic oligonucleotide
  Sense strand starting at position 3834 of SEQ ID NO: 318066
ugaggcauuacgugaccaa

SEQ ID NO: 534122 - RNA, 19 nt, Artificial Sequence
  Description of Artificial Sequence: Synthetic oligonucleotide
  Antisense strand to SEQ ID NO: 534121
uuggucacguaaugccuca

SEQ ID NO: 534123 - RNA, 19 nt, Artificial Sequence
  Description of Artificial Sequence: Synthetic oligonucleotide
  Sense strand starting at position 3835 of SEQ ID NO: 318066
gaggcauuacgugaccaaa

SEQ ID NO: 534124 - RNA, 19 nt, Artificial Sequence
  Description of Artificial Sequence: Synthetic oligonucleotide
  Antisense strand to SEQ ID NO: 534123
uuuggucacguaaugccuc

SEQ ID NO: 534125 - RNA, 19 nt, Artificial Sequence
  Description of Artificial Sequence: Synthetic oligonucleotide
  Sense strand starting at position 3868 of SEQ ID NO: 318066
uaugguaaacgcugaagaa

SEQ ID NO: 534126 - RNA, 19 nt, Artificial Sequence
  Description of Artificial Sequence: Synthetic oligonucleotide
  Antisense strand to SEQ ID NO: 534125
uucuucagcguuuaccaua

SEQ ID NO: 534127 - RNA, 19 nt, Artificial Sequence
  Description of Artificial Sequence: Synthetic oligonucleotide
  Sense strand starting at position 3880 of SEQ ID NO: 318066
ugaagaaguuaagaggaau

SEQ ID NO: 534128 - RNA, 19 nt, Artificial Sequence
  Description of Artificial Sequence: Synthetic oligonucleotide
  Antisense strand to SEQ ID NO: 534127
auuccucuuaacuucuuca

SEQ ID NO: 534129 - RNA, 19 nt, Artificial Sequence
  Description of Artificial Sequence: Synthetic oligonucleotide
  Sense strand starting at position 3893 of SEQ ID NO: 318066
aggaauuccucacuguauc

SEQ ID NO: 534130 - RNA, 19 nt, Artificial Sequence
  Description of Artificial Sequence: Synthetic oligonucleotide
  Antisense strand to SEQ ID NO: 534129
gauacagugaggaauuccu

SEQ ID NO: 534131 - RNA, 19 nt, Artificial Sequence
  Description of Artificial Sequence: Synthetic oligonucleotide
  Sense strand starting at position 3901 of SEQ ID NO: 318066
cucacuguauccucaagua

SEQ ID NO: 534132 - RNA, 19 nt, Artificial Sequence
  Description of Artificial Sequence: Synthetic oligonucleotide
  Antisense strand to SEQ ID NO: 534131
uacuugaggauacagugag

SEQ ID NO: 534133 - RNA, 19 nt, Artificial Sequence
  Description of Artificial Sequence: Synthetic oligonucleotide
  Sense strand starting at position 3967 of SEQ ID NO: 318066
gccaaagacuaguuaguau

SEQ ID NO: 534134 - RNA, 19 nt, Artificial Sequence
  Description of Artificial Sequence: Synthetic oligonucleotide
  Antisense strand to SEQ ID NO: 534133
auacuaacuagucuuuggc

SEQ ID NO: 534135 - RNA, 19 nt, Artificial Sequence
  Description of Artificial Sequence: Synthetic oligonucleotide
  Sense strand starting at position 214 of SEQ ID NO: 318067
uuguaauccucccagaugu

SEQ ID NO: 534136 - RNA, 19 nt, Artificial Sequence
  Description of Artificial Sequence: Synthetic oligonucleotide
  Antisense strand to SEQ ID NO: 534135
acaucugggaggauuacaa

SEQ ID NO: 534137 - RNA, 19 nt, Artificial Sequence
  Description of Artificial Sequence: Synthetic oligonucleotide
  Sense strand starting at position 216 of SEQ ID NO: 318067
guaauccucccagauguuu

SEQ ID NO: 534138 - RNA, 19 nt, Artificial Sequence
  Description of Artificial Sequence: Synthetic oligonucleotide
  Antisense strand to SEQ ID NO: 534137
aaacaucugggaggauuac

SEQ ID NO: 534139 - RNA, 19 nt, Artificial Sequence
  Description of Artificial Sequence: Synthetic oligonucleotide
  Sense strand starting at position 261 of SEQ ID NO: 318067
aaagguaaugaaugucaac

SEQ ID NO: 534140 - RNA, 19 nt, Artificial Sequence
  Description of Artificial Sequence: Synthetic oligonucleotide
  Antisense strand to SEQ ID NO: 534139
guugacauucauuaccuuu

SEQ ID NO: 534141 - RNA, 19 nt, Artificial Sequence
  Description of Artificial Sequence: Synthetic oligonucleotide
  Sense strand starting at position 264 of SEQ ID NO: 318067
gguaaugaaugucaacugu

SEQ ID NO: 534142 - RNA, 19 nt, Artificial Sequence
  Description of Artificial Sequence: Synthetic oligonucleotide
  Antisense strand to SEQ ID NO: 534141
acaguugacauucauuacc

SEQ ID NO: 534143 - RNA, 19 nt, Artificial Sequence
  Description of Artificial Sequence: Synthetic oligonucleotide
  Sense strand starting at position 279 of SEQ ID NO: 318067
cugucaucuucccgaacca

SEQ ID NO: 534144 - RNA, 19 nt, Artificial Sequence
  Description of Artificial Sequence: Synthetic oligonucleotide
  Antisense strand to SEQ ID NO: 534143
ugguucgggaagaugacag

SEQ ID NO: 534145 - RNA, 19 nt, Artificial Sequence
  Description of Artificial Sequence: Synthetic oligonucleotide
  Sense strand starting at position 417 of SEQ ID NO: 318067
cuagucaugcuuuaagaaa

SEQ ID NO: 534146 - RNA, 19 nt, Artificial Sequence
  Description of Artificial Sequence: Synthetic oligonucleotide
  Antisense strand to SEQ ID NO: 534145
uuucuuaaagcaugacuag

SEQ ID NO: 534147 - RNA, 19 nt, Artificial Sequence
  Description of Artificial Sequence: Synthetic oligonucleotide
  Sense strand starting at position 429 of SEQ ID NO: 318067
uaagaaagguguccucuua

SEQ ID NO: 534148 - RNA, 19 nt, Artificial Sequence
  Description of Artificial Sequence: Synthetic oligonucleotide
  Antisense strand to SEQ ID NO: 534147
uaagaggacaccuuucuua

SEQ ID NO: 534149 - RNA, 19 nt, Artificial Sequence
  Description of Artificial Sequence: Synthetic oligonucleotide
  Sense strand starting at position 455 of SEQ ID NO: 318067
aaucguuuccacugagacu

SEQ ID NO: 534150 - RNA, 19 nt, Artificial Sequence
  Description of Artificial Sequence: Synthetic oligonucleotide
  Antisense strand to SEQ ID NO: 534149
agucucaguggaaacgauu

SEQ ID NO: 534151 - RNA, 19 nt, Artificial Sequence
  Description of Artificial Sequence: Synthetic oligonucleotide
  Sense strand starting at position 667 of SEQ ID NO: 318067
cugaaaugguagggugaga

SEQ ID NO: 534152 - RNA, 19 nt, Artificial Sequence
  Description of Artificial Sequence: Synthetic oligonucleotide
  Antisense strand to SEQ ID NO: 534151
ucucacccuaccauuucag

SEQ ID NO: 534153 - RNA, 19 nt, Artificial Sequence
  Description of Artificial Sequence: Synthetic oligonucleotide
  Sense strand starting at position 702 of SEQ ID NO: 318067
uuguaagcaagcugugauu

SEQ ID NO: 534154 - RNA, 19 nt, Artificial Sequence
  Description of Artificial Sequence: Synthetic oligonucleotide
  Antisense strand to SEQ ID NO: 534153
aaucacagcuugcuuacaa

SEQ ID NO: 534155 - RNA, 19 nt, Artificial Sequence
  Description of Artificial Sequence: Synthetic oligonucleotide
  Sense strand starting at position 737 of SEQ ID NO: 318067
cuggcaaaguucucacgaa

SEQ ID NO: 534156 - RNA, 19 nt, Artificial Sequence
  Description of Artificial Sequence: Synthetic oligonucleotide
  Antisense strand to SEQ ID NO: 534155
uucgugagaacuuugccag

SEQ ID NO: 534157 - RNA, 19 nt, Artificial Sequence
  Description of Artificial Sequence: Synthetic oligonucleotide
  Sense strand starting at position 738 of SEQ ID NO: 318067
uggcaaaguucucacgaag

SEQ ID NO: 534158 - RNA, 19 nt, Artificial Sequence
  Description of Artificial Sequence: Synthetic oligonucleotide
  Antisense strand to SEQ ID NO: 534157
cuucgugagaacuuugcca

SEQ ID NO: 534159 - RNA, 19 nt, Artificial Sequence
  Description of Artificial Sequence: Synthetic oligonucleotide
  Sense strand starting at position 741 of SEQ ID NO: 318067
caaaguucucacgaagucu

SEQ ID NO: 534160 - RNA, 19 nt, Artificial Sequence
  Description of Artificial Sequence: Synthetic oligonucleotide
  Antisense strand to SEQ ID NO: 534159
agacuucgugagaacuuug

SEQ ID NO: 534161 - RNA, 19 nt, Artificial Sequence
  Description of Artificial Sequence: Synthetic oligonucleotide
  Sense strand starting at position 782 of SEQ ID NO: 318067
aggagcaccuuagaaagau

SEQ ID NO: 534162 - RNA, 19 nt, Artificial Sequence
  Description of Artificial Sequence: Synthetic oligonucleotide
  Antisense strand to SEQ ID NO: 534161
aucuuucuaaggugcuccu

SEQ ID NO: 534163 - RNA, 19 nt, Artificial Sequence
  Description of Artificial Sequence: Synthetic oligonucleotide
  Sense strand starting at position 875 of SEQ ID NO: 318067
gccugugagaagcaaagaa

SEQ ID NO: 534164 - RNA, 19 nt, Artificial Sequence
  Description of Artificial Sequence: Synthetic oligonucleotide
  Antisense strand to SEQ ID NO: 534163
uucuuugcuucucacaggc

SEQ ID NO: 534165 - RNA, 19 nt, Artificial Sequence
  Description of Artificial Sequence: Synthetic oligonucleotide
  Sense strand starting at position 943 of SEQ ID NO: 318067
ucauguguucuacaaccau

SEQ ID NO: 534166 - RNA, 19 nt, Artificial Sequence
  Description of Artificial Sequence: Synthetic oligonucleotide
  Antisense strand to SEQ ID NO: 534165
augguuguagaacacauga

SEQ ID NO: 534167 - RNA, 19 nt, Artificial Sequence
  Description of Artificial Sequence: Synthetic oligonucleotide
  Sense strand starting at position 1986 of SEQ ID NO: 318067
acucguggcgcccuuuaua

SEQ ID NO: 534168 - RNA, 19 nt, Artificial Sequence
  Description of Artificial Sequence: Synthetic oligonucleotide
  Antisense strand to SEQ ID NO: 534167
uauaaagggcgccacgagu

SEQ ID NO: 534169 - RNA, 19 nt, Artificial Sequence
  Description of Artificial Sequence: Synthetic oligonucleotide
  Sense strand starting at position 2040 of SEQ ID NO: 318067
acacucauuggcugcucaa

SEQ ID NO: 534170 - RNA, 19 nt, Artificial Sequence
  Description of Artificial Sequence: Synthetic oligonucleotide
  Antisense strand to SEQ ID NO: 534169
uugagcagccaaugagugu

SEQ ID NO: 534171 - RNA, 19 nt, Artificial Sequence
  Description of Artificial Sequence: Synthetic oligonucleotide
  Sense strand starting at position 2053 of SEQ ID NO: 318067
gcucaaguccgucacucaa

SEQ ID NO: 534172 - RNA, 19 nt, Artificial Sequence
  Description of Artificial Sequence: Synthetic oligonucleotide
  Antisense strand to SEQ ID NO: 534171
uugagugacggacuugagc

SEQ ID NO: 534173 - RNA, 19 nt, Artificial Sequence
  Description of Artificial Sequence: Synthetic oligonucleotide
  Sense strand starting at position 2239 of SEQ ID NO: 318067
agggccuaaucggauugua

SEQ ID NO: 534174 - RNA, 19 nt, Artificial Sequence
  Description of Artificial Sequence: Synthetic oligonucleotide
  Antisense strand to SEQ ID NO: 534173
uacaauccgauuaggcccu

SEQ ID NO: 534175 - RNA, 19 nt, Artificial Sequence
  Description of Artificial Sequence: Synthetic oligonucleotide
  Sense strand starting at position 2277 of SEQ ID NO: 318067
ucucuugcucucgaggacu

SEQ ID NO: 534176 - RNA, 19 nt, Artificial Sequence
  Description of Artificial Sequence: Synthetic oligonucleotide
  Antisense strand to SEQ ID NO: 534175
aguccucgagagcaagaga

SEQ ID NO: 534177 - RNA, 19 nt, Artificial Sequence
  Description of Artificial Sequence: Synthetic oligonucleotide
  Sense strand starting at position 2353 of SEQ ID NO: 318067
gagaaaguuucgcagccca

SEQ ID NO: 534178 - RNA, 19 nt, Artificial Sequence
  Description of Artificial Sequence: Synthetic oligonucleotide
  Antisense strand to SEQ ID NO: 534177
ugggcugcgaaacuuucuc

SEQ ID NO: 534179 - RNA, 19 nt, Artificial Sequence
  Description of Artificial Sequence: Synthetic oligonucleotide
  Sense strand starting at position 2536 of SEQ ID NO: 318067
cagagaugcucugcaggga

SEQ ID NO: 534180 - RNA, 19 nt, Artificial Sequence
  Description of Artificial Sequence: Synthetic oligonucleotide
  Antisense strand to SEQ ID NO: 534179
ucccugcagagcaucucug

SEQ ID NO: 534181 - RNA, 19 nt, Artificial Sequence
  Description of Artificial Sequence: Synthetic oligonucleotide
  Sense strand starting at position 2555 of SEQ ID NO: 318067
cgaugagaccuugguguuc

SEQ ID NO: 534182 - RNA, 19 nt, Artificial Sequence
  Description of Artificial Sequence: Synthetic oligonucleotide
  Antisense strand to SEQ ID NO: 534181
gaacaccaaggucucaucg

SEQ ID NO: 534183 - RNA, 19 nt, Artificial Sequence
  Description of Artificial Sequence: Synthetic oligonucleotide
  Sense strand starting at position 2603 of SEQ ID NO: 318067
aacgauugacaucgcauuu

SEQ ID NO: 534184 - RNA, 19 nt, Artificial Sequence
  Description of Artificial Sequence: Synthetic oligonucleotide
  Antisense strand to SEQ ID NO: 534183
aaaugcgaugucaaucguu

SEQ ID NO: 534185 - RNA, 19 nt, Artificial Sequence
  Description of Artificial Sequence: Synthetic oligonucleotide
  Sense strand starting at position 3325 of SEQ ID NO: 318067
ucgugaacucacgagguaa

SEQ ID NO: 534186 - RNA, 19 nt, Artificial Sequence
  Description of Artificial Sequence: Synthetic oligonucleotide
  Antisense strand to SEQ ID NO: 534185
uuaccucgugaguucacga

SEQ ID NO: 534187 - RNA, 19 nt, Artificial Sequence
  Description of Artificial Sequence: Synthetic oligonucleotide
  Sense strand starting at position 3356 of SEQ ID NO: 318067
gggcguuguucucuuccua

SEQ ID NO: 534188 - RNA, 19 nt, Artificial Sequence
  Description of Artificial Sequence: Synthetic oligonucleotide
  Antisense strand to SEQ ID NO: 534187
uaggaagagaacaacgccc

SEQ ID NO: 534189 - RNA, 19 nt, Artificial Sequence
  Description of Artificial Sequence: Synthetic oligonucleotide
  Sense strand starting at position 3357 of SEQ ID NO: 318067
ggcguuguucucuuccuaa

SEQ ID NO: 534190 - RNA, 19 nt, Artificial Sequence
  Description of Artificial Sequence: Synthetic oligonucleotide
  Antisense strand to SEQ ID NO: 534189
uuaggaagagaacaacgcc

SEQ ID NO: 534191 - RNA, 19 nt, Artificial Sequence
  Description of Artificial Sequence: Synthetic oligonucleotide
  Sense strand starting at position 3360 of SEQ ID NO: 318067
guuguucucuuccuaauac

SEQ ID NO: 534192 - RNA, 19 nt, Artificial Sequence
  Description of Artificial Sequence: Synthetic oligonucleotide
  Antisense strand to SEQ ID NO: 534191
guauuaggaagagaacaac

SEQ ID NO: 534193 - RNA, 19 nt, Artificial Sequence
  Description of Artificial Sequence: Synthetic oligonucleotide
  Sense strand starting at position 3416 of SEQ ID NO: 318067
uuuaaaggccucgguaauc

SEQ ID NO: 534194 - RNA, 19 nt, Artificial Sequence
  Description of Artificial Sequence: Synthetic oligonucleotide
  Antisense strand to SEQ ID NO: 534193
gauuaccgaggccuuuaaa

SEQ ID NO: 534195 - RNA, 19 nt, Artificial Sequence
  Description of Artificial Sequence: Synthetic oligonucleotide
  Sense strand starting at position 3427 of SEQ ID NO: 318067
cgguaaucccguuauuccu

SEQ ID NO: 534196 - RNA, 19 nt, Artificial Sequence
  Description of Artificial Sequence: Synthetic oligonucleotide
  Antisense strand to SEQ ID NO: 534195
aggaauaacgggauuaccg

SEQ ID NO: 534197 - RNA, 19 nt, Artificial Sequence
  Description of Artificial Sequence: Synthetic oligonucleotide
  Sense strand starting at position 3538 of SEQ ID NO: 318067
uagcguuuccaguggauuc

SEQ ID NO: 534198 - RNA, 19 nt, Artificial Sequence
  Description of Artificial Sequence: Synthetic oligonucleotide
  Antisense strand to SEQ ID NO: 534197
gaauccacuggaaacgcua

SEQ ID NO: 534199 - RNA, 19 nt, Artificial Sequence
  Description of Artificial Sequence: Synthetic oligonucleotide
  Sense strand starting at position 3844 of SEQ ID NO: 318067
cagcuagaucaccagguuu

SEQ ID NO: 534200 - RNA, 19 nt, Artificial Sequence
  Description of Artificial Sequence: Synthetic oligonucleotide
  Antisense strand to SEQ ID NO: 534199
aaaccuggugaucuagcug

SEQ ID NO: 534201 - RNA, 19 nt, Artificial Sequence
  Description of Artificial Sequence: Synthetic oligonucleotide
  Sense strand starting at position 9 of SEQ ID NO: 318068
gugacuuuacggcaaacau

SEQ ID NO: 534202 - RNA, 19 nt, Artificial Sequence
  Description of Artificial Sequence: Synthetic oligonucleotide
  Antisense strand to SEQ ID NO: 534201
auguuugccguaaagucac

SEQ ID NO: 534203 - RNA, 19 nt, Artificial Sequence
  Description of Artificial Sequence: Synthetic oligonucleotide
  Sense strand starting at position 141 of SEQ ID NO: 318068
ggaucaguguuaccaagcu

SEQ ID NO: 534204 - RNA, 19 nt, Artificial Sequence
  Description of Artificial Sequence: Synthetic oligonucleotide
  Antisense strand to SEQ ID NO: 534203
agcuugguaacacugaucc

SEQ ID NO: 534205 - RNA, 19 nt, Artificial Sequence
  Description of Artificial Sequence: Synthetic oligonucleotide
  Sense strand starting at position 246 of SEQ ID NO: 318068
ggucgcuuuccguuaccaa

SEQ ID NO: 534206 - RNA, 19 nt, Artificial Sequence
  Description of Artificial Sequence: Synthetic oligonucleotide
  Antisense strand to SEQ ID NO: 534205
uugguaacggaaagcgacc

SEQ ID NO: 534207 - RNA, 19 nt, Artificial Sequence
  Description of Artificial Sequence: Synthetic oligonucleotide
  Sense strand starting at position 253 of SEQ ID NO: 318068
uuccguuaccaacgcuaaa

SEQ ID NO: 534208 - RNA, 19 nt, Artificial Sequence
  Description of Artificial Sequence: Synthetic oligonucleotide
  Antisense strand to SEQ ID NO: 534207
uuuagcguugguaacggaa

SEQ ID NO: 534209 - RNA, 19 nt, Artificial Sequence
  Description of Artificial Sequence: Synthetic oligonucleotide
  Sense strand starting at position 402 of SEQ ID NO: 318068
ucaggaaaccuauguacug

SEQ ID NO: 534210 - RNA, 19 nt, Artificial Sequence
  Description of Artificial Sequence: Synthetic oligonucleotide
  Antisense strand to SEQ ID NO: 534209
caguacauagguuuccuga

SEQ ID NO: 534211 - RNA, 19 nt, Artificial Sequence
  Description of Artificial Sequence: Synthetic oligonucleotide
  Sense strand starting at position 453 of SEQ ID NO: 318068
acuguauagugagccagau

SEQ ID NO: 534212 - RNA, 19 nt, Artificial Sequence
  Description of Artificial Sequence: Synthetic oligonucleotide
  Antisense strand to SEQ ID NO: 534211
aucuggcucacuauacagu

SEQ ID NO: 534213 - RNA, 19 nt, Artificial Sequence
  Description of Artificial Sequence: Synthetic oligonucleotide
  Sense strand starting at position 455 of SEQ ID NO: 318068
uguauagugagccagauua

SEQ ID NO: 534214 - RNA, 19 nt, Artificial Sequence
  Description of Artificial Sequence: Synthetic oligonucleotide
  Antisense strand to SEQ ID NO: 534213
uaaucuggcucacuauaca

SEQ ID NO: 534215 - RNA, 19 nt, Artificial Sequence
  Description of Artificial Sequence: Synthetic oligonucleotide
  Sense strand starting at position 524 of SEQ ID NO: 318068
cugaaauuaagacgugaca

SEQ ID NO: 534216 - RNA, 19 nt, Artificial Sequence
  Description of Artificial Sequence: Synthetic oligonucleotide
  Antisense strand to SEQ ID NO: 534215
ugucacgucuuaauuucag

SEQ ID NO: 534217 - RNA, 19 nt, Artificial Sequence
  Description of Artificial Sequence: Synthetic oligonucleotide
  Sense strand starting at position 638 of SEQ ID NO: 318068
gucuaaucacucggccauu

SEQ ID NO: 534218 - RNA, 19 nt, Artificial Sequence
  Description of Artificial Sequence: Synthetic oligonucleotide
  Antisense strand to SEQ ID NO: 534217
aauggccgagugauuagac

SEQ ID NO: 534219 - RNA, 19 nt, Artificial Sequence
  Description of Artificial Sequence: Synthetic oligonucleotide
  Sense strand starting at position 639 of SEQ ID NO: 318068
ucuaaucacucggccauuu

SEQ ID NO: 534220 - RNA, 19 nt, Artificial Sequence
  Description of Artificial Sequence: Synthetic oligonucleotide
  Antisense strand to SEQ ID NO: 534219
aaauggccgagugauuaga

SEQ ID NO: 534221 - RNA, 19 nt, Artificial Sequence
  Description of Artificial Sequence: Synthetic oligonucleotide
  Sense strand starting at position 658 of SEQ ID NO: 318068
ucucaagauugaggaggaa

SEQ ID NO: 534222 - RNA, 19 nt, Artificial Sequence
  Description of Artificial Sequence: Synthetic oligonucleotide
  Antisense strand to SEQ ID NO: 534221
uuccuccucaaucuugaga

SEQ ID NO: 534223 - RNA, 19 nt, Artificial Sequence
  Description of Artificial Sequence: Synthetic oligonucleotide
  Sense strand starting at position 1118 of SEQ ID NO: 318068
cgaaauuuccauugcguaa

SEQ ID NO: 534224 - RNA, 19 nt, Artificial Sequence
  Description of Artificial Sequence: Synthetic oligonucleotide
  Antisense strand to SEQ ID NO: 534223
uuacgcaauggaaauuucg

SEQ ID NO: 534225 - RNA, 19 nt, Artificial Sequence
  Description of Artificial Sequence: Synthetic oligonucleotide
  Sense strand starting at position 1305 of SEQ ID NO: 318068
ccgcguccuaguucuaacu

SEQ ID NO: 534226 - RNA, 19 nt, Artificial Sequence
  Description of Artificial Sequence: Synthetic oligonucleotide
  Antisense strand to SEQ ID NO: 534225
aguuagaacuaggacgcgg

SEQ ID NO: 534227 - RNA, 19 nt, Artificial Sequence
  Description of Artificial Sequence: Synthetic oligonucleotide
  Sense strand starting at position 1476 of SEQ ID NO: 318068
aacugagagcgccaauuaa

SEQ ID NO: 534228 - RNA, 19 nt, Artificial Sequence
  Description of Artificial Sequence: Synthetic oligonucleotide
  Antisense strand to SEQ ID NO: 534227
uuaauuggcgcucucaguu

SEQ ID NO: 534229 - RNA, 19 nt, Artificial Sequence
  Description of Artificial Sequence: Synthetic oligonucleotide
  Sense strand starting at position 1832 of SEQ ID NO: 318068
guggcccucccagagauau

SEQ ID NO: 534230 - RNA, 19 nt, Artificial Sequence
  Description of Artificial Sequence: Synthetic oligonucleotide
  Antisense strand to SEQ ID NO: 534229
auaucucugggagggccac

SEQ ID NO: 534231 - RNA, 19 nt, Artificial Sequence
  Description of Artificial Sequence: Synthetic oligonucleotide
  Sense strand starting at position 2063 of SEQ ID NO: 318068
gcgcaugcguaauuucaag

SEQ ID NO: 534232 - RNA, 19 nt, Artificial Sequence
  Description of Artificial Sequence: Synthetic oligonucleotide
  Antisense strand to SEQ ID NO: 534231
cuugaaauuacgcaugcgc

SEQ ID NO: 534233 - RNA, 19 nt, Artificial Sequence
  Description of Artificial Sequence: Synthetic oligonucleotide
  Sense strand starting at position 2173 of SEQ ID NO: 318068
cugcgccuucccgcgaaua

SEQ ID NO: 534234 - RNA, 19 nt, Artificial Sequence
  Description of Artificial Sequence: Synthetic oligonucleotide
  Antisense strand to SEQ ID NO: 534233
uauucgcgggaaggcgcag

SEQ ID NO: 534235 - RNA, 19 nt, Artificial Sequence
  Description of Artificial Sequence: Synthetic oligonucleotide
  Sense strand starting at position 2175 of SEQ ID NO: 318068
gcgccuucccgcgaauauu

SEQ ID NO: 534236 - RNA, 19 nt, Artificial Sequence
  Description of Artificial Sequence: Synthetic oligonucleotide
  Antisense strand to SEQ ID NO: 534235
aauauucgcgggaaggcgc

SEQ ID NO: 534237 - RNA, 19 nt, Artificial Sequence
  Description of Artificial Sequence: Synthetic oligonucleotide
  Sense strand starting at position 2198 of SEQ ID NO: 318068
uucggaguccuagcgguuu

SEQ ID NO: 534238 - RNA, 19 nt, Artificial Sequence
  Description of Artificial Sequence: Synthetic oligonucleotide
  Antisense strand to SEQ ID NO: 534237
aaaccgcuaggacuccgaa

SEQ ID NO: 534239 - RNA, 19 nt, Artificial Sequence
  Description of Artificial Sequence: Synthetic oligonucleotide
  Sense strand starting at position 2200 of SEQ ID NO: 318068
cggaguccuagcgguuuau

SEQ ID NO: 534240 - RNA, 19 nt, Artificial Sequence
  Description of Artificial Sequence: Synthetic oligonucleotide
  Antisense strand to SEQ ID NO: 534239
auaaaccgcuaggacuccg

SEQ ID NO: 534241 - RNA, 19 nt, Artificial Sequence
  Description of Artificial Sequence: Synthetic oligonucleotide
  Sense strand starting at position 2204 of SEQ ID NO: 318068
guccuagcgguuuauaauu

SEQ ID NO: 534242 - RNA, 19 nt, Artificial Sequence
  Description of Artificial Sequence: Synthetic oligonucleotide
  Antisense strand to SEQ ID NO: 534241
aauuauaaaccgcuaggac

SEQ ID NO: 534243 - RNA, 19 nt, Artificial Sequence
  Description of Artificial Sequence: Synthetic oligonucleotide
  Sense strand starting at position 2232 of SEQ ID NO: 318068
gcaugcgucuuccuugaaa

SEQ ID NO: 534244 - RNA, 19 nt, Artificial Sequence
  Description of Artificial Sequence: Synthetic oligonucleotide
  Antisense strand to SEQ ID NO: 534243
uuucaaggaagacgcaugc

SEQ ID NO: 534245 - RNA, 19 nt, Artificial Sequence
  Description of Artificial Sequence: Synthetic oligonucleotide
  Sense strand starting at position 2296 of SEQ ID NO: 318068
ccgccuguucccuauggga

SEQ ID NO: 534246 - RNA, 19 nt, Artificial Sequence
  Description of Artificial Sequence: Synthetic oligonucleotide
  Antisense strand to SEQ ID NO: 534245
ucccauagggaacaggcgg

SEQ ID NO: 534247 - RNA, 19 nt, Artificial Sequence
  Description of Artificial Sequence: Synthetic oligonucleotide
  Sense strand starting at position 2298 of SEQ ID NO: 318068
gccuguucccuaugggacu

SEQ ID NO: 534248 - RNA, 19 nt, Artificial Sequence
  Description of Artificial Sequence: Synthetic oligonucleotide
  Antisense strand to SEQ ID NO: 534247
agucccauagggaacaggc

SEQ ID NO: 534249 - RNA, 19 nt, Artificial Sequence
  Description of Artificial Sequence: Synthetic oligonucleotide
  Sense strand starting at position 2688 of SEQ ID NO: 318068
cgaauucgcacccugugua

SEQ ID NO: 534250 - RNA, 19 nt, Artificial Sequence
  Description of Artificial Sequence: Synthetic oligonucleotide
  Antisense strand to SEQ ID NO: 534249
uacacagggugcgaauucg

SEQ ID NO: 534251 - RNA, 19 nt, Artificial Sequence
  Description of Artificial Sequence: Synthetic oligonucleotide
  Sense strand starting at position 2845 of SEQ ID NO: 318068
uugguaagagugcguccau

SEQ ID NO: 534252 - RNA, 19 nt, Artificial Sequence
  Description of Artificial Sequence: Synthetic oligonucleotide
  Antisense strand to SEQ ID NO: 534251
auggacgcacucuuaccaa

SEQ ID NO: 534253 - RNA, 19 nt, Artificial Sequence
  Description of Artificial Sequence: Synthetic oligonucleotide
  Sense strand starting at position 2846 of SEQ ID NO: 318068
ugguaagagugcguccauu

SEQ ID NO: 534254 - RNA, 19 nt, Artificial Sequence
  Description of Artificial Sequence: Synthetic oligonucleotide
  Antisense strand to SEQ ID NO: 534253
aauggacgcacucuuacca

SEQ ID NO: 534255 - RNA, 19 nt, Artificial Sequence
  Description of Artificial Sequence: Synthetic oligonucleotide
  Sense strand starting at position 2923 of SEQ ID NO: 318068
cugcgagaugacuaauguu

SEQ ID NO: 534256 - RNA, 19 nt, Artificial Sequence
  Description of Artificial Sequence: Synthetic oligonucleotide
  Antisense strand to SEQ ID NO: 534255
aacauuagucaucucgcag

SEQ ID NO: 534257 - RNA, 19 nt, Artificial Sequence
  Description of Artificial Sequence: Synthetic oligonucleotide
  Sense strand starting at position 2930 of SEQ ID NO: 318068
augacuaauguucgugguu

SEQ ID NO: 534258 - RNA, 19 nt, Artificial Sequence
  Description of Artificial Sequence: Synthetic oligonucleotide
  Antisense strand to SEQ ID NO: 534257
aaccacgaacauuagucau

SEQ ID NO: 534259 - RNA, 19 nt, Artificial Sequence
  Description of Artificial Sequence: Synthetic oligonucleotide
  Sense strand starting at position 2931 of SEQ ID NO: 318068
ugacuaauguucgugguuu

SEQ ID NO: 534260 - RNA, 19 nt, Artificial Sequence
  Description of Artificial Sequence: Synthetic oligonucleotide
  Antisense strand to SEQ ID NO: 534259
aaaccacgaacauuaguca

SEQ ID NO: 534261 - RNA, 19 nt, Artificial Sequence
  Description of Artificial Sequence: Synthetic oligonucleotide
  Sense strand starting at position 3284 of SEQ ID NO: 318068
ggguguuaucuccgagaga

SEQ ID NO: 534262 - RNA, 19 nt, Artificial Sequence
  Description of Artificial Sequence: Synthetic oligonucleotide
  Antisense strand to SEQ ID NO: 534261
ucucucggagauaacaccc

SEQ ID NO: 534263 - RNA, 19 nt, Artificial Sequence
  Description of Artificial Sequence: Synthetic oligonucleotide
  Sense strand starting at position 3285 of SEQ ID NO: 318068
gguguuaucuccgagagaa

SEQ ID NO: 534264 - RNA, 19 nt, Artificial Sequence
  Description of Artificial Sequence: Synthetic oligonucleotide
  Antisense strand to SEQ ID NO: 534263
uucucucggagauaacacc

SEQ ID NO: 534265 - RNA, 19 nt, Artificial Sequence
  Description of Artificial Sequence: Synthetic oligonucleotide
  Sense strand starting at position 3287 of SEQ ID NO: 318068
uguuaucuccgagagaagg

SEQ ID NO: 534266 - RNA, 19 nt, Artificial Sequence
  Description of Artificial Sequence: Synthetic oligonucleotide
  Antisense strand to SEQ ID NO: 534265
ccuucucucggagauaaca

SEQ ID NO: 534267 - RNA, 19 nt, Artificial Sequence
  Description of Artificial Sequence: Synthetic oligonucleotide
  Sense strand starting at position 3329 of SEQ ID NO: 318068
agccguaaacccuguguaa

SEQ ID NO: 534268 - RNA, 19 nt, Artificial Sequence
  Description of Artificial Sequence: Synthetic oligonucleotide
  Antisense strand to SEQ ID NO: 534267
uuacacaggguuuacggcu

SEQ ID NO: 534269 - RNA, 19 nt, Artificial Sequence
  Description of Artificial Sequence: Synthetic oligonucleotide
  Sense strand starting at position 3331 of SEQ ID NO: 318068
ccguaaacccuguguaaag

SEQ ID NO: 534270 - RNA, 19 nt, Artificial Sequence
  Description of Artificial Sequence: Synthetic oligonucleotide
  Antisense strand to SEQ ID NO: 534269
cuuuacacaggguuuacgg

SEQ ID NO: 534271 - RNA, 19 nt, Artificial Sequence
  Description of Artificial Sequence: Synthetic oligonucleotide
  Sense strand starting at position 3352 of SEQ ID NO: 318068
aaacucuugcuggauguga

SEQ ID NO: 534272 - RNA, 19 nt, Artificial Sequence
  Description of Artificial Sequence: Synthetic oligonucleotide
  Antisense strand to SEQ ID NO: 534271
ucacauccagcaagaguuu

SEQ ID NO: 534273 - RNA, 19 nt, Artificial Sequence
  Description of Artificial Sequence: Synthetic oligonucleotide
  Sense strand starting at position 3469 of SEQ ID NO: 318068
aggcacuuuggcugaggua

SEQ ID NO: 534274 - RNA, 19 nt, Artificial Sequence
  Description of Artificial Sequence: Synthetic oligonucleotide
  Antisense strand to SEQ ID NO: 534273
uaccucagccaaagugccu

SEQ ID NO: 534275 - RNA, 19 nt, Artificial Sequence
  Description of Artificial Sequence: Synthetic oligonucleotide
  Sense strand starting at position 3470 of SEQ ID NO: 318068
ggcacuuuggcugagguaa

SEQ ID NO: 534276 - RNA, 19 nt, Artificial Sequence
  Description of Artificial Sequence: Synthetic oligonucleotide
  Antisense strand to SEQ ID NO: 534275
uuaccucagccaaagugcc

SEQ ID NO: 534277 - RNA, 19 nt, Artificial Sequence
  Description of Artificial Sequence: Synthetic oligonucleotide
  Sense strand starting at position 3517 of SEQ ID NO: 318068
ggcucacucguguaauacc

SEQ ID NO: 534278 - RNA, 19 nt, Artificial Sequence
  Description of Artificial Sequence: Synthetic oligonucleotide
  Antisense strand to SEQ ID NO: 534277
gguauuacacgagugagcc

SEQ ID NO: 534279 - RNA, 19 nt, Artificial Sequence
  Description of Artificial Sequence: Synthetic oligonucleotide
  Sense strand starting at position 3964 of SEQ ID NO: 318068
aaagaauaguaguaaggua

SEQ ID NO: 534280 - RNA, 19 nt, Artificial Sequence
  Description of Artificial Sequence: Synthetic oligonucleotide
  Antisense strand to SEQ ID NO: 534279
uaccuuacuacuauucuuu

SEQ ID NO: 534281 - RNA, 19 nt, Artificial Sequence
  Description of Artificial Sequence: Synthetic oligonucleotide
  Sense strand starting at position 130 of SEQ ID NO: 318069
ggaucaguguuaccaagcu

SEQ ID NO: 534282 - RNA, 19 nt, Artificial Sequence
  Description of Artificial Sequence: Synthetic oligonucleotide
  Antisense strand to SEQ ID NO: 534281
agcuugguaacacugaucc

SEQ ID NO: 534283 - RNA, 19 nt, Artificial Sequence
  Description of Artificial Sequence: Synthetic oligonucleotide
  Sense strand starting at position 235 of SEQ ID NO: 318069
ggucgcuuuccguuaccaa

SEQ ID NO: 534284 - RNA, 19 nt, Artificial Sequence
  Description of Artificial Sequence: Synthetic oligonucleotide
  Antisense strand to SEQ ID NO: 534283
uugguaacggaaagcgacc

SEQ ID NO: 534285 - RNA, 19 nt, Artificial Sequence
  Description of Artificial Sequence: Synthetic oligonucleotide
  Sense strand starting at position 242 of SEQ ID NO: 318069
uuccguuaccaacgcuaaa

SEQ ID NO: 534286 - RNA, 19 nt, Artificial Sequence
  Description of Artificial Sequence: Synthetic oligonucleotide
  Antisense strand to SEQ ID NO: 534285
uuuagcguugguaacggaa

SEQ ID NO: 534287 - RNA, 19 nt, Artificial Sequence
  Description of Artificial Sequence: Synthetic oligonucleotide
  Sense strand starting at position 391 of SEQ ID NO: 318069
ucaggaaaccuauguacug

SEQ ID NO: 534288 - RNA, 19 nt, Artificial Sequence
  Description of Artificial Sequence: Synthetic oligonucleotide
  Antisense strand to SEQ ID NO: 534287
caguacauagguuuccuga

SEQ ID NO: 534289 - RNA, 19 nt, Artificial Sequence
  Description of Artificial Sequence: Synthetic oligonucleotide
  Sense strand starting at position 442 of SEQ ID NO: 318069
acuguauagugagccagau

SEQ ID NO: 534290 - RNA, 19 nt, Artificial Sequence
  Description of Artificial Sequence: Synthetic oligonucleotide
  Antisense strand to SEQ ID NO: 534289
aucuggcucacuauacagu

SEQ ID NO: 534291 - RNA, 19 nt, Artificial Sequence
  Description of Artificial Sequence: Synthetic oligonucleotide
  Sense strand starting at position 444 of SEQ ID NO: 318069
uguauagugagccagauua

SEQ ID NO: 534292 - RNA, 19 nt, Artificial Sequence
  Description of Artificial Sequence: Synthetic oligonucleotide
  Antisense strand to SEQ ID NO: 534291
uaaucuggcucacuauaca

SEQ ID NO: 534293 - RNA, 19 nt, Artificial Sequence
  Description of Artificial Sequence: Synthetic oligonucleotide
  Sense strand starting at position 513 of SEQ ID NO: 318069
cugaaauuaagacgugaca

SEQ ID NO: 534294 - RNA, 19 nt, Artificial Sequence
  Description of Artificial Sequence: Synthetic oligonucleotide
  Antisense strand to SEQ ID NO: 534293
ugucacgucuuaauuucag

SEQ ID NO: 534295 - RNA, 19 nt, Artificial Sequence
  Description of Artificial Sequence: Synthetic oligonucleotide
  Sense strand starting at position 627 of SEQ ID NO: 318069
gucuaaucacucggccauu

SEQ ID NO: 534296 - RNA, 19 nt, Artificial Sequence
  Description of Artificial Sequence: Synthetic oligonucleotide
  Antisense strand to SEQ ID NO: 534295
aauggccgagugauuagac

SEQ ID NO: 534297 - RNA, 19 nt, Artificial Sequence
  Description of Artificial Sequence: Synthetic oligonucleotide
  Sense strand starting at position 628 of SEQ ID NO: 318069
ucuaaucacucggccauuu

SEQ ID NO: 534298 - RNA, 19 nt, Artificial Sequence
  Description of Artificial Sequence: Synthetic oligonucleotide
  Antisense strand to SEQ ID NO: 534297
aaauggccgagugauuaga

SEQ ID NO: 534299 - RNA, 19 nt, Artificial Sequence
  Description of Artificial Sequence: Synthetic oligonucleotide
  Sense strand starting at position 647 of SEQ ID NO: 318069
ucucaagauugaggaggaa

SEQ ID NO: 534300 - RNA, 19 nt, Artificial Sequence
  Description of Artificial Sequence: Synthetic oligonucleotide
  Antisense strand to SEQ ID NO: 534299
uuccuccucaaucuugaga

SEQ ID NO: 534301 - RNA, 19 nt, Artificial Sequence
  Description of Artificial Sequence: Synthetic oligonucleotide
  Sense strand starting at position 1107 of SEQ ID NO: 318069
cgaaauuuccauugcguaa

SEQ ID NO: 534302 - RNA, 19 nt, Artificial Sequence
  Description of Artificial Sequence: Synthetic oligonucleotide
  Antisense strand to SEQ ID NO: 534301
uuacgcaauggaaauuucg

SEQ ID NO: 534303 - RNA, 19 nt, Artificial Sequence
  Description of Artificial Sequence: Synthetic oligonucleotide
  Sense strand starting at position 1294 of SEQ ID NO: 318069
ccgcguccuaguucuaacu

SEQ ID NO: 534304 - RNA, 19 nt, Artificial Sequence
  Description of Artificial Sequence: Synthetic oligonucleotide
  Antisense strand to SEQ ID NO: 534303
aguuagaacuaggacgcgg

SEQ ID NO: 534305 - RNA, 19 nt, Artificial Sequence
  Description of Artificial Sequence: Synthetic oligonucleotide
  Sense strand starting at position 1465 of SEQ ID NO: 318069
aacugagagcgccaauuaa

SEQ ID NO: 534306 - RNA, 19 nt, Artificial Sequence
  Description of Artificial Sequence: Synthetic oligonucleotide
  Antisense strand to SEQ ID NO: 534305
uuaauuggcgcucucaguu

SEQ ID NO: 534307 - RNA, 19 nt, Artificial Sequence
  Description of Artificial Sequence: Synthetic oligonucleotide
  Sense strand starting at position 1821 of SEQ ID NO: 318069
guggcccucccagagauau

SEQ ID NO: 534308 - RNA, 19 nt, Artificial Sequence
  Description of Artificial Sequence: Synthetic oligonucleotide
  Antisense strand to SEQ ID NO: 534307
auaucucugggagggccac

SEQ ID NO: 534309 - RNA, 19 nt, Artificial Sequence
  Description of Artificial Sequence: Synthetic oligonucleotide
  Sense strand starting at position 2052 of SEQ ID NO: 318069
gcgcaugcguaauuucaag

SEQ ID NO: 534310 - RNA, 19 nt, Artificial Sequence
  Description of Artificial Sequence: Synthetic oligonucleotide
  Antisense strand to SEQ ID NO: 534309
cuugaaauuacgcaugcgc

SEQ ID NO: 534311 - RNA, 19 nt, Artificial Sequence
  Description of Artificial Sequence: Synthetic oligonucleotide
  Sense strand starting at position 2162 of SEQ ID NO: 318069
cugcgccuucccgcgaaua

SEQ ID NO: 534312 - RNA, 19 nt, Artificial Sequence
  Description of Artificial Sequence: Synthetic oligonucleotide
  Antisense strand to SEQ ID NO: 534311
uauucgcgggaaggcgcag

SEQ ID NO: 534313 - RNA, 19 nt, Artificial Sequence
  Description of Artificial Sequence: Synthetic oligonucleotide
  Sense strand starting at position 2164 of SEQ ID NO: 318069
gcgccuucccgcgaauauu

SEQ ID NO: 534314 - RNA, 19 nt, Artificial Sequence
  Description of Artificial Sequence: Synthetic oligonucleotide
  Antisense strand to SEQ ID NO: 534313
aauauucgcgggaaggcgc

SEQ ID NO: 534315 - RNA, 19 nt, Artificial Sequence
  Description of Artificial Sequence: Synthetic oligonucleotide
  Sense strand starting at position 2187 of SEQ ID NO: 318069
uucggaguccuagcgguuu

SEQ ID NO: 534316 - RNA, 19 nt, Artificial Sequence
  Description of Artificial Sequence: Synthetic oligonucleotide
  Antisense strand to SEQ ID NO: 534315
aaaccgcuaggacuccgaa

SEQ ID NO: 534317 - RNA, 19 nt, Artificial Sequence
  Description of Artificial Sequence: Synthetic oligonucleotide
  Sense strand starting at position 2189 of SEQ ID NO: 318069
cggaguccuagcgguuuau

SEQ ID NO: 534318 - RNA, 19 nt, Artificial Sequence
  Description of Artificial Sequence: Synthetic oligonucleotide
  Antisense strand to SEQ ID NO: 534317
auaaaccgcuaggacuccg

SEQ ID NO: 534319 - RNA, 19 nt, Artificial Sequence
  Description of Artificial Sequence: Synthetic oligonucleotide
  Sense strand starting at position 2193 of SEQ ID NO: 318069
guccuagcgguuuauaauu

SEQ ID NO: 534320 - RNA, 19 nt, Artificial Sequence
  Description of Artificial Sequence: Synthetic oligonucleotide
  Antisense strand to SEQ ID NO: 534319
aauuauaaaccgcuaggac

SEQ ID NO: 534321 - RNA, 19 nt, Artificial Sequence
  Description of Artificial Sequence: Synthetic oligonucleotide
  Sense strand starting at position 2221 of SEQ ID NO: 318069
gcaugcgucuuccuugaaa

SEQ ID NO: 534322 - RNA, 19 nt, Artificial Sequence
  Description of Artificial Sequence: Synthetic oligonucleotide
  Antisense strand to SEQ ID NO: 534321
uuucaaggaagacgcaugc

SEQ ID NO: 534323 - RNA, 19 nt, Artificial Sequence
  Description of Artificial Sequence: Synthetic oligonucleotide
  Sense strand starting at position 2285 of SEQ ID NO: 318069
ccgccuguucccuauggga

SEQ ID NO: 534324 - RNA, 19 nt, Artificial Sequence
  Description of Artificial Sequence: Synthetic oligonucleotide
  Antisense strand to SEQ ID NO: 534323
ucccauagggaacaggcgg

SEQ ID NO: 534325 - RNA, 19 nt, Artificial Sequence
  Description of Artificial Sequence: Synthetic oligonucleotide
  Sense strand starting at position 2287 of SEQ ID NO: 318069
gccuguucccuaugggacu

SEQ ID NO: 534326 - RNA, 19 nt, Artificial Sequence
  Description of Artificial Sequence: Synthetic oligonucleotide
  Antisense strand to SEQ ID NO: 534325
agucccauagggaacaggc

SEQ ID NO: 534327 - RNA, 19 nt, Artificial Sequence
  Description of Artificial Sequence: Synthetic oligonucleotide
  Sense strand starting at position 2677 of SEQ ID NO: 318069
cgaauucgcacccugugua

SEQ ID NO: 534328 - RNA, 19 nt, Artificial Sequence
  Description of Artificial Sequence: Synthetic oligonucleotide
  Antisense strand to SEQ ID NO: 534327
uacacagggugcgaauucg

SEQ ID NO: 534329 - RNA, 19 nt, Artificial Sequence
  Description of Artificial Sequence: Synthetic oligonucleotide
  Sense strand starting at position 2834 of SEQ ID NO: 318069
uugguaagagugcguccau

SEQ ID NO: 534330 - RNA, 19 nt, Artificial Sequence
  Description of Artificial Sequence: Synthetic oligonucleotide
  Antisense strand to SEQ ID NO: 534329
auggacgcacucuuaccaa

SEQ ID NO: 534331 - RNA, 19 nt, Artificial Sequence
  Description of Artificial Sequence: Synthetic oligonucleotide
  Sense strand starting at position 2835 of SEQ ID NO: 318069
ugguaagagugcguccauu

SEQ ID NO: 534332 - RNA, 19 nt, Artificial Sequence
  Description of Artificial Sequence: Synthetic oligonucleotide
  Antisense strand to SEQ ID NO: 534331
aauggacgcacucuuacca

SEQ ID NO: 534333 - RNA, 19 nt, Artificial Sequence
  Description of Artificial Sequence: Synthetic oligonucleotide
  Sense strand starting at position 2904 of SEQ ID NO: 318069
cacacaugcugcgagauga

SEQ ID NO: 534334 - RNA, 19 nt, Artificial Sequence
  Description of Artificial Sequence: Synthetic oligonucleotide
  Antisense strand to SEQ ID NO: 534333
ucaucucgcagcaugugug

SEQ ID NO: 534335 - RNA, 19 nt, Artificial Sequence
  Description of Artificial Sequence: Synthetic oligonucleotide
  Sense strand starting at position 2912 of SEQ ID NO: 318069
cugcgagaugacuaauguu

SEQ ID NO: 534336 - RNA, 19 nt, Artificial Sequence
  Description of Artificial Sequence: Synthetic oligonucleotide
  Antisense strand to SEQ ID NO: 534335
aacauuagucaucucgcag

SEQ ID NO: 534337 - RNA, 19 nt, Artificial Sequence
  Description of Artificial Sequence: Synthetic oligonucleotide
  Sense strand starting at position 2919 of SEQ ID NO: 318069
augacuaauguucgugguu

SEQ ID NO: 534338 - RNA, 19 nt, Artificial Sequence
  Description of Artificial Sequence: Synthetic oligonucleotide
  Antisense strand to SEQ ID NO: 534337
aaccacgaacauuagucau

SEQ ID NO: 534339 - RNA, 19 nt, Artificial Sequence
  Description of Artificial Sequence: Synthetic oligonucleotide
  Sense strand starting at position 2920 of SEQ ID NO: 318069
ugacuaauguucgugguuu

SEQ ID NO: 534340 - RNA, 19 nt, Artificial Sequence
  Description of Artificial Sequence: Synthetic oligonucleotide
  Antisense strand to SEQ ID NO: 534339
aaaccacgaacauuaguca

SEQ ID NO: 534341 - RNA, 19 nt, Artificial Sequence
  Description of Artificial Sequence: Synthetic oligonucleotide
  Sense strand starting at position 3273 of SEQ ID NO: 318069
ggguguuaucuccgagaga

SEQ ID NO: 534342 - RNA, 19 nt, Artificial Sequence
  Description of Artificial Sequence: Synthetic oligonucleotide
  Antisense strand to SEQ ID NO: 534341
ucucucggagauaacaccc

SEQ ID NO: 534343 - RNA, 19 nt, Artificial Sequence
  Description of Artificial Sequence: Synthetic oligonucleotide
  Sense strand starting at position 3274 of SEQ ID NO: 318069
gguguuaucuccgagagaa

SEQ ID NO: 534344 - RNA, 19 nt, Artificial Sequence
  Description of Artificial Sequence: Synthetic oligonucleotide
  Antisense strand to SEQ ID NO: 534343
uucucucggagauaacacc

SEQ ID NO: 534345 - RNA, 19 nt, Artificial Sequence
  Description of Artificial Sequence: Synthetic oligonucleotide
  Sense strand starting at position 3276 of SEQ ID NO: 318069
uguuaucuccgagagaagg

SEQ ID NO: 534346 - RNA, 19 nt, Artificial Sequence
  Description of Artificial Sequence: Synthetic oligonucleotide
  Antisense strand to SEQ ID NO: 534345
ccuucucucggagauaaca

SEQ ID NO: 534347 - RNA, 19 nt, Artificial Sequence
  Description of Artificial Sequence: Synthetic oligonucleotide
  Sense strand starting at position 3318 of SEQ ID NO: 318069
agccguaaacccuguguaa

SEQ ID NO: 534348 - RNA, 19 nt, Artificial Sequence
  Description of Artificial Sequence: Synthetic oligonucleotide
  Antisense strand to SEQ ID NO: 534347
uuacacaggguuuacggcu

SEQ ID NO: 534349 - RNA, 19 nt, Artificial Sequence
  Description of Artificial Sequence: Synthetic oligonucleotide
  Sense strand starting at position 3320 of SEQ ID NO: 318069
ccguaaacccuguguaaag

SEQ ID NO: 534350 - RNA, 19 nt, Artificial Sequence
  Description of Artificial Sequence: Synthetic oligonucleotide
  Antisense strand to SEQ ID NO: 534349
cuuuacacaggguuuacgg

SEQ ID NO: 534351 - RNA, 19 nt, Artificial Sequence
  Description of Artificial Sequence: Synthetic oligonucleotide
  Sense strand starting at position 3341 of SEQ ID NO: 318069
aaacucuugcuggauguga

SEQ ID NO: 534352 - RNA, 19 nt, Artificial Sequence
  Description of Artificial Sequence: Synthetic oligonucleotide
  Antisense strand to SEQ ID NO: 534351
ucacauccagcaagaguuu

SEQ ID NO: 534353 - RNA, 19 nt, Artificial Sequence
  Description of Artificial Sequence: Synthetic oligonucleotide
  Sense strand starting at position 3458 of SEQ ID NO: 318069
aggcacuuuggcugaggua

SEQ ID NO: 534354 - RNA, 19 nt, Artificial Sequence
  Description of Artificial Sequence: Synthetic oligonucleotide
  Antisense strand to SEQ ID NO: 534353
uaccucagccaaagugccu

SEQ ID NO: 534355 - RNA, 19 nt, Artificial Sequence
  Description of Artificial Sequence: Synthetic oligonucleotide
  Sense strand starting at position 3459 of SEQ ID NO: 318069
ggcacuuuggcugagguaa

SEQ ID NO: 534356 - RNA, 19 nt, Artificial Sequence
  Description of Artificial Sequence: Synthetic oligonucleotide
  Antisense strand to SEQ ID NO: 534355
uuaccucagccaaagugcc

SEQ ID NO: 534357 - RNA, 19 nt, Artificial Sequence
  Description of Artificial Sequence: Synthetic oligonucleotide
  Sense strand starting at position 3506 of SEQ ID NO: 318069
ggcucacucguguaauacc

SEQ ID NO: 534358 - RNA, 19 nt, Artificial Sequence
  Description of Artificial Sequence: Synthetic oligonucleotide
  Antisense strand to SEQ ID NO: 534357
gguauuacacgagugagcc

SEQ ID NO: 534359 - RNA, 19 nt, Artificial Sequence
  Description of Artificial Sequence: Synthetic oligonucleotide
  Sense strand starting at position 3953 of SEQ ID NO: 318069
aaagaauaguaguaaggua

SEQ ID NO: 534360 - RNA, 19 nt, Artificial Sequence
  Description of Artificial Sequence: Synthetic oligonucleotide
  Antisense strand to SEQ ID NO: 534359
uaccuuacuacuauucuuu

SEQ ID NO: 534361 - RNA, 19 nt, Artificial Sequence
  Description of Artificial Sequence: Synthetic oligonucleotide
  Sense strand starting at position 106 of SEQ ID NO: 318070
augaaaucagauugcucca

SEQ ID NO: 534362 - RNA, 19 nt, Artificial Sequence
  Description of Artificial Sequence: Synthetic oligonucleotide
  Antisense strand to SEQ ID NO: 534361
uggagcaaucugauuucau

SEQ ID NO: 534363 - RNA, 19 nt, Artificial Sequence
  Description of Artificial Sequence: Synthetic oligonucleotide
  Sense strand starting at position 137 of SEQ ID NO: 318070
ggguuuccagcuuaaauua

SEQ ID NO: 534364 - RNA, 19 nt, Artificial Sequence
  Description of Artificial Sequence: Synthetic oligonucleotide
  Antisense strand to SEQ ID NO: 534363
uaauuuaagcuggaaaccc

SEQ ID NO: 534365 - RNA, 19 nt, Artificial Sequence
  Description of Artificial Sequence: Synthetic oligonucleotide
  Sense strand starting at position 154 of SEQ ID NO: 318070
uaggaagugucacuagcau

SEQ ID NO: 534366 - RNA, 19 nt, Artificial Sequence
  Description of Artificial Sequence: Synthetic oligonucleotide
  Antisense strand to SEQ ID NO: 534365
augcuagugacacuuccua

SEQ ID NO: 534367 - RNA, 19 nt, Artificial Sequence
  Description of Artificial Sequence: Synthetic oligonucleotide
  Sense strand starting at position 542 of SEQ ID NO: 318070
uugugcaacugauuaucua

SEQ ID NO: 534368 - RNA, 19 nt, Artificial Sequence
  Description of Artificial Sequence: Synthetic oligonucleotide
  Antisense strand to SEQ ID NO: 534367
uagauaaucaguugcacaa

SEQ ID NO: 534369 - RNA, 19 nt, Artificial Sequence
  Description of Artificial Sequence: Synthetic oligonucleotide
  Sense strand starting at position 543 of SEQ ID NO: 318070
ugugcaacugauuaucuaa

SEQ ID NO: 534370 - RNA, 19 nt, Artificial Sequence
  Description of Artificial Sequence: Synthetic oligonucleotide
  Antisense strand to SEQ ID NO: 534369
uuagauaaucaguugcaca

SEQ ID NO: 534371 - RNA, 19 nt, Artificial Sequence
  Description of Artificial Sequence: Synthetic oligonucleotide
  Sense strand starting at position 569 of SEQ ID NO: 318070
gagagaaugcaguacuucu

SEQ ID NO: 534372 - RNA, 19 nt, Artificial Sequence
  Description of Artificial Sequence: Synthetic oligonucleotide
  Antisense strand to SEQ ID NO: 534371
agaaguacugcauucucuc

SEQ ID NO: 534373 - RNA, 19 nt, Artificial Sequence
  Description of Artificial Sequence: Synthetic oligonucleotide
  Sense strand starting at position 576 of SEQ ID NO: 318070
ugcaguacuucucuuugaa

SEQ ID NO: 534374 - RNA, 19 nt, Artificial Sequence
  Description of Artificial Sequence: Synthetic oligonucleotide
  Antisense strand to SEQ ID NO: 534373
uucaaagagaaguacugca

SEQ ID NO: 534375 - RNA, 19 nt, Artificial Sequence
  Description of Artificial Sequence: Synthetic oligonucleotide
  Sense strand starting at position 579 of SEQ ID NO: 318070
aguacuucucuuugaaaga

SEQ ID NO: 534376 - RNA, 19 nt, Artificial Sequence
  Description of Artificial Sequence: Synthetic oligonucleotide
  Antisense strand to SEQ ID NO: 534375
ucuuucaaagagaaguacu

SEQ ID NO: 534377 - RNA, 19 nt, Artificial Sequence
  Description of Artificial Sequence: Synthetic oligonucleotide
  Sense strand starting at position 650 of SEQ ID NO: 318070
cagucugaccaguaaagug

SEQ ID NO: 534378 - RNA, 19 nt, Artificial Sequence
  Description of Artificial Sequence: Synthetic oligonucleotide
  Antisense strand to SEQ ID NO: 534377
cacuuuacuggucagacug

SEQ ID NO: 534379 - RNA, 19 nt, Artificial Sequence
  Description of Artificial Sequence: Synthetic oligonucleotide
  Sense strand starting at position 655 of SEQ ID NO: 318070
ugaccaguaaaguguagaa

SEQ ID NO: 534380 - RNA, 19 nt, Artificial Sequence
  Description of Artificial Sequence: Synthetic oligonucleotide
  Antisense strand to SEQ ID NO: 534379
uucuacacuuuacugguca

SEQ ID NO: 534381 - RNA, 19 nt, Artificial Sequence
  Description of Artificial Sequence: Synthetic oligonucleotide
  Sense strand starting at position 714 of SEQ ID NO: 318070
aguuacaaacgauauaugu

SEQ ID NO: 534382 - RNA, 19 nt, Artificial Sequence
  Description of Artificial Sequence: Synthetic oligonucleotide
  Antisense strand to SEQ ID NO: 534381
acauauaucguuuguaacu

SEQ ID NO: 534383 - RNA, 19 nt, Artificial Sequence
  Description of Artificial Sequence: Synthetic oligonucleotide
  Sense strand starting at position 1049 of SEQ ID NO: 318070
gauccuuguccggagguau

SEQ ID NO: 534384 - RNA, 19 nt, Artificial Sequence
  Description of Artificial Sequence: Synthetic oligonucleotide
  Antisense strand to SEQ ID NO: 534383
auaccuccggacaaggauc

SEQ ID NO: 534385 - RNA, 19 nt, Artificial Sequence
  Description of Artificial Sequence: Synthetic oligonucleotide
  Sense strand starting at position 1086 of SEQ ID NO: 318070
ucaauuaguucucuuaggu

SEQ ID NO: 534386 - RNA, 19 nt, Artificial Sequence
  Description of Artificial Sequence: Synthetic oligonucleotide
  Antisense strand to SEQ ID NO: 534385
accuaagagaacuaauuga

SEQ ID NO: 534387 - RNA, 19 nt, Artificial Sequence
  Description of Artificial Sequence: Synthetic oligonucleotide
  Sense strand starting at position 1148 of SEQ ID NO: 318070
gcggcauuugcuuauucga

SEQ ID NO: 534388 - RNA, 19 nt, Artificial Sequence
  Description of Artificial Sequence: Synthetic oligonucleotide
  Antisense strand to SEQ ID NO: 534387
ucgaauaagcaaaugccgc

SEQ ID NO: 534389 - RNA, 19 nt, Artificial Sequence
  Description of Artificial Sequence: Synthetic oligonucleotide
  Sense strand starting at position 1150 of SEQ ID NO: 318070
ggcauuugcuuauucgagu

SEQ ID NO: 534390 - RNA, 19 nt, Artificial Sequence
  Description of Artificial Sequence: Synthetic oligonucleotide
  Antisense strand to SEQ ID NO: 534389
acucgaauaagcaaaugcc

SEQ ID NO: 534391 - RNA, 19 nt, Artificial Sequence
  Description of Artificial Sequence: Synthetic oligonucleotide
  Sense strand starting at position 1151 of SEQ ID NO: 318070
gcauuugcuuauucgaguu

SEQ ID NO: 534392 - RNA, 19 nt, Artificial Sequence
  Description of Artificial Sequence: Synthetic oligonucleotide
  Antisense strand to SEQ ID NO: 534391
aacucgaauaagcaaaugc

SEQ ID NO: 534393 - RNA, 19 nt, Artificial Sequence
  Description of Artificial Sequence: Synthetic oligonucleotide
  Sense strand starting at position 1171 of SEQ ID NO: 318070
aaaugcuuugcggaggaga

SEQ ID NO: 534394 - RNA, 19 nt, Artificial Sequence
  Description of Artificial Sequence: Synthetic oligonucleotide
  Antisense strand to SEQ ID NO: 534393
ucuccuccgcaaagcauuu

SEQ ID NO: 534395 - RNA, 19 nt, Artificial Sequence
  Description of Artificial Sequence: Synthetic oligonucleotide
  Sense strand starting at position 1173 of SEQ ID NO: 318070
augcuuugcggaggagaca

SEQ ID NO: 534396 - RNA, 19 nt, Artificial Sequence
  Description of Artificial Sequence: Synthetic oligonucleotide
  Antisense strand to SEQ ID NO: 534395
ugucuccuccgcaaagcau

SEQ ID NO: 534397 - RNA, 19 nt, Artificial Sequence
  Description of Artificial Sequence: Synthetic oligonucleotide
  Sense strand starting at position 1269 of SEQ ID NO: 318070
ugaguucgcuggucauuuc

SEQ ID NO: 534398 - RNA, 19 nt, Artificial Sequence
  Description of Artificial Sequence: Synthetic oligonucleotide
  Antisense strand to SEQ ID NO: 534397
gaaaugaccagcgaacuca

SEQ ID NO: 534399 - RNA, 19 nt, Artificial Sequence
  Description of Artificial Sequence: Synthetic oligonucleotide
  Sense strand starting at position 1406 of SEQ ID NO: 318070
cgcgacgugcacgugaaua

SEQ ID NO: 534400 - RNA, 19 nt, Artificial Sequence
  Description of Artificial Sequence: Synthetic oligonucleotide
  Antisense strand to SEQ ID NO: 534399
uauucacgugcacgucgcg

SEQ ID NO: 534401 - RNA, 19 nt, Artificial Sequence
  Description of Artificial Sequence: Synthetic oligonucleotide
  Sense strand starting at position 1457 of SEQ ID NO: 318070
cugcgcucacauuaggaaa

SEQ ID NO: 534402 - RNA, 19 nt, Artificial Sequence
  Description of Artificial Sequence: Synthetic oligonucleotide
  Antisense strand to SEQ ID NO: 534401
uuuccuaaugugagcgcag

SEQ ID NO: 534403 - RNA, 19 nt, Artificial Sequence
  Description of Artificial Sequence: Synthetic oligonucleotide
  Sense strand starting at position 2973 of SEQ ID NO: 318070
ugccaaaccugagugaauc

SEQ ID NO: 534404 - RNA, 19 nt, Artificial Sequence
  Description of Artificial Sequence: Synthetic oligonucleotide
  Antisense strand to SEQ ID NO: 534403
gauucacucagguuuggca

SEQ ID NO: 534405 - RNA, 19 nt, Artificial Sequence
  Description of Artificial Sequence: Synthetic oligonucleotide
  Sense strand starting at position 2974 of SEQ ID NO: 318070
gccaaaccugagugaauca

SEQ ID NO: 534406 - RNA, 19 nt, Artificial Sequence
  Description of Artificial Sequence: Synthetic oligonucleotide
  Antisense strand to SEQ ID NO: 534405
ugauucacucagguuuggc

SEQ ID NO: 534407 - RNA, 19 nt, Artificial Sequence
  Description of Artificial Sequence: Synthetic oligonucleotide
  Sense strand starting at position 2981 of SEQ ID NO: 318070
cugagugaaucauucguag

SEQ ID NO: 534408 - RNA, 19 nt, Artificial Sequence
  Description of Artificial Sequence: Synthetic oligonucleotide
  Antisense strand to SEQ ID NO: 534407
cuacgaaugauucacucag

SEQ ID NO: 534409 - RNA, 19 nt, Artificial Sequence
  Description of Artificial Sequence: Synthetic oligonucleotide
  Sense strand starting at position 2984 of SEQ ID NO: 318070
agugaaucauucguagcaa

SEQ ID NO: 534410 - RNA, 19 nt, Artificial Sequence
  Description of Artificial Sequence: Synthetic oligonucleotide
  Antisense strand to SEQ ID NO: 534409
uugcuacgaaugauucacu

SEQ ID NO: 534411 - RNA, 19 nt, Artificial Sequence
  Description of Artificial Sequence: Synthetic oligonucleotide
  Sense strand starting at position 3079 of SEQ ID NO: 318070
uccugacuagcagggaaau

SEQ ID NO: 534412 - RNA, 19 nt, Artificial Sequence
  Description of Artificial Sequence: Synthetic oligonucleotide
  Antisense strand to SEQ ID NO: 534411
auuucccugcuagucagga

SEQ ID NO: 534413 - RNA, 19 nt, Artificial Sequence
  Description of Artificial Sequence: Synthetic oligonucleotide
  Sense strand starting at position 3104 of SEQ ID NO: 318070
gggagagccugaucacacu

SEQ ID NO: 534414 - RNA, 19 nt, Artificial Sequence
  Description of Artificial Sequence: Synthetic oligonucleotide
  Antisense strand to SEQ ID NO: 534413
agugugaucaggcucuccc

SEQ ID NO: 534415 - RNA, 19 nt, Artificial Sequence
  Description of Artificial Sequence: Synthetic oligonucleotide
  Sense strand starting at position 3114 of SEQ ID NO: 318070
gaucacacugcugguagau

SEQ ID NO: 534416 - RNA, 19 nt, Artificial Sequence
  Description of Artificial Sequence: Synthetic oligonucleotide
  Antisense strand to SEQ ID NO: 534415
aucuaccagcagugugauc

SEQ ID NO: 534417 - RNA, 19 nt, Artificial Sequence
  Description of Artificial Sequence: Synthetic oligonucleotide
  Sense strand starting at position 3171 of SEQ ID NO: 318070
ucaauuauagagugccauu

SEQ ID NO: 534418 - RNA, 19 nt, Artificial Sequence
  Description of Artificial Sequence: Synthetic oligonucleotide
  Antisense strand to SEQ ID NO: 534417
aauggcacucuauaauuga

SEQ ID NO: 534419 - RNA, 19 nt, Artificial Sequence
  Description of Artificial Sequence: Synthetic oligonucleotide
  Sense strand starting at position 3215 of SEQ ID NO: 318070
uuuguuagugguuaccuga

SEQ ID NO: 534420 - RNA, 19 nt, Artificial Sequence
  Description of Artificial Sequence: Synthetic oligonucleotide
  Antisense strand to SEQ ID NO: 534419
ucagguaaccacuaacaaa

SEQ ID NO: 534421 - RNA, 19 nt, Artificial Sequence
  Description of Artificial Sequence: Synthetic oligonucleotide
  Sense strand starting at position 3218 of SEQ ID NO: 318070
guuagugguuaccugaaac

SEQ ID NO: 534422 - RNA, 19 nt, Artificial Sequence
  Description of Artificial Sequence: Synthetic oligonucleotide
  Antisense strand to SEQ ID NO: 534421
guuucagguaaccacuaac

SEQ ID NO: 534423 - RNA, 19 nt, Artificial Sequence
  Description of Artificial Sequence: Synthetic oligonucleotide
  Sense strand starting at position 3389 of SEQ ID NO: 318070
ucaagaauaugaguuccau

SEQ ID NO: 534424 - RNA, 19 nt, Artificial Sequence
  Description of Artificial Sequence: Synthetic oligonucleotide
  Antisense strand to SEQ ID NO: 534423
auggaacucauauucuuga

SEQ ID NO: 534425 - RNA, 19 nt, Artificial Sequence
  Description of Artificial Sequence: Synthetic oligonucleotide
  Sense strand starting at position 3453 of SEQ ID NO: 318070
ggguuucagucuguggaau

SEQ ID NO: 534426 - RNA, 19 nt, Artificial Sequence
  Description of Artificial Sequence: Synthetic oligonucleotide
  Antisense strand to SEQ ID NO: 534425
auuccacagacugaaaccc

SEQ ID NO: 534427 - RNA, 19 nt, Artificial Sequence
  Description of Artificial Sequence: Synthetic oligonucleotide
  Sense strand starting at position 3622 of SEQ ID NO: 318070
ugaguagcugucuauaggu

SEQ ID NO: 534428 - RNA, 19 nt, Artificial Sequence
  Description of Artificial Sequence: Synthetic oligonucleotide
  Antisense strand to SEQ ID NO: 534427
accuauagacagcuacuca

SEQ ID NO: 534429 - RNA, 19 nt, Artificial Sequence
  Description of Artificial Sequence: Synthetic oligonucleotide
  Sense strand starting at position 3624 of SEQ ID NO: 318070
aguagcugucuauagguuu

SEQ ID NO: 534430 - RNA, 19 nt, Artificial Sequence
  Description of Artificial Sequence: Synthetic oligonucleotide
  Antisense strand to SEQ ID NO: 534429
aaaccuauagacagcuacu

SEQ ID NO: 534431 - RNA, 19 nt, Artificial Sequence
  Description of Artificial Sequence: Synthetic oligonucleotide
  Sense strand starting at position 3637 of SEQ ID NO: 318070
agguuuacuagcuaugugu

SEQ ID NO: 534432 - RNA, 19 nt, Artificial Sequence
  Description of Artificial Sequence: Synthetic oligonucleotide
  Antisense strand to SEQ ID NO: 534431
acacauagcuaguaaaccu

SEQ ID NO: 534433 - RNA, 19 nt, Artificial Sequence
  Description of Artificial Sequence: Synthetic oligonucleotide
  Sense strand starting at position 3666 of SEQ ID NO: 318070
accauauuaugagugcuuu

SEQ ID NO: 534434 - RNA, 19 nt, Artificial Sequence
  Description of Artificial Sequence: Synthetic oligonucleotide
  Antisense strand to SEQ ID NO: 534433
aaagcacucauaauauggu

SEQ ID NO: 534435 - RNA, 19 nt, Artificial Sequence
  Description of Artificial Sequence: Synthetic oligonucleotide
  Sense strand starting at position 3691 of SEQ ID NO: 318070
uguaaauuacuacagaguu

SEQ ID NO: 534436 - RNA, 19 nt, Artificial Sequence
  Description of Artificial Sequence: Synthetic oligonucleotide
  Antisense strand to SEQ ID NO: 534435
aacucuguaguaauuuaca

SEQ ID NO: 534437 - RNA, 19 nt, Artificial Sequence
  Description of Artificial Sequence: Synthetic oligonucleotide
  Sense strand starting at position 3793 of SEQ ID NO: 318070
acuugauaagcauggccaa

SEQ ID NO: 534438 - RNA, 19 nt, Artificial Sequence
  Description of Artificial Sequence: Synthetic oligonucleotide
  Antisense strand to SEQ ID NO: 534437
uuggccaugcuuaucaagu

SEQ ID NO: 534439 - RNA, 19 nt, Artificial Sequence
  Description of Artificial Sequence: Synthetic oligonucleotide
  Sense strand starting at position 3927 of SEQ ID NO: 318070
auauuugaaucugaaguga

SEQ ID NO: 534440 - RNA, 19 nt, Artificial Sequence
  Description of Artificial Sequence: Synthetic oligonucleotide
  Antisense strand to SEQ ID NO: 534439
ucacuucagauucaaauau

SEQ ID NO: 534441 - RNA, 19 nt, Artificial Sequence
  Description of Artificial Sequence: Synthetic oligonucleotide
  Sense strand starting at position 6 of SEQ ID NO: 318071
cugugagcucaggagaauc

SEQ ID NO: 534442 - RNA, 19 nt, Artificial Sequence
  Description of Artificial Sequence: Synthetic oligonucleotide
  Antisense strand to SEQ ID NO: 534441
gauucuccugagcucacag

SEQ ID NO: 534443 - RNA, 19 nt, Artificial Sequence
  Description of Artificial Sequence: Synthetic oligonucleotide
  Sense strand starting at position 114 of SEQ ID NO: 318071
gauaucggcuuccuaugua

SEQ ID NO: 534444 - RNA, 19 nt, Artificial Sequence
  Description of Artificial Sequence: Synthetic oligonucleotide
  Antisense strand to SEQ ID NO: 534443
uacauaggaagccgauauc

SEQ ID NO: 534445 - RNA, 19 nt, Artificial Sequence
  Description of Artificial Sequence: Synthetic oligonucleotide
  Sense strand starting at position 126 of SEQ ID NO: 318071
cuauguaguacugaguagu

SEQ ID NO: 534446 - RNA, 19 nt, Artificial Sequence
  Description of Artificial Sequence: Synthetic oligonucleotide
  Antisense strand to SEQ ID NO: 534445
acuacucaguacuacauag

SEQ ID NO: 534447 - RNA, 19 nt, Artificial Sequence
  Description of Artificial Sequence: Synthetic oligonucleotide
  Sense strand starting at position 158 of SEQ ID NO: 318071
uccagacccuuagagaaau

SEQ ID NO: 534448 - RNA, 19 nt, Artificial Sequence
  Description of Artificial Sequence: Synthetic oligonucleotide
  Antisense strand to SEQ ID NO: 534447
auuucucuaagggucugga

SEQ ID NO: 534449 - RNA, 19 nt, Artificial Sequence
  Description of Artificial Sequence: Synthetic oligonucleotide
  Sense strand starting at position 169 of SEQ ID NO: 318071
agagaaaucccuuggcaag

SEQ ID NO: 534450 - RNA, 19 nt, Artificial Sequence
  Description of Artificial Sequence: Synthetic oligonucleotide
  Antisense strand to SEQ ID NO: 534449
cuugccaagggauuucucu

SEQ ID NO: 534451 - RNA, 19 nt, Artificial Sequence
  Description of Artificial Sequence: Synthetic oligonucleotide
  Sense strand starting at position 170 of SEQ ID NO: 318071
gagaaaucccuuggcaaga

SEQ ID NO: 534452 - RNA, 19 nt, Artificial Sequence
  Description of Artificial Sequence: Synthetic oligonucleotide
  Antisense strand to SEQ ID NO: 534451
ucuugccaagggauuucuc

SEQ ID NO: 534453 - RNA, 19 nt, Artificial Sequence
  Description of Artificial Sequence: Synthetic oligonucleotide
  Sense strand starting at position 265 of SEQ ID NO: 318071
acaagaagccagugcugau

SEQ ID NO: 534454 - RNA, 19 nt, Artificial Sequence
  Description of Artificial Sequence: Synthetic oligonucleotide
  Antisense strand to SEQ ID NO: 534453
aucagcacuggcuucuugu

SEQ ID NO: 534455 - RNA, 19 nt, Artificial Sequence
  Description of Artificial Sequence: Synthetic oligonucleotide
  Sense strand starting at position 479 of SEQ ID NO: 318071
ggaauuugauggcaccagu

SEQ ID NO: 534456 - RNA, 19 nt, Artificial Sequence
  Description of Artificial Sequence: Synthetic oligonucleotide
  Antisense strand to SEQ ID NO: 534455
acuggugccaucaaauucc

SEQ ID NO: 534457 - RNA, 19 nt, Artificial Sequence
  Description of Artificial Sequence: Synthetic oligonucleotide
  Sense strand starting at position 565 of SEQ ID NO: 318071
aggagcagguucucgagau

SEQ ID NO: 534458 - RNA, 19 nt, Artificial Sequence
  Description of Artificial Sequence: Synthetic oligonucleotide
  Antisense strand to SEQ ID NO: 534457
aucucgagaaccugcuccu

SEQ ID NO: 534459 - RNA, 19 nt, Artificial Sequence
  Description of Artificial Sequence: Synthetic oligonucleotide
  Sense strand starting at position 569 of SEQ ID NO: 318071
gcagguucucgagauaagu

SEQ ID NO: 534460 - RNA, 19 nt, Artificial Sequence
  Description of Artificial Sequence: Synthetic oligonucleotide
  Antisense strand to SEQ ID NO: 534459
acuuaucucgagaaccugc

SEQ ID NO: 534461 - RNA, 19 nt, Artificial Sequence
  Description of Artificial Sequence: Synthetic oligonucleotide
  Sense strand starting at position 571 of SEQ ID NO: 318071
agguucucgagauaaguua

SEQ ID NO: 534462 - RNA, 19 nt, Artificial Sequence
  Description of Artificial Sequence: Synthetic oligonucleotide
  Antisense strand to SEQ ID NO: 534461
uaacuuaucucgagaaccu

SEQ ID NO: 534463 - RNA, 19 nt, Artificial Sequence
  Description of Artificial Sequence: Synthetic oligonucleotide
  Sense strand starting at position 684 of SEQ ID NO: 318071
auccaauugccuuggauaa

SEQ ID NO: 534464 - RNA, 19 nt, Artificial Sequence
  Description of Artificial Sequence: Synthetic oligonucleotide
  Antisense strand to SEQ ID NO: 534463
uuauccaaggcaauuggau

SEQ ID NO: 534465 - RNA, 19 nt, Artificial Sequence
  Description of Artificial Sequence: Synthetic oligonucleotide
  Sense strand starting at position 715 of SEQ ID NO: 318071
ggaaacucauuaguaggua

SEQ ID NO: 534466 - RNA, 19 nt, Artificial Sequence
  Description of Artificial Sequence: Synthetic oligonucleotide
  Antisense strand to SEQ ID NO: 534465
uaccuacuaaugaguuucc

SEQ ID NO: 534467 - RNA, 19 nt, Artificial Sequence
  Description of Artificial Sequence: Synthetic oligonucleotide
  Sense strand starting at position 719 of SEQ ID NO: 318071
acucauuaguagguaggaa

SEQ ID NO: 534468 - RNA, 19 nt, Artificial Sequence
  Description of Artificial Sequence: Synthetic oligonucleotide
  Antisense strand to SEQ ID NO: 534467
uuccuaccuacuaaugagu

SEQ ID NO: 534469 - RNA, 19 nt, Artificial Sequence
  Description of Artificial Sequence: Synthetic oligonucleotide
  Sense strand starting at position 723 of SEQ ID NO: 318071
auuaguagguaggaauuua

SEQ ID NO: 534470 - RNA, 19 nt, Artificial Sequence
  Description of Artificial Sequence: Synthetic oligonucleotide
  Antisense strand to SEQ ID NO: 534469
uaaauuccuaccuacuaau

SEQ ID NO: 534471 - RNA, 19 nt, Artificial Sequence
  Description of Artificial Sequence: Synthetic oligonucleotide
  Sense strand starting at position 731 of SEQ ID NO: 318071
guaggaauuuauuaacuuc

SEQ ID NO: 534472 - RNA, 19 nt, Artificial Sequence
  Description of Artificial Sequence: Synthetic oligonucleotide
  Antisense strand to SEQ ID NO: 534471
gaaguuaauaaauuccuac

SEQ ID NO: 534473 - RNA, 19 nt, Artificial Sequence
  Description of Artificial Sequence: Synthetic oligonucleotide
  Sense strand starting at position 780 of SEQ ID NO: 318071
gagauuaugccaggagucu

SEQ ID NO: 534474 - RNA, 19 nt, Artificial Sequence
  Description of Artificial Sequence: Synthetic oligonucleotide
  Antisense strand to SEQ ID NO: 534473
agacuccuggcauaaucuc

SEQ ID NO: 534475 - RNA, 19 nt, Artificial Sequence
  Description of Artificial Sequence: Synthetic oligonucleotide
  Sense strand starting at position 781 of SEQ ID NO: 318071
agauuaugccaggagucuu

SEQ ID NO: 534476 - RNA, 19 nt, Artificial Sequence
  Description of Artificial Sequence: Synthetic oligonucleotide
  Antisense strand to SEQ ID NO: 534475
aagacuccuggcauaaucu

SEQ ID NO: 534477 - RNA, 19 nt, Artificial Sequence
  Description of Artificial Sequence: Synthetic oligonucleotide
  Sense strand starting at position 1361 of SEQ ID NO: 318071
ucguucugguuuccugaga

SEQ ID NO: 534478 - RNA, 19 nt, Artificial Sequence
  Description of Artificial Sequence: Synthetic oligonucleotide
  Antisense strand to SEQ ID NO: 534477
ucucaggaaaccagaacga

SEQ ID NO: 534479 - RNA, 19 nt, Artificial Sequence
  Description of Artificial Sequence: Synthetic oligonucleotide
  Sense strand starting at position 1418 of SEQ ID NO: 318071
ggcuucccuuuagcagaaa

SEQ ID NO: 534480 - RNA, 19 nt, Artificial Sequence
  Description of Artificial Sequence: Synthetic oligonucleotide
  Antisense strand to SEQ ID NO: 534479
uuucugcuaaagggaagcc

SEQ ID NO: 534481 - RNA, 19 nt, Artificial Sequence
  Description of Artificial Sequence: Synthetic oligonucleotide
  Sense strand starting at position 1421 of SEQ ID NO: 318071
uucccuuuagcagaaaguu

SEQ ID NO: 534482 - RNA, 19 nt, Artificial Sequence
  Description of Artificial Sequence: Synthetic oligonucleotide
  Antisense strand to SEQ ID NO: 534481
aacuuucugcuaaagggaa

SEQ ID NO: 534483 - RNA, 19 nt, Artificial Sequence
  Description of Artificial Sequence: Synthetic oligonucleotide
  Sense strand starting at position 1456 of SEQ ID NO: 318071
gacacaucgccgcgagaaa

SEQ ID NO: 534484 - RNA, 19 nt, Artificial Sequence
  Description of Artificial Sequence: Synthetic oligonucleotide
  Antisense strand to SEQ ID NO: 534483
uuucucgcggcgauguguc

SEQ ID NO: 534485 - RNA, 19 nt, Artificial Sequence
  Description of Artificial Sequence: Synthetic oligonucleotide
  Sense strand starting at position 1517 of SEQ ID NO: 318071
gcgcaagugcacuuuccaa

SEQ ID NO: 534486 - RNA, 19 nt, Artificial Sequence
  Description of Artificial Sequence: Synthetic oligonucleotide
  Antisense strand to SEQ ID NO: 534485
uuggaaagugcacuugcgc

SEQ ID NO: 534487 - RNA, 19 nt, Artificial Sequence
  Description of Artificial Sequence: Synthetic oligonucleotide
  Sense strand starting at position 2751 of SEQ ID NO: 318071
ucaagauaucaaggccacu

SEQ ID NO: 534488 - RNA, 19 nt, Artificial Sequence
  Description of Artificial Sequence: Synthetic oligonucleotide
  Antisense strand to SEQ ID NO: 534487
aguggccuugauaucuuga

SEQ ID NO: 534489 - RNA, 19 nt, Artificial Sequence
  Description of Artificial Sequence: Synthetic oligonucleotide
  Sense strand starting at position 2984 of SEQ ID NO: 318071
gacacaugccacugcugau

SEQ ID NO: 534490 - RNA, 19 nt, Artificial Sequence
  Description of Artificial Sequence: Synthetic oligonucleotide
  Antisense strand to SEQ ID NO: 534489
aucagcaguggcauguguc

SEQ ID NO: 534491 - RNA, 19 nt, Artificial Sequence
  Description of Artificial Sequence: Synthetic oligonucleotide
  Sense strand starting at position 3129 of SEQ ID NO: 318071
cgugcauccaagucauugu

SEQ ID NO: 534492 - RNA, 19 nt, Artificial Sequence
  Description of Artificial Sequence: Synthetic oligonucleotide
  Antisense strand to SEQ ID NO: 534491
acaaugacuuggaugcacg

SEQ ID NO: 534493 - RNA, 19 nt, Artificial Sequence
  Description of Artificial Sequence: Synthetic oligonucleotide
  Sense strand starting at position 3132 of SEQ ID NO: 318071
gcauccaagucauugucau

SEQ ID NO: 534494 - RNA, 19 nt, Artificial Sequence
  Description of Artificial Sequence: Synthetic oligonucleotide
  Antisense strand to SEQ ID NO: 534493
augacaaugacuuggaugc

SEQ ID NO: 534495 - RNA, 19 nt, Artificial Sequence
  Description of Artificial Sequence: Synthetic oligonucleotide
  Sense strand starting at position 3138 of SEQ ID NO: 318071
aagucauugucaucuugga

SEQ ID NO: 534496 - RNA, 19 nt, Artificial Sequence
  Description of Artificial Sequence: Synthetic oligonucleotide
  Antisense strand to SEQ ID NO: 534495
uccaagaugacaaugacuu

SEQ ID NO: 534497 - RNA, 19 nt, Artificial Sequence
  Description of Artificial Sequence: Synthetic oligonucleotide
  Sense strand starting at position 3142 of SEQ ID NO: 318071
cauugucaucuuggaauga

SEQ ID NO: 534498 - RNA, 19 nt, Artificial Sequence
  Description of Artificial Sequence: Synthetic oligonucleotide
  Antisense strand to SEQ ID NO: 534497
ucauuccaagaugacaaug

SEQ ID NO: 534499 - RNA, 19 nt, Artificial Sequence
  Description of Artificial Sequence: Synthetic oligonucleotide
  Sense strand starting at position 3146 of SEQ ID NO: 318071
gucaucuuggaaugacaag

SEQ ID NO: 534500 - RNA, 19 nt, Artificial Sequence
  Description of Artificial Sequence: Synthetic oligonucleotide
  Antisense strand to SEQ ID NO: 534499
cuugucauuccaagaugac

SEQ ID NO: 534501 - RNA, 19 nt, Artificial Sequence
  Description of Artificial Sequence: Synthetic oligonucleotide
  Sense strand starting at position 3170 of SEQ ID NO: 318071
ccgaacuggucuucuggau

SEQ ID NO: 534502 - RNA, 19 nt, Artificial Sequence
  Description of Artificial Sequence: Synthetic oligonucleotide
  Antisense strand to SEQ ID NO: 534501
auccagaagaccaguucgg

SEQ ID NO: 534503 - RNA, 19 nt, Artificial Sequence
  Description of Artificial Sequence: Synthetic oligonucleotide
  Sense strand starting at position 3247 of SEQ ID NO: 318071
auuggaucgugccuuucua

SEQ ID NO: 534504 - RNA, 19 nt, Artificial Sequence
  Description of Artificial Sequence: Synthetic oligonucleotide
  Antisense strand to SEQ ID NO: 534503
uagaaaggcacgauccaau

SEQ ID NO: 534505 - RNA, 19 nt, Artificial Sequence
  Description of Artificial Sequence: Synthetic oligonucleotide
  Sense strand starting at position 3315 of SEQ ID NO: 318071
auccaaguuccuugucacu

SEQ ID NO: 534506 - RNA, 19 nt, Artificial Sequence
  Description of Artificial Sequence: Synthetic oligonucleotide
  Antisense strand to SEQ ID NO: 534505
agugacaaggaacuuggau

SEQ ID NO: 534507 - RNA, 19 nt, Artificial Sequence
  Description of Artificial Sequence: Synthetic oligonucleotide
  Sense strand starting at position 3320 of SEQ ID NO: 318071
aguuccuugucacugcuaa

SEQ ID NO: 534508 - RNA, 19 nt, Artificial Sequence
  Description of Artificial Sequence: Synthetic oligonucleotide
  Antisense strand to SEQ ID NO: 534507
uuagcagugacaaggaacu

SEQ ID NO: 534509 - RNA, 19 nt, Artificial Sequence
  Description of Artificial Sequence: Synthetic oligonucleotide
  Sense strand starting at position 3488 of SEQ ID NO: 318071
guuguuucuucugccagga

SEQ ID NO: 534510 - RNA, 19 nt, Artificial Sequence
  Description of Artificial Sequence: Synthetic oligonucleotide
  Antisense strand to SEQ ID NO: 534509
uccuggcagaagaaacaac

SEQ ID NO: 534511 - RNA, 19 nt, Artificial Sequence
  Description of Artificial Sequence: Synthetic oligonucleotide
  Sense strand starting at position 3502 of SEQ ID NO: 318071
caggaaagcucuccucugu

SEQ ID NO: 534512 - RNA, 19 nt, Artificial Sequence
  Description of Artificial Sequence: Synthetic oligonucleotide
  Antisense strand to SEQ ID NO: 534511
acagaggagagcuuuccug

SEQ ID NO: 534513 - RNA, 19 nt, Artificial Sequence
  Description of Artificial Sequence: Synthetic oligonucleotide
  Sense strand starting at position 3522 of SEQ ID NO: 318071
cccauagcugcuugagcau

SEQ ID NO: 534514 - RNA, 19 nt, Artificial Sequence
  Description of Artificial Sequence: Synthetic oligonucleotide
  Antisense strand to SEQ ID NO: 534513
augcucaagcagcuauggg

SEQ ID NO: 534515 - RNA, 19 nt, Artificial Sequence
  Description of Artificial Sequence: Synthetic oligonucleotide
  Sense strand starting at position 3537 of SEQ ID NO: 318071
gcaucaccucuccagugaa

SEQ ID NO: 534516 - RNA, 19 nt, Artificial Sequence
  Description of Artificial Sequence: Synthetic oligonucleotide
  Antisense strand to SEQ ID NO: 534515
uucacuggagaggugaugc

SEQ ID NO: 534517 - RNA, 19 nt, Artificial Sequence
  Description of Artificial Sequence: Synthetic oligonucleotide
  Sense strand starting at position 3581 of SEQ ID NO: 318071
ggaaucaccuucuugccua

SEQ ID NO: 534518 - RNA, 19 nt, Artificial Sequence
  Description of Artificial Sequence: Synthetic oligonucleotide
  Antisense strand to SEQ ID NO: 534517
uaggcaagaaggugauucc

SEQ ID NO: 534519 - RNA, 19 nt, Artificial Sequence
  Description of Artificial Sequence: Synthetic oligonucleotide
  Sense strand starting at position 3588 of SEQ ID NO: 318071
ccuucuugccuauaguguu

SEQ ID NO: 534520 - RNA, 19 nt, Artificial Sequence
  Description of Artificial Sequence: Synthetic oligonucleotide
  Antisense strand to SEQ ID NO: 534519
aacacuauaggcaagaagg

SEQ ID NO: 534521 - RNA, 19 nt, Artificial Sequence
  Description of Artificial Sequence: Synthetic oligonucleotide
  Sense strand starting at position 1989 of SEQ ID NO: 318072
aggcaaucuccugagcucu

SEQ ID NO: 534522 - RNA, 19 nt, Artificial Sequence
  Description of Artificial Sequence: Synthetic oligonucleotide
  Antisense strand to SEQ ID NO: 534521
agagcucaggagauugccu

SEQ ID NO: 534523 - RNA, 19 nt, Artificial Sequence
  Description of Artificial Sequence: Synthetic oligonucleotide
  Sense strand starting at position 1991 of SEQ ID NO: 318072
gcaaucuccugagcucuga

SEQ ID NO: 534524 - RNA, 19 nt, Artificial Sequence
  Description of Artificial Sequence: Synthetic oligonucleotide
  Antisense strand to SEQ ID NO: 534523
ucagagcucaggagauugc

SEQ ID NO: 534525 - RNA, 19 nt, Artificial Sequence
  Description of Artificial Sequence: Synthetic oligonucleotide
  Sense strand starting at position 2004 of SEQ ID NO: 318072
cucugagugugugcagaaa

SEQ ID NO: 534526 - RNA, 19 nt, Artificial Sequence
  Description of Artificial Sequence: Synthetic oligonucleotide
  Antisense strand to SEQ ID NO: 534525
uuucugcacacacucagag

SEQ ID NO: 534527 - RNA, 19 nt, Artificial Sequence
  Description of Artificial Sequence: Synthetic oligonucleotide
  Sense strand starting at position 2108 of SEQ ID NO: 318072
cgguuugcaaccugaauau

SEQ ID NO: 534528 - RNA, 19 nt, Artificial Sequence
  Description of Artificial Sequence: Synthetic oligonucleotide
  Antisense strand to SEQ ID NO: 534527
auauucagguugcaaaccg

SEQ ID NO: 534529 - RNA, 19 nt, Artificial Sequence
  Description of Artificial Sequence: Synthetic oligonucleotide
  Sense strand starting at position 2117 of SEQ ID NO: 318072
accugaauaugagaagcau

SEQ ID NO: 534530 - RNA, 19 nt, Artificial Sequence
  Description of Artificial Sequence: Synthetic oligonucleotide
  Antisense strand to SEQ ID NO: 534529
augcuucucauauucaggu

SEQ ID NO: 534531 - RNA, 19 nt, Artificial Sequence
  Description of Artificial Sequence: Synthetic oligonucleotide
  Sense strand starting at position 2407 of SEQ ID NO: 318072
uuggcaucaggcugacauu

SEQ ID NO: 534532 - RNA, 19 nt, Artificial Sequence
  Description of Artificial Sequence: Synthetic oligonucleotide
  Antisense strand to SEQ ID NO: 534531
aaugucagccugaugccaa

SEQ ID NO: 534533 - RNA, 19 nt, Artificial Sequence
  Description of Artificial Sequence: Synthetic oligonucleotide
  Sense strand starting at position 2410 of SEQ ID NO: 318072
gcaucaggcugacauuuga

SEQ ID NO: 534534 - RNA, 19 nt, Artificial Sequence
  Description of Artificial Sequence: Synthetic oligonucleotide
  Antisense strand to SEQ ID NO: 534533
ucaaaugucagccugaugc

SEQ ID NO: 534535 - RNA, 19 nt, Artificial Sequence
  Description of Artificial Sequence: Synthetic oligonucleotide
  Sense strand starting at position 2425 of SEQ ID NO: 318072
uugaguucauguuuggaug

SEQ ID NO: 534536 - RNA, 19 nt, Artificial Sequence
  Description of Artificial Sequence: Synthetic oligonucleotide
  Antisense strand to SEQ ID NO: 534535
cauccaaacaugaacucaa

SEQ ID NO: 534537 - RNA, 19 nt, Artificial Sequence
  Description of Artificial Sequence: Synthetic oligonucleotide
  Sense strand starting at position 2426 of SEQ ID NO: 318072
ugaguucauguuuggauga

SEQ ID NO: 534538 - RNA, 19 nt, Artificial Sequence
  Description of Artificial Sequence: Synthetic oligonucleotide
  Antisense strand to SEQ ID NO: 534537
ucauccaaacaugaacuca

SEQ ID NO: 534539 - RNA, 19 nt, Artificial Sequence
  Description of Artificial Sequence: Synthetic oligonucleotide
  Sense strand starting at position 2464 of SEQ ID NO: 318072
ggaccagccucucuuauaa

SEQ ID NO: 534540 - RNA, 19 nt, Artificial Sequence
  Description of Artificial Sequence: Synthetic oligonucleotide
  Antisense strand to SEQ ID NO: 534539
uuauaagagaggcuggucc

SEQ ID NO: 534541 - RNA, 19 nt, Artificial Sequence
  Description of Artificial Sequence: Synthetic oligonucleotide
  Sense strand starting at position 2619 of SEQ ID NO: 318072
cugugaguccuuucuucgu

SEQ ID NO: 534542 - RNA, 19 nt, Artificial Sequence
  Description of Artificial Sequence: Synthetic oligonucleotide
  Antisense strand to SEQ ID NO: 534541
acgaagaaaggacucacag

SEQ ID NO: 534543 - RNA, 19 nt, Artificial Sequence
  Description of Artificial Sequence: Synthetic oligonucleotide
  Sense strand starting at position 2622 of SEQ ID NO: 318072
ugaguccuuucuucguaga

SEQ ID NO: 534544 - RNA, 19 nt, Artificial Sequence
  Description of Artificial Sequence: Synthetic oligonucleotide
  Antisense strand to SEQ ID NO: 534543
ucuacgaagaaaggacuca

SEQ ID NO: 534545 - RNA, 19 nt, Artificial Sequence
  Description of Artificial Sequence: Synthetic oligonucleotide
  Sense strand starting at position 2661 of SEQ ID NO: 318072
ucugcuguauuccuauuua

SEQ ID NO: 534546 - RNA, 19 nt, Artificial Sequence
  Description of Artificial Sequence: Synthetic oligonucleotide
  Antisense strand to SEQ ID NO: 534545
uaaauaggaauacagcaga

SEQ ID NO: 534547 - RNA, 19 nt, Artificial Sequence
  Description of Artificial Sequence: Synthetic oligonucleotide
  Sense strand starting at position 2693 of SEQ ID NO: 318072
guaaguucuggucaccuuu

SEQ ID NO: 534548 - RNA, 19 nt, Artificial Sequence
  Description of Artificial Sequence: Synthetic oligonucleotide
  Antisense strand to SEQ ID NO: 534547
aaaggugaccagaacuuac

SEQ ID NO: 534549 - RNA, 19 nt, Artificial Sequence
  Description of Artificial Sequence: Synthetic oligonucleotide
  Sense strand starting at position 2775 of SEQ ID NO: 318072
gcagaaggauugcccuaga

SEQ ID NO: 534550 - RNA, 19 nt, Artificial Sequence
  Description of Artificial Sequence: Synthetic oligonucleotide
  Antisense strand to SEQ ID NO: 534549
ucuagggcaauccuucugc

SEQ ID NO: 534551 - RNA, 19 nt, Artificial Sequence
  Description of Artificial Sequence: Synthetic oligonucleotide
  Sense strand starting at position 2829 of SEQ ID NO: 318072
ggguucucuuugccuguga

SEQ ID NO: 534552 - RNA, 19 nt, Artificial Sequence
  Description of Artificial Sequence: Synthetic oligonucleotide
  Antisense strand to SEQ ID NO: 534551
ucacaggcaaagagaaccc

SEQ ID NO: 534553 - RNA, 19 nt, Artificial Sequence
  Description of Artificial Sequence: Synthetic oligonucleotide
  Sense strand starting at position 2833 of SEQ ID NO: 318072
ucucuuugccugugaggaa

SEQ ID NO: 534554 - RNA, 19 nt, Artificial Sequence
  Description of Artificial Sequence: Synthetic oligonucleotide
  Antisense strand to SEQ ID NO: 534553
uuccucacaggcaaagaga

SEQ ID NO: 534555 - RNA, 19 nt, Artificial Sequence
  Description of Artificial Sequence: Synthetic oligonucleotide
  Sense strand starting at position 2837 of SEQ ID NO: 318072
uuugccugugaggaagaau

SEQ ID NO: 534556 - RNA, 19 nt, Artificial Sequence
  Description of Artificial Sequence: Synthetic oligonucleotide
  Antisense strand to SEQ ID NO: 534555
auucuuccucacaggcaaa

SEQ ID NO: 534557 - RNA, 19 nt, Artificial Sequence
  Description of Artificial Sequence: Synthetic oligonucleotide
  Sense strand starting at position 2873 of SEQ ID NO: 318072
cgucauugucaccaucaua

SEQ ID NO: 534558 - RNA, 19 nt, Artificial Sequence
  Description of Artificial Sequence: Synthetic oligonucleotide
  Antisense strand to SEQ ID NO: 534557
uaugauggugacaaugacg

SEQ ID NO: 534559 - RNA, 19 nt, Artificial Sequence
  Description of Artificial Sequence: Synthetic oligonucleotide
  Sense strand starting at position 2938 of SEQ ID NO: 318072
ugaugacaggcuuauucca

SEQ ID NO: 534560 - RNA, 19 nt, Artificial Sequence
  Description of Artificial Sequence: Synthetic oligonucleotide
  Antisense strand to SEQ ID NO: 534559
uggaauaagccugucauca

SEQ ID NO: 534561 - RNA, 19 nt, Artificial Sequence
  Description of Artificial Sequence: Synthetic oligonucleotide
  Sense strand starting at position 2946 of SEQ ID NO: 318072
ggcuuauuccaguaagcca

SEQ ID NO: 534562 - RNA, 19 nt, Artificial Sequence
  Description of Artificial Sequence: Synthetic oligonucleotide
  Antisense strand to SEQ ID NO: 534561
uggcuuacuggaauaagcc

SEQ ID NO: 534563 - RNA, 19 nt, Artificial Sequence
  Description of Artificial Sequence: Synthetic oligonucleotide
  Sense strand starting at position 2960 of SEQ ID NO: 318072
agccaaauaucccugaggu

SEQ ID NO: 534564 - RNA, 19 nt, Artificial Sequence
  Description of Artificial Sequence: Synthetic oligonucleotide
  Antisense strand to SEQ ID NO: 534563
accucagggauauuuggcu

SEQ ID NO: 534565 - RNA, 19 nt, Artificial Sequence
  Description of Artificial Sequence: Synthetic oligonucleotide
  Sense strand starting at position 2962 of SEQ ID NO: 318072
ccaaauaucccugaggugu

SEQ ID NO: 534566 - RNA, 19 nt, Artificial Sequence
  Description of Artificial Sequence: Synthetic oligonucleotide
  Antisense strand to SEQ ID NO: 534565
acaccucagggauauuugg

SEQ ID NO: 534567 - RNA, 19 nt, Artificial Sequence
  Description of Artificial Sequence: Synthetic oligonucleotide
  Sense strand starting at position 3197 of SEQ ID NO: 318072
cccucuaggucacuuagau

SEQ ID NO: 534568 - RNA, 19 nt, Artificial Sequence
  Description of Artificial Sequence: Synthetic oligonucleotide
  Antisense strand to SEQ ID NO: 534567
aucuaagugaccuagaggg

SEQ ID NO: 534569 - RNA, 19 nt, Artificial Sequence
  Description of Artificial Sequence: Synthetic oligonucleotide
  Sense strand starting at position 3254 of SEQ ID NO: 318072
accugcucucaugaggaua

SEQ ID NO: 534570 - RNA, 19 nt, Artificial Sequence
  Description of Artificial Sequence: Synthetic oligonucleotide
  Antisense strand to SEQ ID NO: 534569
uauccucaugagagcaggu

SEQ ID NO: 534571 - RNA, 19 nt, Artificial Sequence
  Description of Artificial Sequence: Synthetic oligonucleotide
  Sense strand starting at position 3280 of SEQ ID NO: 318072
aaggauguccguuggcaga

SEQ ID NO: 534572 - RNA, 19 nt, Artificial Sequence
  Description of Artificial Sequence: Synthetic oligonucleotide
  Antisense strand to SEQ ID NO: 534571
ucugccaacggacauccuu

SEQ ID NO: 534573 - RNA, 19 nt, Artificial Sequence
  Description of Artificial Sequence: Synthetic oligonucleotide
  Sense strand starting at position 3383 of SEQ ID NO: 318072
cuggauccuccugggcaaa

SEQ ID NO: 534574 - RNA, 19 nt, Artificial Sequence
  Description of Artificial Sequence: Synthetic oligonucleotide
  Antisense strand to SEQ ID NO: 534573
uuugcccaggaggauccag

SEQ ID NO: 534575 - RNA, 19 nt, Artificial Sequence
  Description of Artificial Sequence: Synthetic oligonucleotide
  Sense strand starting at position 3401 of SEQ ID NO: 318072
agcgauaccaugcauagua

SEQ ID NO: 534576 - RNA, 19 nt, Artificial Sequence
  Description of Artificial Sequence: Synthetic oligonucleotide
  Antisense strand to SEQ ID NO: 534575
uacuaugcaugguaucgcu

SEQ ID NO: 534577 - RNA, 19 nt, Artificial Sequence
  Description of Artificial Sequence: Synthetic oligonucleotide
  Sense strand starting at position 3403 of SEQ ID NO: 318072
cgauaccaugcauaguaaa

SEQ ID NO: 534578 - RNA, 19 nt, Artificial Sequence
  Description of Artificial Sequence: Synthetic oligonucleotide
  Antisense strand to SEQ ID NO: 534577
uuuacuaugcaugguaucg

SEQ ID NO: 534579 - RNA, 19 nt, Artificial Sequence
  Description of Artificial Sequence: Synthetic oligonucleotide
  Sense strand starting at position 3566 of SEQ ID NO: 318072
uccuuuggccuguacuuaa

SEQ ID NO: 534580 - RNA, 19 nt, Artificial Sequence
  Description of Artificial Sequence: Synthetic oligonucleotide
  Antisense strand to SEQ ID NO: 534579
uuaaguacaggccaaagga

SEQ ID NO: 534581 - RNA, 19 nt, Artificial Sequence
  Description of Artificial Sequence: Synthetic oligonucleotide
  Sense strand starting at position 3587 of SEQ ID NO: 318072
cccguucuuugaucagacu

SEQ ID NO: 534582 - RNA, 19 nt, Artificial Sequence
  Description of Artificial Sequence: Synthetic oligonucleotide
  Antisense strand to SEQ ID NO: 534581
agucugaucaaagaacggg

SEQ ID NO: 534583 - RNA, 19 nt, Artificial Sequence
  Description of Artificial Sequence: Synthetic oligonucleotide
  Sense strand starting at position 3588 of SEQ ID NO: 318072
ccguucuuugaucagacuu

SEQ ID NO: 534584 - RNA, 19 nt, Artificial Sequence
  Description of Artificial Sequence: Synthetic oligonucleotide
  Antisense strand to SEQ ID NO: 534583
aagucugaucaaagaacgg

SEQ ID NO: 534585 - RNA, 19 nt, Artificial Sequence
  Description of Artificial Sequence: Synthetic oligonucleotide
  Sense strand starting at position 3641 of SEQ ID NO: 318072
uccagcaucugccuguuaa

SEQ ID NO: 534586 - RNA, 19 nt, Artificial Sequence
  Description of Artificial Sequence: Synthetic oligonucleotide
  Antisense strand to SEQ ID NO: 534585
uuaacaggcagaugcugga

SEQ ID NO: 534587 - RNA, 19 nt, Artificial Sequence
  Description of Artificial Sequence: Synthetic oligonucleotide
  Sense strand starting at position 3642 of SEQ ID NO: 318072
ccagcaucugccuguuaau

SEQ ID NO: 534588 - RNA, 19 nt, Artificial Sequence
  Description of Artificial Sequence: Synthetic oligonucleotide
  Antisense strand to SEQ ID NO: 534587
auuaacaggcagaugcugg

SEQ ID NO: 534589 - RNA, 19 nt, Artificial Sequence
  Description of Artificial Sequence: Synthetic oligonucleotide
  Sense strand starting at position 3749 of SEQ ID NO: 318072
gugucacucuuucuuguau

SEQ ID NO: 534590 - RNA, 19 nt, Artificial Sequence
  Description of Artificial Sequence: Synthetic oligonucleotide
  Antisense strand to SEQ ID NO: 534589
auacaagaaagagugacac

SEQ ID NO: 534591 - RNA, 19 nt, Artificial Sequence
  Description of Artificial Sequence: Synthetic oligonucleotide
  Sense strand starting at position 3811 of SEQ ID NO: 318072
cuccuugaguccuccuaga

SEQ ID NO: 534592 - RNA, 19 nt, Artificial Sequence
  Description of Artificial Sequence: Synthetic oligonucleotide
  Antisense strand to SEQ ID NO: 534591
ucuaggaggacucaaggag

SEQ ID NO: 534593 - RNA, 19 nt, Artificial Sequence
  Description of Artificial Sequence: Synthetic oligonucleotide
  Sense strand starting at position 3842 of SEQ ID NO: 318072
ggaguaaucucucugcacu

SEQ ID NO: 534594 - RNA, 19 nt, Artificial Sequence
  Description of Artificial Sequence: Synthetic oligonucleotide
  Antisense strand to SEQ ID NO: 534593
agugcagagagauuacucc

SEQ ID NO: 534595 - RNA, 19 nt, Artificial Sequence
  Description of Artificial Sequence: Synthetic oligonucleotide
  Sense strand starting at position 3856 of SEQ ID NO: 318072
gcacuuuguaccgaguuag

SEQ ID NO: 534596 - RNA, 19 nt, Artificial Sequence
  Description of Artificial Sequence: Synthetic oligonucleotide
  Antisense strand to SEQ ID NO: 534595
cuaacucgguacaaagugc

SEQ ID NO: 534597 - RNA, 19 nt, Artificial Sequence
  Description of Artificial Sequence: Synthetic oligonucleotide
  Sense strand starting at position 3908 of SEQ ID NO: 318072
cuggcucugcggcauuuaa

SEQ ID NO: 534598 - RNA, 19 nt, Artificial Sequence
  Description of Artificial Sequence: Synthetic oligonucleotide
  Antisense strand to SEQ ID NO: 534597
uuaaaugccgcagagccag

SEQ ID NO: 534599 - RNA, 19 nt, Artificial Sequence
  Description of Artificial Sequence: Synthetic oligonucleotide
  Sense strand starting at position 3915 of SEQ ID NO: 318072
ugcggcauuuaauucugaa

SEQ ID NO: 534600 - RNA, 19 nt, Artificial Sequence
  Description of Artificial Sequence: Synthetic oligonucleotide
  Antisense strand to SEQ ID NO: 534599
uucagaauuaaaugccgca

SEQ ID NO: 534601 - RNA, 19 nt, Artificial Sequence
  Description of Artificial Sequence: Synthetic oligonucleotide
  Sense strand starting at position 141 of SEQ ID NO: 318073
aucaacucugaauggguaa

SEQ ID NO: 534602 - RNA, 19 nt, Artificial Sequence
  Description of Artificial Sequence: Synthetic oligonucleotide
  Antisense strand to SEQ ID NO: 534601
uuacccauucagaguugau

SEQ ID NO: 534603 - RNA, 19 nt, Artificial Sequence
  Description of Artificial Sequence: Synthetic oligonucleotide
  Sense strand starting at position 201 of SEQ ID NO: 318073
auaacugucuagucacaac

SEQ ID NO: 534604 - RNA, 19 nt, Artificial Sequence
  Description of Artificial Sequence: Synthetic oligonucleotide
  Antisense strand to SEQ ID NO: 534603
guugugacuagacaguuau

SEQ ID NO: 534605 - RNA, 19 nt, Artificial Sequence
  Description of Artificial Sequence: Synthetic oligonucleotide
  Sense strand starting at position 246 of SEQ ID NO: 318073
ggguuacaauuacaauuua

SEQ ID NO: 534606 - RNA, 19 nt, Artificial Sequence
  Description of Artificial Sequence: Synthetic oligonucleotide
  Antisense strand to SEQ ID NO: 534605
uaaauuguaauuguaaccc

SEQ ID NO: 534607 - RNA, 19 nt, Artificial Sequence
  Description of Artificial Sequence: Synthetic oligonucleotide
  Sense strand starting at position 393 of SEQ ID NO: 318073
gcauaccauguguaaguau

SEQ ID NO: 534608 - RNA, 19 nt, Artificial Sequence
  Description of Artificial Sequence: Synthetic oligonucleotide
  Antisense strand to SEQ ID NO: 534607
auacuuacacaugguaugc

SEQ ID NO: 534609 - RNA, 19 nt, Artificial Sequence
  Description of Artificial Sequence: Synthetic oligonucleotide
  Sense strand starting at position 433 of SEQ ID NO: 318073
agucccuauccuugaauga

SEQ ID NO: 534610 - RNA, 19 nt, Artificial Sequence
  Description of Artificial Sequence: Synthetic oligonucleotide
  Antisense strand to SEQ ID NO: 534609
ucauucaaggauagggacu

SEQ ID NO: 534611 - RNA, 19 nt, Artificial Sequence
  Description of Artificial Sequence: Synthetic oligonucleotide
  Sense strand starting at position 434 of SEQ ID NO: 318073
gucccuauccuugaaugau

SEQ ID NO: 534612 - RNA, 19 nt, Artificial Sequence
  Description of Artificial Sequence: Synthetic oligonucleotide
  Antisense strand to SEQ ID NO: 534611
aucauucaaggauagggac

SEQ ID NO: 534613 - RNA, 19 nt, Artificial Sequence
  Description of Artificial Sequence: Synthetic oligonucleotide
  Sense strand starting at position 474 of SEQ ID NO: 318073
aggaaagucuccuuagcga

SEQ ID NO: 534614 - RNA, 19 nt, Artificial Sequence
  Description of Artificial Sequence: Synthetic oligonucleotide
  Antisense strand to SEQ ID NO: 534613
ucgcuaaggagacuuuccu

SEQ ID NO: 534615 - RNA, 19 nt, Artificial Sequence
  Description of Artificial Sequence: Synthetic oligonucleotide
  Sense strand starting at position 500 of SEQ ID NO: 318073
aacgucuuagaauguaauc

SEQ ID NO: 534616 - RNA, 19 nt, Artificial Sequence
  Description of Artificial Sequence: Synthetic oligonucleotide
  Antisense strand to SEQ ID NO: 534615
gauuacauucuaagacguu

SEQ ID NO: 534617 - RNA, 19 nt, Artificial Sequence
  Description of Artificial Sequence: Synthetic oligonucleotide
  Sense strand starting at position 509 of SEQ ID NO: 318073
gaauguaaucccuggaccu

SEQ ID NO: 534618 - RNA, 19 nt, Artificial Sequence
  Description of Artificial Sequence: Synthetic oligonucleotide
  Antisense strand to SEQ ID NO: 534617
agguccagggauuacauuc

SEQ ID NO: 534619 - RNA, 19 nt, Artificial Sequence
  Description of Artificial Sequence: Synthetic oligonucleotide
  Sense strand starting at position 520 of SEQ ID NO: 318073
cuggaccuccugcaugaaa

SEQ ID NO: 534620 - RNA, 19 nt, Artificial Sequence
  Description of Artificial Sequence: Synthetic oligonucleotide
  Antisense strand to SEQ ID NO: 534619
uuucaugcaggagguccag

SEQ ID NO: 534621 - RNA, 19 nt, Artificial Sequence
  Description of Artificial Sequence: Synthetic oligonucleotide
  Sense strand starting at position 685 of SEQ ID NO: 318073
accagacagcuauggguau

SEQ ID NO: 534622 - RNA, 19 nt, Artificial Sequence
  Description of Artificial Sequence: Synthetic oligonucleotide
  Antisense strand to SEQ ID NO: 534621
auacccauagcugucuggu

SEQ ID NO: 534623 - RNA, 19 nt, Artificial Sequence
  Description of Artificial Sequence: Synthetic oligonucleotide
  Sense strand starting at position 856 of SEQ ID NO: 318073
agggccuuuccagguauaa

SEQ ID NO: 534624 - RNA, 19 nt, Artificial Sequence
  Description of Artificial Sequence: Synthetic oligonucleotide
  Antisense strand to SEQ ID NO: 534623
uuauaccuggaaaggcccu

SEQ ID NO: 534625 - RNA, 19 nt, Artificial Sequence
  Description of Artificial Sequence: Synthetic oligonucleotide
  Sense strand starting at position 858 of SEQ ID NO: 318073
ggccuuuccagguauaagg

SEQ ID NO: 534626 - RNA, 19 nt, Artificial Sequence
  Description of Artificial Sequence: Synthetic oligonucleotide
  Antisense strand to SEQ ID NO: 534625
ccuuauaccuggaaaggcc

SEQ ID NO: 534627 - RNA, 19 nt, Artificial Sequence
  Description of Artificial Sequence: Synthetic oligonucleotide
  Sense strand starting at position 874 of SEQ ID NO: 318073
agguacuaccaguggagaa

SEQ ID NO: 534628 - RNA, 19 nt, Artificial Sequence
  Description of Artificial Sequence: Synthetic oligonucleotide
  Antisense strand to SEQ ID NO: 534627
uucuccacugguaguaccu

SEQ ID NO: 534629 - RNA, 19 nt, Artificial Sequence
  Description of Artificial Sequence: Synthetic oligonucleotide
  Sense strand starting at position 875 of SEQ ID NO: 318073
gguacuaccaguggagaau

SEQ ID NO: 534630 - RNA, 19 nt, Artificial Sequence
  Description of Artificial Sequence: Synthetic oligonucleotide
  Antisense strand to SEQ ID NO: 534629
auucuccacugguaguacc

SEQ ID NO: 534631 - RNA, 19 nt, Artificial Sequence
  Description of Artificial Sequence: Synthetic oligonucleotide
  Sense strand starting at position 886 of SEQ ID NO: 318073
uggagaaucaaaggugcau

SEQ ID NO: 534632 - RNA, 19 nt, Artificial Sequence
  Description of Artificial Sequence: Synthetic oligonucleotide
  Antisense strand to SEQ ID NO: 534631
augcaccuuugauucucca

SEQ ID NO: 534633 - RNA, 19 nt, Artificial Sequence
  Description of Artificial Sequence: Synthetic oligonucleotide
  Sense strand starting at position 901 of SEQ ID NO: 318073
gcauaaugucaagaucccu

SEQ ID NO: 534634 - RNA, 19 nt, Artificial Sequence
  Description of Artificial Sequence: Synthetic oligonucleotide
  Antisense strand to SEQ ID NO: 534633
agggaucuugacauuaugc

SEQ ID NO: 534635 - RNA, 19 nt, Artificial Sequence
  Description of Artificial Sequence: Synthetic oligonucleotide
  Sense strand starting at position 1122 of SEQ ID NO: 318073
ucuccaguuccucagaugu

SEQ ID NO: 534636 - RNA, 19 nt, Artificial Sequence
  Description of Artificial Sequence: Synthetic oligonucleotide
  Antisense strand to SEQ ID NO: 534635
acaucugaggaacuggaga

SEQ ID NO: 534637 - RNA, 19 nt, Artificial Sequence
  Description of Artificial Sequence: Synthetic oligonucleotide
  Sense strand starting at position 1132 of SEQ ID NO: 318073
cucagaugugcccauccua

SEQ ID NO: 534638 - RNA, 19 nt, Artificial Sequence
  Description of Artificial Sequence: Synthetic oligonucleotide
  Antisense strand to SEQ ID NO: 534637
uaggaugggcacaucugag

SEQ ID NO: 534639 - RNA, 19 nt, Artificial Sequence
  Description of Artificial Sequence: Synthetic oligonucleotide
  Sense strand starting at position 1231 of SEQ ID NO: 318073
ucgagaacagauugugacu

SEQ ID NO: 534640 - RNA, 19 nt, Artificial Sequence
  Description of Artificial Sequence: Synthetic oligonucleotide
  Antisense strand to SEQ ID NO: 534639
agucacaaucuguucucga

SEQ ID NO: 534641 - RNA, 19 nt, Artificial Sequence
  Description of Artificial Sequence: Synthetic oligonucleotide
  Sense strand starting at position 1236 of SEQ ID NO: 318073
aacagauugugacuugcua

SEQ ID NO: 534642 - RNA, 19 nt, Artificial Sequence
  Description of Artificial Sequence: Synthetic oligonucleotide
  Antisense strand to SEQ ID NO: 534641
uagcaagucacaaucuguu

SEQ ID NO: 534643 - RNA, 19 nt, Artificial Sequence
  Description of Artificial Sequence: Synthetic oligonucleotide
  Sense strand starting at position 1289 of SEQ ID NO: 318073
agacgcccucuuuaaagaa

SEQ ID NO: 534644 - RNA, 19 nt, Artificial Sequence
  Description of Artificial Sequence: Synthetic oligonucleotide
  Antisense strand to SEQ ID NO: 534643
uucuuuaaagagggcgucu

SEQ ID NO: 534645 - RNA, 19 nt, Artificial Sequence
  Description of Artificial Sequence: Synthetic oligonucleotide
  Sense strand starting at position 1307 of SEQ ID NO: 318073
agguccucucacgaacuua

SEQ ID NO: 534646 - RNA, 19 nt, Artificial Sequence
  Description of Artificial Sequence: Synthetic oligonucleotide
  Antisense strand to SEQ ID NO: 534645
uaaguucgugagaggaccu

SEQ ID NO: 534647 - RNA, 19 nt, Artificial Sequence
  Description of Artificial Sequence: Synthetic oligonucleotide
  Sense strand starting at position 1468 of SEQ ID NO: 318073
gaguuaauugcaggaagag

SEQ ID NO: 534648 - RNA, 19 nt, Artificial Sequence
  Description of Artificial Sequence: Synthetic oligonucleotide
  Antisense strand to SEQ ID NO: 534647
cucuuccugcaauuaacuc

SEQ ID NO: 534649 - RNA, 19 nt, Artificial Sequence
  Description of Artificial Sequence: Synthetic oligonucleotide
  Sense strand starting at position 1469 of SEQ ID NO: 318073
aguuaauugcaggaagagu

SEQ ID NO: 534650 - RNA, 19 nt, Artificial Sequence
  Description of Artificial Sequence: Synthetic oligonucleotide
  Antisense strand to SEQ ID NO: 534649
acucuuccugcaauuaacu

SEQ ID NO: 534651 - RNA, 19 nt, Artificial Sequence
  Description of Artificial Sequence: Synthetic oligonucleotide
  Sense strand starting at position 2037 of SEQ ID NO: 318073
guaguuaagagugacucca

SEQ ID NO: 534652 - RNA, 19 nt, Artificial Sequence
  Description of Artificial Sequence: Synthetic oligonucleotide
  Antisense strand to SEQ ID NO: 534651
uggagucacucuuaacuac

SEQ ID NO: 534653 - RNA, 19 nt, Artificial Sequence
  Description of Artificial Sequence: Synthetic oligonucleotide
  Sense strand starting at position 2119 of SEQ ID NO: 318073
acuuguguagaagaauagu

SEQ ID NO: 534654 - RNA, 19 nt, Artificial Sequence
  Description of Artificial Sequence: Synthetic oligonucleotide
  Antisense strand to SEQ ID NO: 534653
acuauucuucuacacaagu

SEQ ID NO: 534655 - RNA, 19 nt, Artificial Sequence
  Description of Artificial Sequence: Synthetic oligonucleotide
  Sense strand starting at position 2298 of SEQ ID NO: 318073
gguaaagauuugucagugu

SEQ ID NO: 534656 - RNA, 19 nt, Artificial Sequence
  Description of Artificial Sequence: Synthetic oligonucleotide
  Antisense strand to SEQ ID NO: 534655
acacugacaaaucuuuacc

SEQ ID NO: 534657 - RNA, 19 nt, Artificial Sequence
  Description of Artificial Sequence: Synthetic oligonucleotide
  Sense strand starting at position 2424 of SEQ ID NO: 318073
uuugacaaguguuccuaaa

SEQ ID NO: 534658 - RNA, 19 nt, Artificial Sequence
  Description of Artificial Sequence: Synthetic oligonucleotide
  Antisense strand to SEQ ID NO: 534657
uuuaggaacacuugucaaa

SEQ ID NO: 534659 - RNA, 19 nt, Artificial Sequence
  Description of Artificial Sequence: Synthetic oligonucleotide
  Sense strand starting at position 2426 of SEQ ID NO: 318073
ugacaaguguuccuaaaug

SEQ ID NO: 534660 - RNA, 19 nt, Artificial Sequence
  Description of Artificial Sequence: Synthetic oligonucleotide
  Antisense strand to SEQ ID NO: 534659
cauuuaggaacacuuguca

SEQ ID NO: 534661 - RNA, 19 nt, Artificial Sequence
  Description of Artificial Sequence: Synthetic oligonucleotide
  Sense strand starting at position 2456 of SEQ ID NO: 318073
guauguugagaacagucau

SEQ ID NO: 534662 - RNA, 19 nt, Artificial Sequence
  Description of Artificial Sequence: Synthetic oligonucleotide
  Antisense strand to SEQ ID NO: 534661
augacuguucucaacauac

SEQ ID NO: 534663 - RNA, 19 nt, Artificial Sequence
  Description of Artificial Sequence: Synthetic oligonucleotide
  Sense strand starting at position 2530 of SEQ ID NO: 318073
cucagagucagaugguaaa

SEQ ID NO: 534664 - RNA, 19 nt, Artificial Sequence
  Description of Artificial Sequence: Synthetic oligonucleotide
  Antisense strand to SEQ ID NO: 534663
uuuaccaucugacucugag

SEQ ID NO: 534665 - RNA, 19 nt, Artificial Sequence
  Description of Artificial Sequence: Synthetic oligonucleotide
  Sense strand starting at position 2568 of SEQ ID NO: 318073
cuagacuugugaccaaugu

SEQ ID NO: 534666 - RNA, 19 nt, Artificial Sequence
  Description of Artificial Sequence: Synthetic oligonucleotide
  Antisense strand to SEQ ID NO: 534665
acauuggucacaagucuag

SEQ ID NO: 534667 - RNA, 19 nt, Artificial Sequence
  Description of Artificial Sequence: Synthetic oligonucleotide
  Sense strand starting at position 2578 of SEQ ID NO: 318073
gaccaauguguguaaguga

SEQ ID NO: 534668 - RNA, 19 nt, Artificial Sequence
  Description of Artificial Sequence: Synthetic oligonucleotide
  Antisense strand to SEQ ID NO: 534667
ucacuuacacacauugguc

SEQ ID NO: 534669 - RNA, 19 nt, Artificial Sequence
  Description of Artificial Sequence: Synthetic oligonucleotide
  Sense strand starting at position 2583 of SEQ ID NO: 318073
auguguguaagugagcuaa

SEQ ID NO: 534670 - RNA, 19 nt, Artificial Sequence
  Description of Artificial Sequence: Synthetic oligonucleotide
  Antisense strand to SEQ ID NO: 534669
uuagcucacuuacacacau

SEQ ID NO: 534671 - RNA, 19 nt, Artificial Sequence
  Description of Artificial Sequence: Synthetic oligonucleotide
  Sense strand starting at position 2774 of SEQ ID NO: 318073
gcaagaucauguuuagaug

SEQ ID NO: 534672 - RNA, 19 nt, Artificial Sequence
  Description of Artificial Sequence: Synthetic oligonucleotide
  Antisense strand to SEQ ID NO: 534671
caucuaaacaugaucuugc

SEQ ID NO: 534673 - RNA, 19 nt, Artificial Sequence
  Description of Artificial Sequence: Synthetic oligonucleotide
  Sense strand starting at position 2775 of SEQ ID NO: 318073
caagaucauguuuagaugu

SEQ ID NO: 534674 - RNA, 19 nt, Artificial Sequence
  Description of Artificial Sequence: Synthetic oligonucleotide
  Antisense strand to SEQ ID NO: 534673
acaucuaaacaugaucuug

SEQ ID NO: 534675 - RNA, 19 nt, Artificial Sequence
  Description of Artificial Sequence: Synthetic oligonucleotide
  Sense strand starting at position 2878 of SEQ ID NO: 318073
gcccauuauggaggauuga

SEQ ID NO: 534676 - RNA, 19 nt, Artificial Sequence
  Description of Artificial Sequence: Synthetic oligonucleotide
  Antisense strand to SEQ ID NO: 534675
ucaauccuccauaaugggc

SEQ ID NO: 534677 - RNA, 19 nt, Artificial Sequence
  Description of Artificial Sequence: Synthetic oligonucleotide
  Sense strand starting at position 2887 of SEQ ID NO: 318073
ggaggauugauuggauguu

SEQ ID NO: 534678 - RNA, 19 nt, Artificial Sequence
  Description of Artificial Sequence: Synthetic oligonucleotide
  Antisense strand to SEQ ID NO: 534677
aacauccaaucaauccucc

SEQ ID NO: 534679 - RNA, 19 nt, Artificial Sequence
  Description of Artificial Sequence: Synthetic oligonucleotide
  Sense strand starting at position 3530 of SEQ ID NO: 318073
guuucuguuguuuaagaug

SEQ ID NO: 534680 - RNA, 19 nt, Artificial Sequence
  Description of Artificial Sequence: Synthetic oligonucleotide
  Antisense strand to SEQ ID NO: 534679
caucuuaaacaacagaaac

SEQ ID NO: 534681 - RNA, 19 nt, Artificial Sequence
  Description of Artificial Sequence: Synthetic oligonucleotide
  Sense strand starting at position 195 of SEQ ID NO: 318074
aucaacucugaauggguaa

SEQ ID NO: 534682 - RNA, 19 nt, Artificial Sequence
  Description of Artificial Sequence: Synthetic oligonucleotide
  Antisense strand to SEQ ID NO: 534681
uuacccauucagaguugau

SEQ ID NO: 534683 - RNA, 19 nt, Artificial Sequence
  Description of Artificial Sequence: Synthetic oligonucleotide
  Sense strand starting at position 255 of SEQ ID NO: 318074
auaacugucuagucacaac

SEQ ID NO: 534684 - RNA, 19 nt, Artificial Sequence
  Description of Artificial Sequence: Synthetic oligonucleotide
  Antisense strand to SEQ ID NO: 534683
guugugacuagacaguuau

SEQ ID NO: 534685 - RNA, 19 nt, Artificial Sequence
  Description of Artificial Sequence: Synthetic oligonucleotide
  Sense strand starting at position 300 of SEQ ID NO: 318074
ggguuacaauuacaauuua

SEQ ID NO: 534686 - RNA, 19 nt, Artificial Sequence
  Description of Artificial Sequence: Synthetic oligonucleotide
  Antisense strand to SEQ ID NO: 534685
uaaauuguaauuguaaccc

SEQ ID NO: 534687 - RNA, 19 nt, Artificial Sequence
  Description of Artificial Sequence: Synthetic oligonucleotide
  Sense strand starting at position 447 of SEQ ID NO: 318074
gcauaccauguguaaguau

SEQ ID NO: 534688 - RNA, 19 nt, Artificial Sequence
  Description of Artificial Sequence: Synthetic oligonucleotide
  Antisense strand to SEQ ID NO: 534687
auacuuacacaugguaugc

SEQ ID NO: 534689 - RNA, 19 nt, Artificial Sequence
  Description of Artificial Sequence: Synthetic oligonucleotide
  Sense strand starting at position 487 of SEQ ID NO: 318074
agucccuauccuugaauga

SEQ ID NO: 534690 - RNA, 19 nt, Artificial Sequence
  Description of Artificial Sequence: Synthetic oligonucleotide
  Antisense strand to SEQ ID NO: 534689
ucauucaaggauagggacu

SEQ ID NO: 534691 - RNA, 19 nt, Artificial Sequence
  Description of Artificial Sequence: Synthetic oligonucleotide
  Sense strand starting at position 488 of SEQ ID NO: 318074
gucccuauccuugaaugau

SEQ ID NO: 534692 - RNA, 19 nt, Artificial Sequence
  Description of Artificial Sequence: Synthetic oligonucleotide
  Antisense strand to SEQ ID NO: 534691
aucauucaaggauagggac

SEQ ID NO: 534693 - RNA, 19 nt, Artificial Sequence
  Description of Artificial Sequence: Synthetic oligonucleotide
  Sense strand starting at position 528 of SEQ ID NO: 318074
aggaaagucuccuuagcga

SEQ ID NO: 534694 - RNA, 19 nt, Artificial Sequence
  Description of Artificial Sequence: Synthetic oligonucleotide
  Antisense strand to SEQ ID NO: 534693
ucgcuaaggagacuuuccu

SEQ ID NO: 534695 - RNA, 19 nt, Artificial Sequence
  Description of Artificial Sequence: Synthetic oligonucleotide
  Sense strand starting at position 554 of SEQ ID NO: 318074
aacgucuuagaauguaauc

SEQ ID NO: 534696 - RNA, 19 nt, Artificial Sequence
  Description of Artificial Sequence: Synthetic oligonucleotide
  Antisense strand to SEQ ID NO: 534695
gauuacauucuaagacguu

SEQ ID NO: 534697 - RNA, 19 nt, Artificial Sequence
  Description of Artificial Sequence: Synthetic oligonucleotide
  Sense strand starting at position 563 of SEQ ID NO: 318074
gaauguaaucccuggaccu

SEQ ID NO: 534698 - RNA, 19 nt, Artificial Sequence
  Description of Artificial Sequence: Synthetic oligonucleotide
  Antisense strand to SEQ ID NO: 534697
agguccagggauuacauuc

SEQ ID NO: 534699 - RNA, 19 nt, Artificial Sequence
  Description of Artificial Sequence: Synthetic oligonucleotide
  Sense strand starting at position 574 of SEQ ID NO: 318074
cuggaccuccugcaugaaa

SEQ ID NO: 534700 - RNA, 19 nt, Artificial Sequence
  Description of Artificial Sequence: Synthetic oligonucleotide
  Antisense strand to SEQ ID NO: 534699
uuucaugcaggagguccag

SEQ ID NO: 534701 - RNA, 19 nt, Artificial Sequence
  Description of Artificial Sequence: Synthetic oligonucleotide
  Sense strand starting at position 739 of SEQ ID NO: 318074
accagacagcuauggguau

SEQ ID NO: 534702 - RNA, 19 nt, Artificial Sequence
  Description of Artificial Sequence: Synthetic oligonucleotide
  Antisense strand to SEQ ID NO: 534701
auacccauagcugucuggu

SEQ ID NO: 534703 - RNA, 19 nt, Artificial Sequence
  Description of Artificial Sequence: Synthetic oligonucleotide
  Sense strand starting at position 910 of SEQ ID NO: 318074
agggccuuuccagguauaa

SEQ ID NO: 534704 - RNA, 19 nt, Artificial Sequence
  Description of Artificial Sequence: Synthetic oligonucleotide
  Antisense strand to SEQ ID NO: 534703
uuauaccuggaaaggcccu

SEQ ID NO: 534705 - RNA, 19 nt, Artificial Sequence
  Description of Artificial Sequence: Synthetic oligonucleotide
  Sense strand starting at position 912 of SEQ ID NO: 318074
ggccuuuccagguauaagg

SEQ ID NO: 534706 - RNA, 19 nt, Artificial Sequence
  Description of Artificial Sequence: Synthetic oligonucleotide
  Antisense strand to SEQ ID NO: 534705
ccuuauaccuggaaaggcc

SEQ ID NO: 534707 - RNA, 19 nt, Artificial Sequence
  Description of Artificial Sequence: Synthetic oligonucleotide
  Sense strand starting at position 928 of SEQ ID NO: 318074
agguacuaccaguggagaa

SEQ ID NO: 534708 - RNA, 19 nt, Artificial Sequence
  Description of Artificial Sequence: Synthetic oligonucleotide
  Antisense strand to SEQ ID NO: 534707
uucuccacugguaguaccu

SEQ ID NO: 534709 - RNA, 19 nt, Artificial Sequence
  Description of Artificial Sequence: Synthetic oligonucleotide
  Sense strand starting at position 929 of SEQ ID NO: 318074
gguacuaccaguggagaau

SEQ ID NO: 534710 - RNA, 19 nt, Artificial Sequence
  Description of Artificial Sequence: Synthetic oligonucleotide
  Antisense strand to SEQ ID NO: 534709
auucuccacugguaguacc

SEQ ID NO: 534711 - RNA, 19 nt, Artificial Sequence
  Description of Artificial Sequence: Synthetic oligonucleotide
  Sense strand starting at position 940 of SEQ ID NO: 318074
uggagaaucaaaggugcau

SEQ ID NO: 534712 - RNA, 19 nt, Artificial Sequence
  Description of Artificial Sequence: Synthetic oligonucleotide
  Antisense strand to SEQ ID NO: 534711
augcaccuuugauucucca

SEQ ID NO: 534713 - RNA, 19 nt, Artificial Sequence
  Description of Artificial Sequence: Synthetic oligonucleotide
  Sense strand starting at position 955 of SEQ ID NO: 318074
gcauaaugucaagaucccu

SEQ ID NO: 534714 - RNA, 19 nt, Artificial Sequence
  Description of Artificial Sequence: Synthetic oligonucleotide
  Antisense strand to SEQ ID NO: 534713
agggaucuugacauuaugc

SEQ ID NO: 534715 - RNA, 19 nt, Artificial Sequence
  Description of Artificial Sequence: Synthetic oligonucleotide
  Sense strand starting at position 1176 of SEQ ID NO: 318074
ucuccaguuccucagaugu

SEQ ID NO: 534716 - RNA, 19 nt, Artificial Sequence
  Description of Artificial Sequence: Synthetic oligonucleotide
  Antisense strand to SEQ ID NO: 534715
acaucugaggaacuggaga

SEQ ID NO: 534717 - RNA, 19 nt, Artificial Sequence
  Description of Artificial Sequence: Synthetic oligonucleotide
  Sense strand starting at position 1186 of SEQ ID NO: 318074
cucagaugugcccauccua

SEQ ID NO: 534718 - RNA, 19 nt, Artificial Sequence
  Description of Artificial Sequence: Synthetic oligonucleotide
  Antisense strand to SEQ ID NO: 534717
uaggaugggcacaucugag

SEQ ID NO: 534719 - RNA, 19 nt, Artificial Sequence
  Description of Artificial Sequence: Synthetic oligonucleotide
  Sense strand starting at position 1285 of SEQ ID NO: 318074
ucgagaacagauugugacu

SEQ ID NO: 534720 - RNA, 19 nt, Artificial Sequence
  Description of Artificial Sequence: Synthetic oligonucleotide
  Antisense strand to SEQ ID NO: 534719
agucacaaucuguucucga

SEQ ID NO: 534721 - RNA, 19 nt, Artificial Sequence
  Description of Artificial Sequence: Synthetic oligonucleotide
  Sense strand starting at position 1290 of SEQ ID NO: 318074
aacagauugugacuugcua

SEQ ID NO: 534722 - RNA, 19 nt, Artificial Sequence
  Description of Artificial Sequence: Synthetic oligonucleotide
  Antisense strand to SEQ ID NO: 534721
uagcaagucacaaucuguu

SEQ ID NO: 534723 - RNA, 19 nt, Artificial Sequence
  Description of Artificial Sequence: Synthetic oligonucleotide
  Sense strand starting at position 1343 of SEQ ID NO: 318074
agacgcccucuuuaaagaa

SEQ ID NO: 534724 - RNA, 19 nt, Artificial Sequence
  Description of Artificial Sequence: Synthetic oligonucleotide
  Antisense strand to SEQ ID NO: 534723
uucuuuaaagagggcgucu

SEQ ID NO: 534725 - RNA, 19 nt, Artificial Sequence
  Description of Artificial Sequence: Synthetic oligonucleotide
  Sense strand starting at position 1361 of SEQ ID NO: 318074
agguccucucacgaacuua

SEQ ID NO: 534726 - RNA, 19 nt, Artificial Sequence
  Description of Artificial Sequence: Synthetic oligonucleotide
  Antisense strand to SEQ ID NO: 534725
uaaguucgugagaggaccu

SEQ ID NO: 534727 - RNA, 19 nt, Artificial Sequence
  Description of Artificial Sequence: Synthetic oligonucleotide
  Sense strand starting at position 1522 of SEQ ID NO: 318074
gaguuaauugcaggaagag

SEQ ID NO: 534728 - RNA, 19 nt, Artificial Sequence
  Description of Artificial Sequence: Synthetic oligonucleotide
  Antisense strand to SEQ ID NO: 534727
cucuuccugcaauuaacuc

SEQ ID NO: 534729 - RNA, 19 nt, Artificial Sequence
  Description of Artificial Sequence: Synthetic oligonucleotide
  Sense strand starting at position 1523 of SEQ ID NO: 318074
aguuaauugcaggaagagu

SEQ ID NO: 534730 - RNA, 19 nt, Artificial Sequence
  Description of Artificial Sequence: Synthetic oligonucleotide
  Antisense strand to SEQ ID NO: 534729
acucuuccugcaauuaacu

SEQ ID NO: 534731 - RNA, 19 nt, Artificial Sequence
  Description of Artificial Sequence: Synthetic oligonucleotide
  Sense strand starting at position 2091 of SEQ ID NO: 318074
guaguuaagagugacucca

SEQ ID NO: 534732 - RNA, 19 nt, Artificial Sequence
  Description of Artificial Sequence: Synthetic oligonucleotide
  Antisense strand to SEQ ID NO: 534731
uggagucacucuuaacuac

SEQ ID NO: 534733 - RNA, 19 nt, Artificial Sequence
  Description of Artificial Sequence: Synthetic oligonucleotide
  Sense strand starting at position 2173 of SEQ ID NO: 318074
acuuguguagaagaauagu

SEQ ID NO: 534734 - RNA, 19 nt, Artificial Sequence
  Description of Artificial Sequence: Synthetic oligonucleotide
  Antisense strand to SEQ ID NO: 534733
acuauucuucuacacaagu

SEQ ID NO: 534735 - RNA, 19 nt, Artificial Sequence
  Description of Artificial Sequence: Synthetic oligonucleotide
  Sense strand starting at position 2352 of SEQ ID NO: 318074
gguaaagauuugucagugu

SEQ ID NO: 534736 - RNA, 19 nt, Artificial Sequence
  Description of Artificial Sequence: Synthetic oligonucleotide
  Antisense strand to SEQ ID NO: 534735
acacugacaaaucuuuacc

SEQ ID NO: 534737 - RNA, 19 nt, Artificial Sequence
  Description of Artificial Sequence: Synthetic oligonucleotide
  Sense strand starting at position 2478 of SEQ ID NO: 318074
uuugacaaguguuccuaaa

SEQ ID NO: 534738 - RNA, 19 nt, Artificial Sequence
  Description of Artificial Sequence: Synthetic oligonucleotide
  Antisense strand to SEQ ID NO: 534737
uuuaggaacacuugucaaa

SEQ ID NO: 534739 - RNA, 19 nt, Artificial Sequence
  Description of Artificial Sequence: Synthetic oligonucleotide
  Sense strand starting at position 2480 of SEQ ID NO: 318074
ugacaaguguuccuaaaug

SEQ ID NO: 534740 - RNA, 19 nt, Artificial Sequence
  Description of Artificial Sequence: Synthetic oligonucleotide
  Antisense strand to SEQ ID NO: 534739
cauuuaggaacacuuguca

SEQ ID NO: 534741 - RNA, 19 nt, Artificial Sequence
  Description of Artificial Sequence: Synthetic oligonucleotide
  Sense strand starting at position 2510 of SEQ ID NO: 318074
guauguugagaacagucau

SEQ ID NO: 534742 - RNA, 19 nt, Artificial Sequence
  Description of Artificial Sequence: Synthetic oligonucleotide
  Antisense strand to SEQ ID NO: 534741
augacuguucucaacauac

SEQ ID NO: 534743 - RNA, 19 nt, Artificial Sequence
  Description of Artificial Sequence: Synthetic oligonucleotide
  Sense strand starting at position 2584 of SEQ ID NO: 318074
cucagagucagaugguaaa

SEQ ID NO: 534744 - RNA, 19 nt, Artificial Sequence
  Description of Artificial Sequence: Synthetic oligonucleotide
  Antisense strand to SEQ ID NO: 534743
uuuaccaucugacucugag

SEQ ID NO: 534745 - RNA, 19 nt, Artificial Sequence
  Description of Artificial Sequence: Synthetic oligonucleotide
  Sense strand starting at position 2622 of SEQ ID NO: 318074
cuagacuugugaccaaugu

SEQ ID NO: 534746 - RNA, 19 nt, Artificial Sequence
  Description of Artificial Sequence: Synthetic oligonucleotide
  Antisense strand to SEQ ID NO: 534745
acauuggucacaagucuag

SEQ ID NO: 534747 - RNA, 19 nt, Artificial Sequence
  Description of Artificial Sequence: Synthetic oligonucleotide
  Sense strand starting at position 2632 of SEQ ID NO: 318074
gaccaauguguguaaguga

SEQ ID NO: 534748 - RNA, 19 nt, Artificial Sequence
  Description of Artificial Sequence: Synthetic oligonucleotide
  Antisense strand to SEQ ID NO: 534747
ucacuuacacacauugguc

SEQ ID NO: 534749 - RNA, 19 nt, Artificial Sequence
  Description of Artificial Sequence: Synthetic oligonucleotide
  Sense strand starting at position 2637 of SEQ ID NO: 318074
auguguguaagugagcuaa

SEQ ID NO: 534750 - RNA, 19 nt, Artificial Sequence
  Description of Artificial Sequence: Synthetic oligonucleotide
  Antisense strand to SEQ ID NO: 534749
uuagcucacuuacacacau

SEQ ID NO: 534751 - RNA, 19 nt, Artificial Sequence
  Description of Artificial Sequence: Synthetic oligonucleotide
  Sense strand starting at position 2828 of SEQ ID NO: 318074
gcaagaucauguuuagaug

SEQ ID NO: 534752 - RNA, 19 nt, Artificial Sequence
  Description of Artificial Sequence: Synthetic oligonucleotide
  Antisense strand to SEQ ID NO: 534751
caucuaaacaugaucuugc

SEQ ID NO: 534753 - RNA, 19 nt, Artificial Sequence
  Description of Artificial Sequence: Synthetic oligonucleotide
  Sense strand starting at position 2829 of SEQ ID NO: 318074
caagaucauguuuagaugu

SEQ ID NO: 534754 - RNA, 19 nt, Artificial Sequence
  Description of Artificial Sequence: Synthetic oligonucleotide
  Antisense strand to SEQ ID NO: 534753
acaucuaaacaugaucuug

SEQ ID NO: 534755 - RNA, 19 nt, Artificial Sequence
  Description of Artificial Sequence: Synthetic oligonucleotide
  Sense strand starting at position 2932 of SEQ ID NO: 318074
gcccauuauggaggauuga

SEQ ID NO: 534756 - RNA, 19 nt, Artificial Sequence
  Description of Artificial Sequence: Synthetic oligonucleotide
  Antisense strand to SEQ ID NO: 534755
ucaauccuccauaaugggc

SEQ ID NO: 534757 - RNA, 19 nt, Artificial Sequence
  Description of Artificial Sequence: Synthetic oligonucleotide
  Sense strand starting at position 2941 of SEQ ID NO: 318074
ggaggauugauuggauguu

SEQ ID NO: 534758 - RNA, 19 nt, Artificial Sequence
  Description of Artificial Sequence: Synthetic oligonucleotide
  Antisense strand to SEQ ID NO: 534757
aacauccaaucaauccucc

SEQ ID NO: 534759 - RNA, 19 nt, Artificial Sequence
  Description of Artificial Sequence: Synthetic oligonucleotide
  Sense strand starting at position 3584 of SEQ ID NO: 318074
guuucuguuguuuaagaug

SEQ ID NO: 534760 - RNA, 19 nt, Artificial Sequence
  Description of Artificial Sequence: Synthetic oligonucleotide
  Antisense strand to SEQ ID NO: 534759
caucuuaaacaacagaaac

SEQ ID NO: 534761 - RNA, 19 nt, Artificial Sequence
  Description of Artificial Sequence: Synthetic oligonucleotide
  Sense strand starting at position 403 of SEQ ID NO: 318075
agaccauccugagugacau

SEQ ID NO: 534762 - RNA, 19 nt, Artificial Sequence
  Description of Artificial Sequence: Synthetic oligonucleotide
  Antisense strand to SEQ ID NO: 534761
augucacucaggauggucu

SEQ ID NO: 534763 - RNA, 19 nt, Artificial Sequence
  Description of Artificial Sequence: Synthetic oligonucleotide
  Sense strand starting at position 404 of SEQ ID NO: 318075
gaccauccugagugacaua

SEQ ID NO: 534764 - RNA, 19 nt, Artificial Sequence
  Description of Artificial Sequence: Synthetic oligonucleotide
  Antisense strand to SEQ ID NO: 534763
uaugucacucaggaugguc

SEQ ID NO: 534765 - RNA, 19 nt, Artificial Sequence
  Description of Artificial Sequence: Synthetic oligonucleotide
  Sense strand starting at position 746 of SEQ ID NO: 318075
cacuguaaccagugaaaga

SEQ ID NO: 534766 - RNA, 19 nt, Artificial Sequence
  Description of Artificial Sequence: Synthetic oligonucleotide
  Antisense strand to SEQ ID NO: 534765
ucuuucacugguuacagug

SEQ ID NO: 534767 - RNA, 19 nt, Artificial Sequence
  Description of Artificial Sequence: Synthetic oligonucleotide
  Sense strand starting at position 755 of SEQ ID NO: 318075
cagugaaagaccugaguga

SEQ ID NO: 534768 - RNA, 19 nt, Artificial Sequence
  Description of Artificial Sequence: Synthetic oligonucleotide
  Antisense strand to SEQ ID NO: 534767
ucacucaggucuuucacug

SEQ ID NO: 534769 - RNA, 19 nt, Artificial Sequence
  Description of Artificial Sequence: Synthetic oligonucleotide
  Sense strand starting at position 868 of SEQ ID NO: 318075
ccaacacacugguuagaau

SEQ ID NO: 534770 - RNA, 19 nt, Artificial Sequence
  Description of Artificial Sequence: Synthetic oligonucleotide
  Antisense strand to SEQ ID NO: 534769
auucuaaccaguguguugg

SEQ ID NO: 534771 - RNA, 19 nt, Artificial Sequence
  Description of Artificial Sequence: Synthetic oligonucleotide
  Sense strand starting at position 881 of SEQ ID NO: 318075
uagaaugcauuaucguuaa

SEQ ID NO: 534772 - RNA, 19 nt, Artificial Sequence
  Description of Artificial Sequence: Synthetic oligonucleotide
  Antisense strand to SEQ ID NO: 534771
uuaacgauaaugcauucua

SEQ ID NO: 534773 - RNA, 19 nt, Artificial Sequence
  Description of Artificial Sequence: Synthetic oligonucleotide
  Sense strand starting at position 885 of SEQ ID NO: 318075
augcauuaucguuaaagug

SEQ ID NO: 534774 - RNA, 19 nt, Artificial Sequence
  Description of Artificial Sequence: Synthetic oligonucleotide
  Antisense strand to SEQ ID NO: 534773
cacuuuaacgauaaugcau

SEQ ID NO: 534775 - RNA, 19 nt, Artificial Sequence
  Description of Artificial Sequence: Synthetic oligonucleotide
  Sense strand starting at position 990 of SEQ ID NO: 318075
auugcaaaguuaucauaag

SEQ ID NO: 534776 - RNA, 19 nt, Artificial Sequence
  Description of Artificial Sequence: Synthetic oligonucleotide
  Antisense strand to SEQ ID NO: 534775
cuuaugauaacuuugcaau

SEQ ID NO: 534777 - RNA, 19 nt, Artificial Sequence
  Description of Artificial Sequence: Synthetic oligonucleotide
  Sense strand starting at position 1291 of SEQ ID NO: 318075
gaccgcgauccguuuacau

SEQ ID NO: 534778 - RNA, 19 nt, Artificial Sequence
  Description of Artificial Sequence: Synthetic oligonucleotide
  Antisense strand to SEQ ID NO: 534777
auguaaacggaucgcgguc

SEQ ID NO: 534779 - RNA, 19 nt, Artificial Sequence
  Description of Artificial Sequence: Synthetic oligonucleotide
  Sense strand starting at position 2123 of SEQ ID NO: 318075
gcugaaagauggcuggaaa

SEQ ID NO: 534780 - RNA, 19 nt, Artificial Sequence
  Description of Artificial Sequence: Synthetic oligonucleotide
  Antisense strand to SEQ ID NO: 534779
uuuccagccaucuuucagc

SEQ ID NO: 534781 - RNA, 19 nt, Artificial Sequence
  Description of Artificial Sequence: Synthetic oligonucleotide
  Sense strand starting at position 2212 of SEQ ID NO: 318075
cucccuuuaccguagaaag

SEQ ID NO: 534782 - RNA, 19 nt, Artificial Sequence
  Description of Artificial Sequence: Synthetic oligonucleotide
  Antisense strand to SEQ ID NO: 534781
cuuucuacgguaaagggag

SEQ ID NO: 534783 - RNA, 19 nt, Artificial Sequence
  Description of Artificial Sequence: Synthetic oligonucleotide
  Sense strand starting at position 2214 of SEQ ID NO: 318075
cccuuuaccguagaaagua

SEQ ID NO: 534784 - RNA, 19 nt, Artificial Sequence
  Description of Artificial Sequence: Synthetic oligonucleotide
  Antisense strand to SEQ ID NO: 534783
uacuuucuacgguaaaggg

SEQ ID NO: 534785 - RNA, 19 nt, Artificial Sequence
  Description of Artificial Sequence: Synthetic oligonucleotide
  Sense strand starting at position 2461 of SEQ ID NO: 318075
ggguucucucaagagucua

SEQ ID NO: 534786 - RNA, 19 nt, Artificial Sequence
  Description of Artificial Sequence: Synthetic oligonucleotide
  Antisense strand to SEQ ID NO: 534785
uagacucuugagagaaccc

SEQ ID NO: 534787 - RNA, 19 nt, Artificial Sequence
  Description of Artificial Sequence: Synthetic oligonucleotide
  Sense strand starting at position 2572 of SEQ ID NO: 318075
ccacucauguccuuagauc

SEQ ID NO: 534788 - RNA, 19 nt, Artificial Sequence
  Description of Artificial Sequence: Synthetic oligonucleotide
  Antisense strand to SEQ ID NO: 534787
gaucuaaggacaugagugg

SEQ ID NO: 534789 - RNA, 19 nt, Artificial Sequence
  Description of Artificial Sequence: Synthetic oligonucleotide
  Sense strand starting at position 2698 of SEQ ID NO: 318075
ccugaaagguccgcucaga

SEQ ID NO: 534790 - RNA, 19 nt, Artificial Sequence
  Description of Artificial Sequence: Synthetic oligonucleotide
  Antisense strand to SEQ ID NO: 534789
ucugagcggaccuuucagg

SEQ ID NO: 534791 - RNA, 19 nt, Artificial Sequence
  Description of Artificial Sequence: Synthetic oligonucleotide
  Sense strand starting at position 2709 of SEQ ID NO: 318075
cgcucagaccuuuacauga

SEQ ID NO: 534792 - RNA, 19 nt, Artificial Sequence
  Description of Artificial Sequence: Synthetic oligonucleotide
  Antisense strand to SEQ ID NO: 534791
ucauguaaaggucugagcg

SEQ ID NO: 534793 - RNA, 19 nt, Artificial Sequence
  Description of Artificial Sequence: Synthetic oligonucleotide
  Sense strand starting at position 2764 of SEQ ID NO: 318075
uauggccuccugggagaau

SEQ ID NO: 534794 - RNA, 19 nt, Artificial Sequence
  Description of Artificial Sequence: Synthetic oligonucleotide
  Antisense strand to SEQ ID NO: 534793
auucucccaggaggccaua

SEQ ID NO: 534795 - RNA, 19 nt, Artificial Sequence
  Description of Artificial Sequence: Synthetic oligonucleotide
  Sense strand starting at position 2777 of SEQ ID NO: 318075
gagaauagauaguugcuga

SEQ ID NO: 534796 - RNA, 19 nt, Artificial Sequence
  Description of Artificial Sequence: Synthetic oligonucleotide
  Antisense strand to SEQ ID NO: 534795
ucagcaacuaucuauucuc

SEQ ID NO: 534797 - RNA, 19 nt, Artificial Sequence
  Description of Artificial Sequence: Synthetic oligonucleotide
  Sense strand starting at position 2780 of SEQ ID NO: 318075
aauagauaguugcugaguu

SEQ ID NO: 534798 - RNA, 19 nt, Artificial Sequence
  Description of Artificial Sequence: Synthetic oligonucleotide
  Antisense strand to SEQ ID NO: 534797
aacucagcaacuaucuauu

SEQ ID NO: 534799 - RNA, 19 nt, Artificial Sequence
  Description of Artificial Sequence: Synthetic oligonucleotide
  Sense strand starting at position 2782 of SEQ ID NO: 318075
uagauaguugcugaguugu

SEQ ID NO: 534800 - RNA, 19 nt, Artificial Sequence
  Description of Artificial Sequence: Synthetic oligonucleotide
  Antisense strand to SEQ ID NO: 534799
acaacucagcaacuaucua

SEQ ID NO: 534801 - RNA, 19 nt, Artificial Sequence
  Description of Artificial Sequence: Synthetic oligonucleotide
  Sense strand starting at position 2808 of SEQ ID NO: 318075
ggaagccagcuugagauua

SEQ ID NO: 534802 - RNA, 19 nt, Artificial Sequence
  Description of Artificial Sequence: Synthetic oligonucleotide
  Antisense strand to SEQ ID NO: 534801
uaaucucaagcuggcuucc

SEQ ID NO: 534803 - RNA, 19 nt, Artificial Sequence
  Description of Artificial Sequence: Synthetic oligonucleotide
  Sense strand starting at position 3054 of SEQ ID NO: 318075
gugcuauaugcacagaaug

SEQ ID NO: 534804 - RNA, 19 nt, Artificial Sequence
  Description of Artificial Sequence: Synthetic oligonucleotide
  Antisense strand to SEQ ID NO: 534803
cauucugugcauauagcac

SEQ ID NO: 534805 - RNA, 19 nt, Artificial Sequence
  Description of Artificial Sequence: Synthetic oligonucleotide
  Sense strand starting at position 3056 of SEQ ID NO: 318075
gcuauaugcacagaauggu

SEQ ID NO: 534806 - RNA, 19 nt, Artificial Sequence
  Description of Artificial Sequence: Synthetic oligonucleotide
  Antisense strand to SEQ ID NO: 534805
accauucugugcauauagc

SEQ ID NO: 534807 - RNA, 19 nt, Artificial Sequence
  Description of Artificial Sequence: Synthetic oligonucleotide
  Sense strand starting at position 3183 of SEQ ID NO: 318075
gguacaucaugaguugaag

SEQ ID NO: 534808 - RNA, 19 nt, Artificial Sequence
  Description of Artificial Sequence: Synthetic oligonucleotide
  Antisense strand to SEQ ID NO: 534807
cuucaacucaugauguacc

SEQ ID NO: 534809 - RNA, 19 nt, Artificial Sequence
  Description of Artificial Sequence: Synthetic oligonucleotide
  Sense strand starting at position 3189 of SEQ ID NO: 318075
ucaugaguugaaggucuca

SEQ ID NO: 534810 - RNA, 19 nt, Artificial Sequence
  Description of Artificial Sequence: Synthetic oligonucleotide
  Antisense strand to SEQ ID NO: 534809
ugagaccuucaacucauga

SEQ ID NO: 534811 - RNA, 19 nt, Artificial Sequence
  Description of Artificial Sequence: Synthetic oligonucleotide
  Sense strand starting at position 3200 of SEQ ID NO: 318075
aggucucaaggcuagagua

SEQ ID NO: 534812 - RNA, 19 nt, Artificial Sequence
  Description of Artificial Sequence: Synthetic oligonucleotide
  Antisense strand to SEQ ID NO: 534811
uacucuagccuugagaccu

SEQ ID NO: 534813 - RNA, 19 nt, Artificial Sequence
  Description of Artificial Sequence: Synthetic oligonucleotide
  Sense strand starting at position 3351 of SEQ ID NO: 318075
ccggguugauuaccauuaa

SEQ ID NO: 534814 - RNA, 19 nt, Artificial Sequence
  Description of Artificial Sequence: Synthetic oligonucleotide
  Antisense strand to SEQ ID NO: 534813
uuaaugguaaucaacccgg

SEQ ID NO: 534815 - RNA, 19 nt, Artificial Sequence
  Description of Artificial Sequence: Synthetic oligonucleotide
  Sense strand starting at position 3519 of SEQ ID NO: 318075
gggacauauuuguacauug

SEQ ID NO: 534816 - RNA, 19 nt, Artificial Sequence
  Description of Artificial Sequence: Synthetic oligonucleotide
  Antisense strand to SEQ ID NO: 534815
caauguacaaauauguccc

SEQ ID NO: 534817 - RNA, 19 nt, Artificial Sequence
  Description of Artificial Sequence: Synthetic oligonucleotide
  Sense strand starting at position 3590 of SEQ ID NO: 318075
ccacauguccauugacaga

SEQ ID NO: 534818 - RNA, 19 nt, Artificial Sequence
  Description of Artificial Sequence: Synthetic oligonucleotide
  Antisense strand to SEQ ID NO: 534817
ucugucaauggacaugugg

SEQ ID NO: 534819 - RNA, 19 nt, Artificial Sequence
  Description of Artificial Sequence: Synthetic oligonucleotide
  Sense strand starting at position 3601 of SEQ ID NO: 318075
uugacagaugaaugaguuu

SEQ ID NO: 534820 - RNA, 19 nt, Artificial Sequence
  Description of Artificial Sequence: Synthetic oligonucleotide
  Antisense strand to SEQ ID NO: 534819
aaacucauucaucugucaa

SEQ ID NO: 534821 - RNA, 19 nt, Artificial Sequence
  Description of Artificial Sequence: Synthetic oligonucleotide
  Sense strand starting at position 3630 of SEQ ID NO: 318075
guguauacgcguaacagua

SEQ ID NO: 534822 - RNA, 19 nt, Artificial Sequence
  Description of Artificial Sequence: Synthetic oligonucleotide
  Antisense strand to SEQ ID NO: 534821
uacuguuacgcguauacac

SEQ ID NO: 534823 - RNA, 19 nt, Artificial Sequence
  Description of Artificial Sequence: Synthetic oligonucleotide
  Sense strand starting at position 3849 of SEQ ID NO: 318075
ucacaaguagagugaaaug

SEQ ID NO: 534824 - RNA, 19 nt, Artificial Sequence
  Description of Artificial Sequence: Synthetic oligonucleotide
  Antisense strand to SEQ ID NO: 534823
cauuucacucuacuuguga

SEQ ID NO: 534825 - RNA, 19 nt, Artificial Sequence
  Description of Artificial Sequence: Synthetic oligonucleotide
  Sense strand starting at position 3917 of SEQ ID NO: 318075
gagauagaugcugguggua

SEQ ID NO: 534826 - RNA, 19 nt, Artificial Sequence
  Description of Artificial Sequence: Synthetic oligonucleotide
  Antisense strand to SEQ ID NO: 534825
uaccaccagcaucuaucuc

SEQ ID NO: 534827 - RNA, 19 nt, Artificial Sequence
  Description of Artificial Sequence: Synthetic oligonucleotide
  Sense strand starting at position 3930 of SEQ ID NO: 318075
gugguaguugcauaacaau

SEQ ID NO: 534828 - RNA, 19 nt, Artificial Sequence
  Description of Artificial Sequence: Synthetic oligonucleotide
  Antisense strand to SEQ ID NO: 534827
auuguuaugcaacuaccac

SEQ ID NO: 534829 - RNA, 19 nt, Artificial Sequence
  Description of Artificial Sequence: Synthetic oligonucleotide
  Sense strand starting at position 3939 of SEQ ID NO: 318075
gcauaacaaugugcaugau

SEQ ID NO: 534830 - RNA, 19 nt, Artificial Sequence
  Description of Artificial Sequence: Synthetic oligonucleotide
  Antisense strand to SEQ ID NO: 534829
aucaugcacauuguuaugc

SEQ ID NO: 534831 - RNA, 19 nt, Artificial Sequence
  Description of Artificial Sequence: Synthetic oligonucleotide
  Sense strand starting at position 3943 of SEQ ID NO: 318075
aacaaugugcaugaucagu

SEQ ID NO: 534832 - RNA, 19 nt, Artificial Sequence
  Description of Artificial Sequence: Synthetic oligonucleotide
  Antisense strand to SEQ ID NO: 534831
acugaucaugcacauuguu

SEQ ID NO: 534833 - RNA, 19 nt, Artificial Sequence
  Description of Artificial Sequence: Synthetic oligonucleotide
  Sense strand starting at position 3945 of SEQ ID NO: 318075
caaugugcaugaucaguga

SEQ ID NO: 534834 - RNA, 19 nt, Artificial Sequence
  Description of Artificial Sequence: Synthetic oligonucleotide
  Antisense strand to SEQ ID NO: 534833
ucacugaucaugcacauug

SEQ ID NO: 534835 - RNA, 19 nt, Artificial Sequence
  Description of Artificial Sequence: Synthetic oligonucleotide
  Sense strand starting at position 3949 of SEQ ID NO: 318075
gugcaugaucagugacaga

SEQ ID NO: 534836 - RNA, 19 nt, Artificial Sequence
  Description of Artificial Sequence: Synthetic oligonucleotide
  Antisense strand to SEQ ID NO: 534835
ucugucacugaucaugcac

SEQ ID NO: 534837 - RNA, 19 nt, Artificial Sequence
  Description of Artificial Sequence: Synthetic oligonucleotide
  Sense strand starting at position 3952 of SEQ ID NO: 318075
caugaucagugacagauuu

SEQ ID NO: 534838 - RNA, 19 nt, Artificial Sequence
  Description of Artificial Sequence: Synthetic oligonucleotide
  Antisense strand to SEQ ID NO: 534837
aaaucugucacugaucaug

SEQ ID NO: 534839 - RNA, 19 nt, Artificial Sequence
  Description of Artificial Sequence: Synthetic oligonucleotide
  Sense strand starting at position 3960 of SEQ ID NO: 318075
gugacagauuuguacauuu

SEQ ID NO: 534840 - RNA, 19 nt, Artificial Sequence
  Description of Artificial Sequence: Synthetic oligonucleotide
  Antisense strand to SEQ ID NO: 534839
aaauguacaaaucugucac

SEQ ID NO: 534841 - RNA, 19 nt, Artificial Sequence
  Description of Artificial Sequence: Synthetic oligonucleotide
  Sense strand starting at position 90 of SEQ ID NO: 318076
cuggacagauucuggauaa

SEQ ID NO: 534842 - RNA, 19 nt, Artificial Sequence
  Description of Artificial Sequence: Synthetic oligonucleotide
  Antisense strand to SEQ ID NO: 534841
uuauccagaaucuguccag

SEQ ID NO: 534843 - RNA, 19 nt, Artificial Sequence
  Description of Artificial Sequence: Synthetic oligonucleotide
  Sense strand starting at position 91 of SEQ ID NO: 318076
uggacagauucuggauaag

SEQ ID NO: 534844 - RNA, 19 nt, Artificial Sequence
  Description of Artificial Sequence: Synthetic oligonucleotide
  Antisense strand to SEQ ID NO: 534843
cuuauccagaaucugucca

SEQ ID NO: 534845 - RNA, 19 nt, Artificial Sequence
  Description of Artificial Sequence: Synthetic oligonucleotide
  Sense strand starting at position 108 of SEQ ID NO: 318076
agguacuaguuaucaauca

SEQ ID NO: 534846 - RNA, 19 nt, Artificial Sequence
  Description of Artificial Sequence: Synthetic oligonucleotide
  Antisense strand to SEQ ID NO: 534845
ugauugauaacuaguaccu

SEQ ID NO: 534847 - RNA, 19 nt, Artificial Sequence
  Description of Artificial Sequence: Synthetic oligonucleotide
  Sense strand starting at position 170 of SEQ ID NO: 318076
guugguaguacccaaauca

SEQ ID NO: 534848 - RNA, 19 nt, Artificial Sequence
  Description of Artificial Sequence: Synthetic oligonucleotide
  Antisense strand to SEQ ID NO: 534847
ugauuuggguacuaccaac

SEQ ID NO: 534849 - RNA, 19 nt, Artificial Sequence
  Description of Artificial Sequence: Synthetic oligonucleotide
  Sense strand starting at position 203 of SEQ ID NO: 318076
ucccuugauugcuucugau

SEQ ID NO: 534850 - RNA, 19 nt, Artificial Sequence
  Description of Artificial Sequence: Synthetic oligonucleotide
  Antisense strand to SEQ ID NO: 534849
aucagaagcaaucaaggga

SEQ ID NO: 534851 - RNA, 19 nt, Artificial Sequence
  Description of Artificial Sequence: Synthetic oligonucleotide
  Sense strand starting at position 209 of SEQ ID NO: 318076
gauugcuucugaucuguaa

SEQ ID NO: 534852 - RNA, 19 nt, Artificial Sequence
  Description of Artificial Sequence: Synthetic oligonucleotide
  Antisense strand to SEQ ID NO: 534851
uuacagaucagaagcaauc

SEQ ID NO: 534853 - RNA, 19 nt, Artificial Sequence
  Description of Artificial Sequence: Synthetic oligonucleotide
  Sense strand starting at position 212 of SEQ ID NO: 318076
ugcuucugaucuguaagac

SEQ ID NO: 534854 - RNA, 19 nt, Artificial Sequence
  Description of Artificial Sequence: Synthetic oligonucleotide
  Antisense strand to SEQ ID NO: 534853
gucuuacagaucagaagca

SEQ ID NO: 534855 - RNA, 19 nt, Artificial Sequence
  Description of Artificial Sequence: Synthetic oligonucleotide
  Sense strand starting at position 213 of SEQ ID NO: 318076
gcuucugaucuguaagaca

SEQ ID NO: 534856 - RNA, 19 nt, Artificial Sequence
  Description of Artificial Sequence: Synthetic oligonucleotide
  Antisense strand to SEQ ID NO: 534855
ugucuuacagaucagaagc

SEQ ID NO: 534857 - RNA, 19 nt, Artificial Sequence
  Description of Artificial Sequence: Synthetic oligonucleotide
  Sense strand starting at position 216 of SEQ ID NO: 318076
ucugaucuguaagacauuu

SEQ ID NO: 534858 - RNA, 19 nt, Artificial Sequence
  Description of Artificial Sequence: Synthetic oligonucleotide
  Antisense strand to SEQ ID NO: 534857
aaaugucuuacagaucaga

SEQ ID NO: 534859 - RNA, 19 nt, Artificial Sequence
  Description of Artificial Sequence: Synthetic oligonucleotide
  Sense strand starting at position 224 of SEQ ID NO: 318076
guaagacauuuagaacagu

SEQ ID NO: 534860 - RNA, 19 nt, Artificial Sequence
  Description of Artificial Sequence: Synthetic oligonucleotide
  Antisense strand to SEQ ID NO: 534859
acuguucuaaaugucuuac

SEQ ID NO: 534861 - RNA, 19 nt, Artificial Sequence
  Description of Artificial Sequence: Synthetic oligonucleotide
  Sense strand starting at position 248 of SEQ ID NO: 318076
agcuauuguuaucuugaua

SEQ ID NO: 534862 - RNA, 19 nt, Artificial Sequence
  Description of Artificial Sequence: Synthetic oligonucleotide
  Antisense strand to SEQ ID NO: 534861
uaucaagauaacaauagcu

SEQ ID NO: 534863 - RNA, 19 nt, Artificial Sequence
  Description of Artificial Sequence: Synthetic oligonucleotide
  Sense strand starting at position 309 of SEQ ID NO: 318076
agugguauacuacauaauc

SEQ ID NO: 534864 - RNA, 19 nt, Artificial Sequence
  Description of Artificial Sequence: Synthetic oligonucleotide
  Antisense strand to SEQ ID NO: 534863
gauuauguaguauaccacu

SEQ ID NO: 534865 - RNA, 19 nt, Artificial Sequence
  Description of Artificial Sequence: Synthetic oligonucleotide
  Sense strand starting at position 386 of SEQ ID NO: 318076
ugcuuugaaguuuaauaug

SEQ ID NO: 534866 - RNA, 19 nt, Artificial Sequence
  Description of Artificial Sequence: Synthetic oligonucleotide
  Antisense strand to SEQ ID NO: 534865
cauauuaaacuucaaagca

SEQ ID NO: 534867 - RNA, 19 nt, Artificial Sequence
  Description of Artificial Sequence: Synthetic oligonucleotide
  Sense strand starting at position 423 of SEQ ID NO: 318076
augauauuauacuuacgca

SEQ ID NO: 534868 - RNA, 19 nt, Artificial Sequence
  Description of Artificial Sequence: Synthetic oligonucleotide
  Antisense strand to SEQ ID NO: 534867
ugcguaaguauaauaucau

SEQ ID NO: 534869 - RNA, 19 nt, Artificial Sequence
  Description of Artificial Sequence: Synthetic oligonucleotide
  Sense strand starting at position 441 of SEQ ID NO: 318076
auaaucccgccuugaaaca

SEQ ID NO: 534870 - RNA, 19 nt, Artificial Sequence
  Description of Artificial Sequence: Synthetic oligonucleotide
  Antisense strand to SEQ ID NO: 534869
uguuucaaggcgggauuau

SEQ ID NO: 534871 - RNA, 19 nt, Artificial Sequence
  Description of Artificial Sequence: Synthetic oligonucleotide
  Sense strand starting at position 563 of SEQ ID NO: 318076
ugggcucacuuaguauaua

SEQ ID NO: 534872 - RNA, 19 nt, Artificial Sequence
  Description of Artificial Sequence: Synthetic oligonucleotide
  Antisense strand to SEQ ID NO: 534871
uauauacuaagugagccca

SEQ ID NO: 534873 - RNA, 19 nt, Artificial Sequence
  Description of Artificial Sequence: Synthetic oligonucleotide
  Sense strand starting at position 622 of SEQ ID NO: 318076
ccaaauaaguaagacgaaa

SEQ ID NO: 534874 - RNA, 19 nt, Artificial Sequence
  Description of Artificial Sequence: Synthetic oligonucleotide
  Antisense strand to SEQ ID NO: 534873
uuucgucuuacuuauuugg

SEQ ID NO: 534875 - RNA, 19 nt, Artificial Sequence
  Description of Artificial Sequence: Synthetic oligonucleotide
  Sense strand starting at position 905 of SEQ ID NO: 318076
agaguuacuaagggucuuu

SEQ ID NO: 534876 - RNA, 19 nt, Artificial Sequence
  Description of Artificial Sequence: Synthetic oligonucleotide
  Antisense strand to SEQ ID NO: 534875
aaagacccuuaguaacucu

SEQ ID NO: 534877 - RNA, 19 nt, Artificial Sequence
  Description of Artificial Sequence: Synthetic oligonucleotide
  Sense strand starting at position 942 of SEQ ID NO: 318076
aguggcguuucacuaggau

SEQ ID NO: 534878 - RNA, 19 nt, Artificial Sequence
  Description of Artificial Sequence: Synthetic oligonucleotide
  Antisense strand to SEQ ID NO: 534877
auccuagugaaacgccacu

SEQ ID NO: 534879 - RNA, 19 nt, Artificial Sequence
  Description of Artificial Sequence: Synthetic oligonucleotide
  Sense strand starting at position 945 of SEQ ID NO: 318076
ggcguuucacuaggauaaa

SEQ ID NO: 534880 - RNA, 19 nt, Artificial Sequence
  Description of Artificial Sequence: Synthetic oligonucleotide
  Antisense strand to SEQ ID NO: 534879
uuuauccuagugaaacgcc

SEQ ID NO: 534881 - RNA, 19 nt, Artificial Sequence
  Description of Artificial Sequence: Synthetic oligonucleotide
  Sense strand starting at position 1240 of SEQ ID NO: 318076
cucuguauucuguagagga

SEQ ID NO: 534882 - RNA, 19 nt, Artificial Sequence
  Description of Artificial Sequence: Synthetic oligonucleotide
  Antisense strand to SEQ ID NO: 534881
uccucuacagaauacagag

SEQ ID NO: 534883 - RNA, 19 nt, Artificial Sequence
  Description of Artificial Sequence: Synthetic oligonucleotide
  Sense strand starting at position 1282 of SEQ ID NO: 318076
uggcuuucccaauagacug

SEQ ID NO: 534884 - RNA, 19 nt, Artificial Sequence
  Description of Artificial Sequence: Synthetic oligonucleotide
  Antisense strand to SEQ ID NO: 534883
cagucuauugggaaagcca

SEQ ID NO: 534885 - RNA, 19 nt, Artificial Sequence
  Description of Artificial Sequence: Synthetic oligonucleotide
  Sense strand starting at position 1355 of SEQ ID NO: 318076
ggaccacuaccugguaauu

SEQ ID NO: 534886 - RNA, 19 nt, Artificial Sequence
  Description of Artificial Sequence: Synthetic oligonucleotide
  Antisense strand to SEQ ID NO: 534885
aauuaccagguaguggucc

SEQ ID NO: 534887 - RNA, 19 nt, Artificial Sequence
  Description of Artificial Sequence: Synthetic oligonucleotide
  Sense strand starting at position 1678 of SEQ ID NO: 318076
ggcacuuaucauggcggau

SEQ ID NO: 534888 - RNA, 19 nt, Artificial Sequence
  Description of Artificial Sequence: Synthetic oligonucleotide
  Antisense strand to SEQ ID NO: 534887
auccgccaugauaagugcc

SEQ ID NO: 534889 - RNA, 19 nt, Artificial Sequence
  Description of Artificial Sequence: Synthetic oligonucleotide
  Sense strand starting at position 1681 of SEQ ID NO: 318076
acuuaucauggcggauaaa

SEQ ID NO: 534890 - RNA, 19 nt, Artificial Sequence
  Description of Artificial Sequence: Synthetic oligonucleotide
  Antisense strand to SEQ ID NO: 534889
uuuauccgccaugauaagu

SEQ ID NO: 534891 - RNA, 19 nt, Artificial Sequence
  Description of Artificial Sequence: Synthetic oligonucleotide
  Sense strand starting at position 1682 of SEQ ID NO: 318076
cuuaucauggcggauaaau

SEQ ID NO: 534892 - RNA, 19 nt, Artificial Sequence
  Description of Artificial Sequence: Synthetic oligonucleotide
  Antisense strand to SEQ ID NO: 534891
auuuauccgccaugauaag

SEQ ID NO: 534893 - RNA, 19 nt, Artificial Sequence
  Description of Artificial Sequence: Synthetic oligonucleotide
  Sense strand starting at position 1691 of SEQ ID NO: 318076
gcggauaaauggaggagua

SEQ ID NO: 534894 - RNA, 19 nt, Artificial Sequence
  Description of Artificial Sequence: Synthetic oligonucleotide
  Antisense strand to SEQ ID NO: 534893
uacuccuccauuuauccgc

SEQ ID NO: 534895 - RNA, 19 nt, Artificial Sequence
  Description of Artificial Sequence: Synthetic oligonucleotide
  Sense strand starting at position 1921 of SEQ ID NO: 318076
gcagcaugaugguuggaga

SEQ ID NO: 534896 - RNA, 19 nt, Artificial Sequence
  Description of Artificial Sequence: Synthetic oligonucleotide
  Antisense strand to SEQ ID NO: 534895
ucuccaaccaucaugcugc

SEQ ID NO: 534897 - RNA, 19 nt, Artificial Sequence
  Description of Artificial Sequence: Synthetic oligonucleotide
  Sense strand starting at position 1922 of SEQ ID NO: 318076
cagcaugaugguuggagaa

SEQ ID NO: 534898 - RNA, 19 nt, Artificial Sequence
  Description of Artificial Sequence: Synthetic oligonucleotide
  Antisense strand to SEQ ID NO: 534897
uucuccaaccaucaugcug

SEQ ID NO: 534899 - RNA, 19 nt, Artificial Sequence
  Description of Artificial Sequence: Synthetic oligonucleotide
  Sense strand starting at position 1924 of SEQ ID NO: 318076
gcaugaugguuggagaaag

SEQ ID NO: 534900 - RNA, 19 nt, Artificial Sequence
  Description of Artificial Sequence: Synthetic oligonucleotide
  Antisense strand to SEQ ID NO: 534899
cuuucuccaaccaucaugc

SEQ ID NO: 534901 - RNA, 19 nt, Artificial Sequence
  Description of Artificial Sequence: Synthetic oligonucleotide
  Sense strand starting at position 2328 of SEQ ID NO: 318076
ucuuguggcuuugugaagu

SEQ ID NO: 534902 - RNA, 19 nt, Artificial Sequence
  Description of Artificial Sequence: Synthetic oligonucleotide
  Antisense strand to SEQ ID NO: 534901
acuucacaaagccacaaga

SEQ ID NO: 534903 - RNA, 19 nt, Artificial Sequence
  Description of Artificial Sequence: Synthetic oligonucleotide
  Sense strand starting at position 2413 of SEQ ID NO: 318076
gcagacagacguuaaacaa

SEQ ID NO: 534904 - RNA, 19 nt, Artificial Sequence
  Description of Artificial Sequence: Synthetic oligonucleotide
  Antisense strand to SEQ ID NO: 534903
uuguuuaacgucugucugc

SEQ ID NO: 534905 - RNA, 19 nt, Artificial Sequence
  Description of Artificial Sequence: Synthetic oligonucleotide
  Sense strand starting at position 2456 of SEQ ID NO: 318076
ggucuuggguuuccaacua

SEQ ID NO: 534906 - RNA, 19 nt, Artificial Sequence
  Description of Artificial Sequence: Synthetic oligonucleotide
  Antisense strand to SEQ ID NO: 534905
uaguuggaaacccaagacc

SEQ ID NO: 534907 - RNA, 19 nt, Artificial Sequence
  Description of Artificial Sequence: Synthetic oligonucleotide
  Sense strand starting at position 2472 of SEQ ID NO: 318076
cuacgaagcguuugauuca

SEQ ID NO: 534908 - RNA, 19 nt, Artificial Sequence
  Description of Artificial Sequence: Synthetic oligonucleotide
  Antisense strand to SEQ ID NO: 534907
ugaaucaaacgcuucguag

SEQ ID NO: 534909 - RNA, 19 nt, Artificial Sequence
  Description of Artificial Sequence: Synthetic oligonucleotide
  Sense strand starting at position 2503 of SEQ ID NO: 318076
ggccaauuagccugcacaa

SEQ ID NO: 534910 - RNA, 19 nt, Artificial Sequence
  Description of Artificial Sequence: Synthetic oligonucleotide
  Antisense strand to SEQ ID NO: 534909
uugugcaggcuaauuggcc

SEQ ID NO: 534911 - RNA, 19 nt, Artificial Sequence
  Description of Artificial Sequence: Synthetic oligonucleotide
  Sense strand starting at position 3474 of SEQ ID NO: 318076
ucaggaagaucuguauuau

SEQ ID NO: 534912 - RNA, 19 nt, Artificial Sequence
  Description of Artificial Sequence: Synthetic oligonucleotide
  Antisense strand to SEQ ID NO: 534911
auaauacagaucuuccuga

SEQ ID NO: 534913 - RNA, 19 nt, Artificial Sequence
  Description of Artificial Sequence: Synthetic oligonucleotide
  Sense strand starting at position 3478 of SEQ ID NO: 318076
gaagaucuguauuauuaag

SEQ ID NO: 534914 - RNA, 19 nt, Artificial Sequence
  Description of Artificial Sequence: Synthetic oligonucleotide
  Antisense strand to SEQ ID NO: 534913
cuuaauaauacagaucuuc

SEQ ID NO: 534915 - RNA, 19 nt, Artificial Sequence
  Description of Artificial Sequence: Synthetic oligonucleotide
  Sense strand starting at position 3484 of SEQ ID NO: 318076
cuguauuauuaaguaguca

SEQ ID NO: 534916 - RNA, 19 nt, Artificial Sequence
  Description of Artificial Sequence: Synthetic oligonucleotide
  Antisense strand to SEQ ID NO: 534915
ugacuacuuaauaauacag

SEQ ID NO: 534917 - RNA, 19 nt, Artificial Sequence
  Description of Artificial Sequence: Synthetic oligonucleotide
  Sense strand starting at position 3624 of SEQ ID NO: 318076
cguaacauggguuauagau

SEQ ID NO: 534918 - RNA, 19 nt, Artificial Sequence
  Description of Artificial Sequence: Synthetic oligonucleotide
  Antisense strand to SEQ ID NO: 534917
aucuauaacccauguuacg

SEQ ID NO: 534919 - RNA, 19 nt, Artificial Sequence
  Description of Artificial Sequence: Synthetic oligonucleotide
  Sense strand starting at position 3626 of SEQ ID NO: 318076
uaacauggguuauagauua

SEQ ID NO: 534920 - RNA, 19 nt, Artificial Sequence
  Description of Artificial Sequence: Synthetic oligonucleotide
  Antisense strand to SEQ ID NO: 534919
uaaucuauaacccauguua

SEQ ID NO: 534921 - RNA, 19 nt, Artificial Sequence
  Description of Artificial Sequence: Synthetic oligonucleotide
  Sense strand starting at position 48 of SEQ ID NO: 318077
agaacuguuugauucguuu

SEQ ID NO: 534922 - RNA, 19 nt, Artificial Sequence
  Description of Artificial Sequence: Synthetic oligonucleotide
  Antisense strand to SEQ ID NO: 534921
aaacgaaucaaacaguucu

SEQ ID NO: 534923 - RNA, 19 nt, Artificial Sequence
  Description of Artificial Sequence: Synthetic oligonucleotide
  Sense strand starting at position 131 of SEQ ID NO: 318077
gggauacugucagcaaucu

SEQ ID NO: 534924 - RNA, 19 nt, Artificial Sequence
  Description of Artificial Sequence: Synthetic oligonucleotide
  Antisense strand to SEQ ID NO: 534923
agauugcugacaguauccc

SEQ ID NO: 534925 - RNA, 19 nt, Artificial Sequence
  Description of Artificial Sequence: Synthetic oligonucleotide
  Sense strand starting at position 211 of SEQ ID NO: 318077
gcugcuugucagcucacau

SEQ ID NO: 534926 - RNA, 19 nt, Artificial Sequence
  Description of Artificial Sequence: Synthetic oligonucleotide
  Antisense strand to SEQ ID NO: 534925
augugagcugacaagcagc

SEQ ID NO: 534927 - RNA, 19 nt, Artificial Sequence
  Description of Artificial Sequence: Synthetic oligonucleotide
  Sense strand starting at position 253 of SEQ ID NO: 318077
agccacugccucugaagaa

SEQ ID NO: 534928 - RNA, 19 nt, Artificial Sequence
  Description of Artificial Sequence: Synthetic oligonucleotide
  Antisense strand to SEQ ID NO: 534927
uucuucagaggcaguggcu

SEQ ID NO: 534929 - RNA, 19 nt, Artificial Sequence
  Description of Artificial Sequence: Synthetic oligonucleotide
  Sense strand starting at position 413 of SEQ ID NO: 318077
ucagaugugcuguguaaac

SEQ ID NO: 534930 - RNA, 19 nt, Artificial Sequence
  Description of Artificial Sequence: Synthetic oligonucleotide
  Antisense strand to SEQ ID NO: 534929
guuuacacagcacaucuga

SEQ ID NO: 534931 - RNA, 19 nt, Artificial Sequence
  Description of Artificial Sequence: Synthetic oligonucleotide
  Sense strand starting at position 504 of SEQ ID NO: 318077
agagauagcagauguguua

SEQ ID NO: 534932 - RNA, 19 nt, Artificial Sequence
  Description of Artificial Sequence: Synthetic oligonucleotide
  Antisense strand to SEQ ID NO: 534931
uaacacaucugcuaucucu

SEQ ID NO: 534933 - RNA, 19 nt, Artificial Sequence
  Description of Artificial Sequence: Synthetic oligonucleotide
  Sense strand starting at position 507 of SEQ ID NO: 318077
gauagcagauguguuacau

SEQ ID NO: 534934 - RNA, 19 nt, Artificial Sequence
  Description of Artificial Sequence: Synthetic oligonucleotide
  Antisense strand to SEQ ID NO: 534933
auguaacacaucugcuauc

SEQ ID NO: 534935 - RNA, 19 nt, Artificial Sequence
  Description of Artificial Sequence: Synthetic oligonucleotide
  Sense strand starting at position 536 of SEQ ID NO: 318077
aaguuuauggagcaucuaa

SEQ ID NO: 534936 - RNA, 19 nt, Artificial Sequence
  Description of Artificial Sequence: Synthetic oligonucleotide
  Antisense strand to SEQ ID NO: 534935
uuagaugcuccauaaacuu

SEQ ID NO: 534937 - RNA, 19 nt, Artificial Sequence
  Description of Artificial Sequence: Synthetic oligonucleotide
  Sense strand starting at position 665 of SEQ ID NO: 318077
uuuguacguguccauagaa

SEQ ID NO: 534938 - RNA, 19 nt, Artificial Sequence
  Description of Artificial Sequence: Synthetic oligonucleotide
  Antisense strand to SEQ ID NO: 534937
uucuauggacacguacaaa

SEQ ID NO: 534939 - RNA, 19 nt, Artificial Sequence
  Description of Artificial Sequence: Synthetic oligonucleotide
  Sense strand starting at position 934 of SEQ ID NO: 318077
agcuuaucgagugaaggga

SEQ ID NO: 534940 - RNA, 19 nt, Artificial Sequence
  Description of Artificial Sequence: Synthetic oligonucleotide
  Antisense strand to SEQ ID NO: 534939
ucccuucacucgauaagcu

SEQ ID NO: 534941 - RNA, 19 nt, Artificial Sequence
  Description of Artificial Sequence: Synthetic oligonucleotide
  Sense strand starting at position 1027 of SEQ ID NO: 318077
ugccaucagugauuacaaa

SEQ ID NO: 534942 - RNA, 19 nt, Artificial Sequence
  Description of Artificial Sequence: Synthetic oligonucleotide
  Antisense strand to SEQ ID NO: 534941
uuuguaaucacugauggca

SEQ ID NO: 534943 - RNA, 19 nt, Artificial Sequence
  Description of Artificial Sequence: Synthetic oligonucleotide
  Sense strand starting at position 1028 of SEQ ID NO: 318077
gccaucagugauuacaaau

SEQ ID NO: 534944 - RNA, 19 nt, Artificial Sequence
  Description of Artificial Sequence: Synthetic oligonucleotide
  Antisense strand to SEQ ID NO: 534943
auuuguaaucacugauggc

SEQ ID NO: 534945 - RNA, 19 nt, Artificial Sequence
  Description of Artificial Sequence: Synthetic oligonucleotide
  Sense strand starting at position 1050 of SEQ ID NO: 318077
gcuggcauuguuggaauaa

SEQ ID NO: 534946 - RNA, 19 nt, Artificial Sequence
  Description of Artificial Sequence: Synthetic oligonucleotide
  Antisense strand to SEQ ID NO: 534945
uuauuccaacaaugccagc

SEQ ID NO: 534947 - RNA, 19 nt, Artificial Sequence
  Description of Artificial Sequence: Synthetic oligonucleotide
  Sense strand starting at position 1081 of SEQ ID NO: 318077
cggaguccucucuaauauc

SEQ ID NO: 534948 - RNA, 19 nt, Artificial Sequence
  Description of Artificial Sequence: Synthetic oligonucleotide
  Antisense strand to SEQ ID NO: 534947
gauauuagagaggacuccg

SEQ ID NO: 534949 - RNA, 19 nt, Artificial Sequence
  Description of Artificial Sequence: Synthetic oligonucleotide
  Sense strand starting at position 1138 of SEQ ID NO: 318077
agaauaguaucaguuugag

SEQ ID NO: 534950 - RNA, 19 nt, Artificial Sequence
  Description of Artificial Sequence: Synthetic oligonucleotide
  Antisense strand to SEQ ID NO: 534949
cucaaacugauacuauucu

SEQ ID NO: 534951 - RNA, 19 nt, Artificial Sequence
  Description of Artificial Sequence: Synthetic oligonucleotide
  Sense strand starting at position 1141 of SEQ ID NO: 318077
auaguaucaguuugagcca

SEQ ID NO: 534952 - RNA, 19 nt, Artificial Sequence
  Description of Artificial Sequence: Synthetic oligonucleotide
  Antisense strand to SEQ ID NO: 534951
uggcucaaacugauacuau

SEQ ID NO: 534953 - RNA, 19 nt, Artificial Sequence
  Description of Artificial Sequence: Synthetic oligonucleotide
  Sense strand starting at position 1180 of SEQ ID NO: 318077
uuccuuucugaguaagaau

SEQ ID NO: 534954 - RNA, 19 nt, Artificial Sequence
  Description of Artificial Sequence: Synthetic oligonucleotide
  Antisense strand to SEQ ID NO: 534953
auucuuacucagaaaggaa

SEQ ID NO: 534955 - RNA, 19 nt, Artificial Sequence
  Description of Artificial Sequence: Synthetic oligonucleotide
  Sense strand starting at position 2034 of SEQ ID NO: 318077
gcauguuucccagugcauu

SEQ ID NO: 534956 - RNA, 19 nt, Artificial Sequence
  Description of Artificial Sequence: Synthetic oligonucleotide
  Antisense strand to SEQ ID NO: 534955
aaugcacugggaaacaugc

SEQ ID NO: 534957 - RNA, 19 nt, Artificial Sequence
  Description of Artificial Sequence: Synthetic oligonucleotide
  Sense strand starting at position 2090 of SEQ ID NO: 318077
gcccuuacauucucaguua

SEQ ID NO: 534958 - RNA, 19 nt, Artificial Sequence
  Description of Artificial Sequence: Synthetic oligonucleotide
  Antisense strand to SEQ ID NO: 534957
uaacugagaauguaagggc

SEQ ID NO: 534959 - RNA, 19 nt, Artificial Sequence
  Description of Artificial Sequence: Synthetic oligonucleotide
  Sense strand starting at position 2101 of SEQ ID NO: 318077
cucaguuauccuuggcaaa

SEQ ID NO: 534960 - RNA, 19 nt, Artificial Sequence
  Description of Artificial Sequence: Synthetic oligonucleotide
  Antisense strand to SEQ ID NO: 534959
uuugccaaggauaacugag

SEQ ID NO: 534961 - RNA, 19 nt, Artificial Sequence
  Description of Artificial Sequence: Synthetic oligonucleotide
  Sense strand starting at position 2102 of SEQ ID NO: 318077
ucaguuauccuuggcaaau

SEQ ID NO: 534962 - RNA, 19 nt, Artificial Sequence
  Description of Artificial Sequence: Synthetic oligonucleotide
  Antisense strand to SEQ ID NO: 534961
auuugccaaggauaacuga

SEQ ID NO: 534963 - RNA, 19 nt, Artificial Sequence
  Description of Artificial Sequence: Synthetic oligonucleotide
  Sense strand starting at position 2103 of SEQ ID NO: 318077
caguuauccuuggcaaaug

SEQ ID NO: 534964 - RNA, 19 nt, Artificial Sequence
  Description of Artificial Sequence: Synthetic oligonucleotide
  Antisense strand to SEQ ID NO: 534963
cauuugccaaggauaacug

SEQ ID NO: 534965 - RNA, 19 nt, Artificial Sequence
  Description of Artificial Sequence: Synthetic oligonucleotide
  Sense strand starting at position 2606 of SEQ ID NO: 318077
uuucccucgucuccagaua

SEQ ID NO: 534966 - RNA, 19 nt, Artificial Sequence
  Description of Artificial Sequence: Synthetic oligonucleotide
  Antisense strand to SEQ ID NO: 534965
uaucuggagacgagggaaa

SEQ ID NO: 534967 - RNA, 19 nt, Artificial Sequence
  Description of Artificial Sequence: Synthetic oligonucleotide
  Sense strand starting at position 2638 of SEQ ID NO: 318077
ggcagaaucuagcuguaau

SEQ ID NO: 534968 - RNA, 19 nt, Artificial Sequence
  Description of Artificial Sequence: Synthetic oligonucleotide
  Antisense strand to SEQ ID NO: 534967
auuacagcuagauucugcc

SEQ ID NO: 534969 - RNA, 19 nt, Artificial Sequence
  Description of Artificial Sequence: Synthetic oligonucleotide
  Sense strand starting at position 2708 of SEQ ID NO: 318077
cccuguguccuaugcauuu

SEQ ID NO: 534970 - RNA, 19 nt, Artificial Sequence
  Description of Artificial Sequence: Synthetic oligonucleotide
  Antisense strand to SEQ ID NO: 534969
aaaugcauaggacacaggg

SEQ ID NO: 534971 - RNA, 19 nt, Artificial Sequence
  Description of Artificial Sequence: Synthetic oligonucleotide
  Sense strand starting at position 2763 of SEQ ID NO: 318077
acacauuaucuggguuuau

SEQ ID NO: 534972 - RNA, 19 nt, Artificial Sequence
  Description of Artificial Sequence: Synthetic oligonucleotide
  Antisense strand to SEQ ID NO: 534971
auaaacccagauaaugugu

SEQ ID NO: 534973 - RNA, 19 nt, Artificial Sequence
  Description of Artificial Sequence: Synthetic oligonucleotide
  Sense strand starting at position 2773 of SEQ ID NO: 318077
uggguuuauuuacaucuga

SEQ ID NO: 534974 - RNA, 19 nt, Artificial Sequence
  Description of Artificial Sequence: Synthetic oligonucleotide
  Antisense strand to SEQ ID NO: 534973
ucagauguaaauaaaccca

SEQ ID NO: 534975 - RNA, 19 nt, Artificial Sequence
  Description of Artificial Sequence: Synthetic oligonucleotide
  Sense strand starting at position 2824 of SEQ ID NO: 318077
agaagugacaaacgucaga

SEQ ID NO: 534976 - RNA, 19 nt, Artificial Sequence
  Description of Artificial Sequence: Synthetic oligonucleotide
  Antisense strand to SEQ ID NO: 534975
ucugacguuugucacuucu

SEQ ID NO: 534977 - RNA, 19 nt, Artificial Sequence
  Description of Artificial Sequence: Synthetic oligonucleotide
  Sense strand starting at position 2909 of SEQ ID NO: 318077
augucaaagcuuugaauga

SEQ ID NO: 534978 - RNA, 19 nt, Artificial Sequence
  Description of Artificial Sequence: Synthetic oligonucleotide
  Antisense strand to SEQ ID NO: 534977
ucauucaaagcuuugacau

SEQ ID NO: 534979 - RNA, 19 nt, Artificial Sequence
  Description of Artificial Sequence: Synthetic oligonucleotide
  Sense strand starting at position 2954 of SEQ ID NO: 318077
ggauuaaucuugucacagc

SEQ ID NO: 534980 - RNA, 19 nt, Artificial Sequence
  Description of Artificial Sequence: Synthetic oligonucleotide
  Antisense strand to SEQ ID NO: 534979
gcugugacaagauuaaucc

SEQ ID NO: 534981 - RNA, 19 nt, Artificial Sequence
  Description of Artificial Sequence: Synthetic oligonucleotide
  Sense strand starting at position 2974 of SEQ ID NO: 318077
cugcuacugaguuggcaaa

SEQ ID NO: 534982 - RNA, 19 nt, Artificial Sequence
  Description of Artificial Sequence: Synthetic oligonucleotide
  Antisense strand to SEQ ID NO: 534981
uuugccaacucaguagcag

SEQ ID NO: 534983 - RNA, 19 nt, Artificial Sequence
  Description of Artificial Sequence: Synthetic oligonucleotide
  Sense strand starting at position 3056 of SEQ ID NO: 318077
ugaggcaacuccuuaucca

SEQ ID NO: 534984 - RNA, 19 nt, Artificial Sequence
  Description of Artificial Sequence: Synthetic oligonucleotide
  Antisense strand to SEQ ID NO: 534983
uggauaaggaguugccuca

SEQ ID NO: 534985 - RNA, 19 nt, Artificial Sequence
  Description of Artificial Sequence: Synthetic oligonucleotide
  Sense strand starting at position 3136 of SEQ ID NO: 318077
auaugcuaguguuuauacu

SEQ ID NO: 534986 - RNA, 19 nt, Artificial Sequence
  Description of Artificial Sequence: Synthetic oligonucleotide
  Antisense strand to SEQ ID NO: 534985
aguauaaacacuagcauau

SEQ ID NO: 534987 - RNA, 19 nt, Artificial Sequence
  Description of Artificial Sequence: Synthetic oligonucleotide
  Sense strand starting at position 3211 of SEQ ID NO: 318077
ccucgaaguccuggaauca

SEQ ID NO: 534988 - RNA, 19 nt, Artificial Sequence
  Description of Artificial Sequence: Synthetic oligonucleotide
  Antisense strand to SEQ ID NO: 534987
ugauuccaggacuucgagg

SEQ ID NO: 534989 - RNA, 19 nt, Artificial Sequence
  Description of Artificial Sequence: Synthetic oligonucleotide
  Sense strand starting at position 3212 of SEQ ID NO: 318077
cucgaaguccuggaaucaa

SEQ ID NO: 534990 - RNA, 19 nt, Artificial Sequence
  Description of Artificial Sequence: Synthetic oligonucleotide
  Antisense strand to SEQ ID NO: 534989
uugauuccaggacuucgag

SEQ ID NO: 534991 - RNA, 19 nt, Artificial Sequence
  Description of Artificial Sequence: Synthetic oligonucleotide
  Sense strand starting at position 3489 of SEQ ID NO: 318077
aaagcuuuguagcugaaga

SEQ ID NO: 534992 - RNA, 19 nt, Artificial Sequence
  Description of Artificial Sequence: Synthetic oligonucleotide
  Antisense strand to SEQ ID NO: 534991
ucuucagcuacaaagcuuu

SEQ ID NO: 534993 - RNA, 19 nt, Artificial Sequence
  Description of Artificial Sequence: Synthetic oligonucleotide
  Sense strand starting at position 3491 of SEQ ID NO: 318077
agcuuuguagcugaagaca

SEQ ID NO: 534994 - RNA, 19 nt, Artificial Sequence
  Description of Artificial Sequence: Synthetic oligonucleotide
  Antisense strand to SEQ ID NO: 534993
ugucuucagcuacaaagcu

SEQ ID NO: 534995 - RNA, 19 nt, Artificial Sequence
  Description of Artificial Sequence: Synthetic oligonucleotide
  Sense strand starting at position 3570 of SEQ ID NO: 318077
guaaauacuucugugcuau

SEQ ID NO: 534996 - RNA, 19 nt, Artificial Sequence
  Description of Artificial Sequence: Synthetic oligonucleotide
  Antisense strand to SEQ ID NO: 534995
auagcacagaaguauuuac

SEQ ID NO: 534997 - RNA, 19 nt, Artificial Sequence
  Description of Artificial Sequence: Synthetic oligonucleotide
  Sense strand starting at position 3620 of SEQ ID NO: 318077
gccaccaucuucuuuguga

SEQ ID NO: 534998 - RNA, 19 nt, Artificial Sequence
  Description of Artificial Sequence: Synthetic oligonucleotide
  Antisense strand to SEQ ID NO: 534997
ucacaaagaagaugguggc

SEQ ID NO: 534999 - RNA, 19 nt, Artificial Sequence
  Description of Artificial Sequence: Synthetic oligonucleotide
  Sense strand starting at position 3621 of SEQ ID NO: 318077
ccaccaucuucuuugugau

SEQ ID NO: 535000 - RNA, 19 nt, Artificial Sequence
  Description of Artificial Sequence: Synthetic oligonucleotide
  Antisense strand to SEQ ID NO: 534999
aucacaaagaagauggugg

SEQ ID NO: 535001 - RNA, 19 nt, Artificial Sequence
  Description of Artificial Sequence: Synthetic oligonucleotide
  Sense strand starting at position 54 of SEQ ID NO: 318078
aggagaaguggcgaauuau

SEQ ID NO: 535002 - RNA, 19 nt, Artificial Sequence
  Description of Artificial Sequence: Synthetic oligonucleotide
  Antisense strand to SEQ ID NO: 535001
auaauucgccacuucuccu

SEQ ID NO: 535003 - RNA, 19 nt, Artificial Sequence
  Description of Artificial Sequence: Synthetic oligonucleotide
  Sense strand starting at position 66 of SEQ ID NO: 318078
gaauuaucuuaaguguuga

SEQ ID NO: 535004 - RNA, 19 nt, Artificial Sequence
  Description of Artificial Sequence: Synthetic oligonucleotide
  Antisense strand to SEQ ID NO: 535003
ucaacacuuaagauaauuc

SEQ ID NO: 535005 - RNA, 19 nt, Artificial Sequence
  Description of Artificial Sequence: Synthetic oligonucleotide
  Sense strand starting at position 203 of SEQ ID NO: 318078
uuugaaaguccuuguugaa

SEQ ID NO: 535006 - RNA, 19 nt, Artificial Sequence
  Description of Artificial Sequence: Synthetic oligonucleotide
  Antisense strand to SEQ ID NO: 535005
uucaacaaggacuuucaaa

SEQ ID NO: 535007 - RNA, 19 nt, Artificial Sequence
  Description of Artificial Sequence: Synthetic oligonucleotide
  Sense strand starting at position 207 of SEQ ID NO: 318078
aaaguccuuguugaaguau

SEQ ID NO: 535008 - RNA, 19 nt, Artificial Sequence
  Description of Artificial Sequence: Synthetic oligonucleotide
  Antisense strand to SEQ ID NO: 535007
auacuucaacaaggacuuu

SEQ ID NO: 535009 - RNA, 19 nt, Artificial Sequence
  Description of Artificial Sequence: Synthetic oligonucleotide
  Sense strand starting at position 242 of SEQ ID NO: 318078
uaagcagagaguuggagua

SEQ ID NO: 535010 - RNA, 19 nt, Artificial Sequence
  Description of Artificial Sequence: Synthetic oligonucleotide
  Antisense strand to SEQ ID NO: 535009
uacuccaacucucugcuua

SEQ ID NO: 535011 - RNA, 19 nt, Artificial Sequence
  Description of Artificial Sequence: Synthetic oligonucleotide
  Sense strand starting at position 770 of SEQ ID NO: 318078
ggaauaugcgcccauagag

SEQ ID NO: 535012 - RNA, 19 nt, Artificial Sequence
  Description of Artificial Sequence: Synthetic oligonucleotide
  Antisense strand to SEQ ID NO: 535011
cucuaugggcgcauauucc

SEQ ID NO: 535013 - RNA, 19 nt, Artificial Sequence
  Description of Artificial Sequence: Synthetic oligonucleotide
  Sense strand starting at position 812 of SEQ ID NO: 318078
uguagaaagcuccaaaggu

SEQ ID NO: 535014 - RNA, 19 nt, Artificial Sequence
  Description of Artificial Sequence: Synthetic oligonucleotide
  Antisense strand to SEQ ID NO: 535013
accuuuggagcuuucuaca

SEQ ID NO: 535015 - RNA, 19 nt, Artificial Sequence
  Description of Artificial Sequence: Synthetic oligonucleotide
  Sense strand starting at position 835 of SEQ ID NO: 318078
uagauaguguagccaugau

SEQ ID NO: 535016 - RNA, 19 nt, Artificial Sequence
  Description of Artificial Sequence: Synthetic oligonucleotide
  Antisense strand to SEQ ID NO: 535015
aucauggcuacacuaucua

SEQ ID NO: 535017 - RNA, 19 nt, Artificial Sequence
  Description of Artificial Sequence: Synthetic oligonucleotide
  Sense strand starting at position 839 of SEQ ID NO: 318078
uaguguagccaugauccuu

SEQ ID NO: 535018 - RNA, 19 nt, Artificial Sequence
  Description of Artificial Sequence: Synthetic oligonucleotide
  Antisense strand to SEQ ID NO: 535017
aaggaucauggcuacacua

SEQ ID NO: 535019 - RNA, 19 nt, Artificial Sequence
  Description of Artificial Sequence: Synthetic oligonucleotide
  Sense strand starting at position 1205 of SEQ ID NO: 318078
uaagauaauuggccacguu

SEQ ID NO: 535020 - RNA, 19 nt, Artificial Sequence
  Description of Artificial Sequence: Synthetic oligonucleotide
  Antisense strand to SEQ ID NO: 535019
aacguggccaauuaucuua

SEQ ID NO: 535021 - RNA, 19 nt, Artificial Sequence
  Description of Artificial Sequence: Synthetic oligonucleotide
  Sense strand starting at position 1340 of SEQ ID NO: 318078
cggagauaccaguaguguu

SEQ ID NO: 535022 - RNA, 19 nt, Artificial Sequence
  Description of Artificial Sequence: Synthetic oligonucleotide
  Antisense strand to SEQ ID NO: 535021
aacacuacugguaucuccg

SEQ ID NO: 535023 - RNA, 19 nt, Artificial Sequence
  Description of Artificial Sequence: Synthetic oligonucleotide
  Sense strand starting at position 1661 of SEQ ID NO: 318078
uggaguuggccugaaagca

SEQ ID NO: 535024 - RNA, 19 nt, Artificial Sequence
  Description of Artificial Sequence: Synthetic oligonucleotide
  Antisense strand to SEQ ID NO: 535023
ugcuuucaggccaacucca

SEQ ID NO: 535025 - RNA, 19 nt, Artificial Sequence
  Description of Artificial Sequence: Synthetic oligonucleotide
  Sense strand starting at position 2121 of SEQ ID NO: 318078
agcgucuuugcauucgagu

SEQ ID NO: 535026 - RNA, 19 nt, Artificial Sequence
  Description of Artificial Sequence: Synthetic oligonucleotide
  Antisense strand to SEQ ID NO: 535025
acucgaaugcaaagacgcu

SEQ ID NO: 535027 - RNA, 19 nt, Artificial Sequence
  Description of Artificial Sequence: Synthetic oligonucleotide
  Sense strand starting at position 2382 of SEQ ID NO: 318078
ugaacaguccugggucagu

SEQ ID NO: 535028 - RNA, 19 nt, Artificial Sequence
  Description of Artificial Sequence: Synthetic oligonucleotide
  Antisense strand to SEQ ID NO: 535027
acugacccaggacuguuca

SEQ ID NO: 535029 - RNA, 19 nt, Artificial Sequence
  Description of Artificial Sequence: Synthetic oligonucleotide
  Sense strand starting at position 2391 of SEQ ID NO: 318078
cugggucagucucccaauu

SEQ ID NO: 535030 - RNA, 19 nt, Artificial Sequence
  Description of Artificial Sequence: Synthetic oligonucleotide
  Antisense strand to SEQ ID NO: 535029
aauugggagacugacccag

SEQ ID NO: 535031 - RNA, 19 nt, Artificial Sequence
  Description of Artificial Sequence: Synthetic oligonucleotide
  Sense strand starting at position 2411 of SEQ ID NO: 318078
uugcuaauugauggaagaa

SEQ ID NO: 535032 - RNA, 19 nt, Artificial Sequence
  Description of Artificial Sequence: Synthetic oligonucleotide
  Antisense strand to SEQ ID NO: 535031
uucuuccaucaauuagcaa

SEQ ID NO: 535033 - RNA, 19 nt, Artificial Sequence
  Description of Artificial Sequence: Synthetic oligonucleotide
  Sense strand starting at position 2586 of SEQ ID NO: 318078
uuacucccucagggagaau

SEQ ID NO: 535034 - RNA, 19 nt, Artificial Sequence
  Description of Artificial Sequence: Synthetic oligonucleotide
  Antisense strand to SEQ ID NO: 535033
auucucccugagggaguaa

SEQ ID NO: 535035 - RNA, 19 nt, Artificial Sequence
  Description of Artificial Sequence: Synthetic oligonucleotide
  Sense strand starting at position 2597 of SEQ ID NO: 318078
gggagaauauugccuguga

SEQ ID NO: 535036 - RNA, 19 nt, Artificial Sequence
  Description of Artificial Sequence: Synthetic oligonucleotide
  Antisense strand to SEQ ID NO: 535035
ucacaggcaauauucuccc

SEQ ID NO: 535037 - RNA, 19 nt, Artificial Sequence
  Description of Artificial Sequence: Synthetic oligonucleotide
  Sense strand starting at position 2598 of SEQ ID NO: 318078
ggagaauauugccugugac

SEQ ID NO: 535038 - RNA, 19 nt, Artificial Sequence
  Description of Artificial Sequence: Synthetic oligonucleotide
  Antisense strand to SEQ ID NO: 535037
gucacaggcaauauucucc

SEQ ID NO: 535039 - RNA, 19 nt, Artificial Sequence
  Description of Artificial Sequence: Synthetic oligonucleotide
  Sense strand starting at position 2599 of SEQ ID NO: 318078
gagaauauugccugugacu

SEQ ID NO: 535040 - RNA, 19 nt, Artificial Sequence
  Description of Artificial Sequence: Synthetic oligonucleotide
  Antisense strand to SEQ ID NO: 535039
agucacaggcaauauucuc

SEQ ID NO: 535041 - RNA, 19 nt, Artificial Sequence
  Description of Artificial Sequence: Synthetic oligonucleotide
  Sense strand starting at position 2601 of SEQ ID NO: 318078
gaauauugccugugacuuu

SEQ ID NO: 535042 - RNA, 19 nt, Artificial Sequence
  Description of Artificial Sequence: Synthetic oligonucleotide
  Antisense strand to SEQ ID NO: 535041
aaagucacaggcaauauuc

SEQ ID NO: 535043 - RNA, 19 nt, Artificial Sequence
  Description of Artificial Sequence: Synthetic oligonucleotide
  Sense strand starting at position 2654 of SEQ ID NO: 318078
uuauaaaggacgugucaaa

SEQ ID NO: 535044 - RNA, 19 nt, Artificial Sequence
  Description of Artificial Sequence: Synthetic oligonucleotide
  Antisense strand to SEQ ID NO: 535043
uuugacacguccuuuauaa

SEQ ID NO: 535045 - RNA, 19 nt, Artificial Sequence
  Description of Artificial Sequence: Synthetic oligonucleotide
  Sense strand starting at position 2944 of SEQ ID NO: 318078
gccggcuagccucucuuaa

SEQ ID NO: 535046 - RNA, 19 nt, Artificial Sequence
  Description of Artificial Sequence: Synthetic oligonucleotide
  Antisense strand to SEQ ID NO: 535045
uuaagagaggcuagccggc

SEQ ID NO: 535047 - RNA, 19 nt, Artificial Sequence
  Description of Artificial Sequence: Synthetic oligonucleotide
  Sense strand starting at position 2992 of SEQ ID NO: 318078
aguucuaagcaaugagguu

SEQ ID NO: 535048 - RNA, 19 nt, Artificial Sequence
  Description of Artificial Sequence: Synthetic oligonucleotide
  Antisense strand to SEQ ID NO: 535047
aaccucauugcuuagaacu

SEQ ID NO: 535049 - RNA, 19 nt, Artificial Sequence
  Description of Artificial Sequence: Synthetic oligonucleotide
  Sense strand starting at position 2993 of SEQ ID NO: 318078
guucuaagcaaugagguuu

SEQ ID NO: 535050 - RNA, 19 nt, Artificial Sequence
  Description of Artificial Sequence: Synthetic oligonucleotide
  Antisense strand to SEQ ID NO: 535049
aaaccucauugcuuagaac

SEQ ID NO: 535051 - RNA, 19 nt, Artificial Sequence
  Description of Artificial Sequence: Synthetic oligonucleotide
  Sense strand starting at position 3064 of SEQ ID NO: 318078
gcagaaaugaagcaaguau

SEQ ID NO: 535052 - RNA, 19 nt, Artificial Sequence
  Description of Artificial Sequence: Synthetic oligonucleotide
  Antisense strand to SEQ ID NO: 535051
auacuugcuucauuucugc

SEQ ID NO: 535053 - RNA, 19 nt, Artificial Sequence
  Description of Artificial Sequence: Synthetic oligonucleotide
  Sense strand starting at position 3239 of SEQ ID NO: 318078
cuucgaaagccugaaguau

SEQ ID NO: 535054 - RNA, 19 nt, Artificial Sequence
  Description of Artificial Sequence: Synthetic oligonucleotide
  Antisense strand to SEQ ID NO: 535053
auacuucaggcuuucgaag

SEQ ID NO: 535055 - RNA, 19 nt, Artificial Sequence
  Description of Artificial Sequence: Synthetic oligonucleotide
  Sense strand starting at position 3248 of SEQ ID NO: 318078
ccugaaguaucugucauuc

SEQ ID NO: 535056 - RNA, 19 nt, Artificial Sequence
  Description of Artificial Sequence: Synthetic oligonucleotide
  Antisense strand to SEQ ID NO: 535055
gaaugacagauacuucagg

SEQ ID NO: 535057 - RNA, 19 nt, Artificial Sequence
  Description of Artificial Sequence: Synthetic oligonucleotide
  Sense strand starting at position 3454 of SEQ ID NO: 318078
cuuacaaggguuuguucua

SEQ ID NO: 535058 - RNA, 19 nt, Artificial Sequence
  Description of Artificial Sequence: Synthetic oligonucleotide
  Antisense strand to SEQ ID NO: 535057
uagaacaaacccuuguaag

SEQ ID NO: 535059 - RNA, 19 nt, Artificial Sequence
  Description of Artificial Sequence: Synthetic oligonucleotide
  Sense strand starting at position 3455 of SEQ ID NO: 318078
uuacaaggguuuguucuaa

SEQ ID NO: 535060 - RNA, 19 nt, Artificial Sequence
  Description of Artificial Sequence: Synthetic oligonucleotide
  Antisense strand to SEQ ID NO: 535059
uuagaacaaacccuuguaa

SEQ ID NO: 535061 - RNA, 19 nt, Artificial Sequence
  Description of Artificial Sequence: Synthetic oligonucleotide
  Sense strand starting at position 3473 of SEQ ID NO: 318078
agcuguuuccuuuaacaag

SEQ ID NO: 535062 - RNA, 19 nt, Artificial Sequence
  Description of Artificial Sequence: Synthetic oligonucleotide
  Antisense strand to SEQ ID NO: 535061
cuuguuaaaggaaacagcu

SEQ ID NO: 535063 - RNA, 19 nt, Artificial Sequence
  Description of Artificial Sequence: Synthetic oligonucleotide
  Sense strand starting at position 3530 of SEQ ID NO: 318078
ugggacuucuaagcaacua

SEQ ID NO: 535064 - RNA, 19 nt, Artificial Sequence
  Description of Artificial Sequence: Synthetic oligonucleotide
  Antisense strand to SEQ ID NO: 535063
uaguugcuuagaaguccca

SEQ ID NO: 535065 - RNA, 19 nt, Artificial Sequence
  Description of Artificial Sequence: Synthetic oligonucleotide
  Sense strand starting at position 3587 of SEQ ID NO: 318078
gauugcaugccugagguga

SEQ ID NO: 535066 - RNA, 19 nt, Artificial Sequence
  Description of Artificial Sequence: Synthetic oligonucleotide
  Antisense strand to SEQ ID NO: 535065
ucaccucaggcaugcaauc

SEQ ID NO: 535067 - RNA, 19 nt, Artificial Sequence
  Description of Artificial Sequence: Synthetic oligonucleotide
  Sense strand starting at position 3624 of SEQ ID NO: 318078
agcaguugacacuggauaa

SEQ ID NO: 535068 - RNA, 19 nt, Artificial Sequence
  Description of Artificial Sequence: Synthetic oligonucleotide
  Antisense strand to SEQ ID NO: 535067
uuauccagugucaacugcu

SEQ ID NO: 535069 - RNA, 19 nt, Artificial Sequence
  Description of Artificial Sequence: Synthetic oligonucleotide
  Sense strand starting at position 3774 of SEQ ID NO: 318078
gggccaaugcauuacaaua

SEQ ID NO: 535070 - RNA, 19 nt, Artificial Sequence
  Description of Artificial Sequence: Synthetic oligonucleotide
  Antisense strand to SEQ ID NO: 535069
uauuguaaugcauuggccc

SEQ ID NO: 535071 - RNA, 19 nt, Artificial Sequence
  Description of Artificial Sequence: Synthetic oligonucleotide
  Sense strand starting at position 3794 of SEQ ID NO: 318078
aggacaguguguuuggaua

SEQ ID NO: 535072 - RNA, 19 nt, Artificial Sequence
  Description of Artificial Sequence: Synthetic oligonucleotide
  Antisense strand to SEQ ID NO: 535071
uauccaaacacacuguccu

SEQ ID NO: 535073 - RNA, 19 nt, Artificial Sequence
  Description of Artificial Sequence: Synthetic oligonucleotide
  Sense strand starting at position 3935 of SEQ ID NO: 318078
auaaguauacaugguaaug

SEQ ID NO: 535074 - RNA, 19 nt, Artificial Sequence
  Description of Artificial Sequence: Synthetic oligonucleotide
  Antisense strand to SEQ ID NO: 535073
cauuaccauguauacuuau

SEQ ID NO: 535075 - RNA, 19 nt, Artificial Sequence
  Description of Artificial Sequence: Synthetic oligonucleotide
  Sense strand starting at position 3946 of SEQ ID NO: 318078
ugguaaugcuguuuacaga

SEQ ID NO: 535076 - RNA, 19 nt, Artificial Sequence
  Description of Artificial Sequence: Synthetic oligonucleotide
  Antisense strand to SEQ ID NO: 535075
ucuguaaacagcauuacca

SEQ ID NO: 535077 - RNA, 19 nt, Artificial Sequence
  Description of Artificial Sequence: Synthetic oligonucleotide
  Sense strand starting at position 3947 of SEQ ID NO: 318078
gguaaugcuguuuacagac

SEQ ID NO: 535078 - RNA, 19 nt, Artificial Sequence
  Description of Artificial Sequence: Synthetic oligonucleotide
  Antisense strand to SEQ ID NO: 535077
gucuguaaacagcauuacc

SEQ ID NO: 535079 - RNA, 19 nt, Artificial Sequence
  Description of Artificial Sequence: Synthetic oligonucleotide
  Sense strand starting at position 3956 of SEQ ID NO: 318078
guuuacagacucugaagaa

SEQ ID NO: 535080 - RNA, 19 nt, Artificial Sequence
  Description of Artificial Sequence: Synthetic oligonucleotide
  Antisense strand to SEQ ID NO: 535079
uucuucagagucuguaaac

SEQ ID NO: 535081 - RNA, 19 nt, Artificial Sequence
  Description of Artificial Sequence: Synthetic oligonucleotide
  Sense strand starting at position 57 of SEQ ID NO: 318079
ccagauaacucagaggaac

SEQ ID NO: 535082 - RNA, 19 nt, Artificial Sequence
  Description of Artificial Sequence: Synthetic oligonucleotide
  Antisense strand to SEQ ID NO: 535081
guuccucugaguuaucugg

SEQ ID NO: 535083 - RNA, 19 nt, Artificial Sequence
  Description of Artificial Sequence: Synthetic oligonucleotide
  Sense strand starting at position 108 of SEQ ID NO: 318079
cuccuucugcucgauauga

SEQ ID NO: 535084 - RNA, 19 nt, Artificial Sequence
  Description of Artificial Sequence: Synthetic oligonucleotide
  Antisense strand to SEQ ID NO: 535083
ucauaucgagcagaaggag

SEQ ID NO: 535085 - RNA, 19 nt, Artificial Sequence
  Description of Artificial Sequence: Synthetic oligonucleotide
  Sense strand starting at position 110 of SEQ ID NO: 318079
ccuucugcucgauaugaac

SEQ ID NO: 535086 - RNA, 19 nt, Artificial Sequence
  Description of Artificial Sequence: Synthetic oligonucleotide
  Antisense strand to SEQ ID NO: 535085
guucauaucgagcagaagg

SEQ ID NO: 535087 - RNA, 19 nt, Artificial Sequence
  Description of Artificial Sequence: Synthetic oligonucleotide
  Sense strand starting at position 133 of SEQ ID NO: 318079
cuaaaugcucccugaagcu

SEQ ID NO: 535088 - RNA, 19 nt, Artificial Sequence
  Description of Artificial Sequence: Synthetic oligonucleotide
  Antisense strand to SEQ ID NO: 535087
agcuucagggagcauuuag

SEQ ID NO: 535089 - RNA, 19 nt, Artificial Sequence
  Description of Artificial Sequence: Synthetic oligonucleotide
  Sense strand starting at position 201 of SEQ ID NO: 318079
guggcucuccucuauaaua

SEQ ID NO: 535090 - RNA, 19 nt, Artificial Sequence
  Description of Artificial Sequence: Synthetic oligonucleotide
  Antisense strand to SEQ ID NO: 535089
uauuauagaggagagccac

SEQ ID NO: 535091 - RNA, 19 nt, Artificial Sequence
  Description of Artificial Sequence: Synthetic oligonucleotide
  Sense strand starting at position 248 of SEQ ID NO: 318079
gagggaaugaugcaaacgu

SEQ ID NO: 535092 - RNA, 19 nt, Artificial Sequence
  Description of Artificial Sequence: Synthetic oligonucleotide
  Antisense strand to SEQ ID NO: 535091
acguuugcaucauucccuc

SEQ ID NO: 535093 - RNA, 19 nt, Artificial Sequence
  Description of Artificial Sequence: Synthetic oligonucleotide
  Sense strand starting at position 365 of SEQ ID NO: 318079
uccugacacuuguauauuu

SEQ ID NO: 535094 - RNA, 19 nt, Artificial Sequence
  Description of Artificial Sequence: Synthetic oligonucleotide
  Antisense strand to SEQ ID NO: 535093
aaauauacaagugucagga

SEQ ID NO: 535095 - RNA, 19 nt, Artificial Sequence
  Description of Artificial Sequence: Synthetic oligonucleotide
  Sense strand starting at position 374 of SEQ ID NO: 318079
uuguauauuuccuagguga

SEQ ID NO: 535096 - RNA, 19 nt, Artificial Sequence
  Description of Artificial Sequence: Synthetic oligonucleotide
  Antisense strand to SEQ ID NO: 535095
ucaccuaggaaauauacaa

SEQ ID NO: 535097 - RNA, 19 nt, Artificial Sequence
  Description of Artificial Sequence: Synthetic oligonucleotide
  Sense strand starting at position 528 of SEQ ID NO: 318079
ggucacugaugcucaaguu

SEQ ID NO: 535098 - RNA, 19 nt, Artificial Sequence
  Description of Artificial Sequence: Synthetic oligonucleotide
  Antisense strand to SEQ ID NO: 535097
aacuugagcaucagugacc

SEQ ID NO: 535099 - RNA, 19 nt, Artificial Sequence
  Description of Artificial Sequence: Synthetic oligonucleotide
  Sense strand starting at position 773 of SEQ ID NO: 318079
auugaacucuaggaagaca

SEQ ID NO: 535100 - RNA, 19 nt, Artificial Sequence
  Description of Artificial Sequence: Synthetic oligonucleotide
  Antisense strand to SEQ ID NO: 535099
ugucuuccuagaguucaau

SEQ ID NO: 535101 - RNA, 19 nt, Artificial Sequence
  Description of Artificial Sequence: Synthetic oligonucleotide
  Sense strand starting at position 889 of SEQ ID NO: 318079
gguagcaagcugugaggaa

SEQ ID NO: 535102 - RNA, 19 nt, Artificial Sequence
  Description of Artificial Sequence: Synthetic oligonucleotide
  Antisense strand to SEQ ID NO: 535101
uuccucacagcuugcuacc

SEQ ID NO: 535103 - RNA, 19 nt, Artificial Sequence
  Description of Artificial Sequence: Synthetic oligonucleotide
  Sense strand starting at position 909 of SEQ ID NO: 318079
ugcaucugaaaucgggauu

SEQ ID NO: 535104 - RNA, 19 nt, Artificial Sequence
  Description of Artificial Sequence: Synthetic oligonucleotide
  Antisense strand to SEQ ID NO: 535103
aaucccgauuucagaugca

SEQ ID NO: 535105 - RNA, 19 nt, Artificial Sequence
  Description of Artificial Sequence: Synthetic oligonucleotide
  Sense strand starting at position 915 of SEQ ID NO: 318079
ugaaaucgggauugggauu

SEQ ID NO: 535106 - RNA, 19 nt, Artificial Sequence
  Description of Artificial Sequence: Synthetic oligonucleotide
  Antisense strand to SEQ ID NO: 535105
aaucccaaucccgauuuca

SEQ ID NO: 535107 - RNA, 19 nt, Artificial Sequence
  Description of Artificial Sequence: Synthetic oligonucleotide
  Sense strand starting at position 1246 of SEQ ID NO: 318079
cuuguauagucagugagca

SEQ ID NO: 535108 - RNA, 19 nt, Artificial Sequence
  Description of Artificial Sequence: Synthetic oligonucleotide
  Antisense strand to SEQ ID NO: 535107
ugcucacugacuauacaag

SEQ ID NO: 535109 - RNA, 19 nt, Artificial Sequence
  Description of Artificial Sequence: Synthetic oligonucleotide
  Sense strand starting at position 1247 of SEQ ID NO: 318079
uuguauagucagugagcac

SEQ ID NO: 535110 - RNA, 19 nt, Artificial Sequence
  Description of Artificial Sequence: Synthetic oligonucleotide
  Antisense strand to SEQ ID NO: 535109
gugcucacugacuauacaa

SEQ ID NO: 535111 - RNA, 19 nt, Artificial Sequence
  Description of Artificial Sequence: Synthetic oligonucleotide
  Sense strand starting at position 1248 of SEQ ID NO: 318079
uguauagucagugagcaca

SEQ ID NO: 535112 - RNA, 19 nt, Artificial Sequence
  Description of Artificial Sequence: Synthetic oligonucleotide
  Antisense strand to SEQ ID NO: 535111
ugugcucacugacuauaca

SEQ ID NO: 535113 - RNA, 19 nt, Artificial Sequence
  Description of Artificial Sequence: Synthetic oligonucleotide
  Sense strand starting at position 1336 of SEQ ID NO: 318079
cuggaaacacguuguauac

SEQ ID NO: 535114 - RNA, 19 nt, Artificial Sequence
  Description of Artificial Sequence: Synthetic oligonucleotide
  Antisense strand to SEQ ID NO: 535113
guauacaacguguuuccag

SEQ ID NO: 535115 - RNA, 19 nt, Artificial Sequence
  Description of Artificial Sequence: Synthetic oligonucleotide
  Sense strand starting at position 2123 of SEQ ID NO: 318079
ggcgucugugccagggaaa

SEQ ID NO: 535116 - RNA, 19 nt, Artificial Sequence
  Description of Artificial Sequence: Synthetic oligonucleotide
  Antisense strand to SEQ ID NO: 535115
uuucccuggcacagacgcc

SEQ ID NO: 535117 - RNA, 19 nt, Artificial Sequence
  Description of Artificial Sequence: Synthetic oligonucleotide
  Sense strand starting at position 2136 of SEQ ID NO: 318079
gggaaauccuaucccugua

SEQ ID NO: 535118 - RNA, 19 nt, Artificial Sequence
  Description of Artificial Sequence: Synthetic oligonucleotide
  Antisense strand to SEQ ID NO: 535117
uacagggauaggauuuccc

SEQ ID NO: 535119 - RNA, 19 nt, Artificial Sequence
  Description of Artificial Sequence: Synthetic oligonucleotide
  Sense strand starting at position 2141 of SEQ ID NO: 318079
auccuaucccuguauaguu

SEQ ID NO: 535120 - RNA, 19 nt, Artificial Sequence
  Description of Artificial Sequence: Synthetic oligonucleotide
  Antisense strand to SEQ ID NO: 535119
aacuauacagggauaggau

SEQ ID NO: 535121 - RNA, 19 nt, Artificial Sequence
  Description of Artificial Sequence: Synthetic oligonucleotide
  Sense strand starting at position 2227 of SEQ ID NO: 318079
uucguagcaccuuggauau

SEQ ID NO: 535122 - RNA, 19 nt, Artificial Sequence
  Description of Artificial Sequence: Synthetic oligonucleotide
  Antisense strand to SEQ ID NO: 535121
auauccaaggugcuacgaa

SEQ ID NO: 535123 - RNA, 19 nt, Artificial Sequence
  Description of Artificial Sequence: Synthetic oligonucleotide
  Sense strand starting at position 2272 of SEQ ID NO: 318079
auuccauuugccugaaguc

SEQ ID NO: 535124 - RNA, 19 nt, Artificial Sequence
  Description of Artificial Sequence: Synthetic oligonucleotide
  Antisense strand to SEQ ID NO: 535123
gacuucaggcaaauggaau

SEQ ID NO: 535125 - RNA, 19 nt, Artificial Sequence
  Description of Artificial Sequence: Synthetic oligonucleotide
  Sense strand starting at position 2282 of SEQ ID NO: 318079
ccugaagucuuccuaaaug

SEQ ID NO: 535126 - RNA, 19 nt, Artificial Sequence
  Description of Artificial Sequence: Synthetic oligonucleotide
  Antisense strand to SEQ ID NO: 535125
cauuuaggaagacuucagg

SEQ ID NO: 535127 - RNA, 19 nt, Artificial Sequence
  Description of Artificial Sequence: Synthetic oligonucleotide
  Sense strand starting at position 2299 of SEQ ID NO: 318079
ugauccuguccauauugau

SEQ ID NO: 535128 - RNA, 19 nt, Artificial Sequence
  Description of Artificial Sequence: Synthetic oligonucleotide
  Antisense strand to SEQ ID NO: 535127
aucaauauggacaggauca

SEQ ID NO: 535129 - RNA, 19 nt, Artificial Sequence
  Description of Artificial Sequence: Synthetic oligonucleotide
  Sense strand starting at position 2308 of SEQ ID NO: 318079
ccauauugauaguccacua

SEQ ID NO: 535130 - RNA, 19 nt, Artificial Sequence
  Description of Artificial Sequence: Synthetic oligonucleotide
  Antisense strand to SEQ ID NO: 535129
uaguggacuaucaauaugg

SEQ ID NO: 535131 - RNA, 19 nt, Artificial Sequence
  Description of Artificial Sequence: Synthetic oligonucleotide
  Sense strand starting at position 2371 of SEQ ID NO: 318079
uugagcauguaauuaaaca

SEQ ID NO: 535132 - RNA, 19 nt, Artificial Sequence
  Description of Artificial Sequence: Synthetic oligonucleotide
  Antisense strand to SEQ ID NO: 535131
uguuuaauuacaugcucaa

SEQ ID NO: 535133 - RNA, 19 nt, Artificial Sequence
  Description of Artificial Sequence: Synthetic oligonucleotide
  Sense strand starting at position 2412 of SEQ ID NO: 318079
gucuguaacacgggcauaa

SEQ ID NO: 535134 - RNA, 19 nt, Artificial Sequence
  Description of Artificial Sequence: Synthetic oligonucleotide
  Antisense strand to SEQ ID NO: 535133
uuaugcccguguuacagac

SEQ ID NO: 535135 - RNA, 19 nt, Artificial Sequence
  Description of Artificial Sequence: Synthetic oligonucleotide
  Sense strand starting at position 2706 of SEQ ID NO: 318079
agcuguggacagugauuaa

SEQ ID NO: 535136 - RNA, 19 nt, Artificial Sequence
  Description of Artificial Sequence: Synthetic oligonucleotide
  Antisense strand to SEQ ID NO: 535135
uuaaucacuguccacagcu

SEQ ID NO: 535137 - RNA, 19 nt, Artificial Sequence
  Description of Artificial Sequence: Synthetic oligonucleotide
  Sense strand starting at position 2709 of SEQ ID NO: 318079
uguggacagugauuaacuu

SEQ ID NO: 535138 - RNA, 19 nt, Artificial Sequence
  Description of Artificial Sequence: Synthetic oligonucleotide
  Antisense strand to SEQ ID NO: 535137
aaguuaaucacuguccaca

SEQ ID NO: 535139 - RNA, 19 nt, Artificial Sequence
  Description of Artificial Sequence: Synthetic oligonucleotide
  Sense strand starting at position 2713 of SEQ ID NO: 318079
gacagugauuaacuucuga

SEQ ID NO: 535140 - RNA, 19 nt, Artificial Sequence
  Description of Artificial Sequence: Synthetic oligonucleotide
  Antisense strand to SEQ ID NO: 535139
ucagaaguuaaucacuguc

SEQ ID NO: 535141 - RNA, 19 nt, Artificial Sequence
  Description of Artificial Sequence: Synthetic oligonucleotide
  Sense strand starting at position 2734 of SEQ ID NO: 318079
guaaauaaaucugcaaaga

SEQ ID NO: 535142 - RNA, 19 nt, Artificial Sequence
  Description of Artificial Sequence: Synthetic oligonucleotide
  Antisense strand to SEQ ID NO: 535141
ucuuugcagauuuauuuac

SEQ ID NO: 535143 - RNA, 19 nt, Artificial Sequence
  Description of Artificial Sequence: Synthetic oligonucleotide
  Sense strand starting at position 2832 of SEQ ID NO: 318079
gcuagaaaccuuugaguug

SEQ ID NO: 535144 - RNA, 19 nt, Artificial Sequence
  Description of Artificial Sequence: Synthetic oligonucleotide
  Antisense strand to SEQ ID NO: 535143
caacucaaagguuucuagc

SEQ ID NO: 535145 - RNA, 19 nt, Artificial Sequence
  Description of Artificial Sequence: Synthetic oligonucleotide
  Sense strand starting at position 3095 of SEQ ID NO: 318079
uguguaugucuugaauaug

SEQ ID NO: 535146 - RNA, 19 nt, Artificial Sequence
  Description of Artificial Sequence: Synthetic oligonucleotide
  Antisense strand to SEQ ID NO: 535145
cauauucaagacauacaca

SEQ ID NO: 535147 - RNA, 19 nt, Artificial Sequence
  Description of Artificial Sequence: Synthetic oligonucleotide
  Sense strand starting at position 3098 of SEQ ID NO: 318079
guaugucuugaauauguau

SEQ ID NO: 535148 - RNA, 19 nt, Artificial Sequence
  Description of Artificial Sequence: Synthetic oligonucleotide
  Antisense strand to SEQ ID NO: 535147
auacauauucaagacauac

SEQ ID NO: 535149 - RNA, 19 nt, Artificial Sequence
  Description of Artificial Sequence: Synthetic oligonucleotide
  Sense strand starting at position 3150 of SEQ ID NO: 318079
agaggagcuguagauuguu

SEQ ID NO: 535150 - RNA, 19 nt, Artificial Sequence
  Description of Artificial Sequence: Synthetic oligonucleotide
  Antisense strand to SEQ ID NO: 535149
aacaaucuacagcuccucu

SEQ ID NO: 535151 - RNA, 19 nt, Artificial Sequence
  Description of Artificial Sequence: Synthetic oligonucleotide
  Sense strand starting at position 3159 of SEQ ID NO: 318079
guagauuguuucuuuaaug

SEQ ID NO: 535152 - RNA, 19 nt, Artificial Sequence
  Description of Artificial Sequence: Synthetic oligonucleotide
  Antisense strand to SEQ ID NO: 535151
cauuaaagaaacaaucuac

SEQ ID NO: 535153 - RNA, 19 nt, Artificial Sequence
  Description of Artificial Sequence: Synthetic oligonucleotide
  Sense strand starting at position 3267 of SEQ ID NO: 318079
ugcucagagccugaaucau

SEQ ID NO: 535154 - RNA, 19 nt, Artificial Sequence
  Description of Artificial Sequence: Synthetic oligonucleotide
  Antisense strand to SEQ ID NO: 535153
augauucaggcucugagca

SEQ ID NO: 535155 - RNA, 19 nt, Artificial Sequence
  Description of Artificial Sequence: Synthetic oligonucleotide
  Sense strand starting at position 3361 of SEQ ID NO: 318079
uccacucugucauuugcau

SEQ ID NO: 535156 - RNA, 19 nt, Artificial Sequence
  Description of Artificial Sequence: Synthetic oligonucleotide
  Antisense strand to SEQ ID NO: 535155
augcaaaugacagagugga

SEQ ID NO: 535157 - RNA, 19 nt, Artificial Sequence
  Description of Artificial Sequence: Synthetic oligonucleotide
  Sense strand starting at position 3574 of SEQ ID NO: 318079
cuuccucaggcagauagau

SEQ ID NO: 535158 - RNA, 19 nt, Artificial Sequence
  Description of Artificial Sequence: Synthetic oligonucleotide
  Antisense strand to SEQ ID NO: 535157
aucuaucugccugaggaag

SEQ ID NO: 535159 - RNA, 19 nt, Artificial Sequence
  Description of Artificial Sequence: Synthetic oligonucleotide
  Sense strand starting at position 3681 of SEQ ID NO: 318079
aggaccugugguuauguua

SEQ ID NO: 535160 - RNA, 19 nt, Artificial Sequence
  Description of Artificial Sequence: Synthetic oligonucleotide
  Antisense strand to SEQ ID NO: 535159
uaacauaaccacagguccu

SEQ ID NO: 535161 - RNA, 19 nt, Artificial Sequence
  Description of Artificial Sequence: Synthetic oligonucleotide
  Sense strand starting at position 56 of SEQ ID NO: 318080
ucacuauuauaaguggcaa

SEQ ID NO: 535162 - RNA, 19 nt, Artificial Sequence
  Description of Artificial Sequence: Synthetic oligonucleotide
  Antisense strand to SEQ ID NO: 535161
uugccacuuauaauaguga

SEQ ID NO: 535163 - RNA, 19 nt, Artificial Sequence
  Description of Artificial Sequence: Synthetic oligonucleotide
  Sense strand starting at position 574 of SEQ ID NO: 318080
acugauccaguuugauaca

SEQ ID NO: 535164 - RNA, 19 nt, Artificial Sequence
  Description of Artificial Sequence: Synthetic oligonucleotide
  Antisense strand to SEQ ID NO: 535163
uguaucaaacuggaucagu

SEQ ID NO: 535165 - RNA, 19 nt, Artificial Sequence
  Description of Artificial Sequence: Synthetic oligonucleotide
  Sense strand starting at position 585 of SEQ ID NO: 318080
uugauacagugucugaaau

SEQ ID NO: 535166 - RNA, 19 nt, Artificial Sequence
  Description of Artificial Sequence: Synthetic oligonucleotide
  Antisense strand to SEQ ID NO: 535165
auuucagacacuguaucaa

SEQ ID NO: 535167 - RNA, 19 nt, Artificial Sequence
  Description of Artificial Sequence: Synthetic oligonucleotide
  Sense strand starting at position 586 of SEQ ID NO: 318080
ugauacagugucugaaauu

SEQ ID NO: 535168 - RNA, 19 nt, Artificial Sequence
  Description of Artificial Sequence: Synthetic oligonucleotide
  Antisense strand to SEQ ID NO: 535167
aauuucagacacuguauca

SEQ ID NO: 535169 - RNA, 19 nt, Artificial Sequence
  Description of Artificial Sequence: Synthetic oligonucleotide
  Sense strand starting at position 697 of SEQ ID NO: 318080
gcuuucucugggcaaauaa

SEQ ID NO: 535170 - RNA, 19 nt, Artificial Sequence
  Description of Artificial Sequence: Synthetic oligonucleotide
  Antisense strand to SEQ ID NO: 535169
uuauuugcccagagaaagc

SEQ ID NO: 535171 - RNA, 19 nt, Artificial Sequence
  Description of Artificial Sequence: Synthetic oligonucleotide
  Sense strand starting at position 778 of SEQ ID NO: 318080
cuauguuaauguccuaaga

SEQ ID NO: 535172 - RNA, 19 nt, Artificial Sequence
  Description of Artificial Sequence: Synthetic oligonucleotide
  Antisense strand to SEQ ID NO: 535171
ucuuaggacauuaacauag

SEQ ID NO: 535173 - RNA, 19 nt, Artificial Sequence
  Description of Artificial Sequence: Synthetic oligonucleotide
  Sense strand starting at position 788 of SEQ ID NO: 318080
guccuaagacucugaacca

SEQ ID NO: 535174 - RNA, 19 nt, Artificial Sequence
  Description of Artificial Sequence: Synthetic oligonucleotide
  Antisense strand to SEQ ID NO: 535173
ugguucagagucuuaggac

SEQ ID NO: 535175 - RNA, 19 nt, Artificial Sequence
  Description of Artificial Sequence: Synthetic oligonucleotide
  Sense strand starting at position 809 of SEQ ID NO: 318080
ucaguacaucugggaaaua

SEQ ID NO: 535176 - RNA, 19 nt, Artificial Sequence
  Description of Artificial Sequence: Synthetic oligonucleotide
  Antisense strand to SEQ ID NO: 535175
uauuucccagauguacuga

SEQ ID NO: 535177 - RNA, 19 nt, Artificial Sequence
  Description of Artificial Sequence: Synthetic oligonucleotide
  Sense strand starting at position 1028 of SEQ ID NO: 318080
ucaagaaauucccugguug

SEQ ID NO: 535178 - RNA, 19 nt, Artificial Sequence
  Description of Artificial Sequence: Synthetic oligonucleotide
  Antisense strand to SEQ ID NO: 535177
caaccagggaauuucuuga

SEQ ID NO: 535179 - RNA, 19 nt, Artificial Sequence
  Description of Artificial Sequence: Synthetic oligonucleotide
  Sense strand starting at position 1074 of SEQ ID NO: 318080
gucauauuacacuagaguu

SEQ ID NO: 535180 - RNA, 19 nt, Artificial Sequence
  Description of Artificial Sequence: Synthetic oligonucleotide
  Antisense strand to SEQ ID NO: 535179
aacucuaguguaauaugac

SEQ ID NO: 535181 - RNA, 19 nt, Artificial Sequence
  Description of Artificial Sequence: Synthetic oligonucleotide
  Sense strand starting at position 1082 of SEQ ID NO: 318080
acacuagaguuucugucaa

SEQ ID NO: 535182 - RNA, 19 nt, Artificial Sequence
  Description of Artificial Sequence: Synthetic oligonucleotide
  Antisense strand to SEQ ID NO: 535181
uugacagaaacucuagugu

SEQ ID NO: 535183 - RNA, 19 nt, Artificial Sequence
  Description of Artificial Sequence: Synthetic oligonucleotide
  Sense strand starting at position 1084 of SEQ ID NO: 318080
acuagaguuucugucaaga

SEQ ID NO: 535184 - RNA, 19 nt, Artificial Sequence
  Description of Artificial Sequence: Synthetic oligonucleotide
  Antisense strand to SEQ ID NO: 535183
ucuugacagaaacucuagu

SEQ ID NO: 535185 - RNA, 19 nt, Artificial Sequence
  Description of Artificial Sequence: Synthetic oligonucleotide
  Sense strand starting at position 1191 of SEQ ID NO: 318080
agaggucucaagugaauga

SEQ ID NO: 535186 - RNA, 19 nt, Artificial Sequence
  Description of Artificial Sequence: Synthetic oligonucleotide
  Antisense strand to SEQ ID NO: 535185
ucauucacuugagaccucu

SEQ ID NO: 535187 - RNA, 19 nt, Artificial Sequence
  Description of Artificial Sequence: Synthetic oligonucleotide
  Sense strand starting at position 1220 of SEQ ID NO: 318080
uugugauuacagcaagaau

SEQ ID NO: 535188 - RNA, 19 nt, Artificial Sequence
  Description of Artificial Sequence: Synthetic oligonucleotide
  Antisense strand to SEQ ID NO: 535187
auucuugcuguaaucacaa

SEQ ID NO: 535189 - RNA, 19 nt, Artificial Sequence
  Description of Artificial Sequence: Synthetic oligonucleotide
  Sense strand starting at position 1276 of SEQ ID NO: 318080
ggauaauucucagccucaa

SEQ ID NO: 535190 - RNA, 19 nt, Artificial Sequence
  Description of Artificial Sequence: Synthetic oligonucleotide
  Antisense strand to SEQ ID NO: 535189
uugaggcugagaauuaucc

SEQ ID NO: 535191 - RNA, 19 nt, Artificial Sequence
  Description of Artificial Sequence: Synthetic oligonucleotide
  Sense strand starting at position 1315 of SEQ ID NO: 318080
ggccuuauugaauacacuu

SEQ ID NO: 535192 - RNA, 19 nt, Artificial Sequence
  Description of Artificial Sequence: Synthetic oligonucleotide
  Antisense strand to SEQ ID NO: 535191
aaguguauucaauaaggcc

SEQ ID NO: 535193 - RNA, 19 nt, Artificial Sequence
  Description of Artificial Sequence: Synthetic oligonucleotide
  Sense strand starting at position 1340 of SEQ ID NO: 318080
guacuauuugauugugcca

SEQ ID NO: 535194 - RNA, 19 nt, Artificial Sequence
  Description of Artificial Sequence: Synthetic oligonucleotide
  Antisense strand to SEQ ID NO: 535193
uggcacaaucaaauaguac

SEQ ID NO: 535195 - RNA, 19 nt, Artificial Sequence
  Description of Artificial Sequence: Synthetic oligonucleotide
  Sense strand starting at position 1570 of SEQ ID NO: 318080
acgugaauuugucucaagu

SEQ ID NO: 535196 - RNA, 19 nt, Artificial Sequence
  Description of Artificial Sequence: Synthetic oligonucleotide
  Antisense strand to SEQ ID NO: 535195
acuugagacaaauucacgu

SEQ ID NO: 535197 - RNA, 19 nt, Artificial Sequence
  Description of Artificial Sequence: Synthetic oligonucleotide
  Sense strand starting at position 1578 of SEQ ID NO: 318080
uugucucaaguuuagauau

SEQ ID NO: 535198 - RNA, 19 nt, Artificial Sequence
  Description of Artificial Sequence: Synthetic oligonucleotide
  Antisense strand to SEQ ID NO: 535197
auaucuaaacuugagacaa

SEQ ID NO: 535199 - RNA, 19 nt, Artificial Sequence
  Description of Artificial Sequence: Synthetic oligonucleotide
  Sense strand starting at position 1705 of SEQ ID NO: 318080
aguauaggaagcuggaaau

SEQ ID NO: 535200 - RNA, 19 nt, Artificial Sequence
  Description of Artificial Sequence: Synthetic oligonucleotide
  Antisense strand to SEQ ID NO: 535199
auuuccagcuuccuauacu

SEQ ID NO: 535201 - RNA, 19 nt, Artificial Sequence
  Description of Artificial Sequence: Synthetic oligonucleotide
  Sense strand starting at position 1715 of SEQ ID NO: 318080
gcuggaaauguuuacaguc

SEQ ID NO: 535202 - RNA, 19 nt, Artificial Sequence
  Description of Artificial Sequence: Synthetic oligonucleotide
  Antisense strand to SEQ ID NO: 535201
gacuguaaacauuuccagc

SEQ ID NO: 535203 - RNA, 19 nt, Artificial Sequence
  Description of Artificial Sequence: Synthetic oligonucleotide
  Sense strand starting at position 1783 of SEQ ID NO: 318080
caguacugugaacaugauu

SEQ ID NO: 535204 - RNA, 19 nt, Artificial Sequence
  Description of Artificial Sequence: Synthetic oligonucleotide
  Antisense strand to SEQ ID NO: 535203
aaucauguucacaguacug

SEQ ID NO: 535205 - RNA, 19 nt, Artificial Sequence
  Description of Artificial Sequence: Synthetic oligonucleotide
  Sense strand starting at position 1788 of SEQ ID NO: 318080
cugugaacaugauuauaua

SEQ ID NO: 535206 - RNA, 19 nt, Artificial Sequence
  Description of Artificial Sequence: Synthetic oligonucleotide
  Antisense strand to SEQ ID NO: 535205
uauauaaucauguucacag

SEQ ID NO: 535207 - RNA, 19 nt, Artificial Sequence
  Description of Artificial Sequence: Synthetic oligonucleotide
  Sense strand starting at position 1884 of SEQ ID NO: 318080
auguucucaguuuacaaca

SEQ ID NO: 535208 - RNA, 19 nt, Artificial Sequence
  Description of Artificial Sequence: Synthetic oligonucleotide
  Antisense strand to SEQ ID NO: 535207
uguuguaaacugagaacau

SEQ ID NO: 535209 - RNA, 19 nt, Artificial Sequence
  Description of Artificial Sequence: Synthetic oligonucleotide
  Sense strand starting at position 1942 of SEQ ID NO: 318080
aaguuuguccauuacagga

SEQ ID NO: 535210 - RNA, 19 nt, Artificial Sequence
  Description of Artificial Sequence: Synthetic oligonucleotide
  Antisense strand to SEQ ID NO: 535209
uccuguaauggacaaacuu

SEQ ID NO: 535211 - RNA, 19 nt, Artificial Sequence
  Description of Artificial Sequence: Synthetic oligonucleotide
  Sense strand starting at position 1960 of SEQ ID NO: 318080
aaauaagcaugagugaguu

SEQ ID NO: 535212 - RNA, 19 nt, Artificial Sequence
  Description of Artificial Sequence: Synthetic oligonucleotide
  Antisense strand to SEQ ID NO: 535211
aacucacucaugcuuauuu

SEQ ID NO: 535213 - RNA, 19 nt, Artificial Sequence
  Description of Artificial Sequence: Synthetic oligonucleotide
  Sense strand starting at position 1964 of SEQ ID NO: 318080
aagcaugagugaguuggau

SEQ ID NO: 535214 - RNA, 19 nt, Artificial Sequence
  Description of Artificial Sequence: Synthetic oligonucleotide
  Antisense strand to SEQ ID NO: 535213
auccaacucacucaugcuu

SEQ ID NO: 535215 - RNA, 19 nt, Artificial Sequence
  Description of Artificial Sequence: Synthetic oligonucleotide
  Sense strand starting at position 2298 of SEQ ID NO: 318080
ucugcauuaggacaguaau

SEQ ID NO: 535216 - RNA, 19 nt, Artificial Sequence
  Description of Artificial Sequence: Synthetic oligonucleotide
  Antisense strand to SEQ ID NO: 535215
auuacuguccuaaugcaga

SEQ ID NO: 535217 - RNA, 19 nt, Artificial Sequence
  Description of Artificial Sequence: Synthetic oligonucleotide
  Sense strand starting at position 2312 of SEQ ID NO: 318080
guaauuagugaagauaggu

SEQ ID NO: 535218 - RNA, 19 nt, Artificial Sequence
  Description of Artificial Sequence: Synthetic oligonucleotide
  Antisense strand to SEQ ID NO: 535217
accuaucuucacuaauuac

SEQ ID NO: 535219 - RNA, 19 nt, Artificial Sequence
  Description of Artificial Sequence: Synthetic oligonucleotide
  Sense strand starting at position 2321 of SEQ ID NO: 318080
gaagauagguagcuacauu

SEQ ID NO: 535220 - RNA, 19 nt, Artificial Sequence
  Description of Artificial Sequence: Synthetic oligonucleotide
  Antisense strand to SEQ ID NO: 535219
aauguagcuaccuaucuuc

SEQ ID NO: 535221 - RNA, 19 nt, Artificial Sequence
  Description of Artificial Sequence: Synthetic oligonucleotide
  Sense strand starting at position 2465 of SEQ ID NO: 318080
agaacugucugcccagaaa

SEQ ID NO: 535222 - RNA, 19 nt, Artificial Sequence
  Description of Artificial Sequence: Synthetic oligonucleotide
  Antisense strand to SEQ ID NO: 535221
uuucugggcagacaguucu

SEQ ID NO: 535223 - RNA, 19 nt, Artificial Sequence
  Description of Artificial Sequence: Synthetic oligonucleotide
  Sense strand starting at position 2524 of SEQ ID NO: 318080
aguccaugauuccuugaac

SEQ ID NO: 535224 - RNA, 19 nt, Artificial Sequence
  Description of Artificial Sequence: Synthetic oligonucleotide
  Antisense strand to SEQ ID NO: 535223
guucaaggaaucauggacu

SEQ ID NO: 535225 - RNA, 19 nt, Artificial Sequence
  Description of Artificial Sequence: Synthetic oligonucleotide
  Sense strand starting at position 2525 of SEQ ID NO: 318080
guccaugauuccuugaacu

SEQ ID NO: 535226 - RNA, 19 nt, Artificial Sequence
  Description of Artificial Sequence: Synthetic oligonucleotide
  Antisense strand to SEQ ID NO: 535225
aguucaaggaaucauggac

SEQ ID NO: 535227 - RNA, 19 nt, Artificial Sequence
  Description of Artificial Sequence: Synthetic oligonucleotide
  Sense strand starting at position 2663 of SEQ ID NO: 318080
ucuuuaauggaugggcauu

SEQ ID NO: 535228 - RNA, 19 nt, Artificial Sequence
  Description of Artificial Sequence: Synthetic oligonucleotide
  Antisense strand to SEQ ID NO: 535227
aaugcccauccauuaaaga

SEQ ID NO: 535229 - RNA, 19 nt, Artificial Sequence
  Description of Artificial Sequence: Synthetic oligonucleotide
  Sense strand starting at position 2759 of SEQ ID NO: 318080
guuccacagcaugaugaau

SEQ ID NO: 535230 - RNA, 19 nt, Artificial Sequence
  Description of Artificial Sequence: Synthetic oligonucleotide
  Antisense strand to SEQ ID NO: 535229
auucaucaugcuguggaac

SEQ ID NO: 535231 - RNA, 19 nt, Artificial Sequence
  Description of Artificial Sequence: Synthetic oligonucleotide
  Sense strand starting at position 2916 of SEQ ID NO: 318080
ucugauauucuauaguucu

SEQ ID NO: 535232 - RNA, 19 nt, Artificial Sequence
  Description of Artificial Sequence: Synthetic oligonucleotide
  Antisense strand to SEQ ID NO: 535231
agaacuauagaauaucaga

SEQ ID NO: 535233 - RNA, 19 nt, Artificial Sequence
  Description of Artificial Sequence: Synthetic oligonucleotide
  Sense strand starting at position 2975 of SEQ ID NO: 318080
ggaaaucuguuaucuacau

SEQ ID NO: 535234 - RNA, 19 nt, Artificial Sequence
  Description of Artificial Sequence: Synthetic oligonucleotide
  Antisense strand to SEQ ID NO: 535233
auguagauaacagauuucc

SEQ ID NO: 535235 - RNA, 19 nt, Artificial Sequence
  Description of Artificial Sequence: Synthetic oligonucleotide
  Sense strand starting at position 3233 of SEQ ID NO: 318080
cccuaaucugaaggaaagu

SEQ ID NO: 535236 - RNA, 19 nt, Artificial Sequence
  Description of Artificial Sequence: Synthetic oligonucleotide
  Antisense strand to SEQ ID NO: 535235
acuuuccuucagauuaggg

SEQ ID NO: 535237 - RNA, 19 nt, Artificial Sequence
  Description of Artificial Sequence: Synthetic oligonucleotide
  Sense strand starting at position 3325 of SEQ ID NO: 318080
gcccuaacuaucgaaguga

SEQ ID NO: 535238 - RNA, 19 nt, Artificial Sequence
  Description of Artificial Sequence: Synthetic oligonucleotide
  Antisense strand to SEQ ID NO: 535237
ucacuucgauaguuagggc

SEQ ID NO: 535239 - RNA, 19 nt, Artificial Sequence
  Description of Artificial Sequence: Synthetic oligonucleotide
  Sense strand starting at position 3506 of SEQ ID NO: 318080
gcaucucaagauggaugau

SEQ ID NO: 535240 - RNA, 19 nt, Artificial Sequence
  Description of Artificial Sequence: Synthetic oligonucleotide
  Antisense strand to SEQ ID NO: 535239
aucauccaucuugagaugc

SEQ ID NO: 535241 - RNA, 19 nt, Artificial Sequence
  Description of Artificial Sequence: Synthetic oligonucleotide
  Sense strand starting at position 181 of SEQ ID NO: 318081
uacggcaggugaucaauaa

SEQ ID NO: 535242 - RNA, 19 nt, Artificial Sequence
  Description of Artificial Sequence: Synthetic oligonucleotide
  Antisense strand to SEQ ID NO: 535241
uuauugaucaccugccgua

SEQ ID NO: 535243 - RNA, 19 nt, Artificial Sequence
  Description of Artificial Sequence: Synthetic oligonucleotide
  Sense strand starting at position 182 of SEQ ID NO: 318081
acggcaggugaucaauaaa

SEQ ID NO: 535244 - RNA, 19 nt, Artificial Sequence
  Description of Artificial Sequence: Synthetic oligonucleotide
  Antisense strand to SEQ ID NO: 535243
uuuauugaucaccugccgu

SEQ ID NO: 535245 - RNA, 19 nt, Artificial Sequence
  Description of Artificial Sequence: Synthetic oligonucleotide
  Sense strand starting at position 200 of SEQ ID NO: 318081
auguuuguugagugaauug

SEQ ID NO: 535246 - RNA, 19 nt, Artificial Sequence
  Description of Artificial Sequence: Synthetic oligonucleotide
  Antisense strand to SEQ ID NO: 535245
caauucacucaacaaacau

SEQ ID NO: 535247 - RNA, 19 nt, Artificial Sequence
  Description of Artificial Sequence: Synthetic oligonucleotide
  Sense strand starting at position 207 of SEQ ID NO: 318081
uugagugaauuggcucgaa

SEQ ID NO: 535248 - RNA, 19 nt, Artificial Sequence
  Description of Artificial Sequence: Synthetic oligonucleotide
  Antisense strand to SEQ ID NO: 535247
uucgagccaauucacucaa

SEQ ID NO: 535249 - RNA, 19 nt, Artificial Sequence
  Description of Artificial Sequence: Synthetic oligonucleotide
  Sense strand starting at position 210 of SEQ ID NO: 318081
agugaauuggcucgaauaa

SEQ ID NO: 535250 - RNA, 19 nt, Artificial Sequence
  Description of Artificial Sequence: Synthetic oligonucleotide
  Antisense strand to SEQ ID NO: 535249
uuauucgagccaauucacu

SEQ ID NO: 535251 - RNA, 19 nt, Artificial Sequence
  Description of Artificial Sequence: Synthetic oligonucleotide
  Sense strand starting at position 211 of SEQ ID NO: 318081
gugaauuggcucgaauaau

SEQ ID NO: 535252 - RNA, 19 nt, Artificial Sequence
  Description of Artificial Sequence: Synthetic oligonucleotide
  Antisense strand to SEQ ID NO: 535251
auuauucgagccaauucac

SEQ ID NO: 535253 - RNA, 19 nt, Artificial Sequence
  Description of Artificial Sequence: Synthetic oligonucleotide
  Sense strand starting at position 239 of SEQ ID NO: 318081
guauuaaagauucgggaga

SEQ ID NO: 535254 - RNA, 19 nt, Artificial Sequence
  Description of Artificial Sequence: Synthetic oligonucleotide
  Antisense strand to SEQ ID NO: 535253
ucucccgaaucuuuaauac

SEQ ID NO: 535255 - RNA, 19 nt, Artificial Sequence
  Description of Artificial Sequence: Synthetic oligonucleotide
  Sense strand starting at position 300 of SEQ ID NO: 318081
ggcguuauaagauaccuac

SEQ ID NO: 535256 - RNA, 19 nt, Artificial Sequence
  Description of Artificial Sequence: Synthetic oligonucleotide
  Antisense strand to SEQ ID NO: 535255
guagguaucuuauaacgcc

SEQ ID NO: 535257 - RNA, 19 nt, Artificial Sequence
  Description of Artificial Sequence: Synthetic oligonucleotide
  Sense strand starting at position 545 of SEQ ID NO: 318081
auguucugcucaucaaaga

SEQ ID NO: 535258 - RNA, 19 nt, Artificial Sequence
  Description of Artificial Sequence: Synthetic oligonucleotide
  Antisense strand to SEQ ID NO: 535257
ucuuugaugagcagaacau

SEQ ID NO: 535259 - RNA, 19 nt, Artificial Sequence
  Description of Artificial Sequence: Synthetic oligonucleotide
  Sense strand starting at position 570 of SEQ ID NO: 318081
gcuccuucucaccaaagga

SEQ ID NO: 535260 - RNA, 19 nt, Artificial Sequence
  Description of Artificial Sequence: Synthetic oligonucleotide
  Antisense strand to SEQ ID NO: 535259
uccuuuggugagaaggagc

SEQ ID NO: 535261 - RNA, 19 nt, Artificial Sequence
  Description of Artificial Sequence: Synthetic oligonucleotide
  Sense strand starting at position 704 of SEQ ID NO: 318081
ugacuacucuagcuaagag

SEQ ID NO: 535262 - RNA, 19 nt, Artificial Sequence
  Description of Artificial Sequence: Synthetic oligonucleotide
  Antisense strand to SEQ ID NO: 535261
cucuuagcuagaguaguca

SEQ ID NO: 535263 - RNA, 19 nt, Artificial Sequence
  Description of Artificial Sequence: Synthetic oligonucleotide
  Sense strand starting at position 898 of SEQ ID NO: 318081
cacugaaaccgcgauagua

SEQ ID NO: 535264 - RNA, 19 nt, Artificial Sequence
  Description of Artificial Sequence: Synthetic oligonucleotide
  Antisense strand to SEQ ID NO: 535263
uacuaucgcgguuucagug

SEQ ID NO: 535265 - RNA, 19 nt, Artificial Sequence
  Description of Artificial Sequence: Synthetic oligonucleotide
  Sense strand starting at position 951 of SEQ ID NO: 318081
aggagagucgugggaaaug

SEQ ID NO: 535266 - RNA, 19 nt, Artificial Sequence
  Description of Artificial Sequence: Synthetic oligonucleotide
  Antisense strand to SEQ ID NO: 535265
cauuucccacgacucuccu

SEQ ID NO: 535267 - RNA, 19 nt, Artificial Sequence
  Description of Artificial Sequence: Synthetic oligonucleotide
  Sense strand starting at position 1007 of SEQ ID NO: 318081
ggagccauacucuagcaau

SEQ ID NO: 535268 - RNA, 19 nt, Artificial Sequence
  Description of Artificial Sequence: Synthetic oligonucleotide
  Antisense strand to SEQ ID NO: 535267
auugcuagaguauggcucc

SEQ ID NO: 535269 - RNA, 19 nt, Artificial Sequence
  Description of Artificial Sequence: Synthetic oligonucleotide
  Sense strand starting at position 1208 of SEQ ID NO: 318081
acucuucgagucuaagacu

SEQ ID NO: 535270 - RNA, 19 nt, Artificial Sequence
  Description of Artificial Sequence: Synthetic oligonucleotide
  Antisense strand to SEQ ID NO: 535269
agucuuagacucgaagagu

SEQ ID NO: 535271 - RNA, 19 nt, Artificial Sequence
  Description of Artificial Sequence: Synthetic oligonucleotide
  Sense strand starting at position 1246 of SEQ ID NO: 318081
guaagauucugccuccaaa

SEQ ID NO: 535272 - RNA, 19 nt, Artificial Sequence
  Description of Artificial Sequence: Synthetic oligonucleotide
  Antisense strand to SEQ ID NO: 535271
uuuggaggcagaaucuuac

SEQ ID NO: 535273 - RNA, 19 nt, Artificial Sequence
  Description of Artificial Sequence: Synthetic oligonucleotide
  Sense strand starting at position 1296 of SEQ ID NO: 318081
aagcguuauccucagggag

SEQ ID NO: 535274 - RNA, 19 nt, Artificial Sequence
  Description of Artificial Sequence: Synthetic oligonucleotide
  Antisense strand to SEQ ID NO: 535273
cucccugaggauaacgcuu

SEQ ID NO: 535275 - RNA, 19 nt, Artificial Sequence
  Description of Artificial Sequence: Synthetic oligonucleotide
  Sense strand starting at position 1299 of SEQ ID NO: 318081
cguuauccucagggagaua

SEQ ID NO: 535276 - RNA, 19 nt, Artificial Sequence
  Description of Artificial Sequence: Synthetic oligonucleotide
  Antisense strand to SEQ ID NO: 535275
uaucucccugaggauaacg

SEQ ID NO: 535277 - RNA, 19 nt, Artificial Sequence
  Description of Artificial Sequence: Synthetic oligonucleotide
  Sense strand starting at position 1453 of SEQ ID NO: 318081
gucaaugaacucuggguuu

SEQ ID NO: 535278 - RNA, 19 nt, Artificial Sequence
  Description of Artificial Sequence: Synthetic oligonucleotide
  Antisense strand to SEQ ID NO: 535277
aaacccagaguucauugac

SEQ ID NO: 535279 - RNA, 19 nt, Artificial Sequence
  Description of Artificial Sequence: Synthetic oligonucleotide
  Sense strand starting at position 2222 of SEQ ID NO: 318081
acgacaggcuuuccauaga

SEQ ID NO: 535280 - RNA, 19 nt, Artificial Sequence
  Description of Artificial Sequence: Synthetic oligonucleotide
  Antisense strand to SEQ ID NO: 535279
ucuauggaaagccugucgu

SEQ ID NO: 535281 - RNA, 19 nt, Artificial Sequence
  Description of Artificial Sequence: Synthetic oligonucleotide
  Sense strand starting at position 2329 of SEQ ID NO: 318081
caggaaagugcgugauuua

SEQ ID NO: 535282 - RNA, 19 nt, Artificial Sequence
  Description of Artificial Sequence: Synthetic oligonucleotide
  Antisense strand to SEQ ID NO: 535281
uaaaucacgcacuuuccug

SEQ ID NO: 535283 - RNA, 19 nt, Artificial Sequence
  Description of Artificial Sequence: Synthetic oligonucleotide
  Sense strand starting at position 2638 of SEQ ID NO: 318081
cccagagccugguugaauc

SEQ ID NO: 535284 - RNA, 19 nt, Artificial Sequence
  Description of Artificial Sequence: Synthetic oligonucleotide
  Antisense strand to SEQ ID NO: 535283
gauucaaccaggcucuggg

SEQ ID NO: 535285 - RNA, 19 nt, Artificial Sequence
  Description of Artificial Sequence: Synthetic oligonucleotide
  Sense strand starting at position 2753 of SEQ ID NO: 318081
ggaauaaacuccucguggu

SEQ ID NO: 535286 - RNA, 19 nt, Artificial Sequence
  Description of Artificial Sequence: Synthetic oligonucleotide
  Antisense strand to SEQ ID NO: 535285
accacgaggaguuuauucc

SEQ ID NO: 535287 - RNA, 19 nt, Artificial Sequence
  Description of Artificial Sequence: Synthetic oligonucleotide
  Sense strand starting at position 2773 of SEQ ID NO: 318081
guaguuaguggguaaauuc

SEQ ID NO: 535288 - RNA, 19 nt, Artificial Sequence
  Description of Artificial Sequence: Synthetic oligonucleotide
  Antisense strand to SEQ ID NO: 535287
gaauuuacccacuaacuac

SEQ ID NO: 535289 - RNA, 19 nt, Artificial Sequence
  Description of Artificial Sequence: Synthetic oligonucleotide
  Sense strand starting at position 2910 of SEQ ID NO: 318081
agcuuccaucgugugguua

SEQ ID NO: 535290 - RNA, 19 nt, Artificial Sequence
  Description of Artificial Sequence: Synthetic oligonucleotide
  Antisense strand to SEQ ID NO: 535289
uaaccacacgauggaagcu

SEQ ID NO: 535291 - RNA, 19 nt, Artificial Sequence
  Description of Artificial Sequence: Synthetic oligonucleotide
  Sense strand starting at position 2986 of SEQ ID NO: 318081
aguuaaugucuagaccuua

SEQ ID NO: 535292 - RNA, 19 nt, Artificial Sequence
  Description of Artificial Sequence: Synthetic oligonucleotide
  Antisense strand to SEQ ID NO: 535291
uaaggucuagacauuaacu

SEQ ID NO: 535293 - RNA, 19 nt, Artificial Sequence
  Description of Artificial Sequence: Synthetic oligonucleotide
  Sense strand starting at position 3016 of SEQ ID NO: 318081
cuagcuccucaguauggaa

SEQ ID NO: 535294 - RNA, 19 nt, Artificial Sequence
  Description of Artificial Sequence: Synthetic oligonucleotide
  Antisense strand to SEQ ID NO: 535293
uuccauacugaggagcuag

SEQ ID NO: 535295 - RNA, 19 nt, Artificial Sequence
  Description of Artificial Sequence: Synthetic oligonucleotide
  Sense strand starting at position 3018 of SEQ ID NO: 318081
agcuccucaguauggaaau

SEQ ID NO: 535296 - RNA, 19 nt, Artificial Sequence
  Description of Artificial Sequence: Synthetic oligonucleotide
  Antisense strand to SEQ ID NO: 535295
auuuccauacugaggagcu

SEQ ID NO: 535297 - RNA, 19 nt, Artificial Sequence
  Description of Artificial Sequence: Synthetic oligonucleotide
  Sense strand starting at position 3164 of SEQ ID NO: 318081
gacauccagcgauagcuaa

SEQ ID NO: 535298 - RNA, 19 nt, Artificial Sequence
  Description of Artificial Sequence: Synthetic oligonucleotide
  Antisense strand to SEQ ID NO: 535297
uuagcuaucgcuggauguc

SEQ ID NO: 535299 - RNA, 19 nt, Artificial Sequence
  Description of Artificial Sequence: Synthetic oligonucleotide
  Sense strand starting at position 3227 of SEQ ID NO: 318081
ugaggaccugccggugaua

SEQ ID NO: 535300 - RNA, 19 nt, Artificial Sequence
  Description of Artificial Sequence: Synthetic oligonucleotide
  Antisense strand to SEQ ID NO: 535299
uaucaccggcagguccuca

SEQ ID NO: 535301 - RNA, 19 nt, Artificial Sequence
  Description of Artificial Sequence: Synthetic oligonucleotide
  Sense strand starting at position 3229 of SEQ ID NO: 318081
aggaccugccggugauaga

SEQ ID NO: 535302 - RNA, 19 nt, Artificial Sequence
  Description of Artificial Sequence: Synthetic oligonucleotide
  Antisense strand to SEQ ID NO: 535301
ucuaucaccggcagguccu

SEQ ID NO: 535303 - RNA, 19 nt, Artificial Sequence
  Description of Artificial Sequence: Synthetic oligonucleotide
  Sense strand starting at position 3230 of SEQ ID NO: 318081
ggaccugccggugauagaa

SEQ ID NO: 535304 - RNA, 19 nt, Artificial Sequence
  Description of Artificial Sequence: Synthetic oligonucleotide
  Antisense strand to SEQ ID NO: 535303
uucuaucaccggcaggucc

SEQ ID NO: 535305 - RNA, 19 nt, Artificial Sequence
  Description of Artificial Sequence: Synthetic oligonucleotide
  Sense strand starting at position 3335 of SEQ ID NO: 318081
gcagcuauacaguggaaga

SEQ ID NO: 535306 - RNA, 19 nt, Artificial Sequence
  Description of Artificial Sequence: Synthetic oligonucleotide
  Antisense strand to SEQ ID NO: 535305
ucuuccacuguauagcugc

SEQ ID NO: 535307 - RNA, 19 nt, Artificial Sequence
  Description of Artificial Sequence: Synthetic oligonucleotide
  Sense strand starting at position 3507 of SEQ ID NO: 318081
caaaguaccuuacuggaga

SEQ ID NO: 535308 - RNA, 19 nt, Artificial Sequence
  Description of Artificial Sequence: Synthetic oligonucleotide
  Antisense strand to SEQ ID NO: 535307
ucuccaguaagguacuuug

SEQ ID NO: 535309 - RNA, 19 nt, Artificial Sequence
  Description of Artificial Sequence: Synthetic oligonucleotide
  Sense strand starting at position 3671 of SEQ ID NO: 318081
uagcucuagguguagaaau

SEQ ID NO: 535310 - RNA, 19 nt, Artificial Sequence
  Description of Artificial Sequence: Synthetic oligonucleotide
  Antisense strand to SEQ ID NO: 535309
auuucuacaccuagagcua

SEQ ID NO: 535311 - RNA, 19 nt, Artificial Sequence
  Description of Artificial Sequence: Synthetic oligonucleotide
  Sense strand starting at position 3824 of SEQ ID NO: 318081
ugucuuacagaugagucuu

SEQ ID NO: 535312 - RNA, 19 nt, Artificial Sequence
  Description of Artificial Sequence: Synthetic oligonucleotide
  Antisense strand to SEQ ID NO: 535311
aagacucaucuguaagaca

SEQ ID NO: 535313 - RNA, 19 nt, Artificial Sequence
  Description of Artificial Sequence: Synthetic oligonucleotide
  Sense strand starting at position 3830 of SEQ ID NO: 318081
acagaugagucuucccuuu

SEQ ID NO: 535314 - RNA, 19 nt, Artificial Sequence
  Description of Artificial Sequence: Synthetic oligonucleotide
  Antisense strand to SEQ ID NO: 535313
aaagggaagacucaucugu

SEQ ID NO: 535315 - RNA, 19 nt, Artificial Sequence
  Description of Artificial Sequence: Synthetic oligonucleotide
  Sense strand starting at position 3832 of SEQ ID NO: 318081
agaugagucuucccuuuaa

SEQ ID NO: 535316 - RNA, 19 nt, Artificial Sequence
  Description of Artificial Sequence: Synthetic oligonucleotide
  Antisense strand to SEQ ID NO: 535315
uuaaagggaagacucaucu

SEQ ID NO: 535317 - RNA, 19 nt, Artificial Sequence
  Description of Artificial Sequence: Synthetic oligonucleotide
  Sense strand starting at position 3857 of SEQ ID NO: 318081
caaagugcugcauaguaga

SEQ ID NO: 535318 - RNA, 19 nt, Artificial Sequence
  Description of Artificial Sequence: Synthetic oligonucleotide
  Antisense strand to SEQ ID NO: 535317
ucuacuaugcagcacuuug

SEQ ID NO: 535319 - RNA, 19 nt, Artificial Sequence
  Description of Artificial Sequence: Synthetic oligonucleotide
  Sense strand starting at position 3899 of SEQ ID NO: 318081
ucaaaugugcugcaaauaa

SEQ ID NO: 535320 - RNA, 19 nt, Artificial Sequence
  Description of Artificial Sequence: Synthetic oligonucleotide
  Antisense strand to SEQ ID NO: 535319
uuauuugcagcacauuuga

SEQ ID NO: 535321 - RNA, 19 nt, Artificial Sequence
  Description of Artificial Sequence: Synthetic oligonucleotide
  Sense strand starting at position 2284 of SEQ ID NO: 318082
acugauguguuccagcaaa

SEQ ID NO: 535322 - RNA, 19 nt, Artificial Sequence
  Description of Artificial Sequence: Synthetic oligonucleotide
  Antisense strand to SEQ ID NO: 535321
uuugcuggaacacaucagu

SEQ ID NO: 535323 - RNA, 19 nt, Artificial Sequence
  Description of Artificial Sequence: Synthetic oligonucleotide
  Sense strand starting at position 2329 of SEQ ID NO: 318082
agugacaucuuguuuccca

SEQ ID NO: 535324 - RNA, 19 nt, Artificial Sequence
  Description of Artificial Sequence: Synthetic oligonucleotide
  Antisense strand to SEQ ID NO: 535323
ugggaaacaagaugucacu

SEQ ID NO: 535325 - RNA, 19 nt, Artificial Sequence
  Description of Artificial Sequence: Synthetic oligonucleotide
  Sense strand starting at position 2330 of SEQ ID NO: 318082
gugacaucuuguuucccaa

SEQ ID NO: 535326 - RNA, 19 nt, Artificial Sequence
  Description of Artificial Sequence: Synthetic oligonucleotide
  Antisense strand to SEQ ID NO: 535325
uugggaaacaagaugucac

SEQ ID NO: 535327 - RNA, 19 nt, Artificial Sequence
  Description of Artificial Sequence: Synthetic oligonucleotide
  Sense strand starting at position 2380 of SEQ ID NO: 318082
ggguuaagauaauggcuaa

SEQ ID NO: 535328 - RNA, 19 nt, Artificial Sequence
  Description of Artificial Sequence: Synthetic oligonucleotide
  Antisense strand to SEQ ID NO: 535327
uuagccauuaucuuaaccc

SEQ ID NO: 535329 - RNA, 19 nt, Artificial Sequence
  Description of Artificial Sequence: Synthetic oligonucleotide
  Sense strand starting at position 2409 of SEQ ID NO: 318082
uccugagcauugugguuua

SEQ ID NO: 535330 - RNA, 19 nt, Artificial Sequence
  Description of Artificial Sequence: Synthetic oligonucleotide
  Antisense strand to SEQ ID NO: 535329
uaaaccacaaugcucagga

SEQ ID NO: 535331 - RNA, 19 nt, Artificial Sequence
  Description of Artificial Sequence: Synthetic oligonucleotide
  Sense strand starting at position 2412 of SEQ ID NO: 318082
ugagcauugugguuuauca

SEQ ID NO: 535332 - RNA, 19 nt, Artificial Sequence
  Description of Artificial Sequence: Synthetic oligonucleotide
  Antisense strand to SEQ ID NO: 535331
ugauaaaccacaaugcuca

SEQ ID NO: 535333 - RNA, 19 nt, Artificial Sequence
  Description of Artificial Sequence: Synthetic oligonucleotide
  Sense strand starting at position 2414 of SEQ ID NO: 318082
agcauugugguuuaucaaa

SEQ ID NO: 535334 - RNA, 19 nt, Artificial Sequence
  Description of Artificial Sequence: Synthetic oligonucleotide
  Antisense strand to SEQ ID NO: 535333
uuugauaaaccacaaugcu

SEQ ID NO: 535335 - RNA, 19 nt, Artificial Sequence
  Description of Artificial Sequence: Synthetic oligonucleotide
  Sense strand starting at position 2442 of SEQ ID NO: 318082
gcuagaaauugucaggcac

SEQ ID NO: 535336 - RNA, 19 nt, Artificial Sequence
  Description of Artificial Sequence: Synthetic oligonucleotide
  Antisense strand to SEQ ID NO: 535335
gugccugacaauuucuagc

SEQ ID NO: 535337 - RNA, 19 nt, Artificial Sequence
  Description of Artificial Sequence: Synthetic oligonucleotide
  Sense strand starting at position 2486 of SEQ ID NO: 318082
ggcucccaugucuagagau

SEQ ID NO: 535338 - RNA, 19 nt, Artificial Sequence
  Description of Artificial Sequence: Synthetic oligonucleotide
  Antisense strand to SEQ ID NO: 535337
aucucuagacaugggagcc

SEQ ID NO: 535339 - RNA, 19 nt, Artificial Sequence
  Description of Artificial Sequence: Synthetic oligonucleotide
  Sense strand starting at position 2548 of SEQ ID NO: 318082
ccuucucucugguuguuau

SEQ ID NO: 535340 - RNA, 19 nt, Artificial Sequence
  Description of Artificial Sequence: Synthetic oligonucleotide
  Antisense strand to SEQ ID NO: 535339
auaacaaccagagagaagg

SEQ ID NO: 535341 - RNA, 19 nt, Artificial Sequence
  Description of Artificial Sequence: Synthetic oligonucleotide
  Sense strand starting at position 2549 of SEQ ID NO: 318082
cuucucucugguuguuaua

SEQ ID NO: 535342 - RNA, 19 nt, Artificial Sequence
  Description of Artificial Sequence: Synthetic oligonucleotide
  Antisense strand to SEQ ID NO: 535341
uauaacaaccagagagaag

SEQ ID NO: 535343 - RNA, 19 nt, Artificial Sequence
  Description of Artificial Sequence: Synthetic oligonucleotide
  Sense strand starting at position 2551 of SEQ ID NO: 318082
ucucucugguuguuauaau

SEQ ID NO: 535344 - RNA, 19 nt, Artificial Sequence
  Description of Artificial Sequence: Synthetic oligonucleotide
  Antisense strand to SEQ ID NO: 535343
auuauaacaaccagagaga

SEQ ID NO: 535345 - RNA, 19 nt, Artificial Sequence
  Description of Artificial Sequence: Synthetic oligonucleotide
  Sense strand starting at position 2560 of SEQ ID NO: 318082
uuguuauaaugucuaacga

SEQ ID NO: 535346 - RNA, 19 nt, Artificial Sequence
  Description of Artificial Sequence: Synthetic oligonucleotide
  Antisense strand to SEQ ID NO: 535345
ucguuagacauuauaacaa

SEQ ID NO: 535347 - RNA, 19 nt, Artificial Sequence
  Description of Artificial Sequence: Synthetic oligonucleotide
  Sense strand starting at position 2561 of SEQ ID NO: 318082
uguuauaaugucuaacgaa

SEQ ID NO: 535348 - RNA, 19 nt, Artificial Sequence
  Description of Artificial Sequence: Synthetic oligonucleotide
  Antisense strand to SEQ ID NO: 535347
uucguuagacauuauaaca

SEQ ID NO: 535349 - RNA, 19 nt, Artificial Sequence
  Description of Artificial Sequence: Synthetic oligonucleotide
  Sense strand starting at position 2650 of SEQ ID NO: 318082
agccaauaguugguuccua

SEQ ID NO: 535350 - RNA, 19 nt, Artificial Sequence
  Description of Artificial Sequence: Synthetic oligonucleotide
  Antisense strand to SEQ ID NO: 535349
uaggaaccaacuauuggcu

SEQ ID NO: 535351 - RNA, 19 nt, Artificial Sequence
  Description of Artificial Sequence: Synthetic oligonucleotide
  Sense strand starting at position 2651 of SEQ ID NO: 318082
gccaauaguugguuccuaa

SEQ ID NO: 535352 - RNA, 19 nt, Artificial Sequence
  Description of Artificial Sequence: Synthetic oligonucleotide
  Antisense strand to SEQ ID NO: 535351
uuaggaaccaacuauuggc

SEQ ID NO: 535353 - RNA, 19 nt, Artificial Sequence
  Description of Artificial Sequence: Synthetic oligonucleotide
  Sense strand starting at position 2674 of SEQ ID NO: 318082
aucaacgauuugcacuaaa

SEQ ID NO: 535354 - RNA, 19 nt, Artificial Sequence
  Description of Artificial Sequence: Synthetic oligonucleotide
  Antisense strand to SEQ ID NO: 535353
uuuagugcaaaucguugau

SEQ ID NO: 535355 - RNA, 19 nt, Artificial Sequence
  Description of Artificial Sequence: Synthetic oligonucleotide
  Sense strand starting at position 2700 of SEQ ID NO: 318082
acaauuuacuuagagcaga

SEQ ID NO: 535356 - RNA, 19 nt, Artificial Sequence
  Description of Artificial Sequence: Synthetic oligonucleotide
  Antisense strand to SEQ ID NO: 535355
ucugcucuaaguaaauugu

SEQ ID NO: 535357 - RNA, 19 nt, Artificial Sequence
  Description of Artificial Sequence: Synthetic oligonucleotide
  Sense strand starting at position 2730 of SEQ ID NO: 318082
uggguuucagaagaugugu

SEQ ID NO: 535358 - RNA, 19 nt, Artificial Sequence
  Description of Artificial Sequence: Synthetic oligonucleotide
  Antisense strand to SEQ ID NO: 535357
acacaucuucugaaaccca

SEQ ID NO: 535359 - RNA, 19 nt, Artificial Sequence
  Description of Artificial Sequence: Synthetic oligonucleotide
  Sense strand starting at position 2815 of SEQ ID NO: 318082
ccaucacacugucaucaga

SEQ ID NO: 535360 - RNA, 19 nt, Artificial Sequence
  Description of Artificial Sequence: Synthetic oligonucleotide
  Antisense strand to SEQ ID NO: 535359
ucugaugacagugugaugg

SEQ ID NO: 535361 - RNA, 19 nt, Artificial Sequence
  Description of Artificial Sequence: Synthetic oligonucleotide
  Sense strand starting at position 2817 of SEQ ID NO: 318082
aucacacugucaucagauu

SEQ ID NO: 535362 - RNA, 19 nt, Artificial Sequence
  Description of Artificial Sequence: Synthetic oligonucleotide
  Antisense strand to SEQ ID NO: 535361
aaucugaugacagugugau

SEQ ID NO: 535363 - RNA, 19 nt, Artificial Sequence
  Description of Artificial Sequence: Synthetic oligonucleotide
  Sense strand starting at position 2957 of SEQ ID NO: 318082
gggacaaauugcugaucuu

SEQ ID NO: 535364 - RNA, 19 nt, Artificial Sequence
  Description of Artificial Sequence: Synthetic oligonucleotide
  Antisense strand to SEQ ID NO: 535363
aagaucagcaauuuguccc

SEQ ID NO: 535365 - RNA, 19 nt, Artificial Sequence
  Description of Artificial Sequence: Synthetic oligonucleotide
  Sense strand starting at position 2958 of SEQ ID NO: 318082
ggacaaauugcugaucuuu

SEQ ID NO: 535366 - RNA, 19 nt, Artificial Sequence
  Description of Artificial Sequence: Synthetic oligonucleotide
  Antisense strand to SEQ ID NO: 535365
aaagaucagcaauuugucc

SEQ ID NO: 535367 - RNA, 19 nt, Artificial Sequence
  Description of Artificial Sequence: Synthetic oligonucleotide
  Sense strand starting at position 3087 of SEQ ID NO: 318082
uucgauaugugguaaauuu

SEQ ID NO: 535368 - RNA, 19 nt, Artificial Sequence
  Description of Artificial Sequence: Synthetic oligonucleotide
  Antisense strand to SEQ ID NO: 535367
aaauuuaccacauaucgaa

SEQ ID NO: 535369 - RNA, 19 nt, Artificial Sequence
  Description of Artificial Sequence: Synthetic oligonucleotide
  Sense strand starting at position 3222 of SEQ ID NO: 318082
ucuuaaugaugugaaucuu

SEQ ID NO: 535370 - RNA, 19 nt, Artificial Sequence
  Description of Artificial Sequence: Synthetic oligonucleotide
  Antisense strand to SEQ ID NO: 535369
aagauucacaucauuaaga

SEQ ID NO: 535371 - RNA, 19 nt, Artificial Sequence
  Description of Artificial Sequence: Synthetic oligonucleotide
  Sense strand starting at position 3228 of SEQ ID NO: 318082
ugaugugaaucuuuaacuu

SEQ ID NO: 535372 - RNA, 19 nt, Artificial Sequence
  Description of Artificial Sequence: Synthetic oligonucleotide
  Antisense strand to SEQ ID NO: 535371
aaguuaaagauucacauca

SEQ ID NO: 535373 - RNA, 19 nt, Artificial Sequence
  Description of Artificial Sequence: Synthetic oligonucleotide
  Sense strand starting at position 3232 of SEQ ID NO: 318082
gugaaucuuuaacuuauga

SEQ ID NO: 535374 - RNA, 19 nt, Artificial Sequence
  Description of Artificial Sequence: Synthetic oligonucleotide
  Antisense strand to SEQ ID NO: 535373
ucauaaguuaaagauucac

SEQ ID NO: 535375 - RNA, 19 nt, Artificial Sequence
  Description of Artificial Sequence: Synthetic oligonucleotide
  Sense strand starting at position 3312 of SEQ ID NO: 318082
gguccauauuuagacaacu

SEQ ID NO: 535376 - RNA, 19 nt, Artificial Sequence
  Description of Artificial Sequence: Synthetic oligonucleotide
  Antisense strand to SEQ ID NO: 535375
aguugucuaaauauggacc

SEQ ID NO: 535377 - RNA, 19 nt, Artificial Sequence
  Description of Artificial Sequence: Synthetic oligonucleotide
  Sense strand starting at position 3536 of SEQ ID NO: 318082
augcuaagagcaugucaaa

SEQ ID NO: 535378 - RNA, 19 nt, Artificial Sequence
  Description of Artificial Sequence: Synthetic oligonucleotide
  Antisense strand to SEQ ID NO: 535377
uuugacaugcucuuagcau

SEQ ID NO: 535379 - RNA, 19 nt, Artificial Sequence
  Description of Artificial Sequence: Synthetic oligonucleotide
  Sense strand starting at position 3649 of SEQ ID NO: 318082
aaguaugagguguguacaa

SEQ ID NO: 535380 - RNA, 19 nt, Artificial Sequence
  Description of Artificial Sequence: Synthetic oligonucleotide
  Antisense strand to SEQ ID NO: 535379
uuguacacaccucauacuu

SEQ ID NO: 535381 - RNA, 19 nt, Artificial Sequence
  Description of Artificial Sequence: Synthetic oligonucleotide
  Sense strand starting at position 3651 of SEQ ID NO: 318082
guaugagguguguacaaag

SEQ ID NO: 535382 - RNA, 19 nt, Artificial Sequence
  Description of Artificial Sequence: Synthetic oligonucleotide
  Antisense strand to SEQ ID NO: 535381
cuuuguacacaccucauac

SEQ ID NO: 535383 - RNA, 19 nt, Artificial Sequence
  Description of Artificial Sequence: Synthetic oligonucleotide
  Sense strand starting at position 3661 of SEQ ID NO: 318082
uguacaaagcuaugggaaa

SEQ ID NO: 535384 - RNA, 19 nt, Artificial Sequence
  Description of Artificial Sequence: Synthetic oligonucleotide
  Antisense strand to SEQ ID NO: 535383
uuucccauagcuuuguaca

SEQ ID NO: 535385 - RNA, 19 nt, Artificial Sequence
  Description of Artificial Sequence: Synthetic oligonucleotide
  Sense strand starting at position 3738 of SEQ ID NO: 318082
aucucucuguuccauugau

SEQ ID NO: 535386 - RNA, 19 nt, Artificial Sequence
  Description of Artificial Sequence: Synthetic oligonucleotide
  Antisense strand to SEQ ID NO: 535385
aucaauggaacagagagau

SEQ ID NO: 535387 - RNA, 19 nt, Artificial Sequence
  Description of Artificial Sequence: Synthetic oligonucleotide
  Sense strand starting at position 3787 of SEQ ID NO: 318082
uucugaacacuguguugca

SEQ ID NO: 535388 - RNA, 19 nt, Artificial Sequence
  Description of Artificial Sequence: Synthetic oligonucleotide
  Antisense strand to SEQ ID NO: 535387
ugcaacacaguguucagaa

SEQ ID NO: 535389 - RNA, 19 nt, Artificial Sequence
  Description of Artificial Sequence: Synthetic oligonucleotide
  Sense strand starting at position 3790 of SEQ ID NO: 318082
ugaacacuguguugcauaa

SEQ ID NO: 535390 - RNA, 19 nt, Artificial Sequence
  Description of Artificial Sequence: Synthetic oligonucleotide
  Antisense strand to SEQ ID NO: 535389
uuaugcaacacaguguuca

SEQ ID NO: 535391 - RNA, 19 nt, Artificial Sequence
  Description of Artificial Sequence: Synthetic oligonucleotide
  Sense strand starting at position 3866 of SEQ ID NO: 318082
gcacaucuuugaggucaua

SEQ ID NO: 535392 - RNA, 19 nt, Artificial Sequence
  Description of Artificial Sequence: Synthetic oligonucleotide
  Antisense strand to SEQ ID NO: 535391
uaugaccucaaagaugugc

SEQ ID NO: 535393 - RNA, 19 nt, Artificial Sequence
  Description of Artificial Sequence: Synthetic oligonucleotide
  Sense strand starting at position 1025 of SEQ ID NO: 318083
guaauuacacaacacguau

SEQ ID NO: 535394 - RNA, 19 nt, Artificial Sequence
  Description of Artificial Sequence: Synthetic oligonucleotide
  Antisense strand to SEQ ID NO: 535393
auacguguuguguaauuac

SEQ ID NO: 535395 - RNA, 19 nt, Artificial Sequence
  Description of Artificial Sequence: Synthetic oligonucleotide
  Sense strand starting at position 1063 of SEQ ID NO: 318083
acaccuuuccugcaggaau

SEQ ID NO: 535396 - RNA, 19 nt, Artificial Sequence
  Description of Artificial Sequence: Synthetic oligonucleotide
  Antisense strand to SEQ ID NO: 535395
auuccugcaggaaaggugu

SEQ ID NO: 535397 - RNA, 19 nt, Artificial Sequence
  Description of Artificial Sequence: Synthetic oligonucleotide
  Sense strand starting at position 1109 of SEQ ID NO: 318083
gccugauccaguuaaggcu

SEQ ID NO: 535398 - RNA, 19 nt, Artificial Sequence
  Description of Artificial Sequence: Synthetic oligonucleotide
  Antisense strand to SEQ ID NO: 535397
agccuuaacuggaucaggc

SEQ ID NO: 535399 - RNA, 19 nt, Artificial Sequence
  Description of Artificial Sequence: Synthetic oligonucleotide
  Sense strand starting at position 1139 of SEQ ID NO: 318083
agggccagcggguauaauu

SEQ ID NO: 535400 - RNA, 19 nt, Artificial Sequence
  Description of Artificial Sequence: Synthetic oligonucleotide
  Antisense strand to SEQ ID NO: 535399
aauuauacccgcuggcccu

SEQ ID NO: 535401 - RNA, 19 nt, Artificial Sequence
  Description of Artificial Sequence: Synthetic oligonucleotide
  Sense strand starting at position 1440 of SEQ ID NO: 318083
gugucaacacaauguaaua

SEQ ID NO: 535402 - RNA, 19 nt, Artificial Sequence
  Description of Artificial Sequence: Synthetic oligonucleotide
  Antisense strand to SEQ ID NO: 535401
uauuacauuguguugacac

SEQ ID NO: 535403 - RNA, 19 nt, Artificial Sequence
  Description of Artificial Sequence: Synthetic oligonucleotide
  Sense strand starting at position 1453 of SEQ ID NO: 318083
guaauaagugcugaaauag

SEQ ID NO: 535404 - RNA, 19 nt, Artificial Sequence
  Description of Artificial Sequence: Synthetic oligonucleotide
  Antisense strand to SEQ ID NO: 535403
cuauuucagcacuuauuac

SEQ ID NO: 535405 - RNA, 19 nt, Artificial Sequence
  Description of Artificial Sequence: Synthetic oligonucleotide
  Sense strand starting at position 1532 of SEQ ID NO: 318083
agagaagacuuccggaaga

SEQ ID NO: 535406 - RNA, 19 nt, Artificial Sequence
  Description of Artificial Sequence: Synthetic oligonucleotide
  Antisense strand to SEQ ID NO: 535405
ucuuccggaagucuucucu

SEQ ID NO: 535407 - RNA, 19 nt, Artificial Sequence
  Description of Artificial Sequence: Synthetic oligonucleotide
  Sense strand starting at position 2177 of SEQ ID NO: 318083
gccugaagaccuggaauug

SEQ ID NO: 535408 - RNA, 19 nt, Artificial Sequence
  Description of Artificial Sequence: Synthetic oligonucleotide
  Antisense strand to SEQ ID NO: 535407
caauuccaggucuucaggc

SEQ ID NO: 535409 - RNA, 19 nt, Artificial Sequence
  Description of Artificial Sequence: Synthetic oligonucleotide
  Sense strand starting at position 2194 of SEQ ID NO: 318083
uggcgacuucgauauuaac

SEQ ID NO: 535410 - RNA, 19 nt, Artificial Sequence
  Description of Artificial Sequence: Synthetic oligonucleotide
  Antisense strand to SEQ ID NO: 535409
guuaauaucgaagucgcca

SEQ ID NO: 535411 - RNA, 19 nt, Artificial Sequence
  Description of Artificial Sequence: Synthetic oligonucleotide
  Sense strand starting at position 2369 of SEQ ID NO: 318083
ccucgaccucccugaaguu

SEQ ID NO: 535412 - RNA, 19 nt, Artificial Sequence
  Description of Artificial Sequence: Synthetic oligonucleotide
  Antisense strand to SEQ ID NO: 535411
aacuucagggaggucgagg

SEQ ID NO: 535413 - RNA, 19 nt, Artificial Sequence
  Description of Artificial Sequence: Synthetic oligonucleotide
  Sense strand starting at position 2493 of SEQ ID NO: 318083
auccuaauccgcgaaugcu

SEQ ID NO: 535414 - RNA, 19 nt, Artificial Sequence
  Description of Artificial Sequence: Synthetic oligonucleotide
  Antisense strand to SEQ ID NO: 535413
agcauucgcggauuaggau

SEQ ID NO: 535415 - RNA, 19 nt, Artificial Sequence
  Description of Artificial Sequence: Synthetic oligonucleotide
  Sense strand starting at position 2623 of SEQ ID NO: 318083
ugcagaaacccguggagaa

SEQ ID NO: 535416 - RNA, 19 nt, Artificial Sequence
  Description of Artificial Sequence: Synthetic oligonucleotide
  Antisense strand to SEQ ID NO: 535415
uucuccacggguuucugca

SEQ ID NO: 535417 - RNA, 19 nt, Artificial Sequence
  Description of Artificial Sequence: Synthetic oligonucleotide
  Sense strand starting at position 2624 of SEQ ID NO: 318083
gcagaaacccguggagaaa

SEQ ID NO: 535418 - RNA, 19 nt, Artificial Sequence
  Description of Artificial Sequence: Synthetic oligonucleotide
  Antisense strand to SEQ ID NO: 535417
uuucuccacggguuucugc

SEQ ID NO: 535419 - RNA, 19 nt, Artificial Sequence
  Description of Artificial Sequence: Synthetic oligonucleotide
  Sense strand starting at position 2669 of SEQ ID NO: 318083
uugaucuuguuuccaugaa

SEQ ID NO: 535420 - RNA, 19 nt, Artificial Sequence
  Description of Artificial Sequence: Synthetic oligonucleotide
  Antisense strand to SEQ ID NO: 535419
uucauggaaacaagaucaa

SEQ ID NO: 535421 - RNA, 19 nt, Artificial Sequence
  Description of Artificial Sequence: Synthetic oligonucleotide
  Sense strand starting at position 2690 of SEQ ID NO: 318083
aauuuauauucgcaggguu

SEQ ID NO: 535422 - RNA, 19 nt, Artificial Sequence
  Description of Artificial Sequence: Synthetic oligonucleotide
  Antisense strand to SEQ ID NO: 535421
aacccugcgaauauaaauu

SEQ ID NO: 535423 - RNA, 19 nt, Artificial Sequence
  Description of Artificial Sequence: Synthetic oligonucleotide
  Sense strand starting at position 2692 of SEQ ID NO: 318083
uuuauauucgcaggguuau

SEQ ID NO: 535424 - RNA, 19 nt, Artificial Sequence
  Description of Artificial Sequence: Synthetic oligonucleotide
  Antisense strand to SEQ ID NO: 535423
auaacccugcgaauauaaa

SEQ ID NO: 535425 - RNA, 19 nt, Artificial Sequence
  Description of Artificial Sequence: Synthetic oligonucleotide
  Sense strand starting at position 2693 of SEQ ID NO: 318083
uuauauucgcaggguuaua

SEQ ID NO: 535426 - RNA, 19 nt, Artificial Sequence
  Description of Artificial Sequence: Synthetic oligonucleotide
  Antisense strand to SEQ ID NO: 535425
uauaacccugcgaauauaa

SEQ ID NO: 535427 - RNA, 19 nt, Artificial Sequence
  Description of Artificial Sequence: Synthetic oligonucleotide
  Sense strand starting at position 2719 of SEQ ID NO: 318083
uuguauuccgggcaacaua

SEQ ID NO: 535428 - RNA, 19 nt, Artificial Sequence
  Description of Artificial Sequence: Synthetic oligonucleotide
  Antisense strand to SEQ ID NO: 535427
uauguugcccggaauacaa

SEQ ID NO: 535429 - RNA, 19 nt, Artificial Sequence
  Description of Artificial Sequence: Synthetic oligonucleotide
  Sense strand starting at position 2813 of SEQ ID NO: 318083
gagagaaguuagucaauau

SEQ ID NO: 535430 - RNA, 19 nt, Artificial Sequence
  Description of Artificial Sequence: Synthetic oligonucleotide
  Antisense strand to SEQ ID NO: 535429
auauugacuaacuucucuc

SEQ ID NO: 535431 - RNA, 19 nt, Artificial Sequence
  Description of Artificial Sequence: Synthetic oligonucleotide
  Sense strand starting at position 2817 of SEQ ID NO: 318083
gaaguuagucaauauaguu

SEQ ID NO: 535432 - RNA, 19 nt, Artificial Sequence
  Description of Artificial Sequence: Synthetic oligonucleotide
  Antisense strand to SEQ ID NO: 535431
aacuauauugacuaacuuc

SEQ ID NO: 535433 - RNA, 19 nt, Artificial Sequence
  Description of Artificial Sequence: Synthetic oligonucleotide
  Sense strand starting at position 2865 of SEQ ID NO: 318083
ccagguagugugugagaau

SEQ ID NO: 535434 - RNA, 19 nt, Artificial Sequence
  Description of Artificial Sequence: Synthetic oligonucleotide
  Antisense strand to SEQ ID NO: 535433
auucucacacacuaccugg

SEQ ID NO: 535435 - RNA, 19 nt, Artificial Sequence
  Description of Artificial Sequence: Synthetic oligonucleotide
  Sense strand starting at position 2961 of SEQ ID NO: 318083
gaggaagcguguucuucuu

SEQ ID NO: 535436 - RNA, 19 nt, Artificial Sequence
  Description of Artificial Sequence: Synthetic oligonucleotide
  Antisense strand to SEQ ID NO: 535435
aagaagaacacgcuuccuc

SEQ ID NO: 535437 - RNA, 19 nt, Artificial Sequence
  Description of Artificial Sequence: Synthetic oligonucleotide
  Sense strand starting at position 2979 of SEQ ID NO: 318083
uuucucacuguagagauua

SEQ ID NO: 535438 - RNA, 19 nt, Artificial Sequence
  Description of Artificial Sequence: Synthetic oligonucleotide
  Antisense strand to SEQ ID NO: 535437
uaaucucuacagugagaaa

SEQ ID NO: 535439 - RNA, 19 nt, Artificial Sequence
  Description of Artificial Sequence: Synthetic oligonucleotide
  Sense strand starting at position 3050 of SEQ ID NO: 318083
uuuagaugcagcuagaguu

SEQ ID NO: 535440 - RNA, 19 nt, Artificial Sequence
  Description of Artificial Sequence: Synthetic oligonucleotide
  Antisense strand to SEQ ID NO: 535439
aacucuagcugcaucuaaa

SEQ ID NO: 535441 - RNA, 19 nt, Artificial Sequence
  Description of Artificial Sequence: Synthetic oligonucleotide
  Sense strand starting at position 3122 of SEQ ID NO: 318083
cuaagacuggcauggcaau

SEQ ID NO: 535442 - RNA, 19 nt, Artificial Sequence
  Description of Artificial Sequence: Synthetic oligonucleotide
  Antisense strand to SEQ ID NO: 535441
auugccaugccagucuuag

SEQ ID NO: 535443 - RNA, 19 nt, Artificial Sequence
  Description of Artificial Sequence: Synthetic oligonucleotide
  Sense strand starting at position 3180 of SEQ ID NO: 318083
cauuguagguaugcaauaa

SEQ ID NO: 535444 - RNA, 19 nt, Artificial Sequence
  Description of Artificial Sequence: Synthetic oligonucleotide
  Antisense strand to SEQ ID NO: 535443
uuauugcauaccuacaaug

SEQ ID NO: 535445 - RNA, 19 nt, Artificial Sequence
  Description of Artificial Sequence: Synthetic oligonucleotide
  Sense strand starting at position 3298 of SEQ ID NO: 318083
gcagauugguucucagagu

SEQ ID NO: 535446 - RNA, 19 nt, Artificial Sequence
  Description of Artificial Sequence: Synthetic oligonucleotide
  Antisense strand to SEQ ID NO: 535445
acucugagaaccaaucugc

SEQ ID NO: 535447 - RNA, 19 nt, Artificial Sequence
  Description of Artificial Sequence: Synthetic oligonucleotide
  Sense strand starting at position 3304 of SEQ ID NO: 318083
ugguucucagaguagauau

SEQ ID NO: 535448 - RNA, 19 nt, Artificial Sequence
  Description of Artificial Sequence: Synthetic oligonucleotide
  Antisense strand to SEQ ID NO: 535447
auaucuacucugagaacca

SEQ ID NO: 535449 - RNA, 19 nt, Artificial Sequence
  Description of Artificial Sequence: Synthetic oligonucleotide
  Sense strand starting at position 3312 of SEQ ID NO: 318083
agaguagauaucugugaga

SEQ ID NO: 535450 - RNA, 19 nt, Artificial Sequence
  Description of Artificial Sequence: Synthetic oligonucleotide
  Antisense strand to SEQ ID NO: 535449
ucucacagauaucuacucu

SEQ ID NO: 535451 - RNA, 19 nt, Artificial Sequence
  Description of Artificial Sequence: Synthetic oligonucleotide
  Sense strand starting at position 3314 of SEQ ID NO: 318083
aguagauaucugugagaca

SEQ ID NO: 535452 - RNA, 19 nt, Artificial Sequence
  Description of Artificial Sequence: Synthetic oligonucleotide
  Antisense strand to SEQ ID NO: 535451
ugucucacagauaucuacu

SEQ ID NO: 535453 - RNA, 19 nt, Artificial Sequence
  Description of Artificial Sequence: Synthetic oligonucleotide
  Sense strand starting at position 3420 of SEQ ID NO: 318083
cgaguaacuuuaguguauu

SEQ ID NO: 535454 - RNA, 19 nt, Artificial Sequence
  Description of Artificial Sequence: Synthetic oligonucleotide
  Antisense strand to SEQ ID NO: 535453
aauacacuaaaguuacucg

SEQ ID NO: 535455 - RNA, 19 nt, Artificial Sequence
  Description of Artificial Sequence: Synthetic oligonucleotide
  Sense strand starting at position 3833 of SEQ ID NO: 318083
cauugcucaccguaguuaa

SEQ ID NO: 535456 - RNA, 19 nt, Artificial Sequence
  Description of Artificial Sequence: Synthetic oligonucleotide
  Antisense strand to SEQ ID NO: 535455
uuaacuacggugagcaaug

SEQ ID NO: 535457 - RNA, 19 nt, Artificial Sequence
  Description of Artificial Sequence: Synthetic oligonucleotide
  Sense strand starting at position 3836 of SEQ ID NO: 318083
ugcucaccguaguuaauaa

SEQ ID NO: 535458 - RNA, 19 nt, Artificial Sequence
  Description of Artificial Sequence: Synthetic oligonucleotide
  Antisense strand to SEQ ID NO: 535457
uuauuaacuacggugagca

SEQ ID NO: 535459 - RNA, 19 nt, Artificial Sequence
  Description of Artificial Sequence: Synthetic oligonucleotide
  Sense strand starting at position 3872 of SEQ ID NO: 318083
cccgaaagcuucccugaaa

SEQ ID NO: 535460 - RNA, 19 nt, Artificial Sequence
  Description of Artificial Sequence: Synthetic oligonucleotide
  Antisense strand to SEQ ID NO: 535459
uuucagggaagcuuucggg

SEQ ID NO: 535461 - RNA, 19 nt, Artificial Sequence
  Description of Artificial Sequence: Synthetic oligonucleotide
  Sense strand starting at position 3873 of SEQ ID NO: 318083
ccgaaagcuucccugaaac

SEQ ID NO: 535462 - RNA, 19 nt, Artificial Sequence
  Description of Artificial Sequence: Synthetic oligonucleotide
  Antisense strand to SEQ ID NO: 535461
guuucagggaagcuuucgg

SEQ ID NO: 535463 - RNA, 19 nt, Artificial Sequence
  Description of Artificial Sequence: Synthetic oligonucleotide
  Sense strand starting at position 3938 of SEQ ID NO: 318083
gggcuuccuagauguguuu

SEQ ID NO: 535464 - RNA, 19 nt, Artificial Sequence
  Description of Artificial Sequence: Synthetic oligonucleotide
  Antisense strand to SEQ ID NO: 535463
aaacacaucuaggaagccc

SEQ ID NO: 535465 - RNA, 19 nt, Artificial Sequence
  Description of Artificial Sequence: Synthetic oligonucleotide
  Sense strand starting at position 3940 of SEQ ID NO: 318083
gcuuccuagauguguuuga

SEQ ID NO: 535466 - RNA, 19 nt, Artificial Sequence
  Description of Artificial Sequence: Synthetic oligonucleotide
  Antisense strand to SEQ ID NO: 535465
ucaaacacaucuaggaagc

SEQ ID NO: 535467 - RNA, 19 nt, Artificial Sequence
  Description of Artificial Sequence: Synthetic oligonucleotide
  Sense strand starting at position 3944 of SEQ ID NO: 318083
ccuagauguguuugagacc

SEQ ID NO: 535468 - RNA, 19 nt, Artificial Sequence
  Description of Artificial Sequence: Synthetic oligonucleotide
  Antisense strand to SEQ ID NO: 535467
ggucucaaacacaucuagg

SEQ ID NO: 535469 - RNA, 19 nt, Artificial Sequence
  Description of Artificial Sequence: Synthetic oligonucleotide
  Sense strand starting at position 3951 of SEQ ID NO: 318083
guguuugagaccuauugua

SEQ ID NO: 535470 - RNA, 19 nt, Artificial Sequence
  Description of Artificial Sequence: Synthetic oligonucleotide
  Antisense strand to SEQ ID NO: 535469
uacaauaggucucaaacac

SEQ ID NO: 535471 - RNA, 19 nt, Artificial Sequence
  Description of Artificial Sequence: Synthetic oligonucleotide
  Sense strand starting at position 3967 of SEQ ID NO: 318083
guauuaauucuaggcauac

SEQ ID NO: 535472 - RNA, 19 nt, Artificial Sequence
  Description of Artificial Sequence: Synthetic oligonucleotide
  Antisense strand to SEQ ID NO: 535471
guaugccuagaauuaauac

SEQ ID NO: 535473 - RNA, 19 nt, Artificial Sequence
  Description of Artificial Sequence: Synthetic oligonucleotide
  Sense strand starting at position 76 of SEQ ID NO: 318084
ggaacaauucgguaucugu

SEQ ID NO: 535474 - RNA, 19 nt, Artificial Sequence
  Description of Artificial Sequence: Synthetic oligonucleotide
  Antisense strand to SEQ ID NO: 535473
acagauaccgaauuguucc

SEQ ID NO: 535475 - RNA, 19 nt, Artificial Sequence
  Description of Artificial Sequence: Synthetic oligonucleotide
  Sense strand starting at position 120 of SEQ ID NO: 318084
aaagucauucuaggcagua

SEQ ID NO: 535476 - RNA, 19 nt, Artificial Sequence
  Description of Artificial Sequence: Synthetic oligonucleotide
  Antisense strand to SEQ ID NO: 535475
uacugccuagaaugacuuu

SEQ ID NO: 535477 - RNA, 19 nt, Artificial Sequence
  Description of Artificial Sequence: Synthetic oligonucleotide
  Sense strand starting at position 121 of SEQ ID NO: 318084
aagucauucuaggcaguag

SEQ ID NO: 535478 - RNA, 19 nt, Artificial Sequence
  Description of Artificial Sequence: Synthetic oligonucleotide
  Antisense strand to SEQ ID NO: 535477
cuacugccuagaaugacuu

SEQ ID NO: 535479 - RNA, 19 nt, Artificial Sequence
  Description of Artificial Sequence: Synthetic oligonucleotide
  Sense strand starting at position 454 of SEQ ID NO: 318084
ggcccaucagcugauacua

SEQ ID NO: 535480 - RNA, 19 nt, Artificial Sequence
  Description of Artificial Sequence: Synthetic oligonucleotide
  Antisense strand to SEQ ID NO: 535479
uaguaucagcugaugggcc

SEQ ID NO: 535481 - RNA, 19 nt, Artificial Sequence
  Description of Artificial Sequence: Synthetic oligonucleotide
  Sense strand starting at position 492 of SEQ ID NO: 318084
ccacauuucucagcauggu

SEQ ID NO: 535482 - RNA, 19 nt, Artificial Sequence
  Description of Artificial Sequence: Synthetic oligonucleotide
  Antisense strand to SEQ ID NO: 535481
accaugcugagaaaugugg

SEQ ID NO: 535483 - RNA, 19 nt, Artificial Sequence
  Description of Artificial Sequence: Synthetic oligonucleotide
  Sense strand starting at position 575 of SEQ ID NO: 318084
ucuugaaacccuugcauga

SEQ ID NO: 535484 - RNA, 19 nt, Artificial Sequence
  Description of Artificial Sequence: Synthetic oligonucleotide
  Antisense strand to SEQ ID NO: 535483
ucaugcaaggguuucaaga

SEQ ID NO: 535485 - RNA, 19 nt, Artificial Sequence
  Description of Artificial Sequence: Synthetic oligonucleotide
  Sense strand starting at position 620 of SEQ ID NO: 318084
cuccuacuuccuggaguau

SEQ ID NO: 535486 - RNA, 19 nt, Artificial Sequence
  Description of Artificial Sequence: Synthetic oligonucleotide
  Antisense strand to SEQ ID NO: 535485
auacuccaggaaguaggag

SEQ ID NO: 535487 - RNA, 19 nt, Artificial Sequence
  Description of Artificial Sequence: Synthetic oligonucleotide
  Sense strand starting at position 715 of SEQ ID NO: 318084
guuuguuaccuuuaauuag

SEQ ID NO: 535488 - RNA, 19 nt, Artificial Sequence
  Description of Artificial Sequence: Synthetic oligonucleotide
  Antisense strand to SEQ ID NO: 535487
cuaauuaaagguaacaaac

SEQ ID NO: 535489 - RNA, 19 nt, Artificial Sequence
  Description of Artificial Sequence: Synthetic oligonucleotide
  Sense strand starting at position 792 of SEQ ID NO: 318084
augcaaagaucccuaguuu

SEQ ID NO: 535490 - RNA, 19 nt, Artificial Sequence
  Description of Artificial Sequence: Synthetic oligonucleotide
  Antisense strand to SEQ ID NO: 535489
aaacuagggaucuuugcau

SEQ ID NO: 535491 - RNA, 19 nt, Artificial Sequence
  Description of Artificial Sequence: Synthetic oligonucleotide
  Sense strand starting at position 793 of SEQ ID NO: 318084
ugcaaagaucccuaguuug

SEQ ID NO: 535492 - RNA, 19 nt, Artificial Sequence
  Description of Artificial Sequence: Synthetic oligonucleotide
  Antisense strand to SEQ ID NO: 535491
caaacuagggaucuuugca

SEQ ID NO: 535493 - RNA, 19 nt, Artificial Sequence
  Description of Artificial Sequence: Synthetic oligonucleotide
  Sense strand starting at position 819 of SEQ ID NO: 318084
ggcagacuucuagaacugu

SEQ ID NO: 535494 - RNA, 19 nt, Artificial Sequence
  Description of Artificial Sequence: Synthetic oligonucleotide
  Antisense strand to SEQ ID NO: 535493
acaguucuagaagucugcc

SEQ ID NO: 535495 - RNA, 19 nt, Artificial Sequence
  Description of Artificial Sequence: Synthetic oligonucleotide
  Sense strand starting at position 825 of SEQ ID NO: 318084
cuucuagaacugugugacu

SEQ ID NO: 535496 - RNA, 19 nt, Artificial Sequence
  Description of Artificial Sequence: Synthetic oligonucleotide
  Antisense strand to SEQ ID NO: 535495
agucacacaguucuagaag

SEQ ID NO: 535497 - RNA, 19 nt, Artificial Sequence
  Description of Artificial Sequence: Synthetic oligonucleotide
  Sense strand starting at position 827 of SEQ ID NO: 318084
ucuagaacugugugacucu

SEQ ID NO: 535498 - RNA, 19 nt, Artificial Sequence
  Description of Artificial Sequence: Synthetic oligonucleotide
  Antisense strand to SEQ ID NO: 535497
agagucacacaguucuaga

SEQ ID NO: 535499 - RNA, 19 nt, Artificial Sequence
  Description of Artificial Sequence: Synthetic oligonucleotide
  Sense strand starting at position 941 of SEQ ID NO: 318084
ugucauggugccuagauga

SEQ ID NO: 535500 - RNA, 19 nt, Artificial Sequence
  Description of Artificial Sequence: Synthetic oligonucleotide
  Antisense strand to SEQ ID NO: 535499
ucaucuaggcaccaugaca

SEQ ID NO: 535501 - RNA, 19 nt, Artificial Sequence
  Description of Artificial Sequence: Synthetic oligonucleotide
  Sense strand starting at position 1064 of SEQ ID NO: 318084
ucucuuaugccauggauca

SEQ ID NO: 535502 - RNA, 19 nt, Artificial Sequence
  Description of Artificial Sequence: Synthetic oligonucleotide
  Antisense strand to SEQ ID NO: 535501
ugauccauggcauaagaga

SEQ ID NO: 535503 - RNA, 19 nt, Artificial Sequence
  Description of Artificial Sequence: Synthetic oligonucleotide
  Sense strand starting at position 1065 of SEQ ID NO: 318084
cucuuaugccauggaucau

SEQ ID NO: 535504 - RNA, 19 nt, Artificial Sequence
  Description of Artificial Sequence: Synthetic oligonucleotide
  Antisense strand to SEQ ID NO: 535503
augauccauggcauaagag

SEQ ID NO: 535505 - RNA, 19 nt, Artificial Sequence
  Description of Artificial Sequence: Synthetic oligonucleotide
  Sense strand starting at position 1126 of SEQ ID NO: 318084
gggauuccaugacuuauua

SEQ ID NO: 535506 - RNA, 19 nt, Artificial Sequence
  Description of Artificial Sequence: Synthetic oligonucleotide
  Antisense strand to SEQ ID NO: 535505
uaauaagucauggaauccc

SEQ ID NO: 535507 - RNA, 19 nt, Artificial Sequence
  Description of Artificial Sequence: Synthetic oligonucleotide
  Sense strand starting at position 1139 of SEQ ID NO: 318084
uuauuaguagcaugaagga

SEQ ID NO: 535508 - RNA, 19 nt, Artificial Sequence
  Description of Artificial Sequence: Synthetic oligonucleotide
  Antisense strand to SEQ ID NO: 535507
uccuucaugcuacuaauaa

SEQ ID NO: 535509 - RNA, 19 nt, Artificial Sequence
  Description of Artificial Sequence: Synthetic oligonucleotide
  Sense strand starting at position 1201 of SEQ ID NO: 318084
cuaagagguuacccacauu

SEQ ID NO: 535510 - RNA, 19 nt, Artificial Sequence
  Description of Artificial Sequence: Synthetic oligonucleotide
  Antisense strand to SEQ ID NO: 535509
aauguggguaaccucuuag

SEQ ID NO: 535511 - RNA, 19 nt, Artificial Sequence
  Description of Artificial Sequence: Synthetic oligonucleotide
  Sense strand starting at position 1233 of SEQ ID NO: 318084
ugcaauuccuuguuugaaa

SEQ ID NO: 535512 - RNA, 19 nt, Artificial Sequence
  Description of Artificial Sequence: Synthetic oligonucleotide
  Antisense strand to SEQ ID NO: 535511
uuucaaacaaggaauugca

SEQ ID NO: 535513 - RNA, 19 nt, Artificial Sequence
  Description of Artificial Sequence: Synthetic oligonucleotide
  Sense strand starting at position 1298 of SEQ ID NO: 318084
auuguuguugcacacaauu

SEQ ID NO: 535514 - RNA, 19 nt, Artificial Sequence
  Description of Artificial Sequence: Synthetic oligonucleotide
  Antisense strand to SEQ ID NO: 535513
aauugugugcaacaacaau

SEQ ID NO: 535515 - RNA, 19 nt, Artificial Sequence
  Description of Artificial Sequence: Synthetic oligonucleotide
  Sense strand starting at position 1409 of SEQ ID NO: 318084
gggccaaaguuaguuaauc

SEQ ID NO: 535516 - RNA, 19 nt, Artificial Sequence
  Description of Artificial Sequence: Synthetic oligonucleotide
  Antisense strand to SEQ ID NO: 535515
gauuaacuaacuuuggccc

SEQ ID NO: 535517 - RNA, 19 nt, Artificial Sequence
  Description of Artificial Sequence: Synthetic oligonucleotide
  Sense strand starting at position 1621 of SEQ ID NO: 318084
ccuuuaacugaugggcauu

SEQ ID NO: 535518 - RNA, 19 nt, Artificial Sequence
  Description of Artificial Sequence: Synthetic oligonucleotide
  Antisense strand to SEQ ID NO: 535517
aaugcccaucaguuaaagg

SEQ ID NO: 535519 - RNA, 19 nt, Artificial Sequence
  Description of Artificial Sequence: Synthetic oligonucleotide
  Sense strand starting at position 1734 of SEQ ID NO: 318084
gcuauacaguuauuauuag

SEQ ID NO: 535520 - RNA, 19 nt, Artificial Sequence
  Description of Artificial Sequence: Synthetic oligonucleotide
  Antisense strand to SEQ ID NO: 535519
cuaauaauaacuguauagc

SEQ ID NO: 535521 - RNA, 19 nt, Artificial Sequence
  Description of Artificial Sequence: Synthetic oligonucleotide
  Sense strand starting at position 1775 of SEQ ID NO: 318084
uacaucggucccuagagua

SEQ ID NO: 535522 - RNA, 19 nt, Artificial Sequence
  Description of Artificial Sequence: Synthetic oligonucleotide
  Antisense strand to SEQ ID NO: 535521
uacucuagggaccgaugua

SEQ ID NO: 535523 - RNA, 19 nt, Artificial Sequence
  Description of Artificial Sequence: Synthetic oligonucleotide
  Sense strand starting at position 1981 of SEQ ID NO: 318084
guccaauggcccugaaaca

SEQ ID NO: 535524 - RNA, 19 nt, Artificial Sequence
  Description of Artificial Sequence: Synthetic oligonucleotide
  Antisense strand to SEQ ID NO: 535523
uguuucagggccauuggac

SEQ ID NO: 535525 - RNA, 19 nt, Artificial Sequence
  Description of Artificial Sequence: Synthetic oligonucleotide
  Sense strand starting at position 2050 of SEQ ID NO: 318084
cuccuuucugauggaaacu

SEQ ID NO: 535526 - RNA, 19 nt, Artificial Sequence
  Description of Artificial Sequence: Synthetic oligonucleotide
  Antisense strand to SEQ ID NO: 535525
aguuuccaucagaaaggag

SEQ ID NO: 535527 - RNA, 19 nt, Artificial Sequence
  Description of Artificial Sequence: Synthetic oligonucleotide
  Sense strand starting at position 2076 of SEQ ID NO: 318084
gaaacugacuuguugcaac

SEQ ID NO: 535528 - RNA, 19 nt, Artificial Sequence
  Description of Artificial Sequence: Synthetic oligonucleotide
  Antisense strand to SEQ ID NO: 535527
guugcaacaagucaguuuc

SEQ ID NO: 535529 - RNA, 19 nt, Artificial Sequence
  Description of Artificial Sequence: Synthetic oligonucleotide
  Sense strand starting at position 2263 of SEQ ID NO: 318084
augcuaauuucucuggguu

SEQ ID NO: 535530 - RNA, 19 nt, Artificial Sequence
  Description of Artificial Sequence: Synthetic oligonucleotide
  Antisense strand to SEQ ID NO: 535529
aacccagagaaauuagcau

SEQ ID NO: 535531 - RNA, 19 nt, Artificial Sequence
  Description of Artificial Sequence: Synthetic oligonucleotide
  Sense strand starting at position 2264 of SEQ ID NO: 318084
ugcuaauuucucuggguuu

SEQ ID NO: 535532 - RNA, 19 nt, Artificial Sequence
  Description of Artificial Sequence: Synthetic oligonucleotide
  Antisense strand to SEQ ID NO: 535531
aaacccagagaaauuagca

SEQ ID NO: 535533 - RNA, 19 nt, Artificial Sequence
  Description of Artificial Sequence: Synthetic oligonucleotide
  Sense strand starting at position 2317 of SEQ ID NO: 318084
gcagauucccuggguucca

SEQ ID NO: 535534 - RNA, 19 nt, Artificial Sequence
  Description of Artificial Sequence: Synthetic oligonucleotide
  Antisense strand to SEQ ID NO: 535533
uggaacccagggaaucugc

SEQ ID NO: 535535 - RNA, 19 nt, Artificial Sequence
  Description of Artificial Sequence: Synthetic oligonucleotide
  Sense strand starting at position 2383 of SEQ ID NO: 318084
aguucaugucgggauggaa

SEQ ID NO: 535536 - RNA, 19 nt, Artificial Sequence
  Description of Artificial Sequence: Synthetic oligonucleotide
  Antisense strand to SEQ ID NO: 535535
uuccaucccgacaugaacu

SEQ ID NO: 535537 - RNA, 19 nt, Artificial Sequence
  Description of Artificial Sequence: Synthetic oligonucleotide
  Sense strand starting at position 2469 of SEQ ID NO: 318084
gggcaaaggguuuaguaca

SEQ ID NO: 535538 - RNA, 19 nt, Artificial Sequence
  Description of Artificial Sequence: Synthetic oligonucleotide
  Antisense strand to SEQ ID NO: 535537
uguacuaaacccuuugccc

SEQ ID NO: 535539 - RNA, 19 nt, Artificial Sequence
  Description of Artificial Sequence: Synthetic oligonucleotide
  Sense strand starting at position 2874 of SEQ ID NO: 318084
gaauaaagauaucucucgu

SEQ ID NO: 535540 - RNA, 19 nt, Artificial Sequence
  Description of Artificial Sequence: Synthetic oligonucleotide
  Antisense strand to SEQ ID NO: 535539
acgagagauaucuuuauuc

SEQ ID NO: 535541 - RNA, 19 nt, Artificial Sequence
  Description of Artificial Sequence: Synthetic oligonucleotide
  Sense strand starting at position 2881 of SEQ ID NO: 318084
gauaucucucgugguggaa

SEQ ID NO: 535542 - RNA, 19 nt, Artificial Sequence
  Description of Artificial Sequence: Synthetic oligonucleotide
  Antisense strand to SEQ ID NO: 535541
uuccaccacgagagauauc

SEQ ID NO: 535543 - RNA, 19 nt, Artificial Sequence
  Description of Artificial Sequence: Synthetic oligonucleotide
  Sense strand starting at position 2906 of SEQ ID NO: 318084
guugcuaagagguaugcaa

SEQ ID NO: 535544 - RNA, 19 nt, Artificial Sequence
  Description of Artificial Sequence: Synthetic oligonucleotide
  Antisense strand to SEQ ID NO: 535543
uugcauaccucuuagcaac

SEQ ID NO: 535545 - RNA, 19 nt, Artificial Sequence
  Description of Artificial Sequence: Synthetic oligonucleotide
  Sense strand starting at position 2908 of SEQ ID NO: 318084
ugcuaagagguaugcaaag

SEQ ID NO: 535546 - RNA, 19 nt, Artificial Sequence
  Description of Artificial Sequence: Synthetic oligonucleotide
  Antisense strand to SEQ ID NO: 535545
cuuugcauaccucuuagca

SEQ ID NO: 535547 - RNA, 19 nt, Artificial Sequence
  Description of Artificial Sequence: Synthetic oligonucleotide
  Sense strand starting at position 3645 of SEQ ID NO: 318084
guaucucugaggcauaugu

SEQ ID NO: 535548 - RNA, 19 nt, Artificial Sequence
  Description of Artificial Sequence: Synthetic oligonucleotide
  Antisense strand to SEQ ID NO: 535547
acauaugccucagagauac

SEQ ID NO: 535549 - RNA, 19 nt, Artificial Sequence
  Description of Artificial Sequence: Synthetic oligonucleotide
  Sense strand starting at position 3647 of SEQ ID NO: 318084
aucucugaggcauauguaa

SEQ ID NO: 535550 - RNA, 19 nt, Artificial Sequence
  Description of Artificial Sequence: Synthetic oligonucleotide
  Antisense strand to SEQ ID NO: 535549
uuacauaugccucagagau

SEQ ID NO: 535551 - RNA, 19 nt, Artificial Sequence
  Description of Artificial Sequence: Synthetic oligonucleotide
  Sense strand starting at position 3707 of SEQ ID NO: 318084
uccgauccaucacuaaagu

SEQ ID NO: 535552 - RNA, 19 nt, Artificial Sequence
  Description of Artificial Sequence: Synthetic oligonucleotide
  Antisense strand to SEQ ID NO: 535551
acuuuagugauggaucgga

SEQ ID NO: 535553 - RNA, 19 nt, Artificial Sequence
  Description of Artificial Sequence: Synthetic oligonucleotide
  Sense strand starting at position 127 of SEQ ID NO: 318085
guaccucuacuguacagau

SEQ ID NO: 535554 - RNA, 19 nt, Artificial Sequence
  Description of Artificial Sequence: Synthetic oligonucleotide
  Antisense strand to SEQ ID NO: 535553
aucuguacaguagagguac

SEQ ID NO: 535555 - RNA, 19 nt, Artificial Sequence
  Description of Artificial Sequence: Synthetic oligonucleotide
  Sense strand starting at position 135 of SEQ ID NO: 318085
acuguacagauguggaaau

SEQ ID NO: 535556 - RNA, 19 nt, Artificial Sequence
  Description of Artificial Sequence: Synthetic oligonucleotide
  Antisense strand to SEQ ID NO: 535555
auuuccacaucuguacagu

SEQ ID NO: 535557 - RNA, 19 nt, Artificial Sequence
  Description of Artificial Sequence: Synthetic oligonucleotide
  Sense strand starting at position 598 of SEQ ID NO: 318085
acuugaagcuugcuuggaa

SEQ ID NO: 535558 - RNA, 19 nt, Artificial Sequence
  Description of Artificial Sequence: Synthetic oligonucleotide
  Antisense strand to SEQ ID NO: 535557
uuccaagcaagcuucaagu

SEQ ID NO: 535559 - RNA, 19 nt, Artificial Sequence
  Description of Artificial Sequence: Synthetic oligonucleotide
  Sense strand starting at position 957 of SEQ ID NO: 318085
gggucuuggagcugagaga

SEQ ID NO: 535560 - RNA, 19 nt, Artificial Sequence
  Description of Artificial Sequence: Synthetic oligonucleotide
  Antisense strand to SEQ ID NO: 535559
ucucucagcuccaagaccc

SEQ ID NO: 535561 - RNA, 19 nt, Artificial Sequence
  Description of Artificial Sequence: Synthetic oligonucleotide
  Sense strand starting at position 1008 of SEQ ID NO: 318085
gcaugcaaggcuugccaua

SEQ ID NO: 535562 - RNA, 19 nt, Artificial Sequence
  Description of Artificial Sequence: Synthetic oligonucleotide
  Antisense strand to SEQ ID NO: 535561
uauggcaagccuugcaugc

SEQ ID NO: 535563 - RNA, 19 nt, Artificial Sequence
  Description of Artificial Sequence: Synthetic oligonucleotide
  Sense strand starting at position 1096 of SEQ ID NO: 318085
gccacuguugaccaagaca

SEQ ID NO: 535564 - RNA, 19 nt, Artificial Sequence
  Description of Artificial Sequence: Synthetic oligonucleotide
  Antisense strand to SEQ ID NO: 535563
ugucuuggucaacaguggc

SEQ ID NO: 535565 - RNA, 19 nt, Artificial Sequence
  Description of Artificial Sequence: Synthetic oligonucleotide
  Sense strand starting at position 1249 of SEQ ID NO: 318085
cucacugaaccuuagcaga

SEQ ID NO: 535566 - RNA, 19 nt, Artificial Sequence
  Description of Artificial Sequence: Synthetic oligonucleotide
  Antisense strand to SEQ ID NO: 535565
ucugcuaagguucagugag

SEQ ID NO: 535567 - RNA, 19 nt, Artificial Sequence
  Description of Artificial Sequence: Synthetic oligonucleotide
  Sense strand starting at position 1263 of SEQ ID NO: 318085
gcagaauggguucaucgua

SEQ ID NO: 535568 - RNA, 19 nt, Artificial Sequence
  Description of Artificial Sequence: Synthetic oligonucleotide
  Antisense strand to SEQ ID NO: 535567
uacgaugaacccauucugc

SEQ ID NO: 535569 - RNA, 19 nt, Artificial Sequence
  Description of Artificial Sequence: Synthetic oligonucleotide
  Sense strand starting at position 1294 of SEQ ID NO: 318085
gguggcuggcagugaugaa

SEQ ID NO: 535570 - RNA, 19 nt, Artificial Sequence
  Description of Artificial Sequence: Synthetic oligonucleotide
  Antisense strand to SEQ ID NO: 535569
uucaucacugccagccacc

SEQ ID NO: 535571 - RNA, 19 nt, Artificial Sequence
  Description of Artificial Sequence: Synthetic oligonucleotide
  Sense strand starting at position 1295 of SEQ ID NO: 318085
guggcuggcagugaugaaa

SEQ ID NO: 535572 - RNA, 19 nt, Artificial Sequence
  Description of Artificial Sequence: Synthetic oligonucleotide
  Antisense strand to SEQ ID NO: 535571
uuucaucacugccagccac

SEQ ID NO: 535573 - RNA, 19 nt, Artificial Sequence
  Description of Artificial Sequence: Synthetic oligonucleotide
  Sense strand starting at position 1298 of SEQ ID NO: 318085
gcuggcagugaugaaauga

SEQ ID NO: 535574 - RNA, 19 nt, Artificial Sequence
  Description of Artificial Sequence: Synthetic oligonucleotide
  Antisense strand to SEQ ID NO: 535573
ucauuucaucacugccagc

SEQ ID NO: 535575 - RNA, 19 nt, Artificial Sequence
  Description of Artificial Sequence: Synthetic oligonucleotide
  Sense strand starting at position 1345 of SEQ ID NO: 318085
guaagcagugcucagacau

SEQ ID NO: 535576 - RNA, 19 nt, Artificial Sequence
  Description of Artificial Sequence: Synthetic oligonucleotide
  Antisense strand to SEQ ID NO: 535575
augucugagcacugcuuac

SEQ ID NO: 535577 - RNA, 19 nt, Artificial Sequence
  Description of Artificial Sequence: Synthetic oligonucleotide
  Sense strand starting at position 1356 of SEQ ID NO: 318085
ucagacaugugagcuguua

SEQ ID NO: 535578 - RNA, 19 nt, Artificial Sequence
  Description of Artificial Sequence: Synthetic oligonucleotide
  Antisense strand to SEQ ID NO: 535577
uaacagcucacaugucuga

SEQ ID NO: 535579 - RNA, 19 nt, Artificial Sequence
  Description of Artificial Sequence: Synthetic oligonucleotide
  Sense strand starting at position 1358 of SEQ ID NO: 318085
agacaugugagcuguuacu

SEQ ID NO: 535580 - RNA, 19 nt, Artificial Sequence
  Description of Artificial Sequence: Synthetic oligonucleotide
  Antisense strand to SEQ ID NO: 535579
aguaacagcucacaugucu

SEQ ID NO: 535581 - RNA, 19 nt, Artificial Sequence
  Description of Artificial Sequence: Synthetic oligonucleotide
  Sense strand starting at position 1477 of SEQ ID NO: 318085
uggcaaaugccacaugguu

SEQ ID NO: 535582 - RNA, 19 nt, Artificial Sequence
  Description of Artificial Sequence: Synthetic oligonucleotide
  Antisense strand to SEQ ID NO: 535581
aaccauguggcauuugcca

SEQ ID NO: 535583 - RNA, 19 nt, Artificial Sequence
  Description of Artificial Sequence: Synthetic oligonucleotide
  Sense strand starting at position 1682 of SEQ ID NO: 318085
ggccuugguccauggagau

SEQ ID NO: 535584 - RNA, 19 nt, Artificial Sequence
  Description of Artificial Sequence: Synthetic oligonucleotide
  Antisense strand to SEQ ID NO: 535583
aucuccauggaccaaggcc

SEQ ID NO: 535585 - RNA, 19 nt, Artificial Sequence
  Description of Artificial Sequence: Synthetic oligonucleotide
  Sense strand starting at position 2129 of SEQ ID NO: 318085
uccagugucgcauaaagga

SEQ ID NO: 535586 - RNA, 19 nt, Artificial Sequence
  Description of Artificial Sequence: Synthetic oligonucleotide
  Antisense strand to SEQ ID NO: 535585
uccuuuaugcgacacugga

SEQ ID NO: 535587 - RNA, 19 nt, Artificial Sequence
  Description of Artificial Sequence: Synthetic oligonucleotide
  Sense strand starting at position 2144 of SEQ ID NO: 318085
aggaaagaguuugauuucu

SEQ ID NO: 535588 - RNA, 19 nt, Artificial Sequence
  Description of Artificial Sequence: Synthetic oligonucleotide
  Antisense strand to SEQ ID NO: 535587
agaaaucaaacucuuuccu

SEQ ID NO: 535589 - RNA, 19 nt, Artificial Sequence
  Description of Artificial Sequence: Synthetic oligonucleotide
  Sense strand starting at position 2153 of SEQ ID NO: 318085
uuugauuucucauggacuu

SEQ ID NO: 535590 - RNA, 19 nt, Artificial Sequence
  Description of Artificial Sequence: Synthetic oligonucleotide
  Antisense strand to SEQ ID NO: 535589
aaguccaugagaaaucaaa

SEQ ID NO: 535591 - RNA, 19 nt, Artificial Sequence
  Description of Artificial Sequence: Synthetic oligonucleotide
  Sense strand starting at position 2165 of SEQ ID NO: 318085
uggacuuauugagaagggu

SEQ ID NO: 535592 - RNA, 19 nt, Artificial Sequence
  Description of Artificial Sequence: Synthetic oligonucleotide
  Antisense strand to SEQ ID NO: 535591
acccuucucaauaagucca

SEQ ID NO: 535593 - RNA, 19 nt, Artificial Sequence
  Description of Artificial Sequence: Synthetic oligonucleotide
  Sense strand starting at position 2198 of SEQ ID NO: 318085
ccaagaucuggguggguuu

SEQ ID NO: 535594 - RNA, 19 nt, Artificial Sequence
  Description of Artificial Sequence: Synthetic oligonucleotide
  Antisense strand to SEQ ID NO: 535593
aaacccacccagaucuugg

SEQ ID NO: 535595 - RNA, 19 nt, Artificial Sequence
  Description of Artificial Sequence: Synthetic oligonucleotide
  Sense strand starting at position 2199 of SEQ ID NO: 318085
caagaucuggguggguuua

SEQ ID NO: 535596 - RNA, 19 nt, Artificial Sequence
  Description of Artificial Sequence: Synthetic oligonucleotide
  Antisense strand to SEQ ID NO: 535595
uaaacccacccagaucuug

SEQ ID NO: 535597 - RNA, 19 nt, Artificial Sequence
  Description of Artificial Sequence: Synthetic oligonucleotide
  Sense strand starting at position 2200 of SEQ ID NO: 318085
aagaucuggguggguuuaa

SEQ ID NO: 535598 - RNA, 19 nt, Artificial Sequence
  Description of Artificial Sequence: Synthetic oligonucleotide
  Antisense strand to SEQ ID NO: 535597
uuaaacccacccagaucuu

SEQ ID NO: 535599 - RNA, 19 nt, Artificial Sequence
  Description of Artificial Sequence: Synthetic oligonucleotide
  Sense strand starting at position 2201 of SEQ ID NO: 318085
agaucuggguggguuuaau

SEQ ID NO: 535600 - RNA, 19 nt, Artificial Sequence
  Description of Artificial Sequence: Synthetic oligonucleotide
  Antisense strand to SEQ ID NO: 535599
auuaaacccacccagaucu

SEQ ID NO: 535601 - RNA, 19 nt, Artificial Sequence
  Description of Artificial Sequence: Synthetic oligonucleotide
  Sense strand starting at position 2260 of SEQ ID NO: 318085
ugcaaugcugcccugaguu

SEQ ID NO: 535602 - RNA, 19 nt, Artificial Sequence
  Description of Artificial Sequence: Synthetic oligonucleotide
  Antisense strand to SEQ ID NO: 535601
aacucagggcagcauugca

SEQ ID NO: 535603 - RNA, 19 nt, Artificial Sequence
  Description of Artificial Sequence: Synthetic oligonucleotide
  Sense strand starting at position 2376 of SEQ ID NO: 318085
cagauagucuuagugcacu

SEQ ID NO: 535604 - RNA, 19 nt, Artificial Sequence
  Description of Artificial Sequence: Synthetic oligonucleotide
  Antisense strand to SEQ ID NO: 535603
agugcacuaagacuaucug

SEQ ID NO: 535605 - RNA, 19 nt, Artificial Sequence
  Description of Artificial Sequence: Synthetic oligonucleotide
  Sense strand starting at position 2410 of SEQ ID NO: 318085
gucuaccagcuaugggaau

SEQ ID NO: 535606 - RNA, 19 nt, Artificial Sequence
  Description of Artificial Sequence: Synthetic oligonucleotide
  Antisense strand to SEQ ID NO: 535605
auucccauagcugguagac

SEQ ID NO: 535607 - RNA, 19 nt, Artificial Sequence
  Description of Artificial Sequence: Synthetic oligonucleotide
  Sense strand starting at position 2474 of SEQ ID NO: 318085
aaguaacacuugcuuggau

SEQ ID NO: 535608 - RNA, 19 nt, Artificial Sequence
  Description of Artificial Sequence: Synthetic oligonucleotide
  Antisense strand to SEQ ID NO: 535607
auccaagcaaguguuacuu

SEQ ID NO: 535609 - RNA, 19 nt, Artificial Sequence
  Description of Artificial Sequence: Synthetic oligonucleotide
  Sense strand starting at position 2475 of SEQ ID NO: 318085
aguaacacuugcuuggaua

SEQ ID NO: 535610 - RNA, 19 nt, Artificial Sequence
  Description of Artificial Sequence: Synthetic oligonucleotide
  Antisense strand to SEQ ID NO: 535609
uauccaagcaaguguuacu

SEQ ID NO: 535611 - RNA, 19 nt, Artificial Sequence
  Description of Artificial Sequence: Synthetic oligonucleotide
  Sense strand starting at position 2476 of SEQ ID NO: 318085
guaacacuugcuuggauac

SEQ ID NO: 535612 - RNA, 19 nt, Artificial Sequence
  Description of Artificial Sequence: Synthetic oligonucleotide
  Antisense strand to SEQ ID NO: 535611
guauccaagcaaguguuac

SEQ ID NO: 535613 - RNA, 19 nt, Artificial Sequence
  Description of Artificial Sequence: Synthetic oligonucleotide
  Sense strand starting at position 2627 of SEQ ID NO: 318085
gaggucuuucugggagcuu

SEQ ID NO: 535614 - RNA, 19 nt, Artificial Sequence
  Description of Artificial Sequence: Synthetic oligonucleotide
  Antisense strand to SEQ ID NO: 535613
aagcucccagaaagaccuc

SEQ ID NO: 535615 - RNA, 19 nt, Artificial Sequence
  Description of Artificial Sequence: Synthetic oligonucleotide
  Sense strand starting at position 2819 of SEQ ID NO: 318085
gccauccuucugggaaacu

SEQ ID NO: 535616 - RNA, 19 nt, Artificial Sequence
  Description of Artificial Sequence: Synthetic oligonucleotide
  Antisense strand to SEQ ID NO: 535615
aguuucccagaaggauggc

SEQ ID NO: 535617 - RNA, 19 nt, Artificial Sequence
  Description of Artificial Sequence: Synthetic oligonucleotide
  Sense strand starting at position 2858 of SEQ ID NO: 318085
agccuuaguccaggucaga

SEQ ID NO: 535618 - RNA, 19 nt, Artificial Sequence
  Description of Artificial Sequence: Synthetic oligonucleotide
  Antisense strand to SEQ ID NO: 535617
ucugaccuggacuaaggcu

SEQ ID NO: 535619 - RNA, 19 nt, Artificial Sequence
  Description of Artificial Sequence: Synthetic oligonucleotide
  Sense strand starting at position 2861 of SEQ ID NO: 318085
cuuaguccaggucagagau

SEQ ID NO: 535620 - RNA, 19 nt, Artificial Sequence
  Description of Artificial Sequence: Synthetic oligonucleotide
  Antisense strand to SEQ ID NO: 535619
aucucugaccuggacuaag

SEQ ID NO: 535621 - RNA, 19 nt, Artificial Sequence
  Description of Artificial Sequence: Synthetic oligonucleotide
  Sense strand starting at position 2868 of SEQ ID NO: 318085
caggucagagauuguaagu

SEQ ID NO: 535622 - RNA, 19 nt, Artificial Sequence
  Description of Artificial Sequence: Synthetic oligonucleotide
  Antisense strand to SEQ ID NO: 535621
acuuacaaucucugaccug

SEQ ID NO: 535623 - RNA, 19 nt, Artificial Sequence
  Description of Artificial Sequence: Synthetic oligonucleotide
  Sense strand starting at position 2874 of SEQ ID NO: 318085
agagauuguaaguguuccu

SEQ ID NO: 535624 - RNA, 19 nt, Artificial Sequence
  Description of Artificial Sequence: Synthetic oligonucleotide
  Antisense strand to SEQ ID NO: 535623
aggaacacuuacaaucucu

SEQ ID NO: 535625 - RNA, 19 nt, Artificial Sequence
  Description of Artificial Sequence: Synthetic oligonucleotide
  Sense strand starting at position 2877 of SEQ ID NO: 318085
gauuguaaguguuccuagu

SEQ ID NO: 535626 - RNA, 19 nt, Artificial Sequence
  Description of Artificial Sequence: Synthetic oligonucleotide
  Antisense strand to SEQ ID NO: 535625
acuaggaacacuuacaauc

SEQ ID NO: 535627 - RNA, 19 nt, Artificial Sequence
  Description of Artificial Sequence: Synthetic oligonucleotide
  Sense strand starting at position 2929 of SEQ ID NO: 318085
ccagucucugcaggaucaa

SEQ ID NO: 535628 - RNA, 19 nt, Artificial Sequence
  Description of Artificial Sequence: Synthetic oligonucleotide
  Antisense strand to SEQ ID NO: 535627
uugauccugcagagacugg

SEQ ID NO: 535629 - RNA, 19 nt, Artificial Sequence
  Description of Artificial Sequence: Synthetic oligonucleotide
  Sense strand starting at position 3469 of SEQ ID NO: 318085
uuuccuaaucuguaguaga

SEQ ID NO: 535630 - RNA, 19 nt, Artificial Sequence
  Description of Artificial Sequence: Synthetic oligonucleotide
  Antisense strand to SEQ ID NO: 535629
ucuacuacagauuaggaaa

SEQ ID NO: 535631 - RNA, 19 nt, Artificial Sequence
  Description of Artificial Sequence: Synthetic oligonucleotide
  Sense strand starting at position 3711 of SEQ ID NO: 318085
gccuuauguaacgggagau

SEQ ID NO: 535632 - RNA, 19 nt, Artificial Sequence
  Description of Artificial Sequence: Synthetic oligonucleotide
  Antisense strand to SEQ ID NO: 535631
aucucccguuacauaaggc

SEQ ID NO: 535633 - RNA, 19 nt, Artificial Sequence
  Description of Artificial Sequence: Synthetic oligonucleotide
  Sense strand starting at position 47 of SEQ ID NO: 318086
ccucgugucagcuuuagca

SEQ ID NO: 535634 - RNA, 19 nt, Artificial Sequence
  Description of Artificial Sequence: Synthetic oligonucleotide
  Antisense strand to SEQ ID NO: 535633
ugcuaaagcugacacgagg

SEQ ID NO: 535635 - RNA, 19 nt, Artificial Sequence
  Description of Artificial Sequence: Synthetic oligonucleotide
  Sense strand starting at position 75 of SEQ ID NO: 318086
uagggaugccucuggacuu

SEQ ID NO: 535636 - RNA, 19 nt, Artificial Sequence
  Description of Artificial Sequence: Synthetic oligonucleotide
  Antisense strand to SEQ ID NO: 535635
aaguccagaggcaucccua

SEQ ID NO: 535637 - RNA, 19 nt, Artificial Sequence
  Description of Artificial Sequence: Synthetic oligonucleotide
  Sense strand starting at position 88 of SEQ ID NO: 318086
ggacuuucuugggcucuca

SEQ ID NO: 535638 - RNA, 19 nt, Artificial Sequence
  Description of Artificial Sequence: Synthetic oligonucleotide
  Antisense strand to SEQ ID NO: 535637
ugagagcccaagaaagucc

SEQ ID NO: 535639 - RNA, 19 nt, Artificial Sequence
  Description of Artificial Sequence: Synthetic oligonucleotide
  Sense strand starting at position 137 of SEQ ID NO: 318086
cuuaaaguuuguguauaca

SEQ ID NO: 535640 - RNA, 19 nt, Artificial Sequence
  Description of Artificial Sequence: Synthetic oligonucleotide
  Antisense strand to SEQ ID NO: 535639
uguauacacaaacuuuaag

SEQ ID NO: 535641 - RNA, 19 nt, Artificial Sequence
  Description of Artificial Sequence: Synthetic oligonucleotide
  Sense strand starting at position 211 of SEQ ID NO: 318086
guuuccacacacugucaua

SEQ ID NO: 535642 - RNA, 19 nt, Artificial Sequence
  Description of Artificial Sequence: Synthetic oligonucleotide
  Antisense strand to SEQ ID NO: 535641
uaugacaguguguggaaac

SEQ ID NO: 535643 - RNA, 19 nt, Artificial Sequence
  Description of Artificial Sequence: Synthetic oligonucleotide
  Sense strand starting at position 255 of SEQ ID NO: 318086
agugaacacucacugagua

SEQ ID NO: 535644 - RNA, 19 nt, Artificial Sequence
  Description of Artificial Sequence: Synthetic oligonucleotide
  Antisense strand to SEQ ID NO: 535643
uacucagugaguguucacu

SEQ ID NO: 535645 - RNA, 19 nt, Artificial Sequence
  Description of Artificial Sequence: Synthetic oligonucleotide
  Sense strand starting at position 256 of SEQ ID NO: 318086
gugaacacucacugaguaa

SEQ ID NO: 535646 - RNA, 19 nt, Artificial Sequence
  Description of Artificial Sequence: Synthetic oligonucleotide
  Antisense strand to SEQ ID NO: 535645
uuacucagugaguguucac

SEQ ID NO: 535647 - RNA, 19 nt, Artificial Sequence
  Description of Artificial Sequence: Synthetic oligonucleotide
  Sense strand starting at position 297 of SEQ ID NO: 318086
gcccuucugucauuuaugu

SEQ ID NO: 535648 - RNA, 19 nt, Artificial Sequence
  Description of Artificial Sequence: Synthetic oligonucleotide
  Antisense strand to SEQ ID NO: 535647
acauaaaugacagaagggc

SEQ ID NO: 535649 - RNA, 19 nt, Artificial Sequence
  Description of Artificial Sequence: Synthetic oligonucleotide
  Sense strand starting at position 308 of SEQ ID NO: 318086
auuuaugucuaagaaggaa

SEQ ID NO: 535650 - RNA, 19 nt, Artificial Sequence
  Description of Artificial Sequence: Synthetic oligonucleotide
  Antisense strand to SEQ ID NO: 535649
uuccuucuuagacauaaau

SEQ ID NO: 535651 - RNA, 19 nt, Artificial Sequence
  Description of Artificial Sequence: Synthetic oligonucleotide
  Sense strand starting at position 467 of SEQ ID NO: 318086
ggacaugucaggugaggca

SEQ ID NO: 535652 - RNA, 19 nt, Artificial Sequence
  Description of Artificial Sequence: Synthetic oligonucleotide
  Antisense strand to SEQ ID NO: 535651
ugccucaccugacaugucc

SEQ ID NO: 535653 - RNA, 19 nt, Artificial Sequence
  Description of Artificial Sequence: Synthetic oligonucleotide
  Sense strand starting at position 556 of SEQ ID NO: 318086
ggagguuugaacugguuaa

SEQ ID NO: 535654 - RNA, 19 nt, Artificial Sequence
  Description of Artificial Sequence: Synthetic oligonucleotide
  Antisense strand to SEQ ID NO: 535653
uuaaccaguucaaaccucc

SEQ ID NO: 535655 - RNA, 19 nt, Artificial Sequence
  Description of Artificial Sequence: Synthetic oligonucleotide
  Sense strand starting at position 557 of SEQ ID NO: 318086
gagguuugaacugguuaag

SEQ ID NO: 535656 - RNA, 19 nt, Artificial Sequence
  Description of Artificial Sequence: Synthetic oligonucleotide
  Antisense strand to SEQ ID NO: 535655
cuuaaccaguucaaaccuc

SEQ ID NO: 535657 - RNA, 19 nt, Artificial Sequence
  Description of Artificial Sequence: Synthetic oligonucleotide
  Sense strand starting at position 881 of SEQ ID NO: 318086
aagaacuuugcugaaucga

SEQ ID NO: 535658 - RNA, 19 nt, Artificial Sequence
  Description of Artificial Sequence: Synthetic oligonucleotide
  Antisense strand to SEQ ID NO: 535657
ucgauucagcaaaguucuu

SEQ ID NO: 535659 - RNA, 19 nt, Artificial Sequence
  Description of Artificial Sequence: Synthetic oligonucleotide
  Sense strand starting at position 889 of SEQ ID NO: 318086
ugcugaaucgaauggaaug

SEQ ID NO: 535660 - RNA, 19 nt, Artificial Sequence
  Description of Artificial Sequence: Synthetic oligonucleotide
  Antisense strand to SEQ ID NO: 535659
cauuccauucgauucagca

SEQ ID NO: 535661 - RNA, 19 nt, Artificial Sequence
  Description of Artificial Sequence: Synthetic oligonucleotide
  Sense strand starting at position 890 of SEQ ID NO: 318086
gcugaaucgaauggaaugu

SEQ ID NO: 535662 - RNA, 19 nt, Artificial Sequence
  Description of Artificial Sequence: Synthetic oligonucleotide
  Antisense strand to SEQ ID NO: 535661
acauuccauucgauucagc

SEQ ID NO: 535663 - RNA, 19 nt, Artificial Sequence
  Description of Artificial Sequence: Synthetic oligonucleotide
  Sense strand starting at position 894 of SEQ ID NO: 318086
aaucgaauggaauguugau

SEQ ID NO: 535664 - RNA, 19 nt, Artificial Sequence
  Description of Artificial Sequence: Synthetic oligonucleotide
  Antisense strand to SEQ ID NO: 535663
aucaacauuccauucgauu

SEQ ID NO: 535665 - RNA, 19 nt, Artificial Sequence
  Description of Artificial Sequence: Synthetic oligonucleotide
  Sense strand starting at position 1244 of SEQ ID NO: 318086
ugagauaggcuccauaugu

SEQ ID NO: 535666 - RNA, 19 nt, Artificial Sequence
  Description of Artificial Sequence: Synthetic oligonucleotide
  Antisense strand to SEQ ID NO: 535665
acauauggagccuaucuca

SEQ ID NO: 535667 - RNA, 19 nt, Artificial Sequence
  Description of Artificial Sequence: Synthetic oligonucleotide
  Sense strand starting at position 1520 of SEQ ID NO: 318086
uggcucuccacucggagaa

SEQ ID NO: 535668 - RNA, 19 nt, Artificial Sequence
  Description of Artificial Sequence: Synthetic oligonucleotide
  Antisense strand to SEQ ID NO: 535667
uucuccgaguggagagcca

SEQ ID NO: 535669 - RNA, 19 nt, Artificial Sequence
  Description of Artificial Sequence: Synthetic oligonucleotide
  Sense strand starting at position 1521 of SEQ ID NO: 318086
ggcucuccacucggagaaa

SEQ ID NO: 535670 - RNA, 19 nt, Artificial Sequence
  Description of Artificial Sequence: Synthetic oligonucleotide
  Antisense strand to SEQ ID NO: 535669
uuucuccgaguggagagcc

SEQ ID NO: 535671 - RNA, 19 nt, Artificial Sequence
  Description of Artificial Sequence: Synthetic oligonucleotide
  Sense strand starting at position 1687 of SEQ ID NO: 318086
agacgccucuggucugaaa

SEQ ID NO: 535672 - RNA, 19 nt, Artificial Sequence
  Description of Artificial Sequence: Synthetic oligonucleotide
  Antisense strand to SEQ ID NO: 535671
uuucagaccagaggcgucu

SEQ ID NO: 535673 - RNA, 19 nt, Artificial Sequence
  Description of Artificial Sequence: Synthetic oligonucleotide
  Sense strand starting at position 2029 of SEQ ID NO: 318086
gauggagcgaagcaauuau

SEQ ID NO: 535674 - RNA, 19 nt, Artificial Sequence
  Description of Artificial Sequence: Synthetic oligonucleotide
  Antisense strand to SEQ ID NO: 535673
auaauugcuucgcuccauc

SEQ ID NO: 535675 - RNA, 19 nt, Artificial Sequence
  Description of Artificial Sequence: Synthetic oligonucleotide
  Sense strand starting at position 2193 of SEQ ID NO: 318086
gcuguugaccgagggacaa

SEQ ID NO: 535676 - RNA, 19 nt, Artificial Sequence
  Description of Artificial Sequence: Synthetic oligonucleotide
  Antisense strand to SEQ ID NO: 535675
uugucccucggucaacagc

SEQ ID NO: 535677 - RNA, 19 nt, Artificial Sequence
  Description of Artificial Sequence: Synthetic oligonucleotide
  Sense strand starting at position 2377 of SEQ ID NO: 318086
gagagcaaauguucucaaa

SEQ ID NO: 535678 - RNA, 19 nt, Artificial Sequence
  Description of Artificial Sequence: Synthetic oligonucleotide
  Antisense strand to SEQ ID NO: 535677
uuugagaacauuugcucuc

SEQ ID NO: 535679 - RNA, 19 nt, Artificial Sequence
  Description of Artificial Sequence: Synthetic oligonucleotide
  Sense strand starting at position 2552 of SEQ ID NO: 318086
agggacuugucacuauuaa

SEQ ID NO: 535680 - RNA, 19 nt, Artificial Sequence
  Description of Artificial Sequence: Synthetic oligonucleotide
  Antisense strand to SEQ ID NO: 535679
uuaauagugacaagucccu

SEQ ID NO: 535681 - RNA, 19 nt, Artificial Sequence
  Description of Artificial Sequence: Synthetic oligonucleotide
  Sense strand starting at position 2571 of SEQ ID NO: 318086
cagugaguuagagguguca

SEQ ID NO: 535682 - RNA, 19 nt, Artificial Sequence
  Description of Artificial Sequence: Synthetic oligonucleotide
  Antisense strand to SEQ ID NO: 535681
ugacaccucuaacucacug

SEQ ID NO: 535683 - RNA, 19 nt, Artificial Sequence
  Description of Artificial Sequence: Synthetic oligonucleotide
  Sense strand starting at position 2573 of SEQ ID NO: 318086
gugaguuagaggugucaga

SEQ ID NO: 535684 - RNA, 19 nt, Artificial Sequence
  Description of Artificial Sequence: Synthetic oligonucleotide
  Antisense strand to SEQ ID NO: 535683
ucugacaccucuaacucac

SEQ ID NO: 535685 - RNA, 19 nt, Artificial Sequence
  Description of Artificial Sequence: Synthetic oligonucleotide
  Sense strand starting at position 2653 of SEQ ID NO: 318086
gggagacuuuccgcacaau

SEQ ID NO: 535686 - RNA, 19 nt, Artificial Sequence
  Description of Artificial Sequence: Synthetic oligonucleotide
  Antisense strand to SEQ ID NO: 535685
auugugcggaaagucuccc

SEQ ID NO: 535687 - RNA, 19 nt, Artificial Sequence
  Description of Artificial Sequence: Synthetic oligonucleotide
  Sense strand starting at position 2654 of SEQ ID NO: 318086
ggagacuuuccgcacaauu

SEQ ID NO: 535688 - RNA, 19 nt, Artificial Sequence
  Description of Artificial Sequence: Synthetic oligonucleotide
  Antisense strand to SEQ ID NO: 535687
aauugugcggaaagucucc

SEQ ID NO: 535689 - RNA, 19 nt, Artificial Sequence
  Description of Artificial Sequence: Synthetic oligonucleotide
  Sense strand starting at position 2819 of SEQ ID NO: 318086
gcugcaugugagcuuuacu

SEQ ID NO: 535690 - RNA, 19 nt, Artificial Sequence
  Description of Artificial Sequence: Synthetic oligonucleotide
  Antisense strand to SEQ ID NO: 535689
aguaaagcucacaugcagc

SEQ ID NO: 535691 - RNA, 19 nt, Artificial Sequence
  Description of Artificial Sequence: Synthetic oligonucleotide
  Sense strand starting at position 3007 of SEQ ID NO: 318086
uguuaaauagcuggcaaca

SEQ ID NO: 535692 - RNA, 19 nt, Artificial Sequence
  Description of Artificial Sequence: Synthetic oligonucleotide
  Antisense strand to SEQ ID NO: 535691
uguugccagcuauuuaaca

SEQ ID NO: 535693 - RNA, 19 nt, Artificial Sequence
  Description of Artificial Sequence: Synthetic oligonucleotide
  Sense strand starting at position 3121 of SEQ ID NO: 318086
ucuaauuagcauuagaggu

SEQ ID NO: 535694 - RNA, 19 nt, Artificial Sequence
  Description of Artificial Sequence: Synthetic oligonucleotide
  Antisense strand to SEQ ID NO: 535693
accucuaaugcuaauuaga

SEQ ID NO: 535695 - RNA, 19 nt, Artificial Sequence
  Description of Artificial Sequence: Synthetic oligonucleotide
  Sense strand starting at position 3138 of SEQ ID NO: 318086
guagcaugguucucauuuc

SEQ ID NO: 535696 - RNA, 19 nt, Artificial Sequence
  Description of Artificial Sequence: Synthetic oligonucleotide
  Antisense strand to SEQ ID NO: 535695
gaaaugagaaccaugcuac

SEQ ID NO: 535697 - RNA, 19 nt, Artificial Sequence
  Description of Artificial Sequence: Synthetic oligonucleotide
  Sense strand starting at position 3211 of SEQ ID NO: 318086
ggucuaggccuccaagauu

SEQ ID NO: 535698 - RNA, 19 nt, Artificial Sequence
  Description of Artificial Sequence: Synthetic oligonucleotide
  Antisense strand to SEQ ID NO: 535697
aaucuuggaggccuagacc

SEQ ID NO: 535699 - RNA, 19 nt, Artificial Sequence
  Description of Artificial Sequence: Synthetic oligonucleotide
  Sense strand starting at position 3266 of SEQ ID NO: 318086
uccaaagguccuggaauca

SEQ ID NO: 535700 - RNA, 19 nt, Artificial Sequence
  Description of Artificial Sequence: Synthetic oligonucleotide
  Antisense strand to SEQ ID NO: 535699
ugauuccaggaccuuugga

SEQ ID NO: 535701 - RNA, 19 nt, Artificial Sequence
  Description of Artificial Sequence: Synthetic oligonucleotide
  Sense strand starting at position 3581 of SEQ ID NO: 318086
gggcucgagcaugagagau

SEQ ID NO: 535702 - RNA, 19 nt, Artificial Sequence
  Description of Artificial Sequence: Synthetic oligonucleotide
  Antisense strand to SEQ ID NO: 535701
aucucucaugcucgagccc

SEQ ID NO: 535703 - RNA, 19 nt, Artificial Sequence
  Description of Artificial Sequence: Synthetic oligonucleotide
  Sense strand starting at position 3622 of SEQ ID NO: 318086
uagacagggcucuauucua

SEQ ID NO: 535704 - RNA, 19 nt, Artificial Sequence
  Description of Artificial Sequence: Synthetic oligonucleotide
  Antisense strand to SEQ ID NO: 535703
uagaauagagcccugucua

SEQ ID NO: 535705 - RNA, 19 nt, Artificial Sequence
  Description of Artificial Sequence: Synthetic oligonucleotide
  Sense strand starting at position 3633 of SEQ ID NO: 318086
cuauucuaccguuggaaac

SEQ ID NO: 535706 - RNA, 19 nt, Artificial Sequence
  Description of Artificial Sequence: Synthetic oligonucleotide
  Antisense strand to SEQ ID NO: 535705
guuuccaacgguagaauag

SEQ ID NO: 535707 - RNA, 19 nt, Artificial Sequence
  Description of Artificial Sequence: Synthetic oligonucleotide
  Sense strand starting at position 3634 of SEQ ID NO: 318086
uauucuaccguuggaaacu

SEQ ID NO: 535708 - RNA, 19 nt, Artificial Sequence
  Description of Artificial Sequence: Synthetic oligonucleotide
  Antisense strand to SEQ ID NO: 535707
aguuuccaacgguagaaua

SEQ ID NO: 535709 - RNA, 19 nt, Artificial Sequence
  Description of Artificial Sequence: Synthetic oligonucleotide
  Sense strand starting at position 3908 of SEQ ID NO: 318086
uccuuaccugcuggaaaua

SEQ ID NO: 535710 - RNA, 19 nt, Artificial Sequence
  Description of Artificial Sequence: Synthetic oligonucleotide
  Antisense strand to SEQ ID NO: 535709
uauuuccagcagguaagga

SEQ ID NO: 535711 - RNA, 19 nt, Artificial Sequence
  Description of Artificial Sequence: Synthetic oligonucleotide
  Sense strand starting at position 3956 of SEQ ID NO: 318086
aggacugacuugucagcuu

SEQ ID NO: 535712 - RNA, 19 nt, Artificial Sequence
  Description of Artificial Sequence: Synthetic oligonucleotide
  Antisense strand to SEQ ID NO: 535711
aagcugacaagucaguccu

SEQ ID NO: 535713 - RNA, 19 nt, Artificial Sequence
  Description of Artificial Sequence: Synthetic oligonucleotide
  Sense strand starting at position 16 of SEQ ID NO: 318087
gugaguccaggcuguaaug

SEQ ID NO: 535714 - RNA, 19 nt, Artificial Sequence
  Description of Artificial Sequence: Synthetic oligonucleotide
  Antisense strand to SEQ ID NO: 535713
cauuacagccuggacucac

SEQ ID NO: 535715 - RNA, 19 nt, Artificial Sequence
  Description of Artificial Sequence: Synthetic oligonucleotide
  Sense strand starting at position 120 of SEQ ID NO: 318087
gcaggagauucuguggaaa

SEQ ID NO: 535716 - RNA, 19 nt, Artificial Sequence
  Description of Artificial Sequence: Synthetic oligonucleotide
  Antisense strand to SEQ ID NO: 535715
uuuccacagaaucuccugc

SEQ ID NO: 535717 - RNA, 19 nt, Artificial Sequence
  Description of Artificial Sequence: Synthetic oligonucleotide
  Sense strand starting at position 155 of SEQ ID NO: 318087
gucagagauucccuuggaa

SEQ ID NO: 535718 - RNA, 19 nt, Artificial Sequence
  Description of Artificial Sequence: Synthetic oligonucleotide
  Antisense strand to SEQ ID NO: 535717
uuccaagggaaucucugac

SEQ ID NO: 535719 - RNA, 19 nt, Artificial Sequence
  Description of Artificial Sequence: Synthetic oligonucleotide
  Sense strand starting at position 561 of SEQ ID NO: 318087
ggcuccauuugagcuacau

SEQ ID NO: 535720 - RNA, 19 nt, Artificial Sequence
  Description of Artificial Sequence: Synthetic oligonucleotide
  Antisense strand to SEQ ID NO: 535719
auguagcucaaauggagcc

SEQ ID NO: 535721 - RNA, 19 nt, Artificial Sequence
  Description of Artificial Sequence: Synthetic oligonucleotide
  Sense strand starting at position 1017 of SEQ ID NO: 318087
ucaugcccugacugaauua

SEQ ID NO: 535722 - RNA, 19 nt, Artificial Sequence
  Description of Artificial Sequence: Synthetic oligonucleotide
  Antisense strand to SEQ ID NO: 535721
uaauucagucagggcauga

SEQ ID NO: 535723 - RNA, 19 nt, Artificial Sequence
  Description of Artificial Sequence: Synthetic oligonucleotide
  Sense strand starting at position 1152 of SEQ ID NO: 318087
cuucuuguuugacccaaga

SEQ ID NO: 535724 - RNA, 19 nt, Artificial Sequence
  Description of Artificial Sequence: Synthetic oligonucleotide
  Antisense strand to SEQ ID NO: 535723
ucuugggucaaacaagaag

SEQ ID NO: 535725 - RNA, 19 nt, Artificial Sequence
  Description of Artificial Sequence: Synthetic oligonucleotide
  Sense strand starting at position 1168 of SEQ ID NO: 318087
agaaaugucaugcaaaggu

SEQ ID NO: 535726 - RNA, 19 nt, Artificial Sequence
  Description of Artificial Sequence: Synthetic oligonucleotide
  Antisense strand to SEQ ID NO: 535725
accuuugcaugacauuucu

SEQ ID NO: 535727 - RNA, 19 nt, Artificial Sequence
  Description of Artificial Sequence: Synthetic oligonucleotide
  Sense strand starting at position 1172 of SEQ ID NO: 318087
augucaugcaaaggugaga

SEQ ID NO: 535728 - RNA, 19 nt, Artificial Sequence
  Description of Artificial Sequence: Synthetic oligonucleotide
  Antisense strand to SEQ ID NO: 535727
ucucaccuuugcaugacau

SEQ ID NO: 535729 - RNA, 19 nt, Artificial Sequence
  Description of Artificial Sequence: Synthetic oligonucleotide
  Sense strand starting at position 1314 of SEQ ID NO: 318087
gaaauuucugucugucagu

SEQ ID NO: 535730 - RNA, 19 nt, Artificial Sequence
  Description of Artificial Sequence: Synthetic oligonucleotide
  Antisense strand to SEQ ID NO: 535729
acugacagacagaaauuuc

SEQ ID NO: 535731 - RNA, 19 nt, Artificial Sequence
  Description of Artificial Sequence: Synthetic oligonucleotide
  Sense strand starting at position 1359 of SEQ ID NO: 318087
ccuuaaggcccuugguauu

SEQ ID NO: 535732 - RNA, 19 nt, Artificial Sequence
  Description of Artificial Sequence: Synthetic oligonucleotide
  Antisense strand to SEQ ID NO: 535731
aauaccaagggccuuaagg

SEQ ID NO: 535733 - RNA, 19 nt, Artificial Sequence
  Description of Artificial Sequence: Synthetic oligonucleotide
  Sense strand starting at position 1371 of SEQ ID NO: 318087
ugguauuccucaccuagaa

SEQ ID NO: 535734 - RNA, 19 nt, Artificial Sequence
  Description of Artificial Sequence: Synthetic oligonucleotide
  Antisense strand to SEQ ID NO: 535733
uucuaggugaggaauacca

SEQ ID NO: 535735 - RNA, 19 nt, Artificial Sequence
  Description of Artificial Sequence: Synthetic oligonucleotide
  Sense strand starting at position 1426 of SEQ ID NO: 318087
uuauuauagccauggcugu

SEQ ID NO: 535736 - RNA, 19 nt, Artificial Sequence
  Description of Artificial Sequence: Synthetic oligonucleotide
  Antisense strand to SEQ ID NO: 535735
acagccauggcuauaauaa

SEQ ID NO: 535737 - RNA, 19 nt, Artificial Sequence
  Description of Artificial Sequence: Synthetic oligonucleotide
  Sense strand starting at position 1496 of SEQ ID NO: 318087
ugugccauuugauugucau

SEQ ID NO: 535738 - RNA, 19 nt, Artificial Sequence
  Description of Artificial Sequence: Synthetic oligonucleotide
  Antisense strand to SEQ ID NO: 535737
augacaaucaaauggcaca

SEQ ID NO: 535739 - RNA, 19 nt, Artificial Sequence
  Description of Artificial Sequence: Synthetic oligonucleotide
  Sense strand starting at position 1497 of SEQ ID NO: 318087
gugccauuugauugucaua

SEQ ID NO: 535740 - RNA, 19 nt, Artificial Sequence
  Description of Artificial Sequence: Synthetic oligonucleotide
  Antisense strand to SEQ ID NO: 535739
uaugacaaucaaauggcac

SEQ ID NO: 535741 - RNA, 19 nt, Artificial Sequence
  Description of Artificial Sequence: Synthetic oligonucleotide
  Sense strand starting at position 1580 of SEQ ID NO: 318087
gauggaaugacauggcuga

SEQ ID NO: 535742 - RNA, 19 nt, Artificial Sequence
  Description of Artificial Sequence: Synthetic oligonucleotide
  Antisense strand to SEQ ID NO: 535741
ucagccaugucauuccauc

SEQ ID NO: 535743 - RNA, 19 nt, Artificial Sequence
  Description of Artificial Sequence: Synthetic oligonucleotide
  Sense strand starting at position 2104 of SEQ ID NO: 318087
aucuuuaucugacauggaa

SEQ ID NO: 535744 - RNA, 19 nt, Artificial Sequence
  Description of Artificial Sequence: Synthetic oligonucleotide
  Antisense strand to SEQ ID NO: 535743
uuccaugucagauaaagau

SEQ ID NO: 535745 - RNA, 19 nt, Artificial Sequence
  Description of Artificial Sequence: Synthetic oligonucleotide
  Sense strand starting at position 2165 of SEQ ID NO: 318087
ucuaguacucaagaucagu

SEQ ID NO: 535746 - RNA, 19 nt, Artificial Sequence
  Description of Artificial Sequence: Synthetic oligonucleotide
  Antisense strand to SEQ ID NO: 535745
acugaucuugaguacuaga

SEQ ID NO: 535747 - RNA, 19 nt, Artificial Sequence
  Description of Artificial Sequence: Synthetic oligonucleotide
  Sense strand starting at position 2200 of SEQ ID NO: 318087
uuacuuaaacgguaucacu

SEQ ID NO: 535748 - RNA, 19 nt, Artificial Sequence
  Description of Artificial Sequence: Synthetic oligonucleotide
  Antisense strand to SEQ ID NO: 535747
agugauaccguuuaaguaa

SEQ ID NO: 535749 - RNA, 19 nt, Artificial Sequence
  Description of Artificial Sequence: Synthetic oligonucleotide
  Sense strand starting at position 2219 of SEQ ID NO: 318087
ucaucuugucaaggaggau

SEQ ID NO: 535750 - RNA, 19 nt, Artificial Sequence
  Description of Artificial Sequence: Synthetic oligonucleotide
  Antisense strand to SEQ ID NO: 535749
auccuccuugacaagauga

SEQ ID NO: 535751 - RNA, 19 nt, Artificial Sequence
  Description of Artificial Sequence: Synthetic oligonucleotide
  Sense strand starting at position 2415 of SEQ ID NO: 318087
agaugagaguuugucuggu

SEQ ID NO: 535752 - RNA, 19 nt, Artificial Sequence
  Description of Artificial Sequence: Synthetic oligonucleotide
  Antisense strand to SEQ ID NO: 535751
accagacaaacucucaucu

SEQ ID NO: 535753 - RNA, 19 nt, Artificial Sequence
  Description of Artificial Sequence: Synthetic oligonucleotide
  Sense strand starting at position 2417 of SEQ ID NO: 318087
augagaguuugucugguag

SEQ ID NO: 535754 - RNA, 19 nt, Artificial Sequence
  Description of Artificial Sequence: Synthetic oligonucleotide
  Antisense strand to SEQ ID NO: 535753
cuaccagacaaacucucau

SEQ ID NO: 535755 - RNA, 19 nt, Artificial Sequence
  Description of Artificial Sequence: Synthetic oligonucleotide
  Sense strand starting at position 2496 of SEQ ID NO: 318087
gccgcuucccaauacagaa

SEQ ID NO: 535756 - RNA, 19 nt, Artificial Sequence
  Description of Artificial Sequence: Synthetic oligonucleotide
  Antisense strand to SEQ ID NO: 535755
uucuguauugggaagcggc

SEQ ID NO: 535757 - RNA, 19 nt, Artificial Sequence
  Description of Artificial Sequence: Synthetic oligonucleotide
  Sense strand starting at position 2559 of SEQ ID NO: 318087
gcagcuucuccuugacacu

SEQ ID NO: 535758 - RNA, 19 nt, Artificial Sequence
  Description of Artificial Sequence: Synthetic oligonucleotide
  Antisense strand to SEQ ID NO: 535757
agugucaaggagaagcugc

SEQ ID NO: 535759 - RNA, 19 nt, Artificial Sequence
  Description of Artificial Sequence: Synthetic oligonucleotide
  Sense strand starting at position 2623 of SEQ ID NO: 318087
uucucuuacuggucugcua

SEQ ID NO: 535760 - RNA, 19 nt, Artificial Sequence
  Description of Artificial Sequence: Synthetic oligonucleotide
  Antisense strand to SEQ ID NO: 535759
uagcagaccaguaagagaa

SEQ ID NO: 535761 - RNA, 19 nt, Artificial Sequence
  Description of Artificial Sequence: Synthetic oligonucleotide
  Sense strand starting at position 2789 of SEQ ID NO: 318087
ggagguuuaggaggcagaa

SEQ ID NO: 535762 - RNA, 19 nt, Artificial Sequence
  Description of Artificial Sequence: Synthetic oligonucleotide
  Antisense strand to SEQ ID NO: 535761
uucugccuccuaaaccucc

SEQ ID NO: 535763 - RNA, 19 nt, Artificial Sequence
  Description of Artificial Sequence: Synthetic oligonucleotide
  Sense strand starting at position 2802 of SEQ ID NO: 318087
gcagaauuggcauggucug

SEQ ID NO: 535764 - RNA, 19 nt, Artificial Sequence
  Description of Artificial Sequence: Synthetic oligonucleotide
  Antisense strand to SEQ ID NO: 535763
cagaccaugccaauucugc

SEQ ID NO: 535765 - RNA, 19 nt, Artificial Sequence
  Description of Artificial Sequence: Synthetic oligonucleotide
  Sense strand starting at position 2803 of SEQ ID NO: 318087
cagaauuggcauggucuga

SEQ ID NO: 535766 - RNA, 19 nt, Artificial Sequence
  Description of Artificial Sequence: Synthetic oligonucleotide
  Antisense strand to SEQ ID NO: 535765
ucagaccaugccaauucug

SEQ ID NO: 535767 - RNA, 19 nt, Artificial Sequence
  Description of Artificial Sequence: Synthetic oligonucleotide
  Sense strand starting at position 2900 of SEQ ID NO: 318087
gcaggagacaguuguauug

SEQ ID NO: 535768 - RNA, 19 nt, Artificial Sequence
  Description of Artificial Sequence: Synthetic oligonucleotide
  Antisense strand to SEQ ID NO: 535767
caauacaacugucuccugc

SEQ ID NO: 535769 - RNA, 19 nt, Artificial Sequence
  Description of Artificial Sequence: Synthetic oligonucleotide
  Sense strand starting at position 2906 of SEQ ID NO: 318087
gacaguuguauugagaggu

SEQ ID NO: 535770 - RNA, 19 nt, Artificial Sequence
  Description of Artificial Sequence: Synthetic oligonucleotide
  Antisense strand to SEQ ID NO: 535769
accucucaauacaacuguc

SEQ ID NO: 535771 - RNA, 19 nt, Artificial Sequence
  Description of Artificial Sequence: Synthetic oligonucleotide
  Sense strand starting at position 2910 of SEQ ID NO: 318087
guuguauugagaggucuug

SEQ ID NO: 535772 - RNA, 19 nt, Artificial Sequence
  Description of Artificial Sequence: Synthetic oligonucleotide
  Antisense strand to SEQ ID NO: 535771
caagaccucucaauacaac

SEQ ID NO: 535773 - RNA, 19 nt, Artificial Sequence
  Description of Artificial Sequence: Synthetic oligonucleotide
  Sense strand starting at position 3084 of SEQ ID NO: 318087
gugguuaucccagagggca

SEQ ID NO: 535774 - RNA, 19 nt, Artificial Sequence
  Description of Artificial Sequence: Synthetic oligonucleotide
  Antisense strand to SEQ ID NO: 535773
ugcccucugggauaaccac

SEQ ID NO: 535775 - RNA, 19 nt, Artificial Sequence
  Description of Artificial Sequence: Synthetic oligonucleotide
  Sense strand starting at position 3291 of SEQ ID NO: 318087
gugcgguguguugugauca

SEQ ID NO: 535776 - RNA, 19 nt, Artificial Sequence
  Description of Artificial Sequence: Synthetic oligonucleotide
  Antisense strand to SEQ ID NO: 535775
ugaucacaacacaccgcac

SEQ ID NO: 535777 - RNA, 19 nt, Artificial Sequence
  Description of Artificial Sequence: Synthetic oligonucleotide
  Sense strand starting at position 3450 of SEQ ID NO: 318087
ccaugcugugaggaugauu

SEQ ID NO: 535778 - RNA, 19 nt, Artificial Sequence
  Description of Artificial Sequence: Synthetic oligonucleotide
  Antisense strand to SEQ ID NO: 535777
aaucauccucacagcaugg

SEQ ID NO: 535779 - RNA, 19 nt, Artificial Sequence
  Description of Artificial Sequence: Synthetic oligonucleotide
  Sense strand starting at position 3701 of SEQ ID NO: 318087
gagacagauuuccagucuu

SEQ ID NO: 535780 - RNA, 19 nt, Artificial Sequence
  Description of Artificial Sequence: Synthetic oligonucleotide
  Antisense strand to SEQ ID NO: 535779
aagacuggaaaucugucuc

SEQ ID NO: 535781 - RNA, 19 nt, Artificial Sequence
  Description of Artificial Sequence: Synthetic oligonucleotide
  Sense strand starting at position 3828 of SEQ ID NO: 318087
uugauaagauccucaguga

SEQ ID NO: 535782 - RNA, 19 nt, Artificial Sequence
  Description of Artificial Sequence: Synthetic oligonucleotide
  Antisense strand to SEQ ID NO: 535781
ucacugaggaucuuaucaa

SEQ ID NO: 535783 - RNA, 19 nt, Artificial Sequence
  Description of Artificial Sequence: Synthetic oligonucleotide
  Sense strand starting at position 3831 of SEQ ID NO: 318087
auaagauccucagugauuc

SEQ ID NO: 535784 - RNA, 19 nt, Artificial Sequence
  Description of Artificial Sequence: Synthetic oligonucleotide
  Antisense strand to SEQ ID NO: 535783
gaaucacugaggaucuuau

SEQ ID NO: 535785 - RNA, 19 nt, Artificial Sequence
  Description of Artificial Sequence: Synthetic oligonucleotide
  Sense strand starting at position 3926 of SEQ ID NO: 318087
cagaguuuguuccuugcau

SEQ ID NO: 535786 - RNA, 19 nt, Artificial Sequence
  Description of Artificial Sequence: Synthetic oligonucleotide
  Antisense strand to SEQ ID NO: 535785
augcaaggaacaaacucug

SEQ ID NO: 535787 - RNA, 19 nt, Artificial Sequence
  Description of Artificial Sequence: Synthetic oligonucleotide
  Sense strand starting at position 3927 of SEQ ID NO: 318087
agaguuuguuccuugcaua

SEQ ID NO: 535788 - RNA, 19 nt, Artificial Sequence
  Description of Artificial Sequence: Synthetic oligonucleotide
  Antisense strand to SEQ ID NO: 535787
uaugcaaggaacaaacucu

SEQ ID NO: 535789 - RNA, 19 nt, Artificial Sequence
  Description of Artificial Sequence: Synthetic oligonucleotide
  Sense strand starting at position 3960 of SEQ ID NO: 318087
gguguuacugucuauguaa

SEQ ID NO: 535790 - RNA, 19 nt, Artificial Sequence
  Description of Artificial Sequence: Synthetic oligonucleotide
  Antisense strand to SEQ ID NO: 535789
uuacauagacaguaacacc

SEQ ID NO: 535791 - RNA, 19 nt, Artificial Sequence
  Description of Artificial Sequence: Synthetic oligonucleotide
  Sense strand starting at position 3962 of SEQ ID NO: 318087
uguuacugucuauguaaac

SEQ ID NO: 535792 - RNA, 19 nt, Artificial Sequence
  Description of Artificial Sequence: Synthetic oligonucleotide
  Antisense strand to SEQ ID NO: 535791
guuuacauagacaguaaca

SEQ ID NO: 535793 - RNA, 19 nt, Artificial Sequence
  Description of Artificial Sequence: Synthetic oligonucleotide
  Sense strand starting at position 209 of SEQ ID NO: 318088
gcacuauggccauaaguuc

SEQ ID NO: 535794 - RNA, 19 nt, Artificial Sequence
  Description of Artificial Sequence: Synthetic oligonucleotide
  Antisense strand to SEQ ID NO: 535793
gaacuuauggccauagugc

SEQ ID NO: 535795 - RNA, 19 nt, Artificial Sequence
  Description of Artificial Sequence: Synthetic oligonucleotide
  Sense strand starting at position 288 of SEQ ID NO: 318088
cucucagugccucagaauu

SEQ ID NO: 535796 - RNA, 19 nt, Artificial Sequence
  Description of Artificial Sequence: Synthetic oligonucleotide
  Antisense strand to SEQ ID NO: 535795
aauucugaggcacugagag

SEQ ID NO: 535797 - RNA, 19 nt, Artificial Sequence
  Description of Artificial Sequence: Synthetic oligonucleotide
  Sense strand starting at position 296 of SEQ ID NO: 318088
gccucagaauuccucaaga

SEQ ID NO: 535798 - RNA, 19 nt, Artificial Sequence
  Description of Artificial Sequence: Synthetic oligonucleotide
  Antisense strand to SEQ ID NO: 535797
ucuugaggaauucugaggc

SEQ ID NO: 535799 - RNA, 19 nt, Artificial Sequence
  Description of Artificial Sequence: Synthetic oligonucleotide
  Sense strand starting at position 386 of SEQ ID NO: 318088
uuauuuggagcuugcagua

SEQ ID NO: 535800 - RNA, 19 nt, Artificial Sequence
  Description of Artificial Sequence: Synthetic oligonucleotide
  Antisense strand to SEQ ID NO: 535799
uacugcaagcuccaaauaa

SEQ ID NO: 535801 - RNA, 19 nt, Artificial Sequence
  Description of Artificial Sequence: Synthetic oligonucleotide
  Sense strand starting at position 391 of SEQ ID NO: 318088
uggagcuugcaguaaugau

SEQ ID NO: 535802 - RNA, 19 nt, Artificial Sequence
  Description of Artificial Sequence: Synthetic oligonucleotide
  Antisense strand to SEQ ID NO: 535801
aucauuacugcaagcucca

SEQ ID NO: 535803 - RNA, 19 nt, Artificial Sequence
  Description of Artificial Sequence: Synthetic oligonucleotide
  Sense strand starting at position 418 of SEQ ID NO: 318088
caguaauaauggccuuaga

SEQ ID NO: 535804 - RNA, 19 nt, Artificial Sequence
  Description of Artificial Sequence: Synthetic oligonucleotide
  Antisense strand to SEQ ID NO: 535803
ucuaaggccauuauuacug

SEQ ID NO: 535805 - RNA, 19 nt, Artificial Sequence
  Description of Artificial Sequence: Synthetic oligonucleotide
  Sense strand starting at position 453 of SEQ ID NO: 318088
uguauacuaucuccuuaga

SEQ ID NO: 535806 - RNA, 19 nt, Artificial Sequence
  Description of Artificial Sequence: Synthetic oligonucleotide
  Antisense strand to SEQ ID NO: 535805
ucuaaggagauaguauaca

SEQ ID NO: 535807 - RNA, 19 nt, Artificial Sequence
  Description of Artificial Sequence: Synthetic oligonucleotide
  Sense strand starting at position 466 of SEQ ID NO: 318088
cuuagauucuugucacccu

SEQ ID NO: 535808 - RNA, 19 nt, Artificial Sequence
  Description of Artificial Sequence: Synthetic oligonucleotide
  Antisense strand to SEQ ID NO: 535807
agggugacaagaaucuaag

SEQ ID NO: 535809 - RNA, 19 nt, Artificial Sequence
  Description of Artificial Sequence: Synthetic oligonucleotide
  Sense strand starting at position 1035 of SEQ ID NO: 318088
cgagcugucagaugacuac

SEQ ID NO: 535810 - RNA, 19 nt, Artificial Sequence
  Description of Artificial Sequence: Synthetic oligonucleotide
  Antisense strand to SEQ ID NO: 535809
guagucaucugacagcucg

SEQ ID NO: 535811 - RNA, 19 nt, Artificial Sequence
  Description of Artificial Sequence: Synthetic oligonucleotide
  Sense strand starting at position 1234 of SEQ ID NO: 318088
uuguauuacucaucucuag

SEQ ID NO: 535812 - RNA, 19 nt, Artificial Sequence
  Description of Artificial Sequence: Synthetic oligonucleotide
  Antisense strand to SEQ ID NO: 535811
cuagagaugaguaauacaa

SEQ ID NO: 535813 - RNA, 19 nt, Artificial Sequence
  Description of Artificial Sequence: Synthetic oligonucleotide
  Sense strand starting at position 1310 of SEQ ID NO: 318088
guuuguaagcagcauaaau

SEQ ID NO: 535814 - RNA, 19 nt, Artificial Sequence
  Description of Artificial Sequence: Synthetic oligonucleotide
  Antisense strand to SEQ ID NO: 535813
auuuaugcugcuuacaaac

SEQ ID NO: 535815 - RNA, 19 nt, Artificial Sequence
  Description of Artificial Sequence: Synthetic oligonucleotide
  Sense strand starting at position 1312 of SEQ ID NO: 318088
uuguaagcagcauaaauga

SEQ ID NO: 535816 - RNA, 19 nt, Artificial Sequence
  Description of Artificial Sequence: Synthetic oligonucleotide
  Antisense strand to SEQ ID NO: 535815
ucauuuaugcugcuuacaa

SEQ ID NO: 535817 - RNA, 19 nt, Artificial Sequence
  Description of Artificial Sequence: Synthetic oligonucleotide
  Sense strand starting at position 1342 of SEQ ID NO: 318088
acgacugucuuauuccaaa

SEQ ID NO: 535818 - RNA, 19 nt, Artificial Sequence
  Description of Artificial Sequence: Synthetic oligonucleotide
  Antisense strand to SEQ ID NO: 535817
uuuggaauaagacagucgu

SEQ ID NO: 535819 - RNA, 19 nt, Artificial Sequence
  Description of Artificial Sequence: Synthetic oligonucleotide
  Sense strand starting at position 1457 of SEQ ID NO: 318088
cucugaauccucuaggucu

SEQ ID NO: 535820 - RNA, 19 nt, Artificial Sequence
  Description of Artificial Sequence: Synthetic oligonucleotide
  Antisense strand to SEQ ID NO: 535819
agaccuagaggauucagag

SEQ ID NO: 535821 - RNA, 19 nt, Artificial Sequence
  Description of Artificial Sequence: Synthetic oligonucleotide
  Sense strand starting at position 1459 of SEQ ID NO: 318088
cugaauccucuaggucuaa

SEQ ID NO: 535822 - RNA, 19 nt, Artificial Sequence
  Description of Artificial Sequence: Synthetic oligonucleotide
  Antisense strand to SEQ ID NO: 535821
uuagaccuagaggauucag

SEQ ID NO: 535823 - RNA, 19 nt, Artificial Sequence
  Description of Artificial Sequence: Synthetic oligonucleotide
  Sense strand starting at position 1460 of SEQ ID NO: 318088
ugaauccucuaggucuaau

SEQ ID NO: 535824 - RNA, 19 nt, Artificial Sequence
  Description of Artificial Sequence: Synthetic oligonucleotide
  Antisense strand to SEQ ID NO: 535823
auuagaccuagaggauuca

SEQ ID NO: 535825 - RNA, 19 nt, Artificial Sequence
  Description of Artificial Sequence: Synthetic oligonucleotide
  Sense strand starting at position 1486 of SEQ ID NO: 318088
agccuagaguuuccugaaa

SEQ ID NO: 535826 - RNA, 19 nt, Artificial Sequence
  Description of Artificial Sequence: Synthetic oligonucleotide
  Antisense strand to SEQ ID NO: 535825
uuucaggaaacucuaggcu

SEQ ID NO: 535827 - RNA, 19 nt, Artificial Sequence
  Description of Artificial Sequence: Synthetic oligonucleotide
  Sense strand starting at position 1654 of SEQ ID NO: 318088
gugggucugacccauaauu

SEQ ID NO: 535828 - RNA, 19 nt, Artificial Sequence
  Description of Artificial Sequence: Synthetic oligonucleotide
  Antisense strand to SEQ ID NO: 535827
aauuaugggucagacccac

SEQ ID NO: 535829 - RNA, 19 nt, Artificial Sequence
  Description of Artificial Sequence: Synthetic oligonucleotide
  Sense strand starting at position 2113 of SEQ ID NO: 318088
aguccuuacaaauguggua

SEQ ID NO: 535830 - RNA, 19 nt, Artificial Sequence
  Description of Artificial Sequence: Synthetic oligonucleotide
  Antisense strand to SEQ ID NO: 535829
uaccacauuuguaaggacu

SEQ ID NO: 535831 - RNA, 19 nt, Artificial Sequence
  Description of Artificial Sequence: Synthetic oligonucleotide
  Sense strand starting at position 2125 of SEQ ID NO: 318088
ugugguaauagcugaaaca

SEQ ID NO: 535832 - RNA, 19 nt, Artificial Sequence
  Description of Artificial Sequence: Synthetic oligonucleotide
  Antisense strand to SEQ ID NO: 535831
uguuucagcuauuaccaca

SEQ ID NO: 535833 - RNA, 19 nt, Artificial Sequence
  Description of Artificial Sequence: Synthetic oligonucleotide
  Sense strand starting at position 2126 of SEQ ID NO: 318088
gugguaauagcugaaacag

SEQ ID NO: 535834 - RNA, 19 nt, Artificial Sequence
  Description of Artificial Sequence: Synthetic oligonucleotide
  Antisense strand to SEQ ID NO: 535833
cuguuucagcuauuaccac

SEQ ID NO: 535835 - RNA, 19 nt, Artificial Sequence
  Description of Artificial Sequence: Synthetic oligonucleotide
  Sense strand starting at position 2147 of SEQ ID NO: 318088
agaguaucuuuagcuugaa

SEQ ID NO: 535836 - RNA, 19 nt, Artificial Sequence
  Description of Artificial Sequence: Synthetic oligonucleotide
  Antisense strand to SEQ ID NO: 535835
uucaagcuaaagauacucu

SEQ ID NO: 535837 - RNA, 19 nt, Artificial Sequence
  Description of Artificial Sequence: Synthetic oligonucleotide
  Sense strand starting at position 2148 of SEQ ID NO: 318088
gaguaucuuuagcuugaaa

SEQ ID NO: 535838 - RNA, 19 nt, Artificial Sequence
  Description of Artificial Sequence: Synthetic oligonucleotide
  Antisense strand to SEQ ID NO: 535837
uuucaagcuaaagauacuc

SEQ ID NO: 535839 - RNA, 19 nt, Artificial Sequence
  Description of Artificial Sequence: Synthetic oligonucleotide
  Sense strand starting at position 2150 of SEQ ID NO: 318088
guaucuuuagcuugaaaug

SEQ ID NO: 535840 - RNA, 19 nt, Artificial Sequence
  Description of Artificial Sequence: Synthetic oligonucleotide
  Antisense strand to SEQ ID NO: 535839
cauuucaagcuaaagauac

SEQ ID NO: 535841 - RNA, 19 nt, Artificial Sequence
  Description of Artificial Sequence: Synthetic oligonucleotide
  Sense strand starting at position 2184 of SEQ ID NO: 318088
uguuaacugucuuuagaca

SEQ ID NO: 535842 - RNA, 19 nt, Artificial Sequence
  Description of Artificial Sequence: Synthetic oligonucleotide
  Antisense strand to SEQ ID NO: 535841
ugucuaaagacaguuaaca

SEQ ID NO: 535843 - RNA, 19 nt, Artificial Sequence
  Description of Artificial Sequence: Synthetic oligonucleotide
  Sense strand starting at position 2185 of SEQ ID NO: 318088
guuaacugucuuuagacaa

SEQ ID NO: 535844 - RNA, 19 nt, Artificial Sequence
  Description of Artificial Sequence: Synthetic oligonucleotide
  Antisense strand to SEQ ID NO: 535843
uugucuaaagacaguuaac

SEQ ID NO: 535845 - RNA, 19 nt, Artificial Sequence
  Description of Artificial Sequence: Synthetic oligonucleotide
  Sense strand starting at position 2228 of SEQ ID NO: 318088
aaugguagcugacuccaaa

SEQ ID NO: 535846 - RNA, 19 nt, Artificial Sequence
  Description of Artificial Sequence: Synthetic oligonucleotide
  Antisense strand to SEQ ID NO: 535845
uuuggagucagcuaccauu

SEQ ID NO: 535847 - RNA, 19 nt, Artificial Sequence
  Description of Artificial Sequence: Synthetic oligonucleotide
  Sense strand starting at position 2572 of SEQ ID NO: 318088
uuagauuauuucuaggauc

SEQ ID NO: 535848 - RNA, 19 nt, Artificial Sequence
  Description of Artificial Sequence: Synthetic oligonucleotide
  Antisense strand to SEQ ID NO: 535847
gauccuagaaauaaucuaa

SEQ ID NO: 535849 - RNA, 19 nt, Artificial Sequence
  Description of Artificial Sequence: Synthetic oligonucleotide
  Sense strand starting at position 2614 of SEQ ID NO: 318088
accguuuguaauggacuga

SEQ ID NO: 535850 - RNA, 19 nt, Artificial Sequence
  Description of Artificial Sequence: Synthetic oligonucleotide
  Antisense strand to SEQ ID NO: 535849
ucaguccauuacaaacggu

SEQ ID NO: 535851 - RNA, 19 nt, Artificial Sequence
  Description of Artificial Sequence: Synthetic oligonucleotide
  Sense strand starting at position 2618 of SEQ ID NO: 318088
uuuguaauggacugacaaa

SEQ ID NO: 535852 - RNA, 19 nt, Artificial Sequence
  Description of Artificial Sequence: Synthetic oligonucleotide
  Antisense strand to SEQ ID NO: 535851
uuugucaguccauuacaaa

SEQ ID NO: 535853 - RNA, 19 nt, Artificial Sequence
  Description of Artificial Sequence: Synthetic oligonucleotide
  Sense strand starting at position 3215 of SEQ ID NO: 318088
gcaagcauuucuugaauuu

SEQ ID NO: 535854 - RNA, 19 nt, Artificial Sequence
  Description of Artificial Sequence: Synthetic oligonucleotide
  Antisense strand to SEQ ID NO: 535853
aaauucaagaaaugcuugc

SEQ ID NO: 535855 - RNA, 19 nt, Artificial Sequence
  Description of Artificial Sequence: Synthetic oligonucleotide
  Sense strand starting at position 3282 of SEQ ID NO: 318088
aaagguguuguguauuaaa

SEQ ID NO: 535856 - RNA, 19 nt, Artificial Sequence
  Description of Artificial Sequence: Synthetic oligonucleotide
  Antisense strand to SEQ ID NO: 535855
uuuaauacacaacaccuuu

SEQ ID NO: 535857 - RNA, 19 nt, Artificial Sequence
  Description of Artificial Sequence: Synthetic oligonucleotide
  Sense strand starting at position 3300 of SEQ ID NO: 318088
auagaauucugguuaagac

SEQ ID NO: 535858 - RNA, 19 nt, Artificial Sequence
  Description of Artificial Sequence: Synthetic oligonucleotide
  Antisense strand to SEQ ID NO: 535857
gucuuaaccagaauucuau

SEQ ID NO: 535859 - RNA, 19 nt, Artificial Sequence
  Description of Artificial Sequence: Synthetic oligonucleotide
  Sense strand starting at position 3520 of SEQ ID NO: 318088
cuaauaagguugccaacaa

SEQ ID NO: 535860 - RNA, 19 nt, Artificial Sequence
  Description of Artificial Sequence: Synthetic oligonucleotide
  Antisense strand to SEQ ID NO: 535859
uuguuggcaaccuuauuag

SEQ ID NO: 535861 - RNA, 19 nt, Artificial Sequence
  Description of Artificial Sequence: Synthetic oligonucleotide
  Sense strand starting at position 3548 of SEQ ID NO: 318088
auaauuaugccacggaauc

SEQ ID NO: 535862 - RNA, 19 nt, Artificial Sequence
  Description of Artificial Sequence: Synthetic oligonucleotide
  Antisense strand to SEQ ID NO: 535861
gauuccguggcauaauuau

SEQ ID NO: 535863 - RNA, 19 nt, Artificial Sequence
  Description of Artificial Sequence: Synthetic oligonucleotide
  Sense strand starting at position 3565 of SEQ ID NO: 318088
ucucauacggcucaggauu

SEQ ID NO: 535864 - RNA, 19 nt, Artificial Sequence
  Description of Artificial Sequence: Synthetic oligonucleotide
  Antisense strand to SEQ ID NO: 535863
aauccugagccguaugaga

SEQ ID NO: 535865 - RNA, 19 nt, Artificial Sequence
  Description of Artificial Sequence: Synthetic oligonucleotide
  Sense strand starting at position 3621 of SEQ ID NO: 318088
acagcuuccuuauuuguga

SEQ ID NO: 535866 - RNA, 19 nt, Artificial Sequence
  Description of Artificial Sequence: Synthetic oligonucleotide
  Antisense strand to SEQ ID NO: 535865
ucacaaauaaggaagcugu

SEQ ID NO: 535867 - RNA, 19 nt, Artificial Sequence
  Description of Artificial Sequence: Synthetic oligonucleotide
  Sense strand starting at position 3624 of SEQ ID NO: 318088
gcuuccuuauuugugaauu

SEQ ID NO: 535868 - RNA, 19 nt, Artificial Sequence
  Description of Artificial Sequence: Synthetic oligonucleotide
  Antisense strand to SEQ ID NO: 535867
aauucacaaauaaggaagc

SEQ ID NO: 535869 - RNA, 19 nt, Artificial Sequence
  Description of Artificial Sequence: Synthetic oligonucleotide
  Sense strand starting at position 3644 of SEQ ID NO: 318088
accuacuugcuaggaauua

SEQ ID NO: 535870 - RNA, 19 nt, Artificial Sequence
  Description of Artificial Sequence: Synthetic oligonucleotide
  Antisense strand to SEQ ID NO: 535869
uaauuccuagcaaguaggu

SEQ ID NO: 535871 - RNA, 19 nt, Artificial Sequence
  Description of Artificial Sequence: Synthetic oligonucleotide
  Sense strand starting at position 3940 of SEQ ID NO: 318088
ugguguuccuaagcagaag

SEQ ID NO: 535872 - RNA, 19 nt, Artificial Sequence
  Description of Artificial Sequence: Synthetic oligonucleotide
  Antisense strand to SEQ ID NO: 535871
cuucugcuuaggaacacca

SEQ ID NO: 535873 - RNA, 19 nt, Artificial Sequence
  Description of Artificial Sequence: Synthetic oligonucleotide
  Sense strand starting at position 170 of SEQ ID NO: 318089
aguccuuacaaauguggua

SEQ ID NO: 535874 - RNA, 19 nt, Artificial Sequence
  Description of Artificial Sequence: Synthetic oligonucleotide
  Antisense strand to SEQ ID NO: 535873
uaccacauuuguaaggacu

SEQ ID NO: 535875 - RNA, 19 nt, Artificial Sequence
  Description of Artificial Sequence: Synthetic oligonucleotide
  Sense strand starting at position 182 of SEQ ID NO: 318089
ugugguaauagcugaaaca

SEQ ID NO: 535876 - RNA, 19 nt, Artificial Sequence
  Description of Artificial Sequence: Synthetic oligonucleotide
  Antisense strand to SEQ ID NO: 535875
uguuucagcuauuaccaca

SEQ ID NO: 535877 - RNA, 19 nt, Artificial Sequence
  Description of Artificial Sequence: Synthetic oligonucleotide
  Sense strand starting at position 183 of SEQ ID NO: 318089
gugguaauagcugaaacag

SEQ ID NO: 535878 - RNA, 19 nt, Artificial Sequence
  Description of Artificial Sequence: Synthetic oligonucleotide
  Antisense strand to SEQ ID NO: 535877
cuguuucagcuauuaccac

SEQ ID NO: 535879 - RNA, 19 nt, Artificial Sequence
  Description of Artificial Sequence: Synthetic oligonucleotide
  Sense strand starting at position 201 of SEQ ID NO: 318089
gugagaguaucuuuagcuu

SEQ ID NO: 535880 - RNA, 19 nt, Artificial Sequence
  Description of Artificial Sequence: Synthetic oligonucleotide
  Antisense strand to SEQ ID NO: 535879
aagcuaaagauacucucac

SEQ ID NO: 535881 - RNA, 19 nt, Artificial Sequence
  Description of Artificial Sequence: Synthetic oligonucleotide
  Sense strand starting at position 204 of SEQ ID NO: 318089
agaguaucuuuagcuugaa

SEQ ID NO: 535882 - RNA, 19 nt, Artificial Sequence
  Description of Artificial Sequence: Synthetic oligonucleotide
  Antisense strand to SEQ ID NO: 535881
uucaagcuaaagauacucu

SEQ ID NO: 535883 - RNA, 19 nt, Artificial Sequence
  Description of Artificial Sequence: Synthetic oligonucleotide
  Sense strand starting at position 205 of SEQ ID NO: 318089
gaguaucuuuagcuugaaa

SEQ ID NO: 535884 - RNA, 19 nt, Artificial Sequence
  Description of Artificial Sequence: Synthetic oligonucleotide
  Antisense strand to SEQ ID NO: 535883
uuucaagcuaaagauacuc

SEQ ID NO: 535885 - RNA, 19 nt, Artificial Sequence
  Description of Artificial Sequence: Synthetic oligonucleotide
  Sense strand starting at position 207 of SEQ ID NO: 318089
guaucuuuagcuugaaaug

SEQ ID NO: 535886 - RNA, 19 nt, Artificial Sequence
  Description of Artificial Sequence: Synthetic oligonucleotide
  Antisense strand to SEQ ID NO: 535885
cauuucaagcuaaagauac

SEQ ID NO: 535887 - RNA, 19 nt, Artificial Sequence
  Description of Artificial Sequence: Synthetic oligonucleotide
  Sense strand starting at position 241 of SEQ ID NO: 318089
uguuaacugucuuuagaca

SEQ ID NO: 535888 - RNA, 19 nt, Artificial Sequence
  Description of Artificial Sequence: Synthetic oligonucleotide
  Antisense strand to SEQ ID NO: 535887
ugucuaaagacaguuaaca

SEQ ID NO: 535889 - RNA, 19 nt, Artificial Sequence
  Description of Artificial Sequence: Synthetic oligonucleotide
  Sense strand starting at position 242 of SEQ ID NO: 318089
guuaacugucuuuagacaa

SEQ ID NO: 535890 - RNA, 19 nt, Artificial Sequence
  Description of Artificial Sequence: Synthetic oligonucleotide
  Antisense strand to SEQ ID NO: 535889
uugucuaaagacaguuaac

SEQ ID NO: 535891 - RNA, 19 nt, Artificial Sequence
  Description of Artificial Sequence: Synthetic oligonucleotide
  Sense strand starting at position 285 of SEQ ID NO: 318089
aaugguagcugacuccaaa

SEQ ID NO: 535892 - RNA, 19 nt, Artificial Sequence
  Description of Artificial Sequence: Synthetic oligonucleotide
  Antisense strand to SEQ ID NO: 535891
uuuggagucagcuaccauu

SEQ ID NO: 535893 - RNA, 19 nt, Artificial Sequence
  Description of Artificial Sequence: Synthetic oligonucleotide
  Sense strand starting at position 417 of SEQ ID NO: 318089
cugugugucaggcauagua

SEQ ID NO: 535894 - RNA, 19 nt, Artificial Sequence
  Description of Artificial Sequence: Synthetic oligonucleotide
  Antisense strand to SEQ ID NO: 535893
uacuaugccugacacacag

SEQ ID NO: 535895 - RNA, 19 nt, Artificial Sequence
  Description of Artificial Sequence: Synthetic oligonucleotide
  Sense strand starting at position 629 of SEQ ID NO: 318089
uuagauuauuucuaggauc

SEQ ID NO: 535896 - RNA, 19 nt, Artificial Sequence
  Description of Artificial Sequence: Synthetic oligonucleotide
  Antisense strand to SEQ ID NO: 535895
gauccuagaaauaaucuaa

SEQ ID NO: 535897 - RNA, 19 nt, Artificial Sequence
  Description of Artificial Sequence: Synthetic oligonucleotide
  Sense strand starting at position 671 of SEQ ID NO: 318089
accguuuguaauggacuga

SEQ ID NO: 535898 - RNA, 19 nt, Artificial Sequence
  Description of Artificial Sequence: Synthetic oligonucleotide
  Antisense strand to SEQ ID NO: 535897
ucaguccauuacaaacggu

SEQ ID NO: 535899 - RNA, 19 nt, Artificial Sequence
  Description of Artificial Sequence: Synthetic oligonucleotide
  Sense strand starting at position 675 of SEQ ID NO: 318089
uuuguaauggacugacaaa

SEQ ID NO: 535900 - RNA, 19 nt, Artificial Sequence
  Description of Artificial Sequence: Synthetic oligonucleotide
  Antisense strand to SEQ ID NO: 535899
uuugucaguccauuacaaa

SEQ ID NO: 535901 - RNA, 19 nt, Artificial Sequence
  Description of Artificial Sequence: Synthetic oligonucleotide
  Sense strand starting at position 717 of SEQ ID NO: 318089
ggaagagauuaugaugcaa

SEQ ID NO: 535902 - RNA, 19 nt, Artificial Sequence
  Description of Artificial Sequence: Synthetic oligonucleotide
  Antisense strand to SEQ ID NO: 535901
uugcaucauaaucucuucc

SEQ ID NO: 535903 - RNA, 19 nt, Artificial Sequence
  Description of Artificial Sequence: Synthetic oligonucleotide
  Sense strand starting at position 1272 of SEQ ID NO: 318089
gcaagcauuucuugaauuu

SEQ ID NO: 535904 - RNA, 19 nt, Artificial Sequence
  Description of Artificial Sequence: Synthetic oligonucleotide
  Antisense strand to SEQ ID NO: 535903
aaauucaagaaaugcuugc

SEQ ID NO: 535905 - RNA, 19 nt, Artificial Sequence
  Description of Artificial Sequence: Synthetic oligonucleotide
  Sense strand starting at position 1339 of SEQ ID NO: 318089
aaagguguuguguauuaaa

SEQ ID NO: 535906 - RNA, 19 nt, Artificial Sequence
  Description of Artificial Sequence: Synthetic oligonucleotide
  Antisense strand to SEQ ID NO: 535905
uuuaauacacaacaccuuu

SEQ ID NO: 535907 - RNA, 19 nt, Artificial Sequence
  Description of Artificial Sequence: Synthetic oligonucleotide
  Sense strand starting at position 1357 of SEQ ID NO: 318089
auagaauucugguuaagac

SEQ ID NO: 535908 - RNA, 19 nt, Artificial Sequence
  Description of Artificial Sequence: Synthetic oligonucleotide
  Antisense strand to SEQ ID NO: 535907
gucuuaaccagaauucuau

SEQ ID NO: 535909 - RNA, 19 nt, Artificial Sequence
  Description of Artificial Sequence: Synthetic oligonucleotide
  Sense strand starting at position 1577 of SEQ ID NO: 318089
cuaauaagguugccaacaa

SEQ ID NO: 535910 - RNA, 19 nt, Artificial Sequence
  Description of Artificial Sequence: Synthetic oligonucleotide
  Antisense strand to SEQ ID NO: 535909
uuguuggcaaccuuauuag

SEQ ID NO: 535911 - RNA, 19 nt, Artificial Sequence
  Description of Artificial Sequence: Synthetic oligonucleotide
  Sense strand starting at position 1605 of SEQ ID NO: 318089
auaauuaugccacggaauc

SEQ ID NO: 535912 - RNA, 19 nt, Artificial Sequence
  Description of Artificial Sequence: Synthetic oligonucleotide
  Antisense strand to SEQ ID NO: 535911
gauuccguggcauaauuau

SEQ ID NO: 535913 - RNA, 19 nt, Artificial Sequence
  Description of Artificial Sequence: Synthetic oligonucleotide
  Sense strand starting at position 1622 of SEQ ID NO: 318089
ucucauacggcucaggauu

SEQ ID NO: 535914 - RNA, 19 nt, Artificial Sequence
  Description of Artificial Sequence: Synthetic oligonucleotide
  Antisense strand to SEQ ID NO: 535913
aauccugagccguaugaga

SEQ ID NO: 535915 - RNA, 19 nt, Artificial Sequence
  Description of Artificial Sequence: Synthetic oligonucleotide
  Sense strand starting at position 1678 of SEQ ID NO: 318089
acagcuuccuuauuuguga

SEQ ID NO: 535916 - RNA, 19 nt, Artificial Sequence
  Description of Artificial Sequence: Synthetic oligonucleotide
  Antisense strand to SEQ ID NO: 535915
ucacaaauaaggaagcugu

SEQ ID NO: 535917 - RNA, 19 nt, Artificial Sequence
  Description of Artificial Sequence: Synthetic oligonucleotide
  Sense strand starting at position 1681 of SEQ ID NO: 318089
gcuuccuuauuugugaauu

SEQ ID NO: 535918 - RNA, 19 nt, Artificial Sequence
  Description of Artificial Sequence: Synthetic oligonucleotide
  Antisense strand to SEQ ID NO: 535917
aauucacaaauaaggaagc

SEQ ID NO: 535919 - RNA, 19 nt, Artificial Sequence
  Description of Artificial Sequence: Synthetic oligonucleotide
  Sense strand starting at position 1701 of SEQ ID NO: 318089
accuacuugcuaggaauua

SEQ ID NO: 535920 - RNA, 19 nt, Artificial Sequence
  Description of Artificial Sequence: Synthetic oligonucleotide
  Antisense strand to SEQ ID NO: 535919
uaauuccuagcaaguaggu

SEQ ID NO: 535921 - RNA, 19 nt, Artificial Sequence
  Description of Artificial Sequence: Synthetic oligonucleotide
  Sense strand starting at position 1997 of SEQ ID NO: 318089
ugguguuccuaagcagaag

SEQ ID NO: 535922 - RNA, 19 nt, Artificial Sequence
  Description of Artificial Sequence: Synthetic oligonucleotide
  Antisense strand to SEQ ID NO: 535921
cuucugcuuaggaacacca

SEQ ID NO: 535923 - RNA, 19 nt, Artificial Sequence
  Description of Artificial Sequence: Synthetic oligonucleotide
  Sense strand starting at position 2043 of SEQ ID NO: 318089
uguguuaaauaagcucuau

SEQ ID NO: 535924 - RNA, 19 nt, Artificial Sequence
  Description of Artificial Sequence: Synthetic oligonucleotide
  Antisense strand to SEQ ID NO: 535923
auagagcuuauuuaacaca

SEQ ID NO: 535925 - RNA, 19 nt, Artificial Sequence
  Description of Artificial Sequence: Synthetic oligonucleotide
  Sense strand starting at position 2062 of SEQ ID NO: 318089
ucaggcaugagucauagua

SEQ ID NO: 535926 - RNA, 19 nt, Artificial Sequence
  Description of Artificial Sequence: Synthetic oligonucleotide
  Antisense strand to SEQ ID NO: 535925
uacuaugacucaugccuga

SEQ ID NO: 535927 - RNA, 19 nt, Artificial Sequence
  Description of Artificial Sequence: Synthetic oligonucleotide
  Sense strand starting at position 2168 of SEQ ID NO: 318089
uuauguauugauuagcuga

SEQ ID NO: 535928 - RNA, 19 nt, Artificial Sequence
  Description of Artificial Sequence: Synthetic oligonucleotide
  Antisense strand to SEQ ID NO: 535927
ucagcuaaucaauacauaa

SEQ ID NO: 535929 - RNA, 19 nt, Artificial Sequence
  Description of Artificial Sequence: Synthetic oligonucleotide
  Sense strand starting at position 2170 of SEQ ID NO: 318089
auguauugauuagcugaca

SEQ ID NO: 535930 - RNA, 19 nt, Artificial Sequence
  Description of Artificial Sequence: Synthetic oligonucleotide
  Antisense strand to SEQ ID NO: 535929
ugucagcuaaucaauacau

SEQ ID NO: 535931 - RNA, 19 nt, Artificial Sequence
  Description of Artificial Sequence: Synthetic oligonucleotide
  Sense strand starting at position 2630 of SEQ ID NO: 318089
aaggaauaaugagaauuga

SEQ ID NO: 535932 - RNA, 19 nt, Artificial Sequence
  Description of Artificial Sequence: Synthetic oligonucleotide
  Antisense strand to SEQ ID NO: 535931
ucaauucucauuauuccuu

SEQ ID NO: 535933 - RNA, 19 nt, Artificial Sequence
  Description of Artificial Sequence: Synthetic oligonucleotide
  Sense strand starting at position 2972 of SEQ ID NO: 318089
gaggaaaucuuccagaaga

SEQ ID NO: 535934 - RNA, 19 nt, Artificial Sequence
  Description of Artificial Sequence: Synthetic oligonucleotide
  Antisense strand to SEQ ID NO: 535933
ucuucuggaagauuuccuc

SEQ ID NO: 535935 - RNA, 19 nt, Artificial Sequence
  Description of Artificial Sequence: Synthetic oligonucleotide
  Sense strand starting at position 3073 of SEQ ID NO: 318089
aagaaauaaugagagaagu

SEQ ID NO: 535936 - RNA, 19 nt, Artificial Sequence
  Description of Artificial Sequence: Synthetic oligonucleotide
  Antisense strand to SEQ ID NO: 535935
acuucucucauuauuucuu

SEQ ID NO: 535937 - RNA, 19 nt, Artificial Sequence
  Description of Artificial Sequence: Synthetic oligonucleotide
  Sense strand starting at position 3277 of SEQ ID NO: 318089
caaggaugagaauggcuuu

SEQ ID NO: 535938 - RNA, 19 nt, Artificial Sequence
  Description of Artificial Sequence: Synthetic oligonucleotide
  Antisense strand to SEQ ID NO: 535937
aaagccauucucauccuug

SEQ ID NO: 535939 - RNA, 19 nt, Artificial Sequence
  Description of Artificial Sequence: Synthetic oligonucleotide
  Sense strand starting at position 3318 of SEQ ID NO: 318089
guuagaaagcaauggauca

SEQ ID NO: 535940 - RNA, 19 nt, Artificial Sequence
  Description of Artificial Sequence: Synthetic oligonucleotide
  Antisense strand to SEQ ID NO: 535939
ugauccauugcuuucuaac

SEQ ID NO: 535941 - RNA, 19 nt, Artificial Sequence
  Description of Artificial Sequence: Synthetic oligonucleotide
  Sense strand starting at position 3622 of SEQ ID NO: 318089
ccaagaugauaagaguaca

SEQ ID NO: 535942 - RNA, 19 nt, Artificial Sequence
  Description of Artificial Sequence: Synthetic oligonucleotide
  Antisense strand to SEQ ID NO: 535941
uguacucuuaucaucuugg

SEQ ID NO: 535943 - RNA, 19 nt, Artificial Sequence
  Description of Artificial Sequence: Synthetic oligonucleotide
  Sense strand starting at position 3797 of SEQ ID NO: 318089
gaguaaucggcucaguaag

SEQ ID NO: 535944 - RNA, 19 nt, Artificial Sequence
  Description of Artificial Sequence: Synthetic oligonucleotide
  Antisense strand to SEQ ID NO: 535943
cuuacugagccgauuacuc

SEQ ID NO: 535945 - RNA, 19 nt, Artificial Sequence
  Description of Artificial Sequence: Synthetic oligonucleotide
  Sense strand starting at position 3805 of SEQ ID NO: 318089
ggcucaguaaguuaaggaa

SEQ ID NO: 535946 - RNA, 19 nt, Artificial Sequence
  Description of Artificial Sequence: Synthetic oligonucleotide
  Antisense strand to SEQ ID NO: 535945
uuccuuaacuuacugagcc

SEQ ID NO: 535947 - RNA, 19 nt, Artificial Sequence
  Description of Artificial Sequence: Synthetic oligonucleotide
  Sense strand starting at position 3893 of SEQ ID NO: 318089
caauauguggcucagcuau

SEQ ID NO: 535948 - RNA, 19 nt, Artificial Sequence
  Description of Artificial Sequence: Synthetic oligonucleotide
  Antisense strand to SEQ ID NO: 535947
auagcugagccacauauug

SEQ ID NO: 535949 - RNA, 19 nt, Artificial Sequence
  Description of Artificial Sequence: Synthetic oligonucleotide
  Sense strand starting at position 3895 of SEQ ID NO: 318089
auauguggcucagcuauga

SEQ ID NO: 535950 - RNA, 19 nt, Artificial Sequence
  Description of Artificial Sequence: Synthetic oligonucleotide
  Antisense strand to SEQ ID NO: 535949
ucauagcugagccacauau

SEQ ID NO: 535951 - RNA, 19 nt, Artificial Sequence
  Description of Artificial Sequence: Synthetic oligonucleotide
  Sense strand starting at position 3899 of SEQ ID NO: 318089
guggcucagcuaugaauaa

SEQ ID NO: 535952 - RNA, 19 nt, Artificial Sequence
  Description of Artificial Sequence: Synthetic oligonucleotide
  Antisense strand to SEQ ID NO: 535951
uuauucauagcugagccac

SEQ ID NO: 535953 - RNA, 19 nt, Artificial Sequence
  Description of Artificial Sequence: Synthetic oligonucleotide
  Sense strand starting at position 7 of SEQ ID NO: 318090
guuggauggacuuggagau

SEQ ID NO: 535954 - RNA, 19 nt, Artificial Sequence
  Description of Artificial Sequence: Synthetic oligonucleotide
  Antisense strand to SEQ ID NO: 535953
aucuccaaguccauccaac

SEQ ID NO: 535955 - RNA, 19 nt, Artificial Sequence
  Description of Artificial Sequence: Synthetic oligonucleotide
  Sense strand starting at position 454 of SEQ ID NO: 318090
aaucucauccuguaucgga

SEQ ID NO: 535956 - RNA, 19 nt, Artificial Sequence
  Description of Artificial Sequence: Synthetic oligonucleotide
  Antisense strand to SEQ ID NO: 535955
uccgauacaggaugagauu

SEQ ID NO: 535957 - RNA, 19 nt, Artificial Sequence
  Description of Artificial Sequence: Synthetic oligonucleotide
  Sense strand starting at position 468 of SEQ ID NO: 318090
ucggacucccgggauaacu

SEQ ID NO: 535958 - RNA, 19 nt, Artificial Sequence
  Description of Artificial Sequence: Synthetic oligonucleotide
  Antisense strand to SEQ ID NO: 535957
aguuaucccgggaguccga

SEQ ID NO: 535959 - RNA, 19 nt, Artificial Sequence
  Description of Artificial Sequence: Synthetic oligonucleotide
  Sense strand starting at position 477 of SEQ ID NO: 318090
cgggauaacuaaugaaaug

SEQ ID NO: 535960 - RNA, 19 nt, Artificial Sequence
  Description of Artificial Sequence: Synthetic oligonucleotide
  Antisense strand to SEQ ID NO: 535959
cauuucauuaguuaucccg

SEQ ID NO: 535961 - RNA, 19 nt, Artificial Sequence
  Description of Artificial Sequence: Synthetic oligonucleotide
  Sense strand starting at position 519 of SEQ ID NO: 318090
agagcaguuucccucauga

SEQ ID NO: 535962 - RNA, 19 nt, Artificial Sequence
  Description of Artificial Sequence: Synthetic oligonucleotide
  Antisense strand to SEQ ID NO: 535961
ucaugagggaaacugcucu

SEQ ID NO: 535963 - RNA, 19 nt, Artificial Sequence
  Description of Artificial Sequence: Synthetic oligonucleotide
  Sense strand starting at position 521 of SEQ ID NO: 318090
agcaguuucccucaugaag

SEQ ID NO: 535964 - RNA, 19 nt, Artificial Sequence
  Description of Artificial Sequence: Synthetic oligonucleotide
  Antisense strand to SEQ ID NO: 535963
cuucaugagggaaacugcu

SEQ ID NO: 535965 - RNA, 19 nt, Artificial Sequence
  Description of Artificial Sequence: Synthetic oligonucleotide
  Sense strand starting at position 540 of SEQ ID NO: 318090
caggaugggcccuguucua

SEQ ID NO: 535966 - RNA, 19 nt, Artificial Sequence
  Description of Artificial Sequence: Synthetic oligonucleotide
  Antisense strand to SEQ ID NO: 535965
uagaacagggcccauccug

SEQ ID NO: 535967 - RNA, 19 nt, Artificial Sequence
  Description of Artificial Sequence: Synthetic oligonucleotide
  Sense strand starting at position 611 of SEQ ID NO: 318090
gccauaucaucucccuagu

SEQ ID NO: 535968 - RNA, 19 nt, Artificial Sequence
  Description of Artificial Sequence: Synthetic oligonucleotide
  Antisense strand to SEQ ID NO: 535967
acuagggagaugauauggc

SEQ ID NO: 535969 - RNA, 19 nt, Artificial Sequence
  Description of Artificial Sequence: Synthetic oligonucleotide
  Sense strand starting at position 614 of SEQ ID NO: 318090
auaucaucucccuaguuug

SEQ ID NO: 535970 - RNA, 19 nt, Artificial Sequence
  Description of Artificial Sequence: Synthetic oligonucleotide
  Antisense strand to SEQ ID NO: 535969
caaacuagggagaugauau

SEQ ID NO: 535971 - RNA, 19 nt, Artificial Sequence
  Description of Artificial Sequence: Synthetic oligonucleotide
  Sense strand starting at position 693 of SEQ ID NO: 318090
agccguguguuuccaugaa

SEQ ID NO: 535972 - RNA, 19 nt, Artificial Sequence
  Description of Artificial Sequence: Synthetic oligonucleotide
  Antisense strand to SEQ ID NO: 535971
uucauggaaacacacggcu

SEQ ID NO: 535973 - RNA, 19 nt, Artificial Sequence
  Description of Artificial Sequence: Synthetic oligonucleotide
  Sense strand starting at position 736 of SEQ ID NO: 318090
uauugauacggcuguaguc

SEQ ID NO: 535974 - RNA, 19 nt, Artificial Sequence
  Description of Artificial Sequence: Synthetic oligonucleotide
  Antisense strand to SEQ ID NO: 535973
gacuacagccguaucaaua

SEQ ID NO: 535975 - RNA, 19 nt, Artificial Sequence
  Description of Artificial Sequence: Synthetic oligonucleotide
  Sense strand starting at position 738 of SEQ ID NO: 318090
uugauacggcuguagucau

SEQ ID NO: 535976 - RNA, 19 nt, Artificial Sequence
  Description of Artificial Sequence: Synthetic oligonucleotide
  Antisense strand to SEQ ID NO: 535975
augacuacagccguaucaa

SEQ ID NO: 535977 - RNA, 19 nt, Artificial Sequence
  Description of Artificial Sequence: Synthetic oligonucleotide
  Sense strand starting at position 750 of SEQ ID NO: 318090
uagucauguguuugucaga

SEQ ID NO: 535978 - RNA, 19 nt, Artificial Sequence
  Description of Artificial Sequence: Synthetic oligonucleotide
  Antisense strand to SEQ ID NO: 535977
ucugacaaacacaugacua

SEQ ID NO: 535979 - RNA, 19 nt, Artificial Sequence
  Description of Artificial Sequence: Synthetic oligonucleotide
  Sense strand starting at position 751 of SEQ ID NO: 318090
agucauguguuugucagag

SEQ ID NO: 535980 - RNA, 19 nt, Artificial Sequence
  Description of Artificial Sequence: Synthetic oligonucleotide
  Antisense strand to SEQ ID NO: 535979
cucugacaaacacaugacu

SEQ ID NO: 535981 - RNA, 19 nt, Artificial Sequence
  Description of Artificial Sequence: Synthetic oligonucleotide
  Sense strand starting at position 927 of SEQ ID NO: 318090
gggaguucggccggccaga

SEQ ID NO: 535982 - RNA, 19 nt, Artificial Sequence
  Description of Artificial Sequence: Synthetic oligonucleotide
  Antisense strand to SEQ ID NO: 535981
ucuggccggccgaacuccc

SEQ ID NO: 535983 - RNA, 19 nt, Artificial Sequence
  Description of Artificial Sequence: Synthetic oligonucleotide
  Sense strand starting at position 1049 of SEQ ID NO: 318090
uaggaagucucuuagacaa

SEQ ID NO: 535984 - RNA, 19 nt, Artificial Sequence
  Description of Artificial Sequence: Synthetic oligonucleotide
  Antisense strand to SEQ ID NO: 535983
uugucuaagagacuuccua

SEQ ID NO: 535985 - RNA, 19 nt, Artificial Sequence
  Description of Artificial Sequence: Synthetic oligonucleotide
  Sense strand starting at position 1107 of SEQ ID NO: 318090
cugugagaguauuugguuu

SEQ ID NO: 535986 - RNA, 19 nt, Artificial Sequence
  Description of Artificial Sequence: Synthetic oligonucleotide
  Antisense strand to SEQ ID NO: 535985
aaaccaaauacucucacag

SEQ ID NO: 535987 - RNA, 19 nt, Artificial Sequence
  Description of Artificial Sequence: Synthetic oligonucleotide
  Sense strand starting at position 1129 of SEQ ID NO: 318090
agaaauguaugggccagaa

SEQ ID NO: 535988 - RNA, 19 nt, Artificial Sequence
  Description of Artificial Sequence: Synthetic oligonucleotide
  Antisense strand to SEQ ID NO: 535987
uucuggcccauacauuucu

SEQ ID NO: 535989 - RNA, 19 nt, Artificial Sequence
  Description of Artificial Sequence: Synthetic oligonucleotide
  Sense strand starting at position 1330 of SEQ ID NO: 318090
gaguaaagaucagacuucu

SEQ ID NO: 535990 - RNA, 19 nt, Artificial Sequence
  Description of Artificial Sequence: Synthetic oligonucleotide
  Antisense strand to SEQ ID NO: 535989
agaagucugaucuuuacuc

SEQ ID NO: 535991 - RNA, 19 nt, Artificial Sequence
  Description of Artificial Sequence: Synthetic oligonucleotide
  Sense strand starting at position 1336 of SEQ ID NO: 318090
agaucagacuucucguucu

SEQ ID NO: 535992 - RNA, 19 nt, Artificial Sequence
  Description of Artificial Sequence: Synthetic oligonucleotide
  Antisense strand to SEQ ID NO: 535991
agaacgagaagucugaucu

SEQ ID NO: 535993 - RNA, 19 nt, Artificial Sequence
  Description of Artificial Sequence: Synthetic oligonucleotide
  Sense strand starting at position 1342 of SEQ ID NO: 318090
gacuucucguucuuugaaa

SEQ ID NO: 535994 - RNA, 19 nt, Artificial Sequence
  Description of Artificial Sequence: Synthetic oligonucleotide
  Antisense strand to SEQ ID NO: 535993
uuucaaagaacgagaaguc

SEQ ID NO: 535995 - RNA, 19 nt, Artificial Sequence
  Description of Artificial Sequence: Synthetic oligonucleotide
  Sense strand starting at position 1472 of SEQ ID NO: 318090
gcuucuuaccuuggaggca

SEQ ID NO: 535996 - RNA, 19 nt, Artificial Sequence
  Description of Artificial Sequence: Synthetic oligonucleotide
  Antisense strand to SEQ ID NO: 535995
ugccuccaagguaagaagc

SEQ ID NO: 535997 - RNA, 19 nt, Artificial Sequence
  Description of Artificial Sequence: Synthetic oligonucleotide
  Sense strand starting at position 1762 of SEQ ID NO: 318090
accagaacaucuggagaga

SEQ ID NO: 535998 - RNA, 19 nt, Artificial Sequence
  Description of Artificial Sequence: Synthetic oligonucleotide
  Antisense strand to SEQ ID NO: 535997
ucucuccagauguucuggu

SEQ ID NO: 535999 - RNA, 19 nt, Artificial Sequence
  Description of Artificial Sequence: Synthetic oligonucleotide
  Sense strand starting at position 1775 of SEQ ID NO: 318090
gagagauggugccagauag

SEQ ID NO: 536000 - RNA, 19 nt, Artificial Sequence
  Description of Artificial Sequence: Synthetic oligonucleotide
  Antisense strand to SEQ ID NO: 535999
cuaucuggcaccaucucuc

SEQ ID NO: 536001 - RNA, 19 nt, Artificial Sequence
  Description of Artificial Sequence: Synthetic oligonucleotide
  Sense strand starting at position 1786 of SEQ ID NO: 318090
ccagauagguacucaccuu

SEQ ID NO: 536002 - RNA, 19 nt, Artificial Sequence
  Description of Artificial Sequence: Synthetic oligonucleotide
  Antisense strand to SEQ ID NO: 536001
aaggugaguaccuaucugg

SEQ ID NO: 536003 - RNA, 19 nt, Artificial Sequence
  Description of Artificial Sequence: Synthetic oligonucleotide
  Sense strand starting at position 2057 of SEQ ID NO: 318090
augaguuuacauuggaaau

SEQ ID NO: 536004 - RNA, 19 nt, Artificial Sequence
  Description of Artificial Sequence: Synthetic oligonucleotide
  Antisense strand to SEQ ID NO: 536003
auuuccaauguaaacucau

SEQ ID NO: 536005 - RNA, 19 nt, Artificial Sequence
  Description of Artificial Sequence: Synthetic oligonucleotide
  Sense strand starting at position 2059 of SEQ ID NO: 318090
gaguuuacauuggaaauuu

SEQ ID NO: 536006 - RNA, 19 nt, Artificial Sequence
  Description of Artificial Sequence: Synthetic oligonucleotide
  Antisense strand to SEQ ID NO: 536005
aaauuuccaauguaaacuc

SEQ ID NO: 536007 - RNA, 19 nt, Artificial Sequence
  Description of Artificial Sequence: Synthetic oligonucleotide
  Sense strand starting at position 2085 of SEQ ID NO: 318090
accagauugucagucacuu

SEQ ID NO: 536008 - RNA, 19 nt, Artificial Sequence
  Description of Artificial Sequence: Synthetic oligonucleotide
  Antisense strand to SEQ ID NO: 536007
aagugacugacaaucuggu

SEQ ID NO: 536009 - RNA, 19 nt, Artificial Sequence
  Description of Artificial Sequence: Synthetic oligonucleotide
  Sense strand starting at position 2117 of SEQ ID NO: 318090
accucucuuccaggagaaa

SEQ ID NO: 536010 - RNA, 19 nt, Artificial Sequence
  Description of Artificial Sequence: Synthetic oligonucleotide
  Antisense strand to SEQ ID NO: 536009
uuucuccuggaagagaggu

SEQ ID NO: 536011 - RNA, 19 nt, Artificial Sequence
  Description of Artificial Sequence: Synthetic oligonucleotide
  Sense strand starting at position 2314 of SEQ ID NO: 318090
gccacagguguccgaauuu

SEQ ID NO: 536012 - RNA, 19 nt, Artificial Sequence
  Description of Artificial Sequence: Synthetic oligonucleotide
  Antisense strand to SEQ ID NO: 536011
aaauucggacaccuguggc

SEQ ID NO: 536013 - RNA, 19 nt, Artificial Sequence
  Description of Artificial Sequence: Synthetic oligonucleotide
  Sense strand starting at position 2321 of SEQ ID NO: 318090
guguccgaauuuguuguaa

SEQ ID NO: 536014 - RNA, 19 nt, Artificial Sequence
  Description of Artificial Sequence: Synthetic oligonucleotide
  Antisense strand to SEQ ID NO: 536013
uuacaacaaauucggacac

SEQ ID NO: 536015 - RNA, 19 nt, Artificial Sequence
  Description of Artificial Sequence: Synthetic oligonucleotide
  Sense strand starting at position 2466 of SEQ ID NO: 318090
ggcuccuucucugcauaga

SEQ ID NO: 536016 - RNA, 19 nt, Artificial Sequence
  Description of Artificial Sequence: Synthetic oligonucleotide
  Antisense strand to SEQ ID NO: 536015
ucuaugcagagaaggagcc

SEQ ID NO: 536017 - RNA, 19 nt, Artificial Sequence
  Description of Artificial Sequence: Synthetic oligonucleotide
  Sense strand starting at position 2475 of SEQ ID NO: 318090
ucugcauagaggcagaaua

SEQ ID NO: 536018 - RNA, 19 nt, Artificial Sequence
  Description of Artificial Sequence: Synthetic oligonucleotide
  Antisense strand to SEQ ID NO: 536017
uauucugccucuaugcaga

SEQ ID NO: 536019 - RNA, 19 nt, Artificial Sequence
  Description of Artificial Sequence: Synthetic oligonucleotide
  Sense strand starting at position 2523 of SEQ ID NO: 318090
gggacaauguucucccaag

SEQ ID NO: 536020 - RNA, 19 nt, Artificial Sequence
  Description of Artificial Sequence: Synthetic oligonucleotide
  Antisense strand to SEQ ID NO: 536019
cuugggagaacauuguccc

SEQ ID NO: 536021 - RNA, 19 nt, Artificial Sequence
  Description of Artificial Sequence: Synthetic oligonucleotide
  Sense strand starting at position 2524 of SEQ ID NO: 318090
ggacaauguucucccaagu

SEQ ID NO: 536022 - RNA, 19 nt, Artificial Sequence
  Description of Artificial Sequence: Synthetic oligonucleotide
  Antisense strand to SEQ ID NO: 536021
acuugggagaacauugucc

SEQ ID NO: 536023 - RNA, 19 nt, Artificial Sequence
  Description of Artificial Sequence: Synthetic oligonucleotide
  Sense strand starting at position 2724 of SEQ ID NO: 318090
caauguugugaucagggau

SEQ ID NO: 536024 - RNA, 19 nt, Artificial Sequence
  Description of Artificial Sequence: Synthetic oligonucleotide
  Antisense strand to SEQ ID NO: 536023
aucccugaucacaacauug

SEQ ID NO: 536025 - RNA, 19 nt, Artificial Sequence
  Description of Artificial Sequence: Synthetic oligonucleotide
  Sense strand starting at position 3618 of SEQ ID NO: 318090
gggccucccuaugaauuua

SEQ ID NO: 536026 - RNA, 19 nt, Artificial Sequence
  Description of Artificial Sequence: Synthetic oligonucleotide
  Antisense strand to SEQ ID NO: 536025
uaaauucauagggaggccc

SEQ ID NO: 536027 - RNA, 19 nt, Artificial Sequence
  Description of Artificial Sequence: Synthetic oligonucleotide
  Sense strand starting at position 3628 of SEQ ID NO: 318090
augaauuuauucuggaaga

SEQ ID NO: 536028 - RNA, 19 nt, Artificial Sequence
  Description of Artificial Sequence: Synthetic oligonucleotide
  Antisense strand to SEQ ID NO: 536027
ucuuccagaauaaauucau

SEQ ID NO: 536029 - RNA, 19 nt, Artificial Sequence
  Description of Artificial Sequence: Synthetic oligonucleotide
  Sense strand starting at position 3629 of SEQ ID NO: 318090
ugaauuuauucuggaagau

SEQ ID NO: 536030 - RNA, 19 nt, Artificial Sequence
  Description of Artificial Sequence: Synthetic oligonucleotide
  Antisense strand to SEQ ID NO: 536029
aucuuccagaauaaauuca

SEQ ID NO: 536031 - RNA, 19 nt, Artificial Sequence
  Description of Artificial Sequence: Synthetic oligonucleotide
  Sense strand starting at position 3655 of SEQ ID NO: 318090
aaauguguguugcuaaggu

SEQ ID NO: 536032 - RNA, 19 nt, Artificial Sequence
  Description of Artificial Sequence: Synthetic oligonucleotide
  Antisense strand to SEQ ID NO: 536031
accuuagcaacacacauuu

SEQ ID NO: 536033 - RNA, 19 nt, Artificial Sequence
  Description of Artificial Sequence: Synthetic oligonucleotide
  Sense strand starting at position 145 of SEQ ID NO: 318091
gucaguaugccugaaauau

SEQ ID NO: 536034 - RNA, 19 nt, Artificial Sequence
  Description of Artificial Sequence: Synthetic oligonucleotide
  Antisense strand to SEQ ID NO: 536033
auauuucaggcauacugac

SEQ ID NO: 536035 - RNA, 19 nt, Artificial Sequence
  Description of Artificial Sequence: Synthetic oligonucleotide
  Sense strand starting at position 473 of SEQ ID NO: 318091
auugaauguguguaacuua

SEQ ID NO: 536036 - RNA, 19 nt, Artificial Sequence
  Description of Artificial Sequence: Synthetic oligonucleotide
  Antisense strand to SEQ ID NO: 536035
uaaguuacacacauucaau

SEQ ID NO: 536037 - RNA, 19 nt, Artificial Sequence
  Description of Artificial Sequence: Synthetic oligonucleotide
  Sense strand starting at position 500 of SEQ ID NO: 318091
ccgucaauguauuucuuua

SEQ ID NO: 536038 - RNA, 19 nt, Artificial Sequence
  Description of Artificial Sequence: Synthetic oligonucleotide
  Antisense strand to SEQ ID NO: 536037
uaaagaaauacauugacgg

SEQ ID NO: 536039 - RNA, 19 nt, Artificial Sequence
  Description of Artificial Sequence: Synthetic oligonucleotide
  Sense strand starting at position 582 of SEQ ID NO: 318091
ugccuauucccugaaagau

SEQ ID NO: 536040 - RNA, 19 nt, Artificial Sequence
  Description of Artificial Sequence: Synthetic oligonucleotide
  Antisense strand to SEQ ID NO: 536039
aucuuucagggaauaggca

SEQ ID NO: 536041 - RNA, 19 nt, Artificial Sequence
  Description of Artificial Sequence: Synthetic oligonucleotide
  Sense strand starting at position 812 of SEQ ID NO: 318091
gugguauuuacaugaguuc

SEQ ID NO: 536042 - RNA, 19 nt, Artificial Sequence
  Description of Artificial Sequence: Synthetic oligonucleotide
  Antisense strand to SEQ ID NO: 536041
gaacucauguaaauaccac

SEQ ID NO: 536043 - RNA, 19 nt, Artificial Sequence
  Description of Artificial Sequence: Synthetic oligonucleotide
  Sense strand starting at position 980 of SEQ ID NO: 318091
ggaaguguaaugcauuaua

SEQ ID NO: 536044 - RNA, 19 nt, Artificial Sequence
  Description of Artificial Sequence: Synthetic oligonucleotide
  Antisense strand to SEQ ID NO: 536043
uauaaugcauuacacuucc

SEQ ID NO: 536045 - RNA, 19 nt, Artificial Sequence
  Description of Artificial Sequence: Synthetic oligonucleotide
  Sense strand starting at position 983 of SEQ ID NO: 318091
aguguaaugcauuauacau

SEQ ID NO: 536046 - RNA, 19 nt, Artificial Sequence
  Description of Artificial Sequence: Synthetic oligonucleotide
  Antisense strand to SEQ ID NO: 536045
auguauaaugcauuacacu

SEQ ID NO: 536047 - RNA, 19 nt, Artificial Sequence
  Description of Artificial Sequence: Synthetic oligonucleotide
  Sense strand starting at position 1166 of SEQ ID NO: 318091
gggcauuuguuauauauuu

SEQ ID NO: 536048 - RNA, 19 nt, Artificial Sequence
  Description of Artificial Sequence: Synthetic oligonucleotide
  Antisense strand to SEQ ID NO: 536047
aaauauauaacaaaugccc

SEQ ID NO: 536049 - RNA, 19 nt, Artificial Sequence
  Description of Artificial Sequence: Synthetic oligonucleotide
  Sense strand starting at position 1829 of SEQ ID NO: 318091
agaguucgaugaguagaaa

SEQ ID NO: 536050 - RNA, 19 nt, Artificial Sequence
  Description of Artificial Sequence: Synthetic oligonucleotide
  Antisense strand to SEQ ID NO: 536049
uuucuacucaucgaacucu

SEQ ID NO: 536051 - RNA, 19 nt, Artificial Sequence
  Description of Artificial Sequence: Synthetic oligonucleotide
  Sense strand starting at position 1832 of SEQ ID NO: 318091
guucgaugaguagaaagca

SEQ ID NO: 536052 - RNA, 19 nt, Artificial Sequence
  Description of Artificial Sequence: Synthetic oligonucleotide
  Antisense strand to SEQ ID NO: 536051
ugcuuucuacucaucgaac

SEQ ID NO: 536053 - RNA, 19 nt, Artificial Sequence
  Description of Artificial Sequence: Synthetic oligonucleotide
  Sense strand starting at position 1959 of SEQ ID NO: 318091
cucugaaacguucugcguu

SEQ ID NO: 536054 - RNA, 19 nt, Artificial Sequence
  Description of Artificial Sequence: Synthetic oligonucleotide
  Antisense strand to SEQ ID NO: 536053
aacgcagaacguuucagag

SEQ ID NO: 536055 - RNA, 19 nt, Artificial Sequence
  Description of Artificial Sequence: Synthetic oligonucleotide
  Sense strand starting at position 1971 of SEQ ID NO: 318091
cugcguuugccuuuggcaa

SEQ ID NO: 536056 - RNA, 19 nt, Artificial Sequence
  Description of Artificial Sequence: Synthetic oligonucleotide
  Antisense strand to SEQ ID NO: 536055
uugccaaaggcaaacgcag

SEQ ID NO: 536057 - RNA, 19 nt, Artificial Sequence
  Description of Artificial Sequence: Synthetic oligonucleotide
  Sense strand starting at position 2021 of SEQ ID NO: 318091
gucaauuuauugucugucu

SEQ ID NO: 536058 - RNA, 19 nt, Artificial Sequence
  Description of Artificial Sequence: Synthetic oligonucleotide
  Antisense strand to SEQ ID NO: 536057
agacagacaauaaauugac

SEQ ID NO: 536059 - RNA, 19 nt, Artificial Sequence
  Description of Artificial Sequence: Synthetic oligonucleotide
  Sense strand starting at position 2087 of SEQ ID NO: 318091
auggcauaucgugaaacua

SEQ ID NO: 536060 - RNA, 19 nt, Artificial Sequence
  Description of Artificial Sequence: Synthetic oligonucleotide
  Antisense strand to SEQ ID NO: 536059
uaguuucacgauaugccau

SEQ ID NO: 536061 - RNA, 19 nt, Artificial Sequence
  Description of Artificial Sequence: Synthetic oligonucleotide
  Sense strand starting at position 2200 of SEQ ID NO: 318091
uacgaagaaucuuuggguu

SEQ ID NO: 536062 - RNA, 19 nt, Artificial Sequence
  Description of Artificial Sequence: Synthetic oligonucleotide
  Antisense strand to SEQ ID NO: 536061
aacccaaagauucuucgua

SEQ ID NO: 536063 - RNA, 19 nt, Artificial Sequence
  Description of Artificial Sequence: Synthetic oligonucleotide
  Sense strand starting at position 2379 of SEQ ID NO: 318091
uaugacuguggcuagauua

SEQ ID NO: 536064 - RNA, 19 nt, Artificial Sequence
  Description of Artificial Sequence: Synthetic oligonucleotide
  Antisense strand to SEQ ID NO: 536063
uaaucuagccacagucaua

SEQ ID NO: 536065 - RNA, 19 nt, Artificial Sequence
  Description of Artificial Sequence: Synthetic oligonucleotide
  Sense strand starting at position 2427 of SEQ ID NO: 318091
gugggaagacagugauuga

SEQ ID NO: 536066 - RNA, 19 nt, Artificial Sequence
  Description of Artificial Sequence: Synthetic oligonucleotide
  Antisense strand to SEQ ID NO: 536065
ucaaucacugucuucccac

SEQ ID NO: 536067 - RNA, 19 nt, Artificial Sequence
  Description of Artificial Sequence: Synthetic oligonucleotide
  Sense strand starting at position 2534 of SEQ ID NO: 318091
aaccuaaaguuguugaaga

SEQ ID NO: 536068 - RNA, 19 nt, Artificial Sequence
  Description of Artificial Sequence: Synthetic oligonucleotide
  Antisense strand to SEQ ID NO: 536067
ucuucaacaacuuuagguu

SEQ ID NO: 536069 - RNA, 19 nt, Artificial Sequence
  Description of Artificial Sequence: Synthetic oligonucleotide
  Sense strand starting at position 2674 of SEQ ID NO: 318091
ucaagaugauguccagacu

SEQ ID NO: 536070 - RNA, 19 nt, Artificial Sequence
  Description of Artificial Sequence: Synthetic oligonucleotide
  Antisense strand to SEQ ID NO: 536069
agucuggacaucaucuuga

SEQ ID NO: 536071 - RNA, 19 nt, Artificial Sequence
  Description of Artificial Sequence: Synthetic oligonucleotide
  Sense strand starting at position 2826 of SEQ ID NO: 318091
ggguguaguauauacugau

SEQ ID NO: 536072 - RNA, 19 nt, Artificial Sequence
  Description of Artificial Sequence: Synthetic oligonucleotide
  Antisense strand to SEQ ID NO: 536071
aucaguauauacuacaccc

SEQ ID NO: 536073 - RNA, 19 nt, Artificial Sequence
  Description of Artificial Sequence: Synthetic oligonucleotide
  Sense strand starting at position 2995 of SEQ ID NO: 318091
cuuuaugucccauaagggu

SEQ ID NO: 536074 - RNA, 19 nt, Artificial Sequence
  Description of Artificial Sequence: Synthetic oligonucleotide
  Antisense strand to SEQ ID NO: 536073
acccuuaugggacauaaag

SEQ ID NO: 536075 - RNA, 19 nt, Artificial Sequence
  Description of Artificial Sequence: Synthetic oligonucleotide
  Sense strand starting at position 3084 of SEQ ID NO: 318091
ccuguaaucccagaaaggu

SEQ ID NO: 536076 - RNA, 19 nt, Artificial Sequence
  Description of Artificial Sequence: Synthetic oligonucleotide
  Antisense strand to SEQ ID NO: 536075
accuuucugggauuacagg

SEQ ID NO: 536077 - RNA, 19 nt, Artificial Sequence
  Description of Artificial Sequence: Synthetic oligonucleotide
  Sense strand starting at position 3155 of SEQ ID NO: 318091
acauaugauggagguguau

SEQ ID NO: 536078 - RNA, 19 nt, Artificial Sequence
  Description of Artificial Sequence: Synthetic oligonucleotide
  Antisense strand to SEQ ID NO: 536077
auacaccuccaucauaugu

SEQ ID NO: 536079 - RNA, 19 nt, Artificial Sequence
  Description of Artificial Sequence: Synthetic oligonucleotide
  Sense strand starting at position 3167 of SEQ ID NO: 318091
gguguauguggcucauugu

SEQ ID NO: 536080 - RNA, 19 nt, Artificial Sequence
  Description of Artificial Sequence: Synthetic oligonucleotide
  Antisense strand to SEQ ID NO: 536079
acaaugagccacauacacc

SEQ ID NO: 536081 - RNA, 19 nt, Artificial Sequence
  Description of Artificial Sequence: Synthetic oligonucleotide
  Sense strand starting at position 3265 of SEQ ID NO: 318091
gcgucaagaacagauggua

SEQ ID NO: 536082 - RNA, 19 nt, Artificial Sequence
  Description of Artificial Sequence: Synthetic oligonucleotide
  Antisense strand to SEQ ID NO: 536081
uaccaucuguucuugacgc

SEQ ID NO: 536083 - RNA, 19 nt, Artificial Sequence
  Description of Artificial Sequence: Synthetic oligonucleotide
  Sense strand starting at position 3293 of SEQ ID NO: 318091
aacuguugcccagaacagu

SEQ ID NO: 536084 - RNA, 19 nt, Artificial Sequence
  Description of Artificial Sequence: Synthetic oligonucleotide
  Antisense strand to SEQ ID NO: 536083
acuguucugggcaacaguu

SEQ ID NO: 536085 - RNA, 19 nt, Artificial Sequence
  Description of Artificial Sequence: Synthetic oligonucleotide
  Sense strand starting at position 3392 of SEQ ID NO: 318091
agcucugcacuggaaagau

SEQ ID NO: 536086 - RNA, 19 nt, Artificial Sequence
  Description of Artificial Sequence: Synthetic oligonucleotide
  Antisense strand to SEQ ID NO: 536085
aucuuuccagugcagagcu

SEQ ID NO: 536087 - RNA, 19 nt, Artificial Sequence
  Description of Artificial Sequence: Synthetic oligonucleotide
  Sense strand starting at position 3477 of SEQ ID NO: 318091
uuggacucuugguuagaug

SEQ ID NO: 536088 - RNA, 19 nt, Artificial Sequence
  Description of Artificial Sequence: Synthetic oligonucleotide
  Antisense strand to SEQ ID NO: 536087
caucuaaccaagaguccaa

SEQ ID NO: 536089 - RNA, 19 nt, Artificial Sequence
  Description of Artificial Sequence: Synthetic oligonucleotide
  Sense strand starting at position 3478 of SEQ ID NO: 318091
uggacucuugguuagaugu

SEQ ID NO: 536090 - RNA, 19 nt, Artificial Sequence
  Description of Artificial Sequence: Synthetic oligonucleotide
  Antisense strand to SEQ ID NO: 536089
acaucuaaccaagagucca

SEQ ID NO: 536091 - RNA, 19 nt, Artificial Sequence
  Description of Artificial Sequence: Synthetic oligonucleotide
  Sense strand starting at position 3488 of SEQ ID NO: 318091
guuagaugugucugauuug

SEQ ID NO: 536092 - RNA, 19 nt, Artificial Sequence
  Description of Artificial Sequence: Synthetic oligonucleotide
  Antisense strand to SEQ ID NO: 536091
caaaucagacacaucuaac

SEQ ID NO: 536093 - RNA, 19 nt, Artificial Sequence
  Description of Artificial Sequence: Synthetic oligonucleotide
  Sense strand starting at position 3497 of SEQ ID NO: 318091
gucugauuugcgcacuuga

SEQ ID NO: 536094 - RNA, 19 nt, Artificial Sequence
  Description of Artificial Sequence: Synthetic oligonucleotide
  Antisense strand to SEQ ID NO: 536093
ucaagugcgcaaaucagac

SEQ ID NO: 536095 - RNA, 19 nt, Artificial Sequence
  Description of Artificial Sequence: Synthetic oligonucleotide
  Sense strand starting at position 3529 of SEQ ID NO: 318091
ugagaaauguuuccuugag

SEQ ID NO: 536096 - RNA, 19 nt, Artificial Sequence
  Description of Artificial Sequence: Synthetic oligonucleotide
  Antisense strand to SEQ ID NO: 536095
cucaaggaaacauuucuca

SEQ ID NO: 536097 - RNA, 19 nt, Artificial Sequence
  Description of Artificial Sequence: Synthetic oligonucleotide
  Sense strand starting at position 3530 of SEQ ID NO: 318091
gagaaauguuuccuugaga

SEQ ID NO: 536098 - RNA, 19 nt, Artificial Sequence
  Description of Artificial Sequence: Synthetic oligonucleotide
  Antisense strand to SEQ ID NO: 536097
ucucaaggaaacauuucuc

SEQ ID NO: 536099 - RNA, 19 nt, Artificial Sequence
  Description of Artificial Sequence: Synthetic oligonucleotide
  Sense strand starting at position 3531 of SEQ ID NO: 318091
agaaauguuuccuugagac

SEQ ID NO: 536100 - RNA, 19 nt, Artificial Sequence
  Description of Artificial Sequence: Synthetic oligonucleotide
  Antisense strand to SEQ ID NO: 536099
gucucaaggaaacauuucu

SEQ ID NO: 536101 - RNA, 19 nt, Artificial Sequence
  Description of Artificial Sequence: Synthetic oligonucleotide
  Sense strand starting at position 3538 of SEQ ID NO: 318091
uuuccuugagacugcagaa

SEQ ID NO: 536102 - RNA, 19 nt, Artificial Sequence
  Description of Artificial Sequence: Synthetic oligonucleotide
  Antisense strand to SEQ ID NO: 536101
uucugcagucucaaggaaa

SEQ ID NO: 536103 - RNA, 19 nt, Artificial Sequence
  Description of Artificial Sequence: Synthetic oligonucleotide
  Sense strand starting at position 3576 of SEQ ID NO: 318091
aucuaucgggagugagauu

SEQ ID NO: 536104 - RNA, 19 nt, Artificial Sequence
  Description of Artificial Sequence: Synthetic oligonucleotide
  Antisense strand to SEQ ID NO: 536103
aaucucacucccgauagau

SEQ ID NO: 536105 - RNA, 19 nt, Artificial Sequence
  Description of Artificial Sequence: Synthetic oligonucleotide
  Sense strand starting at position 3610 of SEQ ID NO: 318091
cacaauaggcuuggucaaa

SEQ ID NO: 536106 - RNA, 19 nt, Artificial Sequence
  Description of Artificial Sequence: Synthetic oligonucleotide
  Antisense strand to SEQ ID NO: 536105
uuugaccaagccuauugug

SEQ ID NO: 536107 - RNA, 19 nt, Artificial Sequence
  Description of Artificial Sequence: Synthetic oligonucleotide
  Sense strand starting at position 3611 of SEQ ID NO: 318091
acaauaggcuuggucaaag

SEQ ID NO: 536108 - RNA, 19 nt, Artificial Sequence
  Description of Artificial Sequence: Synthetic oligonucleotide
  Antisense strand to SEQ ID NO: 536107
cuuugaccaagccuauugu

SEQ ID NO: 536109 - RNA, 19 nt, Artificial Sequence
  Description of Artificial Sequence: Synthetic oligonucleotide
  Sense strand starting at position 3720 of SEQ ID NO: 318091
cccugacaccuuuauguua

SEQ ID NO: 536110 - RNA, 19 nt, Artificial Sequence
  Description of Artificial Sequence: Synthetic oligonucleotide
  Antisense strand to SEQ ID NO: 536109
uaacauaaaggugucaggg

SEQ ID NO: 536111 - RNA, 19 nt, Artificial Sequence
  Description of Artificial Sequence: Synthetic oligonucleotide
  Sense strand starting at position 3746 of SEQ ID NO: 318091
gaaguuagggcuuagguga

SEQ ID NO: 536112 - RNA, 19 nt, Artificial Sequence
  Description of Artificial Sequence: Synthetic oligonucleotide
  Antisense strand to SEQ ID NO: 536111
ucaccuaagcccuaacuuc

SEQ ID NO: 536113 - RNA, 19 nt, Artificial Sequence
  Description of Artificial Sequence: Synthetic oligonucleotide
  Sense strand starting at position 89 of SEQ ID NO: 318092
auuccaugcuucucuagga

SEQ ID NO: 536114 - RNA, 19 nt, Artificial Sequence
  Description of Artificial Sequence: Synthetic oligonucleotide
  Antisense strand to SEQ ID NO: 536113
uccuagagaagcauggaau

SEQ ID NO: 536115 - RNA, 19 nt, Artificial Sequence
  Description of Artificial Sequence: Synthetic oligonucleotide
  Sense strand starting at position 207 of SEQ ID NO: 318092
ggauuuauggguugcccuu

SEQ ID NO: 536116 - RNA, 19 nt, Artificial Sequence
  Description of Artificial Sequence: Synthetic oligonucleotide
  Antisense strand to SEQ ID NO: 536115
aagggcaacccauaaaucc

SEQ ID NO: 536117 - RNA, 19 nt, Artificial Sequence
  Description of Artificial Sequence: Synthetic oligonucleotide
  Sense strand starting at position 259 of SEQ ID NO: 318092
uuaugagaaacgugucaac

SEQ ID NO: 536118 - RNA, 19 nt, Artificial Sequence
  Description of Artificial Sequence: Synthetic oligonucleotide
  Antisense strand to SEQ ID NO: 536117
guugacacguuucucauaa

SEQ ID NO: 536119 - RNA, 19 nt, Artificial Sequence
  Description of Artificial Sequence: Synthetic oligonucleotide
  Sense strand starting at position 418 of SEQ ID NO: 318092
gugcaaagccuuggaaaca

SEQ ID NO: 536120 - RNA, 19 nt, Artificial Sequence
  Description of Artificial Sequence: Synthetic oligonucleotide
  Antisense strand to SEQ ID NO: 536119
uguuuccaaggcuuugcac

SEQ ID NO: 536121 - RNA, 19 nt, Artificial Sequence
  Description of Artificial Sequence: Synthetic oligonucleotide
  Sense strand starting at position 546 of SEQ ID NO: 318092
aucuaaauugccugugaga

SEQ ID NO: 536122 - RNA, 19 nt, Artificial Sequence
  Description of Artificial Sequence: Synthetic oligonucleotide
  Antisense strand to SEQ ID NO: 536121
ucucacaggcaauuuagau

SEQ ID NO: 536123 - RNA, 19 nt, Artificial Sequence
  Description of Artificial Sequence: Synthetic oligonucleotide
  Sense strand starting at position 548 of SEQ ID NO: 318092
cuaaauugccugugagaaa

SEQ ID NO: 536124 - RNA, 19 nt, Artificial Sequence
  Description of Artificial Sequence: Synthetic oligonucleotide
  Antisense strand to SEQ ID NO: 536123
uuucucacaggcaauuuag

SEQ ID NO: 536125 - RNA, 19 nt, Artificial Sequence
  Description of Artificial Sequence: Synthetic oligonucleotide
  Sense strand starting at position 574 of SEQ ID NO: 318092
ugguauugucaauacauac

SEQ ID NO: 536126 - RNA, 19 nt, Artificial Sequence
  Description of Artificial Sequence: Synthetic oligonucleotide
  Antisense strand to SEQ ID NO: 536125
guauguauugacaauacca

SEQ ID NO: 536127 - RNA, 19 nt, Artificial Sequence
  Description of Artificial Sequence: Synthetic oligonucleotide
  Sense strand starting at position 834 of SEQ ID NO: 318092
cuaaacugaugaucugagu

SEQ ID NO: 536128 - RNA, 19 nt, Artificial Sequence
  Description of Artificial Sequence: Synthetic oligonucleotide
  Antisense strand to SEQ ID NO: 536127
acucagaucaucaguuuag

SEQ ID NO: 536129 - RNA, 19 nt, Artificial Sequence
  Description of Artificial Sequence: Synthetic oligonucleotide
  Sense strand starting at position 843 of SEQ ID NO: 318092
ugaucugaguccguaauuu

SEQ ID NO: 536130 - RNA, 19 nt, Artificial Sequence
  Description of Artificial Sequence: Synthetic oligonucleotide
  Antisense strand to SEQ ID NO: 536129
aaauuacggacucagauca

SEQ ID NO: 536131 - RNA, 19 nt, Artificial Sequence
  Description of Artificial Sequence: Synthetic oligonucleotide
  Sense strand starting at position 906 of SEQ ID NO: 318092
uuuaaaggguuuguuuaca

SEQ ID NO: 536132 - RNA, 19 nt, Artificial Sequence
  Description of Artificial Sequence: Synthetic oligonucleotide
  Antisense strand to SEQ ID NO: 536131
uguaaacaaacccuuuaaa

SEQ ID NO: 536133 - RNA, 19 nt, Artificial Sequence
  Description of Artificial Sequence: Synthetic oligonucleotide
  Sense strand starting at position 997 of SEQ ID NO: 318092
gcaguauaauuguugaaau

SEQ ID NO: 536134 - RNA, 19 nt, Artificial Sequence
  Description of Artificial Sequence: Synthetic oligonucleotide
  Antisense strand to SEQ ID NO: 536133
auuucaacaauuauacugc

SEQ ID NO: 536135 - RNA, 19 nt, Artificial Sequence
  Description of Artificial Sequence: Synthetic oligonucleotide
  Sense strand starting at position 1117 of SEQ ID NO: 318092
ucaguuucggauuaugaaa

SEQ ID NO: 536136 - RNA, 19 nt, Artificial Sequence
  Description of Artificial Sequence: Synthetic oligonucleotide
  Antisense strand to SEQ ID NO: 536135
uuucauaauccgaaacuga

SEQ ID NO: 536137 - RNA, 19 nt, Artificial Sequence
  Description of Artificial Sequence: Synthetic oligonucleotide
  Sense strand starting at position 1242 of SEQ ID NO: 318092
gauacagugagauguggaa

SEQ ID NO: 536138 - RNA, 19 nt, Artificial Sequence
  Description of Artificial Sequence: Synthetic oligonucleotide
  Antisense strand to SEQ ID NO: 536137
uuccacaucucacuguauc

SEQ ID NO: 536139 - RNA, 19 nt, Artificial Sequence
  Description of Artificial Sequence: Synthetic oligonucleotide
  Sense strand starting at position 1244 of SEQ ID NO: 318092
uacagugagauguggaauu

SEQ ID NO: 536140 - RNA, 19 nt, Artificial Sequence
  Description of Artificial Sequence: Synthetic oligonucleotide
  Antisense strand to SEQ ID NO: 536139
aauuccacaucucacugua

SEQ ID NO: 536141 - RNA, 19 nt, Artificial Sequence
  Description of Artificial Sequence: Synthetic oligonucleotide
  Sense strand starting at position 1254 of SEQ ID NO: 318092
uguggaauucguuaggaau

SEQ ID NO: 536142 - RNA, 19 nt, Artificial Sequence
  Description of Artificial Sequence: Synthetic oligonucleotide
  Antisense strand to SEQ ID NO: 536141
auuccuaacgaauuccaca

SEQ ID NO: 536143 - RNA, 19 nt, Artificial Sequence
  Description of Artificial Sequence: Synthetic oligonucleotide
  Sense strand starting at position 1260 of SEQ ID NO: 318092
auucguuaggaaugauaau

SEQ ID NO: 536144 - RNA, 19 nt, Artificial Sequence
  Description of Artificial Sequence: Synthetic oligonucleotide
  Antisense strand to SEQ ID NO: 536143
auuaucauuccuaacgaau

SEQ ID NO: 536145 - RNA, 19 nt, Artificial Sequence
  Description of Artificial Sequence: Synthetic oligonucleotide
  Sense strand starting at position 1261 of SEQ ID NO: 318092
uucguuaggaaugauaauu

SEQ ID NO: 536146 - RNA, 19 nt, Artificial Sequence
  Description of Artificial Sequence: Synthetic oligonucleotide
  Antisense strand to SEQ ID NO: 536145
aauuaucauuccuaacgaa

SEQ ID NO: 536147 - RNA, 19 nt, Artificial Sequence
  Description of Artificial Sequence: Synthetic oligonucleotide
  Sense strand starting at position 1313 of SEQ ID NO: 318092
guuaauaguguuuauaagc

SEQ ID NO: 536148 - RNA, 19 nt, Artificial Sequence
  Description of Artificial Sequence: Synthetic oligonucleotide
  Antisense strand to SEQ ID NO: 536147
gcuuauaaacacuauuaac

SEQ ID NO: 536149 - RNA, 19 nt, Artificial Sequence
  Description of Artificial Sequence: Synthetic oligonucleotide
  Sense strand starting at position 1396 of SEQ ID NO: 318092
ggaaauccaccucgagaau

SEQ ID NO: 536150 - RNA, 19 nt, Artificial Sequence
  Description of Artificial Sequence: Synthetic oligonucleotide
  Antisense strand to SEQ ID NO: 536149
auucucgagguggauuucc

SEQ ID NO: 536151 - RNA, 19 nt, Artificial Sequence
  Description of Artificial Sequence: Synthetic oligonucleotide
  Sense strand starting at position 1582 of SEQ ID NO: 318092
cgauaaucgaggugacaaa

SEQ ID NO: 536152 - RNA, 19 nt, Artificial Sequence
  Description of Artificial Sequence: Synthetic oligonucleotide
  Antisense strand to SEQ ID NO: 536151
uuugucaccucgauuaucg

SEQ ID NO: 536153 - RNA, 19 nt, Artificial Sequence
  Description of Artificial Sequence: Synthetic oligonucleotide
  Sense strand starting at position 1591 of SEQ ID NO: 318092
aggugacaaaguuguggaa

SEQ ID NO: 536154 - RNA, 19 nt, Artificial Sequence
  Description of Artificial Sequence: Synthetic oligonucleotide
  Antisense strand to SEQ ID NO: 536153
uuccacaacuuugucaccu

SEQ ID NO: 536155 - RNA, 19 nt, Artificial Sequence
  Description of Artificial Sequence: Synthetic oligonucleotide
  Sense strand starting at position 2551 of SEQ ID NO: 318092
ccaagacuuacguaaacga

SEQ ID NO: 536156 - RNA, 19 nt, Artificial Sequence
  Description of Artificial Sequence: Synthetic oligonucleotide
  Antisense strand to SEQ ID NO: 536155
ucguuuacguaagucuugg

SEQ ID NO: 536157 - RNA, 19 nt, Artificial Sequence
  Description of Artificial Sequence: Synthetic oligonucleotide
  Sense strand starting at position 2660 of SEQ ID NO: 318092
uguuucuuugcgguuugua

SEQ ID NO: 536158 - RNA, 19 nt, Artificial Sequence
  Description of Artificial Sequence: Synthetic oligonucleotide
  Antisense strand to SEQ ID NO: 536157
uacaaaccgcaaagaaaca

SEQ ID NO: 536159 - RNA, 19 nt, Artificial Sequence
  Description of Artificial Sequence: Synthetic oligonucleotide
  Sense strand starting at position 2896 of SEQ ID NO: 318092
guggaagaaugagaggaua

SEQ ID NO: 536160 - RNA, 19 nt, Artificial Sequence
  Description of Artificial Sequence: Synthetic oligonucleotide
  Antisense strand to SEQ ID NO: 536159
uauccucucauucuuccac

SEQ ID NO: 536161 - RNA, 19 nt, Artificial Sequence
  Description of Artificial Sequence: Synthetic oligonucleotide
  Sense strand starting at position 3028 of SEQ ID NO: 318092
cucuuaguuguugaucaga

SEQ ID NO: 536162 - RNA, 19 nt, Artificial Sequence
  Description of Artificial Sequence: Synthetic oligonucleotide
  Antisense strand to SEQ ID NO: 536161
ucugaucaacaacuaagag

SEQ ID NO: 536163 - RNA, 19 nt, Artificial Sequence
  Description of Artificial Sequence: Synthetic oligonucleotide
  Sense strand starting at position 3030 of SEQ ID NO: 318092
cuuaguuguugaucagaua

SEQ ID NO: 536164 - RNA, 19 nt, Artificial Sequence
  Description of Artificial Sequence: Synthetic oligonucleotide
  Antisense strand to SEQ ID NO: 536163
uaucugaucaacaacuaag

SEQ ID NO: 536165 - RNA, 19 nt, Artificial Sequence
  Description of Artificial Sequence: Synthetic oligonucleotide
  Sense strand starting at position 3031 of SEQ ID NO: 318092
uuaguuguugaucagauaa

SEQ ID NO: 536166 - RNA, 19 nt, Artificial Sequence
  Description of Artificial Sequence: Synthetic oligonucleotide
  Antisense strand to SEQ ID NO: 536165
uuaucugaucaacaacuaa

SEQ ID NO: 536167 - RNA, 19 nt, Artificial Sequence
  Description of Artificial Sequence: Synthetic oligonucleotide
  Sense strand starting at position 3157 of SEQ ID NO: 318092
uauagauugugaccagauu

SEQ ID NO: 536168 - RNA, 19 nt, Artificial Sequence
  Description of Artificial Sequence: Synthetic oligonucleotide
  Antisense strand to SEQ ID NO: 536167
aaucuggucacaaucuaua

SEQ ID NO: 536169 - RNA, 19 nt, Artificial Sequence
  Description of Artificial Sequence: Synthetic oligonucleotide
  Sense strand starting at position 3178 of SEQ ID NO: 318092
guucuagcuuugccauuua

SEQ ID NO: 536170 - RNA, 19 nt, Artificial Sequence
  Description of Artificial Sequence: Synthetic oligonucleotide
  Antisense strand to SEQ ID NO: 536169
uaaauggcaaagcuagaac

SEQ ID NO: 536171 - RNA, 19 nt, Artificial Sequence
  Description of Artificial Sequence: Synthetic oligonucleotide
  Sense strand starting at position 3252 of SEQ ID NO: 318092
uguauagauccaggaaacu

SEQ ID NO: 536172 - RNA, 19 nt, Artificial Sequence
  Description of Artificial Sequence: Synthetic oligonucleotide
  Antisense strand to SEQ ID NO: 536171
aguuuccuggaucuauaca

SEQ ID NO: 536173 - RNA, 19 nt, Artificial Sequence
  Description of Artificial Sequence: Synthetic oligonucleotide
  Sense strand starting at position 3536 of SEQ ID NO: 318092
ugagauaacaggugugaug

SEQ ID NO: 536174 - RNA, 19 nt, Artificial Sequence
  Description of Artificial Sequence: Synthetic oligonucleotide
  Antisense strand to SEQ ID NO: 536173
caucacaccuguuaucuca

SEQ ID NO: 536175 - RNA, 19 nt, Artificial Sequence
  Description of Artificial Sequence: Synthetic oligonucleotide
  Sense strand starting at position 3543 of SEQ ID NO: 318092
acaggugugaugcaaagau

SEQ ID NO: 536176 - RNA, 19 nt, Artificial Sequence
  Description of Artificial Sequence: Synthetic oligonucleotide
  Antisense strand to SEQ ID NO: 536175
aucuuugcaucacaccugu

SEQ ID NO: 536177 - RNA, 19 nt, Artificial Sequence
  Description of Artificial Sequence: Synthetic oligonucleotide
  Sense strand starting at position 3547 of SEQ ID NO: 318092
gugugaugcaaagauguau

SEQ ID NO: 536178 - RNA, 19 nt, Artificial Sequence
  Description of Artificial Sequence: Synthetic oligonucleotide
  Antisense strand to SEQ ID NO: 536177
auacaucuuugcaucacac

SEQ ID NO: 536179 - RNA, 19 nt, Artificial Sequence
  Description of Artificial Sequence: Synthetic oligonucleotide
  Sense strand starting at position 3574 of SEQ ID NO: 318092
gauguauagugguuaaaug

SEQ ID NO: 536180 - RNA, 19 nt, Artificial Sequence
  Description of Artificial Sequence: Synthetic oligonucleotide
  Antisense strand to SEQ ID NO: 536179
cauuuaaccacuauacauc

SEQ ID NO: 536181 - RNA, 19 nt, Artificial Sequence
  Description of Artificial Sequence: Synthetic oligonucleotide
  Sense strand starting at position 3575 of SEQ ID NO: 318092
auguauagugguuaaaugu

SEQ ID NO: 536182 - RNA, 19 nt, Artificial Sequence
  Description of Artificial Sequence: Synthetic oligonucleotide
  Antisense strand to SEQ ID NO: 536181
acauuuaaccacuauacau

SEQ ID NO: 536183 - RNA, 19 nt, Artificial Sequence
  Description of Artificial Sequence: Synthetic oligonucleotide
  Sense strand starting at position 3605 of SEQ ID NO: 318092
cuagauugccuagguuuaa

SEQ ID NO: 536184 - RNA, 19 nt, Artificial Sequence
  Description of Artificial Sequence: Synthetic oligonucleotide
  Antisense strand to SEQ ID NO: 536183
uuaaaccuaggcaaucuag

SEQ ID NO: 536185 - RNA, 19 nt, Artificial Sequence
  Description of Artificial Sequence: Synthetic oligonucleotide
  Sense strand starting at position 3625 of SEQ ID NO: 318092
ugcugaugccucuauuucu

SEQ ID NO: 536186 - RNA, 19 nt, Artificial Sequence
  Description of Artificial Sequence: Synthetic oligonucleotide
  Antisense strand to SEQ ID NO: 536185
agaaauagaggcaucagca

SEQ ID NO: 536187 - RNA, 19 nt, Artificial Sequence
  Description of Artificial Sequence: Synthetic oligonucleotide
  Sense strand starting at position 3809 of SEQ ID NO: 318092
ugucuacucggucaacacu

SEQ ID NO: 536188 - RNA, 19 nt, Artificial Sequence
  Description of Artificial Sequence: Synthetic oligonucleotide
  Antisense strand to SEQ ID NO: 536187
aguguugaccgaguagaca

SEQ ID NO: 536189 - RNA, 19 nt, Artificial Sequence
  Description of Artificial Sequence: Synthetic oligonucleotide
  Sense strand starting at position 3904 of SEQ ID NO: 318092
aguggauugauaugucaca

SEQ ID NO: 536190 - RNA, 19 nt, Artificial Sequence
  Description of Artificial Sequence: Synthetic oligonucleotide
  Antisense strand to SEQ ID NO: 536189
ugugacauaucaauccacu

SEQ ID NO: 536191 - RNA, 19 nt, Artificial Sequence
  Description of Artificial Sequence: Synthetic oligonucleotide
  Sense strand starting at position 3905 of SEQ ID NO: 318092
guggauugauaugucacaa

SEQ ID NO: 536192 - RNA, 19 nt, Artificial Sequence
  Description of Artificial Sequence: Synthetic oligonucleotide
  Antisense strand to SEQ ID NO: 536191
uugugacauaucaauccac

SEQ ID NO: 536193 - RNA, 19 nt, Artificial Sequence
  Description of Artificial Sequence: Synthetic oligonucleotide
  Sense strand starting at position 61 of SEQ ID NO: 318093
gcaaucacugaauggauau

SEQ ID NO: 536194 - RNA, 19 nt, Artificial Sequence
  Description of Artificial Sequence: Synthetic oligonucleotide
  Antisense strand to SEQ ID NO: 536193
auauccauucagugauugc

SEQ ID NO: 536195 - RNA, 19 nt, Artificial Sequence
  Description of Artificial Sequence: Synthetic oligonucleotide
  Sense strand starting at position 108 of SEQ ID NO: 318093
aggauuuaauagggauuag

SEQ ID NO: 536196 - RNA, 19 nt, Artificial Sequence
  Description of Artificial Sequence: Synthetic oligonucleotide
  Antisense strand to SEQ ID NO: 536195
cuaaucccuauuaaauccu

SEQ ID NO: 536197 - RNA, 19 nt, Artificial Sequence
  Description of Artificial Sequence: Synthetic oligonucleotide
  Sense strand starting at position 118 of SEQ ID NO: 318093
agggauuagcuaugaguau

SEQ ID NO: 536198 - RNA, 19 nt, Artificial Sequence
  Description of Artificial Sequence: Synthetic oligonucleotide
  Antisense strand to SEQ ID NO: 536197
auacucauagcuaaucccu

SEQ ID NO: 536199 - RNA, 19 nt, Artificial Sequence
  Description of Artificial Sequence: Synthetic oligonucleotide
  Sense strand starting at position 380 of SEQ ID NO: 318093
aauuguguggaauauguau

SEQ ID NO: 536200 - RNA, 19 nt, Artificial Sequence
  Description of Artificial Sequence: Synthetic oligonucleotide
  Antisense strand to SEQ ID NO: 536199
auacauauuccacacaauu

SEQ ID NO: 536201 - RNA, 19 nt, Artificial Sequence
  Description of Artificial Sequence: Synthetic oligonucleotide
  Sense strand starting at position 410 of SEQ ID NO: 318093
cagugucaucuagaagucu

SEQ ID NO: 536202 - RNA, 19 nt, Artificial Sequence
  Description of Artificial Sequence: Synthetic oligonucleotide
  Antisense strand to SEQ ID NO: 536201
agacuucuagaugacacug

SEQ ID NO: 536203 - RNA, 19 nt, Artificial Sequence
  Description of Artificial Sequence: Synthetic oligonucleotide
  Sense strand starting at position 443 of SEQ ID NO: 318093
ggaguuaguugauuaauag

SEQ ID NO: 536204 - RNA, 19 nt, Artificial Sequence
  Description of Artificial Sequence: Synthetic oligonucleotide
  Antisense strand to SEQ ID NO: 536203
cuauuaaucaacuaacucc

SEQ ID NO: 536205 - RNA, 19 nt, Artificial Sequence
  Description of Artificial Sequence: Synthetic oligonucleotide
  Sense strand starting at position 444 of SEQ ID NO: 318093
gaguuaguugauuaauagu

SEQ ID NO: 536206 - RNA, 19 nt, Artificial Sequence
  Description of Artificial Sequence: Synthetic oligonucleotide
  Antisense strand to SEQ ID NO: 536205
acuauuaaucaacuaacuc

SEQ ID NO: 536207 - RNA, 19 nt, Artificial Sequence
  Description of Artificial Sequence: Synthetic oligonucleotide
  Sense strand starting at position 701 of SEQ ID NO: 318093
auaguaugaucaccagggu

SEQ ID NO: 536208 - RNA, 19 nt, Artificial Sequence
  Description of Artificial Sequence: Synthetic oligonucleotide
  Antisense strand to SEQ ID NO: 536207
acccuggugaucauacuau

SEQ ID NO: 536209 - RNA, 19 nt, Artificial Sequence
  Description of Artificial Sequence: Synthetic oligonucleotide
  Sense strand starting at position 704 of SEQ ID NO: 318093
guaugaucaccagggugaa

SEQ ID NO: 536210 - RNA, 19 nt, Artificial Sequence
  Description of Artificial Sequence: Synthetic oligonucleotide
  Antisense strand to SEQ ID NO: 536209
uucacccuggugaucauac

SEQ ID NO: 536211 - RNA, 19 nt, Artificial Sequence
  Description of Artificial Sequence: Synthetic oligonucleotide
  Sense strand starting at position 716 of SEQ ID NO: 318093
gggugaacuagugaguaua

SEQ ID NO: 536212 - RNA, 19 nt, Artificial Sequence
  Description of Artificial Sequence: Synthetic oligonucleotide
  Antisense strand to SEQ ID NO: 536211
uauacucacuaguucaccc

SEQ ID NO: 536213 - RNA, 19 nt, Artificial Sequence
  Description of Artificial Sequence: Synthetic oligonucleotide
  Sense strand starting at position 718 of SEQ ID NO: 318093
gugaacuagugaguauaga

SEQ ID NO: 536214 - RNA, 19 nt, Artificial Sequence
  Description of Artificial Sequence: Synthetic oligonucleotide
  Antisense strand to SEQ ID NO: 536213
ucuauacucacuaguucac

SEQ ID NO: 536215 - RNA, 19 nt, Artificial Sequence
  Description of Artificial Sequence: Synthetic oligonucleotide
  Sense strand starting at position 829 of SEQ ID NO: 318093
cccauaaagugagucauau

SEQ ID NO: 536216 - RNA, 19 nt, Artificial Sequence
  Description of Artificial Sequence: Synthetic oligonucleotide
  Antisense strand to SEQ ID NO: 536215
auaugacucacuuuauggg

SEQ ID NO: 536217 - RNA, 19 nt, Artificial Sequence
  Description of Artificial Sequence: Synthetic oligonucleotide
  Sense strand starting at position 913 of SEQ ID NO: 318093
ucguaauuacaugacucaa

SEQ ID NO: 536218 - RNA, 19 nt, Artificial Sequence
  Description of Artificial Sequence: Synthetic oligonucleotide
  Antisense strand to SEQ ID NO: 536217
uugagucauguaauuacga

SEQ ID NO: 536219 - RNA, 19 nt, Artificial Sequence
  Description of Artificial Sequence: Synthetic oligonucleotide
  Sense strand starting at position 932 of SEQ ID NO: 318093
aaugcauaagcugagucau

SEQ ID NO: 536220 - RNA, 19 nt, Artificial Sequence
  Description of Artificial Sequence: Synthetic oligonucleotide
  Antisense strand to SEQ ID NO: 536219
augacucagcuuaugcauu

SEQ ID NO: 536221 - RNA, 19 nt, Artificial Sequence
  Description of Artificial Sequence: Synthetic oligonucleotide
  Sense strand starting at position 965 of SEQ ID NO: 318093
ugauauugucuauagccaa

SEQ ID NO: 536222 - RNA, 19 nt, Artificial Sequence
  Description of Artificial Sequence: Synthetic oligonucleotide
  Antisense strand to SEQ ID NO: 536221
uuggcuauagacaauauca

SEQ ID NO: 536223 - RNA, 19 nt, Artificial Sequence
  Description of Artificial Sequence: Synthetic oligonucleotide
  Sense strand starting at position 1011 of SEQ ID NO: 318093
gcuuaauuugcaggagcaa

SEQ ID NO: 536224 - RNA, 19 nt, Artificial Sequence
  Description of Artificial Sequence: Synthetic oligonucleotide
  Antisense strand to SEQ ID NO: 536223
uugcuccugcaaauuaagc

SEQ ID NO: 536225 - RNA, 19 nt, Artificial Sequence
  Description of Artificial Sequence: Synthetic oligonucleotide
  Sense strand starting at position 1175 of SEQ ID NO: 318093
gccaauuuguuggugugga

SEQ ID NO: 536226 - RNA, 19 nt, Artificial Sequence
  Description of Artificial Sequence: Synthetic oligonucleotide
  Antisense strand to SEQ ID NO: 536225
uccacaccaacaaauuggc

SEQ ID NO: 536227 - RNA, 19 nt, Artificial Sequence
  Description of Artificial Sequence: Synthetic oligonucleotide
  Sense strand starting at position 1307 of SEQ ID NO: 318093
aaaguuauuggaugucuac

SEQ ID NO: 536228 - RNA, 19 nt, Artificial Sequence
  Description of Artificial Sequence: Synthetic oligonucleotide
  Antisense strand to SEQ ID NO: 536227
guagacauccaauaacuuu

SEQ ID NO: 536229 - RNA, 19 nt, Artificial Sequence
  Description of Artificial Sequence: Synthetic oligonucleotide
  Sense strand starting at position 1316 of SEQ ID NO: 318093
ggaugucuacuauauucua

SEQ ID NO: 536230 - RNA, 19 nt, Artificial Sequence
  Description of Artificial Sequence: Synthetic oligonucleotide
  Antisense strand to SEQ ID NO: 536229
uagaauauaguagacaucc

SEQ ID NO: 536231 - RNA, 19 nt, Artificial Sequence
  Description of Artificial Sequence: Synthetic oligonucleotide
  Sense strand starting at position 1360 of SEQ ID NO: 318093
uagcacuggucacugaaga

SEQ ID NO: 536232 - RNA, 19 nt, Artificial Sequence
  Description of Artificial Sequence: Synthetic oligonucleotide
  Antisense strand to SEQ ID NO: 536231
ucuucagugaccagugcua

SEQ ID NO: 536233 - RNA, 19 nt, Artificial Sequence
  Description of Artificial Sequence: Synthetic oligonucleotide
  Sense strand starting at position 1542 of SEQ ID NO: 318093
guaagagcagaguaaucau

SEQ ID NO: 536234 - RNA, 19 nt, Artificial Sequence
  Description of Artificial Sequence: Synthetic oligonucleotide
  Antisense strand to SEQ ID NO: 536233
augauuacucugcucuuac

SEQ ID NO: 536235 - RNA, 19 nt, Artificial Sequence
  Description of Artificial Sequence: Synthetic oligonucleotide
  Sense strand starting at position 1594 of SEQ ID NO: 318093
gcauuccuucuugagaaua

SEQ ID NO: 536236 - RNA, 19 nt, Artificial Sequence
  Description of Artificial Sequence: Synthetic oligonucleotide
  Antisense strand to SEQ ID NO: 536235
uauucucaagaaggaaugc

SEQ ID NO: 536237 - RNA, 19 nt, Artificial Sequence
  Description of Artificial Sequence: Synthetic oligonucleotide
  Sense strand starting at position 1656 of SEQ ID NO: 318093
ugucauggugguuaaacau

SEQ ID NO: 536238 - RNA, 19 nt, Artificial Sequence
  Description of Artificial Sequence: Synthetic oligonucleotide
  Antisense strand to SEQ ID NO: 536237
auguuuaaccaccaugaca

SEQ ID NO: 536239 - RNA, 19 nt, Artificial Sequence
  Description of Artificial Sequence: Synthetic oligonucleotide
  Sense strand starting at position 1999 of SEQ ID NO: 318093
gaucuagggcuuuauacuu

SEQ ID NO: 536240 - RNA, 19 nt, Artificial Sequence
  Description of Artificial Sequence: Synthetic oligonucleotide
  Antisense strand to SEQ ID NO: 536239
aaguauaaagcccuagauc

SEQ ID NO: 536241 - RNA, 19 nt, Artificial Sequence
  Description of Artificial Sequence: Synthetic oligonucleotide
  Sense strand starting at position 2093 of SEQ ID NO: 318093
aguauugcugcuguaagca

SEQ ID NO: 536242 - RNA, 19 nt, Artificial Sequence
  Description of Artificial Sequence: Synthetic oligonucleotide
  Antisense strand to SEQ ID NO: 536241
ugcuuacagcagcaauacu

SEQ ID NO: 536243 - RNA, 19 nt, Artificial Sequence
  Description of Artificial Sequence: Synthetic oligonucleotide
  Sense strand starting at position 2244 of SEQ ID NO: 318093
gcuagaggcuacuuuauuu

SEQ ID NO: 536244 - RNA, 19 nt, Artificial Sequence
  Description of Artificial Sequence: Synthetic oligonucleotide
  Antisense strand to SEQ ID NO: 536243
aaauaaaguagccucuagc

SEQ ID NO: 536245 - RNA, 19 nt, Artificial Sequence
  Description of Artificial Sequence: Synthetic oligonucleotide
  Sense strand starting at position 2653 of SEQ ID NO: 318093
aacagucugcacuauguga

SEQ ID NO: 536246 - RNA, 19 nt, Artificial Sequence
  Description of Artificial Sequence: Synthetic oligonucleotide
  Antisense strand to SEQ ID NO: 536245
ucacauagugcagacuguu

SEQ ID NO: 536247 - RNA, 19 nt, Artificial Sequence
  Description of Artificial Sequence: Synthetic oligonucleotide
  Sense strand starting at position 2755 of SEQ ID NO: 318093
cuguguaucccugguauuu

SEQ ID NO: 536248 - RNA, 19 nt, Artificial Sequence
  Description of Artificial Sequence: Synthetic oligonucleotide
  Antisense strand to SEQ ID NO: 536247
aaauaccagggauacacag

SEQ ID NO: 536249 - RNA, 19 nt, Artificial Sequence
  Description of Artificial Sequence: Synthetic oligonucleotide
  Sense strand starting at position 3016 of SEQ ID NO: 318093
gcaacaauggcagagcuaa

SEQ ID NO: 536250 - RNA, 19 nt, Artificial Sequence
  Description of Artificial Sequence: Synthetic oligonucleotide
  Antisense strand to SEQ ID NO: 536249
uuagcucugccauuguugc

SEQ ID NO: 536251 - RNA, 19 nt, Artificial Sequence
  Description of Artificial Sequence: Synthetic oligonucleotide
  Sense strand starting at position 3225 of SEQ ID NO: 318093
uaaauuagugccuagguau

SEQ ID NO: 536252 - RNA, 19 nt, Artificial Sequence
  Description of Artificial Sequence: Synthetic oligonucleotide
  Antisense strand to SEQ ID NO: 536251
auaccuaggcacuaauuua

SEQ ID NO: 536253 - RNA, 19 nt, Artificial Sequence
  Description of Artificial Sequence: Synthetic oligonucleotide
  Sense strand starting at position 3318 of SEQ ID NO: 318093
cuaauauggccucaugguu

SEQ ID NO: 536254 - RNA, 19 nt, Artificial Sequence
  Description of Artificial Sequence: Synthetic oligonucleotide
  Antisense strand to SEQ ID NO: 536253
aaccaugaggccauauuag

SEQ ID NO: 536255 - RNA, 19 nt, Artificial Sequence
  Description of Artificial Sequence: Synthetic oligonucleotide
  Sense strand starting at position 3489 of SEQ ID NO: 318093
gcaguuauaaggugaggag

SEQ ID NO: 536256 - RNA, 19 nt, Artificial Sequence
  Description of Artificial Sequence: Synthetic oligonucleotide
  Antisense strand to SEQ ID NO: 536255
cuccucaccuuauaacugc

SEQ ID NO: 536257 - RNA, 19 nt, Artificial Sequence
  Description of Artificial Sequence: Synthetic oligonucleotide
  Sense strand starting at position 3490 of SEQ ID NO: 318093
caguuauaaggugaggagu

SEQ ID NO: 536258 - RNA, 19 nt, Artificial Sequence
  Description of Artificial Sequence: Synthetic oligonucleotide
  Antisense strand to SEQ ID NO: 536257
acuccucaccuuauaacug

SEQ ID NO: 536259 - RNA, 19 nt, Artificial Sequence
  Description of Artificial Sequence: Synthetic oligonucleotide
  Sense strand starting at position 3514 of SEQ ID NO: 318093
gaaacuaagugaucaguga

SEQ ID NO: 536260 - RNA, 19 nt, Artificial Sequence
  Description of Artificial Sequence: Synthetic oligonucleotide
  Antisense strand to SEQ ID NO: 536259
ucacugaucacuuaguuuc

SEQ ID NO: 536261 - RNA, 19 nt, Artificial Sequence
  Description of Artificial Sequence: Synthetic oligonucleotide
  Sense strand starting at position 3534 of SEQ ID NO: 318093
uuaugaacuucuguuggau

SEQ ID NO: 536262 - RNA, 19 nt, Artificial Sequence
  Description of Artificial Sequence: Synthetic oligonucleotide
  Antisense strand to SEQ ID NO: 536261
auccaacagaaguucauaa

SEQ ID NO: 536263 - RNA, 19 nt, Artificial Sequence
  Description of Artificial Sequence: Synthetic oligonucleotide
  Sense strand starting at position 3554 of SEQ ID NO: 318093
cacugucauuagguagaau

SEQ ID NO: 536264 - RNA, 19 nt, Artificial Sequence
  Description of Artificial Sequence: Synthetic oligonucleotide
  Antisense strand to SEQ ID NO: 536263
auucuaccuaaugacagug

SEQ ID NO: 536265 - RNA, 19 nt, Artificial Sequence
  Description of Artificial Sequence: Synthetic oligonucleotide
  Sense strand starting at position 3666 of SEQ ID NO: 318093
ugauuuagcuugucccauc

SEQ ID NO: 536266 - RNA, 19 nt, Artificial Sequence
  Description of Artificial Sequence: Synthetic oligonucleotide
  Antisense strand to SEQ ID NO: 536265
gaugggacaagcuaaauca

SEQ ID NO: 536267 - RNA, 19 nt, Artificial Sequence
  Description of Artificial Sequence: Synthetic oligonucleotide
  Sense strand starting at position 3821 of SEQ ID NO: 318093
caaggaauacuucggagca

SEQ ID NO: 536268 - RNA, 19 nt, Artificial Sequence
  Description of Artificial Sequence: Synthetic oligonucleotide
  Antisense strand to SEQ ID NO: 536267
ugcuccgaaguauuccuug

SEQ ID NO: 536269 - RNA, 19 nt, Artificial Sequence
  Description of Artificial Sequence: Synthetic oligonucleotide
  Sense strand starting at position 3980 of SEQ ID NO: 318093
uuugaaagcuugguuagaa

SEQ ID NO: 536270 - RNA, 19 nt, Artificial Sequence
  Description of Artificial Sequence: Synthetic oligonucleotide
  Antisense strand to SEQ ID NO: 536269
uucuaaccaagcuuucaaa

SEQ ID NO: 536271 - RNA, 19 nt, Artificial Sequence
  Description of Artificial Sequence: Synthetic oligonucleotide
  Sense strand starting at position 3981 of SEQ ID NO: 318093
uugaaagcuugguuagaaa

SEQ ID NO: 536272 - RNA, 19 nt, Artificial Sequence
  Description of Artificial Sequence: Synthetic oligonucleotide
  Antisense strand to SEQ ID NO: 536271
uuucuaaccaagcuuucaa

SEQ ID NO: 536273 - RNA, 19 nt, Artificial Sequence
  Description of Artificial Sequence: Synthetic oligonucleotide
  Sense strand starting at position 268 of SEQ ID NO: 318094
ggugguauuggucaucuga

SEQ ID NO: 536274 - RNA, 19 nt, Artificial Sequence
  Description of Artificial Sequence: Synthetic oligonucleotide
  Antisense strand to SEQ ID NO: 536273
ucagaugaccaauaccacc

SEQ ID NO: 536275 - RNA, 19 nt, Artificial Sequence
  Description of Artificial Sequence: Synthetic oligonucleotide
  Sense strand starting at position 270 of SEQ ID NO: 318094
ugguauuggucaucugaga

SEQ ID NO: 536276 - RNA, 19 nt, Artificial Sequence
  Description of Artificial Sequence: Synthetic oligonucleotide
  Antisense strand to SEQ ID NO: 536275
ucucagaugaccaauacca

SEQ ID NO: 536277 - RNA, 19 nt, Artificial Sequence
  Description of Artificial Sequence: Synthetic oligonucleotide
  Sense strand starting at position 361 of SEQ ID NO: 318094
ugaggacagcuuuggaaau

SEQ ID NO: 536278 - RNA, 19 nt, Artificial Sequence
  Description of Artificial Sequence: Synthetic oligonucleotide
  Antisense strand to SEQ ID NO: 536277
auuuccaaagcuguccuca

SEQ ID NO: 536279 - RNA, 19 nt, Artificial Sequence
  Description of Artificial Sequence: Synthetic oligonucleotide
  Sense strand starting at position 527 of SEQ ID NO: 318094
ggaggagacuuccuguaug

SEQ ID NO: 536280 - RNA, 19 nt, Artificial Sequence
  Description of Artificial Sequence: Synthetic oligonucleotide
  Antisense strand to SEQ ID NO: 536279
cauacaggaagucuccucc

SEQ ID NO: 536281 - RNA, 19 nt, Artificial Sequence
  Description of Artificial Sequence: Synthetic oligonucleotide
  Sense strand starting at position 530 of SEQ ID NO: 318094
ggagacuuccuguauguua

SEQ ID NO: 536282 - RNA, 19 nt, Artificial Sequence
  Description of Artificial Sequence: Synthetic oligonucleotide
  Antisense strand to SEQ ID NO: 536281
uaacauacaggaagucucc

SEQ ID NO: 536283 - RNA, 19 nt, Artificial Sequence
  Description of Artificial Sequence: Synthetic oligonucleotide
  Sense strand starting at position 675 of SEQ ID NO: 318094
cagcuaaugggaugugaca

SEQ ID NO: 536284 - RNA, 19 nt, Artificial Sequence
  Description of Artificial Sequence: Synthetic oligonucleotide
  Antisense strand to SEQ ID NO: 536283
ugucacaucccauuagcug

SEQ ID NO: 536285 - RNA, 19 nt, Artificial Sequence
  Description of Artificial Sequence: Synthetic oligonucleotide
  Sense strand starting at position 677 of SEQ ID NO: 318094
gcuaaugggaugugacaau

SEQ ID NO: 536286 - RNA, 19 nt, Artificial Sequence
  Description of Artificial Sequence: Synthetic oligonucleotide
  Antisense strand to SEQ ID NO: 536285
auugucacaucccauuagc

SEQ ID NO: 536287 - RNA, 19 nt, Artificial Sequence
  Description of Artificial Sequence: Synthetic oligonucleotide
  Sense strand starting at position 881 of SEQ ID NO: 318094
ccaggccuugcaugagaaa

SEQ ID NO: 536288 - RNA, 19 nt, Artificial Sequence
  Description of Artificial Sequence: Synthetic oligonucleotide
  Antisense strand to SEQ ID NO: 536287
uuucucaugcaaggccugg

SEQ ID NO: 536289 - RNA, 19 nt, Artificial Sequence
  Description of Artificial Sequence: Synthetic oligonucleotide
  Sense strand starting at position 1146 of SEQ ID NO: 318094
ggagguauagcgcauagau

SEQ ID NO: 536290 - RNA, 19 nt, Artificial Sequence
  Description of Artificial Sequence: Synthetic oligonucleotide
  Antisense strand to SEQ ID NO: 536289
aucuaugcgcuauaccucc

SEQ ID NO: 536291 - RNA, 19 nt, Artificial Sequence
  Description of Artificial Sequence: Synthetic oligonucleotide
  Sense strand starting at position 1148 of SEQ ID NO: 318094
agguauagcgcauagauca

SEQ ID NO: 536292 - RNA, 19 nt, Artificial Sequence
  Description of Artificial Sequence: Synthetic oligonucleotide
  Antisense strand to SEQ ID NO: 536291
ugaucuaugcgcuauaccu

SEQ ID NO: 536293 - RNA, 19 nt, Artificial Sequence
  Description of Artificial Sequence: Synthetic oligonucleotide
  Sense strand starting at position 1219 of SEQ ID NO: 318094
acucuagaguuaucaguaa

SEQ ID NO: 536294 - RNA, 19 nt, Artificial Sequence
  Description of Artificial Sequence: Synthetic oligonucleotide
  Antisense strand to SEQ ID NO: 536293
uuacugauaacucuagagu

SEQ ID NO: 536295 - RNA, 19 nt, Artificial Sequence
  Description of Artificial Sequence: Synthetic oligonucleotide
  Sense strand starting at position 1227 of SEQ ID NO: 318094
guuaucaguaaaugaguua

SEQ ID NO: 536296 - RNA, 19 nt, Artificial Sequence
  Description of Artificial Sequence: Synthetic oligonucleotide
  Antisense strand to SEQ ID NO: 536295
uaacucauuuacugauaac

SEQ ID NO: 536297 - RNA, 19 nt, Artificial Sequence
  Description of Artificial Sequence: Synthetic oligonucleotide
  Sense strand starting at position 1256 of SEQ ID NO: 318094
ugauaugagcuacagcaau

SEQ ID NO: 536298 - RNA, 19 nt, Artificial Sequence
  Description of Artificial Sequence: Synthetic oligonucleotide
  Antisense strand to SEQ ID NO: 536297
auugcuguagcucauauca

SEQ ID NO: 536299 - RNA, 19 nt, Artificial Sequence
  Description of Artificial Sequence: Synthetic oligonucleotide
  Sense strand starting at position 1375 of SEQ ID NO: 318094
ucucaagaggcauaaaguu

SEQ ID NO: 536300 - RNA, 19 nt, Artificial Sequence
  Description of Artificial Sequence: Synthetic oligonucleotide
  Antisense strand to SEQ ID NO: 536299
aacuuuaugccucuugaga

SEQ ID NO: 536301 - RNA, 19 nt, Artificial Sequence
  Description of Artificial Sequence: Synthetic oligonucleotide
  Sense strand starting at position 1449 of SEQ ID NO: 318094
gggaauaauuuguaacaau

SEQ ID NO: 536302 - RNA, 19 nt, Artificial Sequence
  Description of Artificial Sequence: Synthetic oligonucleotide
  Antisense strand to SEQ ID NO: 536301
auuguuacaaauuauuccc

SEQ ID NO: 536303 - RNA, 19 nt, Artificial Sequence
  Description of Artificial Sequence: Synthetic oligonucleotide
  Sense strand starting at position 1697 of SEQ ID NO: 318094
uuuggaaaguucuuaaaga

SEQ ID NO: 536304 - RNA, 19 nt, Artificial Sequence
  Description of Artificial Sequence: Synthetic oligonucleotide
  Antisense strand to SEQ ID NO: 536303
ucuuuaagaacuuuccaaa

SEQ ID NO: 536305 - RNA, 19 nt, Artificial Sequence
  Description of Artificial Sequence: Synthetic oligonucleotide
  Sense strand starting at position 1893 of SEQ ID NO: 318094
ggaaguugauguccaggau

SEQ ID NO: 536306 - RNA, 19 nt, Artificial Sequence
  Description of Artificial Sequence: Synthetic oligonucleotide
  Antisense strand to SEQ ID NO: 536305
auccuggacaucaacuucc

SEQ ID NO: 536307 - RNA, 19 nt, Artificial Sequence
  Description of Artificial Sequence: Synthetic oligonucleotide
  Sense strand starting at position 1971 of SEQ ID NO: 318094
ggaccauggccagaagcau

SEQ ID NO: 536308 - RNA, 19 nt, Artificial Sequence
  Description of Artificial Sequence: Synthetic oligonucleotide
  Antisense strand to SEQ ID NO: 536307
augcuucuggccauggucc

SEQ ID NO: 536309 - RNA, 19 nt, Artificial Sequence
  Description of Artificial Sequence: Synthetic oligonucleotide
  Sense strand starting at position 2222 of SEQ ID NO: 318094
ugaguacugaaaugcugaa

SEQ ID NO: 536310 - RNA, 19 nt, Artificial Sequence
  Description of Artificial Sequence: Synthetic oligonucleotide
  Antisense strand to SEQ ID NO: 536309
uucagcauuucaguacuca

SEQ ID NO: 536311 - RNA, 19 nt, Artificial Sequence
  Description of Artificial Sequence: Synthetic oligonucleotide
  Sense strand starting at position 2284 of SEQ ID NO: 318094
cagggauucugguugugag

SEQ ID NO: 536312 - RNA, 19 nt, Artificial Sequence
  Description of Artificial Sequence: Synthetic oligonucleotide
  Antisense strand to SEQ ID NO: 536311
cucacaaccagaaucccug

SEQ ID NO: 536313 - RNA, 19 nt, Artificial Sequence
  Description of Artificial Sequence: Synthetic oligonucleotide
  Sense strand starting at position 2285 of SEQ ID NO: 318094
agggauucugguugugaga

SEQ ID NO: 536314 - RNA, 19 nt, Artificial Sequence
  Description of Artificial Sequence: Synthetic oligonucleotide
  Antisense strand to SEQ ID NO: 536313
ucucacaaccagaaucccu

SEQ ID NO: 536315 - RNA, 19 nt, Artificial Sequence
  Description of Artificial Sequence: Synthetic oligonucleotide
  Sense strand starting at position 2294 of SEQ ID NO: 318094
gguugugagaguuagaaua

SEQ ID NO: 536316 - RNA, 19 nt, Artificial Sequence
  Description of Artificial Sequence: Synthetic oligonucleotide
  Antisense strand to SEQ ID NO: 536315
uauucuaacucucacaacc

SEQ ID NO: 536317 - RNA, 19 nt, Artificial Sequence
  Description of Artificial Sequence: Synthetic oligonucleotide
  Sense strand starting at position 2546 of SEQ ID NO: 318094
ggaugaaguuugccaccua

SEQ ID NO: 536318 - RNA, 19 nt, Artificial Sequence
  Description of Artificial Sequence: Synthetic oligonucleotide
  Antisense strand to SEQ ID NO: 536317
uagguggcaaacuucaucc

SEQ ID NO: 536319 - RNA, 19 nt, Artificial Sequence
  Description of Artificial Sequence: Synthetic oligonucleotide
  Sense strand starting at position 2632 of SEQ ID NO: 318094
acaagaaugcggcaaccau

SEQ ID NO: 536320 - RNA, 19 nt, Artificial Sequence
  Description of Artificial Sequence: Synthetic oligonucleotide
  Antisense strand to SEQ ID NO: 536319
augguugccgcauucuugu

SEQ ID NO: 536321 - RNA, 19 nt, Artificial Sequence
  Description of Artificial Sequence: Synthetic oligonucleotide
  Sense strand starting at position 2640 of SEQ ID NO: 318094
gcggcaaccaugcuuguua

SEQ ID NO: 536322 - RNA, 19 nt, Artificial Sequence
  Description of Artificial Sequence: Synthetic oligonucleotide
  Antisense strand to SEQ ID NO: 536321
uaacaagcaugguugccgc

SEQ ID NO: 536323 - RNA, 19 nt, Artificial Sequence
  Description of Artificial Sequence: Synthetic oligonucleotide
  Sense strand starting at position 2670 of SEQ ID NO: 318094
gaggacuccucaguaucuu

SEQ ID NO: 536324 - RNA, 19 nt, Artificial Sequence
  Description of Artificial Sequence: Synthetic oligonucleotide
  Antisense strand to SEQ ID NO: 536323
aagauacugaggaguccuc

SEQ ID NO: 536325 - RNA, 19 nt, Artificial Sequence
  Description of Artificial Sequence: Synthetic oligonucleotide
  Sense strand starting at position 2671 of SEQ ID NO: 318094
aggacuccucaguaucuuu

SEQ ID NO: 536326 - RNA, 19 nt, Artificial Sequence
  Description of Artificial Sequence: Synthetic oligonucleotide
  Antisense strand to SEQ ID NO: 536325
aaagauacugaggaguccu

SEQ ID NO: 536327 - RNA, 19 nt, Artificial Sequence
  Description of Artificial Sequence: Synthetic oligonucleotide
  Sense strand starting at position 2676 of SEQ ID NO: 318094
uccucaguaucuuuggaga

SEQ ID NO: 536328 - RNA, 19 nt, Artificial Sequence
  Description of Artificial Sequence: Synthetic oligonucleotide
  Antisense strand to SEQ ID NO: 536327
ucuccaaagauacugagga

SEQ ID NO: 536329 - RNA, 19 nt, Artificial Sequence
  Description of Artificial Sequence: Synthetic oligonucleotide
  Sense strand starting at position 2741 of SEQ ID NO: 318094
agaguauaguagcuaacau

SEQ ID NO: 536330 - RNA, 19 nt, Artificial Sequence
  Description of Artificial Sequence: Synthetic oligonucleotide
  Antisense strand to SEQ ID NO: 536329
auguuagcuacuauacucu

SEQ ID NO: 536331 - RNA, 19 nt, Artificial Sequence
  Description of Artificial Sequence: Synthetic oligonucleotide
  Sense strand starting at position 3243 of SEQ ID NO: 318094
uguguuuaaucacuaugag

SEQ ID NO: 536332 - RNA, 19 nt, Artificial Sequence
  Description of Artificial Sequence: Synthetic oligonucleotide
  Antisense strand to SEQ ID NO: 536331
cucauagugauuaaacaca

SEQ ID NO: 536333 - RNA, 19 nt, Artificial Sequence
  Description of Artificial Sequence: Synthetic oligonucleotide
  Sense strand starting at position 3244 of SEQ ID NO: 318094
guguuuaaucacuaugagu

SEQ ID NO: 536334 - RNA, 19 nt, Artificial Sequence
  Description of Artificial Sequence: Synthetic oligonucleotide
  Antisense strand to SEQ ID NO: 536333
acucauagugauuaaacac

SEQ ID NO: 536335 - RNA, 19 nt, Artificial Sequence
  Description of Artificial Sequence: Synthetic oligonucleotide
  Sense strand starting at position 3246 of SEQ ID NO: 318094
guuuaaucacuaugaguca

SEQ ID NO: 536336 - RNA, 19 nt, Artificial Sequence
  Description of Artificial Sequence: Synthetic oligonucleotide
  Antisense strand to SEQ ID NO: 536335
ugacucauagugauuaaac

SEQ ID NO: 536337 - RNA, 19 nt, Artificial Sequence
  Description of Artificial Sequence: Synthetic oligonucleotide
  Sense strand starting at position 3338 of SEQ ID NO: 318094
cauagagaggcagguaauu

SEQ ID NO: 536338 - RNA, 19 nt, Artificial Sequence
  Description of Artificial Sequence: Synthetic oligonucleotide
  Antisense strand to SEQ ID NO: 536337
aauuaccugccucucuaug

SEQ ID NO: 536339 - RNA, 19 nt, Artificial Sequence
  Description of Artificial Sequence: Synthetic oligonucleotide
  Sense strand starting at position 3488 of SEQ ID NO: 318094
auauauacuccagggcuuu

SEQ ID NO: 536340 - RNA, 19 nt, Artificial Sequence
  Description of Artificial Sequence: Synthetic oligonucleotide
  Antisense strand to SEQ ID NO: 536339
aaagcccuggaguauauau

SEQ ID NO: 536341 - RNA, 19 nt, Artificial Sequence
  Description of Artificial Sequence: Synthetic oligonucleotide
  Sense strand starting at position 3659 of SEQ ID NO: 318094
ucugauuucuaggauacau

SEQ ID NO: 536342 - RNA, 19 nt, Artificial Sequence
  Description of Artificial Sequence: Synthetic oligonucleotide
  Antisense strand to SEQ ID NO: 536341
auguauccuagaaaucaga

SEQ ID NO: 536343 - RNA, 19 nt, Artificial Sequence
  Description of Artificial Sequence: Synthetic oligonucleotide
  Sense strand starting at position 3671 of SEQ ID NO: 318094
gauacauauuuggagguau

SEQ ID NO: 536344 - RNA, 19 nt, Artificial Sequence
  Description of Artificial Sequence: Synthetic oligonucleotide
  Antisense strand to SEQ ID NO: 536343
auaccuccaaauauguauc

SEQ ID NO: 536345 - RNA, 19 nt, Artificial Sequence
  Description of Artificial Sequence: Synthetic oligonucleotide
  Sense strand starting at position 3689 of SEQ ID NO: 318094
ugugcagguaaguaaauau

SEQ ID NO: 536346 - RNA, 19 nt, Artificial Sequence
  Description of Artificial Sequence: Synthetic oligonucleotide
  Antisense strand to SEQ ID NO: 536345
auauuuacuuaccugcaca

SEQ ID NO: 536347 - RNA, 19 nt, Artificial Sequence
  Description of Artificial Sequence: Synthetic oligonucleotide
  Sense strand starting at position 3808 of SEQ ID NO: 318094
acuguaagaguauggcaau

SEQ ID NO: 536348 - RNA, 19 nt, Artificial Sequence
  Description of Artificial Sequence: Synthetic oligonucleotide
  Antisense strand to SEQ ID NO: 536347
auugccauacucuuacagu

SEQ ID NO: 536349 - RNA, 19 nt, Artificial Sequence
  Description of Artificial Sequence: Synthetic oligonucleotide
  Sense strand starting at position 3814 of SEQ ID NO: 318094
agaguauggcaauacuguu

SEQ ID NO: 536350 - RNA, 19 nt, Artificial Sequence
  Description of Artificial Sequence: Synthetic oligonucleotide
  Antisense strand to SEQ ID NO: 536349
aacaguauugccauacucu

SEQ ID NO: 536351 - RNA, 19 nt, Artificial Sequence
  Description of Artificial Sequence: Synthetic oligonucleotide
  Sense strand starting at position 3850 of SEQ ID NO: 318094
guuucuuaggagugaugau

SEQ ID NO: 536352 - RNA, 19 nt, Artificial Sequence
  Description of Artificial Sequence: Synthetic oligonucleotide
  Antisense strand to SEQ ID NO: 536351
aucaucacuccuaagaaac

SEQ ID NO: 536353 - RNA, 19 nt, Artificial Sequence
  Description of Artificial Sequence: Synthetic oligonucleotide
  Sense strand starting at position 406 of SEQ ID NO: 318095
gucguaguaaaucacauua

SEQ ID NO: 536354 - RNA, 19 nt, Artificial Sequence
  Description of Artificial Sequence: Synthetic oligonucleotide
  Antisense strand to SEQ ID NO: 536353
uaaugugauuuacuacgac

SEQ ID NO: 536355 - RNA, 19 nt, Artificial Sequence
  Description of Artificial Sequence: Synthetic oligonucleotide
  Sense strand starting at position 918 of SEQ ID NO: 318095
gagcaaugccggcaucaua

SEQ ID NO: 536356 - RNA, 19 nt, Artificial Sequence
  Description of Artificial Sequence: Synthetic oligonucleotide
  Antisense strand to SEQ ID NO: 536355
uaugaugccggcauugcuc

SEQ ID NO: 536357 - RNA, 19 nt, Artificial Sequence
  Description of Artificial Sequence: Synthetic oligonucleotide
  Sense strand starting at position 994 of SEQ ID NO: 318095
auaguugagacuugggacu

SEQ ID NO: 536358 - RNA, 19 nt, Artificial Sequence
  Description of Artificial Sequence: Synthetic oligonucleotide
  Antisense strand to SEQ ID NO: 536357
agucccaagucucaacuau

SEQ ID NO: 536359 - RNA, 19 nt, Artificial Sequence
  Description of Artificial Sequence: Synthetic oligonucleotide
  Sense strand starting at position 1129 of SEQ ID NO: 318095
uucccuaaacccugggauu

SEQ ID NO: 536360 - RNA, 19 nt, Artificial Sequence
  Description of Artificial Sequence: Synthetic oligonucleotide
  Antisense strand to SEQ ID NO: 536359
aaucccaggguuuagggaa

SEQ ID NO: 536361 - RNA, 19 nt, Artificial Sequence
  Description of Artificial Sequence: Synthetic oligonucleotide
  Sense strand starting at position 1271 of SEQ ID NO: 318095
agaagaagucauugcuauc

SEQ ID NO: 536362 - RNA, 19 nt, Artificial Sequence
  Description of Artificial Sequence: Synthetic oligonucleotide
  Antisense strand to SEQ ID NO: 536361
gauagcaaugacuucuucu

SEQ ID NO: 536363 - RNA, 19 nt, Artificial Sequence
  Description of Artificial Sequence: Synthetic oligonucleotide
  Sense strand starting at position 1387 of SEQ ID NO: 318095
uuguguguaccugaguuaa

SEQ ID NO: 536364 - RNA, 19 nt, Artificial Sequence
  Description of Artificial Sequence: Synthetic oligonucleotide
  Antisense strand to SEQ ID NO: 536363
uuaacucagguacacacaa

SEQ ID NO: 536365 - RNA, 19 nt, Artificial Sequence
  Description of Artificial Sequence: Synthetic oligonucleotide
  Sense strand starting at position 1560 of SEQ ID NO: 318095
uuagccuaaguguacaaua

SEQ ID NO: 536366 - RNA, 19 nt, Artificial Sequence
  Description of Artificial Sequence: Synthetic oligonucleotide
  Antisense strand to SEQ ID NO: 536365
uauuguacacuuaggcuaa

SEQ ID NO: 536367 - RNA, 19 nt, Artificial Sequence
  Description of Artificial Sequence: Synthetic oligonucleotide
  Sense strand starting at position 1562 of SEQ ID NO: 318095
agccuaaguguacaauaau

SEQ ID NO: 536368 - RNA, 19 nt, Artificial Sequence
  Description of Artificial Sequence: Synthetic oligonucleotide
  Antisense strand to SEQ ID NO: 536367
auuauuguacacuuaggcu

SEQ ID NO: 536369 - RNA, 19 nt, Artificial Sequence
  Description of Artificial Sequence: Synthetic oligonucleotide
  Sense strand starting at position 1714 of SEQ ID NO: 318095
guaccuuucuaaguuuaga

SEQ ID NO: 536370 - RNA, 19 nt, Artificial Sequence
  Description of Artificial Sequence: Synthetic oligonucleotide
  Antisense strand to SEQ ID NO: 536369
ucuaaacuuagaaagguac

SEQ ID NO: 536371 - RNA, 19 nt, Artificial Sequence
  Description of Artificial Sequence: Synthetic oligonucleotide
  Sense strand starting at position 2063 of SEQ ID NO: 318095
augaccuaguuaucuauau

SEQ ID NO: 536372 - RNA, 19 nt, Artificial Sequence
  Description of Artificial Sequence: Synthetic oligonucleotide
  Antisense strand to SEQ ID NO: 536371
auauagauaacuaggucau

SEQ ID NO: 536373 - RNA, 19 nt, Artificial Sequence
  Description of Artificial Sequence: Synthetic oligonucleotide
  Sense strand starting at position 2064 of SEQ ID NO: 318095
ugaccuaguuaucuauauu

SEQ ID NO: 536374 - RNA, 19 nt, Artificial Sequence
  Description of Artificial Sequence: Synthetic oligonucleotide
  Antisense strand to SEQ ID NO: 536373
aauauagauaacuagguca

SEQ ID NO: 536375 - RNA, 19 nt, Artificial Sequence
  Description of Artificial Sequence: Synthetic oligonucleotide
  Sense strand starting at position 2094 of SEQ ID NO: 318095
ggagacaauacgugaacau

SEQ ID NO: 536376 - RNA, 19 nt, Artificial Sequence
  Description of Artificial Sequence: Synthetic oligonucleotide
  Antisense strand to SEQ ID NO: 536375
auguucacguauugucucc

SEQ ID NO: 536377 - RNA, 19 nt, Artificial Sequence
  Description of Artificial Sequence: Synthetic oligonucleotide
  Sense strand starting at position 2103 of SEQ ID NO: 318095
acgugaacaucuuuaguga

SEQ ID NO: 536378 - RNA, 19 nt, Artificial Sequence
  Description of Artificial Sequence: Synthetic oligonucleotide
  Antisense strand to SEQ ID NO: 536377
ucacuaaagauguucacgu

SEQ ID NO: 536379 - RNA, 19 nt, Artificial Sequence
  Description of Artificial Sequence: Synthetic oligonucleotide
  Sense strand starting at position 2104 of SEQ ID NO: 318095
cgugaacaucuuuagugaa

SEQ ID NO: 536380 - RNA, 19 nt, Artificial Sequence
  Description of Artificial Sequence: Synthetic oligonucleotide
  Antisense strand to SEQ ID NO: 536379
uucacuaaagauguucacg

SEQ ID NO: 536381 - RNA, 19 nt, Artificial Sequence
  Description of Artificial Sequence: Synthetic oligonucleotide
  Sense strand starting at position 2106 of SEQ ID NO: 318095
ugaacaucuuuagugaaau

SEQ ID NO: 536382 - RNA, 19 nt, Artificial Sequence
  Description of Artificial Sequence: Synthetic oligonucleotide
  Antisense strand to SEQ ID NO: 536381
auuucacuaaagauguuca

SEQ ID NO: 536383 - RNA, 19 nt, Artificial Sequence
  Description of Artificial Sequence: Synthetic oligonucleotide
  Sense strand starting at position 2175 of SEQ ID NO: 318095
aagcucuggucucuagaua

SEQ ID NO: 536384 - RNA, 19 nt, Artificial Sequence
  Description of Artificial Sequence: Synthetic oligonucleotide
  Antisense strand to SEQ ID NO: 536383
uaucuagagaccagagcuu

SEQ ID NO: 536385 - RNA, 19 nt, Artificial Sequence
  Description of Artificial Sequence: Synthetic oligonucleotide
  Sense strand starting at position 2176 of SEQ ID NO: 318095
agcucuggucucuagauaa

SEQ ID NO: 536386 - RNA, 19 nt, Artificial Sequence
  Description of Artificial Sequence: Synthetic oligonucleotide
  Antisense strand to SEQ ID NO: 536385
uuaucuagagaccagagcu

SEQ ID NO: 536387 - RNA, 19 nt, Artificial Sequence
  Description of Artificial Sequence: Synthetic oligonucleotide
  Sense strand starting at position 2280 of SEQ ID NO: 318095
gggcucacuccucaaccaa

SEQ ID NO: 536388 - RNA, 19 nt, Artificial Sequence
  Description of Artificial Sequence: Synthetic oligonucleotide
  Antisense strand to SEQ ID NO: 536387
uugguugaggagugagccc

SEQ ID NO: 536389 - RNA, 19 nt, Artificial Sequence
  Description of Artificial Sequence: Synthetic oligonucleotide
  Sense strand starting at position 2299 of SEQ ID NO: 318095
gaaucucuauguucccgau

SEQ ID NO: 536390 - RNA, 19 nt, Artificial Sequence
  Description of Artificial Sequence: Synthetic oligonucleotide
  Antisense strand to SEQ ID NO: 536389
aucgggaacauagagauuc

SEQ ID NO: 536391 - RNA, 19 nt, Artificial Sequence
  Description of Artificial Sequence: Synthetic oligonucleotide
  Sense strand starting at position 2301 of SEQ ID NO: 318095
aucucuauguucccgauau

SEQ ID NO: 536392 - RNA, 19 nt, Artificial Sequence
  Description of Artificial Sequence: Synthetic oligonucleotide
  Antisense strand to SEQ ID NO: 536391
auaucgggaacauagagau

SEQ ID NO: 536393 - RNA, 19 nt, Artificial Sequence
  Description of Artificial Sequence: Synthetic oligonucleotide
  Sense strand starting at position 2305 of SEQ ID NO: 318095
cuauguucccgauauccuu

SEQ ID NO: 536394 - RNA, 19 nt, Artificial Sequence
  Description of Artificial Sequence: Synthetic oligonucleotide
  Antisense strand to SEQ ID NO: 536393
aaggauaucgggaacauag

SEQ ID NO: 536395 - RNA, 19 nt, Artificial Sequence
  Description of Artificial Sequence: Synthetic oligonucleotide
  Sense strand starting at position 2376 of SEQ ID NO: 318095
cuguuaauagcuuacugua

SEQ ID NO: 536396 - RNA, 19 nt, Artificial Sequence
  Description of Artificial Sequence: Synthetic oligonucleotide
  Antisense strand to SEQ ID NO: 536395
uacaguaagcuauuaacag

SEQ ID NO: 536397 - RNA, 19 nt, Artificial Sequence
  Description of Artificial Sequence: Synthetic oligonucleotide
  Sense strand starting at position 2671 of SEQ ID NO: 318095
cagcuuggucaauaagagu

SEQ ID NO: 536398 - RNA, 19 nt, Artificial Sequence
  Description of Artificial Sequence: Synthetic oligonucleotide
  Antisense strand to SEQ ID NO: 536397
acucuuauugaccaagcug

SEQ ID NO: 536399 - RNA, 19 nt, Artificial Sequence
  Description of Artificial Sequence: Synthetic oligonucleotide
  Sense strand starting at position 2850 of SEQ ID NO: 318095
cugggcuacgagugaaauu

SEQ ID NO: 536400 - RNA, 19 nt, Artificial Sequence
  Description of Artificial Sequence: Synthetic oligonucleotide
  Antisense strand to SEQ ID NO: 536399
aauuucacucguagcccag

SEQ ID NO: 536401 - RNA, 19 nt, Artificial Sequence
  Description of Artificial Sequence: Synthetic oligonucleotide
  Sense strand starting at position 2891 of SEQ ID NO: 318095
aauaauggcuaguuggaga

SEQ ID NO: 536402 - RNA, 19 nt, Artificial Sequence
  Description of Artificial Sequence: Synthetic oligonucleotide
  Antisense strand to SEQ ID NO: 536401
ucuccaacuagccauuauu

SEQ ID NO: 536403 - RNA, 19 nt, Artificial Sequence
  Description of Artificial Sequence: Synthetic oligonucleotide
  Sense strand starting at position 2952 of SEQ ID NO: 318095
gguuacacauaaguuaaua

SEQ ID NO: 536404 - RNA, 19 nt, Artificial Sequence
  Description of Artificial Sequence: Synthetic oligonucleotide
  Antisense strand to SEQ ID NO: 536403
uauuaacuuauguguaacc

SEQ ID NO: 536405 - RNA, 19 nt, Artificial Sequence
  Description of Artificial Sequence: Synthetic oligonucleotide
  Sense strand starting at position 3038 of SEQ ID NO: 318095
caaugucaggaagguugaa

SEQ ID NO: 536406 - RNA, 19 nt, Artificial Sequence
  Description of Artificial Sequence: Synthetic oligonucleotide
  Antisense strand to SEQ ID NO: 536405
uucaaccuuccugacauug

SEQ ID NO: 536407 - RNA, 19 nt, Artificial Sequence
  Description of Artificial Sequence: Synthetic oligonucleotide
  Sense strand starting at position 3050 of SEQ ID NO: 318095
gguugaaauacacaacguu

SEQ ID NO: 536408 - RNA, 19 nt, Artificial Sequence
  Description of Artificial Sequence: Synthetic oligonucleotide
  Antisense strand to SEQ ID NO: 536407
aacguuguguauuucaacc

SEQ ID NO: 536409 - RNA, 19 nt, Artificial Sequence
  Description of Artificial Sequence: Synthetic oligonucleotide
  Sense strand starting at position 3104 of SEQ ID NO: 318095
auaugucagcguugaagag

SEQ ID NO: 536410 - RNA, 19 nt, Artificial Sequence
  Description of Artificial Sequence: Synthetic oligonucleotide
  Antisense strand to SEQ ID NO: 536409
cucuucaacgcugacauau

SEQ ID NO: 536411 - RNA, 19 nt, Artificial Sequence
  Description of Artificial Sequence: Synthetic oligonucleotide
  Sense strand starting at position 3105 of SEQ ID NO: 318095
uaugucagcguugaagaga

SEQ ID NO: 536412 - RNA, 19 nt, Artificial Sequence
  Description of Artificial Sequence: Synthetic oligonucleotide
  Antisense strand to SEQ ID NO: 536411
ucucuucaacgcugacaua

SEQ ID NO: 536413 - RNA, 19 nt, Artificial Sequence
  Description of Artificial Sequence: Synthetic oligonucleotide
  Sense strand starting at position 3116 of SEQ ID NO: 318095
ugaagagagaccugugcua

SEQ ID NO: 536414 - RNA, 19 nt, Artificial Sequence
  Description of Artificial Sequence: Synthetic oligonucleotide
  Antisense strand to SEQ ID NO: 536413
uagcacaggucucucuuca

SEQ ID NO: 536415 - RNA, 19 nt, Artificial Sequence
  Description of Artificial Sequence: Synthetic oligonucleotide
  Sense strand starting at position 3118 of SEQ ID NO: 318095
aagagagaccugugcuaaa

SEQ ID NO: 536416 - RNA, 19 nt, Artificial Sequence
  Description of Artificial Sequence: Synthetic oligonucleotide
  Antisense strand to SEQ ID NO: 536415
uuuagcacaggucucucuu

SEQ ID NO: 536417 - RNA, 19 nt, Artificial Sequence
  Description of Artificial Sequence: Synthetic oligonucleotide
  Sense strand starting at position 3201 of SEQ ID NO: 318095
aagagugugcauugaaguc

SEQ ID NO: 536418 - RNA, 19 nt, Artificial Sequence
  Description of Artificial Sequence: Synthetic oligonucleotide
  Antisense strand to SEQ ID NO: 536417
gacuucaaugcacacucuu

SEQ ID NO: 536419 - RNA, 19 nt, Artificial Sequence
  Description of Artificial Sequence: Synthetic oligonucleotide
  Sense strand starting at position 3298 of SEQ ID NO: 318095
caucuaaaguggucagaga

SEQ ID NO: 536420 - RNA, 19 nt, Artificial Sequence
  Description of Artificial Sequence: Synthetic oligonucleotide
  Antisense strand to SEQ ID NO: 536419
ucucugaccacuuuagaug

SEQ ID NO: 536421 - RNA, 19 nt, Artificial Sequence
  Description of Artificial Sequence: Synthetic oligonucleotide
  Sense strand starting at position 3374 of SEQ ID NO: 318095
uauggugucccagaaguau

SEQ ID NO: 536422 - RNA, 19 nt, Artificial Sequence
  Description of Artificial Sequence: Synthetic oligonucleotide
  Antisense strand to SEQ ID NO: 536421
auacuucugggacaccaua

SEQ ID NO: 536423 - RNA, 19 nt, Artificial Sequence
  Description of Artificial Sequence: Synthetic oligonucleotide
  Sense strand starting at position 3378 of SEQ ID NO: 318095
gugucccagaaguauaaga

SEQ ID NO: 536424 - RNA, 19 nt, Artificial Sequence
  Description of Artificial Sequence: Synthetic oligonucleotide
  Antisense strand to SEQ ID NO: 536423
ucuuauacuucugggacac

SEQ ID NO: 536425 - RNA, 19 nt, Artificial Sequence
  Description of Artificial Sequence: Synthetic oligonucleotide
  Sense strand starting at position 3383 of SEQ ID NO: 318095
ccagaaguauaagaagaaa

SEQ ID NO: 536426 - RNA, 19 nt, Artificial Sequence
  Description of Artificial Sequence: Synthetic oligonucleotide
  Antisense strand to SEQ ID NO: 536425
uuucuucuuauacuucugg

SEQ ID NO: 536427 - RNA, 19 nt, Artificial Sequence
  Description of Artificial Sequence: Synthetic oligonucleotide
  Sense strand starting at position 3663 of SEQ ID NO: 318095
uacucaugagauugaagug

SEQ ID NO: 536428 - RNA, 19 nt, Artificial Sequence
  Description of Artificial Sequence: Synthetic oligonucleotide
  Antisense strand to SEQ ID NO: 536427
cacuucaaucucaugagua

SEQ ID NO: 536429 - RNA, 19 nt, Artificial Sequence
  Description of Artificial Sequence: Synthetic oligonucleotide
  Sense strand starting at position 3794 of SEQ ID NO: 318095
agaggaaucuaagaaucua

SEQ ID NO: 536430 - RNA, 19 nt, Artificial Sequence
  Description of Artificial Sequence: Synthetic oligonucleotide
  Antisense strand to SEQ ID NO: 536429
uagauucuuagauuccucu

SEQ ID NO: 536431 - RNA, 19 nt, Artificial Sequence
  Description of Artificial Sequence: Synthetic oligonucleotide
  Sense strand starting at position 3862 of SEQ ID NO: 318095
guggcucacccauauaauu

SEQ ID NO: 536432 - RNA, 19 nt, Artificial Sequence
  Description of Artificial Sequence: Synthetic oligonucleotide
  Antisense strand to SEQ ID NO: 536431
aauuauaugggugagccac

SEQ ID NO: 536433 - RNA, 19 nt, Artificial Sequence
  Description of Artificial Sequence: Synthetic oligonucleotide
  Sense strand starting at position 36 of SEQ ID NO: 318096
cuggauugagccugagauc

SEQ ID NO: 536434 - RNA, 19 nt, Artificial Sequence
  Description of Artificial Sequence: Synthetic oligonucleotide
  Antisense strand to SEQ ID NO: 536433
gaucucaggcucaauccag

SEQ ID NO: 536435 - RNA, 19 nt, Artificial Sequence
  Description of Artificial Sequence: Synthetic oligonucleotide
  Sense strand starting at position 144 of SEQ ID NO: 318096
agcuuauaacuguggacuu

SEQ ID NO: 536436 - RNA, 19 nt, Artificial Sequence
  Description of Artificial Sequence: Synthetic oligonucleotide
  Antisense strand to SEQ ID NO: 536435
aaguccacaguuauaagcu

SEQ ID NO: 536437 - RNA, 19 nt, Artificial Sequence
  Description of Artificial Sequence: Synthetic oligonucleotide
  Sense strand starting at position 146 of SEQ ID NO: 318096
cuuauaacuguggacuuau

SEQ ID NO: 536438 - RNA, 19 nt, Artificial Sequence
  Description of Artificial Sequence: Synthetic oligonucleotide
  Antisense strand to SEQ ID NO: 536437
auaaguccacaguuauaag

SEQ ID NO: 536439 - RNA, 19 nt, Artificial Sequence
  Description of Artificial Sequence: Synthetic oligonucleotide
  Sense strand starting at position 155 of SEQ ID NO: 318096
guggacuuaucuguaauaa

SEQ ID NO: 536440 - RNA, 19 nt, Artificial Sequence
  Description of Artificial Sequence: Synthetic oligonucleotide
  Antisense strand to SEQ ID NO: 536439
uuauuacagauaaguccac

SEQ ID NO: 536441 - RNA, 19 nt, Artificial Sequence
  Description of Artificial Sequence: Synthetic oligonucleotide
  Sense strand starting at position 165 of SEQ ID NO: 318096
cuguaauaagucugauagu

SEQ ID NO: 536442 - RNA, 19 nt, Artificial Sequence
  Description of Artificial Sequence: Synthetic oligonucleotide
  Antisense strand to SEQ ID NO: 536441
acuaucagacuuauuacag

SEQ ID NO: 536443 - RNA, 19 nt, Artificial Sequence
  Description of Artificial Sequence: Synthetic oligonucleotide
  Sense strand starting at position 171 of SEQ ID NO: 318096
uaagucugauagucagcaa

SEQ ID NO: 536444 - RNA, 19 nt, Artificial Sequence
  Description of Artificial Sequence: Synthetic oligonucleotide
  Antisense strand to SEQ ID NO: 536443
uugcugacuaucagacuua

SEQ ID NO: 536445 - RNA, 19 nt, Artificial Sequence
  Description of Artificial Sequence: Synthetic oligonucleotide
  Sense strand starting at position 238 of SEQ ID NO: 318096
ccuuaaacgcucugaaauu

SEQ ID NO: 536446 - RNA, 19 nt, Artificial Sequence
  Description of Artificial Sequence: Synthetic oligonucleotide
  Antisense strand to SEQ ID NO: 536445
aauuucagagcguuuaagg

SEQ ID NO: 536447 - RNA, 19 nt, Artificial Sequence
  Description of Artificial Sequence: Synthetic oligonucleotide
  Sense strand starting at position 267 of SEQ ID NO: 318096
auuugaagcugauaaagaa

SEQ ID NO: 536448 - RNA, 19 nt, Artificial Sequence
  Description of Artificial Sequence: Synthetic oligonucleotide
  Antisense strand to SEQ ID NO: 536447
uucuuuaucagcuucaaau

SEQ ID NO: 536449 - RNA, 19 nt, Artificial Sequence
  Description of Artificial Sequence: Synthetic oligonucleotide
  Sense strand starting at position 312 of SEQ ID NO: 318096
cuaaauuagaagugagguu

SEQ ID NO: 536450 - RNA, 19 nt, Artificial Sequence
  Description of Artificial Sequence: Synthetic oligonucleotide
  Antisense strand to SEQ ID NO: 536449
aaccucacuucuaauuuag

SEQ ID NO: 536451 - RNA, 19 nt, Artificial Sequence
  Description of Artificial Sequence: Synthetic oligonucleotide
  Sense strand starting at position 477 of SEQ ID NO: 318096
gccacaugccuacaaggau

SEQ ID NO: 536452 - RNA, 19 nt, Artificial Sequence
  Description of Artificial Sequence: Synthetic oligonucleotide
  Antisense strand to SEQ ID NO: 536451
auccuuguaggcauguggc

SEQ ID NO: 536453 - RNA, 19 nt, Artificial Sequence
  Description of Artificial Sequence: Synthetic oligonucleotide
  Sense strand starting at position 619 of SEQ ID NO: 318096
ccaaauguguuugugguga

SEQ ID NO: 536454 - RNA, 19 nt, Artificial Sequence
  Description of Artificial Sequence: Synthetic oligonucleotide
  Antisense strand to SEQ ID NO: 536453
ucaccacaaacacauuugg

SEQ ID NO: 536455 - RNA, 19 nt, Artificial Sequence
  Description of Artificial Sequence: Synthetic oligonucleotide
  Sense strand starting at position 642 of SEQ ID NO: 318096
ucucuuuggccuuagaagu

SEQ ID NO: 536456 - RNA, 19 nt, Artificial Sequence
  Description of Artificial Sequence: Synthetic oligonucleotide
  Antisense strand to SEQ ID NO: 536455
acuucuaaggccaaagaga

SEQ ID NO: 536457 - RNA, 19 nt, Artificial Sequence
  Description of Artificial Sequence: Synthetic oligonucleotide
  Sense strand starting at position 737 of SEQ ID NO: 318096
ucuacuauacccugugcua

SEQ ID NO: 536458 - RNA, 19 nt, Artificial Sequence
  Description of Artificial Sequence: Synthetic oligonucleotide
  Antisense strand to SEQ ID NO: 536457
uagcacaggguauaguaga

SEQ ID NO: 536459 - RNA, 19 nt, Artificial Sequence
  Description of Artificial Sequence: Synthetic oligonucleotide
  Sense strand starting at position 846 of SEQ ID NO: 318096
agauguaauaugugucaug

SEQ ID NO: 536460 - RNA, 19 nt, Artificial Sequence
  Description of Artificial Sequence: Synthetic oligonucleotide
  Antisense strand to SEQ ID NO: 536459
caugacacauauuacaucu

SEQ ID NO: 536461 - RNA, 19 nt, Artificial Sequence
  Description of Artificial Sequence: Synthetic oligonucleotide
  Sense strand starting at position 853 of SEQ ID NO: 318096
auaugugucaugcaaugga

SEQ ID NO: 536462 - RNA, 19 nt, Artificial Sequence
  Description of Artificial Sequence: Synthetic oligonucleotide
  Antisense strand to SEQ ID NO: 536461
uccauugcaugacacauau

SEQ ID NO: 536463 - RNA, 19 nt, Artificial Sequence
  Description of Artificial Sequence: Synthetic oligonucleotide
  Sense strand starting at position 986 of SEQ ID NO: 318096
gcauuauggcuacaaacua

SEQ ID NO: 536464 - RNA, 19 nt, Artificial Sequence
  Description of Artificial Sequence: Synthetic oligonucleotide
  Antisense strand to SEQ ID NO: 536463
uaguuuguagccauaaugc

SEQ ID NO: 536465 - RNA, 19 nt, Artificial Sequence
  Description of Artificial Sequence: Synthetic oligonucleotide
  Sense strand starting at position 1051 of SEQ ID NO: 318096
uacaacugagcucguuuaa

SEQ ID NO: 536466 - RNA, 19 nt, Artificial Sequence
  Description of Artificial Sequence: Synthetic oligonucleotide
  Antisense strand to SEQ ID NO: 536465
uuaaacgagcucaguugua

SEQ ID NO: 536467 - RNA, 19 nt, Artificial Sequence
  Description of Artificial Sequence: Synthetic oligonucleotide
  Sense strand starting at position 1127 of SEQ ID NO: 318096
aguccuugcuauuuaguca

SEQ ID NO: 536468 - RNA, 19 nt, Artificial Sequence
  Description of Artificial Sequence: Synthetic oligonucleotide
  Antisense strand to SEQ ID NO: 536467
ugacuaaauagcaaggacu

SEQ ID NO: 536469 - RNA, 19 nt, Artificial Sequence
  Description of Artificial Sequence: Synthetic oligonucleotide
  Sense strand starting at position 1273 of SEQ ID NO: 318096
agucgcugagcuugagaau

SEQ ID NO: 536470 - RNA, 19 nt, Artificial Sequence
  Description of Artificial Sequence: Synthetic oligonucleotide
  Antisense strand to SEQ ID NO: 536469
auucucaagcucagcgacu

SEQ ID NO: 536471 - RNA, 19 nt, Artificial Sequence
  Description of Artificial Sequence: Synthetic oligonucleotide
  Sense strand starting at position 1274 of SEQ ID NO: 318096
gucgcugagcuugagaauu

SEQ ID NO: 536472 - RNA, 19 nt, Artificial Sequence
  Description of Artificial Sequence: Synthetic oligonucleotide
  Antisense strand to SEQ ID NO: 536471
aauucucaagcucagcgac

SEQ ID NO: 536473 - RNA, 19 nt, Artificial Sequence
  Description of Artificial Sequence: Synthetic oligonucleotide
  Sense strand starting at position 1284 of SEQ ID NO: 318096
uugagaauuggcggccaua

SEQ ID NO: 536474 - RNA, 19 nt, Artificial Sequence
  Description of Artificial Sequence: Synthetic oligonucleotide
  Antisense strand to SEQ ID NO: 536473
uauggccgccaauucucaa

SEQ ID NO: 536475 - RNA, 19 nt, Artificial Sequence
  Description of Artificial Sequence: Synthetic oligonucleotide
  Sense strand starting at position 1296 of SEQ ID NO: 318096
ggccauaccucuccaugaa

SEQ ID NO: 536476 - RNA, 19 nt, Artificial Sequence
  Description of Artificial Sequence: Synthetic oligonucleotide
  Antisense strand to SEQ ID NO: 536475
uucauggagagguauggcc

SEQ ID NO: 536477 - RNA, 19 nt, Artificial Sequence
  Description of Artificial Sequence: Synthetic oligonucleotide
  Sense strand starting at position 1297 of SEQ ID NO: 318096
gccauaccucuccaugaag

SEQ ID NO: 536478 - RNA, 19 nt, Artificial Sequence
  Description of Artificial Sequence: Synthetic oligonucleotide
  Antisense strand to SEQ ID NO: 536477
cuucauggagagguauggc

SEQ ID NO: 536479 - RNA, 19 nt, Artificial Sequence
  Description of Artificial Sequence: Synthetic oligonucleotide
  Sense strand starting at position 1361 of SEQ ID NO: 318096
cauguaagggucuaauguu

SEQ ID NO: 536480 - RNA, 19 nt, Artificial Sequence
  Description of Artificial Sequence: Synthetic oligonucleotide
  Antisense strand to SEQ ID NO: 536479
aacauuagacccuuacaug

SEQ ID NO: 536481 - RNA, 19 nt, Artificial Sequence
  Description of Artificial Sequence: Synthetic oligonucleotide
  Sense strand starting at position 1368 of SEQ ID NO: 318096
gggucuaauguuuaaagcu

SEQ ID NO: 536482 - RNA, 19 nt, Artificial Sequence
  Description of Artificial Sequence: Synthetic oligonucleotide
  Antisense strand to SEQ ID NO: 536481
agcuuuaaacauuagaccc

SEQ ID NO: 536483 - RNA, 19 nt, Artificial Sequence
  Description of Artificial Sequence: Synthetic oligonucleotide
  Sense strand starting at position 1438 of SEQ ID NO: 318096
acggucuuauacucgagau

SEQ ID NO: 536484 - RNA, 19 nt, Artificial Sequence
  Description of Artificial Sequence: Synthetic oligonucleotide
  Antisense strand to SEQ ID NO: 536483
aucucgaguauaagaccgu

SEQ ID NO: 536485 - RNA, 19 nt, Artificial Sequence
  Description of Artificial Sequence: Synthetic oligonucleotide
  Sense strand starting at position 1439 of SEQ ID NO: 318096
cggucuuauacucgagaua

SEQ ID NO: 536486 - RNA, 19 nt, Artificial Sequence
  Description of Artificial Sequence: Synthetic oligonucleotide
  Antisense strand to SEQ ID NO: 536485
uaucucgaguauaagaccg

SEQ ID NO: 536487 - RNA, 19 nt, Artificial Sequence
  Description of Artificial Sequence: Synthetic oligonucleotide
  Sense strand starting at position 1440 of SEQ ID NO: 318096
ggucuuauacucgagauaa

SEQ ID NO: 536488 - RNA, 19 nt, Artificial Sequence
  Description of Artificial Sequence: Synthetic oligonucleotide
  Antisense strand to SEQ ID NO: 536487
uuaucucgaguauaagacc

SEQ ID NO: 536489 - RNA, 19 nt, Artificial Sequence
  Description of Artificial Sequence: Synthetic oligonucleotide
  Sense strand starting at position 2077 of SEQ ID NO: 318096
gggcuuugucuuugaacca

SEQ ID NO: 536490 - RNA, 19 nt, Artificial Sequence
  Description of Artificial Sequence: Synthetic oligonucleotide
  Antisense strand to SEQ ID NO: 536489
ugguucaaagacaaagccc

SEQ ID NO: 536491 - RNA, 19 nt, Artificial Sequence
  Description of Artificial Sequence: Synthetic oligonucleotide
  Sense strand starting at position 2138 of SEQ ID NO: 318096
ugcgcuugcgcaguauaaa

SEQ ID NO: 536492 - RNA, 19 nt, Artificial Sequence
  Description of Artificial Sequence: Synthetic oligonucleotide
  Antisense strand to SEQ ID NO: 536491
uuuauacugcgcaagcgca

SEQ ID NO: 536493 - RNA, 19 nt, Artificial Sequence
  Description of Artificial Sequence: Synthetic oligonucleotide
  Sense strand starting at position 2178 of SEQ ID NO: 318096
cggaucugucaccauggaa

SEQ ID NO: 536494 - RNA, 19 nt, Artificial Sequence
  Description of Artificial Sequence: Synthetic oligonucleotide
  Antisense strand to SEQ ID NO: 536493
uuccauggugacagauccg

SEQ ID NO: 536495 - RNA, 19 nt, Artificial Sequence
  Description of Artificial Sequence: Synthetic oligonucleotide
  Sense strand starting at position 2237 of SEQ ID NO: 318096
guuuccugcguugauugaa

SEQ ID NO: 536496 - RNA, 19 nt, Artificial Sequence
  Description of Artificial Sequence: Synthetic oligonucleotide
  Antisense strand to SEQ ID NO: 536495
uucaaucaacgcaggaaac

SEQ ID NO: 536497 - RNA, 19 nt, Artificial Sequence
  Description of Artificial Sequence: Synthetic oligonucleotide
  Sense strand starting at position 2287 of SEQ ID NO: 318096
ucuagauaucaauagcgga

SEQ ID NO: 536498 - RNA, 19 nt, Artificial Sequence
  Description of Artificial Sequence: Synthetic oligonucleotide
  Antisense strand to SEQ ID NO: 536497
uccgcuauugauaucuaga

SEQ ID NO: 536499 - RNA, 19 nt, Artificial Sequence
  Description of Artificial Sequence: Synthetic oligonucleotide
  Sense strand starting at position 2404 of SEQ ID NO: 318096
gcgcuuacuccugaguaau

SEQ ID NO: 536500 - RNA, 19 nt, Artificial Sequence
  Description of Artificial Sequence: Synthetic oligonucleotide
  Antisense strand to SEQ ID NO: 536499
auuacucaggaguaagcgc

SEQ ID NO: 536501 - RNA, 19 nt, Artificial Sequence
  Description of Artificial Sequence: Synthetic oligonucleotide
  Sense strand starting at position 2406 of SEQ ID NO: 318096
gcuuacuccugaguaauag

SEQ ID NO: 536502 - RNA, 19 nt, Artificial Sequence
  Description of Artificial Sequence: Synthetic oligonucleotide
  Antisense strand to SEQ ID NO: 536501
cuauuacucaggaguaagc

SEQ ID NO: 536503 - RNA, 19 nt, Artificial Sequence
  Description of Artificial Sequence: Synthetic oligonucleotide
  Sense strand starting at position 2995 of SEQ ID NO: 318096
auaaauagacuccgucuca

SEQ ID NO: 536504 - RNA, 19 nt, Artificial Sequence
  Description of Artificial Sequence: Synthetic oligonucleotide
  Antisense strand to SEQ ID NO: 536503
ugagacggagucuauuuau

SEQ ID NO: 536505 - RNA, 19 nt, Artificial Sequence
  Description of Artificial Sequence: Synthetic oligonucleotide
  Sense strand starting at position 3445 of SEQ ID NO: 318096
uagaauauuccagguacag

SEQ ID NO: 536506 - RNA, 19 nt, Artificial Sequence
  Description of Artificial Sequence: Synthetic oligonucleotide
  Antisense strand to SEQ ID NO: 536505
cuguaccuggaauauucua

SEQ ID NO: 536507 - RNA, 19 nt, Artificial Sequence
  Description of Artificial Sequence: Synthetic oligonucleotide
  Sense strand starting at position 3469 of SEQ ID NO: 318096
agaucuuuaugggaauuau

SEQ ID NO: 536508 - RNA, 19 nt, Artificial Sequence
  Description of Artificial Sequence: Synthetic oligonucleotide
  Antisense strand to SEQ ID NO: 536507
auaauucccauaaagaucu

SEQ ID NO: 536509 - RNA, 19 nt, Artificial Sequence
  Description of Artificial Sequence: Synthetic oligonucleotide
  Sense strand starting at position 3609 of SEQ ID NO: 318096
aggccauguuaggauuuga

SEQ ID NO: 536510 - RNA, 19 nt, Artificial Sequence
  Description of Artificial Sequence: Synthetic oligonucleotide
  Antisense strand to SEQ ID NO: 536509
ucaaauccuaacauggccu

SEQ ID NO: 536511 - RNA, 19 nt, Artificial Sequence
  Description of Artificial Sequence: Synthetic oligonucleotide
  Sense strand starting at position 3614 of SEQ ID NO: 318096
auguuaggauuugaaccaa

SEQ ID NO: 536512 - RNA, 19 nt, Artificial Sequence
  Description of Artificial Sequence: Synthetic oligonucleotide
  Antisense strand to SEQ ID NO: 536511
uugguucaaauccuaacau

SEQ ID NO: 536513 - RNA, 19 nt, Artificial Sequence
  Description of Artificial Sequence: Synthetic oligonucleotide
  Sense strand starting at position 20 of SEQ ID NO: 318097
gaccuuaucugucuugaga

SEQ ID NO: 536514 - RNA, 19 nt, Artificial Sequence
  Description of Artificial Sequence: Synthetic oligonucleotide
  Antisense strand to SEQ ID NO: 536513
ucucaagacagauaagguc

SEQ ID NO: 536515 - RNA, 19 nt, Artificial Sequence
  Description of Artificial Sequence: Synthetic oligonucleotide
  Sense strand starting at position 29 of SEQ ID NO: 318097
ugucuugagaggcaucuaa

SEQ ID NO: 536516 - RNA, 19 nt, Artificial Sequence
  Description of Artificial Sequence: Synthetic oligonucleotide
  Antisense strand to SEQ ID NO: 536515
uuagaugccucucaagaca

SEQ ID NO: 536517 - RNA, 19 nt, Artificial Sequence
  Description of Artificial Sequence: Synthetic oligonucleotide
  Sense strand starting at position 159 of SEQ ID NO: 318097
gaauuaaucugagucuguu

SEQ ID NO: 536518 - RNA, 19 nt, Artificial Sequence
  Description of Artificial Sequence: Synthetic oligonucleotide
  Antisense strand to SEQ ID NO: 536517
aacagacucagauuaauuc

SEQ ID NO: 536519 - RNA, 19 nt, Artificial Sequence
  Description of Artificial Sequence: Synthetic oligonucleotide
  Sense strand starting at position 192 of SEQ ID NO: 318097
augggauaauaauagaacu

SEQ ID NO: 536520 - RNA, 19 nt, Artificial Sequence
  Description of Artificial Sequence: Synthetic oligonucleotide
  Antisense strand to SEQ ID NO: 536519
aguucuauuauuaucccau

SEQ ID NO: 536521 - RNA, 19 nt, Artificial Sequence
  Description of Artificial Sequence: Synthetic oligonucleotide
  Sense strand starting at position 382 of SEQ ID NO: 318097
acuguuuagccauacagac

SEQ ID NO: 536522 - RNA, 19 nt, Artificial Sequence
  Description of Artificial Sequence: Synthetic oligonucleotide
  Antisense strand to SEQ ID NO: 536521
gucuguauggcuaaacagu

SEQ ID NO: 536523 - RNA, 19 nt, Artificial Sequence
  Description of Artificial Sequence: Synthetic oligonucleotide
  Sense strand starting at position 589 of SEQ ID NO: 318097
agguuucugcuauaaugag

SEQ ID NO: 536524 - RNA, 19 nt, Artificial Sequence
  Description of Artificial Sequence: Synthetic oligonucleotide
  Antisense strand to SEQ ID NO: 536523
cucauuauagcagaaaccu

SEQ ID NO: 536525 - RNA, 19 nt, Artificial Sequence
  Description of Artificial Sequence: Synthetic oligonucleotide
  Sense strand starting at position 621 of SEQ ID NO: 318097
ugauaaugccaauggcaaa

SEQ ID NO: 536526 - RNA, 19 nt, Artificial Sequence
  Description of Artificial Sequence: Synthetic oligonucleotide
  Antisense strand to SEQ ID NO: 536525
uuugccauuggcauuauca

SEQ ID NO: 536527 - RNA, 19 nt, Artificial Sequence
  Description of Artificial Sequence: Synthetic oligonucleotide
  Sense strand starting at position 1036 of SEQ ID NO: 318097
ugugcuuuaagacagauga

SEQ ID NO: 536528 - RNA, 19 nt, Artificial Sequence
  Description of Artificial Sequence: Synthetic oligonucleotide
  Antisense strand to SEQ ID NO: 536527
ucaucugucuuaaagcaca

SEQ ID NO: 536529 - RNA, 19 nt, Artificial Sequence
  Description of Artificial Sequence: Synthetic oligonucleotide
  Sense strand starting at position 1338 of SEQ ID NO: 318097
ugcaacagguccucaagaa

SEQ ID NO: 536530 - RNA, 19 nt, Artificial Sequence
  Description of Artificial Sequence: Synthetic oligonucleotide
  Antisense strand to SEQ ID NO: 536529
uucuugaggaccuguugca

SEQ ID NO: 536531 - RNA, 19 nt, Artificial Sequence
  Description of Artificial Sequence: Synthetic oligonucleotide
  Sense strand starting at position 1435 of SEQ ID NO: 318097
ucacacuguucuccacaga

SEQ ID NO: 536532 - RNA, 19 nt, Artificial Sequence
  Description of Artificial Sequence: Synthetic oligonucleotide
  Antisense strand to SEQ ID NO: 536531
ucuguggagaacaguguga

SEQ ID NO: 536533 - RNA, 19 nt, Artificial Sequence
  Description of Artificial Sequence: Synthetic oligonucleotide
  Sense strand starting at position 1485 of SEQ ID NO: 318097
gauccaaugucuuccaggu

SEQ ID NO: 536534 - RNA, 19 nt, Artificial Sequence
  Description of Artificial Sequence: Synthetic oligonucleotide
  Antisense strand to SEQ ID NO: 536533
accuggaagacauuggauc

SEQ ID NO: 536535 - RNA, 19 nt, Artificial Sequence
  Description of Artificial Sequence: Synthetic oligonucleotide
  Sense strand starting at position 1619 of SEQ ID NO: 318097
gggagacugagcugucaug

SEQ ID NO: 536536 - RNA, 19 nt, Artificial Sequence
  Description of Artificial Sequence: Synthetic oligonucleotide
  Antisense strand to SEQ ID NO: 536535
caugacagcucagucuccc

SEQ ID NO: 536537 - RNA, 19 nt, Artificial Sequence
  Description of Artificial Sequence: Synthetic oligonucleotide
  Sense strand starting at position 1717 of SEQ ID NO: 318097
accgaaaguacucagcaga

SEQ ID NO: 536538 - RNA, 19 nt, Artificial Sequence
  Description of Artificial Sequence: Synthetic oligonucleotide
  Antisense strand to SEQ ID NO: 536537
ucugcugaguacuuucggu

SEQ ID NO: 536539 - RNA, 19 nt, Artificial Sequence
  Description of Artificial Sequence: Synthetic oligonucleotide
  Sense strand starting at position 1720 of SEQ ID NO: 318097
gaaaguacucagcagaagu

SEQ ID NO: 536540 - RNA, 19 nt, Artificial Sequence
  Description of Artificial Sequence: Synthetic oligonucleotide
  Antisense strand to SEQ ID NO: 536539
acuucugcugaguacuuuc

SEQ ID NO: 536541 - RNA, 19 nt, Artificial Sequence
  Description of Artificial Sequence: Synthetic oligonucleotide
  Sense strand starting at position 1722 of SEQ ID NO: 318097
aaguacucagcagaaguuu

SEQ ID NO: 536542 - RNA, 19 nt, Artificial Sequence
  Description of Artificial Sequence: Synthetic oligonucleotide
  Antisense strand to SEQ ID NO: 536541
aaacuucugcugaguacuu

SEQ ID NO: 536543 - RNA, 19 nt, Artificial Sequence
  Description of Artificial Sequence: Synthetic oligonucleotide
  Sense strand starting at position 1933 of SEQ ID NO: 318097
gcuuaauaagaucauugua

SEQ ID NO: 536544 - RNA, 19 nt, Artificial Sequence
  Description of Artificial Sequence: Synthetic oligonucleotide
  Antisense strand to SEQ ID NO: 536543
uacaaugaucuuauuaagc

SEQ ID NO: 536545 - RNA, 19 nt, Artificial Sequence
  Description of Artificial Sequence: Synthetic oligonucleotide
  Sense strand starting at position 2116 of SEQ ID NO: 318097
agcuguauccaguaugaau

SEQ ID NO: 536546 - RNA, 19 nt, Artificial Sequence
  Description of Artificial Sequence: Synthetic oligonucleotide
  Antisense strand to SEQ ID NO: 536545
auucauacuggauacagcu

SEQ ID NO: 536547 - RNA, 19 nt, Artificial Sequence
  Description of Artificial Sequence: Synthetic oligonucleotide
  Sense strand starting at position 2168 of SEQ ID NO: 318097
uuaucuuauguccaaaguu

SEQ ID NO: 536548 - RNA, 19 nt, Artificial Sequence
  Description of Artificial Sequence: Synthetic oligonucleotide
  Antisense strand to SEQ ID NO: 536547
aacuuuggacauaagauaa

SEQ ID NO: 536549 - RNA, 19 nt, Artificial Sequence
  Description of Artificial Sequence: Synthetic oligonucleotide
  Sense strand starting at position 2191 of SEQ ID NO: 318097
cuuucuuggagguggugaa

SEQ ID NO: 536550 - RNA, 19 nt, Artificial Sequence
  Description of Artificial Sequence: Synthetic oligonucleotide
  Antisense strand to SEQ ID NO: 536549
uucaccaccuccaagaaag

SEQ ID NO: 536551 - RNA, 19 nt, Artificial Sequence
  Description of Artificial Sequence: Synthetic oligonucleotide
  Sense strand starting at position 2314 of SEQ ID NO: 318097
ugaggaaugucaucuuaau

SEQ ID NO: 536552 - RNA, 19 nt, Artificial Sequence
  Description of Artificial Sequence: Synthetic oligonucleotide
  Antisense strand to SEQ ID NO: 536551
auuaagaugacauuccuca

SEQ ID NO: 536553 - RNA, 19 nt, Artificial Sequence
  Description of Artificial Sequence: Synthetic oligonucleotide
  Sense strand starting at position 2441 of SEQ ID NO: 318097
acuagaugccgucaaucau

SEQ ID NO: 536554 - RNA, 19 nt, Artificial Sequence
  Description of Artificial Sequence: Synthetic oligonucleotide
  Antisense strand to SEQ ID NO: 536553
augauugacggcaucuagu

SEQ ID NO: 536555 - RNA, 19 nt, Artificial Sequence
  Description of Artificial Sequence: Synthetic oligonucleotide
  Sense strand starting at position 2576 of SEQ ID NO: 318097
uuuaauaucccucgaguga

SEQ ID NO: 536556 - RNA, 19 nt, Artificial Sequence
  Description of Artificial Sequence: Synthetic oligonucleotide
  Antisense strand to SEQ ID NO: 536555
ucacucgagggauauuaaa

SEQ ID NO: 536557 - RNA, 19 nt, Artificial Sequence
  Description of Artificial Sequence: Synthetic oligonucleotide
  Sense strand starting at position 2577 of SEQ ID NO: 318097
uuaauaucccucgagugaa

SEQ ID NO: 536558 - RNA, 19 nt, Artificial Sequence
  Description of Artificial Sequence: Synthetic oligonucleotide
  Antisense strand to SEQ ID NO: 536557
uucacucgagggauauuaa

SEQ ID NO: 536559 - RNA, 19 nt, Artificial Sequence
  Description of Artificial Sequence: Synthetic oligonucleotide
  Sense strand starting at position 2633 of SEQ ID NO: 318097
ccauucuuuccugacaugu

SEQ ID NO: 536560 - RNA, 19 nt, Artificial Sequence
  Description of Artificial Sequence: Synthetic oligonucleotide
  Antisense strand to SEQ ID NO: 536559
acaugucaggaaagaaugg

SEQ ID NO: 536561 - RNA, 19 nt, Artificial Sequence
  Description of Artificial Sequence: Synthetic oligonucleotide
  Sense strand starting at position 2719 of SEQ ID NO: 318097
ugccaauccugacuacaga

SEQ ID NO: 536562 - RNA, 19 nt, Artificial Sequence
  Description of Artificial Sequence: Synthetic oligonucleotide
  Antisense strand to SEQ ID NO: 536561
ucuguagucaggauuggca

SEQ ID NO: 536563 - RNA, 19 nt, Artificial Sequence
  Description of Artificial Sequence: Synthetic oligonucleotide
  Sense strand starting at position 2745 of SEQ ID NO: 318097
agggcugcugaugauuaaa

SEQ ID NO: 536564 - RNA, 19 nt, Artificial Sequence
  Description of Artificial Sequence: Synthetic oligonucleotide
  Antisense strand to SEQ ID NO: 536563
uuuaaucaucagcagcccu

SEQ ID NO: 536565 - RNA, 19 nt, Artificial Sequence
  Description of Artificial Sequence: Synthetic oligonucleotide
  Sense strand starting at position 2808 of SEQ ID NO: 318097
guacaauacagguagcaga

SEQ ID NO: 536566 - RNA, 19 nt, Artificial Sequence
  Description of Artificial Sequence: Synthetic oligonucleotide
  Antisense strand to SEQ ID NO: 536565
ucugcuaccuguauuguac

SEQ ID NO: 536567 - RNA, 19 nt, Artificial Sequence
  Description of Artificial Sequence: Synthetic oligonucleotide
  Sense strand starting at position 2866 of SEQ ID NO: 318097
uuuccuauuugucugcuga

SEQ ID NO: 536568 - RNA, 19 nt, Artificial Sequence
  Description of Artificial Sequence: Synthetic oligonucleotide
  Antisense strand to SEQ ID NO: 536567
ucagcagacaaauaggaaa

SEQ ID NO: 536569 - RNA, 19 nt, Artificial Sequence
  Description of Artificial Sequence: Synthetic oligonucleotide
  Sense strand starting at position 2891 of SEQ ID NO: 318097
ugacgccugguauaucaau

SEQ ID NO: 536570 - RNA, 19 nt, Artificial Sequence
  Description of Artificial Sequence: Synthetic oligonucleotide
  Antisense strand to SEQ ID NO: 536569
auugauauaccaggcguca

SEQ ID NO: 536571 - RNA, 19 nt, Artificial Sequence
  Description of Artificial Sequence: Synthetic oligonucleotide
  Sense strand starting at position 2915 of SEQ ID NO: 318097
uggcaacagcucuaaguau

SEQ ID NO: 536572 - RNA, 19 nt, Artificial Sequence
  Description of Artificial Sequence: Synthetic oligonucleotide
  Antisense strand to SEQ ID NO: 536571
auacuuagagcuguugcca

SEQ ID NO: 536573 - RNA, 19 nt, Artificial Sequence
  Description of Artificial Sequence: Synthetic oligonucleotide
  Sense strand starting at position 2929 of SEQ ID NO: 318097
aguauagugcacuacaaau

SEQ ID NO: 536574 - RNA, 19 nt, Artificial Sequence
  Description of Artificial Sequence: Synthetic oligonucleotide
  Antisense strand to SEQ ID NO: 536573
auuuguagugcacuauacu

SEQ ID NO: 536575 - RNA, 19 nt, Artificial Sequence
  Description of Artificial Sequence: Synthetic oligonucleotide
  Sense strand starting at position 3263 of SEQ ID NO: 318097
ggguguauuaaauggauau

SEQ ID NO: 536576 - RNA, 19 nt, Artificial Sequence
  Description of Artificial Sequence: Synthetic oligonucleotide
  Antisense strand to SEQ ID NO: 536575
auauccauuuaauacaccc

SEQ ID NO: 536577 - RNA, 19 nt, Artificial Sequence
  Description of Artificial Sequence: Synthetic oligonucleotide
  Sense strand starting at position 3264 of SEQ ID NO: 318097
gguguauuaaauggauaua

SEQ ID NO: 536578 - RNA, 19 nt, Artificial Sequence
  Description of Artificial Sequence: Synthetic oligonucleotide
  Antisense strand to SEQ ID NO: 536577
uauauccauuuaauacacc

SEQ ID NO: 536579 - RNA, 19 nt, Artificial Sequence
  Description of Artificial Sequence: Synthetic oligonucleotide
  Sense strand starting at position 3389 of SEQ ID NO: 318097
ucuguucuggcuuaagaaa

SEQ ID NO: 536580 - RNA, 19 nt, Artificial Sequence
  Description of Artificial Sequence: Synthetic oligonucleotide
  Antisense strand to SEQ ID NO: 536579
uuucuuaagccagaacaga

SEQ ID NO: 536581 - RNA, 19 nt, Artificial Sequence
  Description of Artificial Sequence: Synthetic oligonucleotide
  Sense strand starting at position 3423 of SEQ ID NO: 318097
gaccaaugauacgcaugua

SEQ ID NO: 536582 - RNA, 19 nt, Artificial Sequence
  Description of Artificial Sequence: Synthetic oligonucleotide
  Antisense strand to SEQ ID NO: 536581
uacaugcguaucauugguc

SEQ ID NO: 536583 - RNA, 19 nt, Artificial Sequence
  Description of Artificial Sequence: Synthetic oligonucleotide
  Sense strand starting at position 3465 of SEQ ID NO: 318097
aaacucagaugucugauga

SEQ ID NO: 536584 - RNA, 19 nt, Artificial Sequence
  Description of Artificial Sequence: Synthetic oligonucleotide
  Antisense strand to SEQ ID NO: 536583
ucaucagacaucugaguuu

SEQ ID NO: 536585 - RNA, 19 nt, Artificial Sequence
  Description of Artificial Sequence: Synthetic oligonucleotide
  Sense strand starting at position 3696 of SEQ ID NO: 318097
ucaguuuggcccuacaaag

SEQ ID NO: 536586 - RNA, 19 nt, Artificial Sequence
  Description of Artificial Sequence: Synthetic oligonucleotide
  Antisense strand to SEQ ID NO: 536585
cuuuguagggccaaacuga

SEQ ID NO: 536587 - RNA, 19 nt, Artificial Sequence
  Description of Artificial Sequence: Synthetic oligonucleotide
  Sense strand starting at position 3714 of SEQ ID NO: 318097
gacagauagcaaugaagug

SEQ ID NO: 536588 - RNA, 19 nt, Artificial Sequence
  Description of Artificial Sequence: Synthetic oligonucleotide
  Antisense strand to SEQ ID NO: 536587
cacuucauugcuaucuguc

SEQ ID NO: 536589 - RNA, 19 nt, Artificial Sequence
  Description of Artificial Sequence: Synthetic oligonucleotide
  Sense strand starting at position 3897 of SEQ ID NO: 318097
cagaauguugccuauggga

SEQ ID NO: 536590 - RNA, 19 nt, Artificial Sequence
  Description of Artificial Sequence: Synthetic oligonucleotide
  Antisense strand to SEQ ID NO: 536589
ucccauaggcaacauucug

SEQ ID NO: 536591 - RNA, 19 nt, Artificial Sequence
  Description of Artificial Sequence: Synthetic oligonucleotide
  Sense strand starting at position 3973 of SEQ ID NO: 318097
ccaccaugugcccagagau

SEQ ID NO: 536592 - RNA, 19 nt, Artificial Sequence
  Description of Artificial Sequence: Synthetic oligonucleotide
  Antisense strand to SEQ ID NO: 536591
aucucugggcacauggugg

SEQ ID NO: 536593 - RNA, 19 nt, Artificial Sequence
  Description of Artificial Sequence: Synthetic oligonucleotide
  Sense strand starting at position 108 of SEQ ID NO: 318098
gucacaguacauuauaacu

SEQ ID NO: 536594 - RNA, 19 nt, Artificial Sequence
  Description of Artificial Sequence: Synthetic oligonucleotide
  Antisense strand to SEQ ID NO: 536593
aguuauaauguacugugac

SEQ ID NO: 536595 - RNA, 19 nt, Artificial Sequence
  Description of Artificial Sequence: Synthetic oligonucleotide
  Sense strand starting at position 212 of SEQ ID NO: 318098
ugucuauacgcucauaaua

SEQ ID NO: 536596 - RNA, 19 nt, Artificial Sequence
  Description of Artificial Sequence: Synthetic oligonucleotide
  Antisense strand to SEQ ID NO: 536595
uauuaugagcguauagaca

SEQ ID NO: 536597 - RNA, 19 nt, Artificial Sequence
  Description of Artificial Sequence: Synthetic oligonucleotide
  Sense strand starting at position 634 of SEQ ID NO: 318098
cugaguagcucucuacauu

SEQ ID NO: 536598 - RNA, 19 nt, Artificial Sequence
  Description of Artificial Sequence: Synthetic oligonucleotide
  Antisense strand to SEQ ID NO: 536597
aauguagagagcuacucag

SEQ ID NO: 536599 - RNA, 19 nt, Artificial Sequence
  Description of Artificial Sequence: Synthetic oligonucleotide
  Sense strand starting at position 635 of SEQ ID NO: 318098
ugaguagcucucuacauuc

SEQ ID NO: 536600 - RNA, 19 nt, Artificial Sequence
  Description of Artificial Sequence: Synthetic oligonucleotide
  Antisense strand to SEQ ID NO: 536599
gaauguagagagcuacuca

SEQ ID NO: 536601 - RNA, 19 nt, Artificial Sequence
  Description of Artificial Sequence: Synthetic oligonucleotide
  Sense strand starting at position 712 of SEQ ID NO: 318098
aucauacugugguuuggau

SEQ ID NO: 536602 - RNA, 19 nt, Artificial Sequence
  Description of Artificial Sequence: Synthetic oligonucleotide
  Antisense strand to SEQ ID NO: 536601
auccaaaccacaguaugau

SEQ ID NO: 536603 - RNA, 19 nt, Artificial Sequence
  Description of Artificial Sequence: Synthetic oligonucleotide
  Sense strand starting at position 1132 of SEQ ID NO: 318098
cggaucuaucuggagguua

SEQ ID NO: 536604 - RNA, 19 nt, Artificial Sequence
  Description of Artificial Sequence: Synthetic oligonucleotide
  Antisense strand to SEQ ID NO: 536603
uaaccuccagauagauccg

SEQ ID NO: 536605 - RNA, 19 nt, Artificial Sequence
  Description of Artificial Sequence: Synthetic oligonucleotide
  Sense strand starting at position 1134 of SEQ ID NO: 318098
gaucuaucuggagguuacu

SEQ ID NO: 536606 - RNA, 19 nt, Artificial Sequence
  Description of Artificial Sequence: Synthetic oligonucleotide
  Antisense strand to SEQ ID NO: 536605
aguaaccuccagauagauc

SEQ ID NO: 536607 - RNA, 19 nt, Artificial Sequence
  Description of Artificial Sequence: Synthetic oligonucleotide
  Sense strand starting at position 1140 of SEQ ID NO: 318098
ucuggagguuacuucucaa

SEQ ID NO: 536608 - RNA, 19 nt, Artificial Sequence
  Description of Artificial Sequence: Synthetic oligonucleotide
  Antisense strand to SEQ ID NO: 536607
uugagaaguaaccuccaga

SEQ ID NO: 536609 - RNA, 19 nt, Artificial Sequence
  Description of Artificial Sequence: Synthetic oligonucleotide
  Sense strand starting at position 1143 of SEQ ID NO: 318098
ggagguuacuucucaauac

SEQ ID NO: 536610 - RNA, 19 nt, Artificial Sequence
  Description of Artificial Sequence: Synthetic oligonucleotide
  Antisense strand to SEQ ID NO: 536609
guauugagaaguaaccucc

SEQ ID NO: 536611 - RNA, 19 nt, Artificial Sequence
  Description of Artificial Sequence: Synthetic oligonucleotide
  Sense strand starting at position 1306 of SEQ ID NO: 318098
uagguuaguacugauggau

SEQ ID NO: 536612 - RNA, 19 nt, Artificial Sequence
  Description of Artificial Sequence: Synthetic oligonucleotide
  Antisense strand to SEQ ID NO: 536611
auccaucaguacuaaccua

SEQ ID NO: 536613 - RNA, 19 nt, Artificial Sequence
  Description of Artificial Sequence: Synthetic oligonucleotide
  Sense strand starting at position 1309 of SEQ ID NO: 318098
guuaguacugauggauaag

SEQ ID NO: 536614 - RNA, 19 nt, Artificial Sequence
  Description of Artificial Sequence: Synthetic oligonucleotide
  Antisense strand to SEQ ID NO: 536613
cuuauccaucaguacuaac

SEQ ID NO: 536615 - RNA, 19 nt, Artificial Sequence
  Description of Artificial Sequence: Synthetic oligonucleotide
  Sense strand starting at position 1455 of SEQ ID NO: 318098
ugugauaugccaugaaaua

SEQ ID NO: 536616 - RNA, 19 nt, Artificial Sequence
  Description of Artificial Sequence: Synthetic oligonucleotide
  Antisense strand to SEQ ID NO: 536615
uauuucauggcauaucaca

SEQ ID NO: 536617 - RNA, 19 nt, Artificial Sequence
  Description of Artificial Sequence: Synthetic oligonucleotide
  Sense strand starting at position 1554 of SEQ ID NO: 318098
uugaauagaugagcccaua

SEQ ID NO: 536618 - RNA, 19 nt, Artificial Sequence
  Description of Artificial Sequence: Synthetic oligonucleotide
  Antisense strand to SEQ ID NO: 536617
uaugggcucaucuauucaa

SEQ ID NO: 536619 - RNA, 19 nt, Artificial Sequence
  Description of Artificial Sequence: Synthetic oligonucleotide
  Sense strand starting at position 1573 of SEQ ID NO: 318098
accaccacuucguuaagaa

SEQ ID NO: 536620 - RNA, 19 nt, Artificial Sequence
  Description of Artificial Sequence: Synthetic oligonucleotide
  Antisense strand to SEQ ID NO: 536619
uucuuaacgaagugguggu

SEQ ID NO: 536621 - RNA, 19 nt, Artificial Sequence
  Description of Artificial Sequence: Synthetic oligonucleotide
  Sense strand starting at position 1574 of SEQ ID NO: 318098
ccaccacuucguuaagaau

SEQ ID NO: 536622 - RNA, 19 nt, Artificial Sequence
  Description of Artificial Sequence: Synthetic oligonucleotide
  Antisense strand to SEQ ID NO: 536621
auucuuaacgaaguggugg

SEQ ID NO: 536623 - RNA, 19 nt, Artificial Sequence
  Description of Artificial Sequence: Synthetic oligonucleotide
  Sense strand starting at position 1697 of SEQ ID NO: 318098
uaaugugcagguuauauua

SEQ ID NO: 536624 - RNA, 19 nt, Artificial Sequence
  Description of Artificial Sequence: Synthetic oligonucleotide
  Antisense strand to SEQ ID NO: 536623
uaauauaaccugcacauua

SEQ ID NO: 536625 - RNA, 19 nt, Artificial Sequence
  Description of Artificial Sequence: Synthetic oligonucleotide
  Sense strand starting at position 1738 of SEQ ID NO: 318098
uggaaagucuaaguauuau

SEQ ID NO: 536626 - RNA, 19 nt, Artificial Sequence
  Description of Artificial Sequence: Synthetic oligonucleotide
  Antisense strand to SEQ ID NO: 536625
auaauacuuagacuuucca

SEQ ID NO: 536627 - RNA, 19 nt, Artificial Sequence
  Description of Artificial Sequence: Synthetic oligonucleotide
  Sense strand starting at position 1799 of SEQ ID NO: 318098
acuggagugcauggaauau

SEQ ID NO: 536628 - RNA, 19 nt, Artificial Sequence
  Description of Artificial Sequence: Synthetic oligonucleotide
  Antisense strand to SEQ ID NO: 536627
auauuccaugcacuccagu

SEQ ID NO: 536629 - RNA, 19 nt, Artificial Sequence
  Description of Artificial Sequence: Synthetic oligonucleotide
  Sense strand starting at position 1845 of SEQ ID NO: 318098
uggguaagcuguucuaaau

SEQ ID NO: 536630 - RNA, 19 nt, Artificial Sequence
  Description of Artificial Sequence: Synthetic oligonucleotide
  Antisense strand to SEQ ID NO: 536629
auuuagaacagcuuaccca

SEQ ID NO: 536631 - RNA, 19 nt, Artificial Sequence
  Description of Artificial Sequence: Synthetic oligonucleotide
  Sense strand starting at position 2004 of SEQ ID NO: 318098
ggucauagugaaugacauc

SEQ ID NO: 536632 - RNA, 19 nt, Artificial Sequence
  Description of Artificial Sequence: Synthetic oligonucleotide
  Antisense strand to SEQ ID NO: 536631
gaugucauucacuaugacc

SEQ ID NO: 536633 - RNA, 19 nt, Artificial Sequence
  Description of Artificial Sequence: Synthetic oligonucleotide
  Sense strand starting at position 2139 of SEQ ID NO: 318098
gguccacuucuuuacauca

SEQ ID NO: 536634 - RNA, 19 nt, Artificial Sequence
  Description of Artificial Sequence: Synthetic oligonucleotide
  Antisense strand to SEQ ID NO: 536633
ugauguaaagaaguggacc

SEQ ID NO: 536635 - RNA, 19 nt, Artificial Sequence
  Description of Artificial Sequence: Synthetic oligonucleotide
  Sense strand starting at position 2300 of SEQ ID NO: 318098
ugauguaggcuauaagguu

SEQ ID NO: 536636 - RNA, 19 nt, Artificial Sequence
  Description of Artificial Sequence: Synthetic oligonucleotide
  Antisense strand to SEQ ID NO: 536635
aaccuuauagccuacauca

SEQ ID NO: 536637 - RNA, 19 nt, Artificial Sequence
  Description of Artificial Sequence: Synthetic oligonucleotide
  Sense strand starting at position 2602 of SEQ ID NO: 318098
auuccugccugguuacaau

SEQ ID NO: 536638 - RNA, 19 nt, Artificial Sequence
  Description of Artificial Sequence: Synthetic oligonucleotide
  Antisense strand to SEQ ID NO: 536637
auuguaaccaggcaggaau

SEQ ID NO: 536639 - RNA, 19 nt, Artificial Sequence
  Description of Artificial Sequence: Synthetic oligonucleotide
  Sense strand starting at position 2609 of SEQ ID NO: 318098
ccugguuacaaugguguau

SEQ ID NO: 536640 - RNA, 19 nt, Artificial Sequence
  Description of Artificial Sequence: Synthetic oligonucleotide
  Antisense strand to SEQ ID NO: 536639
auacaccauuguaaccagg

SEQ ID NO: 536641 - RNA, 19 nt, Artificial Sequence
  Description of Artificial Sequence: Synthetic oligonucleotide
  Sense strand starting at position 2644 of SEQ ID NO: 318098
uuugaagaauugccuaaac

SEQ ID NO: 536642 - RNA, 19 nt, Artificial Sequence
  Description of Artificial Sequence: Synthetic oligonucleotide
  Antisense strand to SEQ ID NO: 536641
guuuaggcaauucuucaaa

SEQ ID NO: 536643 - RNA, 19 nt, Artificial Sequence
  Description of Artificial Sequence: Synthetic oligonucleotide
  Sense strand starting at position 2745 of SEQ ID NO: 318098
guauuaaaguucccaaauu

SEQ ID NO: 536644 - RNA, 19 nt, Artificial Sequence
  Description of Artificial Sequence: Synthetic oligonucleotide
  Antisense strand to SEQ ID NO: 536643
aauuugggaacuuuaauac

SEQ ID NO: 536645 - RNA, 19 nt, Artificial Sequence
  Description of Artificial Sequence: Synthetic oligonucleotide
  Sense strand starting at position 2806 of SEQ ID NO: 318098
ugguauauguccuuuauga

SEQ ID NO: 536646 - RNA, 19 nt, Artificial Sequence
  Description of Artificial Sequence: Synthetic oligonucleotide
  Antisense strand to SEQ ID NO: 536645
ucauaaaggacauauacca

SEQ ID NO: 536647 - RNA, 19 nt, Artificial Sequence
  Description of Artificial Sequence: Synthetic oligonucleotide
  Sense strand starting at position 2808 of SEQ ID NO: 318098
guauauguccuuuaugaca

SEQ ID NO: 536648 - RNA, 19 nt, Artificial Sequence
  Description of Artificial Sequence: Synthetic oligonucleotide
  Antisense strand to SEQ ID NO: 536647
ugucauaaaggacauauac

SEQ ID NO: 536649 - RNA, 19 nt, Artificial Sequence
  Description of Artificial Sequence: Synthetic oligonucleotide
  Sense strand starting at position 2889 of SEQ ID NO: 318098
ugcuguuaccuugauagau

SEQ ID NO: 536650 - RNA, 19 nt, Artificial Sequence
  Description of Artificial Sequence: Synthetic oligonucleotide
  Antisense strand to SEQ ID NO: 536649
aucuaucaagguaacagca

SEQ ID NO: 536651 - RNA, 19 nt, Artificial Sequence
  Description of Artificial Sequence: Synthetic oligonucleotide
  Sense strand starting at position 3312 of SEQ ID NO: 318098
gagcauuaagacggagguu

SEQ ID NO: 536652 - RNA, 19 nt, Artificial Sequence
  Description of Artificial Sequence: Synthetic oligonucleotide
  Antisense strand to SEQ ID NO: 536651
aaccuccgucuuaaugcuc

SEQ ID NO: 536653 - RNA, 19 nt, Artificial Sequence
  Description of Artificial Sequence: Synthetic oligonucleotide
  Sense strand starting at position 3415 of SEQ ID NO: 318098
uguugaacaucugcucaaa

SEQ ID NO: 536654 - RNA, 19 nt, Artificial Sequence
  Description of Artificial Sequence: Synthetic oligonucleotide
  Antisense strand to SEQ ID NO: 536653
uuugagcagauguucaaca

SEQ ID NO: 536655 - RNA, 19 nt, Artificial Sequence
  Description of Artificial Sequence: Synthetic oligonucleotide
  Sense strand starting at position 3579 of SEQ ID NO: 318098
gaagcugugccgucucgaa

SEQ ID NO: 536656 - RNA, 19 nt, Artificial Sequence
  Description of Artificial Sequence: Synthetic oligonucleotide
  Antisense strand to SEQ ID NO: 536655
uucgagacggcacagcuuc

SEQ ID NO: 536657 - RNA, 19 nt, Artificial Sequence
  Description of Artificial Sequence: Synthetic oligonucleotide
  Sense strand starting at position 3637 of SEQ ID NO: 318098
gaaaguguccagggaucag

SEQ ID NO: 536658 - RNA, 19 nt, Artificial Sequence
  Description of Artificial Sequence: Synthetic oligonucleotide
  Antisense strand to SEQ ID NO: 536657
cugaucccuggacacuuuc

SEQ ID NO: 536659 - RNA, 19 nt, Artificial Sequence
  Description of Artificial Sequence: Synthetic oligonucleotide
  Sense strand starting at position 3646 of SEQ ID NO: 318098
cagggaucaguguaacagu

SEQ ID NO: 536660 - RNA, 19 nt, Artificial Sequence
  Description of Artificial Sequence: Synthetic oligonucleotide
  Antisense strand to SEQ ID NO: 536659
acuguuacacugaucccug

SEQ ID NO: 536661 - RNA, 19 nt, Artificial Sequence
  Description of Artificial Sequence: Synthetic oligonucleotide
  Sense strand starting at position 3657 of SEQ ID NO: 318098
guaacagugguacauccau

SEQ ID NO: 536662 - RNA, 19 nt, Artificial Sequence
  Description of Artificial Sequence: Synthetic oligonucleotide
  Antisense strand to SEQ ID NO: 536661
auggauguaccacuguuac

SEQ ID NO: 536663 - RNA, 19 nt, Artificial Sequence
  Description of Artificial Sequence: Synthetic oligonucleotide
  Sense strand starting at position 3866 of SEQ ID NO: 318098
ugaucuuaguauuccuaag

SEQ ID NO: 536664 - RNA, 19 nt, Artificial Sequence
  Description of Artificial Sequence: Synthetic oligonucleotide
  Antisense strand to SEQ ID NO: 536663
cuuaggaauacuaagauca

SEQ ID NO: 536665 - RNA, 19 nt, Artificial Sequence
  Description of Artificial Sequence: Synthetic oligonucleotide
  Sense strand starting at position 3868 of SEQ ID NO: 318098
aucuuaguauuccuaaguu

SEQ ID NO: 536666 - RNA, 19 nt, Artificial Sequence
  Description of Artificial Sequence: Synthetic oligonucleotide
  Antisense strand to SEQ ID NO: 536665
aacuuaggaauacuaagau

SEQ ID NO: 536667 - RNA, 19 nt, Artificial Sequence
  Description of Artificial Sequence: Synthetic oligonucleotide
  Sense strand starting at position 3944 of SEQ ID NO: 318098
auaauaaacugugagagaa

SEQ ID NO: 536668 - RNA, 19 nt, Artificial Sequence
  Description of Artificial Sequence: Synthetic oligonucleotide
  Antisense strand to SEQ ID NO: 536667
uucucucacaguuuauuau

SEQ ID NO: 536669 - RNA, 19 nt, Artificial Sequence
  Description of Artificial Sequence: Synthetic oligonucleotide
  Sense strand starting at position 3957 of SEQ ID NO: 318098
agagaaguaucugcccacu

SEQ ID NO: 536670 - RNA, 19 nt, Artificial Sequence
  Description of Artificial Sequence: Synthetic oligonucleotide
  Antisense strand to SEQ ID NO: 536669
agugggcagauacuucucu

SEQ ID NO: 536671 - RNA, 19 nt, Artificial Sequence
  Description of Artificial Sequence: Synthetic oligonucleotide
  Sense strand starting at position 3959 of SEQ ID NO: 318098
agaaguaucugcccacucu

SEQ ID NO: 536672 - RNA, 19 nt, Artificial Sequence
  Description of Artificial Sequence: Synthetic oligonucleotide
  Antisense strand to SEQ ID NO: 536671
agagugggcagauacuucu

SEQ ID NO: 536673 - RNA, 19 nt, Artificial Sequence
  Description of Artificial Sequence: Synthetic oligonucleotide
  Sense strand starting at position 3 of SEQ ID NO: 318099
acagauuuauuccgugaaa

SEQ ID NO: 536674 - RNA, 19 nt, Artificial Sequence
  Description of Artificial Sequence: Synthetic oligonucleotide
  Antisense strand to SEQ ID NO: 536673
uuucacggaauaaaucugu

SEQ ID NO: 536675 - RNA, 19 nt, Artificial Sequence
  Description of Artificial Sequence: Synthetic oligonucleotide
  Sense strand starting at position 120 of SEQ ID NO: 318099
gccgacaucaaucauguga

SEQ ID NO: 536676 - RNA, 19 nt, Artificial Sequence
  Description of Artificial Sequence: Synthetic oligonucleotide
  Antisense strand to SEQ ID NO: 536675
ucacaugauugaugucggc

SEQ ID NO: 536677 - RNA, 19 nt, Artificial Sequence
  Description of Artificial Sequence: Synthetic oligonucleotide
  Sense strand starting at position 180 of SEQ ID NO: 318099
agaaguuugugguuaucuu

SEQ ID NO: 536678 - RNA, 19 nt, Artificial Sequence
  Description of Artificial Sequence: Synthetic oligonucleotide
  Antisense strand to SEQ ID NO: 536677
aagauaaccacaaacuucu

SEQ ID NO: 536679 - RNA, 19 nt, Artificial Sequence
  Description of Artificial Sequence: Synthetic oligonucleotide
  Sense strand starting at position 181 of SEQ ID NO: 318099
gaaguuugugguuaucuua

SEQ ID NO: 536680 - RNA, 19 nt, Artificial Sequence
  Description of Artificial Sequence: Synthetic oligonucleotide
  Antisense strand to SEQ ID NO: 536679
uaagauaaccacaaacuuc

SEQ ID NO: 536681 - RNA, 19 nt, Artificial Sequence
  Description of Artificial Sequence: Synthetic oligonucleotide
  Sense strand starting at position 184 of SEQ ID NO: 318099
guuugugguuaucuuauca

SEQ ID NO: 536682 - RNA, 19 nt, Artificial Sequence
  Description of Artificial Sequence: Synthetic oligonucleotide
  Antisense strand to SEQ ID NO: 536681
ugauaagauaaccacaaac

SEQ ID NO: 536683 - RNA, 19 nt, Artificial Sequence
  Description of Artificial Sequence: Synthetic oligonucleotide
  Sense strand starting at position 217 of SEQ ID NO: 318099
gccaccauauauucugaga

SEQ ID NO: 536684 - RNA, 19 nt, Artificial Sequence
  Description of Artificial Sequence: Synthetic oligonucleotide
  Antisense strand to SEQ ID NO: 536683
ucucagaauauaugguggc

SEQ ID NO: 536685 - RNA, 19 nt, Artificial Sequence
  Description of Artificial Sequence: Synthetic oligonucleotide
  Sense strand starting at position 230 of SEQ ID NO: 318099
cugagagcuggucacauua

SEQ ID NO: 536686 - RNA, 19 nt, Artificial Sequence
  Description of Artificial Sequence: Synthetic oligonucleotide
  Antisense strand to SEQ ID NO: 536685
uaaugugaccagcucucag

SEQ ID NO: 536687 - RNA, 19 nt, Artificial Sequence
  Description of Artificial Sequence: Synthetic oligonucleotide
  Sense strand starting at position 285 of SEQ ID NO: 318099
acugaaugagcacagcauu

SEQ ID NO: 536688 - RNA, 19 nt, Artificial Sequence
  Description of Artificial Sequence: Synthetic oligonucleotide
  Antisense strand to SEQ ID NO: 536687
aaugcugugcucauucagu

SEQ ID NO: 536689 - RNA, 19 nt, Artificial Sequence
  Description of Artificial Sequence: Synthetic oligonucleotide
  Sense strand starting at position 330 of SEQ ID NO: 318099
guaucugugguuuaccaaa

SEQ ID NO: 536690 - RNA, 19 nt, Artificial Sequence
  Description of Artificial Sequence: Synthetic oligonucleotide
  Antisense strand to SEQ ID NO: 536689
uuugguaaaccacagauac

SEQ ID NO: 536691 - RNA, 19 nt, Artificial Sequence
  Description of Artificial Sequence: Synthetic oligonucleotide
  Sense strand starting at position 480 of SEQ ID NO: 318099
ugcugaaugcauuagagua

SEQ ID NO: 536692 - RNA, 19 nt, Artificial Sequence
  Description of Artificial Sequence: Synthetic oligonucleotide
  Antisense strand to SEQ ID NO: 536691
uacucuaaugcauucagca

SEQ ID NO: 536693 - RNA, 19 nt, Artificial Sequence
  Description of Artificial Sequence: Synthetic oligonucleotide
  Sense strand starting at position 751 of SEQ ID NO: 318099
aagauuaaccuguggucuu

SEQ ID NO: 536694 - RNA, 19 nt, Artificial Sequence
  Description of Artificial Sequence: Synthetic oligonucleotide
  Antisense strand to SEQ ID NO: 536693
aagaccacagguuaaucuu

SEQ ID NO: 536695 - RNA, 19 nt, Artificial Sequence
  Description of Artificial Sequence: Synthetic oligonucleotide
  Sense strand starting at position 864 of SEQ ID NO: 318099
cucugaacucugcacauga

SEQ ID NO: 536696 - RNA, 19 nt, Artificial Sequence
  Description of Artificial Sequence: Synthetic oligonucleotide
  Antisense strand to SEQ ID NO: 536695
ucaugugcagaguucagag

SEQ ID NO: 536697 - RNA, 19 nt, Artificial Sequence
  Description of Artificial Sequence: Synthetic oligonucleotide
  Sense strand starting at position 896 of SEQ ID NO: 318099
guguuaaucuggcuccauc

SEQ ID NO: 536698 - RNA, 19 nt, Artificial Sequence
  Description of Artificial Sequence: Synthetic oligonucleotide
  Antisense strand to SEQ ID NO: 536697
gauggagccagauuaacac

SEQ ID NO: 536699 - RNA, 19 nt, Artificial Sequence
  Description of Artificial Sequence: Synthetic oligonucleotide
  Sense strand starting at position 934 of SEQ ID NO: 318099
caaccuauuuccgagggca

SEQ ID NO: 536700 - RNA, 19 nt, Artificial Sequence
  Description of Artificial Sequence: Synthetic oligonucleotide
  Antisense strand to SEQ ID NO: 536699
ugcccucggaaauagguug

SEQ ID NO: 536701 - RNA, 19 nt, Artificial Sequence
  Description of Artificial Sequence: Synthetic oligonucleotide
  Sense strand starting at position 1193 of SEQ ID NO: 318099
ccggcuuugcacuagcaga

SEQ ID NO: 536702 - RNA, 19 nt, Artificial Sequence
  Description of Artificial Sequence: Synthetic oligonucleotide
  Antisense strand to SEQ ID NO: 536701
ucugcuagugcaaagccgg

SEQ ID NO: 536703 - RNA, 19 nt, Artificial Sequence
  Description of Artificial Sequence: Synthetic oligonucleotide
  Sense strand starting at position 1282 of SEQ ID NO: 318099
ggaagaauccggugccuua

SEQ ID NO: 536704 - RNA, 19 nt, Artificial Sequence
  Description of Artificial Sequence: Synthetic oligonucleotide
  Antisense strand to SEQ ID NO: 536703
uaaggcaccggauucuucc

SEQ ID NO: 536705 - RNA, 19 nt, Artificial Sequence
  Description of Artificial Sequence: Synthetic oligonucleotide
  Sense strand starting at position 1341 of SEQ ID NO: 318099
gcggacuccucaccugaua

SEQ ID NO: 536706 - RNA, 19 nt, Artificial Sequence
  Description of Artificial Sequence: Synthetic oligonucleotide
  Antisense strand to SEQ ID NO: 536705
uaucaggugaggaguccgc

SEQ ID NO: 536707 - RNA, 19 nt, Artificial Sequence
  Description of Artificial Sequence: Synthetic oligonucleotide
  Sense strand starting at position 1445 of SEQ ID NO: 318099
uggguugccagcuggauau

SEQ ID NO: 536708 - RNA, 19 nt, Artificial Sequence
  Description of Artificial Sequence: Synthetic oligonucleotide
  Antisense strand to SEQ ID NO: 536707
auauccagcuggcaaccca

SEQ ID NO: 536709 - RNA, 19 nt, Artificial Sequence
  Description of Artificial Sequence: Synthetic oligonucleotide
  Sense strand starting at position 1447 of SEQ ID NO: 318099
gguugccagcuggauauua

SEQ ID NO: 536710 - RNA, 19 nt, Artificial Sequence
  Description of Artificial Sequence: Synthetic oligonucleotide
  Antisense strand to SEQ ID NO: 536709
uaauauccagcuggcaacc

SEQ ID NO: 536711 - RNA, 19 nt, Artificial Sequence
  Description of Artificial Sequence: Synthetic oligonucleotide
  Sense strand starting at position 1543 of SEQ ID NO: 318099
gcaguugcugccuuccaau

SEQ ID NO: 536712 - RNA, 19 nt, Artificial Sequence
  Description of Artificial Sequence: Synthetic oligonucleotide
  Antisense strand to SEQ ID NO: 536711
auuggaaggcagcaacugc

SEQ ID NO: 536713 - RNA, 19 nt, Artificial Sequence
  Description of Artificial Sequence: Synthetic oligonucleotide
  Sense strand starting at position 2205 of SEQ ID NO: 318099
ggagaguuucgagggugga

SEQ ID NO: 536714 - RNA, 19 nt, Artificial Sequence
  Description of Artificial Sequence: Synthetic oligonucleotide
  Antisense strand to SEQ ID NO: 536713
uccacccucgaaacucucc

SEQ ID NO: 536715 - RNA, 19 nt, Artificial Sequence
  Description of Artificial Sequence: Synthetic oligonucleotide
  Sense strand starting at position 2206 of SEQ ID NO: 318099
gagaguuucgaggguggaa

SEQ ID NO: 536716 - RNA, 19 nt, Artificial Sequence
  Description of Artificial Sequence: Synthetic oligonucleotide
  Antisense strand to SEQ ID NO: 536715
uuccacccucgaaacucuc

SEQ ID NO: 536717 - RNA, 19 nt, Artificial Sequence
  Description of Artificial Sequence: Synthetic oligonucleotide
  Sense strand starting at position 2234 of SEQ ID NO: 318099
cgcggagaagugcaagaaa

SEQ ID NO: 536718 - RNA, 19 nt, Artificial Sequence
  Description of Artificial Sequence: Synthetic oligonucleotide
  Antisense strand to SEQ ID NO: 536717
uuucuugcacuucuccgcg

SEQ ID NO: 536719 - RNA, 19 nt, Artificial Sequence
  Description of Artificial Sequence: Synthetic oligonucleotide
  Sense strand starting at position 2486 of SEQ ID NO: 318099
gugugugcuggaggaacaa

SEQ ID NO: 536720 - RNA, 19 nt, Artificial Sequence
  Description of Artificial Sequence: Synthetic oligonucleotide
  Antisense strand to SEQ ID NO: 536719
uuguuccuccagcacacac

SEQ ID NO: 536721 - RNA, 19 nt, Artificial Sequence
  Description of Artificial Sequence: Synthetic oligonucleotide
  Sense strand starting at position 3225 of SEQ ID NO: 318099
uuuauuaugcaaggauaca

SEQ ID NO: 536722 - RNA, 19 nt, Artificial Sequence
  Description of Artificial Sequence: Synthetic oligonucleotide
  Antisense strand to SEQ ID NO: 536721
uguauccuugcauaauaaa

SEQ ID NO: 536723 - RNA, 19 nt, Artificial Sequence
  Description of Artificial Sequence: Synthetic oligonucleotide
  Sense strand starting at position 3327 of SEQ ID NO: 318099
cucagaauuuccgacucaa

SEQ ID NO: 536724 - RNA, 19 nt, Artificial Sequence
  Description of Artificial Sequence: Synthetic oligonucleotide
  Antisense strand to SEQ ID NO: 536723
uugagucggaaauucugag

SEQ ID NO: 536725 - RNA, 19 nt, Artificial Sequence
  Description of Artificial Sequence: Synthetic oligonucleotide
  Sense strand starting at position 3352 of SEQ ID NO: 318099
ugggcuggugcucaugaau

SEQ ID NO: 536726 - RNA, 19 nt, Artificial Sequence
  Description of Artificial Sequence: Synthetic oligonucleotide
  Antisense strand to SEQ ID NO: 536725
auucaugagcaccagccca

SEQ ID NO: 536727 - RNA, 19 nt, Artificial Sequence
  Description of Artificial Sequence: Synthetic oligonucleotide
  Sense strand starting at position 3430 of SEQ ID NO: 318099
gguggcucugugaguggua

SEQ ID NO: 536728 - RNA, 19 nt, Artificial Sequence
  Description of Artificial Sequence: Synthetic oligonucleotide
  Antisense strand to SEQ ID NO: 536727
uaccacucacagagccacc

SEQ ID NO: 536729 - RNA, 19 nt, Artificial Sequence
  Description of Artificial Sequence: Synthetic oligonucleotide
  Sense strand starting at position 3432 of SEQ ID NO: 318099
uggcucugugagugguaga

SEQ ID NO: 536730 - RNA, 19 nt, Artificial Sequence
  Description of Artificial Sequence: Synthetic oligonucleotide
  Antisense strand to SEQ ID NO: 536729
ucuaccacucacagagcca

SEQ ID NO: 536731 - RNA, 19 nt, Artificial Sequence
  Description of Artificial Sequence: Synthetic oligonucleotide
  Sense strand starting at position 3433 of SEQ ID NO: 318099
ggcucugugagugguagau

SEQ ID NO: 536732 - RNA, 19 nt, Artificial Sequence
  Description of Artificial Sequence: Synthetic oligonucleotide
  Antisense strand to SEQ ID NO: 536731
aucuaccacucacagagcc

SEQ ID NO: 536733 - RNA, 19 nt, Artificial Sequence
  Description of Artificial Sequence: Synthetic oligonucleotide
  Sense strand starting at position 3523 of SEQ ID NO: 318099
cccugauggcauuagauuc

SEQ ID NO: 536734 - RNA, 19 nt, Artificial Sequence
  Description of Artificial Sequence: Synthetic oligonucleotide
  Antisense strand to SEQ ID NO: 536733
gaaucuaaugccaucaggg

SEQ ID NO: 536735 - RNA, 19 nt, Artificial Sequence
  Description of Artificial Sequence: Synthetic oligonucleotide
  Sense strand starting at position 3533 of SEQ ID NO: 318099
auuagauucucaccuguuu

SEQ ID NO: 536736 - RNA, 19 nt, Artificial Sequence
  Description of Artificial Sequence: Synthetic oligonucleotide
  Antisense strand to SEQ ID NO: 536735
aaacaggugagaaucuaau

SEQ ID NO: 536737 - RNA, 19 nt, Artificial Sequence
  Description of Artificial Sequence: Synthetic oligonucleotide
  Sense strand starting at position 3538 of SEQ ID NO: 318099
auucucaccuguuuggaau

SEQ ID NO: 536738 - RNA, 19 nt, Artificial Sequence
  Description of Artificial Sequence: Synthetic oligonucleotide
  Antisense strand to SEQ ID NO: 536737
auuccaaacaggugagaau

SEQ ID NO: 536739 - RNA, 19 nt, Artificial Sequence
  Description of Artificial Sequence: Synthetic oligonucleotide
  Sense strand starting at position 3546 of SEQ ID NO: 318099
cuguuuggaaugggaugaa

SEQ ID NO: 536740 - RNA, 19 nt, Artificial Sequence
  Description of Artificial Sequence: Synthetic oligonucleotide
  Antisense strand to SEQ ID NO: 536739
uucaucccauuccaaacag

SEQ ID NO: 536741 - RNA, 19 nt, Artificial Sequence
  Description of Artificial Sequence: Synthetic oligonucleotide
  Sense strand starting at position 3742 of SEQ ID NO: 318099
ccauuucuguuguugcauu

SEQ ID NO: 536742 - RNA, 19 nt, Artificial Sequence
  Description of Artificial Sequence: Synthetic oligonucleotide
  Antisense strand to SEQ ID NO: 536741
aaugcaacaacagaaaugg

SEQ ID NO: 536743 - RNA, 19 nt, Artificial Sequence
  Description of Artificial Sequence: Synthetic oligonucleotide
  Sense strand starting at position 3749 of SEQ ID NO: 318099
uguuguugcauuugucaag

SEQ ID NO: 536744 - RNA, 19 nt, Artificial Sequence
  Description of Artificial Sequence: Synthetic oligonucleotide
  Antisense strand to SEQ ID NO: 536743
cuugacaaaugcaacaaca

SEQ ID NO: 536745 - RNA, 19 nt, Artificial Sequence
  Description of Artificial Sequence: Synthetic oligonucleotide
  Sense strand starting at position 3750 of SEQ ID NO: 318099
guuguugcauuugucaagu

SEQ ID NO: 536746 - RNA, 19 nt, Artificial Sequence
  Description of Artificial Sequence: Synthetic oligonucleotide
  Antisense strand to SEQ ID NO: 536745
acuugacaaaugcaacaac

SEQ ID NO: 536747 - RNA, 19 nt, Artificial Sequence
  Description of Artificial Sequence: Synthetic oligonucleotide
  Sense strand starting at position 3800 of SEQ ID NO: 318099
uucguaugaguguaugacu

SEQ ID NO: 536748 - RNA, 19 nt, Artificial Sequence
  Description of Artificial Sequence: Synthetic oligonucleotide
  Antisense strand to SEQ ID NO: 536747
agucauacacucauacgaa

SEQ ID NO: 536749 - RNA, 19 nt, Artificial Sequence
  Description of Artificial Sequence: Synthetic oligonucleotide
  Sense strand starting at position 3896 of SEQ ID NO: 318099
ggugacaggguuugaaagu

SEQ ID NO: 536750 - RNA, 19 nt, Artificial Sequence
  Description of Artificial Sequence: Synthetic oligonucleotide
  Antisense strand to SEQ ID NO: 536749
acuuucaaacccugucacc

SEQ ID NO: 536751 - RNA, 19 nt, Artificial Sequence
  Description of Artificial Sequence: Synthetic oligonucleotide
  Sense strand starting at position 3909 of SEQ ID NO: 318099
gaaaguguggcuugaagug

SEQ ID NO: 536752 - RNA, 19 nt, Artificial Sequence
  Description of Artificial Sequence: Synthetic oligonucleotide
  Antisense strand to SEQ ID NO: 536751
cacuucaagccacacuuuc

SEQ ID NO: 536753 - RNA, 19 nt, Artificial Sequence
  Description of Artificial Sequence: Synthetic oligonucleotide
  Sense strand starting at position 25 of SEQ ID NO: 318100
acaggacuacugcgaggau

SEQ ID NO: 536754 - RNA, 19 nt, Artificial Sequence
  Description of Artificial Sequence: Synthetic oligonucleotide
  Antisense strand to SEQ ID NO: 536753
auccucgcaguaguccugu

SEQ ID NO: 536755 - RNA, 19 nt, Artificial Sequence
  Description of Artificial Sequence: Synthetic oligonucleotide
  Sense strand starting at position 28 of SEQ ID NO: 318100
ggacuacugcgaggauuaa

SEQ ID NO: 536756 - RNA, 19 nt, Artificial Sequence
  Description of Artificial Sequence: Synthetic oligonucleotide
  Antisense strand to SEQ ID NO: 536755
uuaauccucgcaguagucc

SEQ ID NO: 536757 - RNA, 19 nt, Artificial Sequence
  Description of Artificial Sequence: Synthetic oligonucleotide
  Sense strand starting at position 91 of SEQ ID NO: 318100
gggaguguucaguaagcau

SEQ ID NO: 536758 - RNA, 19 nt, Artificial Sequence
  Description of Artificial Sequence: Synthetic oligonucleotide
  Antisense strand to SEQ ID NO: 536757
augcuuacugaacacuccc

SEQ ID NO: 536759 - RNA, 19 nt, Artificial Sequence
  Description of Artificial Sequence: Synthetic oligonucleotide
  Sense strand starting at position 197 of SEQ ID NO: 318100
gagugacuggugcaagauu

SEQ ID NO: 536760 - RNA, 19 nt, Artificial Sequence
  Description of Artificial Sequence: Synthetic oligonucleotide
  Antisense strand to SEQ ID NO: 536759
aaucuugcaccagucacuc

SEQ ID NO: 536761 - RNA, 19 nt, Artificial Sequence
  Description of Artificial Sequence: Synthetic oligonucleotide
  Sense strand starting at position 218 of SEQ ID NO: 318100
cucguuuguccucugcuaa

SEQ ID NO: 536762 - RNA, 19 nt, Artificial Sequence
  Description of Artificial Sequence: Synthetic oligonucleotide
  Antisense strand to SEQ ID NO: 536761
uuagcagaggacaaacgag

SEQ ID NO: 536763 - RNA, 19 nt, Artificial Sequence
  Description of Artificial Sequence: Synthetic oligonucleotide
  Sense strand starting at position 273 of SEQ ID NO: 318100
agucuucuauuuguucgau

SEQ ID NO: 536764 - RNA, 19 nt, Artificial Sequence
  Description of Artificial Sequence: Synthetic oligonucleotide
  Antisense strand to SEQ ID NO: 536763
aucgaacaaauagaagacu

SEQ ID NO: 536765 - RNA, 19 nt, Artificial Sequence
  Description of Artificial Sequence: Synthetic oligonucleotide
  Sense strand starting at position 274 of SEQ ID NO: 318100
gucuucuauuuguucgauu

SEQ ID NO: 536766 - RNA, 19 nt, Artificial Sequence
  Description of Artificial Sequence: Synthetic oligonucleotide
  Antisense strand to SEQ ID NO: 536765
aaucgaacaaauagaagac

SEQ ID NO: 536767 - RNA, 19 nt, Artificial Sequence
  Description of Artificial Sequence: Synthetic oligonucleotide
  Sense strand starting at position 323 of SEQ ID NO: 318100
aagggucucgcuuagagga

SEQ ID NO: 536768 - RNA, 19 nt, Artificial Sequence
  Description of Artificial Sequence: Synthetic oligonucleotide
  Antisense strand to SEQ ID NO: 536767
uccucuaagcgagacccuu

SEQ ID NO: 536769 - RNA, 19 nt, Artificial Sequence
  Description of Artificial Sequence: Synthetic oligonucleotide
  Sense strand starting at position 436 of SEQ ID NO: 318100
gcaggagucaugcaaguga

SEQ ID NO: 536770 - RNA, 19 nt, Artificial Sequence
  Description of Artificial Sequence: Synthetic oligonucleotide
  Antisense strand to SEQ ID NO: 536769
ucacuugcaugacuccugc

SEQ ID NO: 536771 - RNA, 19 nt, Artificial Sequence
  Description of Artificial Sequence: Synthetic oligonucleotide
  Sense strand starting at position 499 of SEQ ID NO: 318100
gggagaaacaccugcuugu

SEQ ID NO: 536772 - RNA, 19 nt, Artificial Sequence
  Description of Artificial Sequence: Synthetic oligonucleotide
  Antisense strand to SEQ ID NO: 536771
acaagcagguguuucuccc

SEQ ID NO: 536773 - RNA, 19 nt, Artificial Sequence
  Description of Artificial Sequence: Synthetic oligonucleotide
  Sense strand starting at position 509 of SEQ ID NO: 318100
ccugcuugucccguuauca

SEQ ID NO: 536774 - RNA, 19 nt, Artificial Sequence
  Description of Artificial Sequence: Synthetic oligonucleotide
  Antisense strand to SEQ ID NO: 536773
ugauaacgggacaagcagg

SEQ ID NO: 536775 - RNA, 19 nt, Artificial Sequence
  Description of Artificial Sequence: Synthetic oligonucleotide
  Sense strand starting at position 510 of SEQ ID NO: 318100
cugcuugucccguuaucac

SEQ ID NO: 536776 - RNA, 19 nt, Artificial Sequence
  Description of Artificial Sequence: Synthetic oligonucleotide
  Antisense strand to SEQ ID NO: 536775
gugauaacgggacaagcag

SEQ ID NO: 536777 - RNA, 19 nt, Artificial Sequence
  Description of Artificial Sequence: Synthetic oligonucleotide
  Sense strand starting at position 564 of SEQ ID NO: 318100
uccagaaguacauggguua

SEQ ID NO: 536778 - RNA, 19 nt, Artificial Sequence
  Description of Artificial Sequence: Synthetic oligonucleotide
  Antisense strand to SEQ ID NO: 536777
uaacccauguacuucugga

SEQ ID NO: 536779 - RNA, 19 nt, Artificial Sequence
  Description of Artificial Sequence: Synthetic oligonucleotide
  Sense strand starting at position 565 of SEQ ID NO: 318100
ccagaaguacauggguuaa

SEQ ID NO: 536780 - RNA, 19 nt, Artificial Sequence
  Description of Artificial Sequence: Synthetic oligonucleotide
  Antisense strand to SEQ ID NO: 536779
uuaacccauguacuucugg

SEQ ID NO: 536781 - RNA, 19 nt, Artificial Sequence
  Description of Artificial Sequence: Synthetic oligonucleotide
  Sense strand starting at position 619 of SEQ ID NO: 318100
uuuauuaauccagaugagc

SEQ ID NO: 536782 - RNA, 19 nt, Artificial Sequence
  Description of Artificial Sequence: Synthetic oligonucleotide
  Antisense strand to SEQ ID NO: 536781
gcucaucuggauuaauaaa

SEQ ID NO: 536783 - RNA, 19 nt, Artificial Sequence
  Description of Artificial Sequence: Synthetic oligonucleotide
  Sense strand starting at position 641 of SEQ ID NO: 318100
gggauuugguuggaauuaa

SEQ ID NO: 536784 - RNA, 19 nt, Artificial Sequence
  Description of Artificial Sequence: Synthetic oligonucleotide
  Antisense strand to SEQ ID NO: 536783
uuaauuccaaccaaauccc

SEQ ID NO: 536785 - RNA, 19 nt, Artificial Sequence
  Description of Artificial Sequence: Synthetic oligonucleotide
  Sense strand starting at position 652 of SEQ ID NO: 318100
ggaauuaaucugcaucucu

SEQ ID NO: 536786 - RNA, 19 nt, Artificial Sequence
  Description of Artificial Sequence: Synthetic oligonucleotide
  Antisense strand to SEQ ID NO: 536785
agagaugcagauuaauucc

SEQ ID NO: 536787 - RNA, 19 nt, Artificial Sequence
  Description of Artificial Sequence: Synthetic oligonucleotide
  Sense strand starting at position 738 of SEQ ID NO: 318100
cuggaaucuguugaacagu

SEQ ID NO: 536788 - RNA, 19 nt, Artificial Sequence
  Description of Artificial Sequence: Synthetic oligonucleotide
  Antisense strand to SEQ ID NO: 536787
acuguucaacagauuccag

SEQ ID NO: 536789 - RNA, 19 nt, Artificial Sequence
  Description of Artificial Sequence: Synthetic oligonucleotide
  Sense strand starting at position 846 of SEQ ID NO: 318100
ggagcugcgcuggaauaaa

SEQ ID NO: 536790 - RNA, 19 nt, Artificial Sequence
  Description of Artificial Sequence: Synthetic oligonucleotide
  Antisense strand to SEQ ID NO: 536789
uuuauuccagcgcagcucc

SEQ ID NO: 536791 - RNA, 19 nt, Artificial Sequence
  Description of Artificial Sequence: Synthetic oligonucleotide
  Sense strand starting at position 1966 of SEQ ID NO: 318100
gcacgucuugccucgacua

SEQ ID NO: 536792 - RNA, 19 nt, Artificial Sequence
  Description of Artificial Sequence: Synthetic oligonucleotide
  Antisense strand to SEQ ID NO: 536791
uagucgaggcaagacgugc

SEQ ID NO: 536793 - RNA, 19 nt, Artificial Sequence
  Description of Artificial Sequence: Synthetic oligonucleotide
  Sense strand starting at position 2120 of SEQ ID NO: 318100
gggaaaucaggcuguugua

SEQ ID NO: 536794 - RNA, 19 nt, Artificial Sequence
  Description of Artificial Sequence: Synthetic oligonucleotide
  Antisense strand to SEQ ID NO: 536793
uacaacagccugauuuccc

SEQ ID NO: 536795 - RNA, 19 nt, Artificial Sequence
  Description of Artificial Sequence: Synthetic oligonucleotide
  Sense strand starting at position 2831 of SEQ ID NO: 318100
gucuaauagugaccaggau

SEQ ID NO: 536796 - RNA, 19 nt, Artificial Sequence
  Description of Artificial Sequence: Synthetic oligonucleotide
  Antisense strand to SEQ ID NO: 536795
auccuggucacuauuagac

SEQ ID NO: 536797 - RNA, 19 nt, Artificial Sequence
  Description of Artificial Sequence: Synthetic oligonucleotide
  Sense strand starting at position 2894 of SEQ ID NO: 318100
gcuggcuuuagggaacaga

SEQ ID NO: 536798 - RNA, 19 nt, Artificial Sequence
  Description of Artificial Sequence: Synthetic oligonucleotide
  Antisense strand to SEQ ID NO: 536797
ucuguucccuaaagccagc

SEQ ID NO: 536799 - RNA, 19 nt, Artificial Sequence
  Description of Artificial Sequence: Synthetic oligonucleotide
  Sense strand starting at position 3031 of SEQ ID NO: 318100
augggaguuccgcaaugga

SEQ ID NO: 536800 - RNA, 19 nt, Artificial Sequence
  Description of Artificial Sequence: Synthetic oligonucleotide
  Antisense strand to SEQ ID NO: 536799
uccauugcggaacucccau

SEQ ID NO: 536801 - RNA, 19 nt, Artificial Sequence
  Description of Artificial Sequence: Synthetic oligonucleotide
  Sense strand starting at position 3109 of SEQ ID NO: 318100
gaggaauuagcucagggcu

SEQ ID NO: 536802 - RNA, 19 nt, Artificial Sequence
  Description of Artificial Sequence: Synthetic oligonucleotide
  Antisense strand to SEQ ID NO: 536801
agcccugagcuaauuccuc

SEQ ID NO: 536803 - RNA, 19 nt, Artificial Sequence
  Description of Artificial Sequence: Synthetic oligonucleotide
  Sense strand starting at position 3112 of SEQ ID NO: 318100
gaauuagcucagggcugau

SEQ ID NO: 536804 - RNA, 19 nt, Artificial Sequence
  Description of Artificial Sequence: Synthetic oligonucleotide
  Antisense strand to SEQ ID NO: 536803
aucagcccugagcuaauuc

SEQ ID NO: 536805 - RNA, 19 nt, Artificial Sequence
  Description of Artificial Sequence: Synthetic oligonucleotide
  Sense strand starting at position 3229 of SEQ ID NO: 318100
cguauaguccuagagacuu

SEQ ID NO: 536806 - RNA, 19 nt, Artificial Sequence
  Description of Artificial Sequence: Synthetic oligonucleotide
  Antisense strand to SEQ ID NO: 536805
aagucucuaggacuauacg

SEQ ID NO: 536807 - RNA, 19 nt, Artificial Sequence
  Description of Artificial Sequence: Synthetic oligonucleotide
  Sense strand starting at position 3242 of SEQ ID NO: 318100
agacuugacuggguguuca

SEQ ID NO: 536808 - RNA, 19 nt, Artificial Sequence
  Description of Artificial Sequence: Synthetic oligonucleotide
  Antisense strand to SEQ ID NO: 536807
ugaacacccagucaagucu

SEQ ID NO: 536809 - RNA, 19 nt, Artificial Sequence
  Description of Artificial Sequence: Synthetic oligonucleotide
  Sense strand starting at position 3456 of SEQ ID NO: 318100
agaggaaaugcauggguua

SEQ ID NO: 536810 - RNA, 19 nt, Artificial Sequence
  Description of Artificial Sequence: Synthetic oligonucleotide
  Antisense strand to SEQ ID NO: 536809
uaacccaugcauuuccucu

SEQ ID NO: 536811 - RNA, 19 nt, Artificial Sequence
  Description of Artificial Sequence: Synthetic oligonucleotide
  Sense strand starting at position 3457 of SEQ ID NO: 318100
gaggaaaugcauggguuaa

SEQ ID NO: 536812 - RNA, 19 nt, Artificial Sequence
  Description of Artificial Sequence: Synthetic oligonucleotide
  Antisense strand to SEQ ID NO: 536811
uuaacccaugcauuuccuc

SEQ ID NO: 536813 - RNA, 19 nt, Artificial Sequence
  Description of Artificial Sequence: Synthetic oligonucleotide
  Sense strand starting at position 3458 of SEQ ID NO: 318100
aggaaaugcauggguuaau

SEQ ID NO: 536814 - RNA, 19 nt, Artificial Sequence
  Description of Artificial Sequence: Synthetic oligonucleotide
  Antisense strand to SEQ ID NO: 536813
auuaacccaugcauuuccu

SEQ ID NO: 536815 - RNA, 19 nt, Artificial Sequence
  Description of Artificial Sequence: Synthetic oligonucleotide
  Sense strand starting at position 3459 of SEQ ID NO: 318100
ggaaaugcauggguuaauc

SEQ ID NO: 536816 - RNA, 19 nt, Artificial Sequence
  Description of Artificial Sequence: Synthetic oligonucleotide
  Antisense strand to SEQ ID NO: 536815
gauuaacccaugcauuucc

SEQ ID NO: 536817 - RNA, 19 nt, Artificial Sequence
  Description of Artificial Sequence: Synthetic oligonucleotide
  Sense strand starting at position 3485 of SEQ ID NO: 318100
ggcgcauugcaaucugagu

SEQ ID NO: 536818 - RNA, 19 nt, Artificial Sequence
  Description of Artificial Sequence: Synthetic oligonucleotide
  Antisense strand to SEQ ID NO: 536817
acucagauugcaaugcgcc

SEQ ID NO: 536819 - RNA, 19 nt, Artificial Sequence
  Description of Artificial Sequence: Synthetic oligonucleotide
  Sense strand starting at position 3622 of SEQ ID NO: 318100
gaaccuaacugaguguuaa

SEQ ID NO: 536820 - RNA, 19 nt, Artificial Sequence
  Description of Artificial Sequence: Synthetic oligonucleotide
  Antisense strand to SEQ ID NO: 536819
uuaacacucaguuagguuc

SEQ ID NO: 536821 - RNA, 19 nt, Artificial Sequence
  Description of Artificial Sequence: Synthetic oligonucleotide
  Sense strand starting at position 3623 of SEQ ID NO: 318100
aaccuaacugaguguuaag

SEQ ID NO: 536822 - RNA, 19 nt, Artificial Sequence
  Description of Artificial Sequence: Synthetic oligonucleotide
  Antisense strand to SEQ ID NO: 536821
cuuaacacucaguuagguu

SEQ ID NO: 536823 - RNA, 19 nt, Artificial Sequence
  Description of Artificial Sequence: Synthetic oligonucleotide
  Sense strand starting at position 3687 of SEQ ID NO: 318100
ggguacuuuaagugacaaa

SEQ ID NO: 536824 - RNA, 19 nt, Artificial Sequence
  Description of Artificial Sequence: Synthetic oligonucleotide
  Antisense strand to SEQ ID NO: 536823
uuugucacuuaaaguaccc

SEQ ID NO: 536825 - RNA, 19 nt, Artificial Sequence
  Description of Artificial Sequence: Synthetic oligonucleotide
  Sense strand starting at position 3694 of SEQ ID NO: 318100
uuaagugacaaauggaagu

SEQ ID NO: 536826 - RNA, 19 nt, Artificial Sequence
  Description of Artificial Sequence: Synthetic oligonucleotide
  Antisense strand to SEQ ID NO: 536825
acuuccauuugucacuuaa

SEQ ID NO: 536827 - RNA, 19 nt, Artificial Sequence
  Description of Artificial Sequence: Synthetic oligonucleotide
  Sense strand starting at position 3882 of SEQ ID NO: 318100
aucuuuguggucugauaag

SEQ ID NO: 536828 - RNA, 19 nt, Artificial Sequence
  Description of Artificial Sequence: Synthetic oligonucleotide
  Antisense strand to SEQ ID NO: 536827
cuuaucagaccacaaagau

SEQ ID NO: 536829 - RNA, 19 nt, Artificial Sequence
  Description of Artificial Sequence: Synthetic oligonucleotide
  Sense strand starting at position 3891 of SEQ ID NO: 318100
gucugauaaguugaccaca

SEQ ID NO: 536830 - RNA, 19 nt, Artificial Sequence
  Description of Artificial Sequence: Synthetic oligonucleotide
  Antisense strand to SEQ ID NO: 536829
uguggucaacuuaucagac

SEQ ID NO: 536831 - RNA, 19 nt, Artificial Sequence
  Description of Artificial Sequence: Synthetic oligonucleotide
  Sense strand starting at position 3893 of SEQ ID NO: 318100
cugauaaguugaccacagu

SEQ ID NO: 536832 - RNA, 19 nt, Artificial Sequence
  Description of Artificial Sequence: Synthetic oligonucleotide
  Antisense strand to SEQ ID NO: 536831
acuguggucaacuuaucag

SEQ ID NO: 536833 - RNA, 19 nt, Artificial Sequence
  Description of Artificial Sequence: Synthetic oligonucleotide
  Sense strand starting at position 808 of SEQ ID NO: 318101
ggaguaagcugcggaagua

SEQ ID NO: 536834 - RNA, 19 nt, Artificial Sequence
  Description of Artificial Sequence: Synthetic oligonucleotide
  Antisense strand to SEQ ID NO: 536833
uacuuccgcagcuuacucc

SEQ ID NO: 536835 - RNA, 19 nt, Artificial Sequence
  Description of Artificial Sequence: Synthetic oligonucleotide
  Sense strand starting at position 911 of SEQ ID NO: 318101
gacgaucuugacugagugu

SEQ ID NO: 536836 - RNA, 19 nt, Artificial Sequence
  Description of Artificial Sequence: Synthetic oligonucleotide
  Antisense strand to SEQ ID NO: 536835
acacucagucaagaucguc

SEQ ID NO: 536837 - RNA, 19 nt, Artificial Sequence
  Description of Artificial Sequence: Synthetic oligonucleotide
  Sense strand starting at position 912 of SEQ ID NO: 318101
acgaucuugacugaguguu

SEQ ID NO: 536838 - RNA, 19 nt, Artificial Sequence
  Description of Artificial Sequence: Synthetic oligonucleotide
  Antisense strand to SEQ ID NO: 536837
aacacucagucaagaucgu

SEQ ID NO: 536839 - RNA, 19 nt, Artificial Sequence
  Description of Artificial Sequence: Synthetic oligonucleotide
  Sense strand starting at position 914 of SEQ ID NO: 318101
gaucuugacugaguguucu

SEQ ID NO: 536840 - RNA, 19 nt, Artificial Sequence
  Description of Artificial Sequence: Synthetic oligonucleotide
  Antisense strand to SEQ ID NO: 536839
agaacacucagucaagauc

SEQ ID NO: 536841 - RNA, 19 nt, Artificial Sequence
  Description of Artificial Sequence: Synthetic oligonucleotide
  Sense strand starting at position 918 of SEQ ID NO: 318101
uugacugaguguucuuuga

SEQ ID NO: 536842 - RNA, 19 nt, Artificial Sequence
  Description of Artificial Sequence: Synthetic oligonucleotide
  Antisense strand to SEQ ID NO: 536841
ucaaagaacacucagucaa

SEQ ID NO: 536843 - RNA, 19 nt, Artificial Sequence
  Description of Artificial Sequence: Synthetic oligonucleotide
  Sense strand starting at position 920 of SEQ ID NO: 318101
gacugaguguucuuugauu

SEQ ID NO: 536844 - RNA, 19 nt, Artificial Sequence
  Description of Artificial Sequence: Synthetic oligonucleotide
  Antisense strand to SEQ ID NO: 536843
aaucaaagaacacucaguc

SEQ ID NO: 536845 - RNA, 19 nt, Artificial Sequence
  Description of Artificial Sequence: Synthetic oligonucleotide
  Sense strand starting at position 922 of SEQ ID NO: 318101
cugaguguucuuugauugu

SEQ ID NO: 536846 - RNA, 19 nt, Artificial Sequence
  Description of Artificial Sequence: Synthetic oligonucleotide
  Antisense strand to SEQ ID NO: 536845
acaaucaaagaacacucag

SEQ ID NO: 536847 - RNA, 19 nt, Artificial Sequence
  Description of Artificial Sequence: Synthetic oligonucleotide
  Sense strand starting at position 1041 of SEQ ID NO: 318101
caggcauguggccaugaga

SEQ ID NO: 536848 - RNA, 19 nt, Artificial Sequence
  Description of Artificial Sequence: Synthetic oligonucleotide
  Antisense strand to SEQ ID NO: 536847
ucucauggccacaugccug

SEQ ID NO: 536849 - RNA, 19 nt, Artificial Sequence
  Description of Artificial Sequence: Synthetic oligonucleotide
  Sense strand starting at position 1212 of SEQ ID NO: 318101
auauuucucugcugaagau

SEQ ID NO: 536850 - RNA, 19 nt, Artificial Sequence
  Description of Artificial Sequence: Synthetic oligonucleotide
  Antisense strand to SEQ ID NO: 536849
aucuucagcagagaaauau

SEQ ID NO: 536851 - RNA, 19 nt, Artificial Sequence
  Description of Artificial Sequence: Synthetic oligonucleotide
  Sense strand starting at position 1269 of SEQ ID NO: 318101
acuugaagcugugaucauc

SEQ ID NO: 536852 - RNA, 19 nt, Artificial Sequence
  Description of Artificial Sequence: Synthetic oligonucleotide
  Antisense strand to SEQ ID NO: 536851
gaugaucacagcuucaagu

SEQ ID NO: 536853 - RNA, 19 nt, Artificial Sequence
  Description of Artificial Sequence: Synthetic oligonucleotide
  Sense strand starting at position 1277 of SEQ ID NO: 318101
cugugaucaucccuguuua

SEQ ID NO: 536854 - RNA, 19 nt, Artificial Sequence
  Description of Artificial Sequence: Synthetic oligonucleotide
  Antisense strand to SEQ ID NO: 536853
uaaacagggaugaucacag

SEQ ID NO: 536855 - RNA, 19 nt, Artificial Sequence
  Description of Artificial Sequence: Synthetic oligonucleotide
  Sense strand starting at position 1278 of SEQ ID NO: 318101
ugugaucaucccuguuuaa

SEQ ID NO: 536856 - RNA, 19 nt, Artificial Sequence
  Description of Artificial Sequence: Synthetic oligonucleotide
  Antisense strand to SEQ ID NO: 536855
uuaaacagggaugaucaca

SEQ ID NO: 536857 - RNA, 19 nt, Artificial Sequence
  Description of Artificial Sequence: Synthetic oligonucleotide
  Sense strand starting at position 2206 of SEQ ID NO: 318101
aguauagauuggugcauuu

SEQ ID NO: 536858 - RNA, 19 nt, Artificial Sequence
  Description of Artificial Sequence: Synthetic oligonucleotide
  Antisense strand to SEQ ID NO: 536857
aaaugcaccaaucuauacu

SEQ ID NO: 536859 - RNA, 19 nt, Artificial Sequence
  Description of Artificial Sequence: Synthetic oligonucleotide
  Sense strand starting at position 2348 of SEQ ID NO: 318101
cagauuagcuaggcucaga

SEQ ID NO: 536860 - RNA, 19 nt, Artificial Sequence
  Description of Artificial Sequence: Synthetic oligonucleotide
  Antisense strand to SEQ ID NO: 536859
ucugagccuagcuaaucug

SEQ ID NO: 536861 - RNA, 19 nt, Artificial Sequence
  Description of Artificial Sequence: Synthetic oligonucleotide
  Sense strand starting at position 2489 of SEQ ID NO: 318101
ucgauugguguguucgcaa

SEQ ID NO: 536862 - RNA, 19 nt, Artificial Sequence
  Description of Artificial Sequence: Synthetic oligonucleotide
  Antisense strand to SEQ ID NO: 536861
uugcgaacacaccaaucga

SEQ ID NO: 536863 - RNA, 19 nt, Artificial Sequence
  Description of Artificial Sequence: Synthetic oligonucleotide
  Sense strand starting at position 2600 of SEQ ID NO: 318101
agacauaaauguuguccaa

SEQ ID NO: 536864 - RNA, 19 nt, Artificial Sequence
  Description of Artificial Sequence: Synthetic oligonucleotide
  Antisense strand to SEQ ID NO: 536863
uuggacaacauuuaugucu

SEQ ID NO: 536865 - RNA, 19 nt, Artificial Sequence
  Description of Artificial Sequence: Synthetic oligonucleotide
  Sense strand starting at position 3473 of SEQ ID NO: 318101
agcugacauguguaaacau

SEQ ID NO: 536866 - RNA, 19 nt, Artificial Sequence
  Description of Artificial Sequence: Synthetic oligonucleotide
  Antisense strand to SEQ ID NO: 536865
auguuuacacaugucagcu

SEQ ID NO: 536867 - RNA, 19 nt, Artificial Sequence
  Description of Artificial Sequence: Synthetic oligonucleotide
  Sense strand starting at position 3630 of SEQ ID NO: 318101
acacucugugcacauauau

SEQ ID NO: 536868 - RNA, 19 nt, Artificial Sequence
  Description of Artificial Sequence: Synthetic oligonucleotide
  Antisense strand to SEQ ID NO: 536867
auauaugugcacagagugu

SEQ ID NO: 536869 - RNA, 19 nt, Artificial Sequence
  Description of Artificial Sequence: Synthetic oligonucleotide
  Sense strand starting at position 3729 of SEQ ID NO: 318101
gacacauguucguacacuc

SEQ ID NO: 536870 - RNA, 19 nt, Artificial Sequence
  Description of Artificial Sequence: Synthetic oligonucleotide
  Antisense strand to SEQ ID NO: 536869
gaguguacgaacauguguc

SEQ ID NO: 536871 - RNA, 19 nt, Artificial Sequence
  Description of Artificial Sequence: Synthetic oligonucleotide
  Sense strand starting at position 3756 of SEQ ID NO: 318101
acagaaucuugccuccuga

SEQ ID NO: 536872 - RNA, 19 nt, Artificial Sequence
  Description of Artificial Sequence: Synthetic oligonucleotide
  Antisense strand to SEQ ID NO: 536871
ucaggaggcaagauucugu

SEQ ID NO: 536873 - RNA, 19 nt, Artificial Sequence
  Description of Artificial Sequence: Synthetic oligonucleotide
  Sense strand starting at position 3840 of SEQ ID NO: 318101
ggcuccagcugucuaucua

SEQ ID NO: 536874 - RNA, 19 nt, Artificial Sequence
  Description of Artificial Sequence: Synthetic oligonucleotide
  Antisense strand to SEQ ID NO: 536873
uagauagacagcuggagcc

SEQ ID NO: 536875 - RNA, 19 nt, Artificial Sequence
  Description of Artificial Sequence: Synthetic oligonucleotide
  Sense strand starting at position 3841 of SEQ ID NO: 318101
gcuccagcugucuaucuau

SEQ ID NO: 536876 - RNA, 19 nt, Artificial Sequence
  Description of Artificial Sequence: Synthetic oligonucleotide
  Antisense strand to SEQ ID NO: 536875
auagauagacagcuggagc

SEQ ID NO: 536877 - RNA, 19 nt, Artificial Sequence
  Description of Artificial Sequence: Synthetic oligonucleotide
  Sense strand starting at position 3844 of SEQ ID NO: 318101
ccagcugucuaucuaugaa

SEQ ID NO: 536878 - RNA, 19 nt, Artificial Sequence
  Description of Artificial Sequence: Synthetic oligonucleotide
  Antisense strand to SEQ ID NO: 536877
uucauagauagacagcugg

SEQ ID NO: 536879 - RNA, 19 nt, Artificial Sequence
  Description of Artificial Sequence: Synthetic oligonucleotide
  Sense strand starting at position 3847 of SEQ ID NO: 318101
gcugucuaucuaugaaaua

SEQ ID NO: 536880 - RNA, 19 nt, Artificial Sequence
  Description of Artificial Sequence: Synthetic oligonucleotide
  Antisense strand to SEQ ID NO: 536879
uauuucauagauagacagc

SEQ ID NO: 536881 - RNA, 19 nt, Artificial Sequence
  Description of Artificial Sequence: Synthetic oligonucleotide
  Sense strand starting at position 3901 of SEQ ID NO: 318101
aggcccuguucucuggaau

SEQ ID NO: 536882 - RNA, 19 nt, Artificial Sequence
  Description of Artificial Sequence: Synthetic oligonucleotide
  Antisense strand to SEQ ID NO: 536881
auuccagagaacagggccu

SEQ ID NO: 536883 - RNA, 19 nt, Artificial Sequence
  Description of Artificial Sequence: Synthetic oligonucleotide
  Sense strand starting at position 3902 of SEQ ID NO: 318101
ggcccuguucucuggaaug

SEQ ID NO: 536884 - RNA, 19 nt, Artificial Sequence
  Description of Artificial Sequence: Synthetic oligonucleotide
  Antisense strand to SEQ ID NO: 536883
cauuccagagaacagggcc

SEQ ID NO: 536885 - RNA, 19 nt, Artificial Sequence
  Description of Artificial Sequence: Synthetic oligonucleotide
  Sense strand starting at position 3907 of SEQ ID NO: 318101
uguucucuggaauguauau

SEQ ID NO: 536886 - RNA, 19 nt, Artificial Sequence
  Description of Artificial Sequence: Synthetic oligonucleotide
  Antisense strand to SEQ ID NO: 536885
auauacauuccagagaaca

SEQ ID NO: 536887 - RNA, 19 nt, Artificial Sequence
  Description of Artificial Sequence: Synthetic oligonucleotide
  Sense strand starting at position 3913 of SEQ ID NO: 318101
cuggaauguauaugagucu

SEQ ID NO: 536888 - RNA, 19 nt, Artificial Sequence
  Description of Artificial Sequence: Synthetic oligonucleotide
  Antisense strand to SEQ ID NO: 536887
agacucauauacauuccag

SEQ ID NO: 536889 - RNA, 19 nt, Artificial Sequence
  Description of Artificial Sequence: Synthetic oligonucleotide
  Sense strand starting at position 3914 of SEQ ID NO: 318101
uggaauguauaugagucuu

SEQ ID NO: 536890 - RNA, 19 nt, Artificial Sequence
  Description of Artificial Sequence: Synthetic oligonucleotide
  Antisense strand to SEQ ID NO: 536889
aagacucauauacauucca

SEQ ID NO: 536891 - RNA, 19 nt, Artificial Sequence
  Description of Artificial Sequence: Synthetic oligonucleotide
  Sense strand starting at position 3932 of SEQ ID NO: 318101
ucaauuucucggugccuca

SEQ ID NO: 536892 - RNA, 19 nt, Artificial Sequence
  Description of Artificial Sequence: Synthetic oligonucleotide
  Antisense strand to SEQ ID NO: 536891
ugaggcaccgagaaauuga

SEQ ID NO: 536893 - RNA, 19 nt, Artificial Sequence
  Description of Artificial Sequence: Synthetic oligonucleotide
  Sense strand starting at position 3946 of SEQ ID NO: 318101
ccucacuugucuugggaag

SEQ ID NO: 536894 - RNA, 19 nt, Artificial Sequence
  Description of Artificial Sequence: Synthetic oligonucleotide
  Antisense strand to SEQ ID NO: 536893
cuucccaagacaagugagg

SEQ ID NO: 536895 - RNA, 19 nt, Artificial Sequence
  Description of Artificial Sequence: Synthetic oligonucleotide
  Sense strand starting at position 3947 of SEQ ID NO: 318101
cucacuugucuugggaaga

SEQ ID NO: 536896 - RNA, 19 nt, Artificial Sequence
  Description of Artificial Sequence: Synthetic oligonucleotide
  Antisense strand to SEQ ID NO: 536895
ucuucccaagacaagugag

SEQ ID NO: 536897 - RNA, 19 nt, Artificial Sequence
  Description of Artificial Sequence: Synthetic oligonucleotide
  Sense strand starting at position 3948 of SEQ ID NO: 318101
ucacuugucuugggaagau

SEQ ID NO: 536898 - RNA, 19 nt, Artificial Sequence
  Description of Artificial Sequence: Synthetic oligonucleotide
  Antisense strand to SEQ ID NO: 536897
aucuucccaagacaaguga

SEQ ID NO: 536899 - RNA, 19 nt, Artificial Sequence
  Description of Artificial Sequence: Synthetic oligonucleotide
  Sense strand starting at position 227 of SEQ ID NO: 318102
aguuccggacucugagaaa

SEQ ID NO: 536900 - RNA, 19 nt, Artificial Sequence
  Description of Artificial Sequence: Synthetic oligonucleotide
  Antisense strand to SEQ ID NO: 536899
uuucucagaguccggaacu

SEQ ID NO: 536901 - RNA, 19 nt, Artificial Sequence
  Description of Artificial Sequence: Synthetic oligonucleotide
  Sense strand starting at position 230 of SEQ ID NO: 318102
uccggacucugagaaaguu

SEQ ID NO: 536902 - RNA, 19 nt, Artificial Sequence
  Description of Artificial Sequence: Synthetic oligonucleotide
  Antisense strand to SEQ ID NO: 536901
aacuuucucagaguccgga

SEQ ID NO: 536903 - RNA, 19 nt, Artificial Sequence
  Description of Artificial Sequence: Synthetic oligonucleotide
  Sense strand starting at position 236 of SEQ ID NO: 318102
cucugagaaaguuguaaag

SEQ ID NO: 536904 - RNA, 19 nt, Artificial Sequence
  Description of Artificial Sequence: Synthetic oligonucleotide
  Antisense strand to SEQ ID NO: 536903
cuuuacaacuuucucagag

SEQ ID NO: 536905 - RNA, 19 nt, Artificial Sequence
  Description of Artificial Sequence: Synthetic oligonucleotide
  Sense strand starting at position 238 of SEQ ID NO: 318102
cugagaaaguuguaaagac

SEQ ID NO: 536906 - RNA, 19 nt, Artificial Sequence
  Description of Artificial Sequence: Synthetic oligonucleotide
  Antisense strand to SEQ ID NO: 536905
gucuuuacaacuuucucag

SEQ ID NO: 536907 - RNA, 19 nt, Artificial Sequence
  Description of Artificial Sequence: Synthetic oligonucleotide
  Sense strand starting at position 271 of SEQ ID NO: 318102
gacuaauuaguuuggugac

SEQ ID NO: 536908 - RNA, 19 nt, Artificial Sequence
  Description of Artificial Sequence: Synthetic oligonucleotide
  Antisense strand to SEQ ID NO: 536907
gucaccaaacuaauuaguc

SEQ ID NO: 536909 - RNA, 19 nt, Artificial Sequence
  Description of Artificial Sequence: Synthetic oligonucleotide
  Sense strand starting at position 272 of SEQ ID NO: 318102
acuaauuaguuuggugacu

SEQ ID NO: 536910 - RNA, 19 nt, Artificial Sequence
  Description of Artificial Sequence: Synthetic oligonucleotide
  Antisense strand to SEQ ID NO: 536909
agucaccaaacuaauuagu

SEQ ID NO: 536911 - RNA, 19 nt, Artificial Sequence
  Description of Artificial Sequence: Synthetic oligonucleotide
  Sense strand starting at position 274 of SEQ ID NO: 318102
uaauuaguuuggugacuga

SEQ ID NO: 536912 - RNA, 19 nt, Artificial Sequence
  Description of Artificial Sequence: Synthetic oligonucleotide
  Antisense strand to SEQ ID NO: 536911
ucagucaccaaacuaauua

SEQ ID NO: 536913 - RNA, 19 nt, Artificial Sequence
  Description of Artificial Sequence: Synthetic oligonucleotide
  Sense strand starting at position 304 of SEQ ID NO: 318102
aaacauuucugcggcuaga

SEQ ID NO: 536914 - RNA, 19 nt, Artificial Sequence
  Description of Artificial Sequence: Synthetic oligonucleotide
  Antisense strand to SEQ ID NO: 536913
ucuagccgcagaaauguuu

SEQ ID NO: 536915 - RNA, 19 nt, Artificial Sequence
  Description of Artificial Sequence: Synthetic oligonucleotide
  Sense strand starting at position 374 of SEQ ID NO: 318102
uuugguuguaauuguaaag

SEQ ID NO: 536916 - RNA, 19 nt, Artificial Sequence
  Description of Artificial Sequence: Synthetic oligonucleotide
  Antisense strand to SEQ ID NO: 536915
cuuuacaauuacaaccaaa

SEQ ID NO: 536917 - RNA, 19 nt, Artificial Sequence
  Description of Artificial Sequence: Synthetic oligonucleotide
  Sense strand starting at position 405 of SEQ ID NO: 318102
ccucgucuccacugggaau

SEQ ID NO: 536918 - RNA, 19 nt, Artificial Sequence
  Description of Artificial Sequence: Synthetic oligonucleotide
  Antisense strand to SEQ ID NO: 536917
auucccaguggagacgagg

SEQ ID NO: 536919 - RNA, 19 nt, Artificial Sequence
  Description of Artificial Sequence: Synthetic oligonucleotide
  Sense strand starting at position 406 of SEQ ID NO: 318102
cucgucuccacugggaauu

SEQ ID NO: 536920 - RNA, 19 nt, Artificial Sequence
  Description of Artificial Sequence: Synthetic oligonucleotide
  Antisense strand to SEQ ID NO: 536919
aauucccaguggagacgag

SEQ ID NO: 536921 - RNA, 19 nt, Artificial Sequence
  Description of Artificial Sequence: Synthetic oligonucleotide
  Sense strand starting at position 636 of SEQ ID NO: 318102
gggagauaucgcgggugcu

SEQ ID NO: 536922 - RNA, 19 nt, Artificial Sequence
  Description of Artificial Sequence: Synthetic oligonucleotide
  Antisense strand to SEQ ID NO: 536921
agcacccgcgauaucuccc

SEQ ID NO: 536923 - RNA, 19 nt, Artificial Sequence
  Description of Artificial Sequence: Synthetic oligonucleotide
  Sense strand starting at position 637 of SEQ ID NO: 318102
ggagauaucgcgggugcuu

SEQ ID NO: 536924 - RNA, 19 nt, Artificial Sequence
  Description of Artificial Sequence: Synthetic oligonucleotide
  Antisense strand to SEQ ID NO: 536923
aagcacccgcgauaucucc

SEQ ID NO: 536925 - RNA, 19 nt, Artificial Sequence
  Description of Artificial Sequence: Synthetic oligonucleotide
  Sense strand starting at position 650 of SEQ ID NO: 318102
gugcuuggaaauugcuuua

SEQ ID NO: 536926 - RNA, 19 nt, Artificial Sequence
  Description of Artificial Sequence: Synthetic oligonucleotide
  Antisense strand to SEQ ID NO: 536925
uaaagcaauuuccaagcac

SEQ ID NO: 536927 - RNA, 19 nt, Artificial Sequence
  Description of Artificial Sequence: Synthetic oligonucleotide
  Sense strand starting at position 818 of SEQ ID NO: 318102
cggagaauuaagugugcag

SEQ ID NO: 536928 - RNA, 19 nt, Artificial Sequence
  Description of Artificial Sequence: Synthetic oligonucleotide
  Antisense strand to SEQ ID NO: 536927
cugcacacuuaauucuccg

SEQ ID NO: 536929 - RNA, 19 nt, Artificial Sequence
  Description of Artificial Sequence: Synthetic oligonucleotide
  Sense strand starting at position 931 of SEQ ID NO: 318102
uuauguaacgcaggaagaa

SEQ ID NO: 536930 - RNA, 19 nt, Artificial Sequence
  Description of Artificial Sequence: Synthetic oligonucleotide
  Antisense strand to SEQ ID NO: 536929
uucuuccugcguuacauaa

SEQ ID NO: 536931 - RNA, 19 nt, Artificial Sequence
  Description of Artificial Sequence: Synthetic oligonucleotide
  Sense strand starting at position 957 of SEQ ID NO: 318102
uuucuuucugugcaaauga

SEQ ID NO: 536932 - RNA, 19 nt, Artificial Sequence
  Description of Artificial Sequence: Synthetic oligonucleotide
  Antisense strand to SEQ ID NO: 536931
ucauuugcacagaaagaaa

SEQ ID NO: 536933 - RNA, 19 nt, Artificial Sequence
  Description of Artificial Sequence: Synthetic oligonucleotide
  Sense strand starting at position 1105 of SEQ ID NO: 318102
ggaccucuauuguuaagau

SEQ ID NO: 536934 - RNA, 19 nt, Artificial Sequence
  Description of Artificial Sequence: Synthetic oligonucleotide
  Antisense strand to SEQ ID NO: 536933
aucuuaacaauagaggucc

SEQ ID NO: 536935 - RNA, 19 nt, Artificial Sequence
  Description of Artificial Sequence: Synthetic oligonucleotide
  Sense strand starting at position 1130 of SEQ ID NO: 318102
gauugacucuaccaggcuu

SEQ ID NO: 536936 - RNA, 19 nt, Artificial Sequence
  Description of Artificial Sequence: Synthetic oligonucleotide
  Antisense strand to SEQ ID NO: 536935
aagccugguagagucaauc

SEQ ID NO: 536937 - RNA, 19 nt, Artificial Sequence
  Description of Artificial Sequence: Synthetic oligonucleotide
  Sense strand starting at position 1162 of SEQ ID NO: 318102
cuggcaaacucggauacaa

SEQ ID NO: 536938 - RNA, 19 nt, Artificial Sequence
  Description of Artificial Sequence: Synthetic oligonucleotide
  Antisense strand to SEQ ID NO: 536937
uuguauccgaguuugccag

SEQ ID NO: 536939 - RNA, 19 nt, Artificial Sequence
  Description of Artificial Sequence: Synthetic oligonucleotide
  Sense strand starting at position 1164 of SEQ ID NO: 318102
ggcaaacucggauacaacu

SEQ ID NO: 536940 - RNA, 19 nt, Artificial Sequence
  Description of Artificial Sequence: Synthetic oligonucleotide
  Antisense strand to SEQ ID NO: 536939
aguuguauccgaguuugcc

SEQ ID NO: 536941 - RNA, 19 nt, Artificial Sequence
  Description of Artificial Sequence: Synthetic oligonucleotide
  Sense strand starting at position 1181 of SEQ ID NO: 318102
cuaucucggagcugcuaaa

SEQ ID NO: 536942 - RNA, 19 nt, Artificial Sequence
  Description of Artificial Sequence: Synthetic oligonucleotide
  Antisense strand to SEQ ID NO: 536941
uuuagcagcuccgagauag

SEQ ID NO: 536943 - RNA, 19 nt, Artificial Sequence
  Description of Artificial Sequence: Synthetic oligonucleotide
  Sense strand starting at position 2477 of SEQ ID NO: 318102
cggguuuacagcugucuga

SEQ ID NO: 536944 - RNA, 19 nt, Artificial Sequence
  Description of Artificial Sequence: Synthetic oligonucleotide
  Antisense strand to SEQ ID NO: 536943
ucagacagcuguaaacccg

SEQ ID NO: 536945 - RNA, 19 nt, Artificial Sequence
  Description of Artificial Sequence: Synthetic oligonucleotide
  Sense strand starting at position 2666 of SEQ ID NO: 318102
gggacaucuuuggcagaag

SEQ ID NO: 536946 - RNA, 19 nt, Artificial Sequence
  Description of Artificial Sequence: Synthetic oligonucleotide
  Antisense strand to SEQ ID NO: 536945
cuucugccaaagauguccc

SEQ ID NO: 536947 - RNA, 19 nt, Artificial Sequence
  Description of Artificial Sequence: Synthetic oligonucleotide
  Sense strand starting at position 2667 of SEQ ID NO: 318102
ggacaucuuuggcagaagu

SEQ ID NO: 536948 - RNA, 19 nt, Artificial Sequence
  Description of Artificial Sequence: Synthetic oligonucleotide
  Antisense strand to SEQ ID NO: 536947
acuucugccaaagaugucc

SEQ ID NO: 536949 - RNA, 19 nt, Artificial Sequence
  Description of Artificial Sequence: Synthetic oligonucleotide
  Sense strand starting at position 2861 of SEQ ID NO: 318102
aacuuugagcgagggcaaa

SEQ ID NO: 536950 - RNA, 19 nt, Artificial Sequence
  Description of Artificial Sequence: Synthetic oligonucleotide
  Antisense strand to SEQ ID NO: 536949
uuugcccucgcucaaaguu

SEQ ID NO: 536951 - RNA, 19 nt, Artificial Sequence
  Description of Artificial Sequence: Synthetic oligonucleotide
  Sense strand starting at position 2873 of SEQ ID NO: 318102
gggcaaaucccgcggagaa

SEQ ID NO: 536952 - RNA, 19 nt, Artificial Sequence
  Description of Artificial Sequence: Synthetic oligonucleotide
  Antisense strand to SEQ ID NO: 536951
uucuccgcgggauuugccc

SEQ ID NO: 536953 - RNA, 19 nt, Artificial Sequence
  Description of Artificial Sequence: Synthetic oligonucleotide
  Sense strand starting at position 2875 of SEQ ID NO: 318102
gcaaaucccgcggagaagu

SEQ ID NO: 536954 - RNA, 19 nt, Artificial Sequence
  Description of Artificial Sequence: Synthetic oligonucleotide
  Antisense strand to SEQ ID NO: 536953
acuucuccgcgggauuugc

SEQ ID NO: 536955 - RNA, 19 nt, Artificial Sequence
  Description of Artificial Sequence: Synthetic oligonucleotide
  Sense strand starting at position 3091 of SEQ ID NO: 318102
acaggaaacuuguguggaa

SEQ ID NO: 536956 - RNA, 19 nt, Artificial Sequence
  Description of Artificial Sequence: Synthetic oligonucleotide
  Antisense strand to SEQ ID NO: 536955
uuccacacaaguuuccugu

SEQ ID NO: 536957 - RNA, 19 nt, Artificial Sequence
  Description of Artificial Sequence: Synthetic oligonucleotide
  Sense strand starting at position 3503 of SEQ ID NO: 318102
accggacuccgcgggaauu

SEQ ID NO: 536958 - RNA, 19 nt, Artificial Sequence
  Description of Artificial Sequence: Synthetic oligonucleotide
  Antisense strand to SEQ ID NO: 536957
aauucccgcggaguccggu

SEQ ID NO: 536959 - RNA, 19 nt, Artificial Sequence
  Description of Artificial Sequence: Synthetic oligonucleotide
  Sense strand starting at position 3536 of SEQ ID NO: 318102
uggcgucuucucggcuuua

SEQ ID NO: 536960 - RNA, 19 nt, Artificial Sequence
  Description of Artificial Sequence: Synthetic oligonucleotide
  Antisense strand to SEQ ID NO: 536959
uaaagccgagaagacgcca

SEQ ID NO: 536961 - RNA, 19 nt, Artificial Sequence
  Description of Artificial Sequence: Synthetic oligonucleotide
  Sense strand starting at position 3764 of SEQ ID NO: 318102
ugagacaucgccuauaauu

SEQ ID NO: 536962 - RNA, 19 nt, Artificial Sequence
  Description of Artificial Sequence: Synthetic oligonucleotide
  Antisense strand to SEQ ID NO: 536961
aauuauaggcgaugucuca

SEQ ID NO: 536963 - RNA, 19 nt, Artificial Sequence
  Description of Artificial Sequence: Synthetic oligonucleotide
  Sense strand starting at position 3766 of SEQ ID NO: 318102
agacaucgccuauaauuag

SEQ ID NO: 536964 - RNA, 19 nt, Artificial Sequence
  Description of Artificial Sequence: Synthetic oligonucleotide
  Antisense strand to SEQ ID NO: 536963
cuaauuauaggcgaugucu

SEQ ID NO: 536965 - RNA, 19 nt, Artificial Sequence
  Description of Artificial Sequence: Synthetic oligonucleotide
  Sense strand starting at position 3772 of SEQ ID NO: 318102
cgccuauaauuagcaacaa

SEQ ID NO: 536966 - RNA, 19 nt, Artificial Sequence
  Description of Artificial Sequence: Synthetic oligonucleotide
  Antisense strand to SEQ ID NO: 536965
uuguugcuaauuauaggcg

SEQ ID NO: 536967 - RNA, 19 nt, Artificial Sequence
  Description of Artificial Sequence: Synthetic oligonucleotide
  Sense strand starting at position 3786 of SEQ ID NO: 318102
aacaauaaugcccgugaug

SEQ ID NO: 536968 - RNA, 19 nt, Artificial Sequence
  Description of Artificial Sequence: Synthetic oligonucleotide
  Antisense strand to SEQ ID NO: 536967
caucacgggcauuauuguu

SEQ ID NO: 536969 - RNA, 19 nt, Artificial Sequence
  Description of Artificial Sequence: Synthetic oligonucleotide
  Sense strand starting at position 3788 of SEQ ID NO: 318102
caauaaugcccgugauggu

SEQ ID NO: 536970 - RNA, 19 nt, Artificial Sequence
  Description of Artificial Sequence: Synthetic oligonucleotide
  Antisense strand to SEQ ID NO: 536969
accaucacgggcauuauug

SEQ ID NO: 536971 - RNA, 19 nt, Artificial Sequence
  Description of Artificial Sequence: Synthetic oligonucleotide
  Sense strand starting at position 3789 of SEQ ID NO: 318102
aauaaugcccgugauggua

SEQ ID NO: 536972 - RNA, 19 nt, Artificial Sequence
  Description of Artificial Sequence: Synthetic oligonucleotide
  Antisense strand to SEQ ID NO: 536971
uaccaucacgggcauuauu

SEQ ID NO: 536973 - RNA, 19 nt, Artificial Sequence
  Description of Artificial Sequence: Synthetic oligonucleotide
  Sense strand starting at position 3804 of SEQ ID NO: 318102
gguaguaauuacuaauaac

SEQ ID NO: 536974 - RNA, 19 nt, Artificial Sequence
  Description of Artificial Sequence: Synthetic oligonucleotide
  Antisense strand to SEQ ID NO: 536973
guuauuaguaauuacuacc

SEQ ID NO: 536975 - RNA, 19 nt, Artificial Sequence
  Description of Artificial Sequence: Synthetic oligonucleotide
  Sense strand starting at position 3858 of SEQ ID NO: 318102
gagucagauugucuugcua

SEQ ID NO: 536976 - RNA, 19 nt, Artificial Sequence
  Description of Artificial Sequence: Synthetic oligonucleotide
  Antisense strand to SEQ ID NO: 536975
uagcaagacaaucugacuc

SEQ ID NO: 536977 - RNA, 19 nt, Artificial Sequence
  Description of Artificial Sequence: Synthetic oligonucleotide
  Sense strand starting at position 3862 of SEQ ID NO: 318102
cagauugucuugcuaguca

SEQ ID NO: 536978 - RNA, 19 nt, Artificial Sequence
  Description of Artificial Sequence: Synthetic oligonucleotide
  Antisense strand to SEQ ID NO: 536977
ugacuagcaagacaaucug

SEQ ID NO: 536979 - RNA, 19 nt, Artificial Sequence
  Description of Artificial Sequence: Synthetic oligonucleotide
  Sense strand starting at position 146 of SEQ ID NO: 318103
gagccugugaguggaguau

SEQ ID NO: 536980 - RNA, 19 nt, Artificial Sequence
  Description of Artificial Sequence: Synthetic oligonucleotide
  Antisense strand to SEQ ID NO: 536979
auacuccacucacaggcuc

SEQ ID NO: 536981 - RNA, 19 nt, Artificial Sequence
  Description of Artificial Sequence: Synthetic oligonucleotide
  Sense strand starting at position 300 of SEQ ID NO: 318103
accagcuguugaucacaaa

SEQ ID NO: 536982 - RNA, 19 nt, Artificial Sequence
  Description of Artificial Sequence: Synthetic oligonucleotide
  Antisense strand to SEQ ID NO: 536981
uuugugaucaacagcuggu

SEQ ID NO: 536983 - RNA, 19 nt, Artificial Sequence
  Description of Artificial Sequence: Synthetic oligonucleotide
  Sense strand starting at position 336 of SEQ ID NO: 318103
ucucgaauuucugaacuau

SEQ ID NO: 536984 - RNA, 19 nt, Artificial Sequence
  Description of Artificial Sequence: Synthetic oligonucleotide
  Antisense strand to SEQ ID NO: 536983
auaguucagaaauucgaga

SEQ ID NO: 536985 - RNA, 19 nt, Artificial Sequence
  Description of Artificial Sequence: Synthetic oligonucleotide
  Sense strand starting at position 450 of SEQ ID NO: 318103
cagguagcucuuugauauc

SEQ ID NO: 536986 - RNA, 19 nt, Artificial Sequence
  Description of Artificial Sequence: Synthetic oligonucleotide
  Antisense strand to SEQ ID NO: 536985
gauaucaaagagcuaccug

SEQ ID NO: 536987 - RNA, 19 nt, Artificial Sequence
  Description of Artificial Sequence: Synthetic oligonucleotide
  Sense strand starting at position 453 of SEQ ID NO: 318103
guagcucuuugauaucuaa

SEQ ID NO: 536988 - RNA, 19 nt, Artificial Sequence
  Description of Artificial Sequence: Synthetic oligonucleotide
  Antisense strand to SEQ ID NO: 536987
uuagauaucaaagagcuac

SEQ ID NO: 536989 - RNA, 19 nt, Artificial Sequence
  Description of Artificial Sequence: Synthetic oligonucleotide
  Sense strand starting at position 573 of SEQ ID NO: 318103
ugcucuaaagcugggcaaa

SEQ ID NO: 536990 - RNA, 19 nt, Artificial Sequence
  Description of Artificial Sequence: Synthetic oligonucleotide
  Antisense strand to SEQ ID NO: 536989
uuugcccagcuuuagagca

SEQ ID NO: 536991 - RNA, 19 nt, Artificial Sequence
  Description of Artificial Sequence: Synthetic oligonucleotide
  Sense strand starting at position 574 of SEQ ID NO: 318103
gcucuaaagcugggcaaau

SEQ ID NO: 536992 - RNA, 19 nt, Artificial Sequence
  Description of Artificial Sequence: Synthetic oligonucleotide
  Antisense strand to SEQ ID NO: 536991
auuugcccagcuuuagagc

SEQ ID NO: 536993 - RNA, 19 nt, Artificial Sequence
  Description of Artificial Sequence: Synthetic oligonucleotide
  Sense strand starting at position 611 of SEQ ID NO: 318103
gccagucaccguuucgaau

SEQ ID NO: 536994 - RNA, 19 nt, Artificial Sequence
  Description of Artificial Sequence: Synthetic oligonucleotide
  Antisense strand to SEQ ID NO: 536993
auucgaaacggugacuggc

SEQ ID NO: 536995 - RNA, 19 nt, Artificial Sequence
  Description of Artificial Sequence: Synthetic oligonucleotide
  Sense strand starting at position 633 of SEQ ID NO: 318103
ucaaauacgccguaauuag

SEQ ID NO: 536996 - RNA, 19 nt, Artificial Sequence
  Description of Artificial Sequence: Synthetic oligonucleotide
  Antisense strand to SEQ ID NO: 536995
cuaauuacggcguauuuga

SEQ ID NO: 536997 - RNA, 19 nt, Artificial Sequence
  Description of Artificial Sequence: Synthetic oligonucleotide
  Sense strand starting at position 671 of SEQ ID NO: 318103
acguuuaaauucgaggcau

SEQ ID NO: 536998 - RNA, 19 nt, Artificial Sequence
  Description of Artificial Sequence: Synthetic oligonucleotide
  Antisense strand to SEQ ID NO: 536997
augccucgaauuuaaacgu

SEQ ID NO: 536999 - RNA, 19 nt, Artificial Sequence
  Description of Artificial Sequence: Synthetic oligonucleotide
  Sense strand starting at position 673 of SEQ ID NO: 318103
guuuaaauucgaggcauuu

SEQ ID NO: 537000 - RNA, 19 nt, Artificial Sequence
  Description of Artificial Sequence: Synthetic oligonucleotide
  Antisense strand to SEQ ID NO: 536999
aaaugccucgaauuuaaac

SEQ ID NO: 537001 - RNA, 19 nt, Artificial Sequence
  Description of Artificial Sequence: Synthetic oligonucleotide
  Sense strand starting at position 718 of SEQ ID NO: 318103
ucggucgcugcccagaaau

SEQ ID NO: 537002 - RNA, 19 nt, Artificial Sequence
  Description of Artificial Sequence: Synthetic oligonucleotide
  Antisense strand to SEQ ID NO: 537001
auuucugggcagcgaccga

SEQ ID NO: 537003 - RNA, 19 nt, Artificial Sequence
  Description of Artificial Sequence: Synthetic oligonucleotide
  Sense strand starting at position 2033 of SEQ ID NO: 318103
ggaaggagcgcucgaguuu

SEQ ID NO: 537004 - RNA, 19 nt, Artificial Sequence
  Description of Artificial Sequence: Synthetic oligonucleotide
  Antisense strand to SEQ ID NO: 537003
aaacucgagcgcuccuucc

SEQ ID NO: 537005 - RNA, 19 nt, Artificial Sequence
  Description of Artificial Sequence: Synthetic oligonucleotide
  Sense strand starting at position 2042 of SEQ ID NO: 318103
gcucgaguuuccgagggac

SEQ ID NO: 537006 - RNA, 19 nt, Artificial Sequence
  Description of Artificial Sequence: Synthetic oligonucleotide
  Antisense strand to SEQ ID NO: 537005
gucccucggaaacucgagc

SEQ ID NO: 537007 - RNA, 19 nt, Artificial Sequence
  Description of Artificial Sequence: Synthetic oligonucleotide
  Sense strand starting at position 2044 of SEQ ID NO: 318103
ucgaguuuccgagggacau

SEQ ID NO: 537008 - RNA, 19 nt, Artificial Sequence
  Description of Artificial Sequence: Synthetic oligonucleotide
  Antisense strand to SEQ ID NO: 537007
augucccucggaaacucga

SEQ ID NO: 537009 - RNA, 19 nt, Artificial Sequence
  Description of Artificial Sequence: Synthetic oligonucleotide
  Sense strand starting at position 2045 of SEQ ID NO: 318103
cgaguuuccgagggacauu

SEQ ID NO: 537010 - RNA, 19 nt, Artificial Sequence
  Description of Artificial Sequence: Synthetic oligonucleotide
  Antisense strand to SEQ ID NO: 537009
aaugucccucggaaacucg

SEQ ID NO: 537011 - RNA, 19 nt, Artificial Sequence
  Description of Artificial Sequence: Synthetic oligonucleotide
  Sense strand starting at position 2084 of SEQ ID NO: 318103
acgcgcucaucugcauauu

SEQ ID NO: 537012 - RNA, 19 nt, Artificial Sequence
  Description of Artificial Sequence: Synthetic oligonucleotide
  Antisense strand to SEQ ID NO: 537011
aauaugcagaugagcgcgu

SEQ ID NO: 537013 - RNA, 19 nt, Artificial Sequence
  Description of Artificial Sequence: Synthetic oligonucleotide
  Sense strand starting at position 2865 of SEQ ID NO: 318103
acuuuccacuguugggaau

SEQ ID NO: 537014 - RNA, 19 nt, Artificial Sequence
  Description of Artificial Sequence: Synthetic oligonucleotide
  Antisense strand to SEQ ID NO: 537013
auucccaacaguggaaagu

SEQ ID NO: 537015 - RNA, 19 nt, Artificial Sequence
  Description of Artificial Sequence: Synthetic oligonucleotide
  Sense strand starting at position 3308 of SEQ ID NO: 318103
ggaagagugucaggucugu

SEQ ID NO: 537016 - RNA, 19 nt, Artificial Sequence
  Description of Artificial Sequence: Synthetic oligonucleotide
  Antisense strand to SEQ ID NO: 537015
acagaccugacacucuucc

SEQ ID NO: 537017 - RNA, 19 nt, Artificial Sequence
  Description of Artificial Sequence: Synthetic oligonucleotide
  Sense strand starting at position 204 of SEQ ID NO: 318104
ccagccugugugcauaaau

SEQ ID NO: 537018 - RNA, 19 nt, Artificial Sequence
  Description of Artificial Sequence: Synthetic oligonucleotide
  Antisense strand to SEQ ID NO: 537017
auuuaugcacacaggcugg

SEQ ID NO: 537019 - RNA, 19 nt, Artificial Sequence
  Description of Artificial Sequence: Synthetic oligonucleotide
  Sense strand starting at position 250 of SEQ ID NO: 318104
acccuuucuccgugaccca

SEQ ID NO: 537020 - RNA, 19 nt, Artificial Sequence
  Description of Artificial Sequence: Synthetic oligonucleotide
  Antisense strand to SEQ ID NO: 537019
ugggucacggagaaagggu

SEQ ID NO: 537021 - RNA, 19 nt, Artificial Sequence
  Description of Artificial Sequence: Synthetic oligonucleotide
  Sense strand starting at position 492 of SEQ ID NO: 318104
cgggacaucucacugaaac

SEQ ID NO: 537022 - RNA, 19 nt, Artificial Sequence
  Description of Artificial Sequence: Synthetic oligonucleotide
  Antisense strand to SEQ ID NO: 537021
guuucagugagaugucccg

SEQ ID NO: 537023 - RNA, 19 nt, Artificial Sequence
  Description of Artificial Sequence: Synthetic oligonucleotide
  Sense strand starting at position 685 of SEQ ID NO: 318104
agcugaacgcgucugcaua

SEQ ID NO: 537024 - RNA, 19 nt, Artificial Sequence
  Description of Artificial Sequence: Synthetic oligonucleotide
  Antisense strand to SEQ ID NO: 537023
uaugcagacgcguucagcu

SEQ ID NO: 537025 - RNA, 19 nt, Artificial Sequence
  Description of Artificial Sequence: Synthetic oligonucleotide
  Sense strand starting at position 1029 of SEQ ID NO: 318104
ccuggugcuucaggaguua

SEQ ID NO: 537026 - RNA, 19 nt, Artificial Sequence
  Description of Artificial Sequence: Synthetic oligonucleotide
  Antisense strand to SEQ ID NO: 537025
uaacuccugaagcaccagg

SEQ ID NO: 537027 - RNA, 19 nt, Artificial Sequence
  Description of Artificial Sequence: Synthetic oligonucleotide
  Sense strand starting at position 1110 of SEQ ID NO: 318104
agaaguuaacuccagccaa

SEQ ID NO: 537028 - RNA, 19 nt, Artificial Sequence
  Description of Artificial Sequence: Synthetic oligonucleotide
  Antisense strand to SEQ ID NO: 537027
uuggcuggaguuaacuucu

SEQ ID NO: 537029 - RNA, 19 nt, Artificial Sequence
  Description of Artificial Sequence: Synthetic oligonucleotide
  Sense strand starting at position 1161 of SEQ ID NO: 318104
gggccuuucuuucugagac

SEQ ID NO: 537030 - RNA, 19 nt, Artificial Sequence
  Description of Artificial Sequence: Synthetic oligonucleotide
  Antisense strand to SEQ ID NO: 537029
gucucagaaagaaaggccc

SEQ ID NO: 537031 - RNA, 19 nt, Artificial Sequence
  Description of Artificial Sequence: Synthetic oligonucleotide
  Sense strand starting at position 1163 of SEQ ID NO: 318104
gccuuucuuucugagaccu

SEQ ID NO: 537032 - RNA, 19 nt, Artificial Sequence
  Description of Artificial Sequence: Synthetic oligonucleotide
  Antisense strand to SEQ ID NO: 537031
aggucucagaaagaaaggc

SEQ ID NO: 537033 - RNA, 19 nt, Artificial Sequence
  Description of Artificial Sequence: Synthetic oligonucleotide
  Sense strand starting at position 1365 of SEQ ID NO: 318104
agcggugaaucucuggauu

SEQ ID NO: 537034 - RNA, 19 nt, Artificial Sequence
  Description of Artificial Sequence: Synthetic oligonucleotide
  Antisense strand to SEQ ID NO: 537033
aauccagagauucaccgcu

SEQ ID NO: 537035 - RNA, 19 nt, Artificial Sequence
  Description of Artificial Sequence: Synthetic oligonucleotide
  Sense strand starting at position 2400 of SEQ ID NO: 318104
cgcgaagagcccggaaaua

SEQ ID NO: 537036 - RNA, 19 nt, Artificial Sequence
  Description of Artificial Sequence: Synthetic oligonucleotide
  Antisense strand to SEQ ID NO: 537035
uauuuccgggcucuucgcg

SEQ ID NO: 537037 - RNA, 19 nt, Artificial Sequence
  Description of Artificial Sequence: Synthetic oligonucleotide
  Sense strand starting at position 2440 of SEQ ID NO: 318104
guuucccuccgaggucuua

SEQ ID NO: 537038 - RNA, 19 nt, Artificial Sequence
  Description of Artificial Sequence: Synthetic oligonucleotide
  Antisense strand to SEQ ID NO: 537037
uaagaccucggagggaaac

SEQ ID NO: 537039 - RNA, 19 nt, Artificial Sequence
  Description of Artificial Sequence: Synthetic oligonucleotide
  Sense strand starting at position 3015 of SEQ ID NO: 318104
gucuguuugucauccacag

SEQ ID NO: 537040 - RNA, 19 nt, Artificial Sequence
  Description of Artificial Sequence: Synthetic oligonucleotide
  Antisense strand to SEQ ID NO: 537039
cuguggaugacaaacagac

SEQ ID NO: 537041 - RNA, 19 nt, Artificial Sequence
  Description of Artificial Sequence: Synthetic oligonucleotide
  Sense strand starting at position 3325 of SEQ ID NO: 318104
gggcaauccucacauauau

SEQ ID NO: 537042 - RNA, 19 nt, Artificial Sequence
  Description of Artificial Sequence: Synthetic oligonucleotide
  Antisense strand to SEQ ID NO: 537041
auauaugugaggauugccc

SEQ ID NO: 537043 - RNA, 19 nt, Artificial Sequence
  Description of Artificial Sequence: Synthetic oligonucleotide
  Sense strand starting at position 3400 of SEQ ID NO: 318104
ugaacuuguuucuugucau

SEQ ID NO: 537044 - RNA, 19 nt, Artificial Sequence
  Description of Artificial Sequence: Synthetic oligonucleotide
  Antisense strand to SEQ ID NO: 537043
augacaagaaacaaguuca

SEQ ID NO: 537045 - RNA, 19 nt, Artificial Sequence
  Description of Artificial Sequence: Synthetic oligonucleotide
  Sense strand starting at position 3410 of SEQ ID NO: 318104
ucuugucaucuguggucau

SEQ ID NO: 537046 - RNA, 19 nt, Artificial Sequence
  Description of Artificial Sequence: Synthetic oligonucleotide
  Antisense strand to SEQ ID NO: 537045
augaccacagaugacaaga

SEQ ID NO: 537047 - RNA, 19 nt, Artificial Sequence
  Description of Artificial Sequence: Synthetic oligonucleotide
  Sense strand starting at position 3413 of SEQ ID NO: 318104
ugucaucuguggucaugca

SEQ ID NO: 537048 - RNA, 19 nt, Artificial Sequence
  Description of Artificial Sequence: Synthetic oligonucleotide
  Antisense strand to SEQ ID NO: 537047
ugcaugaccacagaugaca

SEQ ID NO: 537049 - RNA, 19 nt, Artificial Sequence
  Description of Artificial Sequence: Synthetic oligonucleotide
  Sense strand starting at position 3414 of SEQ ID NO: 318104
gucaucuguggucaugcaa

SEQ ID NO: 537050 - RNA, 19 nt, Artificial Sequence
  Description of Artificial Sequence: Synthetic oligonucleotide
  Antisense strand to SEQ ID NO: 537049
uugcaugaccacagaugac

SEQ ID NO: 537051 - RNA, 19 nt, Artificial Sequence
  Description of Artificial Sequence: Synthetic oligonucleotide
  Sense strand starting at position 3421 of SEQ ID NO: 318104
guggucaugcaaugacauu

SEQ ID NO: 537052 - RNA, 19 nt, Artificial Sequence
  Description of Artificial Sequence: Synthetic oligonucleotide
  Antisense strand to SEQ ID NO: 537051
aaugucauugcaugaccac

SEQ ID NO: 537053 - RNA, 19 nt, Artificial Sequence
  Description of Artificial Sequence: Synthetic oligonucleotide
  Sense strand starting at position 3883 of SEQ ID NO: 318104
gugugcccuccgugucaga

SEQ ID NO: 537054 - RNA, 19 nt, Artificial Sequence
  Description of Artificial Sequence: Synthetic oligonucleotide
  Antisense strand to SEQ ID NO: 537053
ucugacacggagggcacac

SEQ ID NO: 537055 - RNA, 19 nt, Artificial Sequence
  Description of Artificial Sequence: Synthetic oligonucleotide
  Sense strand starting at position 3890 of SEQ ID NO: 318104
cuccgugucagauggaauc

SEQ ID NO: 537056 - RNA, 19 nt, Artificial Sequence
  Description of Artificial Sequence: Synthetic oligonucleotide
  Antisense strand to SEQ ID NO: 537055
gauuccaucugacacggag

SEQ ID NO: 537057 - RNA, 19 nt, Artificial Sequence
  Description of Artificial Sequence: Synthetic oligonucleotide
  Sense strand starting at position 3926 of SEQ ID NO: 318104
gggagagcgucuucaauuc

SEQ ID NO: 537058 - RNA, 19 nt, Artificial Sequence
  Description of Artificial Sequence: Synthetic oligonucleotide
  Antisense strand to SEQ ID NO: 537057
gaauugaagacgcucuccc

SEQ ID NO: 537059 - RNA, 19 nt, Artificial Sequence
  Description of Artificial Sequence: Synthetic oligonucleotide
  Sense strand starting at position 399 of SEQ ID NO: 318105
ccagccugugugcauaaau

SEQ ID NO: 537060 - RNA, 19 nt, Artificial Sequence
  Description of Artificial Sequence: Synthetic oligonucleotide
  Antisense strand to SEQ ID NO: 537059
auuuaugcacacaggcugg

SEQ ID NO: 537061 - RNA, 19 nt, Artificial Sequence
  Description of Artificial Sequence: Synthetic oligonucleotide
  Sense strand starting at position 445 of SEQ ID NO: 318105
acccuuucuccgugaccca

SEQ ID NO: 537062 - RNA, 19 nt, Artificial Sequence
  Description of Artificial Sequence: Synthetic oligonucleotide
  Antisense strand to SEQ ID NO: 537061
ugggucacggagaaagggu

SEQ ID NO: 537063 - RNA, 19 nt, Artificial Sequence
  Description of Artificial Sequence: Synthetic oligonucleotide
  Sense strand starting at position 687 of SEQ ID NO: 318105
cgggacaucucacugaaac

SEQ ID NO: 537064 - RNA, 19 nt, Artificial Sequence
  Description of Artificial Sequence: Synthetic oligonucleotide
  Antisense strand to SEQ ID NO: 537063
guuucagugagaugucccg

SEQ ID NO: 537065 - RNA, 19 nt, Artificial Sequence
  Description of Artificial Sequence: Synthetic oligonucleotide
  Sense strand starting at position 880 of SEQ ID NO: 318105
agcugaacgcgucugcaua

SEQ ID NO: 537066 - RNA, 19 nt, Artificial Sequence
  Description of Artificial Sequence: Synthetic oligonucleotide
  Antisense strand to SEQ ID NO: 537065
uaugcagacgcguucagcu

SEQ ID NO: 537067 - RNA, 19 nt, Artificial Sequence
  Description of Artificial Sequence: Synthetic oligonucleotide
  Sense strand starting at position 1224 of SEQ ID NO: 318105
ccuggugcuucaggaguua

SEQ ID NO: 537068 - RNA, 19 nt, Artificial Sequence
  Description of Artificial Sequence: Synthetic oligonucleotide
  Antisense strand to SEQ ID NO: 537067
uaacuccugaagcaccagg

SEQ ID NO: 537069 - RNA, 19 nt, Artificial Sequence
  Description of Artificial Sequence: Synthetic oligonucleotide
  Sense strand starting at position 1305 of SEQ ID NO: 318105
agaaguuaacuccagccaa

SEQ ID NO: 537070 - RNA, 19 nt, Artificial Sequence
  Description of Artificial Sequence: Synthetic oligonucleotide
  Antisense strand to SEQ ID NO: 537069
uuggcuggaguuaacuucu

SEQ ID NO: 537071 - RNA, 19 nt, Artificial Sequence
  Description of Artificial Sequence: Synthetic oligonucleotide
  Sense strand starting at position 1356 of SEQ ID NO: 318105
gggccuuucuuucugagac

SEQ ID NO: 537072 - RNA, 19 nt, Artificial Sequence
  Description of Artificial Sequence: Synthetic oligonucleotide
  Antisense strand to SEQ ID NO: 537071
gucucagaaagaaaggccc

SEQ ID NO: 537073 - RNA, 19 nt, Artificial Sequence
  Description of Artificial Sequence: Synthetic oligonucleotide
  Sense strand starting at position 1358 of SEQ ID NO: 318105
gccuuucuuucugagaccu

SEQ ID NO: 537074 - RNA, 19 nt, Artificial Sequence
  Description of Artificial Sequence: Synthetic oligonucleotide
  Antisense strand to SEQ ID NO: 537073
aggucucagaaagaaaggc

SEQ ID NO: 537075 - RNA, 19 nt, Artificial Sequence
  Description of Artificial Sequence: Synthetic oligonucleotide
  Sense strand starting at position 1560 of SEQ ID NO: 318105
agcggugaaucucuggauu

SEQ ID NO: 537076 - RNA, 19 nt, Artificial Sequence
  Description of Artificial Sequence: Synthetic oligonucleotide
  Antisense strand to SEQ ID NO: 537075
aauccagagauucaccgcu

SEQ ID NO: 537077 - RNA, 19 nt, Artificial Sequence
  Description of Artificial Sequence: Synthetic oligonucleotide
  Sense strand starting at position 2595 of SEQ ID NO: 318105
cgcgaagagcccggaaaua

SEQ ID NO: 537078 - RNA, 19 nt, Artificial Sequence
  Description of Artificial Sequence: Synthetic oligonucleotide
  Antisense strand to SEQ ID NO: 537077
uauuuccgggcucuucgcg

SEQ ID NO: 537079 - RNA, 19 nt, Artificial Sequence
  Description of Artificial Sequence: Synthetic oligonucleotide
  Sense strand starting at position 2635 of SEQ ID NO: 318105
guuucccuccgaggucuua

SEQ ID NO: 537080 - RNA, 19 nt, Artificial Sequence
  Description of Artificial Sequence: Synthetic oligonucleotide
  Antisense strand to SEQ ID NO: 537079
uaagaccucggagggaaac

SEQ ID NO: 537081 - RNA, 19 nt, Artificial Sequence
  Description of Artificial Sequence: Synthetic oligonucleotide
  Sense strand starting at position 3210 of SEQ ID NO: 318105
gucuguuugucauccacag

SEQ ID NO: 537082 - RNA, 19 nt, Artificial Sequence
  Description of Artificial Sequence: Synthetic oligonucleotide
  Antisense strand to SEQ ID NO: 537081
cuguggaugacaaacagac

SEQ ID NO: 537083 - RNA, 19 nt, Artificial Sequence
  Description of Artificial Sequence: Synthetic oligonucleotide
  Sense strand starting at position 3520 of SEQ ID NO: 318105
gggcaauccucacauauau

SEQ ID NO: 537084 - RNA, 19 nt, Artificial Sequence
  Description of Artificial Sequence: Synthetic oligonucleotide
  Antisense strand to SEQ ID NO: 537083
auauaugugaggauugccc

SEQ ID NO: 537085 - RNA, 19 nt, Artificial Sequence
  Description of Artificial Sequence: Synthetic oligonucleotide
  Sense strand starting at position 3595 of SEQ ID NO: 318105
ugaacuuguuucuugucau

SEQ ID NO: 537086 - RNA, 19 nt, Artificial Sequence
  Description of Artificial Sequence: Synthetic oligonucleotide
  Antisense strand to SEQ ID NO: 537085
augacaagaaacaaguuca

SEQ ID NO: 537087 - RNA, 19 nt, Artificial Sequence
  Description of Artificial Sequence: Synthetic oligonucleotide
  Sense strand starting at position 3605 of SEQ ID NO: 318105
ucuugucaucuguggucau

SEQ ID NO: 537088 - RNA, 19 nt, Artificial Sequence
  Description of Artificial Sequence: Synthetic oligonucleotide
  Antisense strand to SEQ ID NO: 537087
augaccacagaugacaaga

SEQ ID NO: 537089 - RNA, 19 nt, Artificial Sequence
  Description of Artificial Sequence: Synthetic oligonucleotide
  Sense strand starting at position 3608 of SEQ ID NO: 318105
ugucaucuguggucaugca

SEQ ID NO: 537090 - RNA, 19 nt, Artificial Sequence
  Description of Artificial Sequence: Synthetic oligonucleotide
  Antisense strand to SEQ ID NO: 537089
ugcaugaccacagaugaca

SEQ ID NO: 537091 - RNA, 19 nt, Artificial Sequence
  Description of Artificial Sequence: Synthetic oligonucleotide
  Sense strand starting at position 3609 of SEQ ID NO: 318105
gucaucuguggucaugcaa

SEQ ID NO: 537092 - RNA, 19 nt, Artificial Sequence
  Description of Artificial Sequence: Synthetic oligonucleotide
  Antisense strand to SEQ ID NO: 537091
uugcaugaccacagaugac

SEQ ID NO: 537093 - RNA, 19 nt, Artificial Sequence
  Description of Artificial Sequence: Synthetic oligonucleotide
  Sense strand starting at position 3616 of SEQ ID NO: 318105
guggucaugcaaugacauu

SEQ ID NO: 537094 - RNA, 19 nt, Artificial Sequence
  Description of Artificial Sequence: Synthetic oligonucleotide
  Antisense strand to SEQ ID NO: 537093
aaugucauugcaugaccac

SEQ ID NO: 537095 - RNA, 19 nt, Artificial Sequence
  Description of Artificial Sequence: Synthetic oligonucleotide
  Sense strand starting at position 40 of SEQ ID NO: 318106
cccgaaccauccuuggaau

SEQ ID NO: 537096 - RNA, 19 nt, Artificial Sequence
  Description of Artificial Sequence: Synthetic oligonucleotide
  Antisense strand to SEQ ID NO: 537095
auuccaaggaugguucggg

SEQ ID NO: 537097 - RNA, 19 nt, Artificial Sequence
  Description of Artificial Sequence: Synthetic oligonucleotide
  Sense strand starting at position 42 of SEQ ID NO: 318106
cgaaccauccuuggaauca

SEQ ID NO: 537098 - RNA, 19 nt, Artificial Sequence
  Description of Artificial Sequence: Synthetic oligonucleotide
  Antisense strand to SEQ ID NO: 537097
ugauuccaaggaugguucg

SEQ ID NO: 537099 - RNA, 19 nt, Artificial Sequence
  Description of Artificial Sequence: Synthetic oligonucleotide
  Sense strand starting at position 94 of SEQ ID NO: 318106
gcaguuuccagggaggcaa

SEQ ID NO: 537100 - RNA, 19 nt, Artificial Sequence
  Description of Artificial Sequence: Synthetic oligonucleotide
  Antisense strand to SEQ ID NO: 537099
uugccucccuggaaacugc

SEQ ID NO: 537101 - RNA, 19 nt, Artificial Sequence
  Description of Artificial Sequence: Synthetic oligonucleotide
  Sense strand starting at position 202 of SEQ ID NO: 318106
ugauuucccgcuugcuuua

SEQ ID NO: 537102 - RNA, 19 nt, Artificial Sequence
  Description of Artificial Sequence: Synthetic oligonucleotide
  Antisense strand to SEQ ID NO: 537101
uaaagcaagcgggaaauca

SEQ ID NO: 537103 - RNA, 19 nt, Artificial Sequence
  Description of Artificial Sequence: Synthetic oligonucleotide
  Sense strand starting at position 249 of SEQ ID NO: 318106
gauguucugaguugcagaa

SEQ ID NO: 537104 - RNA, 19 nt, Artificial Sequence
  Description of Artificial Sequence: Synthetic oligonucleotide
  Antisense strand to SEQ ID NO: 537103
uucugcaacucagaacauc

SEQ ID NO: 537105 - RNA, 19 nt, Artificial Sequence
  Description of Artificial Sequence: Synthetic oligonucleotide
  Sense strand starting at position 789 of SEQ ID NO: 318106
gccagcugaugaggauuua

SEQ ID NO: 537106 - RNA, 19 nt, Artificial Sequence
  Description of Artificial Sequence: Synthetic oligonucleotide
  Antisense strand to SEQ ID NO: 537105
uaaauccucaucagcuggc

SEQ ID NO: 537107 - RNA, 19 nt, Artificial Sequence
  Description of Artificial Sequence: Synthetic oligonucleotide
  Sense strand starting at position 800 of SEQ ID NO: 318106
aggauuuaguagggaacca

SEQ ID NO: 537108 - RNA, 19 nt, Artificial Sequence
  Description of Artificial Sequence: Synthetic oligonucleotide
  Antisense strand to SEQ ID NO: 537107
ugguucccuacuaaauccu

SEQ ID NO: 537109 - RNA, 19 nt, Artificial Sequence
  Description of Artificial Sequence: Synthetic oligonucleotide
  Sense strand starting at position 1034 of SEQ ID NO: 318106
ccacuuaccagcgaguaga

SEQ ID NO: 537110 - RNA, 19 nt, Artificial Sequence
  Description of Artificial Sequence: Synthetic oligonucleotide
  Antisense strand to SEQ ID NO: 537109
ucuacucgcugguaagugg

SEQ ID NO: 537111 - RNA, 19 nt, Artificial Sequence
  Description of Artificial Sequence: Synthetic oligonucleotide
  Sense strand starting at position 2035 of SEQ ID NO: 318106
uuucuaaccggguaacaaa

SEQ ID NO: 537112 - RNA, 19 nt, Artificial Sequence
  Description of Artificial Sequence: Synthetic oligonucleotide
  Antisense strand to SEQ ID NO: 537111
uuuguuacccgguuagaaa

SEQ ID NO: 537113 - RNA, 19 nt, Artificial Sequence
  Description of Artificial Sequence: Synthetic oligonucleotide
  Sense strand starting at position 2071 of SEQ ID NO: 318106
ccgcgauuccuuuaacuuc

SEQ ID NO: 537114 - RNA, 19 nt, Artificial Sequence
  Description of Artificial Sequence: Synthetic oligonucleotide
  Antisense strand to SEQ ID NO: 537113
gaaguuaaaggaaucgcgg

SEQ ID NO: 537115 - RNA, 19 nt, Artificial Sequence
  Description of Artificial Sequence: Synthetic oligonucleotide
  Sense strand starting at position 2136 of SEQ ID NO: 318106
cggcgacagaaauacauau

SEQ ID NO: 537116 - RNA, 19 nt, Artificial Sequence
  Description of Artificial Sequence: Synthetic oligonucleotide
  Antisense strand to SEQ ID NO: 537115
auauguauuucugucgccg

SEQ ID NO: 537117 - RNA, 19 nt, Artificial Sequence
  Description of Artificial Sequence: Synthetic oligonucleotide
  Sense strand starting at position 2360 of SEQ ID NO: 318106
ggcguuagcaaauaaauuc

SEQ ID NO: 537118 - RNA, 19 nt, Artificial Sequence
  Description of Artificial Sequence: Synthetic oligonucleotide
  Antisense strand to SEQ ID NO: 537117
gaauuuauuugcuaacgcc

SEQ ID NO: 537119 - RNA, 19 nt, Artificial Sequence
  Description of Artificial Sequence: Synthetic oligonucleotide
  Sense strand starting at position 2386 of SEQ ID NO: 318106
gucaauaucgcccagcgaa

SEQ ID NO: 537120 - RNA, 19 nt, Artificial Sequence
  Description of Artificial Sequence: Synthetic oligonucleotide
  Antisense strand to SEQ ID NO: 537119
uucgcugggcgauauugac

SEQ ID NO: 537121 - RNA, 19 nt, Artificial Sequence
  Description of Artificial Sequence: Synthetic oligonucleotide
  Sense strand starting at position 2403 of SEQ ID NO: 318106
aacgguguuucucuuuagu

SEQ ID NO: 537122 - RNA, 19 nt, Artificial Sequence
  Description of Artificial Sequence: Synthetic oligonucleotide
  Antisense strand to SEQ ID NO: 537121
acuaaagagaaacaccguu

SEQ ID NO: 537123 - RNA, 19 nt, Artificial Sequence
  Description of Artificial Sequence: Synthetic oligonucleotide
  Sense strand starting at position 2406 of SEQ ID NO: 318106
gguguuucucuuuagucac

SEQ ID NO: 537124 - RNA, 19 nt, Artificial Sequence
  Description of Artificial Sequence: Synthetic oligonucleotide
  Antisense strand to SEQ ID NO: 537123
gugacuaaagagaaacacc

SEQ ID NO: 537125 - RNA, 19 nt, Artificial Sequence
  Description of Artificial Sequence: Synthetic oligonucleotide
  Sense strand starting at position 2412 of SEQ ID NO: 318106
ucucuuuagucacccgaga

SEQ ID NO: 537126 - RNA, 19 nt, Artificial Sequence
  Description of Artificial Sequence: Synthetic oligonucleotide
  Antisense strand to SEQ ID NO: 537125
ucucgggugacuaaagaga

SEQ ID NO: 537127 - RNA, 19 nt, Artificial Sequence
  Description of Artificial Sequence: Synthetic oligonucleotide
  Sense strand starting at position 2488 of SEQ ID NO: 318106
cuguaaucauucgucucaa

SEQ ID NO: 537128 - RNA, 19 nt, Artificial Sequence
  Description of Artificial Sequence: Synthetic oligonucleotide
  Antisense strand to SEQ ID NO: 537127
uugagacgaaugauuacag

SEQ ID NO: 537129 - RNA, 19 nt, Artificial Sequence
  Description of Artificial Sequence: Synthetic oligonucleotide
  Sense strand starting at position 2489 of SEQ ID NO: 318106
uguaaucauucgucucaau

SEQ ID NO: 537130 - RNA, 19 nt, Artificial Sequence
  Description of Artificial Sequence: Synthetic oligonucleotide
  Antisense strand to SEQ ID NO: 537129
auugagacgaaugauuaca

SEQ ID NO: 537131 - RNA, 19 nt, Artificial Sequence
  Description of Artificial Sequence: Synthetic oligonucleotide
  Sense strand starting at position 2655 of SEQ ID NO: 318106
ucgucacuauuguuuaauc

SEQ ID NO: 537132 - RNA, 19 nt, Artificial Sequence
  Description of Artificial Sequence: Synthetic oligonucleotide
  Antisense strand to SEQ ID NO: 537131
gauuaaacaauagugacga

SEQ ID NO: 537133 - RNA, 19 nt, Artificial Sequence
  Description of Artificial Sequence: Synthetic oligonucleotide
  Sense strand starting at position 2657 of SEQ ID NO: 318106
gucacuauuguuuaaucga

SEQ ID NO: 537134 - RNA, 19 nt, Artificial Sequence
  Description of Artificial Sequence: Synthetic oligonucleotide
  Antisense strand to SEQ ID NO: 537133
ucgauuaaacaauagugac

SEQ ID NO: 537135 - RNA, 19 nt, Artificial Sequence
  Description of Artificial Sequence: Synthetic oligonucleotide
  Sense strand starting at position 2660 of SEQ ID NO: 318106
acuauuguuuaaucgagaa

SEQ ID NO: 537136 - RNA, 19 nt, Artificial Sequence
  Description of Artificial Sequence: Synthetic oligonucleotide
  Antisense strand to SEQ ID NO: 537135
uucucgauuaaacaauagu

SEQ ID NO: 537137 - RNA, 19 nt, Artificial Sequence
  Description of Artificial Sequence: Synthetic oligonucleotide
  Sense strand starting at position 2664 of SEQ ID NO: 318106
uuguuuaaucgagaaucag

SEQ ID NO: 537138 - RNA, 19 nt, Artificial Sequence
  Description of Artificial Sequence: Synthetic oligonucleotide
  Antisense strand to SEQ ID NO: 537137
cugauucucgauuaaacaa

SEQ ID NO: 537139 - RNA, 19 nt, Artificial Sequence
  Description of Artificial Sequence: Synthetic oligonucleotide
  Sense strand starting at position 2752 of SEQ ID NO: 318106
cccgcaagagcuggucaaa

SEQ ID NO: 537140 - RNA, 19 nt, Artificial Sequence
  Description of Artificial Sequence: Synthetic oligonucleotide
  Antisense strand to SEQ ID NO: 537139
uuugaccagcucuugcggg

SEQ ID NO: 537141 - RNA, 19 nt, Artificial Sequence
  Description of Artificial Sequence: Synthetic oligonucleotide
  Sense strand starting at position 3452 of SEQ ID NO: 318106
gugguaaguugggaaggaa

SEQ ID NO: 537142 - RNA, 19 nt, Artificial Sequence
  Description of Artificial Sequence: Synthetic oligonucleotide
  Antisense strand to SEQ ID NO: 537141
uuccuucccaacuuaccac

SEQ ID NO: 537143 - RNA, 19 nt, Artificial Sequence
  Description of Artificial Sequence: Synthetic oligonucleotide
  Sense strand starting at position 3488 of SEQ ID NO: 318106
ugugcagacuugcucagaa

SEQ ID NO: 537144 - RNA, 19 nt, Artificial Sequence
  Description of Artificial Sequence: Synthetic oligonucleotide
  Antisense strand to SEQ ID NO: 537143
uucugagcaagucugcaca

SEQ ID NO: 537145 - RNA, 19 nt, Artificial Sequence
  Description of Artificial Sequence: Synthetic oligonucleotide
  Sense strand starting at position 3490 of SEQ ID NO: 318106
ugcagacuugcucagaaag

SEQ ID NO: 537146 - RNA, 19 nt, Artificial Sequence
  Description of Artificial Sequence: Synthetic oligonucleotide
  Antisense strand to SEQ ID NO: 537145
cuuucugagcaagucugca

SEQ ID NO: 537147 - RNA, 19 nt, Artificial Sequence
  Description of Artificial Sequence: Synthetic oligonucleotide
  Sense strand starting at position 3501 of SEQ ID NO: 318106
ucagaaagauuccuggguu

SEQ ID NO: 537148 - RNA, 19 nt, Artificial Sequence
  Description of Artificial Sequence: Synthetic oligonucleotide
  Antisense strand to SEQ ID NO: 537147
aacccaggaaucuuucuga

SEQ ID NO: 537149 - RNA, 19 nt, Artificial Sequence
  Description of Artificial Sequence: Synthetic oligonucleotide
  Sense strand starting at position 3605 of SEQ ID NO: 318106
acgaaaucugccugcucuu

SEQ ID NO: 537150 - RNA, 19 nt, Artificial Sequence
  Description of Artificial Sequence: Synthetic oligonucleotide
  Antisense strand to SEQ ID NO: 537149
aagagcaggcagauuucgu

SEQ ID NO: 537151 - RNA, 19 nt, Artificial Sequence
  Description of Artificial Sequence: Synthetic oligonucleotide
  Sense strand starting at position 3634 of SEQ ID NO: 318106
gguugaaggugauugauga

SEQ ID NO: 537152 - RNA, 19 nt, Artificial Sequence
  Description of Artificial Sequence: Synthetic oligonucleotide
  Antisense strand to SEQ ID NO: 537151
ucaucaaucaccuucaacc

SEQ ID NO: 537153 - RNA, 19 nt, Artificial Sequence
  Description of Artificial Sequence: Synthetic oligonucleotide
  Sense strand starting at position 3681 of SEQ ID NO: 318106
uaauaucugcugcguaauu

SEQ ID NO: 537154 - RNA, 19 nt, Artificial Sequence
  Description of Artificial Sequence: Synthetic oligonucleotide
  Antisense strand to SEQ ID NO: 537153
aauuacgcagcagauauua

SEQ ID NO: 537155 - RNA, 19 nt, Artificial Sequence
  Description of Artificial Sequence: Synthetic oligonucleotide
  Sense strand starting at position 3688 of SEQ ID NO: 318106
ugcugcguaauugcuuuaa

SEQ ID NO: 537156 - RNA, 19 nt, Artificial Sequence
  Description of Artificial Sequence: Synthetic oligonucleotide
  Antisense strand to SEQ ID NO: 537155
uuaaagcaauuacgcagca

SEQ ID NO: 537157 - RNA, 19 nt, Artificial Sequence
  Description of Artificial Sequence: Synthetic oligonucleotide
  Sense strand starting at position 3692 of SEQ ID NO: 318106
gcguaauugcuuuaauuua

SEQ ID NO: 537158 - RNA, 19 nt, Artificial Sequence
  Description of Artificial Sequence: Synthetic oligonucleotide
  Antisense strand to SEQ ID NO: 537157
uaaauuaaagcaauuacgc

SEQ ID NO: 537159 - RNA, 19 nt, Artificial Sequence
  Description of Artificial Sequence: Synthetic oligonucleotide
  Sense strand starting at position 3723 of SEQ ID NO: 318106
cgaguucuccgaucgcguu

SEQ ID NO: 537160 - RNA, 19 nt, Artificial Sequence
  Description of Artificial Sequence: Synthetic oligonucleotide
  Antisense strand to SEQ ID NO: 537159
aacgcgaucggagaacucg

SEQ ID NO: 537161 - RNA, 19 nt, Artificial Sequence
  Description of Artificial Sequence: Synthetic oligonucleotide
  Sense strand starting at position 3777 of SEQ ID NO: 318106
gggaaaccaucggaaauaa

SEQ ID NO: 537162 - RNA, 19 nt, Artificial Sequence
  Description of Artificial Sequence: Synthetic oligonucleotide
  Antisense strand to SEQ ID NO: 537161
uuauuuccgaugguuuccc

SEQ ID NO: 537163 - RNA, 19 nt, Artificial Sequence
  Description of Artificial Sequence: Synthetic oligonucleotide
  Sense strand starting at position 3836 of SEQ ID NO: 318106
ucgguagccgcgagaaaua

SEQ ID NO: 537164 - RNA, 19 nt, Artificial Sequence
  Description of Artificial Sequence: Synthetic oligonucleotide
  Antisense strand to SEQ ID NO: 537163
uauuucucgcggcuaccga

SEQ ID NO: 537165 - RNA, 19 nt, Artificial Sequence
  Description of Artificial Sequence: Synthetic oligonucleotide
  Sense strand starting at position 3841 of SEQ ID NO: 318106
agccgcgagaaauauauaa

SEQ ID NO: 537166 - RNA, 19 nt, Artificial Sequence
  Description of Artificial Sequence: Synthetic oligonucleotide
  Antisense strand to SEQ ID NO: 537165
uuauauauuucucgcggcu

SEQ ID NO: 537167 - RNA, 19 nt, Artificial Sequence
  Description of Artificial Sequence: Synthetic oligonucleotide
  Sense strand starting at position 3843 of SEQ ID NO: 318106
ccgcgagaaauauauaaag

SEQ ID NO: 537168 - RNA, 19 nt, Artificial Sequence
  Description of Artificial Sequence: Synthetic oligonucleotide
  Antisense strand to SEQ ID NO: 537167
cuuuauauauuucucgcgg

SEQ ID NO: 537169 - RNA, 19 nt, Artificial Sequence
  Description of Artificial Sequence: Synthetic oligonucleotide
  Sense strand starting at position 3891 of SEQ ID NO: 318106
uucugaauucuguauugau

SEQ ID NO: 537170 - RNA, 19 nt, Artificial Sequence
  Description of Artificial Sequence: Synthetic oligonucleotide
  Antisense strand to SEQ ID NO: 537169
aucaauacagaauucagaa

SEQ ID NO: 537171 - RNA, 19 nt, Artificial Sequence
  Description of Artificial Sequence: Synthetic oligonucleotide
  Sense strand starting at position 3894 of SEQ ID NO: 318106
ugaauucuguauugauuuc

SEQ ID NO: 537172 - RNA, 19 nt, Artificial Sequence
  Description of Artificial Sequence: Synthetic oligonucleotide
  Antisense strand to SEQ ID NO: 537171
gaaaucaauacagaauuca

SEQ ID NO: 537173 - RNA, 19 nt, Artificial Sequence
  Description of Artificial Sequence: Synthetic oligonucleotide
  Sense strand starting at position 3938 of SEQ ID NO: 318106
ucaccugaaucgcuaauau

SEQ ID NO: 537174 - RNA, 19 nt, Artificial Sequence
  Description of Artificial Sequence: Synthetic oligonucleotide
  Antisense strand to SEQ ID NO: 537173
auauuagcgauucagguga

SEQ ID NO: 537175 - RNA, 19 nt, Artificial Sequence
  Description of Artificial Sequence: Synthetic oligonucleotide
  Sense strand starting at position 380 of SEQ ID NO: 318107
guguaaaugccauaccuga

SEQ ID NO: 537176 - RNA, 19 nt, Artificial Sequence
  Description of Artificial Sequence: Synthetic oligonucleotide
  Antisense strand to SEQ ID NO: 537175
ucagguauggcauuuacac

SEQ ID NO: 537177 - RNA, 19 nt, Artificial Sequence
  Description of Artificial Sequence: Synthetic oligonucleotide
  Sense strand starting at position 604 of SEQ ID NO: 318107
augauugacuaaccguuua

SEQ ID NO: 537178 - RNA, 19 nt, Artificial Sequence
  Description of Artificial Sequence: Synthetic oligonucleotide
  Antisense strand to SEQ ID NO: 537177
uaaacgguuagucaaucau

SEQ ID NO: 537179 - RNA, 19 nt, Artificial Sequence
  Description of Artificial Sequence: Synthetic oligonucleotide
  Sense strand starting at position 615 of SEQ ID NO: 318107
accguuuacuuccuacaga

SEQ ID NO: 537180 - RNA, 19 nt, Artificial Sequence
  Description of Artificial Sequence: Synthetic oligonucleotide
  Antisense strand to SEQ ID NO: 537179
ucuguaggaaguaaacggu

SEQ ID NO: 537181 - RNA, 19 nt, Artificial Sequence
  Description of Artificial Sequence: Synthetic oligonucleotide
  Sense strand starting at position 618 of SEQ ID NO: 318107
guuuacuuccuacagagau

SEQ ID NO: 537182 - RNA, 19 nt, Artificial Sequence
  Description of Artificial Sequence: Synthetic oligonucleotide
  Antisense strand to SEQ ID NO: 537181
aucucuguaggaaguaaac

SEQ ID NO: 537183 - RNA, 19 nt, Artificial Sequence
  Description of Artificial Sequence: Synthetic oligonucleotide
  Sense strand starting at position 646 of SEQ ID NO: 318107
uuuagugucguucucuuau

SEQ ID NO: 537184 - RNA, 19 nt, Artificial Sequence
  Description of Artificial Sequence: Synthetic oligonucleotide
  Antisense strand to SEQ ID NO: 537183
auaagagaacgacacuaaa

SEQ ID NO: 537185 - RNA, 19 nt, Artificial Sequence
  Description of Artificial Sequence: Synthetic oligonucleotide
  Sense strand starting at position 729 of SEQ ID NO: 318107
ugcacuuugggaugguaau

SEQ ID NO: 537186 - RNA, 19 nt, Artificial Sequence
  Description of Artificial Sequence: Synthetic oligonucleotide
  Antisense strand to SEQ ID NO: 537185
auuaccaucccaaagugca

SEQ ID NO: 537187 - RNA, 19 nt, Artificial Sequence
  Description of Artificial Sequence: Synthetic oligonucleotide
  Sense strand starting at position 730 of SEQ ID NO: 318107
gcacuuugggaugguaauu

SEQ ID NO: 537188 - RNA, 19 nt, Artificial Sequence
  Description of Artificial Sequence: Synthetic oligonucleotide
  Antisense strand to SEQ ID NO: 537187
aauuaccaucccaaagugc

SEQ ID NO: 537189 - RNA, 19 nt, Artificial Sequence
  Description of Artificial Sequence: Synthetic oligonucleotide
  Sense strand starting at position 741 of SEQ ID NO: 318107
ugguaauugaaaugugcca

SEQ ID NO: 537190 - RNA, 19 nt, Artificial Sequence
  Description of Artificial Sequence: Synthetic oligonucleotide
  Antisense strand to SEQ ID NO: 537189
uggcacauuucaauuacca

SEQ ID NO: 537191 - RNA, 19 nt, Artificial Sequence
  Description of Artificial Sequence: Synthetic oligonucleotide
  Sense strand starting at position 806 of SEQ ID NO: 318107
ugcagauuggaauagucua

SEQ ID NO: 537192 - RNA, 19 nt, Artificial Sequence
  Description of Artificial Sequence: Synthetic oligonucleotide
  Antisense strand to SEQ ID NO: 537191
uagacuauuccaaucugca

SEQ ID NO: 537193 - RNA, 19 nt, Artificial Sequence
  Description of Artificial Sequence: Synthetic oligonucleotide
  Sense strand starting at position 889 of SEQ ID NO: 318107
uugcuauaaucauugggaa

SEQ ID NO: 537194 - RNA, 19 nt, Artificial Sequence
  Description of Artificial Sequence: Synthetic oligonucleotide
  Antisense strand to SEQ ID NO: 537193
uucccaaugauuauagcaa

SEQ ID NO: 537195 - RNA, 19 nt, Artificial Sequence
  Description of Artificial Sequence: Synthetic oligonucleotide
  Sense strand starting at position 890 of SEQ ID NO: 318107
ugcuauaaucauugggaaa

SEQ ID NO: 537196 - RNA, 19 nt, Artificial Sequence
  Description of Artificial Sequence: Synthetic oligonucleotide
  Antisense strand to SEQ ID NO: 537195
uuucccaaugauuauagca

SEQ ID NO: 537197 - RNA, 19 nt, Artificial Sequence
  Description of Artificial Sequence: Synthetic oligonucleotide
  Sense strand starting at position 909 of SEQ ID NO: 318107
gauuauggauaagucaagu

SEQ ID NO: 537198 - RNA, 19 nt, Artificial Sequence
  Description of Artificial Sequence: Synthetic oligonucleotide
  Antisense strand to SEQ ID NO: 537197
acuugacuuauccauaauc

SEQ ID NO: 537199 - RNA, 19 nt, Artificial Sequence
  Description of Artificial Sequence: Synthetic oligonucleotide
  Sense strand starting at position 983 of SEQ ID NO: 318107
ccgugaagcgcgcucuuaa

SEQ ID NO: 537200 - RNA, 19 nt, Artificial Sequence
  Description of Artificial Sequence: Synthetic oligonucleotide
  Antisense strand to SEQ ID NO: 537199
uuaagagcgcgcuucacgg

SEQ ID NO: 537201 - RNA, 19 nt, Artificial Sequence
  Description of Artificial Sequence: Synthetic oligonucleotide
  Sense strand starting at position 984 of SEQ ID NO: 318107
cgugaagcgcgcucuuaaa

SEQ ID NO: 537202 - RNA, 19 nt, Artificial Sequence
  Description of Artificial Sequence: Synthetic oligonucleotide
  Antisense strand to SEQ ID NO: 537201
uuuaagagcgcgcuucacg

SEQ ID NO: 537203 - RNA, 19 nt, Artificial Sequence
  Description of Artificial Sequence: Synthetic oligonucleotide
  Sense strand starting at position 1005 of SEQ ID NO: 318107
gcacacaggacuggauauu

SEQ ID NO: 537204 - RNA, 19 nt, Artificial Sequence
  Description of Artificial Sequence: Synthetic oligonucleotide
  Antisense strand to SEQ ID NO: 537203
aauauccaguccugugugc

SEQ ID NO: 537205 - RNA, 19 nt, Artificial Sequence
  Description of Artificial Sequence: Synthetic oligonucleotide
  Sense strand starting at position 1016 of SEQ ID NO: 318107
uggauauuguuagcaagag

SEQ ID NO: 537206 - RNA, 19 nt, Artificial Sequence
  Description of Artificial Sequence: Synthetic oligonucleotide
  Antisense strand to SEQ ID NO: 537205
cucuugcuaacaauaucca

SEQ ID NO: 537207 - RNA, 19 nt, Artificial Sequence
  Description of Artificial Sequence: Synthetic oligonucleotide
  Sense strand starting at position 1049 of SEQ ID NO: 318107
guugucacucguucucuuu

SEQ ID NO: 537208 - RNA, 19 nt, Artificial Sequence
  Description of Artificial Sequence: Synthetic oligonucleotide
  Antisense strand to SEQ ID NO: 537207
aaagagaacgagugacaac

SEQ ID NO: 537209 - RNA, 19 nt, Artificial Sequence
  Description of Artificial Sequence: Synthetic oligonucleotide
  Sense strand starting at position 1128 of SEQ ID NO: 318107
auaauaaccuucucggaga

SEQ ID NO: 537210 - RNA, 19 nt, Artificial Sequence
  Description of Artificial Sequence: Synthetic oligonucleotide
  Antisense strand to SEQ ID NO: 537209
ucuccgagaagguuauuau

SEQ ID NO: 537211 - RNA, 19 nt, Artificial Sequence
  Description of Artificial Sequence: Synthetic oligonucleotide
  Sense strand starting at position 1233 of SEQ ID NO: 318107
acaaucaguuucccgaaga

SEQ ID NO: 537212 - RNA, 19 nt, Artificial Sequence
  Description of Artificial Sequence: Synthetic oligonucleotide
  Antisense strand to SEQ ID NO: 537211
ucuucgggaaacugauugu

SEQ ID NO: 537213 - RNA, 19 nt, Artificial Sequence
  Description of Artificial Sequence: Synthetic oligonucleotide
  Sense strand starting at position 2289 of SEQ ID NO: 318107
gagggcuaguuccuccaga

SEQ ID NO: 537214 - RNA, 19 nt, Artificial Sequence
  Description of Artificial Sequence: Synthetic oligonucleotide
  Antisense strand to SEQ ID NO: 537213
ucuggaggaacuagcccuc

SEQ ID NO: 537215 - RNA, 19 nt, Artificial Sequence
  Description of Artificial Sequence: Synthetic oligonucleotide
  Sense strand starting at position 2290 of SEQ ID NO: 318107
agggcuaguuccuccagaa

SEQ ID NO: 537216 - RNA, 19 nt, Artificial Sequence
  Description of Artificial Sequence: Synthetic oligonucleotide
  Antisense strand to SEQ ID NO: 537215
uucuggaggaacuagcccu

SEQ ID NO: 537217 - RNA, 19 nt, Artificial Sequence
  Description of Artificial Sequence: Synthetic oligonucleotide
  Sense strand starting at position 2366 of SEQ ID NO: 318107
gaggaacuguuuccugacu

SEQ ID NO: 537218 - RNA, 19 nt, Artificial Sequence
  Description of Artificial Sequence: Synthetic oligonucleotide
  Antisense strand to SEQ ID NO: 537217
agucaggaaacaguuccuc

SEQ ID NO: 537219 - RNA, 19 nt, Artificial Sequence
  Description of Artificial Sequence: Synthetic oligonucleotide
  Sense strand starting at position 2534 of SEQ ID NO: 318107
ccgcgaggucugcuucuca

SEQ ID NO: 537220 - RNA, 19 nt, Artificial Sequence
  Description of Artificial Sequence: Synthetic oligonucleotide
  Antisense strand to SEQ ID NO: 537219
ugagaagcagaccucgcgg

SEQ ID NO: 537221 - RNA, 19 nt, Artificial Sequence
  Description of Artificial Sequence: Synthetic oligonucleotide
  Sense strand starting at position 2612 of SEQ ID NO: 318107
uagucuaaaguuuguaaga

SEQ ID NO: 537222 - RNA, 19 nt, Artificial Sequence
  Description of Artificial Sequence: Synthetic oligonucleotide
  Antisense strand to SEQ ID NO: 537221
ucuuacaaacuuuagacua

SEQ ID NO: 537223 - RNA, 19 nt, Artificial Sequence
  Description of Artificial Sequence: Synthetic oligonucleotide
  Sense strand starting at position 2613 of SEQ ID NO: 318107
agucuaaaguuuguaagau

SEQ ID NO: 537224 - RNA, 19 nt, Artificial Sequence
  Description of Artificial Sequence: Synthetic oligonucleotide
  Antisense strand to SEQ ID NO: 537223
aucuuacaaacuuuagacu

SEQ ID NO: 537225 - RNA, 19 nt, Artificial Sequence
  Description of Artificial Sequence: Synthetic oligonucleotide
  Sense strand starting at position 2735 of SEQ ID NO: 318107
cuccaugacuuuguggaga

SEQ ID NO: 537226 - RNA, 19 nt, Artificial Sequence
  Description of Artificial Sequence: Synthetic oligonucleotide
  Antisense strand to SEQ ID NO: 537225
ucuccacaaagucauggag

SEQ ID NO: 537227 - RNA, 19 nt, Artificial Sequence
  Description of Artificial Sequence: Synthetic oligonucleotide
  Sense strand starting at position 2926 of SEQ ID NO: 318107
acauguucccaucaucugu

SEQ ID NO: 537228 - RNA, 19 nt, Artificial Sequence
  Description of Artificial Sequence: Synthetic oligonucleotide
  Antisense strand to SEQ ID NO: 537227
acagaugaugggaacaugu

SEQ ID NO: 537229 - RNA, 19 nt, Artificial Sequence
  Description of Artificial Sequence: Synthetic oligonucleotide
  Sense strand starting at position 3080 of SEQ ID NO: 318107
ggcuuaauuucggugucuu

SEQ ID NO: 537230 - RNA, 19 nt, Artificial Sequence
  Description of Artificial Sequence: Synthetic oligonucleotide
  Antisense strand to SEQ ID NO: 537229
aagacaccgaaauuaagcc

SEQ ID NO: 537231 - RNA, 19 nt, Artificial Sequence
  Description of Artificial Sequence: Synthetic oligonucleotide
  Sense strand starting at position 3081 of SEQ ID NO: 318107
gcuuaauuucggugucuug

SEQ ID NO: 537232 - RNA, 19 nt, Artificial Sequence
  Description of Artificial Sequence: Synthetic oligonucleotide
  Antisense strand to SEQ ID NO: 537231
caagacaccgaaauuaagc

SEQ ID NO: 537233 - RNA, 19 nt, Artificial Sequence
  Description of Artificial Sequence: Synthetic oligonucleotide
  Sense strand starting at position 3238 of SEQ ID NO: 318107
gggaaucaaagaugcguaa

SEQ ID NO: 537234 - RNA, 19 nt, Artificial Sequence
  Description of Artificial Sequence: Synthetic oligonucleotide
  Antisense strand to SEQ ID NO: 537233
uuacgcaucuuugauuccc

SEQ ID NO: 537235 - RNA, 19 nt, Artificial Sequence
  Description of Artificial Sequence: Synthetic oligonucleotide
  Sense strand starting at position 3242 of SEQ ID NO: 318107
aucaaagaugcguaaguuu

SEQ ID NO: 537236 - RNA, 19 nt, Artificial Sequence
  Description of Artificial Sequence: Synthetic oligonucleotide
  Antisense strand to SEQ ID NO: 537235
aaacuuacgcaucuuugau

SEQ ID NO: 537237 - RNA, 19 nt, Artificial Sequence
  Description of Artificial Sequence: Synthetic oligonucleotide
  Sense strand starting at position 3372 of SEQ ID NO: 318107
uuuagagcgcguguaugaa

SEQ ID NO: 537238 - RNA, 19 nt, Artificial Sequence
  Description of Artificial Sequence: Synthetic oligonucleotide
  Antisense strand to SEQ ID NO: 537237
uucauacacgcgcucuaaa

SEQ ID NO: 537239 - RNA, 19 nt, Artificial Sequence
  Description of Artificial Sequence: Synthetic oligonucleotide
  Sense strand starting at position 3382 of SEQ ID NO: 318107
guguaugaaagcgaaaguu

SEQ ID NO: 537240 - RNA, 19 nt, Artificial Sequence
  Description of Artificial Sequence: Synthetic oligonucleotide
  Antisense strand to SEQ ID NO: 537239
aacuuucgcuuucauacac

SEQ ID NO: 537241 - RNA, 19 nt, Artificial Sequence
  Description of Artificial Sequence: Synthetic oligonucleotide
  Sense strand starting at position 3400 of SEQ ID NO: 318107
uggauagaccuagguugau

SEQ ID NO: 537242 - RNA, 19 nt, Artificial Sequence
  Description of Artificial Sequence: Synthetic oligonucleotide
  Antisense strand to SEQ ID NO: 537241
aucaaccuaggucuaucca

SEQ ID NO: 537243 - RNA, 19 nt, Artificial Sequence
  Description of Artificial Sequence: Synthetic oligonucleotide
  Sense strand starting at position 3412 of SEQ ID NO: 318107
gguugauaaguuuaccagu

SEQ ID NO: 537244 - RNA, 19 nt, Artificial Sequence
  Description of Artificial Sequence: Synthetic oligonucleotide
  Antisense strand to SEQ ID NO: 537243
acugguaaacuuaucaacc

SEQ ID NO: 537245 - RNA, 19 nt, Artificial Sequence
  Description of Artificial Sequence: Synthetic oligonucleotide
  Sense strand starting at position 3534 of SEQ ID NO: 318107
uguuaaucucaauacgaag

SEQ ID NO: 537246 - RNA, 19 nt, Artificial Sequence
  Description of Artificial Sequence: Synthetic oligonucleotide
  Antisense strand to SEQ ID NO: 537245
cuucguauugagauuaaca

SEQ ID NO: 537247 - RNA, 19 nt, Artificial Sequence
  Description of Artificial Sequence: Synthetic oligonucleotide
  Sense strand starting at position 3573 of SEQ ID NO: 318107
guguguuucccauagagau

SEQ ID NO: 537248 - RNA, 19 nt, Artificial Sequence
  Description of Artificial Sequence: Synthetic oligonucleotide
  Antisense strand to SEQ ID NO: 537247
aucucuaugggaaacacac

SEQ ID NO: 537249 - RNA, 19 nt, Artificial Sequence
  Description of Artificial Sequence: Synthetic oligonucleotide
  Sense strand starting at position 3594 of SEQ ID NO: 318107
acauguugacccuaguaaa

SEQ ID NO: 537250 - RNA, 19 nt, Artificial Sequence
  Description of Artificial Sequence: Synthetic oligonucleotide
  Antisense strand to SEQ ID NO: 537249
uuuacuagggucaacaugu

SEQ ID NO: 537251 - RNA, 19 nt, Artificial Sequence
  Description of Artificial Sequence: Synthetic oligonucleotide
  Sense strand starting at position 3666 of SEQ ID NO: 318107
gucauauuccaucaugcca

SEQ ID NO: 537252 - RNA, 19 nt, Artificial Sequence
  Description of Artificial Sequence: Synthetic oligonucleotide
  Antisense strand to SEQ ID NO: 537251
uggcaugauggaauaugac

SEQ ID NO: 537253 - RNA, 19 nt, Artificial Sequence
  Description of Artificial Sequence: Synthetic oligonucleotide
  Sense strand starting at position 3725 of SEQ ID NO: 318107
ccugaugacuuacauuuga

SEQ ID NO: 537254 - RNA, 19 nt, Artificial Sequence
  Description of Artificial Sequence: Synthetic oligonucleotide
  Antisense strand to SEQ ID NO: 537253
ucaaauguaagucaucagg

SEQ ID NO: 537255 - RNA, 19 nt, Artificial Sequence
  Description of Artificial Sequence: Synthetic oligonucleotide
  Sense strand starting at position 4 of SEQ ID NO: 318108
cgcaguuaguauuuggauu

SEQ ID NO: 537256 - RNA, 19 nt, Artificial Sequence
  Description of Artificial Sequence: Synthetic oligonucleotide
  Antisense strand to SEQ ID NO: 537255
aauccaaauacuaacugcg

SEQ ID NO: 537257 - RNA, 19 nt, Artificial Sequence
  Description of Artificial Sequence: Synthetic oligonucleotide
  Sense strand starting at position 5 of SEQ ID NO: 318108
gcaguuaguauuuggauuc

SEQ ID NO: 537258 - RNA, 19 nt, Artificial Sequence
  Description of Artificial Sequence: Synthetic oligonucleotide
  Antisense strand to SEQ ID NO: 537257
gaauccaaauacuaacugc

SEQ ID NO: 537259 - RNA, 19 nt, Artificial Sequence
  Description of Artificial Sequence: Synthetic oligonucleotide
  Sense strand starting at position 38 of SEQ ID NO: 318108
ggacuucucaaaggugcau

SEQ ID NO: 537260 - RNA, 19 nt, Artificial Sequence
  Description of Artificial Sequence: Synthetic oligonucleotide
  Antisense strand to SEQ ID NO: 537259
augcaccuuugagaagucc

SEQ ID NO: 537261 - RNA, 19 nt, Artificial Sequence
  Description of Artificial Sequence: Synthetic oligonucleotide
  Sense strand starting at position 60 of SEQ ID NO: 318108
acaucugaguauucuggca

SEQ ID NO: 537262 - RNA, 19 nt, Artificial Sequence
  Description of Artificial Sequence: Synthetic oligonucleotide
  Antisense strand to SEQ ID NO: 537261
ugccagaauacucagaugu

SEQ ID NO: 537263 - RNA, 19 nt, Artificial Sequence
  Description of Artificial Sequence: Synthetic oligonucleotide
  Sense strand starting at position 269 of SEQ ID NO: 318108
cugacuuuguccucugaau

SEQ ID NO: 537264 - RNA, 19 nt, Artificial Sequence
  Description of Artificial Sequence: Synthetic oligonucleotide
  Antisense strand to SEQ ID NO: 537263
auucagaggacaaagucag

SEQ ID NO: 537265 - RNA, 19 nt, Artificial Sequence
  Description of Artificial Sequence: Synthetic oligonucleotide
  Sense strand starting at position 280 of SEQ ID NO: 318108
cucugaaugcaggaacuuu

SEQ ID NO: 537266 - RNA, 19 nt, Artificial Sequence
  Description of Artificial Sequence: Synthetic oligonucleotide
  Antisense strand to SEQ ID NO: 537265
aaaguuccugcauucagag

SEQ ID NO: 537267 - RNA, 19 nt, Artificial Sequence
  Description of Artificial Sequence: Synthetic oligonucleotide
  Sense strand starting at position 574 of SEQ ID NO: 318108
gguaauggauauuccaauu

SEQ ID NO: 537268 - RNA, 19 nt, Artificial Sequence
  Description of Artificial Sequence: Synthetic oligonucleotide
  Antisense strand to SEQ ID NO: 537267
aauuggaauauccauuacc

SEQ ID NO: 537269 - RNA, 19 nt, Artificial Sequence
  Description of Artificial Sequence: Synthetic oligonucleotide
  Sense strand starting at position 747 of SEQ ID NO: 318108
ucaguuuggucuucugaaa

SEQ ID NO: 537270 - RNA, 19 nt, Artificial Sequence
  Description of Artificial Sequence: Synthetic oligonucleotide
  Antisense strand to SEQ ID NO: 537269
uuucagaagaccaaacuga

SEQ ID NO: 537271 - RNA, 19 nt, Artificial Sequence
  Description of Artificial Sequence: Synthetic oligonucleotide
  Sense strand starting at position 775 of SEQ ID NO: 318108
aucaguuucucagcuaaag

SEQ ID NO: 537272 - RNA, 19 nt, Artificial Sequence
  Description of Artificial Sequence: Synthetic oligonucleotide
  Antisense strand to SEQ ID NO: 537271
cuuuagcugagaaacugau

SEQ ID NO: 537273 - RNA, 19 nt, Artificial Sequence
  Description of Artificial Sequence: Synthetic oligonucleotide
  Sense strand starting at position 849 of SEQ ID NO: 318108
aauauaaauucgccaguga

SEQ ID NO: 537274 - RNA, 19 nt, Artificial Sequence
  Description of Artificial Sequence: Synthetic oligonucleotide
  Antisense strand to SEQ ID NO: 537273
ucacuggcgaauuuauauu

SEQ ID NO: 537275 - RNA, 19 nt, Artificial Sequence
  Description of Artificial Sequence: Synthetic oligonucleotide
  Sense strand starting at position 850 of SEQ ID NO: 318108
auauaaauucgccagugaa

SEQ ID NO: 537276 - RNA, 19 nt, Artificial Sequence
  Description of Artificial Sequence: Synthetic oligonucleotide
  Antisense strand to SEQ ID NO: 537275
uucacuggcgaauuuauau

SEQ ID NO: 537277 - RNA, 19 nt, Artificial Sequence
  Description of Artificial Sequence: Synthetic oligonucleotide
  Sense strand starting at position 942 of SEQ ID NO: 318108
guaguccucagguagaaca

SEQ ID NO: 537278 - RNA, 19 nt, Artificial Sequence
  Description of Artificial Sequence: Synthetic oligonucleotide
  Antisense strand to SEQ ID NO: 537277
uguucuaccugaggacuac

SEQ ID NO: 537279 - RNA, 19 nt, Artificial Sequence
  Description of Artificial Sequence: Synthetic oligonucleotide
  Sense strand starting at position 984 of SEQ ID NO: 318108
gaacucaaggucuagcuua

SEQ ID NO: 537280 - RNA, 19 nt, Artificial Sequence
  Description of Artificial Sequence: Synthetic oligonucleotide
  Antisense strand to SEQ ID NO: 537279
uaagcuagaccuugaguuc

SEQ ID NO: 537281 - RNA, 19 nt, Artificial Sequence
  Description of Artificial Sequence: Synthetic oligonucleotide
  Sense strand starting at position 998 of SEQ ID NO: 318108
gcuuaaguuggguauuugu

SEQ ID NO: 537282 - RNA, 19 nt, Artificial Sequence
  Description of Artificial Sequence: Synthetic oligonucleotide
  Antisense strand to SEQ ID NO: 537281
acaaauacccaacuuaagc

SEQ ID NO: 537283 - RNA, 19 nt, Artificial Sequence
  Description of Artificial Sequence: Synthetic oligonucleotide
  Sense strand starting at position 1074 of SEQ ID NO: 318108
acguaaucaagucaguaga

SEQ ID NO: 537284 - RNA, 19 nt, Artificial Sequence
  Description of Artificial Sequence: Synthetic oligonucleotide
  Antisense strand to SEQ ID NO: 537283
ucuacugacuugauuacgu

SEQ ID NO: 537285 - RNA, 19 nt, Artificial Sequence
  Description of Artificial Sequence: Synthetic oligonucleotide
  Sense strand starting at position 1076 of SEQ ID NO: 318108
guaaucaagucaguagaca

SEQ ID NO: 537286 - RNA, 19 nt, Artificial Sequence
  Description of Artificial Sequence: Synthetic oligonucleotide
  Antisense strand to SEQ ID NO: 537285
ugucuacugacuugauuac

SEQ ID NO: 537287 - RNA, 19 nt, Artificial Sequence
  Description of Artificial Sequence: Synthetic oligonucleotide
  Sense strand starting at position 1108 of SEQ ID NO: 318108
aggcuaagcaaaugguuau

SEQ ID NO: 537288 - RNA, 19 nt, Artificial Sequence
  Description of Artificial Sequence: Synthetic oligonucleotide
  Antisense strand to SEQ ID NO: 537287
auaaccauuugcuuagccu

SEQ ID NO: 537289 - RNA, 19 nt, Artificial Sequence
  Description of Artificial Sequence: Synthetic oligonucleotide
  Sense strand starting at position 1115 of SEQ ID NO: 318108
gcaaaugguuauuugcuua

SEQ ID NO: 537290 - RNA, 19 nt, Artificial Sequence
  Description of Artificial Sequence: Synthetic oligonucleotide
  Antisense strand to SEQ ID NO: 537289
uaagcaaauaaccauuugc

SEQ ID NO: 537291 - RNA, 19 nt, Artificial Sequence
  Description of Artificial Sequence: Synthetic oligonucleotide
  Sense strand starting at position 1202 of SEQ ID NO: 318108
caaaguuugcguuuccgca

SEQ ID NO: 537292 - RNA, 19 nt, Artificial Sequence
  Description of Artificial Sequence: Synthetic oligonucleotide
  Antisense strand to SEQ ID NO: 537291
ugcggaaacgcaaacuuug

SEQ ID NO: 537293 - RNA, 19 nt, Artificial Sequence
  Description of Artificial Sequence: Synthetic oligonucleotide
  Sense strand starting at position 1203 of SEQ ID NO: 318108
aaaguuugcguuuccgcaa

SEQ ID NO: 537294 - RNA, 19 nt, Artificial Sequence
  Description of Artificial Sequence: Synthetic oligonucleotide
  Antisense strand to SEQ ID NO: 537293
uugcggaaacgcaaacuuu

SEQ ID NO: 537295 - RNA, 19 nt, Artificial Sequence
  Description of Artificial Sequence: Synthetic oligonucleotide
  Sense strand starting at position 1210 of SEQ ID NO: 318108
gcguuuccgcaagugguua

SEQ ID NO: 537296 - RNA, 19 nt, Artificial Sequence
  Description of Artificial Sequence: Synthetic oligonucleotide
  Antisense strand to SEQ ID NO: 537295
uaaccacuugcggaaacgc

SEQ ID NO: 537297 - RNA, 19 nt, Artificial Sequence
  Description of Artificial Sequence: Synthetic oligonucleotide
  Sense strand starting at position 1358 of SEQ ID NO: 318108
ggaccugauccuggcauaa

SEQ ID NO: 537298 - RNA, 19 nt, Artificial Sequence
  Description of Artificial Sequence: Synthetic oligonucleotide
  Antisense strand to SEQ ID NO: 537297
uuaugccaggaucaggucc

SEQ ID NO: 537299 - RNA, 19 nt, Artificial Sequence
  Description of Artificial Sequence: Synthetic oligonucleotide
  Sense strand starting at position 2308 of SEQ ID NO: 318108
cgccuaguggucucgcaga

SEQ ID NO: 537300 - RNA, 19 nt, Artificial Sequence
  Description of Artificial Sequence: Synthetic oligonucleotide
  Antisense strand to SEQ ID NO: 537299
ucugcgagaccacuaggcg

SEQ ID NO: 537301 - RNA, 19 nt, Artificial Sequence
  Description of Artificial Sequence: Synthetic oligonucleotide
  Sense strand starting at position 2575 of SEQ ID NO: 318108
uccgauagauacccuaaga

SEQ ID NO: 537302 - RNA, 19 nt, Artificial Sequence
  Description of Artificial Sequence: Synthetic oligonucleotide
  Antisense strand to SEQ ID NO: 537301
ucuuaggguaucuaucgga

SEQ ID NO: 537303 - RNA, 19 nt, Artificial Sequence
  Description of Artificial Sequence: Synthetic oligonucleotide
  Sense strand starting at position 2710 of SEQ ID NO: 318108
caaccuauuucugggagga

SEQ ID NO: 537304 - RNA, 19 nt, Artificial Sequence
  Description of Artificial Sequence: Synthetic oligonucleotide
  Antisense strand to SEQ ID NO: 537303
uccucccagaaauagguug

SEQ ID NO: 537305 - RNA, 19 nt, Artificial Sequence
  Description of Artificial Sequence: Synthetic oligonucleotide
  Sense strand starting at position 2712 of SEQ ID NO: 318108
accuauuucugggaggacu

SEQ ID NO: 537306 - RNA, 19 nt, Artificial Sequence
  Description of Artificial Sequence: Synthetic oligonucleotide
  Antisense strand to SEQ ID NO: 537305
aguccucccagaaauaggu

SEQ ID NO: 537307 - RNA, 19 nt, Artificial Sequence
  Description of Artificial Sequence: Synthetic oligonucleotide
  Sense strand starting at position 2726 of SEQ ID NO: 318108
ggacuuggauuugggaaua

SEQ ID NO: 537308 - RNA, 19 nt, Artificial Sequence
  Description of Artificial Sequence: Synthetic oligonucleotide
  Antisense strand to SEQ ID NO: 537307
uauucccaaauccaagucc

SEQ ID NO: 537309 - RNA, 19 nt, Artificial Sequence
  Description of Artificial Sequence: Synthetic oligonucleotide
  Sense strand starting at position 2865 of SEQ ID NO: 318108
cgcuauaauuaacuggaau

SEQ ID NO: 537310 - RNA, 19 nt, Artificial Sequence
  Description of Artificial Sequence: Synthetic oligonucleotide
  Antisense strand to SEQ ID NO: 537309
auuccaguuaauuauagcg

SEQ ID NO: 537311 - RNA, 19 nt, Artificial Sequence
  Description of Artificial Sequence: Synthetic oligonucleotide
  Sense strand starting at position 2905 of SEQ ID NO: 318108
agaauuuccuuggaauuga

SEQ ID NO: 537312 - RNA, 19 nt, Artificial Sequence
  Description of Artificial Sequence: Synthetic oligonucleotide
  Antisense strand to SEQ ID NO: 537311
ucaauuccaaggaaauucu

SEQ ID NO: 537313 - RNA, 19 nt, Artificial Sequence
  Description of Artificial Sequence: Synthetic oligonucleotide
  Sense strand starting at position 3078 of SEQ ID NO: 318108
ugugcauuugcaggauauu

SEQ ID NO: 537314 - RNA, 19 nt, Artificial Sequence
  Description of Artificial Sequence: Synthetic oligonucleotide
  Antisense strand to SEQ ID NO: 537313
aauauccugcaaaugcaca

SEQ ID NO: 537315 - RNA, 19 nt, Artificial Sequence
  Description of Artificial Sequence: Synthetic oligonucleotide
  Sense strand starting at position 3222 of SEQ ID NO: 318108
ugagaaccacacugcuuua

SEQ ID NO: 537316 - RNA, 19 nt, Artificial Sequence
  Description of Artificial Sequence: Synthetic oligonucleotide
  Antisense strand to SEQ ID NO: 537315
uaaagcagugugguucuca

SEQ ID NO: 537317 - RNA, 19 nt, Artificial Sequence
  Description of Artificial Sequence: Synthetic oligonucleotide
  Sense strand starting at position 3320 of SEQ ID NO: 318108
cucaucacacuuugagaga

SEQ ID NO: 537318 - RNA, 19 nt, Artificial Sequence
  Description of Artificial Sequence: Synthetic oligonucleotide
  Antisense strand to SEQ ID NO: 537317
ucucucaaagugugaugag

SEQ ID NO: 537319 - RNA, 19 nt, Artificial Sequence
  Description of Artificial Sequence: Synthetic oligonucleotide
  Sense strand starting at position 3412 of SEQ ID NO: 318108
ggucuucuauaugcagaua

SEQ ID NO: 537320 - RNA, 19 nt, Artificial Sequence
  Description of Artificial Sequence: Synthetic oligonucleotide
  Antisense strand to SEQ ID NO: 537319
uaucugcauauagaagacc

SEQ ID NO: 537321 - RNA, 19 nt, Artificial Sequence
  Description of Artificial Sequence: Synthetic oligonucleotide
  Sense strand starting at position 3556 of SEQ ID NO: 318108
gagauuagagauuggccua

SEQ ID NO: 537322 - RNA, 19 nt, Artificial Sequence
  Description of Artificial Sequence: Synthetic oligonucleotide
  Antisense strand to SEQ ID NO: 537321
uaggccaaucucuaaucuc

SEQ ID NO: 537323 - RNA, 19 nt, Artificial Sequence
  Description of Artificial Sequence: Synthetic oligonucleotide
  Sense strand starting at position 3634 of SEQ ID NO: 318108
auggccgugagucaacaua

SEQ ID NO: 537324 - RNA, 19 nt, Artificial Sequence
  Description of Artificial Sequence: Synthetic oligonucleotide
  Antisense strand to SEQ ID NO: 537323
uauguugacucacggccau

SEQ ID NO: 537325 - RNA, 19 nt, Artificial Sequence
  Description of Artificial Sequence: Synthetic oligonucleotide
  Sense strand starting at position 3730 of SEQ ID NO: 318108
gucugagauugguccuuga

SEQ ID NO: 537326 - RNA, 19 nt, Artificial Sequence
  Description of Artificial Sequence: Synthetic oligonucleotide
  Antisense strand to SEQ ID NO: 537325
ucaaggaccaaucucagac

SEQ ID NO: 537327 - RNA, 19 nt, Artificial Sequence
  Description of Artificial Sequence: Synthetic oligonucleotide
  Sense strand starting at position 3733 of SEQ ID NO: 318108
ugagauugguccuugacaa

SEQ ID NO: 537328 - RNA, 19 nt, Artificial Sequence
  Description of Artificial Sequence: Synthetic oligonucleotide
  Antisense strand to SEQ ID NO: 537327
uugucaaggaccaaucuca

SEQ ID NO: 537329 - RNA, 19 nt, Artificial Sequence
  Description of Artificial Sequence: Synthetic oligonucleotide
  Sense strand starting at position 3734 of SEQ ID NO: 318108
gagauugguccuugacaac

SEQ ID NO: 537330 - RNA, 19 nt, Artificial Sequence
  Description of Artificial Sequence: Synthetic oligonucleotide
  Antisense strand to SEQ ID NO: 537329
guugucaaggaccaaucuc

SEQ ID NO: 537331 - RNA, 19 nt, Artificial Sequence
  Description of Artificial Sequence: Synthetic oligonucleotide
  Sense strand starting at position 3745 of SEQ ID NO: 318108
uugacaaccuaguuuaaug

SEQ ID NO: 537332 - RNA, 19 nt, Artificial Sequence
  Description of Artificial Sequence: Synthetic oligonucleotide
  Antisense strand to SEQ ID NO: 537331
cauuaaacuagguugucaa

SEQ ID NO: 537333 - RNA, 19 nt, Artificial Sequence
  Description of Artificial Sequence: Synthetic oligonucleotide
  Sense strand starting at position 3755 of SEQ ID NO: 318108
aguuuaauggugcaaucau

SEQ ID NO: 537334 - RNA, 19 nt, Artificial Sequence
  Description of Artificial Sequence: Synthetic oligonucleotide
  Antisense strand to SEQ ID NO: 537333
augauugcaccauuaaacu

SEQ ID NO: 537335 - RNA, 19 nt, Artificial Sequence
  Description of Artificial Sequence: Synthetic oligonucleotide
  Sense strand starting at position 77 of SEQ ID NO: 318109
gauguauuaggaggguaga

SEQ ID NO: 537336 - RNA, 19 nt, Artificial Sequence
  Description of Artificial Sequence: Synthetic oligonucleotide
  Antisense strand to SEQ ID NO: 537335
ucuacccuccuaauacauc

SEQ ID NO: 537337 - RNA, 19 nt, Artificial Sequence
  Description of Artificial Sequence: Synthetic oligonucleotide
  Sense strand starting at position 95 of SEQ ID NO: 318109
acuggaaguuggguucaaa

SEQ ID NO: 537338 - RNA, 19 nt, Artificial Sequence
  Description of Artificial Sequence: Synthetic oligonucleotide
  Antisense strand to SEQ ID NO: 537337
uuugaacccaacuuccagu

SEQ ID NO: 537339 - RNA, 19 nt, Artificial Sequence
  Description of Artificial Sequence: Synthetic oligonucleotide
  Sense strand starting at position 126 of SEQ ID NO: 318109
agauaagcucuacaguagu

SEQ ID NO: 537340 - RNA, 19 nt, Artificial Sequence
  Description of Artificial Sequence: Synthetic oligonucleotide
  Antisense strand to SEQ ID NO: 537339
acuacuguagagcuuaucu

SEQ ID NO: 537341 - RNA, 19 nt, Artificial Sequence
  Description of Artificial Sequence: Synthetic oligonucleotide
  Sense strand starting at position 136 of SEQ ID NO: 318109
uacaguagugugcauggau

SEQ ID NO: 537342 - RNA, 19 nt, Artificial Sequence
  Description of Artificial Sequence: Synthetic oligonucleotide
  Antisense strand to SEQ ID NO: 537341
auccaugcacacuacugua

SEQ ID NO: 537343 - RNA, 19 nt, Artificial Sequence
  Description of Artificial Sequence: Synthetic oligonucleotide
  Sense strand starting at position 215 of SEQ ID NO: 318109
ucugaaagagauugcuaaa

SEQ ID NO: 537344 - RNA, 19 nt, Artificial Sequence
  Description of Artificial Sequence: Synthetic oligonucleotide
  Antisense strand to SEQ ID NO: 537343
uuuagcaaucucuuucaga

SEQ ID NO: 537345 - RNA, 19 nt, Artificial Sequence
  Description of Artificial Sequence: Synthetic oligonucleotide
  Sense strand starting at position 295 of SEQ ID NO: 318109
uugcgaaaugggcauaaau

SEQ ID NO: 537346 - RNA, 19 nt, Artificial Sequence
  Description of Artificial Sequence: Synthetic oligonucleotide
  Antisense strand to SEQ ID NO: 537345
auuuaugcccauuucgcaa

SEQ ID NO: 537347 - RNA, 19 nt, Artificial Sequence
  Description of Artificial Sequence: Synthetic oligonucleotide
  Sense strand starting at position 297 of SEQ ID NO: 318109
gcgaaaugggcauaaauau

SEQ ID NO: 537348 - RNA, 19 nt, Artificial Sequence
  Description of Artificial Sequence: Synthetic oligonucleotide
  Antisense strand to SEQ ID NO: 537347
auauuuaugcccauuucgc

SEQ ID NO: 537349 - RNA, 19 nt, Artificial Sequence
  Description of Artificial Sequence: Synthetic oligonucleotide
  Sense strand starting at position 577 of SEQ ID NO: 318109
aaauuugaguuggagaaga

SEQ ID NO: 537350 - RNA, 19 nt, Artificial Sequence
  Description of Artificial Sequence: Synthetic oligonucleotide
  Antisense strand to SEQ ID NO: 537349
ucuucuccaacucaaauuu

SEQ ID NO: 537351 - RNA, 19 nt, Artificial Sequence
  Description of Artificial Sequence: Synthetic oligonucleotide
  Sense strand starting at position 600 of SEQ ID NO: 318109
uaggucaaauauguguaaa

SEQ ID NO: 537352 - RNA, 19 nt, Artificial Sequence
  Description of Artificial Sequence: Synthetic oligonucleotide
  Antisense strand to SEQ ID NO: 537351
uuuacacauauuugaccua

SEQ ID NO: 537353 - RNA, 19 nt, Artificial Sequence
  Description of Artificial Sequence: Synthetic oligonucleotide
  Sense strand starting at position 676 of SEQ ID NO: 318109
guuaccacuguuuggauua

SEQ ID NO: 537354 - RNA, 19 nt, Artificial Sequence
  Description of Artificial Sequence: Synthetic oligonucleotide
  Antisense strand to SEQ ID NO: 537353
uaauccaaacagugguaac

SEQ ID NO: 537355 - RNA, 19 nt, Artificial Sequence
  Description of Artificial Sequence: Synthetic oligonucleotide
  Sense strand starting at position 683 of SEQ ID NO: 318109
cuguuuggauuauuggaca

SEQ ID NO: 537356 - RNA, 19 nt, Artificial Sequence
  Description of Artificial Sequence: Synthetic oligonucleotide
  Antisense strand to SEQ ID NO: 537355
uguccaauaauccaaacag

SEQ ID NO: 537357 - RNA, 19 nt, Artificial Sequence
  Description of Artificial Sequence: Synthetic oligonucleotide
  Sense strand starting at position 686 of SEQ ID NO: 318109
uuuggauuauuggacauuu

SEQ ID NO: 537358 - RNA, 19 nt, Artificial Sequence
  Description of Artificial Sequence: Synthetic oligonucleotide
  Antisense strand to SEQ ID NO: 537357
aaauguccaauaauccaaa

SEQ ID NO: 537359 - RNA, 19 nt, Artificial Sequence
  Description of Artificial Sequence: Synthetic oligonucleotide
  Sense strand starting at position 704 of SEQ ID NO: 318109
uccugaguagugggaaaug

SEQ ID NO: 537360 - RNA, 19 nt, Artificial Sequence
  Description of Artificial Sequence: Synthetic oligonucleotide
  Antisense strand to SEQ ID NO: 537359
cauuucccacuacucagga

SEQ ID NO: 537361 - RNA, 19 nt, Artificial Sequence
  Description of Artificial Sequence: Synthetic oligonucleotide
  Sense strand starting at position 713 of SEQ ID NO: 318109
gugggaaauguuuggauga

SEQ ID NO: 537362 - RNA, 19 nt, Artificial Sequence
  Description of Artificial Sequence: Synthetic oligonucleotide
  Antisense strand to SEQ ID NO: 537361
ucauccaaacauuucccac

SEQ ID NO: 537363 - RNA, 19 nt, Artificial Sequence
  Description of Artificial Sequence: Synthetic oligonucleotide
  Sense strand starting at position 1104 of SEQ ID NO: 318109
aagaucugaccaugaguuc

SEQ ID NO: 537364 - RNA, 19 nt, Artificial Sequence
  Description of Artificial Sequence: Synthetic oligonucleotide
  Antisense strand to SEQ ID NO: 537363
gaacucauggucagaucuu

SEQ ID NO: 537365 - RNA, 19 nt, Artificial Sequence
  Description of Artificial Sequence: Synthetic oligonucleotide
  Sense strand starting at position 1278 of SEQ ID NO: 318109
cugugauauuuacagagaa

SEQ ID NO: 537366 - RNA, 19 nt, Artificial Sequence
  Description of Artificial Sequence: Synthetic oligonucleotide
  Antisense strand to SEQ ID NO: 537365
uucucuguaaauaucacag

SEQ ID NO: 537367 - RNA, 19 nt, Artificial Sequence
  Description of Artificial Sequence: Synthetic oligonucleotide
  Sense strand starting at position 1376 of SEQ ID NO: 318109
ggcaguuucgucuugcauc

SEQ ID NO: 537368 - RNA, 19 nt, Artificial Sequence
  Description of Artificial Sequence: Synthetic oligonucleotide
  Antisense strand to SEQ ID NO: 537367
gaugcaagacgaaacugcc

SEQ ID NO: 537369 - RNA, 19 nt, Artificial Sequence
  Description of Artificial Sequence: Synthetic oligonucleotide
  Sense strand starting at position 1402 of SEQ ID NO: 318109
uuucuuguucugcauggga

SEQ ID NO: 537370 - RNA, 19 nt, Artificial Sequence
  Description of Artificial Sequence: Synthetic oligonucleotide
  Antisense strand to SEQ ID NO: 537369
ucccaugcagaacaagaaa

SEQ ID NO: 537371 - RNA, 19 nt, Artificial Sequence
  Description of Artificial Sequence: Synthetic oligonucleotide
  Sense strand starting at position 1404 of SEQ ID NO: 318109
ucuuguucugcaugggaaa

SEQ ID NO: 537372 - RNA, 19 nt, Artificial Sequence
  Description of Artificial Sequence: Synthetic oligonucleotide
  Antisense strand to SEQ ID NO: 537371
uuucccaugcagaacaaga

SEQ ID NO: 537373 - RNA, 19 nt, Artificial Sequence
  Description of Artificial Sequence: Synthetic oligonucleotide
  Sense strand starting at position 1579 of SEQ ID NO: 318109
ccuaauauacaauguguau

SEQ ID NO: 537374 - RNA, 19 nt, Artificial Sequence
  Description of Artificial Sequence: Synthetic oligonucleotide
  Antisense strand to SEQ ID NO: 537373
auacacauuguauauuagg

SEQ ID NO: 537375 - RNA, 19 nt, Artificial Sequence
  Description of Artificial Sequence: Synthetic oligonucleotide
  Sense strand starting at position 1660 of SEQ ID NO: 318109
cuccuacuccuagggugaa

SEQ ID NO: 537376 - RNA, 19 nt, Artificial Sequence
  Description of Artificial Sequence: Synthetic oligonucleotide
  Antisense strand to SEQ ID NO: 537375
uucacccuaggaguaggag

SEQ ID NO: 537377 - RNA, 19 nt, Artificial Sequence
  Description of Artificial Sequence: Synthetic oligonucleotide
  Sense strand starting at position 2663 of SEQ ID NO: 318109
agggcuuugcuuucgcuua

SEQ ID NO: 537378 - RNA, 19 nt, Artificial Sequence
  Description of Artificial Sequence: Synthetic oligonucleotide
  Antisense strand to SEQ ID NO: 537377
uaagcgaaagcaaagcccu

SEQ ID NO: 537379 - RNA, 19 nt, Artificial Sequence
  Description of Artificial Sequence: Synthetic oligonucleotide
  Sense strand starting at position 2885 of SEQ ID NO: 318109
agugaauuaggauguuugu

SEQ ID NO: 537380 - RNA, 19 nt, Artificial Sequence
  Description of Artificial Sequence: Synthetic oligonucleotide
  Antisense strand to SEQ ID NO: 537379
acaaacauccuaauucacu

SEQ ID NO: 537381 - RNA, 19 nt, Artificial Sequence
  Description of Artificial Sequence: Synthetic oligonucleotide
  Sense strand starting at position 2983 of SEQ ID NO: 318109
gcauuaagaguccagaagu

SEQ ID NO: 537382 - RNA, 19 nt, Artificial Sequence
  Description of Artificial Sequence: Synthetic oligonucleotide
  Antisense strand to SEQ ID NO: 537381
acuucuggacucuuaaugc

SEQ ID NO: 537383 - RNA, 19 nt, Artificial Sequence
  Description of Artificial Sequence: Synthetic oligonucleotide
  Sense strand starting at position 2993 of SEQ ID NO: 318109
uccagaagugcuuaggaac

SEQ ID NO: 537384 - RNA, 19 nt, Artificial Sequence
  Description of Artificial Sequence: Synthetic oligonucleotide
  Antisense strand to SEQ ID NO: 537383
guuccuaagcacuucugga

SEQ ID NO: 537385 - RNA, 19 nt, Artificial Sequence
  Description of Artificial Sequence: Synthetic oligonucleotide
  Sense strand starting at position 3159 of SEQ ID NO: 318109
uuguguuuagaggaaucug

SEQ ID NO: 537386 - RNA, 19 nt, Artificial Sequence
  Description of Artificial Sequence: Synthetic oligonucleotide
  Antisense strand to SEQ ID NO: 537385
cagauuccucuaaacacaa

SEQ ID NO: 537387 - RNA, 19 nt, Artificial Sequence
  Description of Artificial Sequence: Synthetic oligonucleotide
  Sense strand starting at position 3270 of SEQ ID NO: 318109
ggaggguucguugagcaga

SEQ ID NO: 537388 - RNA, 19 nt, Artificial Sequence
  Description of Artificial Sequence: Synthetic oligonucleotide
  Antisense strand to SEQ ID NO: 537387
ucugcucaacgaacccucc

SEQ ID NO: 537389 - RNA, 19 nt, Artificial Sequence
  Description of Artificial Sequence: Synthetic oligonucleotide
  Sense strand starting at position 3354 of SEQ ID NO: 318109
cuggauacauugccagaua

SEQ ID NO: 537390 - RNA, 19 nt, Artificial Sequence
  Description of Artificial Sequence: Synthetic oligonucleotide
  Antisense strand to SEQ ID NO: 537389
uaucuggcaauguauccag

SEQ ID NO: 537391 - RNA, 19 nt, Artificial Sequence
  Description of Artificial Sequence: Synthetic oligonucleotide
  Sense strand starting at position 3416 of SEQ ID NO: 318109
aaguuuaaggagcgucaaa

SEQ ID NO: 537392 - RNA, 19 nt, Artificial Sequence
  Description of Artificial Sequence: Synthetic oligonucleotide
  Antisense strand to SEQ ID NO: 537391
uuugacgcuccuuaaacuu

SEQ ID NO: 537393 - RNA, 19 nt, Artificial Sequence
  Description of Artificial Sequence: Synthetic oligonucleotide
  Sense strand starting at position 3469 of SEQ ID NO: 318109
aucagaucucaguauguug

SEQ ID NO: 537394 - RNA, 19 nt, Artificial Sequence
  Description of Artificial Sequence: Synthetic oligonucleotide
  Antisense strand to SEQ ID NO: 537393
caacauacugagaucugau

SEQ ID NO: 537395 - RNA, 19 nt, Artificial Sequence
  Description of Artificial Sequence: Synthetic oligonucleotide
  Sense strand starting at position 3477 of SEQ ID NO: 318109
ucaguauguugacccauua

SEQ ID NO: 537396 - RNA, 19 nt, Artificial Sequence
  Description of Artificial Sequence: Synthetic oligonucleotide
  Antisense strand to SEQ ID NO: 537395
uaaugggucaacauacuga

SEQ ID NO: 537397 - RNA, 19 nt, Artificial Sequence
  Description of Artificial Sequence: Synthetic oligonucleotide
  Sense strand starting at position 3589 of SEQ ID NO: 318109
ugucauuucucaguucugu

SEQ ID NO: 537398 - RNA, 19 nt, Artificial Sequence
  Description of Artificial Sequence: Synthetic oligonucleotide
  Antisense strand to SEQ ID NO: 537397
acagaacugagaaaugaca

SEQ ID NO: 537399 - RNA, 19 nt, Artificial Sequence
  Description of Artificial Sequence: Synthetic oligonucleotide
  Sense strand starting at position 3643 of SEQ ID NO: 318109
guauuauguugggucacag

SEQ ID NO: 537400 - RNA, 19 nt, Artificial Sequence
  Description of Artificial Sequence: Synthetic oligonucleotide
  Antisense strand to SEQ ID NO: 537399
cugugacccaacauaauac

SEQ ID NO: 537401 - RNA, 19 nt, Artificial Sequence
  Description of Artificial Sequence: Synthetic oligonucleotide
  Sense strand starting at position 3671 of SEQ ID NO: 318109
auuggacuuuacuuaaguu

SEQ ID NO: 537402 - RNA, 19 nt, Artificial Sequence
  Description of Artificial Sequence: Synthetic oligonucleotide
  Antisense strand to SEQ ID NO: 537401
aacuuaaguaaaguccaau

SEQ ID NO: 537403 - RNA, 19 nt, Artificial Sequence
  Description of Artificial Sequence: Synthetic oligonucleotide
  Sense strand starting at position 3747 of SEQ ID NO: 318109
ucucguuucccuguuggua

SEQ ID NO: 537404 - RNA, 19 nt, Artificial Sequence
  Description of Artificial Sequence: Synthetic oligonucleotide
  Antisense strand to SEQ ID NO: 537403
uaccaacagggaaacgaga

SEQ ID NO: 537405 - RNA, 19 nt, Artificial Sequence
  Description of Artificial Sequence: Synthetic oligonucleotide
  Sense strand starting at position 3805 of SEQ ID NO: 318109
ugcuuugaacaguaaccaa

SEQ ID NO: 537406 - RNA, 19 nt, Artificial Sequence
  Description of Artificial Sequence: Synthetic oligonucleotide
  Antisense strand to SEQ ID NO: 537405
uugguuacuguucaaagca

SEQ ID NO: 537407 - RNA, 19 nt, Artificial Sequence
  Description of Artificial Sequence: Synthetic oligonucleotide
  Sense strand starting at position 3826 of SEQ ID NO: 318109
gauauugauuaauucguag

SEQ ID NO: 537408 - RNA, 19 nt, Artificial Sequence
  Description of Artificial Sequence: Synthetic oligonucleotide
  Antisense strand to SEQ ID NO: 537407
cuacgaauuaaucaauauc

SEQ ID NO: 537409 - RNA, 19 nt, Artificial Sequence
  Description of Artificial Sequence: Synthetic oligonucleotide
  Sense strand starting at position 3829 of SEQ ID NO: 318109
auugauuaauucguagaca

SEQ ID NO: 537410 - RNA, 19 nt, Artificial Sequence
  Description of Artificial Sequence: Synthetic oligonucleotide
  Antisense strand to SEQ ID NO: 537409
ugucuacgaauuaaucaau

SEQ ID NO: 537411 - RNA, 19 nt, Artificial Sequence
  Description of Artificial Sequence: Synthetic oligonucleotide
  Sense strand starting at position 3861 of SEQ ID NO: 318109
guaaguacuuucccaauga

SEQ ID NO: 537412 - RNA, 19 nt, Artificial Sequence
  Description of Artificial Sequence: Synthetic oligonucleotide
  Antisense strand to SEQ ID NO: 537411
ucauugggaaaguacuuac

SEQ ID NO: 537413 - RNA, 19 nt, Artificial Sequence
  Description of Artificial Sequence: Synthetic oligonucleotide
  Sense strand starting at position 3933 of SEQ ID NO: 318109
acacaaucauguguaugua

SEQ ID NO: 537414 - RNA, 19 nt, Artificial Sequence
  Description of Artificial Sequence: Synthetic oligonucleotide
  Antisense strand to SEQ ID NO: 537413
uacauacacaugauugugu

SEQ ID NO: 537415 - RNA, 19 nt, Artificial Sequence
  Description of Artificial Sequence: Synthetic oligonucleotide
  Sense strand starting at position 5 of SEQ ID NO: 318110
ugggauacucaugguacca

SEQ ID NO: 537416 - RNA, 19 nt, Artificial Sequence
  Description of Artificial Sequence: Synthetic oligonucleotide
  Antisense strand to SEQ ID NO: 537415
ugguaccaugaguauccca

SEQ ID NO: 537417 - RNA, 19 nt, Artificial Sequence
  Description of Artificial Sequence: Synthetic oligonucleotide
  Sense strand starting at position 69 of SEQ ID NO: 318110
gagagagcuuucuuaugag

SEQ ID NO: 537418 - RNA, 19 nt, Artificial Sequence
  Description of Artificial Sequence: Synthetic oligonucleotide
  Antisense strand to SEQ ID NO: 537417
cucauaagaaagcucucuc

SEQ ID NO: 537419 - RNA, 19 nt, Artificial Sequence
  Description of Artificial Sequence: Synthetic oligonucleotide
  Sense strand starting at position 109 of SEQ ID NO: 318110
cuguuccuugaguauacaa

SEQ ID NO: 537420 - RNA, 19 nt, Artificial Sequence
  Description of Artificial Sequence: Synthetic oligonucleotide
  Antisense strand to SEQ ID NO: 537419
uuguauacucaaggaacag

SEQ ID NO: 537421 - RNA, 19 nt, Artificial Sequence
  Description of Artificial Sequence: Synthetic oligonucleotide
  Sense strand starting at position 111 of SEQ ID NO: 318110
guuccuugaguauacaaau

SEQ ID NO: 537422 - RNA, 19 nt, Artificial Sequence
  Description of Artificial Sequence: Synthetic oligonucleotide
  Antisense strand to SEQ ID NO: 537421
auuuguauacucaaggaac

SEQ ID NO: 537423 - RNA, 19 nt, Artificial Sequence
  Description of Artificial Sequence: Synthetic oligonucleotide
  Sense strand starting at position 121 of SEQ ID NO: 318110
uauacaaauggcuggagua

SEQ ID NO: 537424 - RNA, 19 nt, Artificial Sequence
  Description of Artificial Sequence: Synthetic oligonucleotide
  Antisense strand to SEQ ID NO: 537423
uacuccagccauuuguaua

SEQ ID NO: 537425 - RNA, 19 nt, Artificial Sequence
  Description of Artificial Sequence: Synthetic oligonucleotide
  Sense strand starting at position 216 of SEQ ID NO: 318110
uuauuaacuccagguuaag

SEQ ID NO: 537426 - RNA, 19 nt, Artificial Sequence
  Description of Artificial Sequence: Synthetic oligonucleotide
  Antisense strand to SEQ ID NO: 537425
cuuaaccuggaguuaauaa

SEQ ID NO: 537427 - RNA, 19 nt, Artificial Sequence
  Description of Artificial Sequence: Synthetic oligonucleotide
  Sense strand starting at position 253 of SEQ ID NO: 318110
ugccuugcagcguuacauu

SEQ ID NO: 537428 - RNA, 19 nt, Artificial Sequence
  Description of Artificial Sequence: Synthetic oligonucleotide
  Antisense strand to SEQ ID NO: 537427
aauguaacgcugcaaggca

SEQ ID NO: 537429 - RNA, 19 nt, Artificial Sequence
  Description of Artificial Sequence: Synthetic oligonucleotide
  Sense strand starting at position 417 of SEQ ID NO: 318110
aguuguauuccagagacuc

SEQ ID NO: 537430 - RNA, 19 nt, Artificial Sequence
  Description of Artificial Sequence: Synthetic oligonucleotide
  Antisense strand to SEQ ID NO: 537429
gagucucuggaauacaacu

SEQ ID NO: 537431 - RNA, 19 nt, Artificial Sequence
  Description of Artificial Sequence: Synthetic oligonucleotide
  Sense strand starting at position 460 of SEQ ID NO: 318110
accugaaauccguagauua

SEQ ID NO: 537432 - RNA, 19 nt, Artificial Sequence
  Description of Artificial Sequence: Synthetic oligonucleotide
  Antisense strand to SEQ ID NO: 537431
uaaucuacggauuucaggu

SEQ ID NO: 537433 - RNA, 19 nt, Artificial Sequence
  Description of Artificial Sequence: Synthetic oligonucleotide
  Sense strand starting at position 507 of SEQ ID NO: 318110
cugguucccggagaaagua

SEQ ID NO: 537434 - RNA, 19 nt, Artificial Sequence
  Description of Artificial Sequence: Synthetic oligonucleotide
  Antisense strand to SEQ ID NO: 537433
uacuuucuccgggaaccag

SEQ ID NO: 537435 - RNA, 19 nt, Artificial Sequence
  Description of Artificial Sequence: Synthetic oligonucleotide
  Sense strand starting at position 516 of SEQ ID NO: 318110
ggagaaaguaucugaagca

SEQ ID NO: 537436 - RNA, 19 nt, Artificial Sequence
  Description of Artificial Sequence: Synthetic oligonucleotide
  Antisense strand to SEQ ID NO: 537435
ugcuucagauacuuucucc

SEQ ID NO: 537437 - RNA, 19 nt, Artificial Sequence
  Description of Artificial Sequence: Synthetic oligonucleotide
  Sense strand starting at position 594 of SEQ ID NO: 318110
uggugcuauuucucucuua

SEQ ID NO: 537438 - RNA, 19 nt, Artificial Sequence
  Description of Artificial Sequence: Synthetic oligonucleotide
  Antisense strand to SEQ ID NO: 537437
uaagagagaaauagcacca

SEQ ID NO: 537439 - RNA, 19 nt, Artificial Sequence
  Description of Artificial Sequence: Synthetic oligonucleotide
  Sense strand starting at position 595 of SEQ ID NO: 318110
ggugcuauuucucucuuau

SEQ ID NO: 537440 - RNA, 19 nt, Artificial Sequence
  Description of Artificial Sequence: Synthetic oligonucleotide
  Antisense strand to SEQ ID NO: 537439
auaagagagaaauagcacc

SEQ ID NO: 537441 - RNA, 19 nt, Artificial Sequence
  Description of Artificial Sequence: Synthetic oligonucleotide
  Sense strand starting at position 891 of SEQ ID NO: 318110
cugccuaauggucagggaa

SEQ ID NO: 537442 - RNA, 19 nt, Artificial Sequence
  Description of Artificial Sequence: Synthetic oligonucleotide
  Antisense strand to SEQ ID NO: 537441
uucccugaccauuaggcag

SEQ ID NO: 537443 - RNA, 19 nt, Artificial Sequence
  Description of Artificial Sequence: Synthetic oligonucleotide
  Sense strand starting at position 1055 of SEQ ID NO: 318110
gcaucuaggauccagaagu

SEQ ID NO: 537444 - RNA, 19 nt, Artificial Sequence
  Description of Artificial Sequence: Synthetic oligonucleotide
  Antisense strand to SEQ ID NO: 537443
acuucuggauccuagaugc

SEQ ID NO: 537445 - RNA, 19 nt, Artificial Sequence
  Description of Artificial Sequence: Synthetic oligonucleotide
  Sense strand starting at position 1098 of SEQ ID NO: 318110
uuuacauucgucgaauaga

SEQ ID NO: 537446 - RNA, 19 nt, Artificial Sequence
  Description of Artificial Sequence: Synthetic oligonucleotide
  Antisense strand to SEQ ID NO: 537445
ucuauucgacgaauguaaa

SEQ ID NO: 537447 - RNA, 19 nt, Artificial Sequence
  Description of Artificial Sequence: Synthetic oligonucleotide
  Sense strand starting at position 1101 of SEQ ID NO: 318110
acauucgucgaauagacaa

SEQ ID NO: 537448 - RNA, 19 nt, Artificial Sequence
  Description of Artificial Sequence: Synthetic oligonucleotide
  Antisense strand to SEQ ID NO: 537447
uugucuauucgacgaaugu

SEQ ID NO: 537449 - RNA, 19 nt, Artificial Sequence
  Description of Artificial Sequence: Synthetic oligonucleotide
  Sense strand starting at position 1108 of SEQ ID NO: 318110
ucgaauagacaauguuaca

SEQ ID NO: 537450 - RNA, 19 nt, Artificial Sequence
  Description of Artificial Sequence: Synthetic oligonucleotide
  Antisense strand to SEQ ID NO: 537449
uguaacauugucuauucga

SEQ ID NO: 537451 - RNA, 19 nt, Artificial Sequence
  Description of Artificial Sequence: Synthetic oligonucleotide
  Sense strand starting at position 1238 of SEQ ID NO: 318110
guaagaaauagaggcauua

SEQ ID NO: 537452 - RNA, 19 nt, Artificial Sequence
  Description of Artificial Sequence: Synthetic oligonucleotide
  Antisense strand to SEQ ID NO: 537451
uaaugccucuauuucuuac

SEQ ID NO: 537453 - RNA, 19 nt, Artificial Sequence
  Description of Artificial Sequence: Synthetic oligonucleotide
  Sense strand starting at position 1627 of SEQ ID NO: 318110
agaaguaucucuuuccaag

SEQ ID NO: 537454 - RNA, 19 nt, Artificial Sequence
  Description of Artificial Sequence: Synthetic oligonucleotide
  Antisense strand to SEQ ID NO: 537453
cuuggaaagagauacuucu

SEQ ID NO: 537455 - RNA, 19 nt, Artificial Sequence
  Description of Artificial Sequence: Synthetic oligonucleotide
  Sense strand starting at position 1676 of SEQ ID NO: 318110
cguggaauccgagggaaca

SEQ ID NO: 537456 - RNA, 19 nt, Artificial Sequence
  Description of Artificial Sequence: Synthetic oligonucleotide
  Antisense strand to SEQ ID NO: 537455
uguucccucggauuccacg

SEQ ID NO: 537457 - RNA, 19 nt, Artificial Sequence
  Description of Artificial Sequence: Synthetic oligonucleotide
  Sense strand starting at position 2492 of SEQ ID NO: 318110
gcagaaugaccagguuaga

SEQ ID NO: 537458 - RNA, 19 nt, Artificial Sequence
  Description of Artificial Sequence: Synthetic oligonucleotide
  Antisense strand to SEQ ID NO: 537457
ucuaaccuggucauucugc

SEQ ID NO: 537459 - RNA, 19 nt, Artificial Sequence
  Description of Artificial Sequence: Synthetic oligonucleotide
  Sense strand starting at position 2528 of SEQ ID NO: 318110
agaagaucugcucacaagu

SEQ ID NO: 537460 - RNA, 19 nt, Artificial Sequence
  Description of Artificial Sequence: Synthetic oligonucleotide
  Antisense strand to SEQ ID NO: 537459
acuugugagcagaucuucu

SEQ ID NO: 537461 - RNA, 19 nt, Artificial Sequence
  Description of Artificial Sequence: Synthetic oligonucleotide
  Sense strand starting at position 2544 of SEQ ID NO: 318110
aguuaugauuauccaaggu

SEQ ID NO: 537462 - RNA, 19 nt, Artificial Sequence
  Description of Artificial Sequence: Synthetic oligonucleotide
  Antisense strand to SEQ ID NO: 537461
accuuggauaaucauaacu

SEQ ID NO: 537463 - RNA, 19 nt, Artificial Sequence
  Description of Artificial Sequence: Synthetic oligonucleotide
  Sense strand starting at position 2548 of SEQ ID NO: 318110
augauuauccaaggugaua

SEQ ID NO: 537464 - RNA, 19 nt, Artificial Sequence
  Description of Artificial Sequence: Synthetic oligonucleotide
  Antisense strand to SEQ ID NO: 537463
uaucaccuuggauaaucau

SEQ ID NO: 537465 - RNA, 19 nt, Artificial Sequence
  Description of Artificial Sequence: Synthetic oligonucleotide
  Sense strand starting at position 2649 of SEQ ID NO: 318110
ccucuccuccgagauaauu

SEQ ID NO: 537466 - RNA, 19 nt, Artificial Sequence
  Description of Artificial Sequence: Synthetic oligonucleotide
  Antisense strand to SEQ ID NO: 537465
aauuaucucggaggagagg

SEQ ID NO: 537467 - RNA, 19 nt, Artificial Sequence
  Description of Artificial Sequence: Synthetic oligonucleotide
  Sense strand starting at position 2772 of SEQ ID NO: 318110
ugacauagacugugaccau

SEQ ID NO: 537468 - RNA, 19 nt, Artificial Sequence
  Description of Artificial Sequence: Synthetic oligonucleotide
  Antisense strand to SEQ ID NO: 537467
auggucacagucuauguca

SEQ ID NO: 537469 - RNA, 19 nt, Artificial Sequence
  Description of Artificial Sequence: Synthetic oligonucleotide
  Sense strand starting at position 3001 of SEQ ID NO: 318110
agcuuaaggaguuaugagu

SEQ ID NO: 537470 - RNA, 19 nt, Artificial Sequence
  Description of Artificial Sequence: Synthetic oligonucleotide
  Antisense strand to SEQ ID NO: 537469
acucauaacuccuuaagcu

SEQ ID NO: 537471 - RNA, 19 nt, Artificial Sequence
  Description of Artificial Sequence: Synthetic oligonucleotide
  Sense strand starting at position 3209 of SEQ ID NO: 318110
auugguaugcaucagaugu

SEQ ID NO: 537472 - RNA, 19 nt, Artificial Sequence
  Description of Artificial Sequence: Synthetic oligonucleotide
  Antisense strand to SEQ ID NO: 537471
acaucugaugcauaccaau

SEQ ID NO: 537473 - RNA, 19 nt, Artificial Sequence
  Description of Artificial Sequence: Synthetic oligonucleotide
  Sense strand starting at position 3528 of SEQ ID NO: 318110
acugaaaugugaguaagug

SEQ ID NO: 537474 - RNA, 19 nt, Artificial Sequence
  Description of Artificial Sequence: Synthetic oligonucleotide
  Antisense strand to SEQ ID NO: 537473
cacuuacucacauuucagu

SEQ ID NO: 537475 - RNA, 19 nt, Artificial Sequence
  Description of Artificial Sequence: Synthetic oligonucleotide
  Sense strand starting at position 3529 of SEQ ID NO: 318110
cugaaaugugaguaagugu

SEQ ID NO: 537476 - RNA, 19 nt, Artificial Sequence
  Description of Artificial Sequence: Synthetic oligonucleotide
  Antisense strand to SEQ ID NO: 537475
acacuuacucacauuucag

SEQ ID NO: 537477 - RNA, 19 nt, Artificial Sequence
  Description of Artificial Sequence: Synthetic oligonucleotide
  Sense strand starting at position 3572 of SEQ ID NO: 318110
gcaggacacuuccuuuaau

SEQ ID NO: 537478 - RNA, 19 nt, Artificial Sequence
  Description of Artificial Sequence: Synthetic oligonucleotide
  Antisense strand to SEQ ID NO: 537477
auuaaaggaaguguccugc

SEQ ID NO: 537479 - RNA, 19 nt, Artificial Sequence
  Description of Artificial Sequence: Synthetic oligonucleotide
  Sense strand starting at position 3575 of SEQ ID NO: 318110
ggacacuuccuuuaaugug

SEQ ID NO: 537480 - RNA, 19 nt, Artificial Sequence
  Description of Artificial Sequence: Synthetic oligonucleotide
  Antisense strand to SEQ ID NO: 537479
cacauuaaaggaagugucc

SEQ ID NO: 537481 - RNA, 19 nt, Artificial Sequence
  Description of Artificial Sequence: Synthetic oligonucleotide
  Sense strand starting at position 3689 of SEQ ID NO: 318110
ugucaugaagugcagaaua

SEQ ID NO: 537482 - RNA, 19 nt, Artificial Sequence
  Description of Artificial Sequence: Synthetic oligonucleotide
  Antisense strand to SEQ ID NO: 537481
uauucugcacuucaugaca

SEQ ID NO: 537483 - RNA, 19 nt, Artificial Sequence
  Description of Artificial Sequence: Synthetic oligonucleotide
  Sense strand starting at position 3788 of SEQ ID NO: 318110
aggauaaaguguuccugag

SEQ ID NO: 537484 - RNA, 19 nt, Artificial Sequence
  Description of Artificial Sequence: Synthetic oligonucleotide
  Antisense strand to SEQ ID NO: 537483
cucaggaacacuuuauccu

SEQ ID NO: 537485 - RNA, 19 nt, Artificial Sequence
  Description of Artificial Sequence: Synthetic oligonucleotide
  Sense strand starting at position 3790 of SEQ ID NO: 318110
gauaaaguguuccugagac

SEQ ID NO: 537486 - RNA, 19 nt, Artificial Sequence
  Description of Artificial Sequence: Synthetic oligonucleotide
  Antisense strand to SEQ ID NO: 537485
gucucaggaacacuuuauc

SEQ ID NO: 537487 - RNA, 19 nt, Artificial Sequence
  Description of Artificial Sequence: Synthetic oligonucleotide
  Sense strand starting at position 3796 of SEQ ID NO: 318110
guguuccugagacaaagua

SEQ ID NO: 537488 - RNA, 19 nt, Artificial Sequence
  Description of Artificial Sequence: Synthetic oligonucleotide
  Antisense strand to SEQ ID NO: 537487
uacuuugucucaggaacac

SEQ ID NO: 537489 - RNA, 19 nt, Artificial Sequence
  Description of Artificial Sequence: Synthetic oligonucleotide
  Sense strand starting at position 3806 of SEQ ID NO: 318110
gacaaaguaguuugagaac

SEQ ID NO: 537490 - RNA, 19 nt, Artificial Sequence
  Description of Artificial Sequence: Synthetic oligonucleotide
  Antisense strand to SEQ ID NO: 537489
guucucaaacuacuuuguc

SEQ ID NO: 537491 - RNA, 19 nt, Artificial Sequence
  Description of Artificial Sequence: Synthetic oligonucleotide
  Sense strand starting at position 3844 of SEQ ID NO: 318110
ugccuaguugcaguuguga

SEQ ID NO: 537492 - RNA, 19 nt, Artificial Sequence
  Description of Artificial Sequence: Synthetic oligonucleotide
  Antisense strand to SEQ ID NO: 537491
ucacaacugcaacuaggca

SEQ ID NO: 537493 - RNA, 19 nt, Artificial Sequence
  Description of Artificial Sequence: Synthetic oligonucleotide
  Sense strand starting at position 3963 of SEQ ID NO: 318110
auccuauuaugugugaaca

SEQ ID NO: 537494 - RNA, 19 nt, Artificial Sequence
  Description of Artificial Sequence: Synthetic oligonucleotide
  Antisense strand to SEQ ID NO: 537493
uguucacacauaauaggau

SEQ ID NO: 537495 - RNA, 19 nt, Artificial Sequence
  Description of Artificial Sequence: Synthetic oligonucleotide
  Sense strand starting at position 112 of SEQ ID NO: 318111
agaugauacuauguugaau

SEQ ID NO: 537496 - RNA, 19 nt, Artificial Sequence
  Description of Artificial Sequence: Synthetic oligonucleotide
  Antisense strand to SEQ ID NO: 537495
auucaacauaguaucaucu

SEQ ID NO: 537497 - RNA, 19 nt, Artificial Sequence
  Description of Artificial Sequence: Synthetic oligonucleotide
  Sense strand starting at position 250 of SEQ ID NO: 318111
aguaaugccaugcgauuua

SEQ ID NO: 537498 - RNA, 19 nt, Artificial Sequence
  Description of Artificial Sequence: Synthetic oligonucleotide
  Antisense strand to SEQ ID NO: 537497
uaaaucgcauggcauuacu

SEQ ID NO: 537499 - RNA, 19 nt, Artificial Sequence
  Description of Artificial Sequence: Synthetic oligonucleotide
  Sense strand starting at position 261 of SEQ ID NO: 318111
gcgauuuauuagcucuaca

SEQ ID NO: 537500 - RNA, 19 nt, Artificial Sequence
  Description of Artificial Sequence: Synthetic oligonucleotide
  Antisense strand to SEQ ID NO: 537499
uguagagcuaauaaaucgc

SEQ ID NO: 537501 - RNA, 19 nt, Artificial Sequence
  Description of Artificial Sequence: Synthetic oligonucleotide
  Sense strand starting at position 371 of SEQ ID NO: 318111
aauuguuaucaguaagagu

SEQ ID NO: 537502 - RNA, 19 nt, Artificial Sequence
  Description of Artificial Sequence: Synthetic oligonucleotide
  Antisense strand to SEQ ID NO: 537501
acucuuacugauaacaauu

SEQ ID NO: 537503 - RNA, 19 nt, Artificial Sequence
  Description of Artificial Sequence: Synthetic oligonucleotide
  Sense strand starting at position 379 of SEQ ID NO: 318111
ucaguaagagucugauaau

SEQ ID NO: 537504 - RNA, 19 nt, Artificial Sequence
  Description of Artificial Sequence: Synthetic oligonucleotide
  Antisense strand to SEQ ID NO: 537503
auuaucagacucuuacuga

SEQ ID NO: 537505 - RNA, 19 nt, Artificial Sequence
  Description of Artificial Sequence: Synthetic oligonucleotide
  Sense strand starting at position 435 of SEQ ID NO: 318111
cuauuucgccugcaacuuu

SEQ ID NO: 537506 - RNA, 19 nt, Artificial Sequence
  Description of Artificial Sequence: Synthetic oligonucleotide
  Antisense strand to SEQ ID NO: 537505
aaaguugcaggcgaaauag

SEQ ID NO: 537507 - RNA, 19 nt, Artificial Sequence
  Description of Artificial Sequence: Synthetic oligonucleotide
  Sense strand starting at position 794 of SEQ ID NO: 318111
gcagcauagggcuaaacaa

SEQ ID NO: 537508 - RNA, 19 nt, Artificial Sequence
  Description of Artificial Sequence: Synthetic oligonucleotide
  Antisense strand to SEQ ID NO: 537507
uuguuuagcccuaugcugc

SEQ ID NO: 537509 - RNA, 19 nt, Artificial Sequence
  Description of Artificial Sequence: Synthetic oligonucleotide
  Sense strand starting at position 1098 of SEQ ID NO: 318111
auacuccuucuggguaaga

SEQ ID NO: 537510 - RNA, 19 nt, Artificial Sequence
  Description of Artificial Sequence: Synthetic oligonucleotide
  Antisense strand to SEQ ID NO: 537509
ucuuacccagaaggaguau

SEQ ID NO: 537511 - RNA, 19 nt, Artificial Sequence
  Description of Artificial Sequence: Synthetic oligonucleotide
  Sense strand starting at position 1099 of SEQ ID NO: 318111
uacuccuucuggguaagaa

SEQ ID NO: 537512 - RNA, 19 nt, Artificial Sequence
  Description of Artificial Sequence: Synthetic oligonucleotide
  Antisense strand to SEQ ID NO: 537511
uucuuacccagaaggagua

SEQ ID NO: 537513 - RNA, 19 nt, Artificial Sequence
  Description of Artificial Sequence: Synthetic oligonucleotide
  Sense strand starting at position 1183 of SEQ ID NO: 318111
gaugaagagguuugccauu

SEQ ID NO: 537514 - RNA, 19 nt, Artificial Sequence
  Description of Artificial Sequence: Synthetic oligonucleotide
  Antisense strand to SEQ ID NO: 537513
aauggcaaaccucuucauc

SEQ ID NO: 537515 - RNA, 19 nt, Artificial Sequence
  Description of Artificial Sequence: Synthetic oligonucleotide
  Sense strand starting at position 1223 of SEQ ID NO: 318111
auuaaaugccugggaaauc

SEQ ID NO: 537516 - RNA, 19 nt, Artificial Sequence
  Description of Artificial Sequence: Synthetic oligonucleotide
  Antisense strand to SEQ ID NO: 537515
gauuucccaggcauuuaau

SEQ ID NO: 537517 - RNA, 19 nt, Artificial Sequence
  Description of Artificial Sequence: Synthetic oligonucleotide
  Sense strand starting at position 1679 of SEQ ID NO: 318111
guguuuccugugcucuauu

SEQ ID NO: 537518 - RNA, 19 nt, Artificial Sequence
  Description of Artificial Sequence: Synthetic oligonucleotide
  Antisense strand to SEQ ID NO: 537517
aauagagcacaggaaacac

SEQ ID NO: 537519 - RNA, 19 nt, Artificial Sequence
  Description of Artificial Sequence: Synthetic oligonucleotide
  Sense strand starting at position 2009 of SEQ ID NO: 318111
ggcaguugaucuucagaga

SEQ ID NO: 537520 - RNA, 19 nt, Artificial Sequence
  Description of Artificial Sequence: Synthetic oligonucleotide
  Antisense strand to SEQ ID NO: 537519
ucucugaagaucaacugcc

SEQ ID NO: 537521 - RNA, 19 nt, Artificial Sequence
  Description of Artificial Sequence: Synthetic oligonucleotide
  Sense strand starting at position 2010 of SEQ ID NO: 318111
gcaguugaucuucagagag

SEQ ID NO: 537522 - RNA, 19 nt, Artificial Sequence
  Description of Artificial Sequence: Synthetic oligonucleotide
  Antisense strand to SEQ ID NO: 537521
cucucugaagaucaacugc

SEQ ID NO: 537523 - RNA, 19 nt, Artificial Sequence
  Description of Artificial Sequence: Synthetic oligonucleotide
  Sense strand starting at position 2178 of SEQ ID NO: 318111
ugcuaauggcuugaaauga

SEQ ID NO: 537524 - RNA, 19 nt, Artificial Sequence
  Description of Artificial Sequence: Synthetic oligonucleotide
  Antisense strand to SEQ ID NO: 537523
ucauuucaagccauuagca

SEQ ID NO: 537525 - RNA, 19 nt, Artificial Sequence
  Description of Artificial Sequence: Synthetic oligonucleotide
  Sense strand starting at position 2223 of SEQ ID NO: 318111
ugugguaaggauuacaguu

SEQ ID NO: 537526 - RNA, 19 nt, Artificial Sequence
  Description of Artificial Sequence: Synthetic oligonucleotide
  Antisense strand to SEQ ID NO: 537525
aacuguaauccuuaccaca

SEQ ID NO: 537527 - RNA, 19 nt, Artificial Sequence
  Description of Artificial Sequence: Synthetic oligonucleotide
  Sense strand starting at position 2404 of SEQ ID NO: 318111
ccaaauuggguuggacaau

SEQ ID NO: 537528 - RNA, 19 nt, Artificial Sequence
  Description of Artificial Sequence: Synthetic oligonucleotide
  Antisense strand to SEQ ID NO: 537527
auuguccaacccaauuugg

SEQ ID NO: 537529 - RNA, 19 nt, Artificial Sequence
  Description of Artificial Sequence: Synthetic oligonucleotide
  Sense strand starting at position 2467 of SEQ ID NO: 318111
aaauauguugcugaaguuu

SEQ ID NO: 537530 - RNA, 19 nt, Artificial Sequence
  Description of Artificial Sequence: Synthetic oligonucleotide
  Antisense strand to SEQ ID NO: 537529
aaacuucagcaacauauuu

SEQ ID NO: 537531 - RNA, 19 nt, Artificial Sequence
  Description of Artificial Sequence: Synthetic oligonucleotide
  Sense strand starting at position 2640 of SEQ ID NO: 318111
agacaaacuuguguuggau

SEQ ID NO: 537532 - RNA, 19 nt, Artificial Sequence
  Description of Artificial Sequence: Synthetic oligonucleotide
  Antisense strand to SEQ ID NO: 537531
auccaacacaaguuugucu

SEQ ID NO: 537533 - RNA, 19 nt, Artificial Sequence
  Description of Artificial Sequence: Synthetic oligonucleotide
  Sense strand starting at position 2734 of SEQ ID NO: 318111
ggguccuuuggaggacuga

SEQ ID NO: 537534 - RNA, 19 nt, Artificial Sequence
  Description of Artificial Sequence: Synthetic oligonucleotide
  Antisense strand to SEQ ID NO: 537533
ucaguccuccaaaggaccc

SEQ ID NO: 537535 - RNA, 19 nt, Artificial Sequence
  Description of Artificial Sequence: Synthetic oligonucleotide
  Sense strand starting at position 2785 of SEQ ID NO: 318111
ucauacaugucaccuuaga

SEQ ID NO: 537536 - RNA, 19 nt, Artificial Sequence
  Description of Artificial Sequence: Synthetic oligonucleotide
  Antisense strand to SEQ ID NO: 537535
ucuaaggugacauguauga

SEQ ID NO: 537537 - RNA, 19 nt, Artificial Sequence
  Description of Artificial Sequence: Synthetic oligonucleotide
  Sense strand starting at position 2796 of SEQ ID NO: 318111
accuuagaguuaguacaua

SEQ ID NO: 537538 - RNA, 19 nt, Artificial Sequence
  Description of Artificial Sequence: Synthetic oligonucleotide
  Antisense strand to SEQ ID NO: 537537
uauguacuaacucuaaggu

SEQ ID NO: 537539 - RNA, 19 nt, Artificial Sequence
  Description of Artificial Sequence: Synthetic oligonucleotide
  Sense strand starting at position 2801 of SEQ ID NO: 318111
agaguuaguacauaguuga

SEQ ID NO: 537540 - RNA, 19 nt, Artificial Sequence
  Description of Artificial Sequence: Synthetic oligonucleotide
  Antisense strand to SEQ ID NO: 537539
ucaacuauguacuaacucu

SEQ ID NO: 537541 - RNA, 19 nt, Artificial Sequence
  Description of Artificial Sequence: Synthetic oligonucleotide
  Sense strand starting at position 2817 of SEQ ID NO: 318111
ugaaguauaaugugugaca

SEQ ID NO: 537542 - RNA, 19 nt, Artificial Sequence
  Description of Artificial Sequence: Synthetic oligonucleotide
  Antisense strand to SEQ ID NO: 537541
ugucacacauuauacuuca

SEQ ID NO: 537543 - RNA, 19 nt, Artificial Sequence
  Description of Artificial Sequence: Synthetic oligonucleotide
  Sense strand starting at position 2818 of SEQ ID NO: 318111
gaaguauaaugugugacag

SEQ ID NO: 537544 - RNA, 19 nt, Artificial Sequence
  Description of Artificial Sequence: Synthetic oligonucleotide
  Antisense strand to SEQ ID NO: 537543
cugucacacauuauacuuc

SEQ ID NO: 537545 - RNA, 19 nt, Artificial Sequence
  Description of Artificial Sequence: Synthetic oligonucleotide
  Sense strand starting at position 2923 of SEQ ID NO: 318111
uaauuauugcuguauagga

SEQ ID NO: 537546 - RNA, 19 nt, Artificial Sequence
  Description of Artificial Sequence: Synthetic oligonucleotide
  Antisense strand to SEQ ID NO: 537545
uccuauacagcaauaauua

SEQ ID NO: 537547 - RNA, 19 nt, Artificial Sequence
  Description of Artificial Sequence: Synthetic oligonucleotide
  Sense strand starting at position 2925 of SEQ ID NO: 318111
auuauugcuguauaggagu

SEQ ID NO: 537548 - RNA, 19 nt, Artificial Sequence
  Description of Artificial Sequence: Synthetic oligonucleotide
  Antisense strand to SEQ ID NO: 537547
acuccuauacagcaauaau

SEQ ID NO: 537549 - RNA, 19 nt, Artificial Sequence
  Description of Artificial Sequence: Synthetic oligonucleotide
  Sense strand starting at position 2940 of SEQ ID NO: 318111
gagugaaauucuccaaugu

SEQ ID NO: 537550 - RNA, 19 nt, Artificial Sequence
  Description of Artificial Sequence: Synthetic oligonucleotide
  Antisense strand to SEQ ID NO: 537549
acauuggagaauuucacuc

SEQ ID NO: 537551 - RNA, 19 nt, Artificial Sequence
  Description of Artificial Sequence: Synthetic oligonucleotide
  Sense strand starting at position 2941 of SEQ ID NO: 318111
agugaaauucuccaauguu

SEQ ID NO: 537552 - RNA, 19 nt, Artificial Sequence
  Description of Artificial Sequence: Synthetic oligonucleotide
  Antisense strand to SEQ ID NO: 537551
aacauuggagaauuucacu

SEQ ID NO: 537553 - RNA, 19 nt, Artificial Sequence
  Description of Artificial Sequence: Synthetic oligonucleotide
  Sense strand starting at position 3090 of SEQ ID NO: 318111
uuaagacauauguguggaa

SEQ ID NO: 537554 - RNA, 19 nt, Artificial Sequence
  Description of Artificial Sequence: Synthetic oligonucleotide
  Antisense strand to SEQ ID NO: 537553
uuccacacauaugucuuaa

SEQ ID NO: 537555 - RNA, 19 nt, Artificial Sequence
  Description of Artificial Sequence: Synthetic oligonucleotide
  Sense strand starting at position 3091 of SEQ ID NO: 318111
uaagacauauguguggaaa

SEQ ID NO: 537556 - RNA, 19 nt, Artificial Sequence
  Description of Artificial Sequence: Synthetic oligonucleotide
  Antisense strand to SEQ ID NO: 537555
uuuccacacauaugucuua

SEQ ID NO: 537557 - RNA, 19 nt, Artificial Sequence
  Description of Artificial Sequence: Synthetic oligonucleotide
  Sense strand starting at position 3092 of SEQ ID NO: 318111
aagacauauguguggaaau

SEQ ID NO: 537558 - RNA, 19 nt, Artificial Sequence
  Description of Artificial Sequence: Synthetic oligonucleotide
  Antisense strand to SEQ ID NO: 537557
auuuccacacauaugucuu

SEQ ID NO: 537559 - RNA, 19 nt, Artificial Sequence
  Description of Artificial Sequence: Synthetic oligonucleotide
  Sense strand starting at position 3303 of SEQ ID NO: 318111
cugucuucuggucaacuga

SEQ ID NO: 537560 - RNA, 19 nt, Artificial Sequence
  Description of Artificial Sequence: Synthetic oligonucleotide
  Antisense strand to SEQ ID NO: 537559
ucaguugaccagaagacag

SEQ ID NO: 537561 - RNA, 19 nt, Artificial Sequence
  Description of Artificial Sequence: Synthetic oligonucleotide
  Sense strand starting at position 3340 of SEQ ID NO: 318111
gcacaacuucuaggaaauu

SEQ ID NO: 537562 - RNA, 19 nt, Artificial Sequence
  Description of Artificial Sequence: Synthetic oligonucleotide
  Antisense strand to SEQ ID NO: 537561
aauuuccuagaaguugugc

SEQ ID NO: 537563 - RNA, 19 nt, Artificial Sequence
  Description of Artificial Sequence: Synthetic oligonucleotide
  Sense strand starting at position 3402 of SEQ ID NO: 318111
cugccuugugacuagaaua

SEQ ID NO: 537564 - RNA, 19 nt, Artificial Sequence
  Description of Artificial Sequence: Synthetic oligonucleotide
  Antisense strand to SEQ ID NO: 537563
uauucuagucacaaggcag

SEQ ID NO: 537565 - RNA, 19 nt, Artificial Sequence
  Description of Artificial Sequence: Synthetic oligonucleotide
  Sense strand starting at position 3454 of SEQ ID NO: 318111
aguaucaugagguggaaau

SEQ ID NO: 537566 - RNA, 19 nt, Artificial Sequence
  Description of Artificial Sequence: Synthetic oligonucleotide
  Antisense strand to SEQ ID NO: 537565
auuuccaccucaugauacu

SEQ ID NO: 537567 - RNA, 19 nt, Artificial Sequence
  Description of Artificial Sequence: Synthetic oligonucleotide
  Sense strand starting at position 3455 of SEQ ID NO: 318111
guaucaugagguggaaauu

SEQ ID NO: 537568 - RNA, 19 nt, Artificial Sequence
  Description of Artificial Sequence: Synthetic oligonucleotide
  Antisense strand to SEQ ID NO: 537567
aauuuccaccucaugauac

SEQ ID NO: 537569 - RNA, 19 nt, Artificial Sequence
  Description of Artificial Sequence: Synthetic oligonucleotide
  Sense strand starting at position 3465 of SEQ ID NO: 318111
guggaaauugaauguugag

SEQ ID NO: 537570 - RNA, 19 nt, Artificial Sequence
  Description of Artificial Sequence: Synthetic oligonucleotide
  Antisense strand to SEQ ID NO: 537569
cucaacauucaauuuccac

SEQ ID NO: 537571 - RNA, 19 nt, Artificial Sequence
  Description of Artificial Sequence: Synthetic oligonucleotide
  Sense strand starting at position 3762 of SEQ ID NO: 318111
uguugcaauacuuaggagu

SEQ ID NO: 537572 - RNA, 19 nt, Artificial Sequence
  Description of Artificial Sequence: Synthetic oligonucleotide
  Antisense strand to SEQ ID NO: 537571
acuccuaaguauugcaaca

SEQ ID NO: 537573 - RNA, 19 nt, Artificial Sequence
  Description of Artificial Sequence: Synthetic oligonucleotide
  Sense strand starting at position 3806 of SEQ ID NO: 318111
gugucaucguaaguaauuu

SEQ ID NO: 537574 - RNA, 19 nt, Artificial Sequence
  Description of Artificial Sequence: Synthetic oligonucleotide
  Antisense strand to SEQ ID NO: 537573
aaauuacuuacgaugacac

SEQ ID NO: 537575 - RNA, 19 nt, Artificial Sequence
  Description of Artificial Sequence: Synthetic oligonucleotide
  Sense strand starting at position 164 of SEQ ID NO: 318112
gugguagcuguguguagua

SEQ ID NO: 537576 - RNA, 19 nt, Artificial Sequence
  Description of Artificial Sequence: Synthetic oligonucleotide
  Antisense strand to SEQ ID NO: 537575
uacuacacacagcuaccac

SEQ ID NO: 537577 - RNA, 19 nt, Artificial Sequence
  Description of Artificial Sequence: Synthetic oligonucleotide
  Sense strand starting at position 1124 of SEQ ID NO: 318112
cgugcugcguaucaacaaa

SEQ ID NO: 537578 - RNA, 19 nt, Artificial Sequence
  Description of Artificial Sequence: Synthetic oligonucleotide
  Antisense strand to SEQ ID NO: 537577
uuuguugauacgcagcacg

SEQ ID NO: 537579 - RNA, 19 nt, Artificial Sequence
  Description of Artificial Sequence: Synthetic oligonucleotide
  Sense strand starting at position 1321 of SEQ ID NO: 318112
ggcgcuuugccgcagucau

SEQ ID NO: 537580 - RNA, 19 nt, Artificial Sequence
  Description of Artificial Sequence: Synthetic oligonucleotide
  Antisense strand to SEQ ID NO: 537579
augacugcggcaaagcgcc

SEQ ID NO: 537581 - RNA, 19 nt, Artificial Sequence
  Description of Artificial Sequence: Synthetic oligonucleotide
  Sense strand starting at position 1323 of SEQ ID NO: 318112
cgcuuugccgcagucauua

SEQ ID NO: 537582 - RNA, 19 nt, Artificial Sequence
  Description of Artificial Sequence: Synthetic oligonucleotide
  Antisense strand to SEQ ID NO: 537581
uaaugacugcggcaaagcg

SEQ ID NO: 537583 - RNA, 19 nt, Artificial Sequence
  Description of Artificial Sequence: Synthetic oligonucleotide
  Sense strand starting at position 1328 of SEQ ID NO: 318112
ugccgcagucauuaauaaa

SEQ ID NO: 537584 - RNA, 19 nt, Artificial Sequence
  Description of Artificial Sequence: Synthetic oligonucleotide
  Antisense strand to SEQ ID NO: 537583
uuuauuaaugacugcggca

SEQ ID NO: 537585 - RNA, 19 nt, Artificial Sequence
  Description of Artificial Sequence: Synthetic oligonucleotide
  Sense strand starting at position 1331 of SEQ ID NO: 318112
cgcagucauuaauaaagaa

SEQ ID NO: 537586 - RNA, 19 nt, Artificial Sequence
  Description of Artificial Sequence: Synthetic oligonucleotide
  Antisense strand to SEQ ID NO: 537585
uucuuuauuaaugacugcg

SEQ ID NO: 537587 - RNA, 19 nt, Artificial Sequence
  Description of Artificial Sequence: Synthetic oligonucleotide
  Sense strand starting at position 1562 of SEQ ID NO: 318112
gcuggcagaucuguugcaa

SEQ ID NO: 537588 - RNA, 19 nt, Artificial Sequence
  Description of Artificial Sequence: Synthetic oligonucleotide
  Antisense strand to SEQ ID NO: 537587
uugcaacagaucugccagc

SEQ ID NO: 537589 - RNA, 19 nt, Artificial Sequence
  Description of Artificial Sequence: Synthetic oligonucleotide
  Sense strand starting at position 1587 of SEQ ID NO: 318112
caaauaacgucguggagau

SEQ ID NO: 537590 - RNA, 19 nt, Artificial Sequence
  Description of Artificial Sequence: Synthetic oligonucleotide
  Antisense strand to SEQ ID NO: 537589
aucuccacgacguuauuug

SEQ ID NO: 537591 - RNA, 19 nt, Artificial Sequence
  Description of Artificial Sequence: Synthetic oligonucleotide
  Sense strand starting at position 1588 of SEQ ID NO: 318112
aaauaacgucguggagaug

SEQ ID NO: 537592 - RNA, 19 nt, Artificial Sequence
  Description of Artificial Sequence: Synthetic oligonucleotide
  Antisense strand to SEQ ID NO: 537591
caucuccacgacguuauuu

SEQ ID NO: 537593 - RNA, 19 nt, Artificial Sequence
  Description of Artificial Sequence: Synthetic oligonucleotide
  Sense strand starting at position 1995 of SEQ ID NO: 318112
ccaagacuuccuugugauc

SEQ ID NO: 537594 - RNA, 19 nt, Artificial Sequence
  Description of Artificial Sequence: Synthetic oligonucleotide
  Antisense strand to SEQ ID NO: 537593
gaucacaaggaagucuugg

SEQ ID NO: 537595 - RNA, 19 nt, Artificial Sequence
  Description of Artificial Sequence: Synthetic oligonucleotide
  Sense strand starting at position 2000 of SEQ ID NO: 318112
acuuccuugugaucucuuu

SEQ ID NO: 537596 - RNA, 19 nt, Artificial Sequence
  Description of Artificial Sequence: Synthetic oligonucleotide
  Antisense strand to SEQ ID NO: 537595
aaagagaucacaaggaagu

SEQ ID NO: 537597 - RNA, 19 nt, Artificial Sequence
  Description of Artificial Sequence: Synthetic oligonucleotide
  Sense strand starting at position 2518 of SEQ ID NO: 318112
ccauauuaaugacguacuu

SEQ ID NO: 537598 - RNA, 19 nt, Artificial Sequence
  Description of Artificial Sequence: Synthetic oligonucleotide
  Antisense strand to SEQ ID NO: 537597
aaguacgucauuaauaugg

SEQ ID NO: 537599 - RNA, 19 nt, Artificial Sequence
  Description of Artificial Sequence: Synthetic oligonucleotide
  Sense strand starting at position 2544 of SEQ ID NO: 318112
gccauuucucccugcguca

SEQ ID NO: 537600 - RNA, 19 nt, Artificial Sequence
  Description of Artificial Sequence: Synthetic oligonucleotide
  Antisense strand to SEQ ID NO: 537599
ugacgcagggagaaauggc

SEQ ID NO: 537601 - RNA, 19 nt, Artificial Sequence
  Description of Artificial Sequence: Synthetic oligonucleotide
  Sense strand starting at position 2564 of SEQ ID NO: 318112
aaagacguuucuuugcaaa

SEQ ID NO: 537602 - RNA, 19 nt, Artificial Sequence
  Description of Artificial Sequence: Synthetic oligonucleotide
  Antisense strand to SEQ ID NO: 537601
uuugcaaagaaacgucuuu

SEQ ID NO: 537603 - RNA, 19 nt, Artificial Sequence
  Description of Artificial Sequence: Synthetic oligonucleotide
  Sense strand starting at position 2566 of SEQ ID NO: 318112
agacguuucuuugcaaaua

SEQ ID NO: 537604 - RNA, 19 nt, Artificial Sequence
  Description of Artificial Sequence: Synthetic oligonucleotide
  Antisense strand to SEQ ID NO: 537603
uauuugcaaagaaacgucu

SEQ ID NO: 537605 - RNA, 19 nt, Artificial Sequence
  Description of Artificial Sequence: Synthetic oligonucleotide
  Sense strand starting at position 2567 of SEQ ID NO: 318112
gacguuucuuugcaaauaa

SEQ ID NO: 537606 - RNA, 19 nt, Artificial Sequence
  Description of Artificial Sequence: Synthetic oligonucleotide
  Antisense strand to SEQ ID NO: 537605
uuauuugcaaagaaacguc

SEQ ID NO: 537607 - RNA, 19 nt, Artificial Sequence
  Description of Artificial Sequence: Synthetic oligonucleotide
  Sense strand starting at position 2704 of SEQ ID NO: 318112
augcgaaucgaauaaauug

SEQ ID NO: 537608 - RNA, 19 nt, Artificial Sequence
  Description of Artificial Sequence: Synthetic oligonucleotide
  Antisense strand to SEQ ID NO: 537607
caauuuauucgauucgcau

SEQ ID NO: 537609 - RNA, 19 nt, Artificial Sequence
  Description of Artificial Sequence: Synthetic oligonucleotide
  Sense strand starting at position 2713 of SEQ ID NO: 318112
gaauaaauugcguggcguu

SEQ ID NO: 537610 - RNA, 19 nt, Artificial Sequence
  Description of Artificial Sequence: Synthetic oligonucleotide
  Antisense strand to SEQ ID NO: 537609
aacgccacgcaauuuauuc

SEQ ID NO: 537611 - RNA, 19 nt, Artificial Sequence
  Description of Artificial Sequence: Synthetic oligonucleotide
  Sense strand starting at position 2714 of SEQ ID NO: 318112
aauaaauugcguggcguuu

SEQ ID NO: 537612 - RNA, 19 nt, Artificial Sequence
  Description of Artificial Sequence: Synthetic oligonucleotide
  Antisense strand to SEQ ID NO: 537611
aaacgccacgcaauuuauu

SEQ ID NO: 537613 - RNA, 19 nt, Artificial Sequence
  Description of Artificial Sequence: Synthetic oligonucleotide
  Sense strand starting at position 3251 of SEQ ID NO: 318112
ccucgcaguuucuggaaga

SEQ ID NO: 537614 - RNA, 19 nt, Artificial Sequence
  Description of Artificial Sequence: Synthetic oligonucleotide
  Antisense strand to SEQ ID NO: 537613
ucuuccagaaacugcgagg

SEQ ID NO: 537615 - RNA, 19 nt, Artificial Sequence
  Description of Artificial Sequence: Synthetic oligonucleotide
  Sense strand starting at position 3252 of SEQ ID NO: 318112
cucgcaguuucuggaagaa

SEQ ID NO: 537616 - RNA, 19 nt, Artificial Sequence
  Description of Artificial Sequence: Synthetic oligonucleotide
  Antisense strand to SEQ ID NO: 537615
uucuuccagaaacugcgag

SEQ ID NO: 537617 - RNA, 19 nt, Artificial Sequence
  Description of Artificial Sequence: Synthetic oligonucleotide
  Sense strand starting at position 3386 of SEQ ID NO: 318112
cucaccuucucucgaggaa

SEQ ID NO: 537618 - RNA, 19 nt, Artificial Sequence
  Description of Artificial Sequence: Synthetic oligonucleotide
  Antisense strand to SEQ ID NO: 537617
uuccucgagagaaggugag

SEQ ID NO: 537619 - RNA, 19 nt, Artificial Sequence
  Description of Artificial Sequence: Synthetic oligonucleotide
  Sense strand starting at position 3448 of SEQ ID NO: 318112
gcuccaaccuccucggaau

SEQ ID NO: 537620 - RNA, 19 nt, Artificial Sequence
  Description of Artificial Sequence: Synthetic oligonucleotide
  Antisense strand to SEQ ID NO: 537619
auuccgaggagguuggagc

SEQ ID NO: 537621 - RNA, 19 nt, Artificial Sequence
  Description of Artificial Sequence: Synthetic oligonucleotide
  Sense strand starting at position 3631 of SEQ ID NO: 318112
ugggugaguugugaaugga

SEQ ID NO: 537622 - RNA, 19 nt, Artificial Sequence
  Description of Artificial Sequence: Synthetic oligonucleotide
  Antisense strand to SEQ ID NO: 537621
uccauucacaacucaccca

SEQ ID NO: 537623 - RNA, 19 nt, Artificial Sequence
  Description of Artificial Sequence: Synthetic oligonucleotide
  Sense strand starting at position 3634 of SEQ ID NO: 318112
gugaguugugaauggacac

SEQ ID NO: 537624 - RNA, 19 nt, Artificial Sequence
  Description of Artificial Sequence: Synthetic oligonucleotide
  Antisense strand to SEQ ID NO: 537623
guguccauucacaacucac

SEQ ID NO: 537625 - RNA, 19 nt, Artificial Sequence
  Description of Artificial Sequence: Synthetic oligonucleotide
  Sense strand starting at position 3673 of SEQ ID NO: 318112
aagacugaagauuguuuau

SEQ ID NO: 537626 - RNA, 19 nt, Artificial Sequence
  Description of Artificial Sequence: Synthetic oligonucleotide
  Antisense strand to SEQ ID NO: 537625
auaaacaaucuucagucuu

SEQ ID NO: 537627 - RNA, 19 nt, Artificial Sequence
  Description of Artificial Sequence: Synthetic oligonucleotide
  Sense strand starting at position 3675 of SEQ ID NO: 318112
gacugaagauuguuuauuc

SEQ ID NO: 537628 - RNA, 19 nt, Artificial Sequence
  Description of Artificial Sequence: Synthetic oligonucleotide
  Antisense strand to SEQ ID NO: 537627
gaauaaacaaucuucaguc

SEQ ID NO: 537629 - RNA, 19 nt, Artificial Sequence
  Description of Artificial Sequence: Synthetic oligonucleotide
  Sense strand starting at position 3676 of SEQ ID NO: 318112
acugaagauuguuuauucu

SEQ ID NO: 537630 - RNA, 19 nt, Artificial Sequence
  Description of Artificial Sequence: Synthetic oligonucleotide
  Antisense strand to SEQ ID NO: 537629
agaauaaacaaucuucagu

SEQ ID NO: 537631 - RNA, 19 nt, Artificial Sequence
  Description of Artificial Sequence: Synthetic oligonucleotide
  Sense strand starting at position 3746 of SEQ ID NO: 318112
agaugacauuuaugugaca

SEQ ID NO: 537632 - RNA, 19 nt, Artificial Sequence
  Description of Artificial Sequence: Synthetic oligonucleotide
  Antisense strand to SEQ ID NO: 537631
ugucacauaaaugucaucu

SEQ ID NO: 537633 - RNA, 19 nt, Artificial Sequence
  Description of Artificial Sequence: Synthetic oligonucleotide
  Sense strand starting at position 3749 of SEQ ID NO: 318112
ugacauuuaugugacaauu

SEQ ID NO: 537634 - RNA, 19 nt, Artificial Sequence
  Description of Artificial Sequence: Synthetic oligonucleotide
  Antisense strand to SEQ ID NO: 537633
aauugucacauaaauguca

SEQ ID NO: 537635 - RNA, 19 nt, Artificial Sequence
  Description of Artificial Sequence: Synthetic oligonucleotide
  Sense strand starting at position 3758 of SEQ ID NO: 318112
ugugacaauuaagaagauu

SEQ ID NO: 537636 - RNA, 19 nt, Artificial Sequence
  Description of Artificial Sequence: Synthetic oligonucleotide
  Antisense strand to SEQ ID NO: 537635
aaucuucuuaauugucaca

SEQ ID NO: 537637 - RNA, 19 nt, Artificial Sequence
  Description of Artificial Sequence: Synthetic oligonucleotide
  Sense strand starting at position 3781 of SEQ ID NO: 318112
gauggaauguugugaacac

SEQ ID NO: 537638 - RNA, 19 nt, Artificial Sequence
  Description of Artificial Sequence: Synthetic oligonucleotide
  Antisense strand to SEQ ID NO: 537637
guguucacaacauuccauc

SEQ ID NO: 537639 - RNA, 19 nt, Artificial Sequence
  Description of Artificial Sequence: Synthetic oligonucleotide
  Sense strand starting at position 3782 of SEQ ID NO: 318112
auggaauguugugaacaca

SEQ ID NO: 537640 - RNA, 19 nt, Artificial Sequence
  Description of Artificial Sequence: Synthetic oligonucleotide
  Antisense strand to SEQ ID NO: 537639
uguguucacaacauuccau

SEQ ID NO: 537641 - RNA, 19 nt, Artificial Sequence
  Description of Artificial Sequence: Synthetic oligonucleotide
  Sense strand starting at position 3797 of SEQ ID NO: 318112
cacauuugcuuauaggaga

SEQ ID NO: 537642 - RNA, 19 nt, Artificial Sequence
  Description of Artificial Sequence: Synthetic oligonucleotide
  Antisense strand to SEQ ID NO: 537641
ucuccuauaagcaaaugug

SEQ ID NO: 537643 - RNA, 19 nt, Artificial Sequence
  Description of Artificial Sequence: Synthetic oligonucleotide
  Sense strand starting at position 3800 of SEQ ID NO: 318112
auuugcuuauaggagaaau

SEQ ID NO: 537644 - RNA, 19 nt, Artificial Sequence
  Description of Artificial Sequence: Synthetic oligonucleotide
  Antisense strand to SEQ ID NO: 537643
auuucuccuauaagcaaau

SEQ ID NO: 537645 - RNA, 19 nt, Artificial Sequence
  Description of Artificial Sequence: Synthetic oligonucleotide
  Sense strand starting at position 3870 of SEQ ID NO: 318112
cggauugucuacccaacaa

SEQ ID NO: 537646 - RNA, 19 nt, Artificial Sequence
  Description of Artificial Sequence: Synthetic oligonucleotide
  Antisense strand to SEQ ID NO: 537645
uuguuggguagacaauccg

SEQ ID NO: 537647 - RNA, 19 nt, Artificial Sequence
  Description of Artificial Sequence: Synthetic oligonucleotide
  Sense strand starting at position 3896 of SEQ ID NO: 318112
gaugaugaaugcugaaaua

SEQ ID NO: 537648 - RNA, 19 nt, Artificial Sequence
  Description of Artificial Sequence: Synthetic oligonucleotide
  Antisense strand to SEQ ID NO: 537647
uauuucagcauucaucauc

SEQ ID NO: 537649 - RNA, 19 nt, Artificial Sequence
  Description of Artificial Sequence: Synthetic oligonucleotide
  Sense strand starting at position 14 of SEQ ID NO: 318113
ggguccuccuuccaacaaa

SEQ ID NO: 537650 - RNA, 19 nt, Artificial Sequence
  Description of Artificial Sequence: Synthetic oligonucleotide
  Antisense strand to SEQ ID NO: 537649
uuuguuggaaggaggaccc

SEQ ID NO: 537651 - RNA, 19 nt, Artificial Sequence
  Description of Artificial Sequence: Synthetic oligonucleotide
  Sense strand starting at position 122 of SEQ ID NO: 318113
aacucugacccgggauaca

SEQ ID NO: 537652 - RNA, 19 nt, Artificial Sequence
  Description of Artificial Sequence: Synthetic oligonucleotide
  Antisense strand to SEQ ID NO: 537651
uguaucccgggucagaguu

SEQ ID NO: 537653 - RNA, 19 nt, Artificial Sequence
  Description of Artificial Sequence: Synthetic oligonucleotide
  Sense strand starting at position 192 of SEQ ID NO: 318113
cggcgagguuuggaaaucu

SEQ ID NO: 537654 - RNA, 19 nt, Artificial Sequence
  Description of Artificial Sequence: Synthetic oligonucleotide
  Antisense strand to SEQ ID NO: 537653
agauuuccaaaccucgccg

SEQ ID NO: 537655 - RNA, 19 nt, Artificial Sequence
  Description of Artificial Sequence: Synthetic oligonucleotide
  Sense strand starting at position 232 of SEQ ID NO: 318113
cgcagugugccuucggcau

SEQ ID NO: 537656 - RNA, 19 nt, Artificial Sequence
  Description of Artificial Sequence: Synthetic oligonucleotide
  Antisense strand to SEQ ID NO: 537655
augccgaaggcacacugcg

SEQ ID NO: 537657 - RNA, 19 nt, Artificial Sequence
  Description of Artificial Sequence: Synthetic oligonucleotide
  Sense strand starting at position 622 of SEQ ID NO: 318113
gugguagcuguguguagua

SEQ ID NO: 537658 - RNA, 19 nt, Artificial Sequence
  Description of Artificial Sequence: Synthetic oligonucleotide
  Antisense strand to SEQ ID NO: 537657
uacuacacacagcuaccac

SEQ ID NO: 537659 - RNA, 19 nt, Artificial Sequence
  Description of Artificial Sequence: Synthetic oligonucleotide
  Sense strand starting at position 1582 of SEQ ID NO: 318113
cgugcugcguaucaacaaa

SEQ ID NO: 537660 - RNA, 19 nt, Artificial Sequence
  Description of Artificial Sequence: Synthetic oligonucleotide
  Antisense strand to SEQ ID NO: 537659
uuuguugauacgcagcacg

SEQ ID NO: 537661 - RNA, 19 nt, Artificial Sequence
  Description of Artificial Sequence: Synthetic oligonucleotide
  Sense strand starting at position 1779 of SEQ ID NO: 318113
ggcgcuuugccgcagucau

SEQ ID NO: 537662 - RNA, 19 nt, Artificial Sequence
  Description of Artificial Sequence: Synthetic oligonucleotide
  Antisense strand to SEQ ID NO: 537661
augacugcggcaaagcgcc

SEQ ID NO: 537663 - RNA, 19 nt, Artificial Sequence
  Description of Artificial Sequence: Synthetic oligonucleotide
  Sense strand starting at position 1781 of SEQ ID NO: 318113
cgcuuugccgcagucauua

SEQ ID NO: 537664 - RNA, 19 nt, Artificial Sequence
  Description of Artificial Sequence: Synthetic oligonucleotide
  Antisense strand to SEQ ID NO: 537663
uaaugacugcggcaaagcg

SEQ ID NO: 537665 - RNA, 19 nt, Artificial Sequence
  Description of Artificial Sequence: Synthetic oligonucleotide
  Sense strand starting at position 1786 of SEQ ID NO: 318113
ugccgcagucauuaauaaa

SEQ ID NO: 537666 - RNA, 19 nt, Artificial Sequence
  Description of Artificial Sequence: Synthetic oligonucleotide
  Antisense strand to SEQ ID NO: 537665
uuuauuaaugacugcggca

SEQ ID NO: 537667 - RNA, 19 nt, Artificial Sequence
  Description of Artificial Sequence: Synthetic oligonucleotide
  Sense strand starting at position 1789 of SEQ ID NO: 318113
cgcagucauuaauaaagaa

SEQ ID NO: 537668 - RNA, 19 nt, Artificial Sequence
  Description of Artificial Sequence: Synthetic oligonucleotide
  Antisense strand to SEQ ID NO: 537667
uucuuuauuaaugacugcg

SEQ ID NO: 537669 - RNA, 19 nt, Artificial Sequence
  Description of Artificial Sequence: Synthetic oligonucleotide
  Sense strand starting at position 2020 of SEQ ID NO: 318113
gcuggcagaucuguugcaa

SEQ ID NO: 537670 - RNA, 19 nt, Artificial Sequence
  Description of Artificial Sequence: Synthetic oligonucleotide
  Antisense strand to SEQ ID NO: 537669
uugcaacagaucugccagc

SEQ ID NO: 537671 - RNA, 19 nt, Artificial Sequence
  Description of Artificial Sequence: Synthetic oligonucleotide
  Sense strand starting at position 2045 of SEQ ID NO: 318113
caaauaacgucguggagau

SEQ ID NO: 537672 - RNA, 19 nt, Artificial Sequence
  Description of Artificial Sequence: Synthetic oligonucleotide
  Antisense strand to SEQ ID NO: 537671
aucuccacgacguuauuug

SEQ ID NO: 537673 - RNA, 19 nt, Artificial Sequence
  Description of Artificial Sequence: Synthetic oligonucleotide
  Sense strand starting at position 2046 of SEQ ID NO: 318113
aaauaacgucguggagaug

SEQ ID NO: 537674 - RNA, 19 nt, Artificial Sequence
  Description of Artificial Sequence: Synthetic oligonucleotide
  Antisense strand to SEQ ID NO: 537673
caucuccacgacguuauuu

SEQ ID NO: 537675 - RNA, 19 nt, Artificial Sequence
  Description of Artificial Sequence: Synthetic oligonucleotide
  Sense strand starting at position 2453 of SEQ ID NO: 318113
ccaagacuuccuugugauc

SEQ ID NO: 537676 - RNA, 19 nt, Artificial Sequence
  Description of Artificial Sequence: Synthetic oligonucleotide
  Antisense strand to SEQ ID NO: 537675
gaucacaaggaagucuugg

SEQ ID NO: 537677 - RNA, 19 nt, Artificial Sequence
  Description of Artificial Sequence: Synthetic oligonucleotide
  Sense strand starting at position 2458 of SEQ ID NO: 318113
acuuccuugugaucucuuu

SEQ ID NO: 537678 - RNA, 19 nt, Artificial Sequence
  Description of Artificial Sequence: Synthetic oligonucleotide
  Antisense strand to SEQ ID NO: 537677
aaagagaucacaaggaagu

SEQ ID NO: 537679 - RNA, 19 nt, Artificial Sequence
  Description of Artificial Sequence: Synthetic oligonucleotide
  Sense strand starting at position 2976 of SEQ ID NO: 318113
ccauauuaaugacguacuu

SEQ ID NO: 537680 - RNA, 19 nt, Artificial Sequence
  Description of Artificial Sequence: Synthetic oligonucleotide
  Antisense strand to SEQ ID NO: 537679
aaguacgucauuaauaugg

SEQ ID NO: 537681 - RNA, 19 nt, Artificial Sequence
  Description of Artificial Sequence: Synthetic oligonucleotide
  Sense strand starting at position 3002 of SEQ ID NO: 318113
gccauuucucccugcguca

SEQ ID NO: 537682 - RNA, 19 nt, Artificial Sequence
  Description of Artificial Sequence: Synthetic oligonucleotide
  Antisense strand to SEQ ID NO: 537681
ugacgcagggagaaauggc

SEQ ID NO: 537683 - RNA, 19 nt, Artificial Sequence
  Description of Artificial Sequence: Synthetic oligonucleotide
  Sense strand starting at position 3022 of SEQ ID NO: 318113
aaagacguuucuuugcaaa

SEQ ID NO: 537684 - RNA, 19 nt, Artificial Sequence
  Description of Artificial Sequence: Synthetic oligonucleotide
  Antisense strand to SEQ ID NO: 537683
uuugcaaagaaacgucuuu

SEQ ID NO: 537685 - RNA, 19 nt, Artificial Sequence
  Description of Artificial Sequence: Synthetic oligonucleotide
  Sense strand starting at position 3024 of SEQ ID NO: 318113
agacguuucuuugcaaaua

SEQ ID NO: 537686 - RNA, 19 nt, Artificial Sequence
  Description of Artificial Sequence: Synthetic oligonucleotide
  Antisense strand to SEQ ID NO: 537685
uauuugcaaagaaacgucu

SEQ ID NO: 537687 - RNA, 19 nt, Artificial Sequence
  Description of Artificial Sequence: Synthetic oligonucleotide
  Sense strand starting at position 3025 of SEQ ID NO: 318113
gacguuucuuugcaaauaa

SEQ ID NO: 537688 - RNA, 19 nt, Artificial Sequence
  Description of Artificial Sequence: Synthetic oligonucleotide
  Antisense strand to SEQ ID NO: 537687
uuauuugcaaagaaacguc

SEQ ID NO: 537689 - RNA, 19 nt, Artificial Sequence
  Description of Artificial Sequence: Synthetic oligonucleotide
  Sense strand starting at position 3162 of SEQ ID NO: 318113
augcgaaucgaauaaauug

SEQ ID NO: 537690 - RNA, 19 nt, Artificial Sequence
  Description of Artificial Sequence: Synthetic oligonucleotide
  Antisense strand to SEQ ID NO: 537689
caauuuauucgauucgcau

SEQ ID NO: 537691 - RNA, 19 nt, Artificial Sequence
  Description of Artificial Sequence: Synthetic oligonucleotide
  Sense strand starting at position 3171 of SEQ ID NO: 318113
gaauaaauugcguggcguu

SEQ ID NO: 537692 - RNA, 19 nt, Artificial Sequence
  Description of Artificial Sequence: Synthetic oligonucleotide
  Antisense strand to SEQ ID NO: 537691
aacgccacgcaauuuauuc

SEQ ID NO: 537693 - RNA, 19 nt, Artificial Sequence
  Description of Artificial Sequence: Synthetic oligonucleotide
  Sense strand starting at position 3172 of SEQ ID NO: 318113
aauaaauugcguggcguuu

SEQ ID NO: 537694 - RNA, 19 nt, Artificial Sequence
  Description of Artificial Sequence: Synthetic oligonucleotide
  Antisense strand to SEQ ID NO: 537693
aaacgccacgcaauuuauu

SEQ ID NO: 537695 - RNA, 19 nt, Artificial Sequence
  Description of Artificial Sequence: Synthetic oligonucleotide
  Sense strand starting at position 3709 of SEQ ID NO: 318113
ccucgcaguuucuggaaga

SEQ ID NO: 537696 - RNA, 19 nt, Artificial Sequence
  Description of Artificial Sequence: Synthetic oligonucleotide
  Antisense strand to SEQ ID NO: 537695
ucuuccagaaacugcgagg

SEQ ID NO: 537697 - RNA, 19 nt, Artificial Sequence
  Description of Artificial Sequence: Synthetic oligonucleotide
  Sense strand starting at position 3710 of SEQ ID NO: 318113
cucgcaguuucuggaagaa

SEQ ID NO: 537698 - RNA, 19 nt, Artificial Sequence
  Description of Artificial Sequence: Synthetic oligonucleotide
  Antisense strand to SEQ ID NO: 537697
uucuuccagaaacugcgag

SEQ ID NO: 537699 - RNA, 19 nt, Artificial Sequence
  Description of Artificial Sequence: Synthetic oligonucleotide
  Sense strand starting at position 3844 of SEQ ID NO: 318113
cucaccuucucucgaggaa

SEQ ID NO: 537700 - RNA, 19 nt, Artificial Sequence
  Description of Artificial Sequence: Synthetic oligonucleotide
  Antisense strand to SEQ ID NO: 537699
uuccucgagagaaggugag

SEQ ID NO: 537701 - RNA, 19 nt, Artificial Sequence
  Description of Artificial Sequence: Synthetic oligonucleotide
  Sense strand starting at position 3906 of SEQ ID NO: 318113
gcuccaaccuccucggaau

SEQ ID NO: 537702 - RNA, 19 nt, Artificial Sequence
  Description of Artificial Sequence: Synthetic oligonucleotide
  Antisense strand to SEQ ID NO: 537701
auuccgaggagguuggagc

SEQ ID NO: 537703 - RNA, 19 nt, Artificial Sequence
  Description of Artificial Sequence: Synthetic oligonucleotide
  Sense strand starting at position 1 of SEQ ID NO: 318114
cuguacugacaaugauauu

SEQ ID NO: 537704 - RNA, 19 nt, Artificial Sequence
  Description of Artificial Sequence: Synthetic oligonucleotide
  Antisense strand to SEQ ID NO: 537703
aauaucauugucaguacag

SEQ ID NO: 537705 - RNA, 19 nt, Artificial Sequence
  Description of Artificial Sequence: Synthetic oligonucleotide
  Sense strand starting at position 216 of SEQ ID NO: 318114
agcagaucccaguaagcau

SEQ ID NO: 537706 - RNA, 19 nt, Artificial Sequence
  Description of Artificial Sequence: Synthetic oligonucleotide
  Antisense strand to SEQ ID NO: 537705
augcuuacugggaucugcu

SEQ ID NO: 537707 - RNA, 19 nt, Artificial Sequence
  Description of Artificial Sequence: Synthetic oligonucleotide
  Sense strand starting at position 316 of SEQ ID NO: 318114
auuguauaagcagacuaau

SEQ ID NO: 537708 - RNA, 19 nt, Artificial Sequence
  Description of Artificial Sequence: Synthetic oligonucleotide
  Antisense strand to SEQ ID NO: 537707
auuagucugcuuauacaau

SEQ ID NO: 537709 - RNA, 19 nt, Artificial Sequence
  Description of Artificial Sequence: Synthetic oligonucleotide
  Sense strand starting at position 480 of SEQ ID NO: 318114
aucagauagcagcacuauu

SEQ ID NO: 537710 - RNA, 19 nt, Artificial Sequence
  Description of Artificial Sequence: Synthetic oligonucleotide
  Antisense strand to SEQ ID NO: 537709
aauagugcugcuaucugau

SEQ ID NO: 537711 - RNA, 19 nt, Artificial Sequence
  Description of Artificial Sequence: Synthetic oligonucleotide
  Sense strand starting at position 778 of SEQ ID NO: 318114
guuccaaucggucacaaug

SEQ ID NO: 537712 - RNA, 19 nt, Artificial Sequence
  Description of Artificial Sequence: Synthetic oligonucleotide
  Antisense strand to SEQ ID NO: 537711
cauugugaccgauuggaac

SEQ ID NO: 537713 - RNA, 19 nt, Artificial Sequence
  Description of Artificial Sequence: Synthetic oligonucleotide
  Sense strand starting at position 990 of SEQ ID NO: 318114
aagugacauguguauauau

SEQ ID NO: 537714 - RNA, 19 nt, Artificial Sequence
  Description of Artificial Sequence: Synthetic oligonucleotide
  Antisense strand to SEQ ID NO: 537713
auauauacacaugucacuu

SEQ ID NO: 537715 - RNA, 19 nt, Artificial Sequence
  Description of Artificial Sequence: Synthetic oligonucleotide
  Sense strand starting at position 992 of SEQ ID NO: 318114
gugacauguguauauauga

SEQ ID NO: 537716 - RNA, 19 nt, Artificial Sequence
  Description of Artificial Sequence: Synthetic oligonucleotide
  Antisense strand to SEQ ID NO: 537715
ucauauauacacaugucac

SEQ ID NO: 537717 - RNA, 19 nt, Artificial Sequence
  Description of Artificial Sequence: Synthetic oligonucleotide
  Sense strand starting at position 1008 of SEQ ID NO: 318114
ugaucuguauauccauaag

SEQ ID NO: 537718 - RNA, 19 nt, Artificial Sequence
  Description of Artificial Sequence: Synthetic oligonucleotide
  Antisense strand to SEQ ID NO: 537717
cuuauggauauacagauca

SEQ ID NO: 537719 - RNA, 19 nt, Artificial Sequence
  Description of Artificial Sequence: Synthetic oligonucleotide
  Sense strand starting at position 1025 of SEQ ID NO: 318114
agauauacauguguaaguu

SEQ ID NO: 537720 - RNA, 19 nt, Artificial Sequence
  Description of Artificial Sequence: Synthetic oligonucleotide
  Antisense strand to SEQ ID NO: 537719
aacuuacacauguauaucu

SEQ ID NO: 537721 - RNA, 19 nt, Artificial Sequence
  Description of Artificial Sequence: Synthetic oligonucleotide
  Sense strand starting at position 1026 of SEQ ID NO: 318114
gauauacauguguaaguuc

SEQ ID NO: 537722 - RNA, 19 nt, Artificial Sequence
  Description of Artificial Sequence: Synthetic oligonucleotide
  Antisense strand to SEQ ID NO: 537721
gaacuuacacauguauauc

SEQ ID NO: 537723 - RNA, 19 nt, Artificial Sequence
  Description of Artificial Sequence: Synthetic oligonucleotide
  Sense strand starting at position 1047 of SEQ ID NO: 318114
agucaaaucuacguauaaa

SEQ ID NO: 537724 - RNA, 19 nt, Artificial Sequence
  Description of Artificial Sequence: Synthetic oligonucleotide
  Antisense strand to SEQ ID NO: 537723
uuuauacguagauuugacu

SEQ ID NO: 537725 - RNA, 19 nt, Artificial Sequence
  Description of Artificial Sequence: Synthetic oligonucleotide
  Sense strand starting at position 1180 of SEQ ID NO: 318114
uuauaaugagucugguaag

SEQ ID NO: 537726 - RNA, 19 nt, Artificial Sequence
  Description of Artificial Sequence: Synthetic oligonucleotide
  Antisense strand to SEQ ID NO: 537725
cuuaccagacucauuauaa

SEQ ID NO: 537727 - RNA, 19 nt, Artificial Sequence
  Description of Artificial Sequence: Synthetic oligonucleotide
  Sense strand starting at position 1243 of SEQ ID NO: 318114
augugagagcugcaaauga

SEQ ID NO: 537728 - RNA, 19 nt, Artificial Sequence
  Description of Artificial Sequence: Synthetic oligonucleotide
  Antisense strand to SEQ ID NO: 537727
ucauuugcagcucucacau

SEQ ID NO: 537729 - RNA, 19 nt, Artificial Sequence
  Description of Artificial Sequence: Synthetic oligonucleotide
  Sense strand starting at position 1322 of SEQ ID NO: 318114
uguugcuaagcuuaggaaa

SEQ ID NO: 537730 - RNA, 19 nt, Artificial Sequence
  Description of Artificial Sequence: Synthetic oligonucleotide
  Antisense strand to SEQ ID NO: 537729
uuuccuaagcuuagcaaca

SEQ ID NO: 537731 - RNA, 19 nt, Artificial Sequence
  Description of Artificial Sequence: Synthetic oligonucleotide
  Sense strand starting at position 1367 of SEQ ID NO: 318114
uucugagccaguuagagau

SEQ ID NO: 537732 - RNA, 19 nt, Artificial Sequence
  Description of Artificial Sequence: Synthetic oligonucleotide
  Antisense strand to SEQ ID NO: 537731
aucucuaacuggcucagaa

SEQ ID NO: 537733 - RNA, 19 nt, Artificial Sequence
  Description of Artificial Sequence: Synthetic oligonucleotide
  Sense strand starting at position 1620 of SEQ ID NO: 318114
cggagaagcuguuuaaagg

SEQ ID NO: 537734 - RNA, 19 nt, Artificial Sequence
  Description of Artificial Sequence: Synthetic oligonucleotide
  Antisense strand to SEQ ID NO: 537733
ccuuuaaacagcuucuccg

SEQ ID NO: 537735 - RNA, 19 nt, Artificial Sequence
  Description of Artificial Sequence: Synthetic oligonucleotide
  Sense strand starting at position 1784 of SEQ ID NO: 318114
acuagaguaucagcaauag

SEQ ID NO: 537736 - RNA, 19 nt, Artificial Sequence
  Description of Artificial Sequence: Synthetic oligonucleotide
  Antisense strand to SEQ ID NO: 537735
cuauugcugauacucuagu

SEQ ID NO: 537737 - RNA, 19 nt, Artificial Sequence
  Description of Artificial Sequence: Synthetic oligonucleotide
  Sense strand starting at position 2076 of SEQ ID NO: 318114
gagugaauuugugcugcug

SEQ ID NO: 537738 - RNA, 19 nt, Artificial Sequence
  Description of Artificial Sequence: Synthetic oligonucleotide
  Antisense strand to SEQ ID NO: 537737
cagcagcacaaauucacuc

SEQ ID NO: 537739 - RNA, 19 nt, Artificial Sequence
  Description of Artificial Sequence: Synthetic oligonucleotide
  Sense strand starting at position 2316 of SEQ ID NO: 318114
cgcauaauagcagauuauu

SEQ ID NO: 537740 - RNA, 19 nt, Artificial Sequence
  Description of Artificial Sequence: Synthetic oligonucleotide
  Antisense strand to SEQ ID NO: 537739
aauaaucugcuauuaugcg

SEQ ID NO: 537741 - RNA, 19 nt, Artificial Sequence
  Description of Artificial Sequence: Synthetic oligonucleotide
  Sense strand starting at position 2344 of SEQ ID NO: 318114
aaacguguucguccuuuau

SEQ ID NO: 537742 - RNA, 19 nt, Artificial Sequence
  Description of Artificial Sequence: Synthetic oligonucleotide
  Antisense strand to SEQ ID NO: 537741
auaaaggacgaacacguuu

SEQ ID NO: 537743 - RNA, 19 nt, Artificial Sequence
  Description of Artificial Sequence: Synthetic oligonucleotide
  Sense strand starting at position 2431 of SEQ ID NO: 318114
aaauuaagagucugguuga

SEQ ID NO: 537744 - RNA, 19 nt, Artificial Sequence
  Description of Artificial Sequence: Synthetic oligonucleotide
  Antisense strand to SEQ ID NO: 537743
ucaaccagacucuuaauuu

SEQ ID NO: 537745 - RNA, 19 nt, Artificial Sequence
  Description of Artificial Sequence: Synthetic oligonucleotide
  Sense strand starting at position 2529 of SEQ ID NO: 318114
cuuggagguaauugacaca

SEQ ID NO: 537746 - RNA, 19 nt, Artificial Sequence
  Description of Artificial Sequence: Synthetic oligonucleotide
  Antisense strand to SEQ ID NO: 537745
ugugucaauuaccuccaag

SEQ ID NO: 537747 - RNA, 19 nt, Artificial Sequence
  Description of Artificial Sequence: Synthetic oligonucleotide
  Sense strand starting at position 2647 of SEQ ID NO: 318114
gucaaacuccuggagcauu

SEQ ID NO: 537748 - RNA, 19 nt, Artificial Sequence
  Description of Artificial Sequence: Synthetic oligonucleotide
  Antisense strand to SEQ ID NO: 537747
aaugcuccaggaguuugac

SEQ ID NO: 537749 - RNA, 19 nt, Artificial Sequence
  Description of Artificial Sequence: Synthetic oligonucleotide
  Sense strand starting at position 2760 of SEQ ID NO: 318114
aagugaaaucagcaauguc

SEQ ID NO: 537750 - RNA, 19 nt, Artificial Sequence
  Description of Artificial Sequence: Synthetic oligonucleotide
  Antisense strand to SEQ ID NO: 537749
gacauugcugauuucacuu

SEQ ID NO: 537751 - RNA, 19 nt, Artificial Sequence
  Description of Artificial Sequence: Synthetic oligonucleotide
  Sense strand starting at position 2781 of SEQ ID NO: 318114
guucuaggcgaguucuguu

SEQ ID NO: 537752 - RNA, 19 nt, Artificial Sequence
  Description of Artificial Sequence: Synthetic oligonucleotide
  Antisense strand to SEQ ID NO: 537751
aacagaacucgccuagaac

SEQ ID NO: 537753 - RNA, 19 nt, Artificial Sequence
  Description of Artificial Sequence: Synthetic oligonucleotide
  Sense strand starting at position 2845 of SEQ ID NO: 318114
gguuguaaagauugaauga

SEQ ID NO: 537754 - RNA, 19 nt, Artificial Sequence
  Description of Artificial Sequence: Synthetic oligonucleotide
  Antisense strand to SEQ ID NO: 537753
ucauucaaucuuuacaacc

SEQ ID NO: 537755 - RNA, 19 nt, Artificial Sequence
  Description of Artificial Sequence: Synthetic oligonucleotide
  Sense strand starting at position 3023 of SEQ ID NO: 318114
guacguaauaaccaugaug

SEQ ID NO: 537756 - RNA, 19 nt, Artificial Sequence
  Description of Artificial Sequence: Synthetic oligonucleotide
  Antisense strand to SEQ ID NO: 537755
caucaugguuauuacguac

SEQ ID NO: 537757 - RNA, 19 nt, Artificial Sequence
  Description of Artificial Sequence: Synthetic oligonucleotide
  Sense strand starting at position 3025 of SEQ ID NO: 318114
acguaauaaccaugaugau

SEQ ID NO: 537758 - RNA, 19 nt, Artificial Sequence
  Description of Artificial Sequence: Synthetic oligonucleotide
  Antisense strand to SEQ ID NO: 537757
aucaucaugguuauuacgu

SEQ ID NO: 537759 - RNA, 19 nt, Artificial Sequence
  Description of Artificial Sequence: Synthetic oligonucleotide
  Sense strand starting at position 3062 of SEQ ID NO: 318114
gcccuaagagauuaagugu

SEQ ID NO: 537760 - RNA, 19 nt, Artificial Sequence
  Description of Artificial Sequence: Synthetic oligonucleotide
  Antisense strand to SEQ ID NO: 537759
acacuuaaucucuuagggc

SEQ ID NO: 537761 - RNA, 19 nt, Artificial Sequence
  Description of Artificial Sequence: Synthetic oligonucleotide
  Sense strand starting at position 3069 of SEQ ID NO: 318114
gagauuaaguguucucuac

SEQ ID NO: 537762 - RNA, 19 nt, Artificial Sequence
  Description of Artificial Sequence: Synthetic oligonucleotide
  Antisense strand to SEQ ID NO: 537761
guagagaacacuuaaucuc

SEQ ID NO: 537763 - RNA, 19 nt, Artificial Sequence
  Description of Artificial Sequence: Synthetic oligonucleotide
  Sense strand starting at position 3073 of SEQ ID NO: 318114
uuaaguguucucuacaucu

SEQ ID NO: 537764 - RNA, 19 nt, Artificial Sequence
  Description of Artificial Sequence: Synthetic oligonucleotide
  Antisense strand to SEQ ID NO: 537763
agauguagagaacacuuaa

SEQ ID NO: 537765 - RNA, 19 nt, Artificial Sequence
  Description of Artificial Sequence: Synthetic oligonucleotide
  Sense strand starting at position 3109 of SEQ ID NO: 318114
guaaaucucagaggaguua

SEQ ID NO: 537766 - RNA, 19 nt, Artificial Sequence
  Description of Artificial Sequence: Synthetic oligonucleotide
  Antisense strand to SEQ ID NO: 537765
uaacuccucugagauuuac

SEQ ID NO: 537767 - RNA, 19 nt, Artificial Sequence
  Description of Artificial Sequence: Synthetic oligonucleotide
  Sense strand starting at position 3244 of SEQ ID NO: 318114
uggaaauaaucuuuguucu

SEQ ID NO: 537768 - RNA, 19 nt, Artificial Sequence
  Description of Artificial Sequence: Synthetic oligonucleotide
  Antisense strand to SEQ ID NO: 537767
agaacaaagauuauuucca

SEQ ID NO: 537769 - RNA, 19 nt, Artificial Sequence
  Description of Artificial Sequence: Synthetic oligonucleotide
  Sense strand starting at position 3258 of SEQ ID NO: 318114
guucuuaauccacagaguu

SEQ ID NO: 537770 - RNA, 19 nt, Artificial Sequence
  Description of Artificial Sequence: Synthetic oligonucleotide
  Antisense strand to SEQ ID NO: 537769
aacucuguggauuaagaac

SEQ ID NO: 537771 - RNA, 19 nt, Artificial Sequence
  Description of Artificial Sequence: Synthetic oligonucleotide
  Sense strand starting at position 3308 of SEQ ID NO: 318114
uccagagucagacgaucua

SEQ ID NO: 537772 - RNA, 19 nt, Artificial Sequence
  Description of Artificial Sequence: Synthetic oligonucleotide
  Antisense strand to SEQ ID NO: 537771
uagaucgucugacucugga

SEQ ID NO: 537773 - RNA, 19 nt, Artificial Sequence
  Description of Artificial Sequence: Synthetic oligonucleotide
  Sense strand starting at position 3429 of SEQ ID NO: 318114
agaaccucaugagucauua

SEQ ID NO: 537774 - RNA, 19 nt, Artificial Sequence
  Description of Artificial Sequence: Synthetic oligonucleotide
  Antisense strand to SEQ ID NO: 537773
uaaugacucaugagguucu

SEQ ID NO: 537775 - RNA, 19 nt, Artificial Sequence
  Description of Artificial Sequence: Synthetic oligonucleotide
  Sense strand starting at position 3482 of SEQ ID NO: 318114
cggucuuuagcagauagga

SEQ ID NO: 537776 - RNA, 19 nt, Artificial Sequence
  Description of Artificial Sequence: Synthetic oligonucleotide
  Antisense strand to SEQ ID NO: 537775
uccuaucugcuaaagaccg

SEQ ID NO: 537777 - RNA, 19 nt, Artificial Sequence
  Description of Artificial Sequence: Synthetic oligonucleotide
  Sense strand starting at position 3530 of SEQ ID NO: 318114
uguuacucauuuguaagua

SEQ ID NO: 537778 - RNA, 19 nt, Artificial Sequence
  Description of Artificial Sequence: Synthetic oligonucleotide
  Antisense strand to SEQ ID NO: 537777
uacuuacaaaugaguaaca

SEQ ID NO: 537779 - RNA, 19 nt, Artificial Sequence
  Description of Artificial Sequence: Synthetic oligonucleotide
  Sense strand starting at position 3805 of SEQ ID NO: 318114
auguguaauguguaacaua

SEQ ID NO: 537780 - RNA, 19 nt, Artificial Sequence
  Description of Artificial Sequence: Synthetic oligonucleotide
  Antisense strand to SEQ ID NO: 537779
uauguuacacauuacacau

SEQ ID NO: 537781 - RNA, 19 nt, Artificial Sequence
  Description of Artificial Sequence: Synthetic oligonucleotide
  Sense strand starting at position 3928 of SEQ ID NO: 318114
ggcuguagaaguuaugaca

SEQ ID NO: 537782 - RNA, 19 nt, Artificial Sequence
  Description of Artificial Sequence: Synthetic oligonucleotide
  Antisense strand to SEQ ID NO: 537781
ugucauaacuucuacagcc

SEQ ID NO: 537783 - RNA, 19 nt, Artificial Sequence
  Description of Artificial Sequence: Synthetic oligonucleotide
  Sense strand starting at position 52 of SEQ ID NO: 318115
aguugacaucugggcaguu

SEQ ID NO: 537784 - RNA, 19 nt, Artificial Sequence
  Description of Artificial Sequence: Synthetic oligonucleotide
  Antisense strand to SEQ ID NO: 537783
aacugcccagaugucaacu

SEQ ID NO: 537785 - RNA, 19 nt, Artificial Sequence
  Description of Artificial Sequence: Synthetic oligonucleotide
  Sense strand starting at position 53 of SEQ ID NO: 318115
guugacaucugggcaguua

SEQ ID NO: 537786 - RNA, 19 nt, Artificial Sequence
  Description of Artificial Sequence: Synthetic oligonucleotide
  Antisense strand to SEQ ID NO: 537785
uaacugcccagaugucaac

SEQ ID NO: 537787 - RNA, 19 nt, Artificial Sequence
  Description of Artificial Sequence: Synthetic oligonucleotide
  Sense strand starting at position 54 of SEQ ID NO: 318115
uugacaucugggcaguuau

SEQ ID NO: 537788 - RNA, 19 nt, Artificial Sequence
  Description of Artificial Sequence: Synthetic oligonucleotide
  Antisense strand to SEQ ID NO: 537787
auaacugcccagaugucaa

SEQ ID NO: 537789 - RNA, 19 nt, Artificial Sequence
  Description of Artificial Sequence: Synthetic oligonucleotide
  Sense strand starting at position 64 of SEQ ID NO: 318115
ggcaguuauugcuggaaga

SEQ ID NO: 537790 - RNA, 19 nt, Artificial Sequence
  Description of Artificial Sequence: Synthetic oligonucleotide
  Antisense strand to SEQ ID NO: 537789
ucuuccagcaauaacugcc

SEQ ID NO: 537791 - RNA, 19 nt, Artificial Sequence
  Description of Artificial Sequence: Synthetic oligonucleotide
  Sense strand starting at position 65 of SEQ ID NO: 318115
gcaguuauugcuggaagag

SEQ ID NO: 537792 - RNA, 19 nt, Artificial Sequence
  Description of Artificial Sequence: Synthetic oligonucleotide
  Antisense strand to SEQ ID NO: 537791
cucuuccagcaauaacugc

SEQ ID NO: 537793 - RNA, 19 nt, Artificial Sequence
  Description of Artificial Sequence: Synthetic oligonucleotide
  Sense strand starting at position 66 of SEQ ID NO: 318115
caguuauugcuggaagagc

SEQ ID NO: 537794 - RNA, 19 nt, Artificial Sequence
  Description of Artificial Sequence: Synthetic oligonucleotide
  Antisense strand to SEQ ID NO: 537793
gcucuuccagcaauaacug

SEQ ID NO: 537795 - RNA, 19 nt, Artificial Sequence
  Description of Artificial Sequence: Synthetic oligonucleotide
  Sense strand starting at position 157 of SEQ ID NO: 318115
accaguacugaguaguaca

SEQ ID NO: 537796 - RNA, 19 nt, Artificial Sequence
  Description of Artificial Sequence: Synthetic oligonucleotide
  Antisense strand to SEQ ID NO: 537795
uguacuacucaguacuggu

SEQ ID NO: 537797 - RNA, 19 nt, Artificial Sequence
  Description of Artificial Sequence: Synthetic oligonucleotide
  Sense strand starting at position 295 of SEQ ID NO: 318115
gguuuccgcuuguccagaa

SEQ ID NO: 537798 - RNA, 19 nt, Artificial Sequence
  Description of Artificial Sequence: Synthetic oligonucleotide
  Antisense strand to SEQ ID NO: 537797
uucuggacaagcggaaacc

SEQ ID NO: 537799 - RNA, 19 nt, Artificial Sequence
  Description of Artificial Sequence: Synthetic oligonucleotide
  Sense strand starting at position 296 of SEQ ID NO: 318115
guuuccgcuuguccagaaa

SEQ ID NO: 537800 - RNA, 19 nt, Artificial Sequence
  Description of Artificial Sequence: Synthetic oligonucleotide
  Antisense strand to SEQ ID NO: 537799
uuucuggacaagcggaaac

SEQ ID NO: 537801 - RNA, 19 nt, Artificial Sequence
  Description of Artificial Sequence: Synthetic oligonucleotide
  Sense strand starting at position 360 of SEQ ID NO: 318115
ugguuuggccaguaaacca

SEQ ID NO: 537802 - RNA, 19 nt, Artificial Sequence
  Description of Artificial Sequence: Synthetic oligonucleotide
  Antisense strand to SEQ ID NO: 537801
ugguuuacuggccaaacca

SEQ ID NO: 537803 - RNA, 19 nt, Artificial Sequence
  Description of Artificial Sequence: Synthetic oligonucleotide
  Sense strand starting at position 1989 of SEQ ID NO: 318115
ccacgagggacguaaacau

SEQ ID NO: 537804 - RNA, 19 nt, Artificial Sequence
  Description of Artificial Sequence: Synthetic oligonucleotide
  Antisense strand to SEQ ID NO: 537803
auguuuacgucccucgugg

SEQ ID NO: 537805 - RNA, 19 nt, Artificial Sequence
  Description of Artificial Sequence: Synthetic oligonucleotide
  Sense strand starting at position 2278 of SEQ ID NO: 318115
cguuucgaauuccagguau

SEQ ID NO: 537806 - RNA, 19 nt, Artificial Sequence
  Description of Artificial Sequence: Synthetic oligonucleotide
  Antisense strand to SEQ ID NO: 537805
auaccuggaauucgaaacg

SEQ ID NO: 537807 - RNA, 19 nt, Artificial Sequence
  Description of Artificial Sequence: Synthetic oligonucleotide
  Sense strand starting at position 2280 of SEQ ID NO: 318115
uuucgaauuccagguauug

SEQ ID NO: 537808 - RNA, 19 nt, Artificial Sequence
  Description of Artificial Sequence: Synthetic oligonucleotide
  Antisense strand to SEQ ID NO: 537807
caauaccuggaauucgaaa

SEQ ID NO: 537809 - RNA, 19 nt, Artificial Sequence
  Description of Artificial Sequence: Synthetic oligonucleotide
  Sense strand starting at position 2282 of SEQ ID NO: 318115
ucgaauuccagguauugag

SEQ ID NO: 537810 - RNA, 19 nt, Artificial Sequence
  Description of Artificial Sequence: Synthetic oligonucleotide
  Antisense strand to SEQ ID NO: 537809
cucaauaccuggaauucga

SEQ ID NO: 537811 - RNA, 19 nt, Artificial Sequence
  Description of Artificial Sequence: Synthetic oligonucleotide
  Sense strand starting at position 2294 of SEQ ID NO: 318115
uauugagacccucgaaugu

SEQ ID NO: 537812 - RNA, 19 nt, Artificial Sequence
  Description of Artificial Sequence: Synthetic oligonucleotide
  Antisense strand to SEQ ID NO: 537811
acauucgagggucucaaua

SEQ ID NO: 537813 - RNA, 19 nt, Artificial Sequence
  Description of Artificial Sequence: Synthetic oligonucleotide
  Sense strand starting at position 2353 of SEQ ID NO: 318115
gucgcuccugcguucagaa

SEQ ID NO: 537814 - RNA, 19 nt, Artificial Sequence
  Description of Artificial Sequence: Synthetic oligonucleotide
  Antisense strand to SEQ ID NO: 537813
uucugaacgcaggagcgac

SEQ ID NO: 537815 - RNA, 19 nt, Artificial Sequence
  Description of Artificial Sequence: Synthetic oligonucleotide
  Sense strand starting at position 2500 of SEQ ID NO: 318115
gacagaguuuaauauauga

SEQ ID NO: 537816 - RNA, 19 nt, Artificial Sequence
  Description of Artificial Sequence: Synthetic oligonucleotide
  Antisense strand to SEQ ID NO: 537815
ucauauauuaaacucuguc

SEQ ID NO: 537817 - RNA, 19 nt, Artificial Sequence
  Description of Artificial Sequence: Synthetic oligonucleotide
  Sense strand starting at position 2533 of SEQ ID NO: 318115
aggaaagcccaguaacagu

SEQ ID NO: 537818 - RNA, 19 nt, Artificial Sequence
  Description of Artificial Sequence: Synthetic oligonucleotide
  Antisense strand to SEQ ID NO: 537817
acuguuacugggcuuuccu

SEQ ID NO: 537819 - RNA, 19 nt, Artificial Sequence
  Description of Artificial Sequence: Synthetic oligonucleotide
  Sense strand starting at position 2580 of SEQ ID NO: 318115
auguccuaacagcaugaau

SEQ ID NO: 537820 - RNA, 19 nt, Artificial Sequence
  Description of Artificial Sequence: Synthetic oligonucleotide
  Antisense strand to SEQ ID NO: 537819
auucaugcuguuaggacau

SEQ ID NO: 537821 - RNA, 19 nt, Artificial Sequence
  Description of Artificial Sequence: Synthetic oligonucleotide
  Sense strand starting at position 2582 of SEQ ID NO: 318115
guccuaacagcaugaaugu

SEQ ID NO: 537822 - RNA, 19 nt, Artificial Sequence
  Description of Artificial Sequence: Synthetic oligonucleotide
  Antisense strand to SEQ ID NO: 537821
acauucaugcuguuaggac

SEQ ID NO: 537823 - RNA, 19 nt, Artificial Sequence
  Description of Artificial Sequence: Synthetic oligonucleotide
  Sense strand starting at position 2648 of SEQ ID NO: 318115
uguacuguucugugaaccu

SEQ ID NO: 537824 - RNA, 19 nt, Artificial Sequence
  Description of Artificial Sequence: Synthetic oligonucleotide
  Antisense strand to SEQ ID NO: 537823
agguucacagaacaguaca

SEQ ID NO: 537825 - RNA, 19 nt, Artificial Sequence
  Description of Artificial Sequence: Synthetic oligonucleotide
  Sense strand starting at position 2718 of SEQ ID NO: 318115
gaguucccagaaugcauau

SEQ ID NO: 537826 - RNA, 19 nt, Artificial Sequence
  Description of Artificial Sequence: Synthetic oligonucleotide
  Antisense strand to SEQ ID NO: 537825
auaugcauucugggaacuc

SEQ ID NO: 537827 - RNA, 19 nt, Artificial Sequence
  Description of Artificial Sequence: Synthetic oligonucleotide
  Sense strand starting at position 2854 of SEQ ID NO: 318115
acagauguugugcaccaua

SEQ ID NO: 537828 - RNA, 19 nt, Artificial Sequence
  Description of Artificial Sequence: Synthetic oligonucleotide
  Antisense strand to SEQ ID NO: 537827
uauggugcacaacaucugu

SEQ ID NO: 537829 - RNA, 19 nt, Artificial Sequence
  Description of Artificial Sequence: Synthetic oligonucleotide
  Sense strand starting at position 2857 of SEQ ID NO: 318115
gauguugugcaccauagua

SEQ ID NO: 537830 - RNA, 19 nt, Artificial Sequence
  Description of Artificial Sequence: Synthetic oligonucleotide
  Antisense strand to SEQ ID NO: 537829
uacuauggugcacaacauc

SEQ ID NO: 537831 - RNA, 19 nt, Artificial Sequence
  Description of Artificial Sequence: Synthetic oligonucleotide
  Sense strand starting at position 2859 of SEQ ID NO: 318115
uguugugcaccauaguaaa

SEQ ID NO: 537832 - RNA, 19 nt, Artificial Sequence
  Description of Artificial Sequence: Synthetic oligonucleotide
  Antisense strand to SEQ ID NO: 537831
uuuacuauggugcacaaca

SEQ ID NO: 537833 - RNA, 19 nt, Artificial Sequence
  Description of Artificial Sequence: Synthetic oligonucleotide
  Sense strand starting at position 2872 of SEQ ID NO: 318115
aguaaagcacaauggaaau

SEQ ID NO: 537834 - RNA, 19 nt, Artificial Sequence
  Description of Artificial Sequence: Synthetic oligonucleotide
  Antisense strand to SEQ ID NO: 537833
auuuccauugugcuuuacu

SEQ ID NO: 537835 - RNA, 19 nt, Artificial Sequence
  Description of Artificial Sequence: Synthetic oligonucleotide
  Sense strand starting at position 2938 of SEQ ID NO: 318115
uuggauuagccuuguauug

SEQ ID NO: 537836 - RNA, 19 nt, Artificial Sequence
  Description of Artificial Sequence: Synthetic oligonucleotide
  Antisense strand to SEQ ID NO: 537835
caauacaaggcuaauccaa

SEQ ID NO: 537837 - RNA, 19 nt, Artificial Sequence
  Description of Artificial Sequence: Synthetic oligonucleotide
  Sense strand starting at position 2940 of SEQ ID NO: 318115
ggauuagccuuguauuguu

SEQ ID NO: 537838 - RNA, 19 nt, Artificial Sequence
  Description of Artificial Sequence: Synthetic oligonucleotide
  Antisense strand to SEQ ID NO: 537837
aacaauacaaggcuaaucc

SEQ ID NO: 537839 - RNA, 19 nt, Artificial Sequence
  Description of Artificial Sequence: Synthetic oligonucleotide
  Sense strand starting at position 2945 of SEQ ID NO: 318115
agccuuguauuguuagguu

SEQ ID NO: 537840 - RNA, 19 nt, Artificial Sequence
  Description of Artificial Sequence: Synthetic oligonucleotide
  Antisense strand to SEQ ID NO: 537839
aaccuaacaauacaaggcu

SEQ ID NO: 537841 - RNA, 19 nt, Artificial Sequence
  Description of Artificial Sequence: Synthetic oligonucleotide
  Sense strand starting at position 2949 of SEQ ID NO: 318115
uuguauuguuagguucagu

SEQ ID NO: 537842 - RNA, 19 nt, Artificial Sequence
  Description of Artificial Sequence: Synthetic oligonucleotide
  Antisense strand to SEQ ID NO: 537841
acugaaccuaacaauacaa

SEQ ID NO: 537843 - RNA, 19 nt, Artificial Sequence
  Description of Artificial Sequence: Synthetic oligonucleotide
  Sense strand starting at position 2991 of SEQ ID NO: 318115
acagaacaguacugaacua

SEQ ID NO: 537844 - RNA, 19 nt, Artificial Sequence
  Description of Artificial Sequence: Synthetic oligonucleotide
  Antisense strand to SEQ ID NO: 537843
uaguucaguacuguucugu

SEQ ID NO: 537845 - RNA, 19 nt, Artificial Sequence
  Description of Artificial Sequence: Synthetic oligonucleotide
  Sense strand starting at position 3070 of SEQ ID NO: 318115
ucaguauuguccugauauu

SEQ ID NO: 537846 - RNA, 19 nt, Artificial Sequence
  Description of Artificial Sequence: Synthetic oligonucleotide
  Antisense strand to SEQ ID NO: 537845
aauaucaggacaauacuga

SEQ ID NO: 537847 - RNA, 19 nt, Artificial Sequence
  Description of Artificial Sequence: Synthetic oligonucleotide
  Sense strand starting at position 3448 of SEQ ID NO: 318115
caaaguuuguaacugaguu

SEQ ID NO: 537848 - RNA, 19 nt, Artificial Sequence
  Description of Artificial Sequence: Synthetic oligonucleotide
  Antisense strand to SEQ ID NO: 537847
aacucaguuacaaacuuug

SEQ ID NO: 537849 - RNA, 19 nt, Artificial Sequence
  Description of Artificial Sequence: Synthetic oligonucleotide
  Sense strand starting at position 3456 of SEQ ID NO: 318115
guaacugaguuugugucaa

SEQ ID NO: 537850 - RNA, 19 nt, Artificial Sequence
  Description of Artificial Sequence: Synthetic oligonucleotide
  Antisense strand to SEQ ID NO: 537849
uugacacaaacucaguuac

SEQ ID NO: 537851 - RNA, 19 nt, Artificial Sequence
  Description of Artificial Sequence: Synthetic oligonucleotide
  Sense strand starting at position 3458 of SEQ ID NO: 318115
aacugaguuugugucaaau

SEQ ID NO: 537852 - RNA, 19 nt, Artificial Sequence
  Description of Artificial Sequence: Synthetic oligonucleotide
  Antisense strand to SEQ ID NO: 537851
auuugacacaaacucaguu

SEQ ID NO: 537853 - RNA, 19 nt, Artificial Sequence
  Description of Artificial Sequence: Synthetic oligonucleotide
  Sense strand starting at position 3460 of SEQ ID NO: 318115
cugaguuugugucaaaucu

SEQ ID NO: 537854 - RNA, 19 nt, Artificial Sequence
  Description of Artificial Sequence: Synthetic oligonucleotide
  Antisense strand to SEQ ID NO: 537853
agauuugacacaaacucag

SEQ ID NO: 537855 - RNA, 19 nt, Artificial Sequence
  Description of Artificial Sequence: Synthetic oligonucleotide
  Sense strand starting at position 3845 of SEQ ID NO: 318115
agguuugaauuaccagcua

SEQ ID NO: 537856 - RNA, 19 nt, Artificial Sequence
  Description of Artificial Sequence: Synthetic oligonucleotide
  Antisense strand to SEQ ID NO: 537855
uagcugguaauucaaaccu

SEQ ID NO: 537857 - RNA, 19 nt, Artificial Sequence
  Description of Artificial Sequence: Synthetic oligonucleotide
  Sense strand starting at position 3869 of SEQ ID NO: 318115
acaauagcacauuguagaa

SEQ ID NO: 537858 - RNA, 19 nt, Artificial Sequence
  Description of Artificial Sequence: Synthetic oligonucleotide
  Antisense strand to SEQ ID NO: 537857
uucuacaaugugcuauugu

SEQ ID NO: 537859 - RNA, 19 nt, Artificial Sequence
  Description of Artificial Sequence: Synthetic oligonucleotide
  Sense strand starting at position 3951 of SEQ ID NO: 318115
cugacaugaucccauuaug

SEQ ID NO: 537860 - RNA, 19 nt, Artificial Sequence
  Description of Artificial Sequence: Synthetic oligonucleotide
  Antisense strand to SEQ ID NO: 537859
cauaaugggaucaugucag

SEQ ID NO: 537861 - RNA, 19 nt, Artificial Sequence
  Description of Artificial Sequence: Synthetic oligonucleotide
  Sense strand starting at position 3960 of SEQ ID NO: 318115
ucccauuauguauaauugu

SEQ ID NO: 537862 - RNA, 19 nt, Artificial Sequence
  Description of Artificial Sequence: Synthetic oligonucleotide
  Antisense strand to SEQ ID NO: 537861
acaauuauacauaauggga

SEQ ID NO: 537863 - RNA, 19 nt, Artificial Sequence
  Description of Artificial Sequence: Synthetic oligonucleotide
  Sense strand starting at position 135 of SEQ ID NO: 318116
uguaacucagcuggacaaa

SEQ ID NO: 537864 - RNA, 19 nt, Artificial Sequence
  Description of Artificial Sequence: Synthetic oligonucleotide
  Antisense strand to SEQ ID NO: 537863
uuuguccagcugaguuaca

SEQ ID NO: 537865 - RNA, 19 nt, Artificial Sequence
  Description of Artificial Sequence: Synthetic oligonucleotide
  Sense strand starting at position 136 of SEQ ID NO: 318116
guaacucagcuggacaaau

SEQ ID NO: 537866 - RNA, 19 nt, Artificial Sequence
  Description of Artificial Sequence: Synthetic oligonucleotide
  Antisense strand to SEQ ID NO: 537865
auuuguccagcugaguuac

SEQ ID NO: 537867 - RNA, 19 nt, Artificial Sequence
  Description of Artificial Sequence: Synthetic oligonucleotide
  Sense strand starting at position 157 of SEQ ID NO: 318116
gccaaagccucuuccuaug

SEQ ID NO: 537868 - RNA, 19 nt, Artificial Sequence
  Description of Artificial Sequence: Synthetic oligonucleotide
  Antisense strand to SEQ ID NO: 537867
cauaggaagaggcuuuggc

SEQ ID NO: 537869 - RNA, 19 nt, Artificial Sequence
  Description of Artificial Sequence: Synthetic oligonucleotide
  Sense strand starting at position 162 of SEQ ID NO: 318116
agccucuuccuauguucua

SEQ ID NO: 537870 - RNA, 19 nt, Artificial Sequence
  Description of Artificial Sequence: Synthetic oligonucleotide
  Antisense strand to SEQ ID NO: 537869
uagaacauaggaagaggcu

SEQ ID NO: 537871 - RNA, 19 nt, Artificial Sequence
  Description of Artificial Sequence: Synthetic oligonucleotide
  Sense strand starting at position 169 of SEQ ID NO: 318116
uccuauguucuaggaugua

SEQ ID NO: 537872 - RNA, 19 nt, Artificial Sequence
  Description of Artificial Sequence: Synthetic oligonucleotide
  Antisense strand to SEQ ID NO: 537871
uacauccuagaacauagga

SEQ ID NO: 537873 - RNA, 19 nt, Artificial Sequence
  Description of Artificial Sequence: Synthetic oligonucleotide
  Sense strand starting at position 172 of SEQ ID NO: 318116
uauguucuaggauguaaau

SEQ ID NO: 537874 - RNA, 19 nt, Artificial Sequence
  Description of Artificial Sequence: Synthetic oligonucleotide
  Antisense strand to SEQ ID NO: 537873
auuuacauccuagaacaua

SEQ ID NO: 537875 - RNA, 19 nt, Artificial Sequence
  Description of Artificial Sequence: Synthetic oligonucleotide
  Sense strand starting at position 324 of SEQ ID NO: 318116
uauggagaucucugugguu

SEQ ID NO: 537876 - RNA, 19 nt, Artificial Sequence
  Description of Artificial Sequence: Synthetic oligonucleotide
  Antisense strand to SEQ ID NO: 537875
aaccacagagaucuccaua

SEQ ID NO: 537877 - RNA, 19 nt, Artificial Sequence
  Description of Artificial Sequence: Synthetic oligonucleotide
  Sense strand starting at position 326 of SEQ ID NO: 318116
uggagaucucugugguucu

SEQ ID NO: 537878 - RNA, 19 nt, Artificial Sequence
  Description of Artificial Sequence: Synthetic oligonucleotide
  Antisense strand to SEQ ID NO: 537877
agaaccacagagaucucca

SEQ ID NO: 537879 - RNA, 19 nt, Artificial Sequence
  Description of Artificial Sequence: Synthetic oligonucleotide
  Sense strand starting at position 329 of SEQ ID NO: 318116
agaucucugugguucuaaa

SEQ ID NO: 537880 - RNA, 19 nt, Artificial Sequence
  Description of Artificial Sequence: Synthetic oligonucleotide
  Antisense strand to SEQ ID NO: 537879
uuuagaaccacagagaucu

SEQ ID NO: 537881 - RNA, 19 nt, Artificial Sequence
  Description of Artificial Sequence: Synthetic oligonucleotide
  Sense strand starting at position 339 of SEQ ID NO: 318116
gguucuaaacagggugaga

SEQ ID NO: 537882 - RNA, 19 nt, Artificial Sequence
  Description of Artificial Sequence: Synthetic oligonucleotide
  Antisense strand to SEQ ID NO: 537881
ucucacccuguuuagaacc

SEQ ID NO: 537883 - RNA, 19 nt, Artificial Sequence
  Description of Artificial Sequence: Synthetic oligonucleotide
  Sense strand starting at position 475 of SEQ ID NO: 318116
gggcucugaugguagaauu

SEQ ID NO: 537884 - RNA, 19 nt, Artificial Sequence
  Description of Artificial Sequence: Synthetic oligonucleotide
  Antisense strand to SEQ ID NO: 537883
aauucuaccaucagagccc

SEQ ID NO: 537885 - RNA, 19 nt, Artificial Sequence
  Description of Artificial Sequence: Synthetic oligonucleotide
  Sense strand starting at position 483 of SEQ ID NO: 318116
augguagaauuugaauguu

SEQ ID NO: 537886 - RNA, 19 nt, Artificial Sequence
  Description of Artificial Sequence: Synthetic oligonucleotide
  Antisense strand to SEQ ID NO: 537885
aacauucaaauucuaccau

SEQ ID NO: 537887 - RNA, 19 nt, Artificial Sequence
  Description of Artificial Sequence: Synthetic oligonucleotide
  Sense strand starting at position 493 of SEQ ID NO: 318116
uugaauguuuaagugucaa

SEQ ID NO: 537888 - RNA, 19 nt, Artificial Sequence
  Description of Artificial Sequence: Synthetic oligonucleotide
  Antisense strand to SEQ ID NO: 537887
uugacacuuaaacauucaa

SEQ ID NO: 537889 - RNA, 19 nt, Artificial Sequence
  Description of Artificial Sequence: Synthetic oligonucleotide
  Sense strand starting at position 697 of SEQ ID NO: 318116
ugaggacucucccacggau

SEQ ID NO: 537890 - RNA, 19 nt, Artificial Sequence
  Description of Artificial Sequence: Synthetic oligonucleotide
  Antisense strand to SEQ ID NO: 537889
auccgugggagaguccuca

SEQ ID NO: 537891 - RNA, 19 nt, Artificial Sequence
  Description of Artificial Sequence: Synthetic oligonucleotide
  Sense strand starting at position 872 of SEQ ID NO: 318116
acaugaggccugggaguuu

SEQ ID NO: 537892 - RNA, 19 nt, Artificial Sequence
  Description of Artificial Sequence: Synthetic oligonucleotide
  Antisense strand to SEQ ID NO: 537891
aaacucccaggccucaugu

SEQ ID NO: 537893 - RNA, 19 nt, Artificial Sequence
  Description of Artificial Sequence: Synthetic oligonucleotide
  Sense strand starting at position 946 of SEQ ID NO: 318116
agagcacucuuccugauga

SEQ ID NO: 537894 - RNA, 19 nt, Artificial Sequence
  Description of Artificial Sequence: Synthetic oligonucleotide
  Antisense strand to SEQ ID NO: 537893
ucaucaggaagagugcucu

SEQ ID NO: 537895 - RNA, 19 nt, Artificial Sequence
  Description of Artificial Sequence: Synthetic oligonucleotide
  Sense strand starting at position 948 of SEQ ID NO: 318116
agcacucuuccugaugaag

SEQ ID NO: 537896 - RNA, 19 nt, Artificial Sequence
  Description of Artificial Sequence: Synthetic oligonucleotide
  Antisense strand to SEQ ID NO: 537895
cuucaucaggaagagugcu

SEQ ID NO: 537897 - RNA, 19 nt, Artificial Sequence
  Description of Artificial Sequence: Synthetic oligonucleotide
  Sense strand starting at position 1046 of SEQ ID NO: 318116
gccagcugucaugggaaug

SEQ ID NO: 537898 - RNA, 19 nt, Artificial Sequence
  Description of Artificial Sequence: Synthetic oligonucleotide
  Antisense strand to SEQ ID NO: 537897
cauucccaugacagcuggc

SEQ ID NO: 537899 - RNA, 19 nt, Artificial Sequence
  Description of Artificial Sequence: Synthetic oligonucleotide
  Sense strand starting at position 1304 of SEQ ID NO: 318116
agaggagaguccggacuaa

SEQ ID NO: 537900 - RNA, 19 nt, Artificial Sequence
  Description of Artificial Sequence: Synthetic oligonucleotide
  Antisense strand to SEQ ID NO: 537899
uuaguccggacucuccucu

SEQ ID NO: 537901 - RNA, 19 nt, Artificial Sequence
  Description of Artificial Sequence: Synthetic oligonucleotide
  Sense strand starting at position 2349 of SEQ ID NO: 318116
guguguggugcauugugau

SEQ ID NO: 537902 - RNA, 19 nt, Artificial Sequence
  Description of Artificial Sequence: Synthetic oligonucleotide
  Antisense strand to SEQ ID NO: 537901
aucacaaugcaccacacac

SEQ ID NO: 537903 - RNA, 19 nt, Artificial Sequence
  Description of Artificial Sequence: Synthetic oligonucleotide
  Sense strand starting at position 2461 of SEQ ID NO: 318116
cauccaaauggguggucau

SEQ ID NO: 537904 - RNA, 19 nt, Artificial Sequence
  Description of Artificial Sequence: Synthetic oligonucleotide
  Antisense strand to SEQ ID NO: 537903
augaccacccauuuggaug

SEQ ID NO: 537905 - RNA, 19 nt, Artificial Sequence
  Description of Artificial Sequence: Synthetic oligonucleotide
  Sense strand starting at position 2468 of SEQ ID NO: 318116
auggguggucaugggaaga

SEQ ID NO: 537906 - RNA, 19 nt, Artificial Sequence
  Description of Artificial Sequence: Synthetic oligonucleotide
  Antisense strand to SEQ ID NO: 537905
ucuucccaugaccacccau

SEQ ID NO: 537907 - RNA, 19 nt, Artificial Sequence
  Description of Artificial Sequence: Synthetic oligonucleotide
  Sense strand starting at position 2514 of SEQ ID NO: 318116
gaggguucugcagaauccu

SEQ ID NO: 537908 - RNA, 19 nt, Artificial Sequence
  Description of Artificial Sequence: Synthetic oligonucleotide
  Antisense strand to SEQ ID NO: 537907
aggauucugcagaacccuc

SEQ ID NO: 537909 - RNA, 19 nt, Artificial Sequence
  Description of Artificial Sequence: Synthetic oligonucleotide
  Sense strand starting at position 2550 of SEQ ID NO: 318116
cuucuagugacagggaguu

SEQ ID NO: 537910 - RNA, 19 nt, Artificial Sequence
  Description of Artificial Sequence: Synthetic oligonucleotide
  Antisense strand to SEQ ID NO: 537909
aacucccugucacuagaag

SEQ ID NO: 537911 - RNA, 19 nt, Artificial Sequence
  Description of Artificial Sequence: Synthetic oligonucleotide
  Sense strand starting at position 3040 of SEQ ID NO: 318116
gggcaaugauuagauuuag

SEQ ID NO: 537912 - RNA, 19 nt, Artificial Sequence
  Description of Artificial Sequence: Synthetic oligonucleotide
  Antisense strand to SEQ ID NO: 537911
cuaaaucuaaucauugccc

SEQ ID NO: 537913 - RNA, 19 nt, Artificial Sequence
  Description of Artificial Sequence: Synthetic oligonucleotide
  Sense strand starting at position 3063 of SEQ ID NO: 318116
ccauuucccuucugugagu

SEQ ID NO: 537914 - RNA, 19 nt, Artificial Sequence
  Description of Artificial Sequence: Synthetic oligonucleotide
  Antisense strand to SEQ ID NO: 537913
acucacagaagggaaaugg

SEQ ID NO: 537915 - RNA, 19 nt, Artificial Sequence
  Description of Artificial Sequence: Synthetic oligonucleotide
  Sense strand starting at position 3151 of SEQ ID NO: 318116
aagguuugcucccuggaag

SEQ ID NO: 537916 - RNA, 19 nt, Artificial Sequence
  Description of Artificial Sequence: Synthetic oligonucleotide
  Antisense strand to SEQ ID NO: 537915
cuuccagggagcaaaccuu

SEQ ID NO: 537917 - RNA, 19 nt, Artificial Sequence
  Description of Artificial Sequence: Synthetic oligonucleotide
  Sense strand starting at position 3289 of SEQ ID NO: 318116
uucugucugccacacagau

SEQ ID NO: 537918 - RNA, 19 nt, Artificial Sequence
  Description of Artificial Sequence: Synthetic oligonucleotide
  Antisense strand to SEQ ID NO: 537917
aucuguguggcagacagaa

SEQ ID NO: 537919 - RNA, 19 nt, Artificial Sequence
  Description of Artificial Sequence: Synthetic oligonucleotide
  Sense strand starting at position 3327 of SEQ ID NO: 318116
cacagaauacccggaugua

SEQ ID NO: 537920 - RNA, 19 nt, Artificial Sequence
  Description of Artificial Sequence: Synthetic oligonucleotide
  Antisense strand to SEQ ID NO: 537919
uacauccggguauucugug

SEQ ID NO: 537921 - RNA, 19 nt, Artificial Sequence
  Description of Artificial Sequence: Synthetic oligonucleotide
  Sense strand starting at position 3337 of SEQ ID NO: 318116
ccggauguauggccucaua

SEQ ID NO: 537922 - RNA, 19 nt, Artificial Sequence
  Description of Artificial Sequence: Synthetic oligonucleotide
  Antisense strand to SEQ ID NO: 537921
uaugaggccauacauccgg

SEQ ID NO: 537923 - RNA, 19 nt, Artificial Sequence
  Description of Artificial Sequence: Synthetic oligonucleotide
  Sense strand starting at position 3340 of SEQ ID NO: 318116
gauguauggccucauaaac

SEQ ID NO: 537924 - RNA, 19 nt, Artificial Sequence
  Description of Artificial Sequence: Synthetic oligonucleotide
  Antisense strand to SEQ ID NO: 537923
guuuaugaggccauacauc

SEQ ID NO: 537925 - RNA, 19 nt, Artificial Sequence
  Description of Artificial Sequence: Synthetic oligonucleotide
  Sense strand starting at position 3401 of SEQ ID NO: 318116
guccuuaaguccgcacaga

SEQ ID NO: 537926 - RNA, 19 nt, Artificial Sequence
  Description of Artificial Sequence: Synthetic oligonucleotide
  Antisense strand to SEQ ID NO: 537925
ucugugcggacuuaaggac

SEQ ID NO: 537927 - RNA, 19 nt, Artificial Sequence
  Description of Artificial Sequence: Synthetic oligonucleotide
  Sense strand starting at position 3536 of SEQ ID NO: 318116
gcaugacagucaccacauu

SEQ ID NO: 537928 - RNA, 19 nt, Artificial Sequence
  Description of Artificial Sequence: Synthetic oligonucleotide
  Antisense strand to SEQ ID NO: 537927
aauguggugacugucaugc

SEQ ID NO: 537929 - RNA, 19 nt, Artificial Sequence
  Description of Artificial Sequence: Synthetic oligonucleotide
  Sense strand starting at position 3677 of SEQ ID NO: 318116
uggccaggguccuugaaua

SEQ ID NO: 537930 - RNA, 19 nt, Artificial Sequence
  Description of Artificial Sequence: Synthetic oligonucleotide
  Antisense strand to SEQ ID NO: 537929
uauucaaggacccuggcca

SEQ ID NO: 537931 - RNA, 19 nt, Artificial Sequence
  Description of Artificial Sequence: Synthetic oligonucleotide
  Sense strand starting at position 3821 of SEQ ID NO: 318116
ccacauuguccacgugaug

SEQ ID NO: 537932 - RNA, 19 nt, Artificial Sequence
  Description of Artificial Sequence: Synthetic oligonucleotide
  Antisense strand to SEQ ID NO: 537931
caucacguggacaaugugg

SEQ ID NO: 537933 - RNA, 19 nt, Artificial Sequence
  Description of Artificial Sequence: Synthetic oligonucleotide
  Sense strand starting at position 3830 of SEQ ID NO: 318116
ccacgugaugcccaccaaa

SEQ ID NO: 537934 - RNA, 19 nt, Artificial Sequence
  Description of Artificial Sequence: Synthetic oligonucleotide
  Antisense strand to SEQ ID NO: 537933
uuuggugggcaucacgugg

SEQ ID NO: 537935 - RNA, 19 nt, Artificial Sequence
  Description of Artificial Sequence: Synthetic oligonucleotide
  Sense strand starting at position 3860 of SEQ ID NO: 318116
uaagcaggugccugaucau

SEQ ID NO: 537936 - RNA, 19 nt, Artificial Sequence
  Description of Artificial Sequence: Synthetic oligonucleotide
  Antisense strand to SEQ ID NO: 537935
augaucaggcaccugcuua

SEQ ID NO: 537937 - RNA, 19 nt, Artificial Sequence
  Description of Artificial Sequence: Synthetic oligonucleotide
  Sense strand starting at position 3863 of SEQ ID NO: 318116
gcaggugccugaucauuac

SEQ ID NO: 537938 - RNA, 19 nt, Artificial Sequence
  Description of Artificial Sequence: Synthetic oligonucleotide
  Antisense strand to SEQ ID NO: 537937
guaaugaucaggcaccugc

SEQ ID NO: 537939 - RNA, 19 nt, Artificial Sequence
  Description of Artificial Sequence: Synthetic oligonucleotide
  Sense strand starting at position 3895 of SEQ ID NO: 318116
ugaggcuuaccuuguguua

SEQ ID NO: 537940 - RNA, 19 nt, Artificial Sequence
  Description of Artificial Sequence: Synthetic oligonucleotide
  Antisense strand to SEQ ID NO: 537939
uaacacaagguaagccuca

SEQ ID NO: 537941 - RNA, 19 nt, Artificial Sequence
  Description of Artificial Sequence: Synthetic oligonucleotide
  Sense strand starting at position 3898 of SEQ ID NO: 318116
ggcuuaccuuguguuagaa

SEQ ID NO: 537942 - RNA, 19 nt, Artificial Sequence
  Description of Artificial Sequence: Synthetic oligonucleotide
  Antisense strand to SEQ ID NO: 537941
uucuaacacaagguaagcc

SEQ ID NO: 537943 - RNA, 19 nt, Artificial Sequence
  Description of Artificial Sequence: Synthetic oligonucleotide
  Sense strand starting at position 99 of SEQ ID NO: 318117
gcugucucugaggauugaa

SEQ ID NO: 537944 - RNA, 19 nt, Artificial Sequence
  Description of Artificial Sequence: Synthetic oligonucleotide
  Antisense strand to SEQ ID NO: 537943
uucaauccucagagacagc

SEQ ID NO: 537945 - RNA, 19 nt, Artificial Sequence
  Description of Artificial Sequence: Synthetic oligonucleotide
  Sense strand starting at position 120 of SEQ ID NO: 318117
gggagacuuugugaaauuu

SEQ ID NO: 537946 - RNA, 19 nt, Artificial Sequence
  Description of Artificial Sequence: Synthetic oligonucleotide
  Antisense strand to SEQ ID NO: 537945
aaauuucacaaagucuccc

SEQ ID NO: 537947 - RNA, 19 nt, Artificial Sequence
  Description of Artificial Sequence: Synthetic oligonucleotide
  Sense strand starting at position 156 of SEQ ID NO: 318117
cuccuucuccaggagguaa

SEQ ID NO: 537948 - RNA, 19 nt, Artificial Sequence
  Description of Artificial Sequence: Synthetic oligonucleotide
  Antisense strand to SEQ ID NO: 537947
uuaccuccuggagaaggag

SEQ ID NO: 537949 - RNA, 19 nt, Artificial Sequence
  Description of Artificial Sequence: Synthetic oligonucleotide
  Sense strand starting at position 224 of SEQ ID NO: 318117
acuucuggccuccaggaau

SEQ ID NO: 537950 - RNA, 19 nt, Artificial Sequence
  Description of Artificial Sequence: Synthetic oligonucleotide
  Antisense strand to SEQ ID NO: 537949
auuccuggaggccagaagu

SEQ ID NO: 537951 - RNA, 19 nt, Artificial Sequence
  Description of Artificial Sequence: Synthetic oligonucleotide
  Sense strand starting at position 451 of SEQ ID NO: 318117
gagccaugucaugagaucu

SEQ ID NO: 537952 - RNA, 19 nt, Artificial Sequence
  Description of Artificial Sequence: Synthetic oligonucleotide
  Antisense strand to SEQ ID NO: 537951
agaucucaugacauggcuc

SEQ ID NO: 537953 - RNA, 19 nt, Artificial Sequence
  Description of Artificial Sequence: Synthetic oligonucleotide
  Sense strand starting at position 461 of SEQ ID NO: 318117
augagaucuggcugcauau

SEQ ID NO: 537954 - RNA, 19 nt, Artificial Sequence
  Description of Artificial Sequence: Synthetic oligonucleotide
  Antisense strand to SEQ ID NO: 537953
auaugcagccagaucucau

SEQ ID NO: 537955 - RNA, 19 nt, Artificial Sequence
  Description of Artificial Sequence: Synthetic oligonucleotide
  Sense strand starting at position 530 of SEQ ID NO: 318117
ugggcuccuucccugaaua

SEQ ID NO: 537956 - RNA, 19 nt, Artificial Sequence
  Description of Artificial Sequence: Synthetic oligonucleotide
  Antisense strand to SEQ ID NO: 537955
uauucagggaaggagccca

SEQ ID NO: 537957 - RNA, 19 nt, Artificial Sequence
  Description of Artificial Sequence: Synthetic oligonucleotide
  Sense strand starting at position 531 of SEQ ID NO: 318117
gggcuccuucccugaauau

SEQ ID NO: 537958 - RNA, 19 nt, Artificial Sequence
  Description of Artificial Sequence: Synthetic oligonucleotide
  Antisense strand to SEQ ID NO: 537957
auauucagggaaggagccc

SEQ ID NO: 537959 - RNA, 19 nt, Artificial Sequence
  Description of Artificial Sequence: Synthetic oligonucleotide
  Sense strand starting at position 532 of SEQ ID NO: 318117
ggcuccuucccugaauauu

SEQ ID NO: 537960 - RNA, 19 nt, Artificial Sequence
  Description of Artificial Sequence: Synthetic oligonucleotide
  Antisense strand to SEQ ID NO: 537959
aauauucagggaaggagcc

SEQ ID NO: 537961 - RNA, 19 nt, Artificial Sequence
  Description of Artificial Sequence: Synthetic oligonucleotide
  Sense strand starting at position 820 of SEQ ID NO: 318117
cccuaauucugguccauag

SEQ ID NO: 537962 - RNA, 19 nt, Artificial Sequence
  Description of Artificial Sequence: Synthetic oligonucleotide
  Antisense strand to SEQ ID NO: 537961
cuauggaccagaauuaggg

SEQ ID NO: 537963 - RNA, 19 nt, Artificial Sequence
  Description of Artificial Sequence: Synthetic oligonucleotide
  Sense strand starting at position 848 of SEQ ID NO: 318117
cugaucugcccagacaguu

SEQ ID NO: 537964 - RNA, 19 nt, Artificial Sequence
  Description of Artificial Sequence: Synthetic oligonucleotide
  Antisense strand to SEQ ID NO: 537963
aacugucugggcagaucag

SEQ ID NO: 537965 - RNA, 19 nt, Artificial Sequence
  Description of Artificial Sequence: Synthetic oligonucleotide
  Sense strand starting at position 1119 of SEQ ID NO: 318117
cucuguucugcagaauuac

SEQ ID NO: 537966 - RNA, 19 nt, Artificial Sequence
  Description of Artificial Sequence: Synthetic oligonucleotide
  Antisense strand to SEQ ID NO: 537965
guaauucugcagaacagag

SEQ ID NO: 537967 - RNA, 19 nt, Artificial Sequence
  Description of Artificial Sequence: Synthetic oligonucleotide
  Sense strand starting at position 1226 of SEQ ID NO: 318117
cuuccaaugcucuggaaag

SEQ ID NO: 537968 - RNA, 19 nt, Artificial Sequence
  Description of Artificial Sequence: Synthetic oligonucleotide
  Antisense strand to SEQ ID NO: 537967
cuuuccagagcauuggaag

SEQ ID NO: 537969 - RNA, 19 nt, Artificial Sequence
  Description of Artificial Sequence: Synthetic oligonucleotide
  Sense strand starting at position 1300 of SEQ ID NO: 318117
uccaaaguuccaggcaauu

SEQ ID NO: 537970 - RNA, 19 nt, Artificial Sequence
  Description of Artificial Sequence: Synthetic oligonucleotide
  Antisense strand to SEQ ID NO: 537969
aauugccuggaacuuugga

SEQ ID NO: 537971 - RNA, 19 nt, Artificial Sequence
  Description of Artificial Sequence: Synthetic oligonucleotide
  Sense strand starting at position 1987 of SEQ ID NO: 318117
cugacugucuuucuuacau

SEQ ID NO: 537972 - RNA, 19 nt, Artificial Sequence
  Description of Artificial Sequence: Synthetic oligonucleotide
  Antisense strand to SEQ ID NO: 537971
auguaagaaagacagucag

SEQ ID NO: 537973 - RNA, 19 nt, Artificial Sequence
  Description of Artificial Sequence: Synthetic oligonucleotide
  Sense strand starting at position 2110 of SEQ ID NO: 318117
cuuccugguuaaucugaua

SEQ ID NO: 537974 - RNA, 19 nt, Artificial Sequence
  Description of Artificial Sequence: Synthetic oligonucleotide
  Antisense strand to SEQ ID NO: 537973
uaucagauuaaccaggaag

SEQ ID NO: 537975 - RNA, 19 nt, Artificial Sequence
  Description of Artificial Sequence: Synthetic oligonucleotide
  Sense strand starting at position 2359 of SEQ ID NO: 318117
cugccuuccugacuuggaa

SEQ ID NO: 537976 - RNA, 19 nt, Artificial Sequence
  Description of Artificial Sequence: Synthetic oligonucleotide
  Antisense strand to SEQ ID NO: 537975
uuccaagucaggaaggcag

SEQ ID NO: 537977 - RNA, 19 nt, Artificial Sequence
  Description of Artificial Sequence: Synthetic oligonucleotide
  Sense strand starting at position 2361 of SEQ ID NO: 318117
gccuuccugacuuggaaag

SEQ ID NO: 537978 - RNA, 19 nt, Artificial Sequence
  Description of Artificial Sequence: Synthetic oligonucleotide
  Antisense strand to SEQ ID NO: 537977
cuuuccaagucaggaaggc

SEQ ID NO: 537979 - RNA, 19 nt, Artificial Sequence
  Description of Artificial Sequence: Synthetic oligonucleotide
  Sense strand starting at position 2486 of SEQ ID NO: 318117
auaggagaggagugcaauu

SEQ ID NO: 537980 - RNA, 19 nt, Artificial Sequence
  Description of Artificial Sequence: Synthetic oligonucleotide
  Antisense strand to SEQ ID NO: 537979
aauugcacuccucuccuau

SEQ ID NO: 537981 - RNA, 19 nt, Artificial Sequence
  Description of Artificial Sequence: Synthetic oligonucleotide
  Sense strand starting at position 2521 of SEQ ID NO: 318117
gagauaguauuccucagaa

SEQ ID NO: 537982 - RNA, 19 nt, Artificial Sequence
  Description of Artificial Sequence: Synthetic oligonucleotide
  Antisense strand to SEQ ID NO: 537981
uucugaggaauacuaucuc

SEQ ID NO: 537983 - RNA, 19 nt, Artificial Sequence
  Description of Artificial Sequence: Synthetic oligonucleotide
  Sense strand starting at position 2571 of SEQ ID NO: 318117
auuagaauacaaugcagua

SEQ ID NO: 537984 - RNA, 19 nt, Artificial Sequence
  Description of Artificial Sequence: Synthetic oligonucleotide
  Antisense strand to SEQ ID NO: 537983
uacugcauuguauucuaau

SEQ ID NO: 537985 - RNA, 19 nt, Artificial Sequence
  Description of Artificial Sequence: Synthetic oligonucleotide
  Sense strand starting at position 2599 of SEQ ID NO: 318117
gugaaacugcaaggcauua

SEQ ID NO: 537986 - RNA, 19 nt, Artificial Sequence
  Description of Artificial Sequence: Synthetic oligonucleotide
  Antisense strand to SEQ ID NO: 537985
uaaugccuugcaguuucac

SEQ ID NO: 537987 - RNA, 19 nt, Artificial Sequence
  Description of Artificial Sequence: Synthetic oligonucleotide
  Sense strand starting at position 2612 of SEQ ID NO: 318117
gcauuaugcaaaugugaag

SEQ ID NO: 537988 - RNA, 19 nt, Artificial Sequence
  Description of Artificial Sequence: Synthetic oligonucleotide
  Antisense strand to SEQ ID NO: 537987
cuucacauuugcauaaugc

SEQ ID NO: 537989 - RNA, 19 nt, Artificial Sequence
  Description of Artificial Sequence: Synthetic oligonucleotide
  Sense strand starting at position 2621 of SEQ ID NO: 318117
aaaugugaaguccagcuau

SEQ ID NO: 537990 - RNA, 19 nt, Artificial Sequence
  Description of Artificial Sequence: Synthetic oligonucleotide
  Antisense strand to SEQ ID NO: 537989
auagcuggacuucacauuu

SEQ ID NO: 537991 - RNA, 19 nt, Artificial Sequence
  Description of Artificial Sequence: Synthetic oligonucleotide
  Sense strand starting at position 2802 of SEQ ID NO: 318117
auggguacaucugugaaug

SEQ ID NO: 537992 - RNA, 19 nt, Artificial Sequence
  Description of Artificial Sequence: Synthetic oligonucleotide
  Antisense strand to SEQ ID NO: 537991
cauucacagauguacccau

SEQ ID NO: 537993 - RNA, 19 nt, Artificial Sequence
  Description of Artificial Sequence: Synthetic oligonucleotide
  Sense strand starting at position 2828 of SEQ ID NO: 318117
gcuacuugugaauagcaga

SEQ ID NO: 537994 - RNA, 19 nt, Artificial Sequence
  Description of Artificial Sequence: Synthetic oligonucleotide
  Antisense strand to SEQ ID NO: 537993
ucugcuauucacaaguagc

SEQ ID NO: 537995 - RNA, 19 nt, Artificial Sequence
  Description of Artificial Sequence: Synthetic oligonucleotide
  Sense strand starting at position 2869 of SEQ ID NO: 318117
aaggcuaugccuuggaaag

SEQ ID NO: 537996 - RNA, 19 nt, Artificial Sequence
  Description of Artificial Sequence: Synthetic oligonucleotide
  Antisense strand to SEQ ID NO: 537995
cuuuccaaggcauagccuu

SEQ ID NO: 537997 - RNA, 19 nt, Artificial Sequence
  Description of Artificial Sequence: Synthetic oligonucleotide
  Sense strand starting at position 2917 of SEQ ID NO: 318117
ugaucugcuucucugggau

SEQ ID NO: 537998 - RNA, 19 nt, Artificial Sequence
  Description of Artificial Sequence: Synthetic oligonucleotide
  Antisense strand to SEQ ID NO: 537997
aucccagagaagcagauca

SEQ ID NO: 537999 - RNA, 19 nt, Artificial Sequence
  Description of Artificial Sequence: Synthetic oligonucleotide
  Sense strand starting at position 2941 of SEQ ID NO: 318117
agaggaauccguugcuuaa

SEQ ID NO: 538000 - RNA, 19 nt, Artificial Sequence
  Description of Artificial Sequence: Synthetic oligonucleotide
  Antisense strand to SEQ ID NO: 537999
uuaagcaacggauuccucu

SEQ ID NO: 538001 - RNA, 19 nt, Artificial Sequence
  Description of Artificial Sequence: Synthetic oligonucleotide
  Sense strand starting at position 2943 of SEQ ID NO: 318117
aggaauccguugcuuaaga

SEQ ID NO: 538002 - RNA, 19 nt, Artificial Sequence
  Description of Artificial Sequence: Synthetic oligonucleotide
  Antisense strand to SEQ ID NO: 538001
ucuuaagcaacggauuccu

SEQ ID NO: 538003 - RNA, 19 nt, Artificial Sequence
  Description of Artificial Sequence: Synthetic oligonucleotide
  Sense strand starting at position 2945 of SEQ ID NO: 318117
gaauccguugcuuaagaga

SEQ ID NO: 538004 - RNA, 19 nt, Artificial Sequence
  Description of Artificial Sequence: Synthetic oligonucleotide
  Antisense strand to SEQ ID NO: 538003
ucucuuaagcaacggauuc

SEQ ID NO: 538005 - RNA, 19 nt, Artificial Sequence
  Description of Artificial Sequence: Synthetic oligonucleotide
  Sense strand starting at position 2978 of SEQ ID NO: 318117
ugaguugacaaaugccaga

SEQ ID NO: 538006 - RNA, 19 nt, Artificial Sequence
  Description of Artificial Sequence: Synthetic oligonucleotide
  Antisense strand to SEQ ID NO: 538005
ucuggcauuugucaacuca

SEQ ID NO: 538007 - RNA, 19 nt, Artificial Sequence
  Description of Artificial Sequence: Synthetic oligonucleotide
  Sense strand starting at position 3220 of SEQ ID NO: 318117
guagcucuagcaggaaaua

SEQ ID NO: 538008 - RNA, 19 nt, Artificial Sequence
  Description of Artificial Sequence: Synthetic oligonucleotide
  Antisense strand to SEQ ID NO: 538007
uauuuccugcuagagcuac

SEQ ID NO: 538009 - RNA, 19 nt, Artificial Sequence
  Description of Artificial Sequence: Synthetic oligonucleotide
  Sense strand starting at position 3275 of SEQ ID NO: 318117
cguguuaugcacucucugu

SEQ ID NO: 538010 - RNA, 19 nt, Artificial Sequence
  Description of Artificial Sequence: Synthetic oligonucleotide
  Antisense strand to SEQ ID NO: 538009
acagagagugcauaacacg

SEQ ID NO: 538011 - RNA, 19 nt, Artificial Sequence
  Description of Artificial Sequence: Synthetic oligonucleotide
  Sense strand starting at position 3291 of SEQ ID NO: 318117
ugucuuaagaguugaaggu

SEQ ID NO: 538012 - RNA, 19 nt, Artificial Sequence
  Description of Artificial Sequence: Synthetic oligonucleotide
  Antisense strand to SEQ ID NO: 538011
accuucaacucuuaagaca

SEQ ID NO: 538013 - RNA, 19 nt, Artificial Sequence
  Description of Artificial Sequence: Synthetic oligonucleotide
  Sense strand starting at position 3640 of SEQ ID NO: 318117
gagaguguuaauggcacuu

SEQ ID NO: 538014 - RNA, 19 nt, Artificial Sequence
  Description of Artificial Sequence: Synthetic oligonucleotide
  Antisense strand to SEQ ID NO: 538013
aagugccauuaacacucuc

SEQ ID NO: 538015 - RNA, 19 nt, Artificial Sequence
  Description of Artificial Sequence: Synthetic oligonucleotide
  Sense strand starting at position 3815 of SEQ ID NO: 318117
gacacucaguccuuguuga

SEQ ID NO: 538016 - RNA, 19 nt, Artificial Sequence
  Description of Artificial Sequence: Synthetic oligonucleotide
  Antisense strand to SEQ ID NO: 538015
ucaacaaggacugaguguc

SEQ ID NO: 538017 - RNA, 19 nt, Artificial Sequence
  Description of Artificial Sequence: Synthetic oligonucleotide
  Sense strand starting at position 3828 of SEQ ID NO: 318117
uguugagaaucaguuuauc

SEQ ID NO: 538018 - RNA, 19 nt, Artificial Sequence
  Description of Artificial Sequence: Synthetic oligonucleotide
  Antisense strand to SEQ ID NO: 538017
gauaaacugauucucaaca

SEQ ID NO: 538019 - RNA, 19 nt, Artificial Sequence
  Description of Artificial Sequence: Synthetic oligonucleotide
  Sense strand starting at position 3866 of SEQ ID NO: 318117
ugcagaaucuuaguggaau

SEQ ID NO: 538020 - RNA, 19 nt, Artificial Sequence
  Description of Artificial Sequence: Synthetic oligonucleotide
  Antisense strand to SEQ ID NO: 538019
auuccacuaagauucugca

SEQ ID NO: 538021 - RNA, 19 nt, Artificial Sequence
  Description of Artificial Sequence: Synthetic oligonucleotide
  Sense strand starting at position 3880 of SEQ ID NO: 318117
ggaauugaggcaugaggca

SEQ ID NO: 538022 - RNA, 19 nt, Artificial Sequence
  Description of Artificial Sequence: Synthetic oligonucleotide
  Antisense strand to SEQ ID NO: 538021
ugccucaugccucaauucc

SEQ ID NO: 538023 - RNA, 19 nt, Artificial Sequence
  Description of Artificial Sequence: Synthetic oligonucleotide
  Sense strand starting at position 65 of SEQ ID NO: 318118
gcgucaguugaacaagacu

SEQ ID NO: 538024 - RNA, 19 nt, Artificial Sequence
  Description of Artificial Sequence: Synthetic oligonucleotide
  Antisense strand to SEQ ID NO: 538023
agucuuguucaacugacgc

SEQ ID NO: 538025 - RNA, 19 nt, Artificial Sequence
  Description of Artificial Sequence: Synthetic oligonucleotide
  Sense strand starting at position 504 of SEQ ID NO: 318118
ucuggaaacuuggcuuauu

SEQ ID NO: 538026 - RNA, 19 nt, Artificial Sequence
  Description of Artificial Sequence: Synthetic oligonucleotide
  Antisense strand to SEQ ID NO: 538025
aauaagccaaguuuccaga

SEQ ID NO: 538027 - RNA, 19 nt, Artificial Sequence
  Description of Artificial Sequence: Synthetic oligonucleotide
  Sense strand starting at position 536 of SEQ ID NO: 318118
ucucuaauggucugaugag

SEQ ID NO: 538028 - RNA, 19 nt, Artificial Sequence
  Description of Artificial Sequence: Synthetic oligonucleotide
  Antisense strand to SEQ ID NO: 538027
cucaucagaccauuagaga

SEQ ID NO: 538029 - RNA, 19 nt, Artificial Sequence
  Description of Artificial Sequence: Synthetic oligonucleotide
  Sense strand starting at position 562 of SEQ ID NO: 318118
ccugcacugagugaguuua

SEQ ID NO: 538030 - RNA, 19 nt, Artificial Sequence
  Description of Artificial Sequence: Synthetic oligonucleotide
  Antisense strand to SEQ ID NO: 538029
uaaacucacucagugcagg

SEQ ID NO: 538031 - RNA, 19 nt, Artificial Sequence
  Description of Artificial Sequence: Synthetic oligonucleotide
  Sense strand starting at position 564 of SEQ ID NO: 318118
ugcacugagugaguuuaua

SEQ ID NO: 538032 - RNA, 19 nt, Artificial Sequence
  Description of Artificial Sequence: Synthetic oligonucleotide
  Antisense strand to SEQ ID NO: 538031
uauaaacucacucagugca

SEQ ID NO: 538033 - RNA, 19 nt, Artificial Sequence
  Description of Artificial Sequence: Synthetic oligonucleotide
  Sense strand starting at position 616 of SEQ ID NO: 318118
ggguucaguguagauauga

SEQ ID NO: 538034 - RNA, 19 nt, Artificial Sequence
  Description of Artificial Sequence: Synthetic oligonucleotide
  Antisense strand to SEQ ID NO: 538033
ucauaucuacacugaaccc

SEQ ID NO: 538035 - RNA, 19 nt, Artificial Sequence
  Description of Artificial Sequence: Synthetic oligonucleotide
  Sense strand starting at position 671 of SEQ ID NO: 318118
gaaccuuuggcgggaggaa

SEQ ID NO: 538036 - RNA, 19 nt, Artificial Sequence
  Description of Artificial Sequence: Synthetic oligonucleotide
  Antisense strand to SEQ ID NO: 538035
uuccucccgccaaagguuc

SEQ ID NO: 538037 - RNA, 19 nt, Artificial Sequence
  Description of Artificial Sequence: Synthetic oligonucleotide
  Sense strand starting at position 745 of SEQ ID NO: 318118
ucagcuaucauaggaggga

SEQ ID NO: 538038 - RNA, 19 nt, Artificial Sequence
  Description of Artificial Sequence: Synthetic oligonucleotide
  Antisense strand to SEQ ID NO: 538037
ucccuccuaugauagcuga

SEQ ID NO: 538039 - RNA, 19 nt, Artificial Sequence
  Description of Artificial Sequence: Synthetic oligonucleotide
  Sense strand starting at position 816 of SEQ ID NO: 318118
ucugaaguuccaggauaua

SEQ ID NO: 538040 - RNA, 19 nt, Artificial Sequence
  Description of Artificial Sequence: Synthetic oligonucleotide
  Antisense strand to SEQ ID NO: 538039
uauauccuggaacuucaga

SEQ ID NO: 538041 - RNA, 19 nt, Artificial Sequence
  Description of Artificial Sequence: Synthetic oligonucleotide
  Sense strand starting at position 866 of SEQ ID NO: 318118
gggauagauucagagaaga

SEQ ID NO: 538042 - RNA, 19 nt, Artificial Sequence
  Description of Artificial Sequence: Synthetic oligonucleotide
  Antisense strand to SEQ ID NO: 538041
ucuucucugaaucuauccc

SEQ ID NO: 538043 - RNA, 19 nt, Artificial Sequence
  Description of Artificial Sequence: Synthetic oligonucleotide
  Sense strand starting at position 972 of SEQ ID NO: 318118
aauagaguacauuguugaa

SEQ ID NO: 538044 - RNA, 19 nt, Artificial Sequence
  Description of Artificial Sequence: Synthetic oligonucleotide
  Antisense strand to SEQ ID NO: 538043
uucaacaauguacucuauu

SEQ ID NO: 538045 - RNA, 19 nt, Artificial Sequence
  Description of Artificial Sequence: Synthetic oligonucleotide
  Sense strand starting at position 974 of SEQ ID NO: 318118
uagaguacauuguugaaca

SEQ ID NO: 538046 - RNA, 19 nt, Artificial Sequence
  Description of Artificial Sequence: Synthetic oligonucleotide
  Antisense strand to SEQ ID NO: 538045
uguucaacaauguacucua

SEQ ID NO: 538047 - RNA, 19 nt, Artificial Sequence
  Description of Artificial Sequence: Synthetic oligonucleotide
  Sense strand starting at position 976 of SEQ ID NO: 318118
gaguacauuguugaacagu

SEQ ID NO: 538048 - RNA, 19 nt, Artificial Sequence
  Description of Artificial Sequence: Synthetic oligonucleotide
  Antisense strand to SEQ ID NO: 538047
acuguucaacaauguacuc

SEQ ID NO: 538049 - RNA, 19 nt, Artificial Sequence
  Description of Artificial Sequence: Synthetic oligonucleotide
  Sense strand starting at position 1018 of SEQ ID NO: 318118
uucugagguccucagacau

SEQ ID NO: 538050 - RNA, 19 nt, Artificial Sequence
  Description of Artificial Sequence: Synthetic oligonucleotide
  Antisense strand to SEQ ID NO: 538049
augucugaggaccucagaa

SEQ ID NO: 538051 - RNA, 19 nt, Artificial Sequence
  Description of Artificial Sequence: Synthetic oligonucleotide
  Sense strand starting at position 1024 of SEQ ID NO: 318118
gguccucagacauggaauc

SEQ ID NO: 538052 - RNA, 19 nt, Artificial Sequence
  Description of Artificial Sequence: Synthetic oligonucleotide
  Antisense strand to SEQ ID NO: 538051
gauuccaugucugaggacc

SEQ ID NO: 538053 - RNA, 19 nt, Artificial Sequence
  Description of Artificial Sequence: Synthetic oligonucleotide
  Sense strand starting at position 1025 of SEQ ID NO: 318118
guccucagacauggaauca

SEQ ID NO: 538054 - RNA, 19 nt, Artificial Sequence
  Description of Artificial Sequence: Synthetic oligonucleotide
  Antisense strand to SEQ ID NO: 538053
ugauuccaugucugaggac

SEQ ID NO: 538055 - RNA, 19 nt, Artificial Sequence
  Description of Artificial Sequence: Synthetic oligonucleotide
  Sense strand starting at position 1135 of SEQ ID NO: 318118
ugccauauugaguaucaga

SEQ ID NO: 538056 - RNA, 19 nt, Artificial Sequence
  Description of Artificial Sequence: Synthetic oligonucleotide
  Antisense strand to SEQ ID NO: 538055
ucugauacucaauauggca

SEQ ID NO: 538057 - RNA, 19 nt, Artificial Sequence
  Description of Artificial Sequence: Synthetic oligonucleotide
  Sense strand starting at position 1227 of SEQ ID NO: 318118
gaaaguuuggagcagaagu

SEQ ID NO: 538058 - RNA, 19 nt, Artificial Sequence
  Description of Artificial Sequence: Synthetic oligonucleotide
  Antisense strand to SEQ ID NO: 538057
acuucugcuccaaacuuuc

SEQ ID NO: 538059 - RNA, 19 nt, Artificial Sequence
  Description of Artificial Sequence: Synthetic oligonucleotide
  Sense strand starting at position 1372 of SEQ ID NO: 318118
cgcuuacuaccagaguaac

SEQ ID NO: 538060 - RNA, 19 nt, Artificial Sequence
  Description of Artificial Sequence: Synthetic oligonucleotide
  Antisense strand to SEQ ID NO: 538059
guuacucugguaguaagcg

SEQ ID NO: 538061 - RNA, 19 nt, Artificial Sequence
  Description of Artificial Sequence: Synthetic oligonucleotide
  Sense strand starting at position 1755 of SEQ ID NO: 318118
ggucaagucugagcacaca

SEQ ID NO: 538062 - RNA, 19 nt, Artificial Sequence
  Description of Artificial Sequence: Synthetic oligonucleotide
  Antisense strand to SEQ ID NO: 538061
ugugugcucagacuugacc

SEQ ID NO: 538063 - RNA, 19 nt, Artificial Sequence
  Description of Artificial Sequence: Synthetic oligonucleotide
  Sense strand starting at position 1913 of SEQ ID NO: 318118
gaaagaucagccugguaua

SEQ ID NO: 538064 - RNA, 19 nt, Artificial Sequence
  Description of Artificial Sequence: Synthetic oligonucleotide
  Antisense strand to SEQ ID NO: 538063
uauaccaggcugaucuuuc

SEQ ID NO: 538065 - RNA, 19 nt, Artificial Sequence
  Description of Artificial Sequence: Synthetic oligonucleotide
  Sense strand starting at position 1914 of SEQ ID NO: 318118
aaagaucagccugguauau

SEQ ID NO: 538066 - RNA, 19 nt, Artificial Sequence
  Description of Artificial Sequence: Synthetic oligonucleotide
  Antisense strand to SEQ ID NO: 538065
auauaccaggcugaucuuu

SEQ ID NO: 538067 - RNA, 19 nt, Artificial Sequence
  Description of Artificial Sequence: Synthetic oligonucleotide
  Sense strand starting at position 1923 of SEQ ID NO: 318118
ccugguauauuuggaaaua

SEQ ID NO: 538068 - RNA, 19 nt, Artificial Sequence
  Description of Artificial Sequence: Synthetic oligonucleotide
  Antisense strand to SEQ ID NO: 538067
uauuuccaaauauaccagg

SEQ ID NO: 538069 - RNA, 19 nt, Artificial Sequence
  Description of Artificial Sequence: Synthetic oligonucleotide
  Sense strand starting at position 1924 of SEQ ID NO: 318118
cugguauauuuggaaauau

SEQ ID NO: 538070 - RNA, 19 nt, Artificial Sequence
  Description of Artificial Sequence: Synthetic oligonucleotide
  Antisense strand to SEQ ID NO: 538069
auauuuccaaauauaccag

SEQ ID NO: 538071 - RNA, 19 nt, Artificial Sequence
  Description of Artificial Sequence: Synthetic oligonucleotide
  Sense strand starting at position 2185 of SEQ ID NO: 318118
ccaaacuuaucguuaaaug

SEQ ID NO: 538072 - RNA, 19 nt, Artificial Sequence
  Description of Artificial Sequence: Synthetic oligonucleotide
  Antisense strand to SEQ ID NO: 538071
cauuuaacgauaaguuugg

SEQ ID NO: 538073 - RNA, 19 nt, Artificial Sequence
  Description of Artificial Sequence: Synthetic oligonucleotide
  Sense strand starting at position 2243 of SEQ ID NO: 318118
ccuacuuugcuuuagggua

SEQ ID NO: 538074 - RNA, 19 nt, Artificial Sequence
  Description of Artificial Sequence: Synthetic oligonucleotide
  Antisense strand to SEQ ID NO: 538073
uacccuaaagcaaaguagg

SEQ ID NO: 538075 - RNA, 19 nt, Artificial Sequence
  Description of Artificial Sequence: Synthetic oligonucleotide
  Sense strand starting at position 2248 of SEQ ID NO: 318118
uuugcuuuaggguagugau

SEQ ID NO: 538076 - RNA, 19 nt, Artificial Sequence
  Description of Artificial Sequence: Synthetic oligonucleotide
  Antisense strand to SEQ ID NO: 538075
aucacuacccuaaagcaaa

SEQ ID NO: 538077 - RNA, 19 nt, Artificial Sequence
  Description of Artificial Sequence: Synthetic oligonucleotide
  Sense strand starting at position 2256 of SEQ ID NO: 318118
aggguagugaugggaguua

SEQ ID NO: 538078 - RNA, 19 nt, Artificial Sequence
  Description of Artificial Sequence: Synthetic oligonucleotide
  Antisense strand to SEQ ID NO: 538077
uaacucccaucacuacccu

SEQ ID NO: 538079 - RNA, 19 nt, Artificial Sequence
  Description of Artificial Sequence: Synthetic oligonucleotide
  Sense strand starting at position 2345 of SEQ ID NO: 318118
uagugagagcuccacaacu

SEQ ID NO: 538080 - RNA, 19 nt, Artificial Sequence
  Description of Artificial Sequence: Synthetic oligonucleotide
  Antisense strand to SEQ ID NO: 538079
aguuguggagcucucacua

SEQ ID NO: 538081 - RNA, 19 nt, Artificial Sequence
  Description of Artificial Sequence: Synthetic oligonucleotide
  Sense strand starting at position 2505 of SEQ ID NO: 318118
ucaucuguaaaguggaagu

SEQ ID NO: 538082 - RNA, 19 nt, Artificial Sequence
  Description of Artificial Sequence: Synthetic oligonucleotide
  Antisense strand to SEQ ID NO: 538081
acuuccacuuuacagauga

SEQ ID NO: 538083 - RNA, 19 nt, Artificial Sequence
  Description of Artificial Sequence: Synthetic oligonucleotide
  Sense strand starting at position 2585 of SEQ ID NO: 318118
uugggaugccaagguagau

SEQ ID NO: 538084 - RNA, 19 nt, Artificial Sequence
  Description of Artificial Sequence: Synthetic oligonucleotide
  Antisense strand to SEQ ID NO: 538083
aucuaccuuggcaucccaa

SEQ ID NO: 538085 - RNA, 19 nt, Artificial Sequence
  Description of Artificial Sequence: Synthetic oligonucleotide
  Sense strand starting at position 2898 of SEQ ID NO: 318118
gggcuuuccuaaguaucag

SEQ ID NO: 538086 - RNA, 19 nt, Artificial Sequence
  Description of Artificial Sequence: Synthetic oligonucleotide
  Antisense strand to SEQ ID NO: 538085
cugauacuuaggaaagccc

SEQ ID NO: 538087 - RNA, 19 nt, Artificial Sequence
  Description of Artificial Sequence: Synthetic oligonucleotide
  Sense strand starting at position 3063 of SEQ ID NO: 318118
cuuggucugucucugauga

SEQ ID NO: 538088 - RNA, 19 nt, Artificial Sequence
  Description of Artificial Sequence: Synthetic oligonucleotide
  Antisense strand to SEQ ID NO: 538087
ucaucagagacagaccaag

SEQ ID NO: 538089 - RNA, 19 nt, Artificial Sequence
  Description of Artificial Sequence: Synthetic oligonucleotide
  Sense strand starting at position 3344 of SEQ ID NO: 318118
agacuacagugucuguuua

SEQ ID NO: 538090 - RNA, 19 nt, Artificial Sequence
  Description of Artificial Sequence: Synthetic oligonucleotide
  Antisense strand to SEQ ID NO: 538089
uaaacagacacuguagucu

SEQ ID NO: 538091 - RNA, 19 nt, Artificial Sequence
  Description of Artificial Sequence: Synthetic oligonucleotide
  Sense strand starting at position 3345 of SEQ ID NO: 318118
gacuacagugucuguuuaa

SEQ ID NO: 538092 - RNA, 19 nt, Artificial Sequence
  Description of Artificial Sequence: Synthetic oligonucleotide
  Antisense strand to SEQ ID NO: 538091
uuaaacagacacuguaguc

SEQ ID NO: 538093 - RNA, 19 nt, Artificial Sequence
  Description of Artificial Sequence: Synthetic oligonucleotide
  Sense strand starting at position 3356 of SEQ ID NO: 318118
cuguuuaaugggcaccaua

SEQ ID NO: 538094 - RNA, 19 nt, Artificial Sequence
  Description of Artificial Sequence: Synthetic oligonucleotide
  Antisense strand to SEQ ID NO: 538093
uauggugcccauuaaacag

SEQ ID NO: 538095 - RNA, 19 nt, Artificial Sequence
  Description of Artificial Sequence: Synthetic oligonucleotide
  Sense strand starting at position 3426 of SEQ ID NO: 318118
ggauguaggaucuggaauu

SEQ ID NO: 538096 - RNA, 19 nt, Artificial Sequence
  Description of Artificial Sequence: Synthetic oligonucleotide
  Antisense strand to SEQ ID NO: 538095
aauuccagauccuacaucc

SEQ ID NO: 538097 - RNA, 19 nt, Artificial Sequence
  Description of Artificial Sequence: Synthetic oligonucleotide
  Sense strand starting at position 3470 of SEQ ID NO: 318118
ggaugauccucuguccacu

SEQ ID NO: 538098 - RNA, 19 nt, Artificial Sequence
  Description of Artificial Sequence: Synthetic oligonucleotide
  Antisense strand to SEQ ID NO: 538097
aguggacagaggaucaucc

SEQ ID NO: 538099 - RNA, 19 nt, Artificial Sequence
  Description of Artificial Sequence: Synthetic oligonucleotide
  Sense strand starting at position 3631 of SEQ ID NO: 318118
guuauuaagggcuacauau

SEQ ID NO: 538100 - RNA, 19 nt, Artificial Sequence
  Description of Artificial Sequence: Synthetic oligonucleotide
  Antisense strand to SEQ ID NO: 538099
auauguagcccuuaauaac

SEQ ID NO: 538101 - RNA, 19 nt, Artificial Sequence
  Description of Artificial Sequence: Synthetic oligonucleotide
  Sense strand starting at position 3782 of SEQ ID NO: 318118
cgaggguuugugggugaaa

SEQ ID NO: 538102 - RNA, 19 nt, Artificial Sequence
  Description of Artificial Sequence: Synthetic oligonucleotide
  Antisense strand to SEQ ID NO: 538101
uuucacccacaaacccucg

SEQ ID NO: 538103 - RNA, 19 nt, Artificial Sequence
  Description of Artificial Sequence: Synthetic oligonucleotide
  Sense strand starting at position 6 of SEQ ID NO: 318119
gagcauaacuggccuuaag

SEQ ID NO: 538104 - RNA, 19 nt, Artificial Sequence
  Description of Artificial Sequence: Synthetic oligonucleotide
  Antisense strand to SEQ ID NO: 538103
cuuaaggccaguuaugcuc

SEQ ID NO: 538105 - RNA, 19 nt, Artificial Sequence
  Description of Artificial Sequence: Synthetic oligonucleotide
  Sense strand starting at position 174 of SEQ ID NO: 318119
aggugcuaacgguaacaau

SEQ ID NO: 538106 - RNA, 19 nt, Artificial Sequence
  Description of Artificial Sequence: Synthetic oligonucleotide
  Antisense strand to SEQ ID NO: 538105
auuguuaccguuagcaccu

SEQ ID NO: 538107 - RNA, 19 nt, Artificial Sequence
  Description of Artificial Sequence: Synthetic oligonucleotide
  Sense strand starting at position 194 of SEQ ID NO: 318119
cagcaugugucuucuguaa

SEQ ID NO: 538108 - RNA, 19 nt, Artificial Sequence
  Description of Artificial Sequence: Synthetic oligonucleotide
  Antisense strand to SEQ ID NO: 538107
uuacagaagacacaugcug

SEQ ID NO: 538109 - RNA, 19 nt, Artificial Sequence
  Description of Artificial Sequence: Synthetic oligonucleotide
  Sense strand starting at position 279 of SEQ ID NO: 318119
agggcuuugggucauucau

SEQ ID NO: 538110 - RNA, 19 nt, Artificial Sequence
  Description of Artificial Sequence: Synthetic oligonucleotide
  Antisense strand to SEQ ID NO: 538109
augaaugacccaaagcccu

SEQ ID NO: 538111 - RNA, 19 nt, Artificial Sequence
  Description of Artificial Sequence: Synthetic oligonucleotide
  Sense strand starting at position 306 of SEQ ID NO: 318119
ggaccuaaguuaccuguau

SEQ ID NO: 538112 - RNA, 19 nt, Artificial Sequence
  Description of Artificial Sequence: Synthetic oligonucleotide
  Antisense strand to SEQ ID NO: 538111
auacagguaacuuaggucc

SEQ ID NO: 538113 - RNA, 19 nt, Artificial Sequence
  Description of Artificial Sequence: Synthetic oligonucleotide
  Sense strand starting at position 554 of SEQ ID NO: 318119
ggcucugugaucugucaga

SEQ ID NO: 538114 - RNA, 19 nt, Artificial Sequence
  Description of Artificial Sequence: Synthetic oligonucleotide
  Antisense strand to SEQ ID NO: 538113
ucugacagaucacagagcc

SEQ ID NO: 538115 - RNA, 19 nt, Artificial Sequence
  Description of Artificial Sequence: Synthetic oligonucleotide
  Sense strand starting at position 836 of SEQ ID NO: 318119
acucuuaacugccucgaga

SEQ ID NO: 538116 - RNA, 19 nt, Artificial Sequence
  Description of Artificial Sequence: Synthetic oligonucleotide
  Antisense strand to SEQ ID NO: 538115
ucucgaggcaguuaagagu

SEQ ID NO: 538117 - RNA, 19 nt, Artificial Sequence
  Description of Artificial Sequence: Synthetic oligonucleotide
  Sense strand starting at position 838 of SEQ ID NO: 318119
ucuuaacugccucgagaac

SEQ ID NO: 538118 - RNA, 19 nt, Artificial Sequence
  Description of Artificial Sequence: Synthetic oligonucleotide
  Antisense strand to SEQ ID NO: 538117
guucucgaggcaguuaaga

SEQ ID NO: 538119 - RNA, 19 nt, Artificial Sequence
  Description of Artificial Sequence: Synthetic oligonucleotide
  Sense strand starting at position 839 of SEQ ID NO: 318119
cuuaacugccucgagaacu

SEQ ID NO: 538120 - RNA, 19 nt, Artificial Sequence
  Description of Artificial Sequence: Synthetic oligonucleotide
  Antisense strand to SEQ ID NO: 538119
aguucucgaggcaguuaag

SEQ ID NO: 538121 - RNA, 19 nt, Artificial Sequence
  Description of Artificial Sequence: Synthetic oligonucleotide
  Sense strand starting at position 883 of SEQ ID NO: 318119
cuccgaguuguuuagcuga

SEQ ID NO: 538122 - RNA, 19 nt, Artificial Sequence
  Description of Artificial Sequence: Synthetic oligonucleotide
  Antisense strand to SEQ ID NO: 538121
ucagcuaaacaacucggag

SEQ ID NO: 538123 - RNA, 19 nt, Artificial Sequence
  Description of Artificial Sequence: Synthetic oligonucleotide
  Sense strand starting at position 885 of SEQ ID NO: 318119
ccgaguuguuuagcugacu

SEQ ID NO: 538124 - RNA, 19 nt, Artificial Sequence
  Description of Artificial Sequence: Synthetic oligonucleotide
  Antisense strand to SEQ ID NO: 538123
agucagcuaaacaacucgg

SEQ ID NO: 538125 - RNA, 19 nt, Artificial Sequence
  Description of Artificial Sequence: Synthetic oligonucleotide
  Sense strand starting at position 886 of SEQ ID NO: 318119
cgaguuguuuagcugacua

SEQ ID NO: 538126 - RNA, 19 nt, Artificial Sequence
  Description of Artificial Sequence: Synthetic oligonucleotide
  Antisense strand to SEQ ID NO: 538125
uagucagcuaaacaacucg

SEQ ID NO: 538127 - RNA, 19 nt, Artificial Sequence
  Description of Artificial Sequence: Synthetic oligonucleotide
  Sense strand starting at position 903 of SEQ ID NO: 318119
uacggaugcgcguccuaga

SEQ ID NO: 538128 - RNA, 19 nt, Artificial Sequence
  Description of Artificial Sequence: Synthetic oligonucleotide
  Antisense strand to SEQ ID NO: 538127
ucuaggacgcgcauccgua

SEQ ID NO: 538129 - RNA, 19 nt, Artificial Sequence
  Description of Artificial Sequence: Synthetic oligonucleotide
  Sense strand starting at position 2177 of SEQ ID NO: 318119
ccaugucagggcuguuaaa

SEQ ID NO: 538130 - RNA, 19 nt, Artificial Sequence
  Description of Artificial Sequence: Synthetic oligonucleotide
  Antisense strand to SEQ ID NO: 538129
uuuaacagcccugacaugg

SEQ ID NO: 538131 - RNA, 19 nt, Artificial Sequence
  Description of Artificial Sequence: Synthetic oligonucleotide
  Sense strand starting at position 2404 of SEQ ID NO: 318119
guguguggcagagaaagau

SEQ ID NO: 538132 - RNA, 19 nt, Artificial Sequence
  Description of Artificial Sequence: Synthetic oligonucleotide
  Antisense strand to SEQ ID NO: 538131
aucuuucucugccacacac

SEQ ID NO: 538133 - RNA, 19 nt, Artificial Sequence
  Description of Artificial Sequence: Synthetic oligonucleotide
  Sense strand starting at position 2487 of SEQ ID NO: 318119
agggauuccgccugcugau

SEQ ID NO: 538134 - RNA, 19 nt, Artificial Sequence
  Description of Artificial Sequence: Synthetic oligonucleotide
  Antisense strand to SEQ ID NO: 538133
aucagcaggcggaaucccu

SEQ ID NO: 538135 - RNA, 19 nt, Artificial Sequence
  Description of Artificial Sequence: Synthetic oligonucleotide
  Sense strand starting at position 2499 of SEQ ID NO: 318119
ugcugauugcguggagaug

SEQ ID NO: 538136 - RNA, 19 nt, Artificial Sequence
  Description of Artificial Sequence: Synthetic oligonucleotide
  Antisense strand to SEQ ID NO: 538135
caucuccacgcaaucagca

SEQ ID NO: 538137 - RNA, 19 nt, Artificial Sequence
  Description of Artificial Sequence: Synthetic oligonucleotide
  Sense strand starting at position 2761 of SEQ ID NO: 318119
ccgcuucucccagaucauc

SEQ ID NO: 538138 - RNA, 19 nt, Artificial Sequence
  Description of Artificial Sequence: Synthetic oligonucleotide
  Antisense strand to SEQ ID NO: 538137
gaugaucugggagaagcgg

SEQ ID NO: 538139 - RNA, 19 nt, Artificial Sequence
  Description of Artificial Sequence: Synthetic oligonucleotide
  Sense strand starting at position 2772 of SEQ ID NO: 318119
agaucaucccgccgagagu

SEQ ID NO: 538140 - RNA, 19 nt, Artificial Sequence
  Description of Artificial Sequence: Synthetic oligonucleotide
  Antisense strand to SEQ ID NO: 538139
acucucggcgggaugaucu

SEQ ID NO: 538141 - RNA, 19 nt, Artificial Sequence
  Description of Artificial Sequence: Synthetic oligonucleotide
  Sense strand starting at position 3174 of SEQ ID NO: 318119
gcgccuucuccagaacaug

SEQ ID NO: 538142 - RNA, 19 nt, Artificial Sequence
  Description of Artificial Sequence: Synthetic oligonucleotide
  Antisense strand to SEQ ID NO: 538141
cauguucuggagaaggcgc

SEQ ID NO: 538143 - RNA, 19 nt, Artificial Sequence
  Description of Artificial Sequence: Synthetic oligonucleotide
  Sense strand starting at position 3415 of SEQ ID NO: 318119
gcaaauaucgagcaucuuu

SEQ ID NO: 538144 - RNA, 19 nt, Artificial Sequence
  Description of Artificial Sequence: Synthetic oligonucleotide
  Antisense strand to SEQ ID NO: 538143
aaagaugcucgauauuugc

SEQ ID NO: 538145 - RNA, 19 nt, Artificial Sequence
  Description of Artificial Sequence: Synthetic oligonucleotide
  Sense strand starting at position 3509 of SEQ ID NO: 318119
cagggaaauuaagaaugau

SEQ ID NO: 538146 - RNA, 19 nt, Artificial Sequence
  Description of Artificial Sequence: Synthetic oligonucleotide
  Antisense strand to SEQ ID NO: 538145
aucauucuuaauuucccug

SEQ ID NO: 538147 - RNA, 19 nt, Artificial Sequence
  Description of Artificial Sequence: Synthetic oligonucleotide
  Sense strand starting at position 3521 of SEQ ID NO: 318119
gaaugauagcuugggcuga

SEQ ID NO: 538148 - RNA, 19 nt, Artificial Sequence
  Description of Artificial Sequence: Synthetic oligonucleotide
  Antisense strand to SEQ ID NO: 538147
ucagcccaagcuaucauuc

SEQ ID NO: 538149 - RNA, 19 nt, Artificial Sequence
  Description of Artificial Sequence: Synthetic oligonucleotide
  Sense strand starting at position 3523 of SEQ ID NO: 318119
augauagcuugggcugaau

SEQ ID NO: 538150 - RNA, 19 nt, Artificial Sequence
  Description of Artificial Sequence: Synthetic oligonucleotide
  Antisense strand to SEQ ID NO: 538149
auucagcccaagcuaucau

SEQ ID NO: 538151 - RNA, 19 nt, Artificial Sequence
  Description of Artificial Sequence: Synthetic oligonucleotide
  Sense strand starting at position 3525 of SEQ ID NO: 318119
gauagcuugggcugaauag

SEQ ID NO: 538152 - RNA, 19 nt, Artificial Sequence
  Description of Artificial Sequence: Synthetic oligonucleotide
  Antisense strand to SEQ ID NO: 538151
cuauucagcccaagcuauc

SEQ ID NO: 538153 - RNA, 19 nt, Artificial Sequence
  Description of Artificial Sequence: Synthetic oligonucleotide
  Sense strand starting at position 3526 of SEQ ID NO: 318119
auagcuugggcugaauagu

SEQ ID NO: 538154 - RNA, 19 nt, Artificial Sequence
  Description of Artificial Sequence: Synthetic oligonucleotide
  Antisense strand to SEQ ID NO: 538153
acuauucagcccaagcuau

SEQ ID NO: 538155 - RNA, 19 nt, Artificial Sequence
  Description of Artificial Sequence: Synthetic oligonucleotide
  Sense strand starting at position 3573 of SEQ ID NO: 318119
guuggaguucgguaucauu

SEQ ID NO: 538156 - RNA, 19 nt, Artificial Sequence
  Description of Artificial Sequence: Synthetic oligonucleotide
  Antisense strand to SEQ ID NO: 538155
aaugauaccgaacuccaac

SEQ ID NO: 538157 - RNA, 19 nt, Artificial Sequence
  Description of Artificial Sequence: Synthetic oligonucleotide
  Sense strand starting at position 3628 of SEQ ID NO: 318119
ugcauuuggugucucacaa

SEQ ID NO: 538158 - RNA, 19 nt, Artificial Sequence
  Description of Artificial Sequence: Synthetic oligonucleotide
  Antisense strand to SEQ ID NO: 538157
uugugagacaccaaaugca

SEQ ID NO: 538159 - RNA, 19 nt, Artificial Sequence
  Description of Artificial Sequence: Synthetic oligonucleotide
  Sense strand starting at position 3653 of SEQ ID NO: 318119
ugugcugucuucuucuaag

SEQ ID NO: 538160 - RNA, 19 nt, Artificial Sequence
  Description of Artificial Sequence: Synthetic oligonucleotide
  Antisense strand to SEQ ID NO: 538159
cuuagaagaagacagcaca

SEQ ID NO: 538161 - RNA, 19 nt, Artificial Sequence
  Description of Artificial Sequence: Synthetic oligonucleotide
  Sense strand starting at position 3688 of SEQ ID NO: 318119
ugcacuaggugauccuuau

SEQ ID NO: 538162 - RNA, 19 nt, Artificial Sequence
  Description of Artificial Sequence: Synthetic oligonucleotide
  Antisense strand to SEQ ID NO: 538161
auaaggaucaccuagugca

SEQ ID NO: 538163 - RNA, 19 nt, Artificial Sequence
  Description of Artificial Sequence: Synthetic oligonucleotide
  Sense strand starting at position 3692 of SEQ ID NO: 318119
cuaggugauccuuauguuc

SEQ ID NO: 538164 - RNA, 19 nt, Artificial Sequence
  Description of Artificial Sequence: Synthetic oligonucleotide
  Antisense strand to SEQ ID NO: 538163
gaacauaaggaucaccuag

SEQ ID NO: 538165 - RNA, 19 nt, Artificial Sequence
  Description of Artificial Sequence: Synthetic oligonucleotide
  Sense strand starting at position 3712 of SEQ ID NO: 318119
uuguuucugcuccaucuua

SEQ ID NO: 538166 - RNA, 19 nt, Artificial Sequence
  Description of Artificial Sequence: Synthetic oligonucleotide
  Antisense strand to SEQ ID NO: 538165
uaagauggagcagaaacaa

SEQ ID NO: 538167 - RNA, 19 nt, Artificial Sequence
  Description of Artificial Sequence: Synthetic oligonucleotide
  Sense strand starting at position 3741 of SEQ ID NO: 318119
uuugcauuucuuugugaau

SEQ ID NO: 538168 - RNA, 19 nt, Artificial Sequence
  Description of Artificial Sequence: Synthetic oligonucleotide
  Antisense strand to SEQ ID NO: 538167
auucacaaagaaaugcaaa

SEQ ID NO: 538169 - RNA, 19 nt, Artificial Sequence
  Description of Artificial Sequence: Synthetic oligonucleotide
  Sense strand starting at position 3791 of SEQ ID NO: 318119
aagaaauuggcccguugaa

SEQ ID NO: 538170 - RNA, 19 nt, Artificial Sequence
  Description of Artificial Sequence: Synthetic oligonucleotide
  Antisense strand to SEQ ID NO: 538169
uucaacgggccaauuucuu

SEQ ID NO: 538171 - RNA, 19 nt, Artificial Sequence
  Description of Artificial Sequence: Synthetic oligonucleotide
  Sense strand starting at position 3803 of SEQ ID NO: 318119
cguugaauauuuguuucca

SEQ ID NO: 538172 - RNA, 19 nt, Artificial Sequence
  Description of Artificial Sequence: Synthetic oligonucleotide
  Antisense strand to SEQ ID NO: 538171
uggaaacaaauauucaacg

SEQ ID NO: 538173 - RNA, 19 nt, Artificial Sequence
  Description of Artificial Sequence: Synthetic oligonucleotide
  Sense strand starting at position 3857 of SEQ ID NO: 318119
agacuauuacaacgaguua

SEQ ID NO: 538174 - RNA, 19 nt, Artificial Sequence
  Description of Artificial Sequence: Synthetic oligonucleotide
  Antisense strand to SEQ ID NO: 538173
uaacucguuguaauagucu

SEQ ID NO: 538175 - RNA, 19 nt, Artificial Sequence
  Description of Artificial Sequence: Synthetic oligonucleotide
  Sense strand starting at position 3868 of SEQ ID NO: 318119
acgaguuagaccuagcaau

SEQ ID NO: 538176 - RNA, 19 nt, Artificial Sequence
  Description of Artificial Sequence: Synthetic oligonucleotide
  Antisense strand to SEQ ID NO: 538175
auugcuaggucuaacucgu

SEQ ID NO: 538177 - RNA, 19 nt, Artificial Sequence
  Description of Artificial Sequence: Synthetic oligonucleotide
  Sense strand starting at position 3907 of SEQ ID NO: 318119
cucauuaggucauuaggua

SEQ ID NO: 538178 - RNA, 19 nt, Artificial Sequence
  Description of Artificial Sequence: Synthetic oligonucleotide
  Antisense strand to SEQ ID NO: 538177
uaccuaaugaccuaaugag

SEQ ID NO: 538179 - RNA, 19 nt, Artificial Sequence
  Description of Artificial Sequence: Synthetic oligonucleotide
  Sense strand starting at position 3908 of SEQ ID NO: 318119
ucauuaggucauuagguaa

SEQ ID NO: 538180 - RNA, 19 nt, Artificial Sequence
  Description of Artificial Sequence: Synthetic oligonucleotide
  Antisense strand to SEQ ID NO: 538179
uuaccuaaugaccuaauga

SEQ ID NO: 538181 - RNA, 19 nt, Artificial Sequence
  Description of Artificial Sequence: Synthetic oligonucleotide
  Sense strand starting at position 3915 of SEQ ID NO: 318119
gucauuagguaauuggaau

SEQ ID NO: 538182 - RNA, 19 nt, Artificial Sequence
  Description of Artificial Sequence: Synthetic oligonucleotide
  Antisense strand to SEQ ID NO: 538181
auuccaauuaccuaaugac

SEQ ID NO: 538183 - RNA, 19 nt, Artificial Sequence
  Description of Artificial Sequence: Synthetic oligonucleotide
  Sense strand starting at position 22 of SEQ ID NO: 318120
cugauagaauacuaugaag

SEQ ID NO: 538184 - RNA, 19 nt, Artificial Sequence
  Description of Artificial Sequence: Synthetic oligonucleotide
  Antisense strand to SEQ ID NO: 538183
cuucauaguauucuaucag

SEQ ID NO: 538185 - RNA, 19 nt, Artificial Sequence
  Description of Artificial Sequence: Synthetic oligonucleotide
  Sense strand starting at position 25 of SEQ ID NO: 318120
auagaauacuaugaagucu

SEQ ID NO: 538186 - RNA, 19 nt, Artificial Sequence
  Description of Artificial Sequence: Synthetic oligonucleotide
  Antisense strand to SEQ ID NO: 538185
agacuucauaguauucuau

SEQ ID NO: 538187 - RNA, 19 nt, Artificial Sequence
  Description of Artificial Sequence: Synthetic oligonucleotide
  Sense strand starting at position 68 of SEQ ID NO: 318120
caguuucuggcccaaagga

SEQ ID NO: 538188 - RNA, 19 nt, Artificial Sequence
  Description of Artificial Sequence: Synthetic oligonucleotide
  Antisense strand to SEQ ID NO: 538187
uccuuugggccagaaacug

SEQ ID NO: 538189 - RNA, 19 nt, Artificial Sequence
  Description of Artificial Sequence: Synthetic oligonucleotide
  Sense strand starting at position 78 of SEQ ID NO: 318120
cccaaaggaguuugagacu

SEQ ID NO: 538190 - RNA, 19 nt, Artificial Sequence
  Description of Artificial Sequence: Synthetic oligonucleotide
  Antisense strand to SEQ ID NO: 538189
agucucaaacuccuuuggg

SEQ ID NO: 538191 - RNA, 19 nt, Artificial Sequence
  Description of Artificial Sequence: Synthetic oligonucleotide
  Sense strand starting at position 81 of SEQ ID NO: 318120
aaaggaguuugagacucau

SEQ ID NO: 538192 - RNA, 19 nt, Artificial Sequence
  Description of Artificial Sequence: Synthetic oligonucleotide
  Antisense strand to SEQ ID NO: 538191
augagucucaaacuccuuu

SEQ ID NO: 538193 - RNA, 19 nt, Artificial Sequence
  Description of Artificial Sequence: Synthetic oligonucleotide
  Sense strand starting at position 85 of SEQ ID NO: 318120
gaguuugagacucaucguu

SEQ ID NO: 538194 - RNA, 19 nt, Artificial Sequence
  Description of Artificial Sequence: Synthetic oligonucleotide
  Antisense strand to SEQ ID NO: 538193
aacgaugagucucaaacuc

SEQ ID NO: 538195 - RNA, 19 nt, Artificial Sequence
  Description of Artificial Sequence: Synthetic oligonucleotide
  Sense strand starting at position 90 of SEQ ID NO: 318120
ugagacucaucguuccuau

SEQ ID NO: 538196 - RNA, 19 nt, Artificial Sequence
  Description of Artificial Sequence: Synthetic oligonucleotide
  Antisense strand to SEQ ID NO: 538195
auaggaacgaugagucuca

SEQ ID NO: 538197 - RNA, 19 nt, Artificial Sequence
  Description of Artificial Sequence: Synthetic oligonucleotide
  Sense strand starting at position 241 of SEQ ID NO: 318120
acagcuuacuuggaacaaa

SEQ ID NO: 538198 - RNA, 19 nt, Artificial Sequence
  Description of Artificial Sequence: Synthetic oligonucleotide
  Antisense strand to SEQ ID NO: 538197
uuuguuccaaguaagcugu

SEQ ID NO: 538199 - RNA, 19 nt, Artificial Sequence
  Description of Artificial Sequence: Synthetic oligonucleotide
  Sense strand starting at position 284 of SEQ ID NO: 318120
gccagccucagguaaugau

SEQ ID NO: 538200 - RNA, 19 nt, Artificial Sequence
  Description of Artificial Sequence: Synthetic oligonucleotide
  Antisense strand to SEQ ID NO: 538199
aucauuaccugaggcuggc

SEQ ID NO: 538201 - RNA, 19 nt, Artificial Sequence
  Description of Artificial Sequence: Synthetic oligonucleotide
  Sense strand starting at position 339 of SEQ ID NO: 318120
cacucacuagcuugagaga

SEQ ID NO: 538202 - RNA, 19 nt, Artificial Sequence
  Description of Artificial Sequence: Synthetic oligonucleotide
  Antisense strand to SEQ ID NO: 538201
ucucucaagcuagugagug

SEQ ID NO: 538203 - RNA, 19 nt, Artificial Sequence
  Description of Artificial Sequence: Synthetic oligonucleotide
  Sense strand starting at position 476 of SEQ ID NO: 318120
ccaauaggaucuuaggaua

SEQ ID NO: 538204 - RNA, 19 nt, Artificial Sequence
  Description of Artificial Sequence: Synthetic oligonucleotide
  Antisense strand to SEQ ID NO: 538203
uauccuaagauccuauugg

SEQ ID NO: 538205 - RNA, 19 nt, Artificial Sequence
  Description of Artificial Sequence: Synthetic oligonucleotide
  Sense strand starting at position 479 of SEQ ID NO: 318120
auaggaucuuaggauaaag

SEQ ID NO: 538206 - RNA, 19 nt, Artificial Sequence
  Description of Artificial Sequence: Synthetic oligonucleotide
  Antisense strand to SEQ ID NO: 538205
cuuuauccuaagauccuau

SEQ ID NO: 538207 - RNA, 19 nt, Artificial Sequence
  Description of Artificial Sequence: Synthetic oligonucleotide
  Sense strand starting at position 515 of SEQ ID NO: 318120
uccugcuuccagcagagaa

SEQ ID NO: 538208 - RNA, 19 nt, Artificial Sequence
  Description of Artificial Sequence: Synthetic oligonucleotide
  Antisense strand to SEQ ID NO: 538207
uucucugcuggaagcagga

SEQ ID NO: 538209 - RNA, 19 nt, Artificial Sequence
  Description of Artificial Sequence: Synthetic oligonucleotide
  Sense strand starting at position 582 of SEQ ID NO: 318120
auagcuugcccucauagga

SEQ ID NO: 538210 - RNA, 19 nt, Artificial Sequence
  Description of Artificial Sequence: Synthetic oligonucleotide
  Antisense strand to SEQ ID NO: 538209
uccuaugagggcaagcuau

SEQ ID NO: 538211 - RNA, 19 nt, Artificial Sequence
  Description of Artificial Sequence: Synthetic oligonucleotide
  Sense strand starting at position 702 of SEQ ID NO: 318120
cccggagugaucuggcauu

SEQ ID NO: 538212 - RNA, 19 nt, Artificial Sequence
  Description of Artificial Sequence: Synthetic oligonucleotide
  Antisense strand to SEQ ID NO: 538211
aaugccagaucacuccggg

SEQ ID NO: 538213 - RNA, 19 nt, Artificial Sequence
  Description of Artificial Sequence: Synthetic oligonucleotide
  Sense strand starting at position 766 of SEQ ID NO: 318120
guugcaucuaaaugggaga

SEQ ID NO: 538214 - RNA, 19 nt, Artificial Sequence
  Description of Artificial Sequence: Synthetic oligonucleotide
  Antisense strand to SEQ ID NO: 538213
ucucccauuuagaugcaac

SEQ ID NO: 538215 - RNA, 19 nt, Artificial Sequence
  Description of Artificial Sequence: Synthetic oligonucleotide
  Sense strand starting at position 824 of SEQ ID NO: 318120
agggaccuguacuuauuaa

SEQ ID NO: 538216 - RNA, 19 nt, Artificial Sequence
  Description of Artificial Sequence: Synthetic oligonucleotide
  Antisense strand to SEQ ID NO: 538215
uuaauaaguacaggucccu

SEQ ID NO: 538217 - RNA, 19 nt, Artificial Sequence
  Description of Artificial Sequence: Synthetic oligonucleotide
  Sense strand starting at position 849 of SEQ ID NO: 318120
gagaacuaaucaccggacu

SEQ ID NO: 538218 - RNA, 19 nt, Artificial Sequence
  Description of Artificial Sequence: Synthetic oligonucleotide
  Antisense strand to SEQ ID NO: 538217
aguccggugauuaguucuc

SEQ ID NO: 538219 - RNA, 19 nt, Artificial Sequence
  Description of Artificial Sequence: Synthetic oligonucleotide
  Sense strand starting at position 1047 of SEQ ID NO: 318120
gcaucaaccugacucagau

SEQ ID NO: 538220 - RNA, 19 nt, Artificial Sequence
  Description of Artificial Sequence: Synthetic oligonucleotide
  Antisense strand to SEQ ID NO: 538219
aucugagucagguugaugc

SEQ ID NO: 538221 - RNA, 19 nt, Artificial Sequence
  Description of Artificial Sequence: Synthetic oligonucleotide
  Sense strand starting at position 1061 of SEQ ID NO: 318120
cagauaugguaggaauguu

SEQ ID NO: 538222 - RNA, 19 nt, Artificial Sequence
  Description of Artificial Sequence: Synthetic oligonucleotide
  Antisense strand to SEQ ID NO: 538221
aacauuccuaccauaucug

SEQ ID NO: 538223 - RNA, 19 nt, Artificial Sequence
  Description of Artificial Sequence: Synthetic oligonucleotide
  Sense strand starting at position 1081 of SEQ ID NO: 318120
ggguuaucagacugggauu

SEQ ID NO: 538224 - RNA, 19 nt, Artificial Sequence
  Description of Artificial Sequence: Synthetic oligonucleotide
  Antisense strand to SEQ ID NO: 538223
aaucccagucugauaaccc

SEQ ID NO: 538225 - RNA, 19 nt, Artificial Sequence
  Description of Artificial Sequence: Synthetic oligonucleotide
  Sense strand starting at position 1084 of SEQ ID NO: 318120
uuaucagacugggauuuaa

SEQ ID NO: 538226 - RNA, 19 nt, Artificial Sequence
  Description of Artificial Sequence: Synthetic oligonucleotide
  Antisense strand to SEQ ID NO: 538225
uuaaaucccagucugauaa

SEQ ID NO: 538227 - RNA, 19 nt, Artificial Sequence
  Description of Artificial Sequence: Synthetic oligonucleotide
  Sense strand starting at position 1111 of SEQ ID NO: 318120
ugauuaguauguuaaggga

SEQ ID NO: 538228 - RNA, 19 nt, Artificial Sequence
  Description of Artificial Sequence: Synthetic oligonucleotide
  Antisense strand to SEQ ID NO: 538227
ucccuuaacauacuaauca

SEQ ID NO: 538229 - RNA, 19 nt, Artificial Sequence
  Description of Artificial Sequence: Synthetic oligonucleotide
  Sense strand starting at position 1145 of SEQ ID NO: 318120
ggcagcacgcaagaauaaa

SEQ ID NO: 538230 - RNA, 19 nt, Artificial Sequence
  Description of Artificial Sequence: Synthetic oligonucleotide
  Antisense strand to SEQ ID NO: 538229
uuuauucuugcgugcugcc

SEQ ID NO: 538231 - RNA, 19 nt, Artificial Sequence
  Description of Artificial Sequence: Synthetic oligonucleotide
  Sense strand starting at position 1246 of SEQ ID NO: 318120
gaaugucuugaugggcuua

SEQ ID NO: 538232 - RNA, 19 nt, Artificial Sequence
  Description of Artificial Sequence: Synthetic oligonucleotide
  Antisense strand to SEQ ID NO: 538231
uaagcccaucaagacauuc

SEQ ID NO: 538233 - RNA, 19 nt, Artificial Sequence
  Description of Artificial Sequence: Synthetic oligonucleotide
  Sense strand starting at position 1251 of SEQ ID NO: 318120
ucuugaugggcuuaugagu

SEQ ID NO: 538234 - RNA, 19 nt, Artificial Sequence
  Description of Artificial Sequence: Synthetic oligonucleotide
  Antisense strand to SEQ ID NO: 538233
acucauaagcccaucaaga

SEQ ID NO: 538235 - RNA, 19 nt, Artificial Sequence
  Description of Artificial Sequence: Synthetic oligonucleotide
  Sense strand starting at position 1257 of SEQ ID NO: 318120
ugggcuuaugaguaguaga

SEQ ID NO: 538236 - RNA, 19 nt, Artificial Sequence
  Description of Artificial Sequence: Synthetic oligonucleotide
  Antisense strand to SEQ ID NO: 538235
ucuacuacucauaagccca

SEQ ID NO: 538237 - RNA, 19 nt, Artificial Sequence
  Description of Artificial Sequence: Synthetic oligonucleotide
  Sense strand starting at position 1265 of SEQ ID NO: 318120
ugaguaguagacuguuuau

SEQ ID NO: 538238 - RNA, 19 nt, Artificial Sequence
  Description of Artificial Sequence: Synthetic oligonucleotide
  Antisense strand to SEQ ID NO: 538237
auaaacagucuacuacuca

SEQ ID NO: 538239 - RNA, 19 nt, Artificial Sequence
  Description of Artificial Sequence: Synthetic oligonucleotide
  Sense strand starting at position 1268 of SEQ ID NO: 318120
guaguagacuguuuauagc

SEQ ID NO: 538240 - RNA, 19 nt, Artificial Sequence
  Description of Artificial Sequence: Synthetic oligonucleotide
  Antisense strand to SEQ ID NO: 538239
gcuauaaacagucuacuac

SEQ ID NO: 538241 - RNA, 19 nt, Artificial Sequence
  Description of Artificial Sequence: Synthetic oligonucleotide
  Sense strand starting at position 1275 of SEQ ID NO: 318120
acuguuuauagcgaaggaa

SEQ ID NO: 538242 - RNA, 19 nt, Artificial Sequence
  Description of Artificial Sequence: Synthetic oligonucleotide
  Antisense strand to SEQ ID NO: 538241
uuccuucgcuauaaacagu

SEQ ID NO: 538243 - RNA, 19 nt, Artificial Sequence
  Description of Artificial Sequence: Synthetic oligonucleotide
  Sense strand starting at position 1538 of SEQ ID NO: 318120
acaucaauggucugaauac

SEQ ID NO: 538244 - RNA, 19 nt, Artificial Sequence
  Description of Artificial Sequence: Synthetic oligonucleotide
  Antisense strand to SEQ ID NO: 538243
guauucagaccauugaugu

SEQ ID NO: 538245 - RNA, 19 nt, Artificial Sequence
  Description of Artificial Sequence: Synthetic oligonucleotide
  Sense strand starting at position 1570 of SEQ ID NO: 318120
ggcugucagagugaauaaa

SEQ ID NO: 538246 - RNA, 19 nt, Artificial Sequence
  Description of Artificial Sequence: Synthetic oligonucleotide
  Antisense strand to SEQ ID NO: 538245
uuuauucacucugacagcc

SEQ ID NO: 538247 - RNA, 19 nt, Artificial Sequence
  Description of Artificial Sequence: Synthetic oligonucleotide
  Sense strand starting at position 3033 of SEQ ID NO: 318120
ccauguguuguccacaaga

SEQ ID NO: 538248 - RNA, 19 nt, Artificial Sequence
  Description of Artificial Sequence: Synthetic oligonucleotide
  Antisense strand to SEQ ID NO: 538247
ucuuguggacaacacaugg

SEQ ID NO: 538249 - RNA, 19 nt, Artificial Sequence
  Description of Artificial Sequence: Synthetic oligonucleotide
  Sense strand starting at position 3035 of SEQ ID NO: 318120
auguguuguccacaagaaa

SEQ ID NO: 538250 - RNA, 19 nt, Artificial Sequence
  Description of Artificial Sequence: Synthetic oligonucleotide
  Antisense strand to SEQ ID NO: 538249
uuucuuguggacaacacau

SEQ ID NO: 538251 - RNA, 19 nt, Artificial Sequence
  Description of Artificial Sequence: Synthetic oligonucleotide
  Sense strand starting at position 3359 of SEQ ID NO: 318120
ucaacaucucucuguuagu

SEQ ID NO: 538252 - RNA, 19 nt, Artificial Sequence
  Description of Artificial Sequence: Synthetic oligonucleotide
  Antisense strand to SEQ ID NO: 538251
acuaacagagagauguuga

SEQ ID NO: 538253 - RNA, 19 nt, Artificial Sequence
  Description of Artificial Sequence: Synthetic oligonucleotide
  Sense strand starting at position 3407 of SEQ ID NO: 318120
guaacaacguaguugaauu

SEQ ID NO: 538254 - RNA, 19 nt, Artificial Sequence
  Description of Artificial Sequence: Synthetic oligonucleotide
  Antisense strand to SEQ ID NO: 538253
aauucaacuacguuguuac

SEQ ID NO: 538255 - RNA, 19 nt, Artificial Sequence
  Description of Artificial Sequence: Synthetic oligonucleotide
  Sense strand starting at position 3447 of SEQ ID NO: 318120
ggaucuagcugacauuuau

SEQ ID NO: 538256 - RNA, 19 nt, Artificial Sequence
  Description of Artificial Sequence: Synthetic oligonucleotide
  Antisense strand to SEQ ID NO: 538255
auaaaugucagcuagaucc

SEQ ID NO: 538257 - RNA, 19 nt, Artificial Sequence
  Description of Artificial Sequence: Synthetic oligonucleotide
  Sense strand starting at position 3527 of SEQ ID NO: 318120
gacauauucugggcccuga

SEQ ID NO: 538258 - RNA, 19 nt, Artificial Sequence
  Description of Artificial Sequence: Synthetic oligonucleotide
  Antisense strand to SEQ ID NO: 538257
ucagggcccagaauauguc

SEQ ID NO: 538259 - RNA, 19 nt, Artificial Sequence
  Description of Artificial Sequence: Synthetic oligonucleotide
  Sense strand starting at position 3531 of SEQ ID NO: 318120
uauucugggcccugaaaga

SEQ ID NO: 538260 - RNA, 19 nt, Artificial Sequence
  Description of Artificial Sequence: Synthetic oligonucleotide
  Antisense strand to SEQ ID NO: 538259
ucuuucagggcccagaaua

SEQ ID NO: 538261 - RNA, 19 nt, Artificial Sequence
  Description of Artificial Sequence: Synthetic oligonucleotide
  Sense strand starting at position 3940 of SEQ ID NO: 318120
agcagauaucaaugaagug

SEQ ID NO: 538262 - RNA, 19 nt, Artificial Sequence
  Description of Artificial Sequence: Synthetic oligonucleotide
  Antisense strand to SEQ ID NO: 538261
cacuucauugauaucugcu

SEQ ID NO: 538263 - RNA, 19 nt, Artificial Sequence
  Description of Artificial Sequence: Synthetic oligonucleotide
  Sense strand starting at position 52 of SEQ ID NO: 318121
caucuuauugaugacucga

SEQ ID NO: 538264 - RNA, 19 nt, Artificial Sequence
  Description of Artificial Sequence: Synthetic oligonucleotide
  Antisense strand to SEQ ID NO: 538263
ucgagucaucaauaagaug

SEQ ID NO: 538265 - RNA, 19 nt, Artificial Sequence
  Description of Artificial Sequence: Synthetic oligonucleotide
  Sense strand starting at position 54 of SEQ ID NO: 318121
ucuuauugaugacucgaaa

SEQ ID NO: 538266 - RNA, 19 nt, Artificial Sequence
  Description of Artificial Sequence: Synthetic oligonucleotide
  Antisense strand to SEQ ID NO: 538265
uuucgagucaucaauaaga

SEQ ID NO: 538267 - RNA, 19 nt, Artificial Sequence
  Description of Artificial Sequence: Synthetic oligonucleotide
  Sense strand starting at position 83 of SEQ ID NO: 318121
uggauaauguagcuuaaag

SEQ ID NO: 538268 - RNA, 19 nt, Artificial Sequence
  Description of Artificial Sequence: Synthetic oligonucleotide
  Antisense strand to SEQ ID NO: 538267
cuuuaagcuacauuaucca

SEQ ID NO: 538269 - RNA, 19 nt, Artificial Sequence
  Description of Artificial Sequence: Synthetic oligonucleotide
  Sense strand starting at position 172 of SEQ ID NO: 318121
uuaugcugaggguaaguaa

SEQ ID NO: 538270 - RNA, 19 nt, Artificial Sequence
  Description of Artificial Sequence: Synthetic oligonucleotide
  Antisense strand to SEQ ID NO: 538269
uuacuuacccucagcauaa

SEQ ID NO: 538271 - RNA, 19 nt, Artificial Sequence
  Description of Artificial Sequence: Synthetic oligonucleotide
  Sense strand starting at position 213 of SEQ ID NO: 318121
uggaauugucuccagcaaa

SEQ ID NO: 538272 - RNA, 19 nt, Artificial Sequence
  Description of Artificial Sequence: Synthetic oligonucleotide
  Antisense strand to SEQ ID NO: 538271
uuugcuggagacaauucca

SEQ ID NO: 538273 - RNA, 19 nt, Artificial Sequence
  Description of Artificial Sequence: Synthetic oligonucleotide
  Sense strand starting at position 253 of SEQ ID NO: 318121
ccugaaguugugcagauga

SEQ ID NO: 538274 - RNA, 19 nt, Artificial Sequence
  Description of Artificial Sequence: Synthetic oligonucleotide
  Antisense strand to SEQ ID NO: 538273
ucaucugcacaacuucagg

SEQ ID NO: 538275 - RNA, 19 nt, Artificial Sequence
  Description of Artificial Sequence: Synthetic oligonucleotide
  Sense strand starting at position 255 of SEQ ID NO: 318121
ugaaguugugcagaugaua

SEQ ID NO: 538276 - RNA, 19 nt, Artificial Sequence
  Description of Artificial Sequence: Synthetic oligonucleotide
  Antisense strand to SEQ ID NO: 538275
uaucaucugcacaacuuca

SEQ ID NO: 538277 - RNA, 19 nt, Artificial Sequence
  Description of Artificial Sequence: Synthetic oligonucleotide
  Sense strand starting at position 298 of SEQ ID NO: 318121
auugaugaaagguggugaa

SEQ ID NO: 538278 - RNA, 19 nt, Artificial Sequence
  Description of Artificial Sequence: Synthetic oligonucleotide
  Antisense strand to SEQ ID NO: 538277
uucaccaccuuucaucaau

SEQ ID NO: 538279 - RNA, 19 nt, Artificial Sequence
  Description of Artificial Sequence: Synthetic oligonucleotide
  Sense strand starting at position 313 of SEQ ID NO: 318121
ugaacacuugaaugagcaa

SEQ ID NO: 538280 - RNA, 19 nt, Artificial Sequence
  Description of Artificial Sequence: Synthetic oligonucleotide
  Antisense strand to SEQ ID NO: 538279
uugcucauucaaguguuca

SEQ ID NO: 538281 - RNA, 19 nt, Artificial Sequence
  Description of Artificial Sequence: Synthetic oligonucleotide
  Sense strand starting at position 477 of SEQ ID NO: 318121
aaaugucugaggcgacaga

SEQ ID NO: 538282 - RNA, 19 nt, Artificial Sequence
  Description of Artificial Sequence: Synthetic oligonucleotide
  Antisense strand to SEQ ID NO: 538281
ucugucgccucagacauuu

SEQ ID NO: 538283 - RNA, 19 nt, Artificial Sequence
  Description of Artificial Sequence: Synthetic oligonucleotide
  Sense strand starting at position 836 of SEQ ID NO: 318121
uugugagggccucaggauu

SEQ ID NO: 538284 - RNA, 19 nt, Artificial Sequence
  Description of Artificial Sequence: Synthetic oligonucleotide
  Antisense strand to SEQ ID NO: 538283
aauccugaggcccucacaa

SEQ ID NO: 538285 - RNA, 19 nt, Artificial Sequence
  Description of Artificial Sequence: Synthetic oligonucleotide
  Sense strand starting at position 870 of SEQ ID NO: 318121
aaugcaguggcucaugaua

SEQ ID NO: 538286 - RNA, 19 nt, Artificial Sequence
  Description of Artificial Sequence: Synthetic oligonucleotide
  Antisense strand to SEQ ID NO: 538285
uaucaugagccacugcauu

SEQ ID NO: 538287 - RNA, 19 nt, Artificial Sequence
  Description of Artificial Sequence: Synthetic oligonucleotide
  Sense strand starting at position 897 of SEQ ID NO: 318121
ugcuauaaacccugaagaa

SEQ ID NO: 538288 - RNA, 19 nt, Artificial Sequence
  Description of Artificial Sequence: Synthetic oligonucleotide
  Antisense strand to SEQ ID NO: 538287
uucuucaggguuuauagca

SEQ ID NO: 538289 - RNA, 19 nt, Artificial Sequence
  Description of Artificial Sequence: Synthetic oligonucleotide
  Sense strand starting at position 934 of SEQ ID NO: 318121
auagcaucuuauuucgagu

SEQ ID NO: 538290 - RNA, 19 nt, Artificial Sequence
  Description of Artificial Sequence: Synthetic oligonucleotide
  Antisense strand to SEQ ID NO: 538289
acucgaaauaagaugcuau

SEQ ID NO: 538291 - RNA, 19 nt, Artificial Sequence
  Description of Artificial Sequence: Synthetic oligonucleotide
  Sense strand starting at position 949 of SEQ ID NO: 318121
gagucacaauauucgggau

SEQ ID NO: 538292 - RNA, 19 nt, Artificial Sequence
  Description of Artificial Sequence: Synthetic oligonucleotide
  Antisense strand to SEQ ID NO: 538291
aucccgaauauugugacuc

SEQ ID NO: 538293 - RNA, 19 nt, Artificial Sequence
  Description of Artificial Sequence: Synthetic oligonucleotide
  Sense strand starting at position 950 of SEQ ID NO: 318121
agucacaauauucgggauu

SEQ ID NO: 538294 - RNA, 19 nt, Artificial Sequence
  Description of Artificial Sequence: Synthetic oligonucleotide
  Antisense strand to SEQ ID NO: 538293
aaucccgaauauugugacu

SEQ ID NO: 538295 - RNA, 19 nt, Artificial Sequence
  Description of Artificial Sequence: Synthetic oligonucleotide
  Sense strand starting at position 1177 of SEQ ID NO: 318121
cacuuagaagagugguuga

SEQ ID NO: 538296 - RNA, 19 nt, Artificial Sequence
  Description of Artificial Sequence: Synthetic oligonucleotide
  Antisense strand to SEQ ID NO: 538295
ucaaccacucuucuaagug

SEQ ID NO: 538297 - RNA, 19 nt, Artificial Sequence
  Description of Artificial Sequence: Synthetic oligonucleotide
  Sense strand starting at position 1180 of SEQ ID NO: 318121
uuagaagagugguugacaa

SEQ ID NO: 538298 - RNA, 19 nt, Artificial Sequence
  Description of Artificial Sequence: Synthetic oligonucleotide
  Antisense strand to SEQ ID NO: 538297
uugucaaccacucuucuaa

SEQ ID NO: 538299 - RNA, 19 nt, Artificial Sequence
  Description of Artificial Sequence: Synthetic oligonucleotide
  Sense strand starting at position 1319 of SEQ ID NO: 318121
gcaucuaauggcuagagau

SEQ ID NO: 538300 - RNA, 19 nt, Artificial Sequence
  Description of Artificial Sequence: Synthetic oligonucleotide
  Antisense strand to SEQ ID NO: 538299
aucucuagccauuagaugc

SEQ ID NO: 538301 - RNA, 19 nt, Artificial Sequence
  Description of Artificial Sequence: Synthetic oligonucleotide
  Sense strand starting at position 1332 of SEQ ID NO: 318121
agagauuagggaugcuacu

SEQ ID NO: 538302 - RNA, 19 nt, Artificial Sequence
  Description of Artificial Sequence: Synthetic oligonucleotide
  Antisense strand to SEQ ID NO: 538301
aguagcaucccuaaucucu

SEQ ID NO: 538303 - RNA, 19 nt, Artificial Sequence
  Description of Artificial Sequence: Synthetic oligonucleotide
  Sense strand starting at position 1448 of SEQ ID NO: 318121
agaccaugcuucccagauc

SEQ ID NO: 538304 - RNA, 19 nt, Artificial Sequence
  Description of Artificial Sequence: Synthetic oligonucleotide
  Antisense strand to SEQ ID NO: 538303
gaucugggaagcauggucu

SEQ ID NO: 538305 - RNA, 19 nt, Artificial Sequence
  Description of Artificial Sequence: Synthetic oligonucleotide
  Sense strand starting at position 1603 of SEQ ID NO: 318121
agacucuucuucccagaug

SEQ ID NO: 538306 - RNA, 19 nt, Artificial Sequence
  Description of Artificial Sequence: Synthetic oligonucleotide
  Antisense strand to SEQ ID NO: 538305
caucugggaagaagagucu

SEQ ID NO: 538307 - RNA, 19 nt, Artificial Sequence
  Description of Artificial Sequence: Synthetic oligonucleotide
  Sense strand starting at position 1612 of SEQ ID NO: 318121
uucccagaugaauguuacu

SEQ ID NO: 538308 - RNA, 19 nt, Artificial Sequence
  Description of Artificial Sequence: Synthetic oligonucleotide
  Antisense strand to SEQ ID NO: 538307
aguaacauucaucugggaa

SEQ ID NO: 538309 - RNA, 19 nt, Artificial Sequence
  Description of Artificial Sequence: Synthetic oligonucleotide
  Sense strand starting at position 1617 of SEQ ID NO: 318121
agaugaauguuacucuuuc

SEQ ID NO: 538310 - RNA, 19 nt, Artificial Sequence
  Description of Artificial Sequence: Synthetic oligonucleotide
  Antisense strand to SEQ ID NO: 538309
gaaagaguaacauucaucu

SEQ ID NO: 538311 - RNA, 19 nt, Artificial Sequence
  Description of Artificial Sequence: Synthetic oligonucleotide
  Sense strand starting at position 1682 of SEQ ID NO: 318121
auuuguauguguucgauua

SEQ ID NO: 538312 - RNA, 19 nt, Artificial Sequence
  Description of Artificial Sequence: Synthetic oligonucleotide
  Antisense strand to SEQ ID NO: 538311
uaaucgaacacauacaaau

SEQ ID NO: 538313 - RNA, 19 nt, Artificial Sequence
  Description of Artificial Sequence: Synthetic oligonucleotide
  Sense strand starting at position 1830 of SEQ ID NO: 318121
aucucauuagguuguaaag

SEQ ID NO: 538314 - RNA, 19 nt, Artificial Sequence
  Description of Artificial Sequence: Synthetic oligonucleotide
  Antisense strand to SEQ ID NO: 538313
cuuuacaaccuaaugagau

SEQ ID NO: 538315 - RNA, 19 nt, Artificial Sequence
  Description of Artificial Sequence: Synthetic oligonucleotide
  Sense strand starting at position 1989 of SEQ ID NO: 318121
aucaccuaggucugagaaa

SEQ ID NO: 538316 - RNA, 19 nt, Artificial Sequence
  Description of Artificial Sequence: Synthetic oligonucleotide
  Antisense strand to SEQ ID NO: 538315
uuucucagaccuaggugau

SEQ ID NO: 538317 - RNA, 19 nt, Artificial Sequence
  Description of Artificial Sequence: Synthetic oligonucleotide
  Sense strand starting at position 2255 of SEQ ID NO: 318121
ugguucagggucugaaaca

SEQ ID NO: 538318 - RNA, 19 nt, Artificial Sequence
  Description of Artificial Sequence: Synthetic oligonucleotide
  Antisense strand to SEQ ID NO: 538317
uguuucagacccugaacca

SEQ ID NO: 538319 - RNA, 19 nt, Artificial Sequence
  Description of Artificial Sequence: Synthetic oligonucleotide
  Sense strand starting at position 2559 of SEQ ID NO: 318121
ucgccuugucagcuguaaa

SEQ ID NO: 538320 - RNA, 19 nt, Artificial Sequence
  Description of Artificial Sequence: Synthetic oligonucleotide
  Antisense strand to SEQ ID NO: 538319
uuuacagcugacaaggcga

SEQ ID NO: 538321 - RNA, 19 nt, Artificial Sequence
  Description of Artificial Sequence: Synthetic oligonucleotide
  Sense strand starting at position 2746 of SEQ ID NO: 318121
uccgcuaccgucguucaaa

SEQ ID NO: 538322 - RNA, 19 nt, Artificial Sequence
  Description of Artificial Sequence: Synthetic oligonucleotide
  Antisense strand to SEQ ID NO: 538321
uuugaacgacgguagcgga

SEQ ID NO: 538323 - RNA, 19 nt, Artificial Sequence
  Description of Artificial Sequence: Synthetic oligonucleotide
  Sense strand starting at position 2822 of SEQ ID NO: 318121
guuucuauuugcuuaagca

SEQ ID NO: 538324 - RNA, 19 nt, Artificial Sequence
  Description of Artificial Sequence: Synthetic oligonucleotide
  Antisense strand to SEQ ID NO: 538323
ugcuuaagcaaauagaaac

SEQ ID NO: 538325 - RNA, 19 nt, Artificial Sequence
  Description of Artificial Sequence: Synthetic oligonucleotide
  Sense strand starting at position 2943 of SEQ ID NO: 318121
acggauuucuaccagacaa

SEQ ID NO: 538326 - RNA, 19 nt, Artificial Sequence
  Description of Artificial Sequence: Synthetic oligonucleotide
  Antisense strand to SEQ ID NO: 538325
uugucugguagaaauccgu

SEQ ID NO: 538327 - RNA, 19 nt, Artificial Sequence
  Description of Artificial Sequence: Synthetic oligonucleotide
  Sense strand starting at position 3123 of SEQ ID NO: 318121
guccuuuaucaggaguaug

SEQ ID NO: 538328 - RNA, 19 nt, Artificial Sequence
  Description of Artificial Sequence: Synthetic oligonucleotide
  Antisense strand to SEQ ID NO: 538327
cauacuccugauaaaggac

SEQ ID NO: 538329 - RNA, 19 nt, Artificial Sequence
  Description of Artificial Sequence: Synthetic oligonucleotide
  Sense strand starting at position 3128 of SEQ ID NO: 318121
uuaucaggaguaugaucuu

SEQ ID NO: 538330 - RNA, 19 nt, Artificial Sequence
  Description of Artificial Sequence: Synthetic oligonucleotide
  Antisense strand to SEQ ID NO: 538329
aagaucauacuccugauaa

SEQ ID NO: 538331 - RNA, 19 nt, Artificial Sequence
  Description of Artificial Sequence: Synthetic oligonucleotide
  Sense strand starting at position 3293 of SEQ ID NO: 318121
guaacaguauuucuguauu

SEQ ID NO: 538332 - RNA, 19 nt, Artificial Sequence
  Description of Artificial Sequence: Synthetic oligonucleotide
  Antisense strand to SEQ ID NO: 538331
aauacagaaauacuguuac

SEQ ID NO: 538333 - RNA, 19 nt, Artificial Sequence
  Description of Artificial Sequence: Synthetic oligonucleotide
  Sense strand starting at position 3396 of SEQ ID NO: 318121
guuaaaucaguccaacucu

SEQ ID NO: 538334 - RNA, 19 nt, Artificial Sequence
  Description of Artificial Sequence: Synthetic oligonucleotide
  Antisense strand to SEQ ID NO: 538333
agaguuggacugauuuaac

SEQ ID NO: 538335 - RNA, 19 nt, Artificial Sequence
  Description of Artificial Sequence: Synthetic oligonucleotide
  Sense strand starting at position 3774 of SEQ ID NO: 318121
cuauacuaggauugcuuaa

SEQ ID NO: 538336 - RNA, 19 nt, Artificial Sequence
  Description of Artificial Sequence: Synthetic oligonucleotide
  Antisense strand to SEQ ID NO: 538335
uuaagcaauccuaguauag

SEQ ID NO: 538337 - RNA, 19 nt, Artificial Sequence
  Description of Artificial Sequence: Synthetic oligonucleotide
  Sense strand starting at position 3808 of SEQ ID NO: 318121
ucuggaucucuuugagaau

SEQ ID NO: 538338 - RNA, 19 nt, Artificial Sequence
  Description of Artificial Sequence: Synthetic oligonucleotide
  Antisense strand to SEQ ID NO: 538337
auucucaaagagauccaga

SEQ ID NO: 538339 - RNA, 19 nt, Artificial Sequence
  Description of Artificial Sequence: Synthetic oligonucleotide
  Sense strand starting at position 3956 of SEQ ID NO: 318121
cauaaagacuguuccacga

SEQ ID NO: 538340 - RNA, 19 nt, Artificial Sequence
  Description of Artificial Sequence: Synthetic oligonucleotide
  Antisense strand to SEQ ID NO: 538339
ucguggaacagucuuuaug

SEQ ID NO: 538341 - RNA, 19 nt, Artificial Sequence
  Description of Artificial Sequence: Synthetic oligonucleotide
  Sense strand starting at position 3960 of SEQ ID NO: 318121
aagacuguuccacgaugag

SEQ ID NO: 538342 - RNA, 19 nt, Artificial Sequence
  Description of Artificial Sequence: Synthetic oligonucleotide
  Antisense strand to SEQ ID NO: 538341
cucaucguggaacagucuu

SEQ ID NO: 538343 - RNA, 19 nt, Artificial Sequence
  Description of Artificial Sequence: Synthetic oligonucleotide
  Sense strand starting at position 23 of SEQ ID NO: 318122
ugcagagcucauuagcaau

SEQ ID NO: 538344 - RNA, 19 nt, Artificial Sequence
  Description of Artificial Sequence: Synthetic oligonucleotide
  Antisense strand to SEQ ID NO: 538343
auugcuaaugagcucugca

SEQ ID NO: 538345 - RNA, 19 nt, Artificial Sequence
  Description of Artificial Sequence: Synthetic oligonucleotide
  Sense strand starting at position 94 of SEQ ID NO: 318122
aaugaauagcuagggcaaa

SEQ ID NO: 538346 - RNA, 19 nt, Artificial Sequence
  Description of Artificial Sequence: Synthetic oligonucleotide
  Antisense strand to SEQ ID NO: 538345
uuugcccuagcuauucauu

SEQ ID NO: 538347 - RNA, 19 nt, Artificial Sequence
  Description of Artificial Sequence: Synthetic oligonucleotide
  Sense strand starting at position 110 of SEQ ID NO: 318122
aaaguaggccuucggucaa

SEQ ID NO: 538348 - RNA, 19 nt, Artificial Sequence
  Description of Artificial Sequence: Synthetic oligonucleotide
  Antisense strand to SEQ ID NO: 538347
uugaccgaaggccuacuuu

SEQ ID NO: 538349 - RNA, 19 nt, Artificial Sequence
  Description of Artificial Sequence: Synthetic oligonucleotide
  Sense strand starting at position 114 of SEQ ID NO: 318122
uaggccuucggucaaagua

SEQ ID NO: 538350 - RNA, 19 nt, Artificial Sequence
  Description of Artificial Sequence: Synthetic oligonucleotide
  Antisense strand to SEQ ID NO: 538349
uacuuugaccgaaggccua

SEQ ID NO: 538351 - RNA, 19 nt, Artificial Sequence
  Description of Artificial Sequence: Synthetic oligonucleotide
  Sense strand starting at position 122 of SEQ ID NO: 318122
cggucaaaguaugcauaua

SEQ ID NO: 538352 - RNA, 19 nt, Artificial Sequence
  Description of Artificial Sequence: Synthetic oligonucleotide
  Antisense strand to SEQ ID NO: 538351
uauaugcauacuuugaccg

SEQ ID NO: 538353 - RNA, 19 nt, Artificial Sequence
  Description of Artificial Sequence: Synthetic oligonucleotide
  Sense strand starting at position 143 of SEQ ID NO: 318122
aguggaucuuaaguauguu

SEQ ID NO: 538354 - RNA, 19 nt, Artificial Sequence
  Description of Artificial Sequence: Synthetic oligonucleotide
  Antisense strand to SEQ ID NO: 538353
aacauacuuaagauccacu

SEQ ID NO: 538355 - RNA, 19 nt, Artificial Sequence
  Description of Artificial Sequence: Synthetic oligonucleotide
  Sense strand starting at position 144 of SEQ ID NO: 318122
guggaucuuaaguauguuu

SEQ ID NO: 538356 - RNA, 19 nt, Artificial Sequence
  Description of Artificial Sequence: Synthetic oligonucleotide
  Antisense strand to SEQ ID NO: 538355
aaacauacuuaagauccac

SEQ ID NO: 538357 - RNA, 19 nt, Artificial Sequence
  Description of Artificial Sequence: Synthetic oligonucleotide
  Sense strand starting at position 325 of SEQ ID NO: 318122
ccuuauaaauguccuagua

SEQ ID NO: 538358 - RNA, 19 nt, Artificial Sequence
  Description of Artificial Sequence: Synthetic oligonucleotide
  Antisense strand to SEQ ID NO: 538357
uacuaggacauuuauaagg

SEQ ID NO: 538359 - RNA, 19 nt, Artificial Sequence
  Description of Artificial Sequence: Synthetic oligonucleotide
  Sense strand starting at position 338 of SEQ ID NO: 318122
cuaguaacguuucuuauac

SEQ ID NO: 538360 - RNA, 19 nt, Artificial Sequence
  Description of Artificial Sequence: Synthetic oligonucleotide
  Antisense strand to SEQ ID NO: 538359
guauaagaaacguuacuag

SEQ ID NO: 538361 - RNA, 19 nt, Artificial Sequence
  Description of Artificial Sequence: Synthetic oligonucleotide
  Sense strand starting at position 349 of SEQ ID NO: 318122
ucuuauacagcaugaagaa

SEQ ID NO: 538362 - RNA, 19 nt, Artificial Sequence
  Description of Artificial Sequence: Synthetic oligonucleotide
  Antisense strand to SEQ ID NO: 538361
uucuucaugcuguauaaga

SEQ ID NO: 538363 - RNA, 19 nt, Artificial Sequence
  Description of Artificial Sequence: Synthetic oligonucleotide
  Sense strand starting at position 460 of SEQ ID NO: 318122
gucuaacaccguugaucaa

SEQ ID NO: 538364 - RNA, 19 nt, Artificial Sequence
  Description of Artificial Sequence: Synthetic oligonucleotide
  Antisense strand to SEQ ID NO: 538363
uugaucaacgguguuagac

SEQ ID NO: 538365 - RNA, 19 nt, Artificial Sequence
  Description of Artificial Sequence: Synthetic oligonucleotide
  Sense strand starting at position 461 of SEQ ID NO: 318122
ucuaacaccguugaucaau

SEQ ID NO: 538366 - RNA, 19 nt, Artificial Sequence
  Description of Artificial Sequence: Synthetic oligonucleotide
  Antisense strand to SEQ ID NO: 538365
auugaucaacgguguuaga

SEQ ID NO: 538367 - RNA, 19 nt, Artificial Sequence
  Description of Artificial Sequence: Synthetic oligonucleotide
  Sense strand starting at position 469 of SEQ ID NO: 318122
cguugaucaauaggaagaa

SEQ ID NO: 538368 - RNA, 19 nt, Artificial Sequence
  Description of Artificial Sequence: Synthetic oligonucleotide
  Antisense strand to SEQ ID NO: 538367
uucuuccuauugaucaacg

SEQ ID NO: 538369 - RNA, 19 nt, Artificial Sequence
  Description of Artificial Sequence: Synthetic oligonucleotide
  Sense strand starting at position 496 of SEQ ID NO: 318122
aucggaagccuacaacauu

SEQ ID NO: 538370 - RNA, 19 nt, Artificial Sequence
  Description of Artificial Sequence: Synthetic oligonucleotide
  Antisense strand to SEQ ID NO: 538369
aauguuguaggcuuccgau

SEQ ID NO: 538371 - RNA, 19 nt, Artificial Sequence
  Description of Artificial Sequence: Synthetic oligonucleotide
  Sense strand starting at position 531 of SEQ ID NO: 318122
aacugcguucccguuuaua

SEQ ID NO: 538372 - RNA, 19 nt, Artificial Sequence
  Description of Artificial Sequence: Synthetic oligonucleotide
  Antisense strand to SEQ ID NO: 538371
uauaaacgggaacgcaguu

SEQ ID NO: 538373 - RNA, 19 nt, Artificial Sequence
  Description of Artificial Sequence: Synthetic oligonucleotide
  Sense strand starting at position 533 of SEQ ID NO: 318122
cugcguucccguuuauauc

SEQ ID NO: 538374 - RNA, 19 nt, Artificial Sequence
  Description of Artificial Sequence: Synthetic oligonucleotide
  Antisense strand to SEQ ID NO: 538373
gauauaaacgggaacgcag

SEQ ID NO: 538375 - RNA, 19 nt, Artificial Sequence
  Description of Artificial Sequence: Synthetic oligonucleotide
  Sense strand starting at position 654 of SEQ ID NO: 318122
agccuuaucucaccagaga

SEQ ID NO: 538376 - RNA, 19 nt, Artificial Sequence
  Description of Artificial Sequence: Synthetic oligonucleotide
  Antisense strand to SEQ ID NO: 538375
ucucuggugagauaaggcu

SEQ ID NO: 538377 - RNA, 19 nt, Artificial Sequence
  Description of Artificial Sequence: Synthetic oligonucleotide
  Sense strand starting at position 655 of SEQ ID NO: 318122
gccuuaucucaccagagaa

SEQ ID NO: 538378 - RNA, 19 nt, Artificial Sequence
  Description of Artificial Sequence: Synthetic oligonucleotide
  Antisense strand to SEQ ID NO: 538377
uucucuggugagauaaggc

SEQ ID NO: 538379 - RNA, 19 nt, Artificial Sequence
  Description of Artificial Sequence: Synthetic oligonucleotide
  Sense strand starting at position 779 of SEQ ID NO: 318122
aguuaaguuguaugacuga

SEQ ID NO: 538380 - RNA, 19 nt, Artificial Sequence
  Description of Artificial Sequence: Synthetic oligonucleotide
  Antisense strand to SEQ ID NO: 538379
ucagucauacaacuuaacu

SEQ ID NO: 538381 - RNA, 19 nt, Artificial Sequence
  Description of Artificial Sequence: Synthetic oligonucleotide
  Sense strand starting at position 782 of SEQ ID NO: 318122
uaaguuguaugacugaaca

SEQ ID NO: 538382 - RNA, 19 nt, Artificial Sequence
  Description of Artificial Sequence: Synthetic oligonucleotide
  Antisense strand to SEQ ID NO: 538381
uguucagucauacaacuua

SEQ ID NO: 538383 - RNA, 19 nt, Artificial Sequence
  Description of Artificial Sequence: Synthetic oligonucleotide
  Sense strand starting at position 928 of SEQ ID NO: 318122
ccguucggccacuaagaaa

SEQ ID NO: 538384 - RNA, 19 nt, Artificial Sequence
  Description of Artificial Sequence: Synthetic oligonucleotide
  Antisense strand to SEQ ID NO: 538383
uuucuuaguggccgaacgg

SEQ ID NO: 538385 - RNA, 19 nt, Artificial Sequence
  Description of Artificial Sequence: Synthetic oligonucleotide
  Sense strand starting at position 2159 of SEQ ID NO: 318122
ggcaucaucccuggucuca

SEQ ID NO: 538386 - RNA, 19 nt, Artificial Sequence
  Description of Artificial Sequence: Synthetic oligonucleotide
  Antisense strand to SEQ ID NO: 538385
ugagaccagggaugaugcc

SEQ ID NO: 538387 - RNA, 19 nt, Artificial Sequence
  Description of Artificial Sequence: Synthetic oligonucleotide
  Sense strand starting at position 2187 of SEQ ID NO: 318122
cagggagucguauauauga

SEQ ID NO: 538388 - RNA, 19 nt, Artificial Sequence
  Description of Artificial Sequence: Synthetic oligonucleotide
  Antisense strand to SEQ ID NO: 538387
ucauauauacgacucccug

SEQ ID NO: 538389 - RNA, 19 nt, Artificial Sequence
  Description of Artificial Sequence: Synthetic oligonucleotide
  Sense strand starting at position 2189 of SEQ ID NO: 318122
gggagucguauauaugaga

SEQ ID NO: 538390 - RNA, 19 nt, Artificial Sequence
  Description of Artificial Sequence: Synthetic oligonucleotide
  Antisense strand to SEQ ID NO: 538389
ucucauauauacgacuccc

SEQ ID NO: 538391 - RNA, 19 nt, Artificial Sequence
  Description of Artificial Sequence: Synthetic oligonucleotide
  Sense strand starting at position 2196 of SEQ ID NO: 318122
guauauaugagagggcuuu

SEQ ID NO: 538392 - RNA, 19 nt, Artificial Sequence
  Description of Artificial Sequence: Synthetic oligonucleotide
  Antisense strand to SEQ ID NO: 538391
aaagcccucucauauauac

SEQ ID NO: 538393 - RNA, 19 nt, Artificial Sequence
  Description of Artificial Sequence: Synthetic oligonucleotide
  Sense strand starting at position 2220 of SEQ ID NO: 318122
gcucuccucggauaccaaa

SEQ ID NO: 538394 - RNA, 19 nt, Artificial Sequence
  Description of Artificial Sequence: Synthetic oligonucleotide
  Antisense strand to SEQ ID NO: 538393
uuugguauccgaggagagc

SEQ ID NO: 538395 - RNA, 19 nt, Artificial Sequence
  Description of Artificial Sequence: Synthetic oligonucleotide
  Sense strand starting at position 2295 of SEQ ID NO: 318122
gcuauuuagugucuccaau

SEQ ID NO: 538396 - RNA, 19 nt, Artificial Sequence
  Description of Artificial Sequence: Synthetic oligonucleotide
  Antisense strand to SEQ ID NO: 538395
auuggagacacuaaauagc

SEQ ID NO: 538397 - RNA, 19 nt, Artificial Sequence
  Description of Artificial Sequence: Synthetic oligonucleotide
  Sense strand starting at position 2379 of SEQ ID NO: 318122
cccauugguccaugagaca

SEQ ID NO: 538398 - RNA, 19 nt, Artificial Sequence
  Description of Artificial Sequence: Synthetic oligonucleotide
  Antisense strand to SEQ ID NO: 538397
ugucucauggaccaauggg

SEQ ID NO: 538399 - RNA, 19 nt, Artificial Sequence
  Description of Artificial Sequence: Synthetic oligonucleotide
  Sense strand starting at position 2471 of SEQ ID NO: 318122
ccaauuggccaauguauua

SEQ ID NO: 538400 - RNA, 19 nt, Artificial Sequence
  Description of Artificial Sequence: Synthetic oligonucleotide
  Antisense strand to SEQ ID NO: 538399
uaauacauuggccaauugg

SEQ ID NO: 538401 - RNA, 19 nt, Artificial Sequence
  Description of Artificial Sequence: Synthetic oligonucleotide
  Sense strand starting at position 2489 of SEQ ID NO: 318122
acuuccauuggauguauaa

SEQ ID NO: 538402 - RNA, 19 nt, Artificial Sequence
  Description of Artificial Sequence: Synthetic oligonucleotide
  Antisense strand to SEQ ID NO: 538401
uuauacauccaauggaagu

SEQ ID NO: 538403 - RNA, 19 nt, Artificial Sequence
  Description of Artificial Sequence: Synthetic oligonucleotide
  Sense strand starting at position 2679 of SEQ ID NO: 318122
uuaguagcacuccaucuua

SEQ ID NO: 538404 - RNA, 19 nt, Artificial Sequence
  Description of Artificial Sequence: Synthetic oligonucleotide
  Antisense strand to SEQ ID NO: 538403
uaagauggagugcuacuaa

SEQ ID NO: 538405 - RNA, 19 nt, Artificial Sequence
  Description of Artificial Sequence: Synthetic oligonucleotide
  Sense strand starting at position 2775 of SEQ ID NO: 318122
cugauagcuccugauuaga

SEQ ID NO: 538406 - RNA, 19 nt, Artificial Sequence
  Description of Artificial Sequence: Synthetic oligonucleotide
  Antisense strand to SEQ ID NO: 538405
ucuaaucaggagcuaucag

SEQ ID NO: 538407 - RNA, 19 nt, Artificial Sequence
  Description of Artificial Sequence: Synthetic oligonucleotide
  Sense strand starting at position 2833 of SEQ ID NO: 318122
gcuagauuguuacccacaa

SEQ ID NO: 538408 - RNA, 19 nt, Artificial Sequence
  Description of Artificial Sequence: Synthetic oligonucleotide
  Antisense strand to SEQ ID NO: 538407
uuguggguaacaaucuagc

SEQ ID NO: 538409 - RNA, 19 nt, Artificial Sequence
  Description of Artificial Sequence: Synthetic oligonucleotide
  Sense strand starting at position 2858 of SEQ ID NO: 318122
acaggaaauugccucaauc

SEQ ID NO: 538410 - RNA, 19 nt, Artificial Sequence
  Description of Artificial Sequence: Synthetic oligonucleotide
  Antisense strand to SEQ ID NO: 538409
gauugaggcaauuuccugu

SEQ ID NO: 538411 - RNA, 19 nt, Artificial Sequence
  Description of Artificial Sequence: Synthetic oligonucleotide
  Sense strand starting at position 2973 of SEQ ID NO: 318122
aguaauaacccaugacugu

SEQ ID NO: 538412 - RNA, 19 nt, Artificial Sequence
  Description of Artificial Sequence: Synthetic oligonucleotide
  Antisense strand to SEQ ID NO: 538411
acagucauggguuauuacu

SEQ ID NO: 538413 - RNA, 19 nt, Artificial Sequence
  Description of Artificial Sequence: Synthetic oligonucleotide
  Sense strand starting at position 2974 of SEQ ID NO: 318122
guaauaacccaugacuguu

SEQ ID NO: 538414 - RNA, 19 nt, Artificial Sequence
  Description of Artificial Sequence: Synthetic oligonucleotide
  Antisense strand to SEQ ID NO: 538413
aacagucauggguuauuac

SEQ ID NO: 538415 - RNA, 19 nt, Artificial Sequence
  Description of Artificial Sequence: Synthetic oligonucleotide
  Sense strand starting at position 2982 of SEQ ID NO: 318122
ccaugacuguuguucuaaa

SEQ ID NO: 538416 - RNA, 19 nt, Artificial Sequence
  Description of Artificial Sequence: Synthetic oligonucleotide
  Antisense strand to SEQ ID NO: 538415
uuuagaacaacagucaugg

SEQ ID NO: 538417 - RNA, 19 nt, Artificial Sequence
  Description of Artificial Sequence: Synthetic oligonucleotide
  Sense strand starting at position 3388 of SEQ ID NO: 318122
agaucuaucugccuugcaa

SEQ ID NO: 538418 - RNA, 19 nt, Artificial Sequence
  Description of Artificial Sequence: Synthetic oligonucleotide
  Antisense strand to SEQ ID NO: 538417
uugcaaggcagauagaucu

SEQ ID NO: 538419 - RNA, 19 nt, Artificial Sequence
  Description of Artificial Sequence: Synthetic oligonucleotide
  Sense strand starting at position 3499 of SEQ ID NO: 318122
acagaaauguaccuaaguu

SEQ ID NO: 538420 - RNA, 19 nt, Artificial Sequence
  Description of Artificial Sequence: Synthetic oligonucleotide
  Antisense strand to SEQ ID NO: 538419
aacuuagguacauuucugu

SEQ ID NO: 538421 - RNA, 19 nt, Artificial Sequence
  Description of Artificial Sequence: Synthetic oligonucleotide
  Sense strand starting at position 3962 of SEQ ID NO: 318122
aaagauuccugcuccaggu

SEQ ID NO: 538422 - RNA, 19 nt, Artificial Sequence
  Description of Artificial Sequence: Synthetic oligonucleotide
  Antisense strand to SEQ ID NO: 538421
accuggagcaggaaucuuu

SEQ ID NO: 538423 - RNA, 19 nt, Artificial Sequence
  Description of Artificial Sequence: Synthetic oligonucleotide
  Sense strand starting at position 10 of SEQ ID NO: 318123
gcaagaauguaucuaucuu

SEQ ID NO: 538424 - RNA, 19 nt, Artificial Sequence
  Description of Artificial Sequence: Synthetic oligonucleotide
  Antisense strand to SEQ ID NO: 538423
aagauagauacauucuugc

SEQ ID NO: 538425 - RNA, 19 nt, Artificial Sequence
  Description of Artificial Sequence: Synthetic oligonucleotide
  Sense strand starting at position 22 of SEQ ID NO: 318123
cuaucuuguucucugcuau

SEQ ID NO: 538426 - RNA, 19 nt, Artificial Sequence
  Description of Artificial Sequence: Synthetic oligonucleotide
  Antisense strand to SEQ ID NO: 538425
auagcagagaacaagauag

SEQ ID NO: 538427 - RNA, 19 nt, Artificial Sequence
  Description of Artificial Sequence: Synthetic oligonucleotide
  Sense strand starting at position 34 of SEQ ID NO: 318123
cugcuauguccguagugac

SEQ ID NO: 538428 - RNA, 19 nt, Artificial Sequence
  Description of Artificial Sequence: Synthetic oligonucleotide
  Antisense strand to SEQ ID NO: 538427
gucacuacggacauagcag

SEQ ID NO: 538429 - RNA, 19 nt, Artificial Sequence
  Description of Artificial Sequence: Synthetic oligonucleotide
  Sense strand starting at position 41 of SEQ ID NO: 318123
guccguagugacuagcaaa

SEQ ID NO: 538430 - RNA, 19 nt, Artificial Sequence
  Description of Artificial Sequence: Synthetic oligonucleotide
  Antisense strand to SEQ ID NO: 538429
uuugcuagucacuacggac

SEQ ID NO: 538431 - RNA, 19 nt, Artificial Sequence
  Description of Artificial Sequence: Synthetic oligonucleotide
  Sense strand starting at position 139 of SEQ ID NO: 318123
guggcaauaucuccuugaa

SEQ ID NO: 538432 - RNA, 19 nt, Artificial Sequence
  Description of Artificial Sequence: Synthetic oligonucleotide
  Antisense strand to SEQ ID NO: 538431
uucaaggagauauugccac

SEQ ID NO: 538433 - RNA, 19 nt, Artificial Sequence
  Description of Artificial Sequence: Synthetic oligonucleotide
  Sense strand starting at position 141 of SEQ ID NO: 318123
ggcaauaucuccuugaaua

SEQ ID NO: 538434 - RNA, 19 nt, Artificial Sequence
  Description of Artificial Sequence: Synthetic oligonucleotide
  Antisense strand to SEQ ID NO: 538433
uauucaaggagauauugcc

SEQ ID NO: 538435 - RNA, 19 nt, Artificial Sequence
  Description of Artificial Sequence: Synthetic oligonucleotide
  Sense strand starting at position 161 of SEQ ID NO: 318123
gcuccaauaccauggguua

SEQ ID NO: 538436 - RNA, 19 nt, Artificial Sequence
  Description of Artificial Sequence: Synthetic oligonucleotide
  Antisense strand to SEQ ID NO: 538435
uaacccaugguauuggagc

SEQ ID NO: 538437 - RNA, 19 nt, Artificial Sequence
  Description of Artificial Sequence: Synthetic oligonucleotide
  Sense strand starting at position 172 of SEQ ID NO: 318123
auggguuacuuguuaaaug

SEQ ID NO: 538438 - RNA, 19 nt, Artificial Sequence
  Description of Artificial Sequence: Synthetic oligonucleotide
  Antisense strand to SEQ ID NO: 538437
cauuuaacaaguaacccau

SEQ ID NO: 538439 - RNA, 19 nt, Artificial Sequence
  Description of Artificial Sequence: Synthetic oligonucleotide
  Sense strand starting at position 226 of SEQ ID NO: 318123
gcuguauacccaugaagga

SEQ ID NO: 538440 - RNA, 19 nt, Artificial Sequence
  Description of Artificial Sequence: Synthetic oligonucleotide
  Antisense strand to SEQ ID NO: 538439
uccuucauggguauacagc

SEQ ID NO: 538441 - RNA, 19 nt, Artificial Sequence
  Description of Artificial Sequence: Synthetic oligonucleotide
  Sense strand starting at position 408 of SEQ ID NO: 318123
ugaccuagaugaugaaaua

SEQ ID NO: 538442 - RNA, 19 nt, Artificial Sequence
  Description of Artificial Sequence: Synthetic oligonucleotide
  Antisense strand to SEQ ID NO: 538441
uauuucaucaucuagguca

SEQ ID NO: 538443 - RNA, 19 nt, Artificial Sequence
  Description of Artificial Sequence: Synthetic oligonucleotide
  Sense strand starting at position 1114 of SEQ ID NO: 318123
gcaguaucuuaccugucga

SEQ ID NO: 538444 - RNA, 19 nt, Artificial Sequence
  Description of Artificial Sequence: Synthetic oligonucleotide
  Antisense strand to SEQ ID NO: 538443
ucgacagguaagauacugc

SEQ ID NO: 538445 - RNA, 19 nt, Artificial Sequence
  Description of Artificial Sequence: Synthetic oligonucleotide
  Sense strand starting at position 1119 of SEQ ID NO: 318123
aucuuaccugucgagguua

SEQ ID NO: 538446 - RNA, 19 nt, Artificial Sequence
  Description of Artificial Sequence: Synthetic oligonucleotide
  Antisense strand to SEQ ID NO: 538445
uaaccucgacagguaagau

SEQ ID NO: 538447 - RNA, 19 nt, Artificial Sequence
  Description of Artificial Sequence: Synthetic oligonucleotide
  Sense strand starting at position 1292 of SEQ ID NO: 318123
ugucaucugccucagcaga

SEQ ID NO: 538448 - RNA, 19 nt, Artificial Sequence
  Description of Artificial Sequence: Synthetic oligonucleotide
  Antisense strand to SEQ ID NO: 538447
ucugcugaggcagaugaca

SEQ ID NO: 538449 - RNA, 19 nt, Artificial Sequence
  Description of Artificial Sequence: Synthetic oligonucleotide
  Sense strand starting at position 1312 of SEQ ID NO: 318123
guucuuaaacauggauaca

SEQ ID NO: 538450 - RNA, 19 nt, Artificial Sequence
  Description of Artificial Sequence: Synthetic oligonucleotide
  Antisense strand to SEQ ID NO: 538449
uguauccauguuuaagaac

SEQ ID NO: 538451 - RNA, 19 nt, Artificial Sequence
  Description of Artificial Sequence: Synthetic oligonucleotide
  Sense strand starting at position 1387 of SEQ ID NO: 318123
uaagauuucucaggguaga

SEQ ID NO: 538452 - RNA, 19 nt, Artificial Sequence
  Description of Artificial Sequence: Synthetic oligonucleotide
  Antisense strand to SEQ ID NO: 538451
ucuacccugagaaaucuua

SEQ ID NO: 538453 - RNA, 19 nt, Artificial Sequence
  Description of Artificial Sequence: Synthetic oligonucleotide
  Sense strand starting at position 1458 of SEQ ID NO: 318123
gccaaccacuguucuaaga

SEQ ID NO: 538454 - RNA, 19 nt, Artificial Sequence
  Description of Artificial Sequence: Synthetic oligonucleotide
  Antisense strand to SEQ ID NO: 538453
ucuuagaacagugguuggc

SEQ ID NO: 538455 - RNA, 19 nt, Artificial Sequence
  Description of Artificial Sequence: Synthetic oligonucleotide
  Sense strand starting at position 1803 of SEQ ID NO: 318123
ggucuuugcggcccagagu

SEQ ID NO: 538456 - RNA, 19 nt, Artificial Sequence
  Description of Artificial Sequence: Synthetic oligonucleotide
  Antisense strand to SEQ ID NO: 538455
acucugggccgcaaagacc

SEQ ID NO: 538457 - RNA, 19 nt, Artificial Sequence
  Description of Artificial Sequence: Synthetic oligonucleotide
  Sense strand starting at position 2423 of SEQ ID NO: 318123
cugcguaggcgaugagaaa

SEQ ID NO: 538458 - RNA, 19 nt, Artificial Sequence
  Description of Artificial Sequence: Synthetic oligonucleotide
  Antisense strand to SEQ ID NO: 538457
uuucucaucgccuacgcag

SEQ ID NO: 538459 - RNA, 19 nt, Artificial Sequence
  Description of Artificial Sequence: Synthetic oligonucleotide
  Sense strand starting at position 2448 of SEQ ID NO: 318123
agggcaaggcuuugauucu

SEQ ID NO: 538460 - RNA, 19 nt, Artificial Sequence
  Description of Artificial Sequence: Synthetic oligonucleotide
  Antisense strand to SEQ ID NO: 538459
agaaucaaagccuugcccu

SEQ ID NO: 538461 - RNA, 19 nt, Artificial Sequence
  Description of Artificial Sequence: Synthetic oligonucleotide
  Sense strand starting at position 2457 of SEQ ID NO: 318123
cuuugauucuggguucuag

SEQ ID NO: 538462 - RNA, 19 nt, Artificial Sequence
  Description of Artificial Sequence: Synthetic oligonucleotide
  Antisense strand to SEQ ID NO: 538461
cuagaacccagaaucaaag

SEQ ID NO: 538463 - RNA, 19 nt, Artificial Sequence
  Description of Artificial Sequence: Synthetic oligonucleotide
  Sense strand starting at position 2485 of SEQ ID NO: 318123
agcuuuaucucacugugca

SEQ ID NO: 538464 - RNA, 19 nt, Artificial Sequence
  Description of Artificial Sequence: Synthetic oligonucleotide
  Antisense strand to SEQ ID NO: 538463
ugcacagugagauaaagcu

SEQ ID NO: 538465 - RNA, 19 nt, Artificial Sequence
  Description of Artificial Sequence: Synthetic oligonucleotide
  Sense strand starting at position 2561 of SEQ ID NO: 318123
uggaaugacuggccugaca

SEQ ID NO: 538466 - RNA, 19 nt, Artificial Sequence
  Description of Artificial Sequence: Synthetic oligonucleotide
  Antisense strand to SEQ ID NO: 538465
ugucaggccagucauucca

SEQ ID NO: 538467 - RNA, 19 nt, Artificial Sequence
  Description of Artificial Sequence: Synthetic oligonucleotide
  Sense strand starting at position 2563 of SEQ ID NO: 318123
gaaugacuggccugacaag

SEQ ID NO: 538468 - RNA, 19 nt, Artificial Sequence
  Description of Artificial Sequence: Synthetic oligonucleotide
  Antisense strand to SEQ ID NO: 538467
cuugucaggccagucauuc

SEQ ID NO: 538469 - RNA, 19 nt, Artificial Sequence
  Description of Artificial Sequence: Synthetic oligonucleotide
  Sense strand starting at position 2695 of SEQ ID NO: 318123
aagaauaguuccgucuggu

SEQ ID NO: 538470 - RNA, 19 nt, Artificial Sequence
  Description of Artificial Sequence: Synthetic oligonucleotide
  Antisense strand to SEQ ID NO: 538469
accagacggaacuauucuu

SEQ ID NO: 538471 - RNA, 19 nt, Artificial Sequence
  Description of Artificial Sequence: Synthetic oligonucleotide
  Sense strand starting at position 3021 of SEQ ID NO: 318123
ccgugaaauaacggagcuu

SEQ ID NO: 538472 - RNA, 19 nt, Artificial Sequence
  Description of Artificial Sequence: Synthetic oligonucleotide
  Antisense strand to SEQ ID NO: 538471
aagcuccguuauuucacgg

SEQ ID NO: 538473 - RNA, 19 nt, Artificial Sequence
  Description of Artificial Sequence: Synthetic oligonucleotide
  Sense strand starting at position 3022 of SEQ ID NO: 318123
cgugaaauaacggagcuua

SEQ ID NO: 538474 - RNA, 19 nt, Artificial Sequence
  Description of Artificial Sequence: Synthetic oligonucleotide
  Antisense strand to SEQ ID NO: 538473
uaagcuccguuauuucacg

SEQ ID NO: 538475 - RNA, 19 nt, Artificial Sequence
  Description of Artificial Sequence: Synthetic oligonucleotide
  Sense strand starting at position 3085 of SEQ ID NO: 318123
ccagguaugugacuuuaag

SEQ ID NO: 538476 - RNA, 19 nt, Artificial Sequence
  Description of Artificial Sequence: Synthetic oligonucleotide
  Antisense strand to SEQ ID NO: 538475
cuuaaagucacauaccugg

SEQ ID NO: 538477 - RNA, 19 nt, Artificial Sequence
  Description of Artificial Sequence: Synthetic oligonucleotide
  Sense strand starting at position 3160 of SEQ ID NO: 318123
cgaggcauguggcuugaaa

SEQ ID NO: 538478 - RNA, 19 nt, Artificial Sequence
  Description of Artificial Sequence: Synthetic oligonucleotide
  Antisense strand to SEQ ID NO: 538477
uuucaagccacaugccucg

SEQ ID NO: 538479 - RNA, 19 nt, Artificial Sequence
  Description of Artificial Sequence: Synthetic oligonucleotide
  Sense strand starting at position 3162 of SEQ ID NO: 318123
aggcauguggcuugaaagu

SEQ ID NO: 538480 - RNA, 19 nt, Artificial Sequence
  Description of Artificial Sequence: Synthetic oligonucleotide
  Antisense strand to SEQ ID NO: 538479
acuuucaagccacaugccu

SEQ ID NO: 538481 - RNA, 19 nt, Artificial Sequence
  Description of Artificial Sequence: Synthetic oligonucleotide
  Sense strand starting at position 3169 of SEQ ID NO: 318123
uggcuugaaaguuguauua

SEQ ID NO: 538482 - RNA, 19 nt, Artificial Sequence
  Description of Artificial Sequence: Synthetic oligonucleotide
  Antisense strand to SEQ ID NO: 538481
uaauacaacuuucaagcca

SEQ ID NO: 538483 - RNA, 19 nt, Artificial Sequence
  Description of Artificial Sequence: Synthetic oligonucleotide
  Sense strand starting at position 3485 of SEQ ID NO: 318123
cgugccuggccguuaaaga

SEQ ID NO: 538484 - RNA, 19 nt, Artificial Sequence
  Description of Artificial Sequence: Synthetic oligonucleotide
  Antisense strand to SEQ ID NO: 538483
ucuuuaacggccaggcacg

SEQ ID NO: 538485 - RNA, 19 nt, Artificial Sequence
  Description of Artificial Sequence: Synthetic oligonucleotide
  Sense strand starting at position 3486 of SEQ ID NO: 318123
gugccuggccguuaaagaa

SEQ ID NO: 538486 - RNA, 19 nt, Artificial Sequence
  Description of Artificial Sequence: Synthetic oligonucleotide
  Antisense strand to SEQ ID NO: 538485
uucuuuaacggccaggcac

SEQ ID NO: 538487 - RNA, 19 nt, Artificial Sequence
  Description of Artificial Sequence: Synthetic oligonucleotide
  Sense strand starting at position 3526 of SEQ ID NO: 318123
cguucuaggaucugagaag

SEQ ID NO: 538488 - RNA, 19 nt, Artificial Sequence
  Description of Artificial Sequence: Synthetic oligonucleotide
  Antisense strand to SEQ ID NO: 538487
cuucucagauccuagaacg

SEQ ID NO: 538489 - RNA, 19 nt, Artificial Sequence
  Description of Artificial Sequence: Synthetic oligonucleotide
  Sense strand starting at position 3527 of SEQ ID NO: 318123
guucuaggaucugagaaga

SEQ ID NO: 538490 - RNA, 19 nt, Artificial Sequence
  Description of Artificial Sequence: Synthetic oligonucleotide
  Antisense strand to SEQ ID NO: 538489
ucuucucagauccuagaac

SEQ ID NO: 538491 - RNA, 19 nt, Artificial Sequence
  Description of Artificial Sequence: Synthetic oligonucleotide
  Sense strand starting at position 3606 of SEQ ID NO: 318123
uuuggagucccacaaaucu

SEQ ID NO: 538492 - RNA, 19 nt, Artificial Sequence
  Description of Artificial Sequence: Synthetic oligonucleotide
  Antisense strand to SEQ ID NO: 538491
agauuugugggacuccaaa

SEQ ID NO: 538493 - RNA, 19 nt, Artificial Sequence
  Description of Artificial Sequence: Synthetic oligonucleotide
  Sense strand starting at position 3614 of SEQ ID NO: 318123
cccacaaaucuggguugga

SEQ ID NO: 538494 - RNA, 19 nt, Artificial Sequence
  Description of Artificial Sequence: Synthetic oligonucleotide
  Antisense strand to SEQ ID NO: 538493
uccaacccagauuuguggg

SEQ ID NO: 538495 - RNA, 19 nt, Artificial Sequence
  Description of Artificial Sequence: Synthetic oligonucleotide
  Sense strand starting at position 3615 of SEQ ID NO: 318123
ccacaaaucuggguuggaa

SEQ ID NO: 538496 - RNA, 19 nt, Artificial Sequence
  Description of Artificial Sequence: Synthetic oligonucleotide
  Antisense strand to SEQ ID NO: 538495
uuccaacccagauuugugg

SEQ ID NO: 538497 - RNA, 19 nt, Artificial Sequence
  Description of Artificial Sequence: Synthetic oligonucleotide
  Sense strand starting at position 3645 of SEQ ID NO: 318123
uuacuucguagguauguua

SEQ ID NO: 538498 - RNA, 19 nt, Artificial Sequence
  Description of Artificial Sequence: Synthetic oligonucleotide
  Antisense strand to SEQ ID NO: 538497
uaacauaccuacgaaguaa

SEQ ID NO: 538499 - RNA, 19 nt, Artificial Sequence
  Description of Artificial Sequence: Synthetic oligonucleotide
  Sense strand starting at position 3869 of SEQ ID NO: 318123
aaguguaaguugcuauuaa

SEQ ID NO: 538500 - RNA, 19 nt, Artificial Sequence
  Description of Artificial Sequence: Synthetic oligonucleotide
  Antisense strand to SEQ ID NO: 538499
uuaauagcaacuuacacuu

SEQ ID NO: 538501 - RNA, 19 nt, Artificial Sequence
  Description of Artificial Sequence: Synthetic oligonucleotide
  Sense strand starting at position 3923 of SEQ ID NO: 318123
uagguuagguucccauaga

SEQ ID NO: 538502 - RNA, 19 nt, Artificial Sequence
  Description of Artificial Sequence: Synthetic oligonucleotide
  Antisense strand to SEQ ID NO: 538501
ucuaugggaaccuaaccua

SEQ ID NO: 538503 - RNA, 19 nt, Artificial Sequence
  Description of Artificial Sequence: Synthetic oligonucleotide
  Sense strand starting at position 15 of SEQ ID NO: 318124
uggacucagucaccaauau

SEQ ID NO: 538504 - RNA, 19 nt, Artificial Sequence
  Description of Artificial Sequence: Synthetic oligonucleotide
  Antisense strand to SEQ ID NO: 538503
auauuggugacugagucca

SEQ ID NO: 538505 - RNA, 19 nt, Artificial Sequence
  Description of Artificial Sequence: Synthetic oligonucleotide
  Sense strand starting at position 38 of SEQ ID NO: 318124
gcugauggucuccagaucu

SEQ ID NO: 538506 - RNA, 19 nt, Artificial Sequence
  Description of Artificial Sequence: Synthetic oligonucleotide
  Antisense strand to SEQ ID NO: 538505
agaucuggagaccaucagc

SEQ ID NO: 538507 - RNA, 19 nt, Artificial Sequence
  Description of Artificial Sequence: Synthetic oligonucleotide
  Sense strand starting at position 248 of SEQ ID NO: 318124
gugacauacuaucuaucca

SEQ ID NO: 538508 - RNA, 19 nt, Artificial Sequence
  Description of Artificial Sequence: Synthetic oligonucleotide
  Antisense strand to SEQ ID NO: 538507
uggauagauaguaugucac

SEQ ID NO: 538509 - RNA, 19 nt, Artificial Sequence
  Description of Artificial Sequence: Synthetic oligonucleotide
  Sense strand starting at position 377 of SEQ ID NO: 318124
ugugccauuuaauuguaua

SEQ ID NO: 538510 - RNA, 19 nt, Artificial Sequence
  Description of Artificial Sequence: Synthetic oligonucleotide
  Antisense strand to SEQ ID NO: 538509
uauacaauuaaauggcaca

SEQ ID NO: 538511 - RNA, 19 nt, Artificial Sequence
  Description of Artificial Sequence: Synthetic oligonucleotide
  Sense strand starting at position 544 of SEQ ID NO: 318124
aaguauuaaugauuggcua

SEQ ID NO: 538512 - RNA, 19 nt, Artificial Sequence
  Description of Artificial Sequence: Synthetic oligonucleotide
  Antisense strand to SEQ ID NO: 538511
uagccaaucauuaauacuu

SEQ ID NO: 538513 - RNA, 19 nt, Artificial Sequence
  Description of Artificial Sequence: Synthetic oligonucleotide
  Sense strand starting at position 548 of SEQ ID NO: 318124
auuaaugauuggcuacauu

SEQ ID NO: 538514 - RNA, 19 nt, Artificial Sequence
  Description of Artificial Sequence: Synthetic oligonucleotide
  Antisense strand to SEQ ID NO: 538513
aauguagccaaucauuaau

SEQ ID NO: 538515 - RNA, 19 nt, Artificial Sequence
  Description of Artificial Sequence: Synthetic oligonucleotide
  Sense strand starting at position 606 of SEQ ID NO: 318124
cuaguugcuguacagauau

SEQ ID NO: 538516 - RNA, 19 nt, Artificial Sequence
  Description of Artificial Sequence: Synthetic oligonucleotide
  Antisense strand to SEQ ID NO: 538515
auaucuguacagcaacuag

SEQ ID NO: 538517 - RNA, 19 nt, Artificial Sequence
  Description of Artificial Sequence: Synthetic oligonucleotide
  Sense strand starting at position 1081 of SEQ ID NO: 318124
aagagaagucgccaagguu

SEQ ID NO: 538518 - RNA, 19 nt, Artificial Sequence
  Description of Artificial Sequence: Synthetic oligonucleotide
  Antisense strand to SEQ ID NO: 538517
aaccuuggcgacuucucuu

SEQ ID NO: 538519 - RNA, 19 nt, Artificial Sequence
  Description of Artificial Sequence: Synthetic oligonucleotide
  Sense strand starting at position 1316 of SEQ ID NO: 318124
augcccaagcaugaaauua

SEQ ID NO: 538520 - RNA, 19 nt, Artificial Sequence
  Description of Artificial Sequence: Synthetic oligonucleotide
  Antisense strand to SEQ ID NO: 538519
uaauuucaugcuugggcau

SEQ ID NO: 538521 - RNA, 19 nt, Artificial Sequence
  Description of Artificial Sequence: Synthetic oligonucleotide
  Sense strand starting at position 1451 of SEQ ID NO: 318124
cuuccuaaauguuuguaaa

SEQ ID NO: 538522 - RNA, 19 nt, Artificial Sequence
  Description of Artificial Sequence: Synthetic oligonucleotide
  Antisense strand to SEQ ID NO: 538521
uuuacaaacauuuaggaag

SEQ ID NO: 538523 - RNA, 19 nt, Artificial Sequence
  Description of Artificial Sequence: Synthetic oligonucleotide
  Sense strand starting at position 1523 of SEQ ID NO: 318124
cggaaacaguacucaggaa

SEQ ID NO: 538524 - RNA, 19 nt, Artificial Sequence
  Description of Artificial Sequence: Synthetic oligonucleotide
  Antisense strand to SEQ ID NO: 538523
uuccugaguacuguuuccg

SEQ ID NO: 538525 - RNA, 19 nt, Artificial Sequence
  Description of Artificial Sequence: Synthetic oligonucleotide
  Sense strand starting at position 1538 of SEQ ID NO: 318124
ggaaucaagaguggccaaa

SEQ ID NO: 538526 - RNA, 19 nt, Artificial Sequence
  Description of Artificial Sequence: Synthetic oligonucleotide
  Antisense strand to SEQ ID NO: 538525
uuuggccacucuugauucc

SEQ ID NO: 538527 - RNA, 19 nt, Artificial Sequence
  Description of Artificial Sequence: Synthetic oligonucleotide
  Sense strand starting at position 1572 of SEQ ID NO: 318124
auaggaaacucguugauca

SEQ ID NO: 538528 - RNA, 19 nt, Artificial Sequence
  Description of Artificial Sequence: Synthetic oligonucleotide
  Antisense strand to SEQ ID NO: 538527
ugaucaacgaguuuccuau

SEQ ID NO: 538529 - RNA, 19 nt, Artificial Sequence
  Description of Artificial Sequence: Synthetic oligonucleotide
  Sense strand starting at position 1573 of SEQ ID NO: 318124
uaggaaacucguugaucau

SEQ ID NO: 538530 - RNA, 19 nt, Artificial Sequence
  Description of Artificial Sequence: Synthetic oligonucleotide
  Antisense strand to SEQ ID NO: 538529
augaucaacgaguuuccua

SEQ ID NO: 538531 - RNA, 19 nt, Artificial Sequence
  Description of Artificial Sequence: Synthetic oligonucleotide
  Sense strand starting at position 1574 of SEQ ID NO: 318124
aggaaacucguugaucauu

SEQ ID NO: 538532 - RNA, 19 nt, Artificial Sequence
  Description of Artificial Sequence: Synthetic oligonucleotide
  Antisense strand to SEQ ID NO: 538531
aaugaucaacgaguuuccu

SEQ ID NO: 538533 - RNA, 19 nt, Artificial Sequence
  Description of Artificial Sequence: Synthetic oligonucleotide
  Sense strand starting at position 1582 of SEQ ID NO: 318124
cguugaucauugguagaga

SEQ ID NO: 538534 - RNA, 19 nt, Artificial Sequence
  Description of Artificial Sequence: Synthetic oligonucleotide
  Antisense strand to SEQ ID NO: 538533
ucucuaccaaugaucaacg

SEQ ID NO: 538535 - RNA, 19 nt, Artificial Sequence
  Description of Artificial Sequence: Synthetic oligonucleotide
  Sense strand starting at position 1670 of SEQ ID NO: 318124
ggucgaguuccaagucgga

SEQ ID NO: 538536 - RNA, 19 nt, Artificial Sequence
  Description of Artificial Sequence: Synthetic oligonucleotide
  Antisense strand to SEQ ID NO: 538535
uccgacuuggaacucgacc

SEQ ID NO: 538537 - RNA, 19 nt, Artificial Sequence
  Description of Artificial Sequence: Synthetic oligonucleotide
  Sense strand starting at position 2053 of SEQ ID NO: 318124
gggaaauuguuucccagag

SEQ ID NO: 538538 - RNA, 19 nt, Artificial Sequence
  Description of Artificial Sequence: Synthetic oligonucleotide
  Antisense strand to SEQ ID NO: 538537
cucugggaaacaauuuccc

SEQ ID NO: 538539 - RNA, 19 nt, Artificial Sequence
  Description of Artificial Sequence: Synthetic oligonucleotide
  Sense strand starting at position 2054 of SEQ ID NO: 318124
ggaaauuguuucccagagc

SEQ ID NO: 538540 - RNA, 19 nt, Artificial Sequence
  Description of Artificial Sequence: Synthetic oligonucleotide
  Antisense strand to SEQ ID NO: 538539
gcucugggaaacaauuucc

SEQ ID NO: 538541 - RNA, 19 nt, Artificial Sequence
  Description of Artificial Sequence: Synthetic oligonucleotide
  Sense strand starting at position 2524 of SEQ ID NO: 318124
cgcgucucucguuuccaua

SEQ ID NO: 538542 - RNA, 19 nt, Artificial Sequence
  Description of Artificial Sequence: Synthetic oligonucleotide
  Antisense strand to SEQ ID NO: 538541
uauggaaacgagagacgcg

SEQ ID NO: 538543 - RNA, 19 nt, Artificial Sequence
  Description of Artificial Sequence: Synthetic oligonucleotide
  Sense strand starting at position 2581 of SEQ ID NO: 318124
ggcugcuuuccauaacuua

SEQ ID NO: 538544 - RNA, 19 nt, Artificial Sequence
  Description of Artificial Sequence: Synthetic oligonucleotide
  Antisense strand to SEQ ID NO: 538543
uaaguuauggaaagcagcc

SEQ ID NO: 538545 - RNA, 19 nt, Artificial Sequence
  Description of Artificial Sequence: Synthetic oligonucleotide
  Sense strand starting at position 2635 of SEQ ID NO: 318124
cuuuccugugacgaagaaa

SEQ ID NO: 538546 - RNA, 19 nt, Artificial Sequence
  Description of Artificial Sequence: Synthetic oligonucleotide
  Antisense strand to SEQ ID NO: 538545
uuucuucgucacaggaaag

SEQ ID NO: 538547 - RNA, 19 nt, Artificial Sequence
  Description of Artificial Sequence: Synthetic oligonucleotide
  Sense strand starting at position 2663 of SEQ ID NO: 318124
uucuuuccucucuaguaga

SEQ ID NO: 538548 - RNA, 19 nt, Artificial Sequence
  Description of Artificial Sequence: Synthetic oligonucleotide
  Antisense strand to SEQ ID NO: 538547
ucuacuagagaggaaagaa

SEQ ID NO: 538549 - RNA, 19 nt, Artificial Sequence
  Description of Artificial Sequence: Synthetic oligonucleotide
  Sense strand starting at position 2730 of SEQ ID NO: 318124
gcuauaggccuuuaaacac

SEQ ID NO: 538550 - RNA, 19 nt, Artificial Sequence
  Description of Artificial Sequence: Synthetic oligonucleotide
  Antisense strand to SEQ ID NO: 538549
guguuuaaaggccuauagc

SEQ ID NO: 538551 - RNA, 19 nt, Artificial Sequence
  Description of Artificial Sequence: Synthetic oligonucleotide
  Sense strand starting at position 2829 of SEQ ID NO: 318124
acaagacugaguggcuauu

SEQ ID NO: 538552 - RNA, 19 nt, Artificial Sequence
  Description of Artificial Sequence: Synthetic oligonucleotide
  Antisense strand to SEQ ID NO: 538551
aauagccacucagucuugu

SEQ ID NO: 538553 - RNA, 19 nt, Artificial Sequence
  Description of Artificial Sequence: Synthetic oligonucleotide
  Sense strand starting at position 3053 of SEQ ID NO: 318124
uuacaauguaugugugaca

SEQ ID NO: 538554 - RNA, 19 nt, Artificial Sequence
  Description of Artificial Sequence: Synthetic oligonucleotide
  Antisense strand to SEQ ID NO: 538553
ugucacacauacauuguaa

SEQ ID NO: 538555 - RNA, 19 nt, Artificial Sequence
  Description of Artificial Sequence: Synthetic oligonucleotide
  Sense strand starting at position 3060 of SEQ ID NO: 318124
guaugugugacagacaaug

SEQ ID NO: 538556 - RNA, 19 nt, Artificial Sequence
  Description of Artificial Sequence: Synthetic oligonucleotide
  Antisense strand to SEQ ID NO: 538555
cauugucugucacacauac

SEQ ID NO: 538557 - RNA, 19 nt, Artificial Sequence
  Description of Artificial Sequence: Synthetic oligonucleotide
  Sense strand starting at position 3114 of SEQ ID NO: 318124
gugccucaauucuuggaaa

SEQ ID NO: 538558 - RNA, 19 nt, Artificial Sequence
  Description of Artificial Sequence: Synthetic oligonucleotide
  Antisense strand to SEQ ID NO: 538557
uuuccaagaauugaggcac

SEQ ID NO: 538559 - RNA, 19 nt, Artificial Sequence
  Description of Artificial Sequence: Synthetic oligonucleotide
  Sense strand starting at position 3116 of SEQ ID NO: 318124
gccucaauucuuggaaaua

SEQ ID NO: 538560 - RNA, 19 nt, Artificial Sequence
  Description of Artificial Sequence: Synthetic oligonucleotide
  Antisense strand to SEQ ID NO: 538559
uauuuccaagaauugaggc

SEQ ID NO: 538561 - RNA, 19 nt, Artificial Sequence
  Description of Artificial Sequence: Synthetic oligonucleotide
  Sense strand starting at position 3125 of SEQ ID NO: 318124
cuuggaaauaccuguggau

SEQ ID NO: 538562 - RNA, 19 nt, Artificial Sequence
  Description of Artificial Sequence: Synthetic oligonucleotide
  Antisense strand to SEQ ID NO: 538561
auccacagguauuuccaag

SEQ ID NO: 538563 - RNA, 19 nt, Artificial Sequence
  Description of Artificial Sequence: Synthetic oligonucleotide
  Sense strand starting at position 3127 of SEQ ID NO: 318124
uggaaauaccuguggaugu

SEQ ID NO: 538564 - RNA, 19 nt, Artificial Sequence
  Description of Artificial Sequence: Synthetic oligonucleotide
  Antisense strand to SEQ ID NO: 538563
acauccacagguauuucca

SEQ ID NO: 538565 - RNA, 19 nt, Artificial Sequence
  Description of Artificial Sequence: Synthetic oligonucleotide
  Sense strand starting at position 3151 of SEQ ID NO: 318124
auguucucauuauuggaaa

SEQ ID NO: 538566 - RNA, 19 nt, Artificial Sequence
  Description of Artificial Sequence: Synthetic oligonucleotide
  Antisense strand to SEQ ID NO: 538565
uuuccaauaaugagaacau

SEQ ID NO: 538567 - RNA, 19 nt, Artificial Sequence
  Description of Artificial Sequence: Synthetic oligonucleotide
  Sense strand starting at position 3164 of SEQ ID NO: 318124
uggaaaguuugauuacgua

SEQ ID NO: 538568 - RNA, 19 nt, Artificial Sequence
  Description of Artificial Sequence: Synthetic oligonucleotide
  Antisense strand to SEQ ID NO: 538567
uacguaaucaaacuuucca

SEQ ID NO: 538569 - RNA, 19 nt, Artificial Sequence
  Description of Artificial Sequence: Synthetic oligonucleotide
  Sense strand starting at position 3171 of SEQ ID NO: 318124
uuugauuacguauauugca

SEQ ID NO: 538570 - RNA, 19 nt, Artificial Sequence
  Description of Artificial Sequence: Synthetic oligonucleotide
  Antisense strand to SEQ ID NO: 538569
ugcaauauacguaaucaaa

SEQ ID NO: 538571 - RNA, 19 nt, Artificial Sequence
  Description of Artificial Sequence: Synthetic oligonucleotide
  Sense strand starting at position 3565 of SEQ ID NO: 318124
cggguaacucuugaguauu

SEQ ID NO: 538572 - RNA, 19 nt, Artificial Sequence
  Description of Artificial Sequence: Synthetic oligonucleotide
  Antisense strand to SEQ ID NO: 538571
aauacucaagaguuacccg

SEQ ID NO: 538573 - RNA, 19 nt, Artificial Sequence
  Description of Artificial Sequence: Synthetic oligonucleotide
  Sense strand starting at position 3567 of SEQ ID NO: 318124
gguaacucuugaguauucu

SEQ ID NO: 538574 - RNA, 19 nt, Artificial Sequence
  Description of Artificial Sequence: Synthetic oligonucleotide
  Antisense strand to SEQ ID NO: 538573
agaauacucaagaguuacc

SEQ ID NO: 538575 - RNA, 19 nt, Artificial Sequence
  Description of Artificial Sequence: Synthetic oligonucleotide
  Sense strand starting at position 3568 of SEQ ID NO: 318124
guaacucuugaguauucuu

SEQ ID NO: 538576 - RNA, 19 nt, Artificial Sequence
  Description of Artificial Sequence: Synthetic oligonucleotide
  Antisense strand to SEQ ID NO: 538575
aagaauacucaagaguuac

SEQ ID NO: 538577 - RNA, 19 nt, Artificial Sequence
  Description of Artificial Sequence: Synthetic oligonucleotide
  Sense strand starting at position 3777 of SEQ ID NO: 318124
ucacgugaaagucauugaa

SEQ ID NO: 538578 - RNA, 19 nt, Artificial Sequence
  Description of Artificial Sequence: Synthetic oligonucleotide
  Antisense strand to SEQ ID NO: 538577
uucaaugacuuucacguga

SEQ ID NO: 538579 - RNA, 19 nt, Artificial Sequence
  Description of Artificial Sequence: Synthetic oligonucleotide
  Sense strand starting at position 3801 of SEQ ID NO: 318124
gaucaaaugugguuacuuu

SEQ ID NO: 538580 - RNA, 19 nt, Artificial Sequence
  Description of Artificial Sequence: Synthetic oligonucleotide
  Antisense strand to SEQ ID NO: 538579
aaaguaaccacauuugauc

SEQ ID NO: 538581 - RNA, 19 nt, Artificial Sequence
  Description of Artificial Sequence: Synthetic oligonucleotide
  Sense strand starting at position 3929 of SEQ ID NO: 318124
guacuuuccuuauuauaug

SEQ ID NO: 538582 - RNA, 19 nt, Artificial Sequence
  Description of Artificial Sequence: Synthetic oligonucleotide
  Antisense strand to SEQ ID NO: 538581
cauauaauaaggaaaguac

SEQ ID NO: 538583 - RNA, 19 nt, Artificial Sequence
  Description of Artificial Sequence: Synthetic oligonucleotide
  Sense strand starting at position 13 of SEQ ID NO: 318125
ugaugcauugcacagugaa

SEQ ID NO: 538584 - RNA, 19 nt, Artificial Sequence
  Description of Artificial Sequence: Synthetic oligonucleotide
  Antisense strand to SEQ ID NO: 538583
uucacugugcaaugcauca

SEQ ID NO: 538585 - RNA, 19 nt, Artificial Sequence
  Description of Artificial Sequence: Synthetic oligonucleotide
  Sense strand starting at position 25 of SEQ ID NO: 318125
cagugaaguggugaauauu

SEQ ID NO: 538586 - RNA, 19 nt, Artificial Sequence
  Description of Artificial Sequence: Synthetic oligonucleotide
  Antisense strand to SEQ ID NO: 538585
aauauucaccacuucacug

SEQ ID NO: 538587 - RNA, 19 nt, Artificial Sequence
  Description of Artificial Sequence: Synthetic oligonucleotide
  Sense strand starting at position 28 of SEQ ID NO: 318125
ugaaguggugaauauuguu

SEQ ID NO: 538588 - RNA, 19 nt, Artificial Sequence
  Description of Artificial Sequence: Synthetic oligonucleotide
  Antisense strand to SEQ ID NO: 538587
aacaauauucaccacuuca

SEQ ID NO: 538589 - RNA, 19 nt, Artificial Sequence
  Description of Artificial Sequence: Synthetic oligonucleotide
  Sense strand starting at position 248 of SEQ ID NO: 318125
accuaugaagcagaaguuu

SEQ ID NO: 538590 - RNA, 19 nt, Artificial Sequence
  Description of Artificial Sequence: Synthetic oligonucleotide
  Antisense strand to SEQ ID NO: 538589
aaacuucugcuucauaggu

SEQ ID NO: 538591 - RNA, 19 nt, Artificial Sequence
  Description of Artificial Sequence: Synthetic oligonucleotide
  Sense strand starting at position 439 of SEQ ID NO: 318125
uuagaucaauguguuccaa

SEQ ID NO: 538592 - RNA, 19 nt, Artificial Sequence
  Description of Artificial Sequence: Synthetic oligonucleotide
  Antisense strand to SEQ ID NO: 538591
uuggaacacauugaucuaa

SEQ ID NO: 538593 - RNA, 19 nt, Artificial Sequence
  Description of Artificial Sequence: Synthetic oligonucleotide
  Sense strand starting at position 464 of SEQ ID NO: 318125
aggaauuuauuggauaugu

SEQ ID NO: 538594 - RNA, 19 nt, Artificial Sequence
  Description of Artificial Sequence: Synthetic oligonucleotide
  Antisense strand to SEQ ID NO: 538593
acauauccaauaaauuccu

SEQ ID NO: 538595 - RNA, 19 nt, Artificial Sequence
  Description of Artificial Sequence: Synthetic oligonucleotide
  Sense strand starting at position 644 of SEQ ID NO: 318125
caacaagauggcuggguau

SEQ ID NO: 538596 - RNA, 19 nt, Artificial Sequence
  Description of Artificial Sequence: Synthetic oligonucleotide
  Antisense strand to SEQ ID NO: 538595
auacccagccaucuuguug

SEQ ID NO: 538597 - RNA, 19 nt, Artificial Sequence
  Description of Artificial Sequence: Synthetic oligonucleotide
  Sense strand starting at position 646 of SEQ ID NO: 318125
acaagauggcuggguauga

SEQ ID NO: 538598 - RNA, 19 nt, Artificial Sequence
  Description of Artificial Sequence: Synthetic oligonucleotide
  Antisense strand to SEQ ID NO: 538597
ucauacccagccaucuugu

SEQ ID NO: 538599 - RNA, 19 nt, Artificial Sequence
  Description of Artificial Sequence: Synthetic oligonucleotide
  Sense strand starting at position 647 of SEQ ID NO: 318125
caagauggcuggguaugaa

SEQ ID NO: 538600 - RNA, 19 nt, Artificial Sequence
  Description of Artificial Sequence: Synthetic oligonucleotide
  Antisense strand to SEQ ID NO: 538599
uucauacccagccaucuug

SEQ ID NO: 538601 - RNA, 19 nt, Artificial Sequence
  Description of Artificial Sequence: Synthetic oligonucleotide
  Sense strand starting at position 655 of SEQ ID NO: 318125
cuggguaugaaauggcaga

SEQ ID NO: 538602 - RNA, 19 nt, Artificial Sequence
  Description of Artificial Sequence: Synthetic oligonucleotide
  Antisense strand to SEQ ID NO: 538601
ucugccauuucauacccag

SEQ ID NO: 538603 - RNA, 19 nt, Artificial Sequence
  Description of Artificial Sequence: Synthetic oligonucleotide
  Sense strand starting at position 668 of SEQ ID NO: 318125
ggcagaaggguuugaggau

SEQ ID NO: 538604 - RNA, 19 nt, Artificial Sequence
  Description of Artificial Sequence: Synthetic oligonucleotide
  Antisense strand to SEQ ID NO: 538603
auccucaaacccuucugcc

SEQ ID NO: 538605 - RNA, 19 nt, Artificial Sequence
  Description of Artificial Sequence: Synthetic oligonucleotide
  Sense strand starting at position 677 of SEQ ID NO: 318125
guuugaggauuaccaaagu

SEQ ID NO: 538606 - RNA, 19 nt, Artificial Sequence
  Description of Artificial Sequence: Synthetic oligonucleotide
  Antisense strand to SEQ ID NO: 538605
acuuugguaauccucaaac

SEQ ID NO: 538607 - RNA, 19 nt, Artificial Sequence
  Description of Artificial Sequence: Synthetic oligonucleotide
  Sense strand starting at position 687 of SEQ ID NO: 318125
uaccaaagugauugaugca

SEQ ID NO: 538608 - RNA, 19 nt, Artificial Sequence
  Description of Artificial Sequence: Synthetic oligonucleotide
  Antisense strand to SEQ ID NO: 538607
ugcaucaaucacuuuggua

SEQ ID NO: 538609 - RNA, 19 nt, Artificial Sequence
  Description of Artificial Sequence: Synthetic oligonucleotide
  Sense strand starting at position 986 of SEQ ID NO: 318125
acaucuguucuguaaugaa

SEQ ID NO: 538610 - RNA, 19 nt, Artificial Sequence
  Description of Artificial Sequence: Synthetic oligonucleotide
  Antisense strand to SEQ ID NO: 538609
uucauuacagaacagaugu

SEQ ID NO: 538611 - RNA, 19 nt, Artificial Sequence
  Description of Artificial Sequence: Synthetic oligonucleotide
  Sense strand starting at position 1463 of SEQ ID NO: 318125
augcuuuaugcuuagauua

SEQ ID NO: 538612 - RNA, 19 nt, Artificial Sequence
  Description of Artificial Sequence: Synthetic oligonucleotide
  Antisense strand to SEQ ID NO: 538611
uaaucuaagcauaaagcau

SEQ ID NO: 538613 - RNA, 19 nt, Artificial Sequence
  Description of Artificial Sequence: Synthetic oligonucleotide
  Sense strand starting at position 1516 of SEQ ID NO: 318125
agucuuauuugugcauaua

SEQ ID NO: 538614 - RNA, 19 nt, Artificial Sequence
  Description of Artificial Sequence: Synthetic oligonucleotide
  Antisense strand to SEQ ID NO: 538613
uauaugcacaaauaagacu

SEQ ID NO: 538615 - RNA, 19 nt, Artificial Sequence
  Description of Artificial Sequence: Synthetic oligonucleotide
  Sense strand starting at position 1828 of SEQ ID NO: 318125
agaucuuaccugugaguag

SEQ ID NO: 538616 - RNA, 19 nt, Artificial Sequence
  Description of Artificial Sequence: Synthetic oligonucleotide
  Antisense strand to SEQ ID NO: 538615
cuacucacagguaagaucu

SEQ ID NO: 538617 - RNA, 19 nt, Artificial Sequence
  Description of Artificial Sequence: Synthetic oligonucleotide
  Sense strand starting at position 1832 of SEQ ID NO: 318125
cuuaccugugaguagacaa

SEQ ID NO: 538618 - RNA, 19 nt, Artificial Sequence
  Description of Artificial Sequence: Synthetic oligonucleotide
  Antisense strand to SEQ ID NO: 538617
uugucuacucacagguaag

SEQ ID NO: 538619 - RNA, 19 nt, Artificial Sequence
  Description of Artificial Sequence: Synthetic oligonucleotide
  Sense strand starting at position 2050 of SEQ ID NO: 318125
gucagacuccuccauuauu

SEQ ID NO: 538620 - RNA, 19 nt, Artificial Sequence
  Description of Artificial Sequence: Synthetic oligonucleotide
  Antisense strand to SEQ ID NO: 538619
aauaauggaggagucugac

SEQ ID NO: 538621 - RNA, 19 nt, Artificial Sequence
  Description of Artificial Sequence: Synthetic oligonucleotide
  Sense strand starting at position 2066 of SEQ ID NO: 318125
auuaaugugccugaggaug

SEQ ID NO: 538622 - RNA, 19 nt, Artificial Sequence
  Description of Artificial Sequence: Synthetic oligonucleotide
  Antisense strand to SEQ ID NO: 538621
cauccucaggcacauuaau

SEQ ID NO: 538623 - RNA, 19 nt, Artificial Sequence
  Description of Artificial Sequence: Synthetic oligonucleotide
  Sense strand starting at position 2127 of SEQ ID NO: 318125
cacugcucucgagaugaua

SEQ ID NO: 538624 - RNA, 19 nt, Artificial Sequence
  Description of Artificial Sequence: Synthetic oligonucleotide
  Antisense strand to SEQ ID NO: 538623
uaucaucucgagagcagug

SEQ ID NO: 538625 - RNA, 19 nt, Artificial Sequence
  Description of Artificial Sequence: Synthetic oligonucleotide
  Sense strand starting at position 2130 of SEQ ID NO: 318125
ugcucucgagaugauacau

SEQ ID NO: 538626 - RNA, 19 nt, Artificial Sequence
  Description of Artificial Sequence: Synthetic oligonucleotide
  Antisense strand to SEQ ID NO: 538625
auguaucaucucgagagca

SEQ ID NO: 538627 - RNA, 19 nt, Artificial Sequence
  Description of Artificial Sequence: Synthetic oligonucleotide
  Sense strand starting at position 2237 of SEQ ID NO: 318125
gggcuauacucauuacaau

SEQ ID NO: 538628 - RNA, 19 nt, Artificial Sequence
  Description of Artificial Sequence: Synthetic oligonucleotide
  Antisense strand to SEQ ID NO: 538627
auuguaaugaguauagccc

SEQ ID NO: 538629 - RNA, 19 nt, Artificial Sequence
  Description of Artificial Sequence: Synthetic oligonucleotide
  Sense strand starting at position 2328 of SEQ ID NO: 318125
gggaaacuauuguuugaau

SEQ ID NO: 538630 - RNA, 19 nt, Artificial Sequence
  Description of Artificial Sequence: Synthetic oligonucleotide
  Antisense strand to SEQ ID NO: 538629
auucaaacaauaguuuccc

SEQ ID NO: 538631 - RNA, 19 nt, Artificial Sequence
  Description of Artificial Sequence: Synthetic oligonucleotide
  Sense strand starting at position 2329 of SEQ ID NO: 318125
ggaaacuauuguuugaaua

SEQ ID NO: 538632 - RNA, 19 nt, Artificial Sequence
  Description of Artificial Sequence: Synthetic oligonucleotide
  Antisense strand to SEQ ID NO: 538631
uauucaaacaauaguuucc

SEQ ID NO: 538633 - RNA, 19 nt, Artificial Sequence
  Description of Artificial Sequence: Synthetic oligonucleotide
  Sense strand starting at position 2388 of SEQ ID NO: 318125
acaggaaacagucacguau

SEQ ID NO: 538634 - RNA, 19 nt, Artificial Sequence
  Description of Artificial Sequence: Synthetic oligonucleotide
  Antisense strand to SEQ ID NO: 538633
auacgugacuguuuccugu

SEQ ID NO: 538635 - RNA, 19 nt, Artificial Sequence
  Description of Artificial Sequence: Synthetic oligonucleotide
  Sense strand starting at position 2855 of SEQ ID NO: 318125
ucgugaugacuuuaaugga

SEQ ID NO: 538636 - RNA, 19 nt, Artificial Sequence
  Description of Artificial Sequence: Synthetic oligonucleotide
  Antisense strand to SEQ ID NO: 538635
uccauuaaagucaucacga

SEQ ID NO: 538637 - RNA, 19 nt, Artificial Sequence
  Description of Artificial Sequence: Synthetic oligonucleotide
  Sense strand starting at position 2914 of SEQ ID NO: 318125
ccauacuucucacugggaa

SEQ ID NO: 538638 - RNA, 19 nt, Artificial Sequence
  Description of Artificial Sequence: Synthetic oligonucleotide
  Antisense strand to SEQ ID NO: 538637
uucccagugagaaguaugg

SEQ ID NO: 538639 - RNA, 19 nt, Artificial Sequence
  Description of Artificial Sequence: Synthetic oligonucleotide
  Sense strand starting at position 2917 of SEQ ID NO: 318125
uacuucucacugggaaagu

SEQ ID NO: 538640 - RNA, 19 nt, Artificial Sequence
  Description of Artificial Sequence: Synthetic oligonucleotide
  Antisense strand to SEQ ID NO: 538639
acuuucccagugagaagua

SEQ ID NO: 538641 - RNA, 19 nt, Artificial Sequence
  Description of Artificial Sequence: Synthetic oligonucleotide
  Sense strand starting at position 3056 of SEQ ID NO: 318125
cugacucagcaggaaaguu

SEQ ID NO: 538642 - RNA, 19 nt, Artificial Sequence
  Description of Artificial Sequence: Synthetic oligonucleotide
  Antisense strand to SEQ ID NO: 538641
aacuuuccugcugagucag

SEQ ID NO: 538643 - RNA, 19 nt, Artificial Sequence
  Description of Artificial Sequence: Synthetic oligonucleotide
  Sense strand starting at position 3066 of SEQ ID NO: 318125
aggaaaguuucucuuccag

SEQ ID NO: 538644 - RNA, 19 nt, Artificial Sequence
  Description of Artificial Sequence: Synthetic oligonucleotide
  Antisense strand to SEQ ID NO: 538643
cuggaagagaaacuuuccu

SEQ ID NO: 538645 - RNA, 19 nt, Artificial Sequence
  Description of Artificial Sequence: Synthetic oligonucleotide
  Sense strand starting at position 3093 of SEQ ID NO: 318125
ggguuacauguggaaugua

SEQ ID NO: 538646 - RNA, 19 nt, Artificial Sequence
  Description of Artificial Sequence: Synthetic oligonucleotide
  Antisense strand to SEQ ID NO: 538645
uacauuccacauguaaccc

SEQ ID NO: 538647 - RNA, 19 nt, Artificial Sequence
  Description of Artificial Sequence: Synthetic oligonucleotide
  Sense strand starting at position 3096 of SEQ ID NO: 318125
uuacauguggaauguauca

SEQ ID NO: 538648 - RNA, 19 nt, Artificial Sequence
  Description of Artificial Sequence: Synthetic oligonucleotide
  Antisense strand to SEQ ID NO: 538647
ugauacauuccacauguaa

SEQ ID NO: 538649 - RNA, 19 nt, Artificial Sequence
  Description of Artificial Sequence: Synthetic oligonucleotide
  Sense strand starting at position 3107 of SEQ ID NO: 318125
auguaucagcacuagaucu

SEQ ID NO: 538650 - RNA, 19 nt, Artificial Sequence
  Description of Artificial Sequence: Synthetic oligonucleotide
  Antisense strand to SEQ ID NO: 538649
agaucuagugcugauacau

SEQ ID NO: 538651 - RNA, 19 nt, Artificial Sequence
  Description of Artificial Sequence: Synthetic oligonucleotide
  Sense strand starting at position 3122 of SEQ ID NO: 318125
aucucagaagagugccaua

SEQ ID NO: 538652 - RNA, 19 nt, Artificial Sequence
  Description of Artificial Sequence: Synthetic oligonucleotide
  Antisense strand to SEQ ID NO: 538651
uauggcacucuucugagau

SEQ ID NO: 538653 - RNA, 19 nt, Artificial Sequence
  Description of Artificial Sequence: Synthetic oligonucleotide
  Sense strand starting at position 3127 of SEQ ID NO: 318125
agaagagugccauaugccu

SEQ ID NO: 538654 - RNA, 19 nt, Artificial Sequence
  Description of Artificial Sequence: Synthetic oligonucleotide
  Antisense strand to SEQ ID NO: 538653
aggcauauggcacucuucu

SEQ ID NO: 538655 - RNA, 19 nt, Artificial Sequence
  Description of Artificial Sequence: Synthetic oligonucleotide
  Sense strand starting at position 3134 of SEQ ID NO: 318125
ugccauaugccuuacaaga

SEQ ID NO: 538656 - RNA, 19 nt, Artificial Sequence
  Description of Artificial Sequence: Synthetic oligonucleotide
  Antisense strand to SEQ ID NO: 538655
ucuuguaaggcauauggca

SEQ ID NO: 538657 - RNA, 19 nt, Artificial Sequence
  Description of Artificial Sequence: Synthetic oligonucleotide
  Sense strand starting at position 3188 of SEQ ID NO: 318125
acuggagaguacuuaucuu

SEQ ID NO: 538658 - RNA, 19 nt, Artificial Sequence
  Description of Artificial Sequence: Synthetic oligonucleotide
  Antisense strand to SEQ ID NO: 538657
aagauaaguacucuccagu

SEQ ID NO: 538659 - RNA, 19 nt, Artificial Sequence
  Description of Artificial Sequence: Synthetic oligonucleotide
  Sense strand starting at position 3503 of SEQ ID NO: 318125
gccagaauauaucuaauga

SEQ ID NO: 538660 - RNA, 19 nt, Artificial Sequence
  Description of Artificial Sequence: Synthetic oligonucleotide
  Antisense strand to SEQ ID NO: 538659
ucauuagauauauucuggc

SEQ ID NO: 538661 - RNA, 19 nt, Artificial Sequence
  Description of Artificial Sequence: Synthetic oligonucleotide
  Sense strand starting at position 3960 of SEQ ID NO: 318125
aguuuauuaccugaguaua

SEQ ID NO: 538662 - RNA, 19 nt, Artificial Sequence
  Description of Artificial Sequence: Synthetic oligonucleotide
  Antisense strand to SEQ ID NO: 538661
uauacucagguaauaaacu

SEQ ID NO: 538663 - RNA, 19 nt, Artificial Sequence
  Description of Artificial Sequence: Synthetic oligonucleotide
  Sense strand starting at position 7 of SEQ ID NO: 318126
agugaaaugaugugaugac

SEQ ID NO: 538664 - RNA, 19 nt, Artificial Sequence
  Description of Artificial Sequence: Synthetic oligonucleotide
  Antisense strand to SEQ ID NO: 538663
gucaucacaucauuucacu

SEQ ID NO: 538665 - RNA, 19 nt, Artificial Sequence
  Description of Artificial Sequence: Synthetic oligonucleotide
  Sense strand starting at position 8 of SEQ ID NO: 318126
gugaaaugaugugaugacu

SEQ ID NO: 538666 - RNA, 19 nt, Artificial Sequence
  Description of Artificial Sequence: Synthetic oligonucleotide
  Antisense strand to SEQ ID NO: 538665
agucaucacaucauuucac

SEQ ID NO: 538667 - RNA, 19 nt, Artificial Sequence
  Description of Artificial Sequence: Synthetic oligonucleotide
  Sense strand starting at position 30 of SEQ ID NO: 318126
cggacagacagauguuaau

SEQ ID NO: 538668 - RNA, 19 nt, Artificial Sequence
  Description of Artificial Sequence: Synthetic oligonucleotide
  Antisense strand to SEQ ID NO: 538667
auuaacaucugucuguccg

SEQ ID NO: 538669 - RNA, 19 nt, Artificial Sequence
  Description of Artificial Sequence: Synthetic oligonucleotide
  Sense strand starting at position 664 of SEQ ID NO: 318126
agcuaucucuuacagaaag

SEQ ID NO: 538670 - RNA, 19 nt, Artificial Sequence
  Description of Artificial Sequence: Synthetic oligonucleotide
  Antisense strand to SEQ ID NO: 538669
cuuucuguaagagauagcu

SEQ ID NO: 538671 - RNA, 19 nt, Artificial Sequence
  Description of Artificial Sequence: Synthetic oligonucleotide
  Sense strand starting at position 1070 of SEQ ID NO: 318126
aaguaaauuuguccacggu

SEQ ID NO: 538672 - RNA, 19 nt, Artificial Sequence
  Description of Artificial Sequence: Synthetic oligonucleotide
  Antisense strand to SEQ ID NO: 538671
accguggacaaauuuacuu

SEQ ID NO: 538673 - RNA, 19 nt, Artificial Sequence
  Description of Artificial Sequence: Synthetic oligonucleotide
  Sense strand starting at position 1159 of SEQ ID NO: 318126
cugagaaaguuacucuugu

SEQ ID NO: 538674 - RNA, 19 nt, Artificial Sequence
  Description of Artificial Sequence: Synthetic oligonucleotide
  Antisense strand to SEQ ID NO: 538673
acaagaguaacuuucucag

SEQ ID NO: 538675 - RNA, 19 nt, Artificial Sequence
  Description of Artificial Sequence: Synthetic oligonucleotide
  Sense strand starting at position 1197 of SEQ ID NO: 318126
ucccucuaucccgauagga

SEQ ID NO: 538676 - RNA, 19 nt, Artificial Sequence
  Description of Artificial Sequence: Synthetic oligonucleotide
  Antisense strand to SEQ ID NO: 538675
uccuaucgggauagaggga

SEQ ID NO: 538677 - RNA, 19 nt, Artificial Sequence
  Description of Artificial Sequence: Synthetic oligonucleotide
  Sense strand starting at position 1199 of SEQ ID NO: 318126
ccucuaucccgauaggacu

SEQ ID NO: 538678 - RNA, 19 nt, Artificial Sequence
  Description of Artificial Sequence: Synthetic oligonucleotide
  Antisense strand to SEQ ID NO: 538677
aguccuaucgggauagagg

SEQ ID NO: 538679 - RNA, 19 nt, Artificial Sequence
  Description of Artificial Sequence: Synthetic oligonucleotide
  Sense strand starting at position 1571 of SEQ ID NO: 318126
cagggcauucccggagaga

SEQ ID NO: 538680 - RNA, 19 nt, Artificial Sequence
  Description of Artificial Sequence: Synthetic oligonucleotide
  Antisense strand to SEQ ID NO: 538679
ucucuccgggaaugcccug

SEQ ID NO: 538681 - RNA, 19 nt, Artificial Sequence
  Description of Artificial Sequence: Synthetic oligonucleotide
  Sense strand starting at position 1736 of SEQ ID NO: 318126
ccuccugaucgccagagaa

SEQ ID NO: 538682 - RNA, 19 nt, Artificial Sequence
  Description of Artificial Sequence: Synthetic oligonucleotide
  Antisense strand to SEQ ID NO: 538681
uucucuggcgaucaggagg

SEQ ID NO: 538683 - RNA, 19 nt, Artificial Sequence
  Description of Artificial Sequence: Synthetic oligonucleotide
  Sense strand starting at position 1827 of SEQ ID NO: 318126
cccggaguccggcacuaaa

SEQ ID NO: 538684 - RNA, 19 nt, Artificial Sequence
  Description of Artificial Sequence: Synthetic oligonucleotide
  Antisense strand to SEQ ID NO: 538683
uuuagugccggacuccggg

SEQ ID NO: 538685 - RNA, 19 nt, Artificial Sequence
  Description of Artificial Sequence: Synthetic oligonucleotide
  Sense strand starting at position 1892 of SEQ ID NO: 318126
gacccaagccauugugaga

SEQ ID NO: 538686 - RNA, 19 nt, Artificial Sequence
  Description of Artificial Sequence: Synthetic oligonucleotide
  Antisense strand to SEQ ID NO: 538685
ucucacaauggcuuggguc

SEQ ID NO: 538687 - RNA, 19 nt, Artificial Sequence
  Description of Artificial Sequence: Synthetic oligonucleotide
  Sense strand starting at position 2003 of SEQ ID NO: 318126
gggaucucgcgcgagacuu

SEQ ID NO: 538688 - RNA, 19 nt, Artificial Sequence
  Description of Artificial Sequence: Synthetic oligonucleotide
  Antisense strand to SEQ ID NO: 538687
aagucucgcgcgagauccc

SEQ ID NO: 538689 - RNA, 19 nt, Artificial Sequence
  Description of Artificial Sequence: Synthetic oligonucleotide
  Sense strand starting at position 2047 of SEQ ID NO: 318126
gggaguuguuguccacgau

SEQ ID NO: 538690 - RNA, 19 nt, Artificial Sequence
  Description of Artificial Sequence: Synthetic oligonucleotide
  Antisense strand to SEQ ID NO: 538689
aucguggacaacaacuccc

SEQ ID NO: 538691 - RNA, 19 nt, Artificial Sequence
  Description of Artificial Sequence: Synthetic oligonucleotide
  Sense strand starting at position 2048 of SEQ ID NO: 318126
ggaguuguuguccacgauc

SEQ ID NO: 538692 - RNA, 19 nt, Artificial Sequence
  Description of Artificial Sequence: Synthetic oligonucleotide
  Antisense strand to SEQ ID NO: 538691
gaucguggacaacaacucc

SEQ ID NO: 538693 - RNA, 19 nt, Artificial Sequence
  Description of Artificial Sequence: Synthetic oligonucleotide
  Sense strand starting at position 2195 of SEQ ID NO: 318126
gugccuggguccgugacaa

SEQ ID NO: 538694 - RNA, 19 nt, Artificial Sequence
  Description of Artificial Sequence: Synthetic oligonucleotide
  Antisense strand to SEQ ID NO: 538693
uugucacggacccaggcac

SEQ ID NO: 538695 - RNA, 19 nt, Artificial Sequence
  Description of Artificial Sequence: Synthetic oligonucleotide
  Sense strand starting at position 2295 of SEQ ID NO: 318126
gagcacuugucauccuguu

SEQ ID NO: 538696 - RNA, 19 nt, Artificial Sequence
  Description of Artificial Sequence: Synthetic oligonucleotide
  Antisense strand to SEQ ID NO: 538695
aacaggaugacaagugcuc

SEQ ID NO: 538697 - RNA, 19 nt, Artificial Sequence
  Description of Artificial Sequence: Synthetic oligonucleotide
  Sense strand starting at position 2335 of SEQ ID NO: 318126
agcugagacugggagagau

SEQ ID NO: 538698 - RNA, 19 nt, Artificial Sequence
  Description of Artificial Sequence: Synthetic oligonucleotide
  Antisense strand to SEQ ID NO: 538697
aucucucccagucucagcu

SEQ ID NO: 538699 - RNA, 19 nt, Artificial Sequence
  Description of Artificial Sequence: Synthetic oligonucleotide
  Sense strand starting at position 2429 of SEQ ID NO: 318126
guacuaguagcugaaccaa

SEQ ID NO: 538700 - RNA, 19 nt, Artificial Sequence
  Description of Artificial Sequence: Synthetic oligonucleotide
  Antisense strand to SEQ ID NO: 538699
uugguucagcuacuaguac

SEQ ID NO: 538701 - RNA, 19 nt, Artificial Sequence
  Description of Artificial Sequence: Synthetic oligonucleotide
  Sense strand starting at position 2660 of SEQ ID NO: 318126
guccaaagcucgccaucaa

SEQ ID NO: 538702 - RNA, 19 nt, Artificial Sequence
  Description of Artificial Sequence: Synthetic oligonucleotide
  Antisense strand to SEQ ID NO: 538701
uugauggcgagcuuuggac

SEQ ID NO: 538703 - RNA, 19 nt, Artificial Sequence
  Description of Artificial Sequence: Synthetic oligonucleotide
  Sense strand starting at position 2661 of SEQ ID NO: 318126
uccaaagcucgccaucaaa

SEQ ID NO: 538704 - RNA, 19 nt, Artificial Sequence
  Description of Artificial Sequence: Synthetic oligonucleotide
  Antisense strand to SEQ ID NO: 538703
uuugauggcgagcuuugga

SEQ ID NO: 538705 - RNA, 19 nt, Artificial Sequence
  Description of Artificial Sequence: Synthetic oligonucleotide
  Sense strand starting at position 2711 of SEQ ID NO: 318126
cagggugaaugucacauuu

SEQ ID NO: 538706 - RNA, 19 nt, Artificial Sequence
  Description of Artificial Sequence: Synthetic oligonucleotide
  Antisense strand to SEQ ID NO: 538705
aaaugugacauucacccug

SEQ ID NO: 538707 - RNA, 19 nt, Artificial Sequence
  Description of Artificial Sequence: Synthetic oligonucleotide
  Sense strand starting at position 2713 of SEQ ID NO: 318126
gggugaaugucacauuuag

SEQ ID NO: 538708 - RNA, 19 nt, Artificial Sequence
  Description of Artificial Sequence: Synthetic oligonucleotide
  Antisense strand to SEQ ID NO: 538707
cuaaaugugacauucaccc

SEQ ID NO: 538709 - RNA, 19 nt, Artificial Sequence
  Description of Artificial Sequence: Synthetic oligonucleotide
  Sense strand starting at position 2781 of SEQ ID NO: 318126
gcucaugcgacuugaaacu

SEQ ID NO: 538710 - RNA, 19 nt, Artificial Sequence
  Description of Artificial Sequence: Synthetic oligonucleotide
  Antisense strand to SEQ ID NO: 538709
aguuucaagucgcaugagc

SEQ ID NO: 538711 - RNA, 19 nt, Artificial Sequence
  Description of Artificial Sequence: Synthetic oligonucleotide
  Sense strand starting at position 2824 of SEQ ID NO: 318126
gcuugagugcacuaagaau

SEQ ID NO: 538712 - RNA, 19 nt, Artificial Sequence
  Description of Artificial Sequence: Synthetic oligonucleotide
  Antisense strand to SEQ ID NO: 538711
auucuuagugcacucaagc

SEQ ID NO: 538713 - RNA, 19 nt, Artificial Sequence
  Description of Artificial Sequence: Synthetic oligonucleotide
  Sense strand starting at position 2839 of SEQ ID NO: 318126
gaauuaaagucuuugauga

SEQ ID NO: 538714 - RNA, 19 nt, Artificial Sequence
  Description of Artificial Sequence: Synthetic oligonucleotide
  Antisense strand to SEQ ID NO: 538713
ucaucaaagacuuuaauuc

SEQ ID NO: 538715 - RNA, 19 nt, Artificial Sequence
  Description of Artificial Sequence: Synthetic oligonucleotide
  Sense strand starting at position 2881 of SEQ ID NO: 318126
gcacaauuacauugcagua

SEQ ID NO: 538716 - RNA, 19 nt, Artificial Sequence
  Description of Artificial Sequence: Synthetic oligonucleotide
  Antisense strand to SEQ ID NO: 538715
uacugcaauguaauugugc

SEQ ID NO: 538717 - RNA, 19 nt, Artificial Sequence
  Description of Artificial Sequence: Synthetic oligonucleotide
  Sense strand starting at position 2895 of SEQ ID NO: 318126
caguauaauuguguguaua

SEQ ID NO: 538718 - RNA, 19 nt, Artificial Sequence
  Description of Artificial Sequence: Synthetic oligonucleotide
  Antisense strand to SEQ ID NO: 538717
uauacacacaauuauacug

SEQ ID NO: 538719 - RNA, 19 nt, Artificial Sequence
  Description of Artificial Sequence: Synthetic oligonucleotide
  Sense strand starting at position 2897 of SEQ ID NO: 318126
guauaauuguguguauaug

SEQ ID NO: 538720 - RNA, 19 nt, Artificial Sequence
  Description of Artificial Sequence: Synthetic oligonucleotide
  Antisense strand to SEQ ID NO: 538719
cauauacacacaauuauac

SEQ ID NO: 538721 - RNA, 19 nt, Artificial Sequence
  Description of Artificial Sequence: Synthetic oligonucleotide
  Sense strand starting at position 2938 of SEQ ID NO: 318126
agguguuccuuuguuaauu

SEQ ID NO: 538722 - RNA, 19 nt, Artificial Sequence
  Description of Artificial Sequence: Synthetic oligonucleotide
  Antisense strand to SEQ ID NO: 538721
aauuaacaaaggaacaccu

SEQ ID NO: 538723 - RNA, 19 nt, Artificial Sequence
  Description of Artificial Sequence: Synthetic oligonucleotide
  Sense strand starting at position 2939 of SEQ ID NO: 318126
gguguuccuuuguuaauuu

SEQ ID NO: 538724 - RNA, 19 nt, Artificial Sequence
  Description of Artificial Sequence: Synthetic oligonucleotide
  Antisense strand to SEQ ID NO: 538723
aaauuaacaaaggaacacc

SEQ ID NO: 538725 - RNA, 19 nt, Artificial Sequence
  Description of Artificial Sequence: Synthetic oligonucleotide
  Sense strand starting at position 3037 of SEQ ID NO: 318126
ggauguauaucaccucuca

SEQ ID NO: 538726 - RNA, 19 nt, Artificial Sequence
  Description of Artificial Sequence: Synthetic oligonucleotide
  Antisense strand to SEQ ID NO: 538725
ugagaggugauauacaucc

SEQ ID NO: 538727 - RNA, 19 nt, Artificial Sequence
  Description of Artificial Sequence: Synthetic oligonucleotide
  Sense strand starting at position 3104 of SEQ ID NO: 318126
gugggaucaucucauuuau

SEQ ID NO: 538728 - RNA, 19 nt, Artificial Sequence
  Description of Artificial Sequence: Synthetic oligonucleotide
  Antisense strand to SEQ ID NO: 538727
auaaaugagaugaucccac

SEQ ID NO: 538729 - RNA, 19 nt, Artificial Sequence
  Description of Artificial Sequence: Synthetic oligonucleotide
  Sense strand starting at position 3149 of SEQ ID NO: 318126
uaagacuuuccuggaaguu

SEQ ID NO: 538730 - RNA, 19 nt, Artificial Sequence
  Description of Artificial Sequence: Synthetic oligonucleotide
  Antisense strand to SEQ ID NO: 538729
aacuuccaggaaagucuua

SEQ ID NO: 538731 - RNA, 19 nt, Artificial Sequence
  Description of Artificial Sequence: Synthetic oligonucleotide
  Sense strand starting at position 3158 of SEQ ID NO: 318126
ccuggaaguuacuauuuga

SEQ ID NO: 538732 - RNA, 19 nt, Artificial Sequence
  Description of Artificial Sequence: Synthetic oligonucleotide
  Antisense strand to SEQ ID NO: 538731
ucaaauaguaacuuccagg

SEQ ID NO: 538733 - RNA, 19 nt, Artificial Sequence
  Description of Artificial Sequence: Synthetic oligonucleotide
  Sense strand starting at position 3539 of SEQ ID NO: 318126
ggguacauggguugagaga

SEQ ID NO: 538734 - RNA, 19 nt, Artificial Sequence
  Description of Artificial Sequence: Synthetic oligonucleotide
  Antisense strand to SEQ ID NO: 538733
ucucucaacccauguaccc

SEQ ID NO: 538735 - RNA, 19 nt, Artificial Sequence
  Description of Artificial Sequence: Synthetic oligonucleotide
  Sense strand starting at position 3672 of SEQ ID NO: 318126
ccuauuccuucugauuugu

SEQ ID NO: 538736 - RNA, 19 nt, Artificial Sequence
  Description of Artificial Sequence: Synthetic oligonucleotide
  Antisense strand to SEQ ID NO: 538735
acaaaucagaaggaauagg

SEQ ID NO: 538737 - RNA, 19 nt, Artificial Sequence
  Description of Artificial Sequence: Synthetic oligonucleotide
  Sense strand starting at position 3919 of SEQ ID NO: 318126
ccugauauuugugguacca

SEQ ID NO: 538738 - RNA, 19 nt, Artificial Sequence
  Description of Artificial Sequence: Synthetic oligonucleotide
  Antisense strand to SEQ ID NO: 538737
ugguaccacaaauaucagg

SEQ ID NO: 538739 - RNA, 19 nt, Artificial Sequence
  Description of Artificial Sequence: Synthetic oligonucleotide
  Sense strand starting at position 3921 of SEQ ID NO: 318126
ugauauuugugguaccaau

SEQ ID NO: 538740 - RNA, 19 nt, Artificial Sequence
  Description of Artificial Sequence: Synthetic oligonucleotide
  Antisense strand to SEQ ID NO: 538739
auugguaccacaaauauca

SEQ ID NO: 538741 - RNA, 19 nt, Artificial Sequence
  Description of Artificial Sequence: Synthetic oligonucleotide
  Sense strand starting at position 3962 of SEQ ID NO: 318126
gugcauagcaccuauguga

SEQ ID NO: 538742 - RNA, 19 nt, Artificial Sequence
  Description of Artificial Sequence: Synthetic oligonucleotide
  Antisense strand to SEQ ID NO: 538741
ucacauaggugcuaugcac

SEQ ID NO: 538743 - RNA, 19 nt, Artificial Sequence
  Description of Artificial Sequence: Synthetic oligonucleotide
  Sense strand starting at position 79 of SEQ ID NO: 318127
gagugucuacuauggccua

SEQ ID NO: 538744 - RNA, 19 nt, Artificial Sequence
  Description of Artificial Sequence: Synthetic oligonucleotide
  Antisense strand to SEQ ID NO: 538743
uaggccauaguagacacuc

SEQ ID NO: 538745 - RNA, 19 nt, Artificial Sequence
  Description of Artificial Sequence: Synthetic oligonucleotide
  Sense strand starting at position 111 of SEQ ID NO: 318127
ucugauaguccauagugag

SEQ ID NO: 538746 - RNA, 19 nt, Artificial Sequence
  Description of Artificial Sequence: Synthetic oligonucleotide
  Antisense strand to SEQ ID NO: 538745
cucacuauggacuaucaga

SEQ ID NO: 538747 - RNA, 19 nt, Artificial Sequence
  Description of Artificial Sequence: Synthetic oligonucleotide
  Sense strand starting at position 145 of SEQ ID NO: 318127
ccaugcucucauggaacuu

SEQ ID NO: 538748 - RNA, 19 nt, Artificial Sequence
  Description of Artificial Sequence: Synthetic oligonucleotide
  Antisense strand to SEQ ID NO: 538747
aaguuccaugagagcaugg

SEQ ID NO: 538749 - RNA, 19 nt, Artificial Sequence
  Description of Artificial Sequence: Synthetic oligonucleotide
  Sense strand starting at position 157 of SEQ ID NO: 318127
ggaacuuuauaagucucua

SEQ ID NO: 538750 - RNA, 19 nt, Artificial Sequence
  Description of Artificial Sequence: Synthetic oligonucleotide
  Antisense strand to SEQ ID NO: 538749
uagagacuuauaaaguucc

SEQ ID NO: 538751 - RNA, 19 nt, Artificial Sequence
  Description of Artificial Sequence: Synthetic oligonucleotide
  Sense strand starting at position 161 of SEQ ID NO: 318127
cuuuauaagucucuaagag

SEQ ID NO: 538752 - RNA, 19 nt, Artificial Sequence
  Description of Artificial Sequence: Synthetic oligonucleotide
  Antisense strand to SEQ ID NO: 538751
cucuuagagacuuauaaag

SEQ ID NO: 538753 - RNA, 19 nt, Artificial Sequence
  Description of Artificial Sequence: Synthetic oligonucleotide
  Sense strand starting at position 201 of SEQ ID NO: 318127
ucugacaauguauguuaau

SEQ ID NO: 538754 - RNA, 19 nt, Artificial Sequence
  Description of Artificial Sequence: Synthetic oligonucleotide
  Antisense strand to SEQ ID NO: 538753
auuaacauacauugucaga

SEQ ID NO: 538755 - RNA, 19 nt, Artificial Sequence
  Description of Artificial Sequence: Synthetic oligonucleotide
  Sense strand starting at position 202 of SEQ ID NO: 318127
cugacaauguauguuaaug

SEQ ID NO: 538756 - RNA, 19 nt, Artificial Sequence
  Description of Artificial Sequence: Synthetic oligonucleotide
  Antisense strand to SEQ ID NO: 538755
cauuaacauacauugucag

SEQ ID NO: 538757 - RNA, 19 nt, Artificial Sequence
  Description of Artificial Sequence: Synthetic oligonucleotide
  Sense strand starting at position 276 of SEQ ID NO: 318127
gccauuuagcaaugccuga

SEQ ID NO: 538758 - RNA, 19 nt, Artificial Sequence
  Description of Artificial Sequence: Synthetic oligonucleotide
  Antisense strand to SEQ ID NO: 538757
ucaggcauugcuaaauggc

SEQ ID NO: 538759 - RNA, 19 nt, Artificial Sequence
  Description of Artificial Sequence: Synthetic oligonucleotide
  Sense strand starting at position 341 of SEQ ID NO: 318127
ugacaucuaguggguaaau

SEQ ID NO: 538760 - RNA, 19 nt, Artificial Sequence
  Description of Artificial Sequence: Synthetic oligonucleotide
  Antisense strand to SEQ ID NO: 538759
auuuacccacuagauguca

SEQ ID NO: 538761 - RNA, 19 nt, Artificial Sequence
  Description of Artificial Sequence: Synthetic oligonucleotide
  Sense strand starting at position 353 of SEQ ID NO: 318127
gguaaaugccaagaaugcu

SEQ ID NO: 538762 - RNA, 19 nt, Artificial Sequence
  Description of Artificial Sequence: Synthetic oligonucleotide
  Antisense strand to SEQ ID NO: 538761
agcauucuuggcauuuacc

SEQ ID NO: 538763 - RNA, 19 nt, Artificial Sequence
  Description of Artificial Sequence: Synthetic oligonucleotide
  Sense strand starting at position 430 of SEQ ID NO: 318127
ucaauaaugcuguaacuga

SEQ ID NO: 538764 - RNA, 19 nt, Artificial Sequence
  Description of Artificial Sequence: Synthetic oligonucleotide
  Antisense strand to SEQ ID NO: 538763
ucaguuacagcauuauuga

SEQ ID NO: 538765 - RNA, 19 nt, Artificial Sequence
  Description of Artificial Sequence: Synthetic oligonucleotide
  Sense strand starting at position 483 of SEQ ID NO: 318127
ugaagcuauggugauacua

SEQ ID NO: 538766 - RNA, 19 nt, Artificial Sequence
  Description of Artificial Sequence: Synthetic oligonucleotide
  Antisense strand to SEQ ID NO: 538765
uaguaucaccauagcuuca

SEQ ID NO: 538767 - RNA, 19 nt, Artificial Sequence
  Description of Artificial Sequence: Synthetic oligonucleotide
  Sense strand starting at position 536 of SEQ ID NO: 318127
ccuauaugaccuugugcaa

SEQ ID NO: 538768 - RNA, 19 nt, Artificial Sequence
  Description of Artificial Sequence: Synthetic oligonucleotide
  Antisense strand to SEQ ID NO: 538767
uugcacaaggucauauagg

SEQ ID NO: 538769 - RNA, 19 nt, Artificial Sequence
  Description of Artificial Sequence: Synthetic oligonucleotide
  Sense strand starting at position 539 of SEQ ID NO: 318127
auaugaccuugugcaaauu

SEQ ID NO: 538770 - RNA, 19 nt, Artificial Sequence
  Description of Artificial Sequence: Synthetic oligonucleotide
  Antisense strand to SEQ ID NO: 538769
aauuugcacaaggucauau

SEQ ID NO: 538771 - RNA, 19 nt, Artificial Sequence
  Description of Artificial Sequence: Synthetic oligonucleotide
  Sense strand starting at position 782 of SEQ ID NO: 318127
gaccuuuaggauugcuagu

SEQ ID NO: 538772 - RNA, 19 nt, Artificial Sequence
  Description of Artificial Sequence: Synthetic oligonucleotide
  Antisense strand to SEQ ID NO: 538771
acuagcaauccuaaagguc

SEQ ID NO: 538773 - RNA, 19 nt, Artificial Sequence
  Description of Artificial Sequence: Synthetic oligonucleotide
  Sense strand starting at position 788 of SEQ ID NO: 318127
uaggauugcuagucuuuga

SEQ ID NO: 538774 - RNA, 19 nt, Artificial Sequence
  Description of Artificial Sequence: Synthetic oligonucleotide
  Antisense strand to SEQ ID NO: 538773
ucaaagacuagcaauccua

SEQ ID NO: 538775 - RNA, 19 nt, Artificial Sequence
  Description of Artificial Sequence: Synthetic oligonucleotide
  Sense strand starting at position 791 of SEQ ID NO: 318127
gauugcuagucuuugaccu

SEQ ID NO: 538776 - RNA, 19 nt, Artificial Sequence
  Description of Artificial Sequence: Synthetic oligonucleotide
  Antisense strand to SEQ ID NO: 538775
aggucaaagacuagcaauc

SEQ ID NO: 538777 - RNA, 19 nt, Artificial Sequence
  Description of Artificial Sequence: Synthetic oligonucleotide
  Sense strand starting at position 795 of SEQ ID NO: 318127
gcuagucuuugaccucaua

SEQ ID NO: 538778 - RNA, 19 nt, Artificial Sequence
  Description of Artificial Sequence: Synthetic oligonucleotide
  Antisense strand to SEQ ID NO: 538777
uaugaggucaaagacuagc

SEQ ID NO: 538779 - RNA, 19 nt, Artificial Sequence
  Description of Artificial Sequence: Synthetic oligonucleotide
  Sense strand starting at position 798 of SEQ ID NO: 318127
agucuuugaccucauacua

SEQ ID NO: 538780 - RNA, 19 nt, Artificial Sequence
  Description of Artificial Sequence: Synthetic oligonucleotide
  Antisense strand to SEQ ID NO: 538779
uaguaugaggucaaagacu

SEQ ID NO: 538781 - RNA, 19 nt, Artificial Sequence
  Description of Artificial Sequence: Synthetic oligonucleotide
  Sense strand starting at position 828 of SEQ ID NO: 318127
caauuauuggccugaggau

SEQ ID NO: 538782 - RNA, 19 nt, Artificial Sequence
  Description of Artificial Sequence: Synthetic oligonucleotide
  Antisense strand to SEQ ID NO: 538781
auccucaggccaauaauug

SEQ ID NO: 538783 - RNA, 19 nt, Artificial Sequence
  Description of Artificial Sequence: Synthetic oligonucleotide
  Sense strand starting at position 1235 of SEQ ID NO: 318127
augaacaauugagagaagu

SEQ ID NO: 538784 - RNA, 19 nt, Artificial Sequence
  Description of Artificial Sequence: Synthetic oligonucleotide
  Antisense strand to SEQ ID NO: 538783
acuucucucaauuguucau

SEQ ID NO: 538785 - RNA, 19 nt, Artificial Sequence
  Description of Artificial Sequence: Synthetic oligonucleotide
  Sense strand starting at position 1261 of SEQ ID NO: 318127
ggcauuucugaacgcgaac

SEQ ID NO: 538786 - RNA, 19 nt, Artificial Sequence
  Description of Artificial Sequence: Synthetic oligonucleotide
  Antisense strand to SEQ ID NO: 538785
guucgcguucagaaaugcc

SEQ ID NO: 538787 - RNA, 19 nt, Artificial Sequence
  Description of Artificial Sequence: Synthetic oligonucleotide
  Sense strand starting at position 1288 of SEQ ID NO: 318127
acagacaucuggcuccaaa

SEQ ID NO: 538788 - RNA, 19 nt, Artificial Sequence
  Description of Artificial Sequence: Synthetic oligonucleotide
  Antisense strand to SEQ ID NO: 538787
uuuggagccagaugucugu

SEQ ID NO: 538789 - RNA, 19 nt, Artificial Sequence
  Description of Artificial Sequence: Synthetic oligonucleotide
  Sense strand starting at position 1311 of SEQ ID NO: 318127
gaaggcuacgccuaaagua

SEQ ID NO: 538790 - RNA, 19 nt, Artificial Sequence
  Description of Artificial Sequence: Synthetic oligonucleotide
  Antisense strand to SEQ ID NO: 538789
uacuuuaggcguagccuuc

SEQ ID NO: 538791 - RNA, 19 nt, Artificial Sequence
  Description of Artificial Sequence: Synthetic oligonucleotide
  Sense strand starting at position 2134 of SEQ ID NO: 318127
gugaguaucugagcagguu

SEQ ID NO: 538792 - RNA, 19 nt, Artificial Sequence
  Description of Artificial Sequence: Synthetic oligonucleotide
  Antisense strand to SEQ ID NO: 538791
aaccugcucagauacucac

SEQ ID NO: 538793 - RNA, 19 nt, Artificial Sequence
  Description of Artificial Sequence: Synthetic oligonucleotide
  Sense strand starting at position 2157 of SEQ ID NO: 318127
gugaaaggccuuuguagau

SEQ ID NO: 538794 - RNA, 19 nt, Artificial Sequence
  Description of Artificial Sequence: Synthetic oligonucleotide
  Antisense strand to SEQ ID NO: 538793
aucuacaaaggccuuucac

SEQ ID NO: 538795 - RNA, 19 nt, Artificial Sequence
  Description of Artificial Sequence: Synthetic oligonucleotide
  Sense strand starting at position 2218 of SEQ ID NO: 318127
ggagaaguggguugcuuga

SEQ ID NO: 538796 - RNA, 19 nt, Artificial Sequence
  Description of Artificial Sequence: Synthetic oligonucleotide
  Antisense strand to SEQ ID NO: 538795
ucaagcaacccacuucucc

SEQ ID NO: 538797 - RNA, 19 nt, Artificial Sequence
  Description of Artificial Sequence: Synthetic oligonucleotide
  Sense strand starting at position 2308 of SEQ ID NO: 318127
gggucuuguuucucaggga

SEQ ID NO: 538798 - RNA, 19 nt, Artificial Sequence
  Description of Artificial Sequence: Synthetic oligonucleotide
  Antisense strand to SEQ ID NO: 538797
ucccugagaaacaagaccc

SEQ ID NO: 538799 - RNA, 19 nt, Artificial Sequence
  Description of Artificial Sequence: Synthetic oligonucleotide
  Sense strand starting at position 2312 of SEQ ID NO: 318127
cuuguuucucagggagaga

SEQ ID NO: 538800 - RNA, 19 nt, Artificial Sequence
  Description of Artificial Sequence: Synthetic oligonucleotide
  Antisense strand to SEQ ID NO: 538799
ucucucccugagaaacaag

SEQ ID NO: 538801 - RNA, 19 nt, Artificial Sequence
  Description of Artificial Sequence: Synthetic oligonucleotide
  Sense strand starting at position 2342 of SEQ ID NO: 318127
agagaagcagcuuagugaa

SEQ ID NO: 538802 - RNA, 19 nt, Artificial Sequence
  Description of Artificial Sequence: Synthetic oligonucleotide
  Antisense strand to SEQ ID NO: 538801
uucacuaagcugcuucucu

SEQ ID NO: 538803 - RNA, 19 nt, Artificial Sequence
  Description of Artificial Sequence: Synthetic oligonucleotide
  Sense strand starting at position 2358 of SEQ ID NO: 318127
gaauccuaguguguuagga

SEQ ID NO: 538804 - RNA, 19 nt, Artificial Sequence
  Description of Artificial Sequence: Synthetic oligonucleotide
  Antisense strand to SEQ ID NO: 538803
uccuaacacacuaggauuc

SEQ ID NO: 538805 - RNA, 19 nt, Artificial Sequence
  Description of Artificial Sequence: Synthetic oligonucleotide
  Sense strand starting at position 2371 of SEQ ID NO: 318127
uuaggaacucugcggguua

SEQ ID NO: 538806 - RNA, 19 nt, Artificial Sequence
  Description of Artificial Sequence: Synthetic oligonucleotide
  Antisense strand to SEQ ID NO: 538805
uaacccgcagaguuccuaa

SEQ ID NO: 538807 - RNA, 19 nt, Artificial Sequence
  Description of Artificial Sequence: Synthetic oligonucleotide
  Sense strand starting at position 2621 of SEQ ID NO: 318127
aguagaggaucugagagaa

SEQ ID NO: 538808 - RNA, 19 nt, Artificial Sequence
  Description of Artificial Sequence: Synthetic oligonucleotide
  Antisense strand to SEQ ID NO: 538807
uucucucagauccucuacu

SEQ ID NO: 538809 - RNA, 19 nt, Artificial Sequence
  Description of Artificial Sequence: Synthetic oligonucleotide
  Sense strand starting at position 2770 of SEQ ID NO: 318127
agaacugccuaaucugaca

SEQ ID NO: 538810 - RNA, 19 nt, Artificial Sequence
  Description of Artificial Sequence: Synthetic oligonucleotide
  Antisense strand to SEQ ID NO: 538809
ugucagauuaggcaguucu

SEQ ID NO: 538811 - RNA, 19 nt, Artificial Sequence
  Description of Artificial Sequence: Synthetic oligonucleotide
  Sense strand starting at position 3121 of SEQ ID NO: 318127
uuagcaucuucugucauga

SEQ ID NO: 538812 - RNA, 19 nt, Artificial Sequence
  Description of Artificial Sequence: Synthetic oligonucleotide
  Antisense strand to SEQ ID NO: 538811
ucaugacagaagaugcuaa

SEQ ID NO: 538813 - RNA, 19 nt, Artificial Sequence
  Description of Artificial Sequence: Synthetic oligonucleotide
  Sense strand starting at position 3126 of SEQ ID NO: 318127
aucuucugucaugagaagu

SEQ ID NO: 538814 - RNA, 19 nt, Artificial Sequence
  Description of Artificial Sequence: Synthetic oligonucleotide
  Antisense strand to SEQ ID NO: 538813
acuucucaugacagaagau

SEQ ID NO: 538815 - RNA, 19 nt, Artificial Sequence
  Description of Artificial Sequence: Synthetic oligonucleotide
  Sense strand starting at position 3156 of SEQ ID NO: 318127
uugguaagguaucuaggau

SEQ ID NO: 538816 - RNA, 19 nt, Artificial Sequence
  Description of Artificial Sequence: Synthetic oligonucleotide
  Antisense strand to SEQ ID NO: 538815
auccuagauaccuuaccaa

SEQ ID NO: 538817 - RNA, 19 nt, Artificial Sequence
  Description of Artificial Sequence: Synthetic oligonucleotide
  Sense strand starting at position 3188 of SEQ ID NO: 318127
ggucuuagaaauuguuaga

SEQ ID NO: 538818 - RNA, 19 nt, Artificial Sequence
  Description of Artificial Sequence: Synthetic oligonucleotide
  Antisense strand to SEQ ID NO: 538817
ucuaacaauuucuaagacc

SEQ ID NO: 538819 - RNA, 19 nt, Artificial Sequence
  Description of Artificial Sequence: Synthetic oligonucleotide
  Sense strand starting at position 3241 of SEQ ID NO: 318127
cauauuaagcuguaaguag

SEQ ID NO: 538820 - RNA, 19 nt, Artificial Sequence
  Description of Artificial Sequence: Synthetic oligonucleotide
  Antisense strand to SEQ ID NO: 538819
cuacuuacagcuuaauaug

SEQ ID NO: 538821 - RNA, 19 nt, Artificial Sequence
  Description of Artificial Sequence: Synthetic oligonucleotide
  Sense strand starting at position 3861 of SEQ ID NO: 318127
gagcgauccgcccaaccua

SEQ ID NO: 538822 - RNA, 19 nt, Artificial Sequence
  Description of Artificial Sequence: Synthetic oligonucleotide
  Antisense strand to SEQ ID NO: 538821
uagguugggcggaucgcuc

SEQ ID NO: 538823 - RNA, 19 nt, Artificial Sequence
  Description of Artificial Sequence: Synthetic oligonucleotide
  Sense strand starting at position 11 of SEQ ID NO: 318128
ggauaacgaugguuucagu

SEQ ID NO: 538824 - RNA, 19 nt, Artificial Sequence
  Description of Artificial Sequence: Synthetic oligonucleotide
  Antisense strand to SEQ ID NO: 538823
acugaaaccaucguuaucc

SEQ ID NO: 538825 - RNA, 19 nt, Artificial Sequence
  Description of Artificial Sequence: Synthetic oligonucleotide
  Sense strand starting at position 171 of SEQ ID NO: 318128
ggacgugacagccaaguua

SEQ ID NO: 538826 - RNA, 19 nt, Artificial Sequence
  Description of Artificial Sequence: Synthetic oligonucleotide
  Antisense strand to SEQ ID NO: 538825
uaacuuggcugucacgucc

SEQ ID NO: 538827 - RNA, 19 nt, Artificial Sequence
  Description of Artificial Sequence: Synthetic oligonucleotide
  Sense strand starting at position 565 of SEQ ID NO: 318128
acugcucaacucgagauua

SEQ ID NO: 538828 - RNA, 19 nt, Artificial Sequence
  Description of Artificial Sequence: Synthetic oligonucleotide
  Antisense strand to SEQ ID NO: 538827
uaaucucgaguugagcagu

SEQ ID NO: 538829 - RNA, 19 nt, Artificial Sequence
  Description of Artificial Sequence: Synthetic oligonucleotide
  Sense strand starting at position 567 of SEQ ID NO: 318128
ugcucaacucgagauuauc

SEQ ID NO: 538830 - RNA, 19 nt, Artificial Sequence
  Description of Artificial Sequence: Synthetic oligonucleotide
  Antisense strand to SEQ ID NO: 538829
gauaaucucgaguugagca

SEQ ID NO: 538831 - RNA, 19 nt, Artificial Sequence
  Description of Artificial Sequence: Synthetic oligonucleotide
  Sense strand starting at position 645 of SEQ ID NO: 318128
ccgugcauuuauuccuuua

SEQ ID NO: 538832 - RNA, 19 nt, Artificial Sequence
  Description of Artificial Sequence: Synthetic oligonucleotide
  Antisense strand to SEQ ID NO: 538831
uaaaggaauaaaugcacgg

SEQ ID NO: 538833 - RNA, 19 nt, Artificial Sequence
  Description of Artificial Sequence: Synthetic oligonucleotide
  Sense strand starting at position 647 of SEQ ID NO: 318128
gugcauuuauuccuuuaca

SEQ ID NO: 538834 - RNA, 19 nt, Artificial Sequence
  Description of Artificial Sequence: Synthetic oligonucleotide
  Antisense strand to SEQ ID NO: 538833
uguaaaggaauaaaugcac

SEQ ID NO: 538835 - RNA, 19 nt, Artificial Sequence
  Description of Artificial Sequence: Synthetic oligonucleotide
  Sense strand starting at position 934 of SEQ ID NO: 318128
gucucaucaccuuggagaa

SEQ ID NO: 538836 - RNA, 19 nt, Artificial Sequence
  Description of Artificial Sequence: Synthetic oligonucleotide
  Antisense strand to SEQ ID NO: 538835
uucuccaaggugaugagac

SEQ ID NO: 538837 - RNA, 19 nt, Artificial Sequence
  Description of Artificial Sequence: Synthetic oligonucleotide
  Sense strand starting at position 947 of SEQ ID NO: 318128
ggagaagcccaucgaauau

SEQ ID NO: 538838 - RNA, 19 nt, Artificial Sequence
  Description of Artificial Sequence: Synthetic oligonucleotide
  Antisense strand to SEQ ID NO: 538837
auauucgaugggcuucucc

SEQ ID NO: 538839 - RNA, 19 nt, Artificial Sequence
  Description of Artificial Sequence: Synthetic oligonucleotide
  Sense strand starting at position 1004 of SEQ ID NO: 318128
cgcgauauucuccacauuu

SEQ ID NO: 538840 - RNA, 19 nt, Artificial Sequence
  Description of Artificial Sequence: Synthetic oligonucleotide
  Antisense strand to SEQ ID NO: 538839
aaauguggagaauaucgcg

SEQ ID NO: 538841 - RNA, 19 nt, Artificial Sequence
  Description of Artificial Sequence: Synthetic oligonucleotide
  Sense strand starting at position 1152 of SEQ ID NO: 318128
cgguucucuaaaugugaaa

SEQ ID NO: 538842 - RNA, 19 nt, Artificial Sequence
  Description of Artificial Sequence: Synthetic oligonucleotide
  Antisense strand to SEQ ID NO: 538841
uuucacauuuagagaaccg

SEQ ID NO: 538843 - RNA, 19 nt, Artificial Sequence
  Description of Artificial Sequence: Synthetic oligonucleotide
  Sense strand starting at position 1255 of SEQ ID NO: 318128
gaggcagggucaucccuaa

SEQ ID NO: 538844 - RNA, 19 nt, Artificial Sequence
  Description of Artificial Sequence: Synthetic oligonucleotide
  Antisense strand to SEQ ID NO: 538843
uuagggaugacccugccuc

SEQ ID NO: 538845 - RNA, 19 nt, Artificial Sequence
  Description of Artificial Sequence: Synthetic oligonucleotide
  Sense strand starting at position 1259 of SEQ ID NO: 318128
cagggucaucccuaacgaa

SEQ ID NO: 538846 - RNA, 19 nt, Artificial Sequence
  Description of Artificial Sequence: Synthetic oligonucleotide
  Antisense strand to SEQ ID NO: 538845
uucguuagggaugacccug

SEQ ID NO: 538847 - RNA, 19 nt, Artificial Sequence
  Description of Artificial Sequence: Synthetic oligonucleotide
  Sense strand starting at position 2311 of SEQ ID NO: 318128
cgggcugagggaugugaau

SEQ ID NO: 538848 - RNA, 19 nt, Artificial Sequence
  Description of Artificial Sequence: Synthetic oligonucleotide
  Antisense strand to SEQ ID NO: 538847
auucacaucccucagcccg

SEQ ID NO: 538849 - RNA, 19 nt, Artificial Sequence
  Description of Artificial Sequence: Synthetic oligonucleotide
  Sense strand starting at position 2313 of SEQ ID NO: 318128
ggcugagggaugugaauuc

SEQ ID NO: 538850 - RNA, 19 nt, Artificial Sequence
  Description of Artificial Sequence: Synthetic oligonucleotide
  Antisense strand to SEQ ID NO: 538849
gaauucacaucccucagcc

SEQ ID NO: 538851 - RNA, 19 nt, Artificial Sequence
  Description of Artificial Sequence: Synthetic oligonucleotide
  Sense strand starting at position 2486 of SEQ ID NO: 318128
ggugucaccuacccuaaau

SEQ ID NO: 538852 - RNA, 19 nt, Artificial Sequence
  Description of Artificial Sequence: Synthetic oligonucleotide
  Antisense strand to SEQ ID NO: 538851
auuuaggguaggugacacc

SEQ ID NO: 538853 - RNA, 19 nt, Artificial Sequence
  Description of Artificial Sequence: Synthetic oligonucleotide
  Sense strand starting at position 2524 of SEQ ID NO: 318128
uuuacagucuugccuuaua

SEQ ID NO: 538854 - RNA, 19 nt, Artificial Sequence
  Description of Artificial Sequence: Synthetic oligonucleotide
  Antisense strand to SEQ ID NO: 538853
uauaaggcaagacuguaaa

SEQ ID NO: 538855 - RNA, 19 nt, Artificial Sequence
  Description of Artificial Sequence: Synthetic oligonucleotide
  Sense strand starting at position 2527 of SEQ ID NO: 318128
acagucuugccuuauaguu

SEQ ID NO: 538856 - RNA, 19 nt, Artificial Sequence
  Description of Artificial Sequence: Synthetic oligonucleotide
  Antisense strand to SEQ ID NO: 538855
aacuauaaggcaagacugu

SEQ ID NO: 538857 - RNA, 19 nt, Artificial Sequence
  Description of Artificial Sequence: Synthetic oligonucleotide
  Sense strand starting at position 2534 of SEQ ID NO: 318128
ugccuuauaguuuaucaca

SEQ ID NO: 538858 - RNA, 19 nt, Artificial Sequence
  Description of Artificial Sequence: Synthetic oligonucleotide
  Antisense strand to SEQ ID NO: 538857
ugugauaaacuauaaggca

SEQ ID NO: 538859 - RNA, 19 nt, Artificial Sequence
  Description of Artificial Sequence: Synthetic oligonucleotide
  Sense strand starting at position 2592 of SEQ ID NO: 318128
cagguuaugaggcauccga

SEQ ID NO: 538860 - RNA, 19 nt, Artificial Sequence
  Description of Artificial Sequence: Synthetic oligonucleotide
  Antisense strand to SEQ ID NO: 538859
ucggaugccucauaaccug

SEQ ID NO: 538861 - RNA, 19 nt, Artificial Sequence
  Description of Artificial Sequence: Synthetic oligonucleotide
  Sense strand starting at position 2623 of SEQ ID NO: 318128
guuucugcugaggguucaa

SEQ ID NO: 538862 - RNA, 19 nt, Artificial Sequence
  Description of Artificial Sequence: Synthetic oligonucleotide
  Antisense strand to SEQ ID NO: 538861
uugaacccucagcagaaac

SEQ ID NO: 538863 - RNA, 19 nt, Artificial Sequence
  Description of Artificial Sequence: Synthetic oligonucleotide
  Sense strand starting at position 2752 of SEQ ID NO: 318128
ccacaucagcaauguggaa

SEQ ID NO: 538864 - RNA, 19 nt, Artificial Sequence
  Description of Artificial Sequence: Synthetic oligonucleotide
  Antisense strand to SEQ ID NO: 538863
uuccacauugcugaugugg

SEQ ID NO: 538865 - RNA, 19 nt, Artificial Sequence
  Description of Artificial Sequence: Synthetic oligonucleotide
  Sense strand starting at position 2831 of SEQ ID NO: 318128
uauuuauagcaccguguga

SEQ ID NO: 538866 - RNA, 19 nt, Artificial Sequence
  Description of Artificial Sequence: Synthetic oligonucleotide
  Antisense strand to SEQ ID NO: 538865
ucacacggugcuauaaaua

SEQ ID NO: 538867 - RNA, 19 nt, Artificial Sequence
  Description of Artificial Sequence: Synthetic oligonucleotide
  Sense strand starting at position 2833 of SEQ ID NO: 318128
uuuauagcaccgugugaaa

SEQ ID NO: 538868 - RNA, 19 nt, Artificial Sequence
  Description of Artificial Sequence: Synthetic oligonucleotide
  Antisense strand to SEQ ID NO: 538867
uuucacacggugcuauaaa

SEQ ID NO: 538869 - RNA, 19 nt, Artificial Sequence
  Description of Artificial Sequence: Synthetic oligonucleotide
  Sense strand starting at position 2884 of SEQ ID NO: 318128
uggcaauugauagguugga

SEQ ID NO: 538870 - RNA, 19 nt, Artificial Sequence
  Description of Artificial Sequence: Synthetic oligonucleotide
  Antisense strand to SEQ ID NO: 538869
uccaaccuaucaauugcca

SEQ ID NO: 538871 - RNA, 19 nt, Artificial Sequence
  Description of Artificial Sequence: Synthetic oligonucleotide
  Sense strand starting at position 2885 of SEQ ID NO: 318128
ggcaauugauagguuggaa

SEQ ID NO: 538872 - RNA, 19 nt, Artificial Sequence
  Description of Artificial Sequence: Synthetic oligonucleotide
  Antisense strand to SEQ ID NO: 538871
uuccaaccuaucaauugcc

SEQ ID NO: 538873 - RNA, 19 nt, Artificial Sequence
  Description of Artificial Sequence: Synthetic oligonucleotide
  Sense strand starting at position 2889 of SEQ ID NO: 318128
auugauagguuggaaacaa

SEQ ID NO: 538874 - RNA, 19 nt, Artificial Sequence
  Description of Artificial Sequence: Synthetic oligonucleotide
  Antisense strand to SEQ ID NO: 538873
uuguuuccaaccuaucaau

SEQ ID NO: 538875 - RNA, 19 nt, Artificial Sequence
  Description of Artificial Sequence: Synthetic oligonucleotide
  Sense strand starting at position 2918 of SEQ ID NO: 318128
ggccuacuuucccuaguca

SEQ ID NO: 538876 - RNA, 19 nt, Artificial Sequence
  Description of Artificial Sequence: Synthetic oligonucleotide
  Antisense strand to SEQ ID NO: 538875
ugacuagggaaaguaggcc

SEQ ID NO: 538877 - RNA, 19 nt, Artificial Sequence
  Description of Artificial Sequence: Synthetic oligonucleotide
  Sense strand starting at position 2919 of SEQ ID NO: 318128
gccuacuuucccuagucau

SEQ ID NO: 538878 - RNA, 19 nt, Artificial Sequence
  Description of Artificial Sequence: Synthetic oligonucleotide
  Antisense strand to SEQ ID NO: 538877
augacuagggaaaguaggc

SEQ ID NO: 538879 - RNA, 19 nt, Artificial Sequence
  Description of Artificial Sequence: Synthetic oligonucleotide
  Sense strand starting at position 3253 of SEQ ID NO: 318128
ggccuucccuagucauuga

SEQ ID NO: 538880 - RNA, 19 nt, Artificial Sequence
  Description of Artificial Sequence: Synthetic oligonucleotide
  Antisense strand to SEQ ID NO: 538879
ucaaugacuagggaaggcc

SEQ ID NO: 538881 - RNA, 19 nt, Artificial Sequence
  Description of Artificial Sequence: Synthetic oligonucleotide
  Sense strand starting at position 3340 of SEQ ID NO: 318128
aucaaugcuuauguggaua

SEQ ID NO: 538882 - RNA, 19 nt, Artificial Sequence
  Description of Artificial Sequence: Synthetic oligonucleotide
  Antisense strand to SEQ ID NO: 538881
uauccacauaagcauugau

SEQ ID NO: 538883 - RNA, 19 nt, Artificial Sequence
  Description of Artificial Sequence: Synthetic oligonucleotide
  Sense strand starting at position 3343 of SEQ ID NO: 318128
aaugcuuauguggauauau

SEQ ID NO: 538884 - RNA, 19 nt, Artificial Sequence
  Description of Artificial Sequence: Synthetic oligonucleotide
  Antisense strand to SEQ ID NO: 538883
auauauccacauaagcauu

SEQ ID NO: 538885 - RNA, 19 nt, Artificial Sequence
  Description of Artificial Sequence: Synthetic oligonucleotide
  Sense strand starting at position 3345 of SEQ ID NO: 318128
ugcuuauguggauauaugu

SEQ ID NO: 538886 - RNA, 19 nt, Artificial Sequence
  Description of Artificial Sequence: Synthetic oligonucleotide
  Antisense strand to SEQ ID NO: 538885
acauauauccacauaagca

SEQ ID NO: 538887 - RNA, 19 nt, Artificial Sequence
  Description of Artificial Sequence: Synthetic oligonucleotide
  Sense strand starting at position 3353 of SEQ ID NO: 318128
uggauauaugugugccuag

SEQ ID NO: 538888 - RNA, 19 nt, Artificial Sequence
  Description of Artificial Sequence: Synthetic oligonucleotide
  Antisense strand to SEQ ID NO: 538887
cuaggcacacauauaucca

SEQ ID NO: 538889 - RNA, 19 nt, Artificial Sequence
  Description of Artificial Sequence: Synthetic oligonucleotide
  Sense strand starting at position 3354 of SEQ ID NO: 318128
ggauauaugugugccuaga

SEQ ID NO: 538890 - RNA, 19 nt, Artificial Sequence
  Description of Artificial Sequence: Synthetic oligonucleotide
  Antisense strand to SEQ ID NO: 538889
ucuaggcacacauauaucc

SEQ ID NO: 538891 - RNA, 19 nt, Artificial Sequence
  Description of Artificial Sequence: Synthetic oligonucleotide
  Sense strand starting at position 3391 of SEQ ID NO: 318128
guaaucauguagguccuua

SEQ ID NO: 538892 - RNA, 19 nt, Artificial Sequence
  Description of Artificial Sequence: Synthetic oligonucleotide
  Antisense strand to SEQ ID NO: 538891
uaaggaccuacaugauuac

SEQ ID NO: 538893 - RNA, 19 nt, Artificial Sequence
  Description of Artificial Sequence: Synthetic oligonucleotide
  Sense strand starting at position 3432 of SEQ ID NO: 318128
ucaucuguagcuugaacau

SEQ ID NO: 538894 - RNA, 19 nt, Artificial Sequence
  Description of Artificial Sequence: Synthetic oligonucleotide
  Antisense strand to SEQ ID NO: 538893
auguucaagcuacagauga

SEQ ID NO: 538895 - RNA, 19 nt, Artificial Sequence
  Description of Artificial Sequence: Synthetic oligonucleotide
  Sense strand starting at position 3502 of SEQ ID NO: 318128
gcauauaauuucuauggaa

SEQ ID NO: 538896 - RNA, 19 nt, Artificial Sequence
  Description of Artificial Sequence: Synthetic oligonucleotide
  Antisense strand to SEQ ID NO: 538895
uuccauagaaauuauaugc

SEQ ID NO: 538897 - RNA, 19 nt, Artificial Sequence
  Description of Artificial Sequence: Synthetic oligonucleotide
  Sense strand starting at position 3672 of SEQ ID NO: 318128
ucaagcuccugucuagaau

SEQ ID NO: 538898 - RNA, 19 nt, Artificial Sequence
  Description of Artificial Sequence: Synthetic oligonucleotide
  Antisense strand to SEQ ID NO: 538897
auucuagacaggagcuuga

SEQ ID NO: 538899 - RNA, 19 nt, Artificial Sequence
  Description of Artificial Sequence: Synthetic oligonucleotide
  Sense strand starting at position 3696 of SEQ ID NO: 318128
uucugaugucucugcaacu

SEQ ID NO: 538900 - RNA, 19 nt, Artificial Sequence
  Description of Artificial Sequence: Synthetic oligonucleotide
  Antisense strand to SEQ ID NO: 538899
aguugcagagacaucagaa

SEQ ID NO: 538901 - RNA, 19 nt, Artificial Sequence
  Description of Artificial Sequence: Synthetic oligonucleotide
  Sense strand starting at position 3774 of SEQ ID NO: 318128
agcuauacagcucaaaguu

SEQ ID NO: 538902 - RNA, 19 nt, Artificial Sequence
  Description of Artificial Sequence: Synthetic oligonucleotide
  Antisense strand to SEQ ID NO: 538901
aacuuugagcuguauagcu

SEQ ID NO: 538903 - RNA, 19 nt, Artificial Sequence
  Description of Artificial Sequence: Synthetic oligonucleotide
  Sense strand starting at position 61 of SEQ ID NO: 318129
ucaucuuggcccuggauua

SEQ ID NO: 538904 - RNA, 19 nt, Artificial Sequence
  Description of Artificial Sequence: Synthetic oligonucleotide
  Antisense strand to SEQ ID NO: 538903
uaauccagggccaagauga

SEQ ID NO: 538905 - RNA, 19 nt, Artificial Sequence
  Description of Artificial Sequence: Synthetic oligonucleotide
  Sense strand starting at position 72 of SEQ ID NO: 318129
cuggauuacugccuccuaa

SEQ ID NO: 538906 - RNA, 19 nt, Artificial Sequence
  Description of Artificial Sequence: Synthetic oligonucleotide
  Antisense strand to SEQ ID NO: 538905
uuaggaggcaguaauccag

SEQ ID NO: 538907 - RNA, 19 nt, Artificial Sequence
  Description of Artificial Sequence: Synthetic oligonucleotide
  Sense strand starting at position 195 of SEQ ID NO: 318129
agugguuucccauagaucu

SEQ ID NO: 538908 - RNA, 19 nt, Artificial Sequence
  Description of Artificial Sequence: Synthetic oligonucleotide
  Antisense strand to SEQ ID NO: 538907
agaucuaugggaaaccacu

SEQ ID NO: 538909 - RNA, 19 nt, Artificial Sequence
  Description of Artificial Sequence: Synthetic oligonucleotide
  Sense strand starting at position 231 of SEQ ID NO: 318129
uccuuaagguggucuguaa

SEQ ID NO: 538910 - RNA, 19 nt, Artificial Sequence
  Description of Artificial Sequence: Synthetic oligonucleotide
  Antisense strand to SEQ ID NO: 538909
uuacagaccaccuuaagga

SEQ ID NO: 538911 - RNA, 19 nt, Artificial Sequence
  Description of Artificial Sequence: Synthetic oligonucleotide
  Sense strand starting at position 294 of SEQ ID NO: 318129
agauauucugccuggcuca

SEQ ID NO: 538912 - RNA, 19 nt, Artificial Sequence
  Description of Artificial Sequence: Synthetic oligonucleotide
  Antisense strand to SEQ ID NO: 538911
ugagccaggcagaauaucu

SEQ ID NO: 538913 - RNA, 19 nt, Artificial Sequence
  Description of Artificial Sequence: Synthetic oligonucleotide
  Sense strand starting at position 481 of SEQ ID NO: 318129
acuuccugacuaggucaaa

SEQ ID NO: 538914 - RNA, 19 nt, Artificial Sequence
  Description of Artificial Sequence: Synthetic oligonucleotide
  Antisense strand to SEQ ID NO: 538913
uuugaccuagucaggaagu

SEQ ID NO: 538915 - RNA, 19 nt, Artificial Sequence
  Description of Artificial Sequence: Synthetic oligonucleotide
  Sense strand starting at position 560 of SEQ ID NO: 318129
gcuuguuccuuauuugauu

SEQ ID NO: 538916 - RNA, 19 nt, Artificial Sequence
  Description of Artificial Sequence: Synthetic oligonucleotide
  Antisense strand to SEQ ID NO: 538915
aaucaaauaaggaacaagc

SEQ ID NO: 538917 - RNA, 19 nt, Artificial Sequence
  Description of Artificial Sequence: Synthetic oligonucleotide
  Sense strand starting at position 574 of SEQ ID NO: 318129
ugauuaaugucuuucuguc

SEQ ID NO: 538918 - RNA, 19 nt, Artificial Sequence
  Description of Artificial Sequence: Synthetic oligonucleotide
  Antisense strand to SEQ ID NO: 538917
gacagaaagacauuaauca

SEQ ID NO: 538919 - RNA, 19 nt, Artificial Sequence
  Description of Artificial Sequence: Synthetic oligonucleotide
  Sense strand starting at position 576 of SEQ ID NO: 318129
auuaaugucuuucugucua

SEQ ID NO: 538920 - RNA, 19 nt, Artificial Sequence
  Description of Artificial Sequence: Synthetic oligonucleotide
  Antisense strand to SEQ ID NO: 538919
uagacagaaagacauuaau

SEQ ID NO: 538921 - RNA, 19 nt, Artificial Sequence
  Description of Artificial Sequence: Synthetic oligonucleotide
  Sense strand starting at position 725 of SEQ ID NO: 318129
aagucucuucuugggagga

SEQ ID NO: 538922 - RNA, 19 nt, Artificial Sequence
  Description of Artificial Sequence: Synthetic oligonucleotide
  Antisense strand to SEQ ID NO: 538921
uccucccaagaagagacuu

SEQ ID NO: 538923 - RNA, 19 nt, Artificial Sequence
  Description of Artificial Sequence: Synthetic oligonucleotide
  Sense strand starting at position 756 of SEQ ID NO: 318129
uguuaucaucugcagacca

SEQ ID NO: 538924 - RNA, 19 nt, Artificial Sequence
  Description of Artificial Sequence: Synthetic oligonucleotide
  Antisense strand to SEQ ID NO: 538923
uggucugcagaugauaaca

SEQ ID NO: 538925 - RNA, 19 nt, Artificial Sequence
  Description of Artificial Sequence: Synthetic oligonucleotide
  Sense strand starting at position 860 of SEQ ID NO: 318129
uugugucuuacgucuguaa

SEQ ID NO: 538926 - RNA, 19 nt, Artificial Sequence
  Description of Artificial Sequence: Synthetic oligonucleotide
  Antisense strand to SEQ ID NO: 538925
uuacagacguaagacacaa

SEQ ID NO: 538927 - RNA, 19 nt, Artificial Sequence
  Description of Artificial Sequence: Synthetic oligonucleotide
  Sense strand starting at position 864 of SEQ ID NO: 318129
gucuuacgucuguaaauau

SEQ ID NO: 538928 - RNA, 19 nt, Artificial Sequence
  Description of Artificial Sequence: Synthetic oligonucleotide
  Antisense strand to SEQ ID NO: 538927
auauuuacagacguaagac

SEQ ID NO: 538929 - RNA, 19 nt, Artificial Sequence
  Description of Artificial Sequence: Synthetic oligonucleotide
  Sense strand starting at position 871 of SEQ ID NO: 318129
gucuguaaauauguaugau

SEQ ID NO: 538930 - RNA, 19 nt, Artificial Sequence
  Description of Artificial Sequence: Synthetic oligonucleotide
  Antisense strand to SEQ ID NO: 538929
aucauacauauuuacagac

SEQ ID NO: 538931 - RNA, 19 nt, Artificial Sequence
  Description of Artificial Sequence: Synthetic oligonucleotide
  Sense strand starting at position 982 of SEQ ID NO: 318129
gugguuggugcccaauauu

SEQ ID NO: 538932 - RNA, 19 nt, Artificial Sequence
  Description of Artificial Sequence: Synthetic oligonucleotide
  Antisense strand to SEQ ID NO: 538931
aauauugggcaccaaccac

SEQ ID NO: 538933 - RNA, 19 nt, Artificial Sequence
  Description of Artificial Sequence: Synthetic oligonucleotide
  Sense strand starting at position 1121 of SEQ ID NO: 318129
uaaaguuuacaugggaacu

SEQ ID NO: 538934 - RNA, 19 nt, Artificial Sequence
  Description of Artificial Sequence: Synthetic oligonucleotide
  Antisense strand to SEQ ID NO: 538933
aguucccauguaaacuuua

SEQ ID NO: 538935 - RNA, 19 nt, Artificial Sequence
  Description of Artificial Sequence: Synthetic oligonucleotide
  Sense strand starting at position 1159 of SEQ ID NO: 318129
auaauuauccgaggccuca

SEQ ID NO: 538936 - RNA, 19 nt, Artificial Sequence
  Description of Artificial Sequence: Synthetic oligonucleotide
  Antisense strand to SEQ ID NO: 538935
ugaggccucggauaauuau

SEQ ID NO: 538937 - RNA, 19 nt, Artificial Sequence
  Description of Artificial Sequence: Synthetic oligonucleotide
  Sense strand starting at position 1261 of SEQ ID NO: 318129
cgauaacaaucugugaaau

SEQ ID NO: 538938 - RNA, 19 nt, Artificial Sequence
  Description of Artificial Sequence: Synthetic oligonucleotide
  Antisense strand to SEQ ID NO: 538937
auuucacagauuguuaucg

SEQ ID NO: 538939 - RNA, 19 nt, Artificial Sequence
  Description of Artificial Sequence: Synthetic oligonucleotide
  Sense strand starting at position 1271 of SEQ ID NO: 318129
cugugaaauccuggaagau

SEQ ID NO: 538940 - RNA, 19 nt, Artificial Sequence
  Description of Artificial Sequence: Synthetic oligonucleotide
  Antisense strand to SEQ ID NO: 538939
aucuuccaggauuucacag

SEQ ID NO: 538941 - RNA, 19 nt, Artificial Sequence
  Description of Artificial Sequence: Synthetic oligonucleotide
  Sense strand starting at position 2220 of SEQ ID NO: 318129
cuugcaauacccggaauau

SEQ ID NO: 538942 - RNA, 19 nt, Artificial Sequence
  Description of Artificial Sequence: Synthetic oligonucleotide
  Antisense strand to SEQ ID NO: 538941
auauuccggguauugcaag

SEQ ID NO: 538943 - RNA, 19 nt, Artificial Sequence
  Description of Artificial Sequence: Synthetic oligonucleotide
  Sense strand starting at position 2221 of SEQ ID NO: 318129
uugcaauacccggaauauu

SEQ ID NO: 538944 - RNA, 19 nt, Artificial Sequence
  Description of Artificial Sequence: Synthetic oligonucleotide
  Antisense strand to SEQ ID NO: 538943
aauauuccggguauugcaa

SEQ ID NO: 538945 - RNA, 19 nt, Artificial Sequence
  Description of Artificial Sequence: Synthetic oligonucleotide
  Sense strand starting at position 2268 of SEQ ID NO: 318129
gucucauccgaagaauuga

SEQ ID NO: 538946 - RNA, 19 nt, Artificial Sequence
  Description of Artificial Sequence: Synthetic oligonucleotide
  Antisense strand to SEQ ID NO: 538945
ucaauucuucggaugagac

SEQ ID NO: 538947 - RNA, 19 nt, Artificial Sequence
  Description of Artificial Sequence: Synthetic oligonucleotide
  Sense strand starting at position 2356 of SEQ ID NO: 318129
cucucuuaaggagauuguu

SEQ ID NO: 538948 - RNA, 19 nt, Artificial Sequence
  Description of Artificial Sequence: Synthetic oligonucleotide
  Antisense strand to SEQ ID NO: 538947
aacaaucuccuuaagagag

SEQ ID NO: 538949 - RNA, 19 nt, Artificial Sequence
  Description of Artificial Sequence: Synthetic oligonucleotide
  Sense strand starting at position 2359 of SEQ ID NO: 318129
ucuuaaggagauuguuagu

SEQ ID NO: 538950 - RNA, 19 nt, Artificial Sequence
  Description of Artificial Sequence: Synthetic oligonucleotide
  Antisense strand to SEQ ID NO: 538949
acuaacaaucuccuuaaga

SEQ ID NO: 538951 - RNA, 19 nt, Artificial Sequence
  Description of Artificial Sequence: Synthetic oligonucleotide
  Sense strand starting at position 2370 of SEQ ID NO: 318129
uuguuaguauucucacauc

SEQ ID NO: 538952 - RNA, 19 nt, Artificial Sequence
  Description of Artificial Sequence: Synthetic oligonucleotide
  Antisense strand to SEQ ID NO: 538951
gaugugagaauacuaacaa

SEQ ID NO: 538953 - RNA, 19 nt, Artificial Sequence
  Description of Artificial Sequence: Synthetic oligonucleotide
  Sense strand starting at position 2433 of SEQ ID NO: 318129
auacguguuggucaaagaa

SEQ ID NO: 538954 - RNA, 19 nt, Artificial Sequence
  Description of Artificial Sequence: Synthetic oligonucleotide
  Antisense strand to SEQ ID NO: 538953
uucuuugaccaacacguau

SEQ ID NO: 538955 - RNA, 19 nt, Artificial Sequence
  Description of Artificial Sequence: Synthetic oligonucleotide
  Sense strand starting at position 2477 of SEQ ID NO: 318129
aguccacuugaauguguaa

SEQ ID NO: 538956 - RNA, 19 nt, Artificial Sequence
  Description of Artificial Sequence: Synthetic oligonucleotide
  Antisense strand to SEQ ID NO: 538955
uuacacauucaaguggacu

SEQ ID NO: 538957 - RNA, 19 nt, Artificial Sequence
  Description of Artificial Sequence: Synthetic oligonucleotide
  Sense strand starting at position 2508 of SEQ ID NO: 318129
guuaaucauguccagaauu

SEQ ID NO: 538958 - RNA, 19 nt, Artificial Sequence
  Description of Artificial Sequence: Synthetic oligonucleotide
  Antisense strand to SEQ ID NO: 538957
aauucuggacaugauuaac

SEQ ID NO: 538959 - RNA, 19 nt, Artificial Sequence
  Description of Artificial Sequence: Synthetic oligonucleotide
  Sense strand starting at position 2622 of SEQ ID NO: 318129
ucucaauaugugggagcuu

SEQ ID NO: 538960 - RNA, 19 nt, Artificial Sequence
  Description of Artificial Sequence: Synthetic oligonucleotide
  Antisense strand to SEQ ID NO: 538959
aagcucccacauauugaga

SEQ ID NO: 538961 - RNA, 19 nt, Artificial Sequence
  Description of Artificial Sequence: Synthetic oligonucleotide
  Sense strand starting at position 2699 of SEQ ID NO: 318129
uuaaauacagccuguugua

SEQ ID NO: 538962 - RNA, 19 nt, Artificial Sequence
  Description of Artificial Sequence: Synthetic oligonucleotide
  Antisense strand to SEQ ID NO: 538961
uacaacaggcuguauuuaa

SEQ ID NO: 538963 - RNA, 19 nt, Artificial Sequence
  Description of Artificial Sequence: Synthetic oligonucleotide
  Sense strand starting at position 2781 of SEQ ID NO: 318129
uuacuacaaucgcucagaa

SEQ ID NO: 538964 - RNA, 19 nt, Artificial Sequence
  Description of Artificial Sequence: Synthetic oligonucleotide
  Antisense strand to SEQ ID NO: 538963
uucugagcgauuguaguaa

SEQ ID NO: 538965 - RNA, 19 nt, Artificial Sequence
  Description of Artificial Sequence: Synthetic oligonucleotide
  Sense strand starting at position 2783 of SEQ ID NO: 318129
acuacaaucgcucagaacu

SEQ ID NO: 538966 - RNA, 19 nt, Artificial Sequence
  Description of Artificial Sequence: Synthetic oligonucleotide
  Antisense strand to SEQ ID NO: 538965
aguucugagcgauuguagu

SEQ ID NO: 538967 - RNA, 19 nt, Artificial Sequence
  Description of Artificial Sequence: Synthetic oligonucleotide
  Sense strand starting at position 2795 of SEQ ID NO: 318129
cagaacugguuuccuugau

SEQ ID NO: 538968 - RNA, 19 nt, Artificial Sequence
  Description of Artificial Sequence: Synthetic oligonucleotide
  Antisense strand to SEQ ID NO: 538967
aucaaggaaaccaguucug

SEQ ID NO: 538969 - RNA, 19 nt, Artificial Sequence
  Description of Artificial Sequence: Synthetic oligonucleotide
  Sense strand starting at position 2796 of SEQ ID NO: 318129
agaacugguuuccuugauu

SEQ ID NO: 538970 - RNA, 19 nt, Artificial Sequence
  Description of Artificial Sequence: Synthetic oligonucleotide
  Antisense strand to SEQ ID NO: 538969
aaucaaggaaaccaguucu

SEQ ID NO: 538971 - RNA, 19 nt, Artificial Sequence
  Description of Artificial Sequence: Synthetic oligonucleotide
  Sense strand starting at position 3054 of SEQ ID NO: 318129
ugcaguaggaacugauaga

SEQ ID NO: 538972 - RNA, 19 nt, Artificial Sequence
  Description of Artificial Sequence: Synthetic oligonucleotide
  Antisense strand to SEQ ID NO: 538971
ucuaucaguuccuacugca

SEQ ID NO: 538973 - RNA, 19 nt, Artificial Sequence
  Description of Artificial Sequence: Synthetic oligonucleotide
  Sense strand starting at position 3190 of SEQ ID NO: 318129
agauaaaguaauugaggca

SEQ ID NO: 538974 - RNA, 19 nt, Artificial Sequence
  Description of Artificial Sequence: Synthetic oligonucleotide
  Antisense strand to SEQ ID NO: 538973
ugccucaauuacuuuaucu

SEQ ID NO: 538975 - RNA, 19 nt, Artificial Sequence
  Description of Artificial Sequence: Synthetic oligonucleotide
  Sense strand starting at position 3480 of SEQ ID NO: 318129
auacaagcuuuacugagau

SEQ ID NO: 538976 - RNA, 19 nt, Artificial Sequence
  Description of Artificial Sequence: Synthetic oligonucleotide
  Antisense strand to SEQ ID NO: 538975
aucucaguaaagcuuguau

SEQ ID NO: 538977 - RNA, 19 nt, Artificial Sequence
  Description of Artificial Sequence: Synthetic oligonucleotide
  Sense strand starting at position 3544 of SEQ ID NO: 318129
agucaauaguucuuacuau

SEQ ID NO: 538978 - RNA, 19 nt, Artificial Sequence
  Description of Artificial Sequence: Synthetic oligonucleotide
  Antisense strand to SEQ ID NO: 538977
auaguaagaacuauugacu

SEQ ID NO: 538979 - RNA, 19 nt, Artificial Sequence
  Description of Artificial Sequence: Synthetic oligonucleotide
  Sense strand starting at position 3904 of SEQ ID NO: 318129
uuugucauugauggauauu

SEQ ID NO: 538980 - RNA, 19 nt, Artificial Sequence
  Description of Artificial Sequence: Synthetic oligonucleotide
  Antisense strand to SEQ ID NO: 538979
aauauccaucaaugacaaa

SEQ ID NO: 538981 - RNA, 19 nt, Artificial Sequence
  Description of Artificial Sequence: Synthetic oligonucleotide
  Sense strand starting at position 3971 of SEQ ID NO: 318129
uuuguaugagccuauguuu

SEQ ID NO: 538982 - RNA, 19 nt, Artificial Sequence
  Description of Artificial Sequence: Synthetic oligonucleotide
  Antisense strand to SEQ ID NO: 538981
aaacauaggcucauacaaa

SEQ ID NO: 538983 - RNA, 19 nt, Artificial Sequence
  Description of Artificial Sequence: Synthetic oligonucleotide
  Sense strand starting at position 2087 of SEQ ID NO: 318130
acuaauaagugaguauagu

SEQ ID NO: 538984 - RNA, 19 nt, Artificial Sequence
  Description of Artificial Sequence: Synthetic oligonucleotide
  Antisense strand to SEQ ID NO: 538983
acuauacucacuuauuagu

SEQ ID NO: 538985 - RNA, 19 nt, Artificial Sequence
  Description of Artificial Sequence: Synthetic oligonucleotide
  Sense strand starting at position 2088 of SEQ ID NO: 318130
cuaauaagugaguauagua

SEQ ID NO: 538986 - RNA, 19 nt, Artificial Sequence
  Description of Artificial Sequence: Synthetic oligonucleotide
  Antisense strand to SEQ ID NO: 538985
uacuauacucacuuauuag

SEQ ID NO: 538987 - RNA, 19 nt, Artificial Sequence
  Description of Artificial Sequence: Synthetic oligonucleotide
  Sense strand starting at position 2093 of SEQ ID NO: 318130
aagugaguauaguauaaac

SEQ ID NO: 538988 - RNA, 19 nt, Artificial Sequence
  Description of Artificial Sequence: Synthetic oligonucleotide
  Antisense strand to SEQ ID NO: 538987
guuuauacuauacucacuu

SEQ ID NO: 538989 - RNA, 19 nt, Artificial Sequence
  Description of Artificial Sequence: Synthetic oligonucleotide
  Sense strand starting at position 2095 of SEQ ID NO: 318130
gugaguauaguauaaacuu

SEQ ID NO: 538990 - RNA, 19 nt, Artificial Sequence
  Description of Artificial Sequence: Synthetic oligonucleotide
  Antisense strand to SEQ ID NO: 538989
aaguuuauacuauacucac

SEQ ID NO: 538991 - RNA, 19 nt, Artificial Sequence
  Description of Artificial Sequence: Synthetic oligonucleotide
  Sense strand starting at position 2140 of SEQ ID NO: 318130
guaaauugguuuccuauau

SEQ ID NO: 538992 - RNA, 19 nt, Artificial Sequence
  Description of Artificial Sequence: Synthetic oligonucleotide
  Antisense strand to SEQ ID NO: 538991
auauaggaaaccaauuuac

SEQ ID NO: 538993 - RNA, 19 nt, Artificial Sequence
  Description of Artificial Sequence: Synthetic oligonucleotide
  Sense strand starting at position 2144 of SEQ ID NO: 318130
auugguuuccuauauacca

SEQ ID NO: 538994 - RNA, 19 nt, Artificial Sequence
  Description of Artificial Sequence: Synthetic oligonucleotide
  Antisense strand to SEQ ID NO: 538993
ugguauauaggaaaccaau

SEQ ID NO: 538995 - RNA, 19 nt, Artificial Sequence
  Description of Artificial Sequence: Synthetic oligonucleotide
  Sense strand starting at position 2245 of SEQ ID NO: 318130
cagaauauguaugagaucu

SEQ ID NO: 538996 - RNA, 19 nt, Artificial Sequence
  Description of Artificial Sequence: Synthetic oligonucleotide
  Antisense strand to SEQ ID NO: 538995
agaucucauacauauucug

SEQ ID NO: 538997 - RNA, 19 nt, Artificial Sequence
  Description of Artificial Sequence: Synthetic oligonucleotide
  Sense strand starting at position 2247 of SEQ ID NO: 318130
gaauauguaugagaucuac

SEQ ID NO: 538998 - RNA, 19 nt, Artificial Sequence
  Description of Artificial Sequence: Synthetic oligonucleotide
  Antisense strand to SEQ ID NO: 538997
guagaucucauacauauuc

SEQ ID NO: 538999 - RNA, 19 nt, Artificial Sequence
  Description of Artificial Sequence: Synthetic oligonucleotide
  Sense strand starting at position 2251 of SEQ ID NO: 318130
auguaugagaucuacguga

SEQ ID NO: 539000 - RNA, 19 nt, Artificial Sequence
  Description of Artificial Sequence: Synthetic oligonucleotide
  Antisense strand to SEQ ID NO: 538999
ucacguagaucucauacau

SEQ ID NO: 539001 - RNA, 19 nt, Artificial Sequence
  Description of Artificial Sequence: Synthetic oligonucleotide
  Sense strand starting at position 2253 of SEQ ID NO: 318130
guaugagaucuacgugaug

SEQ ID NO: 539002 - RNA, 19 nt, Artificial Sequence
  Description of Artificial Sequence: Synthetic oligonucleotide
  Antisense strand to SEQ ID NO: 539001
caucacguagaucucauac

SEQ ID NO: 539003 - RNA, 19 nt, Artificial Sequence
  Description of Artificial Sequence: Synthetic oligonucleotide
  Sense strand starting at position 2255 of SEQ ID NO: 318130
augagaucuacgugaugaa

SEQ ID NO: 539004 - RNA, 19 nt, Artificial Sequence
  Description of Artificial Sequence: Synthetic oligonucleotide
  Antisense strand to SEQ ID NO: 539003
uucaucacguagaucucau

SEQ ID NO: 539005 - RNA, 19 nt, Artificial Sequence
  Description of Artificial Sequence: Synthetic oligonucleotide
  Sense strand starting at position 2350 of SEQ ID NO: 318130
gacugaauaucguaaagau

SEQ ID NO: 539006 - RNA, 19 nt, Artificial Sequence
  Description of Artificial Sequence: Synthetic oligonucleotide
  Antisense strand to SEQ ID NO: 539005
aucuuuacgauauucaguc

SEQ ID NO: 539007 - RNA, 19 nt, Artificial Sequence
  Description of Artificial Sequence: Synthetic oligonucleotide
  Sense strand starting at position 2492 of SEQ ID NO: 318130
uggcaaacauaauauugaa

SEQ ID NO: 539008 - RNA, 19 nt, Artificial Sequence
  Description of Artificial Sequence: Synthetic oligonucleotide
  Antisense strand to SEQ ID NO: 539007
uucaauauuauguuugcca

SEQ ID NO: 539009 - RNA, 19 nt, Artificial Sequence
  Description of Artificial Sequence: Synthetic oligonucleotide
  Sense strand starting at position 2516 of SEQ ID NO: 318130
agaacaaagucauaagacu

SEQ ID NO: 539010 - RNA, 19 nt, Artificial Sequence
  Description of Artificial Sequence: Synthetic oligonucleotide
  Antisense strand to SEQ ID NO: 539009
agucuuaugacuuuguucu

SEQ ID NO: 539011 - RNA, 19 nt, Artificial Sequence
  Description of Artificial Sequence: Synthetic oligonucleotide
  Sense strand starting at position 2613 of SEQ ID NO: 318130
aggccaauguauuagagua

SEQ ID NO: 539012 - RNA, 19 nt, Artificial Sequence
  Description of Artificial Sequence: Synthetic oligonucleotide
  Antisense strand to SEQ ID NO: 539011
uacucuaauacauuggccu

SEQ ID NO: 539013 - RNA, 19 nt, Artificial Sequence
  Description of Artificial Sequence: Synthetic oligonucleotide
  Sense strand starting at position 2760 of SEQ ID NO: 318130
acuggacuucugcauguua

SEQ ID NO: 539014 - RNA, 19 nt, Artificial Sequence
  Description of Artificial Sequence: Synthetic oligonucleotide
  Antisense strand to SEQ ID NO: 539013
uaacaugcagaaguccagu

SEQ ID NO: 539015 - RNA, 19 nt, Artificial Sequence
  Description of Artificial Sequence: Synthetic oligonucleotide
  Sense strand starting at position 2762 of SEQ ID NO: 318130
uggacuucugcauguuaaa

SEQ ID NO: 539016 - RNA, 19 nt, Artificial Sequence
  Description of Artificial Sequence: Synthetic oligonucleotide
  Antisense strand to SEQ ID NO: 539015
uuuaacaugcagaagucca

SEQ ID NO: 539017 - RNA, 19 nt, Artificial Sequence
  Description of Artificial Sequence: Synthetic oligonucleotide
  Sense strand starting at position 2832 of SEQ ID NO: 318130
ggaucauaguccuaacugu

SEQ ID NO: 539018 - RNA, 19 nt, Artificial Sequence
  Description of Artificial Sequence: Synthetic oligonucleotide
  Antisense strand to SEQ ID NO: 539017
acaguuaggacuaugaucc

SEQ ID NO: 539019 - RNA, 19 nt, Artificial Sequence
  Description of Artificial Sequence: Synthetic oligonucleotide
  Sense strand starting at position 2907 of SEQ ID NO: 318130
ucaggugugagaugacuuu

SEQ ID NO: 539020 - RNA, 19 nt, Artificial Sequence
  Description of Artificial Sequence: Synthetic oligonucleotide
  Antisense strand to SEQ ID NO: 539019
aaagucaucucacaccuga

SEQ ID NO: 539021 - RNA, 19 nt, Artificial Sequence
  Description of Artificial Sequence: Synthetic oligonucleotide
  Sense strand starting at position 3154 of SEQ ID NO: 318130
ggccaaaggcuuuagcaga

SEQ ID NO: 539022 - RNA, 19 nt, Artificial Sequence
  Description of Artificial Sequence: Synthetic oligonucleotide
  Antisense strand to SEQ ID NO: 539021
ucugcuaaagccuuuggcc

SEQ ID NO: 539023 - RNA, 19 nt, Artificial Sequence
  Description of Artificial Sequence: Synthetic oligonucleotide
  Sense strand starting at position 3361 of SEQ ID NO: 318130
guaaacuauuggcuuugaa

SEQ ID NO: 539024 - RNA, 19 nt, Artificial Sequence
  Description of Artificial Sequence: Synthetic oligonucleotide
  Antisense strand to SEQ ID NO: 539023
uucaaagccaauaguuuac

SEQ ID NO: 539025 - RNA, 19 nt, Artificial Sequence
  Description of Artificial Sequence: Synthetic oligonucleotide
  Sense strand starting at position 3365 of SEQ ID NO: 318130
acuauuggcuuugaaugau

SEQ ID NO: 539026 - RNA, 19 nt, Artificial Sequence
  Description of Artificial Sequence: Synthetic oligonucleotide
  Antisense strand to SEQ ID NO: 539025
aucauucaaagccaauagu

SEQ ID NO: 539027 - RNA, 19 nt, Artificial Sequence
  Description of Artificial Sequence: Synthetic oligonucleotide
  Sense strand starting at position 3368 of SEQ ID NO: 318130
auuggcuuugaaugauaau

SEQ ID NO: 539028 - RNA, 19 nt, Artificial Sequence
  Description of Artificial Sequence: Synthetic oligonucleotide
  Antisense strand to SEQ ID NO: 539027
auuaucauucaaagccaau

SEQ ID NO: 539029 - RNA, 19 nt, Artificial Sequence
  Description of Artificial Sequence: Synthetic oligonucleotide
  Sense strand starting at position 3384 of SEQ ID NO: 318130
aaugaugugucaguguaug

SEQ ID NO: 539030 - RNA, 19 nt, Artificial Sequence
  Description of Artificial Sequence: Synthetic oligonucleotide
  Antisense strand to SEQ ID NO: 539029
cauacacugacacaucauu

SEQ ID NO: 539031 - RNA, 19 nt, Artificial Sequence
  Description of Artificial Sequence: Synthetic oligonucleotide
  Sense strand starting at position 3389 of SEQ ID NO: 318130
ugugucaguguauguucau

SEQ ID NO: 539032 - RNA, 19 nt, Artificial Sequence
  Description of Artificial Sequence: Synthetic oligonucleotide
  Antisense strand to SEQ ID NO: 539031
augaacauacacugacaca

SEQ ID NO: 539033 - RNA, 19 nt, Artificial Sequence
  Description of Artificial Sequence: Synthetic oligonucleotide
  Sense strand starting at position 3390 of SEQ ID NO: 318130
gugucaguguauguucauu

SEQ ID NO: 539034 - RNA, 19 nt, Artificial Sequence
  Description of Artificial Sequence: Synthetic oligonucleotide
  Antisense strand to SEQ ID NO: 539033
aaugaacauacacugacac

SEQ ID NO: 539035 - RNA, 19 nt, Artificial Sequence
  Description of Artificial Sequence: Synthetic oligonucleotide
  Sense strand starting at position 3435 of SEQ ID NO: 318130
gcuggauguugauaacaug

SEQ ID NO: 539036 - RNA, 19 nt, Artificial Sequence
  Description of Artificial Sequence: Synthetic oligonucleotide
  Antisense strand to SEQ ID NO: 539035
cauguuaucaacauccagc

SEQ ID NO: 539037 - RNA, 19 nt, Artificial Sequence
  Description of Artificial Sequence: Synthetic oligonucleotide
  Sense strand starting at position 3464 of SEQ ID NO: 318130
ggaggcaugugggaaaucu

SEQ ID NO: 539038 - RNA, 19 nt, Artificial Sequence
  Description of Artificial Sequence: Synthetic oligonucleotide
  Antisense strand to SEQ ID NO: 539037
agauuucccacaugccucc

SEQ ID NO: 539039 - RNA, 19 nt, Artificial Sequence
  Description of Artificial Sequence: Synthetic oligonucleotide
  Sense strand starting at position 3632 of SEQ ID NO: 318130
aauaaacuguggucauaug

SEQ ID NO: 539040 - RNA, 19 nt, Artificial Sequence
  Description of Artificial Sequence: Synthetic oligonucleotide
  Antisense strand to SEQ ID NO: 539039
cauaugaccacaguuuauu

SEQ ID NO: 539041 - RNA, 19 nt, Artificial Sequence
  Description of Artificial Sequence: Synthetic oligonucleotide
  Sense strand starting at position 3725 of SEQ ID NO: 318130
gcccuuugggugugaugaa

SEQ ID NO: 539042 - RNA, 19 nt, Artificial Sequence
  Description of Artificial Sequence: Synthetic oligonucleotide
  Antisense strand to SEQ ID NO: 539041
uucaucacacccaaagggc

SEQ ID NO: 539043 - RNA, 19 nt, Artificial Sequence
  Description of Artificial Sequence: Synthetic oligonucleotide
  Sense strand starting at position 3726 of SEQ ID NO: 318130
cccuuugggugugaugaaa

SEQ ID NO: 539044 - RNA, 19 nt, Artificial Sequence
  Description of Artificial Sequence: Synthetic oligonucleotide
  Antisense strand to SEQ ID NO: 539043
uuucaucacacccaaaggg

SEQ ID NO: 539045 - RNA, 19 nt, Artificial Sequence
  Description of Artificial Sequence: Synthetic oligonucleotide
  Sense strand starting at position 3765 of SEQ ID NO: 318130
gaugauggaugcucaaguu

SEQ ID NO: 539046 - RNA, 19 nt, Artificial Sequence
  Description of Artificial Sequence: Synthetic oligonucleotide
  Antisense strand to SEQ ID NO: 539045
aacuugagcauccaucauc

SEQ ID NO: 539047 - RNA, 19 nt, Artificial Sequence
  Description of Artificial Sequence: Synthetic oligonucleotide
  Sense strand starting at position 3778 of SEQ ID NO: 318130
caaguuauauauucgugga

SEQ ID NO: 539048 - RNA, 19 nt, Artificial Sequence
  Description of Artificial Sequence: Synthetic oligonucleotide
  Antisense strand to SEQ ID NO: 539047
uccacgaauauauaacuug

SEQ ID NO: 539049 - RNA, 19 nt, Artificial Sequence
  Description of Artificial Sequence: Synthetic oligonucleotide
  Sense strand starting at position 3780 of SEQ ID NO: 318130
aguuauauauucguggaaa

SEQ ID NO: 539050 - RNA, 19 nt, Artificial Sequence
  Description of Artificial Sequence: Synthetic oligonucleotide
  Antisense strand to SEQ ID NO: 539049
uuuccacgaauauauaacu

SEQ ID NO: 539051 - RNA, 19 nt, Artificial Sequence
  Description of Artificial Sequence: Synthetic oligonucleotide
  Sense strand starting at position 3782 of SEQ ID NO: 318130
uuauauauucguggaaacu

SEQ ID NO: 539052 - RNA, 19 nt, Artificial Sequence
  Description of Artificial Sequence: Synthetic oligonucleotide
  Antisense strand to SEQ ID NO: 539051
aguuuccacgaauauauaa

SEQ ID NO: 539053 - RNA, 19 nt, Artificial Sequence
  Description of Artificial Sequence: Synthetic oligonucleotide
  Sense strand starting at position 3783 of SEQ ID NO: 318130
uauauauucguggaaacuu

SEQ ID NO: 539054 - RNA, 19 nt, Artificial Sequence
  Description of Artificial Sequence: Synthetic oligonucleotide
  Antisense strand to SEQ ID NO: 539053
aaguuuccacgaauauaua

SEQ ID NO: 539055 - RNA, 19 nt, Artificial Sequence
  Description of Artificial Sequence: Synthetic oligonucleotide
  Sense strand starting at position 3791 of SEQ ID NO: 318130
cguggaaacuuaucaaauu

SEQ ID NO: 539056 - RNA, 19 nt, Artificial Sequence
  Description of Artificial Sequence: Synthetic oligonucleotide
  Antisense strand to SEQ ID NO: 539055
aauuugauaaguuuccacg

SEQ ID NO: 539057 - RNA, 19 nt, Artificial Sequence
  Description of Artificial Sequence: Synthetic oligonucleotide
  Sense strand starting at position 3792 of SEQ ID NO: 318130
guggaaacuuaucaaauug

SEQ ID NO: 539058 - RNA, 19 nt, Artificial Sequence
  Description of Artificial Sequence: Synthetic oligonucleotide
  Antisense strand to SEQ ID NO: 539057
caauuugauaaguuuccac

SEQ ID NO: 539059 - RNA, 19 nt, Artificial Sequence
  Description of Artificial Sequence: Synthetic oligonucleotide
  Sense strand starting at position 3838 of SEQ ID NO: 318130
uuaauuguaucuccguuaa

SEQ ID NO: 539060 - RNA, 19 nt, Artificial Sequence
  Description of Artificial Sequence: Synthetic oligonucleotide
  Antisense strand to SEQ ID NO: 539059
uuaacggagauacaauuaa

SEQ ID NO: 539061 - RNA, 19 nt, Artificial Sequence
  Description of Artificial Sequence: Synthetic oligonucleotide
  Sense strand starting at position 3876 of SEQ ID NO: 318130
auugaucuccucuaccgau

SEQ ID NO: 539062 - RNA, 19 nt, Artificial Sequence
  Description of Artificial Sequence: Synthetic oligonucleotide
  Antisense strand to SEQ ID NO: 539061
aucgguagaggagaucaau

SEQ ID NO: 539063 - RNA, 19 nt, Artificial Sequence
  Description of Artificial Sequence: Synthetic oligonucleotide
  Sense strand starting at position 3 of SEQ ID NO: 318131
ggcaucuuuggugaaucaa

SEQ ID NO: 539064 - RNA, 19 nt, Artificial Sequence
  Description of Artificial Sequence: Synthetic oligonucleotide
  Antisense strand to SEQ ID NO: 539063
uugauucaccaaagaugcc

SEQ ID NO: 539065 - RNA, 19 nt, Artificial Sequence
  Description of Artificial Sequence: Synthetic oligonucleotide
  Sense strand starting at position 213 of SEQ ID NO: 318131
uccacaggcuuuguacaaa

SEQ ID NO: 539066 - RNA, 19 nt, Artificial Sequence
  Description of Artificial Sequence: Synthetic oligonucleotide
  Antisense strand to SEQ ID NO: 539065
uuuguacaaagccugugga

SEQ ID NO: 539067 - RNA, 19 nt, Artificial Sequence
  Description of Artificial Sequence: Synthetic oligonucleotide
  Sense strand starting at position 276 of SEQ ID NO: 318131
gcaacaagcuugucaaaca

SEQ ID NO: 539068 - RNA, 19 nt, Artificial Sequence
  Description of Artificial Sequence: Synthetic oligonucleotide
  Antisense strand to SEQ ID NO: 539067
uguuugacaagcuuguugc

SEQ ID NO: 539069 - RNA, 19 nt, Artificial Sequence
  Description of Artificial Sequence: Synthetic oligonucleotide
  Sense strand starting at position 296 of SEQ ID NO: 318131
gcacauuggccuuacaaau

SEQ ID NO: 539070 - RNA, 19 nt, Artificial Sequence
  Description of Artificial Sequence: Synthetic oligonucleotide
  Antisense strand to SEQ ID NO: 539069
auuuguaaggccaaugugc

SEQ ID NO: 539071 - RNA, 19 nt, Artificial Sequence
  Description of Artificial Sequence: Synthetic oligonucleotide
  Sense strand starting at position 486 of SEQ ID NO: 318131
agucuuuaaucugcaauug

SEQ ID NO: 539072 - RNA, 19 nt, Artificial Sequence
  Description of Artificial Sequence: Synthetic oligonucleotide
  Antisense strand to SEQ ID NO: 539071
caauugcagauuaaagacu

SEQ ID NO: 539073 - RNA, 19 nt, Artificial Sequence
  Description of Artificial Sequence: Synthetic oligonucleotide
  Sense strand starting at position 510 of SEQ ID NO: 318131
ggguguugcaaucauucua

SEQ ID NO: 539074 - RNA, 19 nt, Artificial Sequence
  Description of Artificial Sequence: Synthetic oligonucleotide
  Antisense strand to SEQ ID NO: 539073
uagaaugauugcaacaccc

SEQ ID NO: 539075 - RNA, 19 nt, Artificial Sequence
  Description of Artificial Sequence: Synthetic oligonucleotide
  Sense strand starting at position 572 of SEQ ID NO: 318131
ugaauagacuugcuguaac

SEQ ID NO: 539076 - RNA, 19 nt, Artificial Sequence
  Description of Artificial Sequence: Synthetic oligonucleotide
  Antisense strand to SEQ ID NO: 539075
guuacagcaagucuauuca

SEQ ID NO: 539077 - RNA, 19 nt, Artificial Sequence
  Description of Artificial Sequence: Synthetic oligonucleotide
  Sense strand starting at position 575 of SEQ ID NO: 318131
auagacuugcuguaaccau

SEQ ID NO: 539078 - RNA, 19 nt, Artificial Sequence
  Description of Artificial Sequence: Synthetic oligonucleotide
  Antisense strand to SEQ ID NO: 539077
augguuacagcaagucuau

SEQ ID NO: 539079 - RNA, 19 nt, Artificial Sequence
  Description of Artificial Sequence: Synthetic oligonucleotide
  Sense strand starting at position 1048 of SEQ ID NO: 318131
gagucagaauucccuaggu

SEQ ID NO: 539080 - RNA, 19 nt, Artificial Sequence
  Description of Artificial Sequence: Synthetic oligonucleotide
  Antisense strand to SEQ ID NO: 539079
accuagggaauucugacuc

SEQ ID NO: 539081 - RNA, 19 nt, Artificial Sequence
  Description of Artificial Sequence: Synthetic oligonucleotide
  Sense strand starting at position 1085 of SEQ ID NO: 318131
guucucaguccuugaugaa

SEQ ID NO: 539082 - RNA, 19 nt, Artificial Sequence
  Description of Artificial Sequence: Synthetic oligonucleotide
  Antisense strand to SEQ ID NO: 539081
uucaucaaggacugagaac

SEQ ID NO: 539083 - RNA, 19 nt, Artificial Sequence
  Description of Artificial Sequence: Synthetic oligonucleotide
  Sense strand starting at position 1086 of SEQ ID NO: 318131
uucucaguccuugaugaag

SEQ ID NO: 539084 - RNA, 19 nt, Artificial Sequence
  Description of Artificial Sequence: Synthetic oligonucleotide
  Antisense strand to SEQ ID NO: 539083
cuucaucaaggacugagaa

SEQ ID NO: 539085 - RNA, 19 nt, Artificial Sequence
  Description of Artificial Sequence: Synthetic oligonucleotide
  Sense strand starting at position 1109 of SEQ ID NO: 318131
uggacaaguuccuucugca

SEQ ID NO: 539086 - RNA, 19 nt, Artificial Sequence
  Description of Artificial Sequence: Synthetic oligonucleotide
  Antisense strand to SEQ ID NO: 539085
ugcagaaggaacuugucca

SEQ ID NO: 539087 - RNA, 19 nt, Artificial Sequence
  Description of Artificial Sequence: Synthetic oligonucleotide
  Sense strand starting at position 1258 of SEQ ID NO: 318131
gggagcucagcuugacacu

SEQ ID NO: 539088 - RNA, 19 nt, Artificial Sequence
  Description of Artificial Sequence: Synthetic oligonucleotide
  Antisense strand to SEQ ID NO: 539087
agugucaagcugagcuccc

SEQ ID NO: 539089 - RNA, 19 nt, Artificial Sequence
  Description of Artificial Sequence: Synthetic oligonucleotide
  Sense strand starting at position 1304 of SEQ ID NO: 318131
gagaaucacucauugguaa

SEQ ID NO: 539090 - RNA, 19 nt, Artificial Sequence
  Description of Artificial Sequence: Synthetic oligonucleotide
  Antisense strand to SEQ ID NO: 539089
uuaccaaugagugauucuc

SEQ ID NO: 539091 - RNA, 19 nt, Artificial Sequence
  Description of Artificial Sequence: Synthetic oligonucleotide
  Sense strand starting at position 1451 of SEQ ID NO: 318131
agugcauuccucugaagga

SEQ ID NO: 539092 - RNA, 19 nt, Artificial Sequence
  Description of Artificial Sequence: Synthetic oligonucleotide
  Antisense strand to SEQ ID NO: 539091
uccuucagaggaaugcacu

SEQ ID NO: 539093 - RNA, 19 nt, Artificial Sequence
  Description of Artificial Sequence: Synthetic oligonucleotide
  Sense strand starting at position 1638 of SEQ ID NO: 318131
aggcacugcguuuagauuu

SEQ ID NO: 539094 - RNA, 19 nt, Artificial Sequence
  Description of Artificial Sequence: Synthetic oligonucleotide
  Antisense strand to SEQ ID NO: 539093
aaaucuaaacgcagugccu

SEQ ID NO: 539095 - RNA, 19 nt, Artificial Sequence
  Description of Artificial Sequence: Synthetic oligonucleotide
  Sense strand starting at position 1827 of SEQ ID NO: 318131
auggaaagcuuccuagaau

SEQ ID NO: 539096 - RNA, 19 nt, Artificial Sequence
  Description of Artificial Sequence: Synthetic oligonucleotide
  Antisense strand to SEQ ID NO: 539095
auucuaggaagcuuuccau

SEQ ID NO: 539097 - RNA, 19 nt, Artificial Sequence
  Description of Artificial Sequence: Synthetic oligonucleotide
  Sense strand starting at position 1864 of SEQ ID NO: 318131
gcagaaacgagucagguaa

SEQ ID NO: 539098 - RNA, 19 nt, Artificial Sequence
  Description of Artificial Sequence: Synthetic oligonucleotide
  Antisense strand to SEQ ID NO: 539097
uuaccugacucguuucugc

SEQ ID NO: 539099 - RNA, 19 nt, Artificial Sequence
  Description of Artificial Sequence: Synthetic oligonucleotide
  Sense strand starting at position 2061 of SEQ ID NO: 318131
cuaagaaguuuggauuucu

SEQ ID NO: 539100 - RNA, 19 nt, Artificial Sequence
  Description of Artificial Sequence: Synthetic oligonucleotide
  Antisense strand to SEQ ID NO: 539099
agaaauccaaacuucuuag

SEQ ID NO: 539101 - RNA, 19 nt, Artificial Sequence
  Description of Artificial Sequence: Synthetic oligonucleotide
  Sense strand starting at position 2072 of SEQ ID NO: 318131
ggauuucuuucugaaauaa

SEQ ID NO: 539102 - RNA, 19 nt, Artificial Sequence
  Description of Artificial Sequence: Synthetic oligonucleotide
  Antisense strand to SEQ ID NO: 539101
uuauuucagaaagaaaucc

SEQ ID NO: 539103 - RNA, 19 nt, Artificial Sequence
  Description of Artificial Sequence: Synthetic oligonucleotide
  Sense strand starting at position 2211 of SEQ ID NO: 318131
gggaaacuguaaucccaua

SEQ ID NO: 539104 - RNA, 19 nt, Artificial Sequence
  Description of Artificial Sequence: Synthetic oligonucleotide
  Antisense strand to SEQ ID NO: 539103
uaugggauuacaguuuccc

SEQ ID NO: 539105 - RNA, 19 nt, Artificial Sequence
  Description of Artificial Sequence: Synthetic oligonucleotide
  Sense strand starting at position 2259 of SEQ ID NO: 318131
aagaaaggcuaucuaugua

SEQ ID NO: 539106 - RNA, 19 nt, Artificial Sequence
  Description of Artificial Sequence: Synthetic oligonucleotide
  Antisense strand to SEQ ID NO: 539105
uacauagauagccuuucuu

SEQ ID NO: 539107 - RNA, 19 nt, Artificial Sequence
  Description of Artificial Sequence: Synthetic oligonucleotide
  Sense strand starting at position 2263 of SEQ ID NO: 318131
aaggcuaucuauguagacu

SEQ ID NO: 539108 - RNA, 19 nt, Artificial Sequence
  Description of Artificial Sequence: Synthetic oligonucleotide
  Antisense strand to SEQ ID NO: 539107
agucuacauagauagccuu

SEQ ID NO: 539109 - RNA, 19 nt, Artificial Sequence
  Description of Artificial Sequence: Synthetic oligonucleotide
  Sense strand starting at position 2276 of SEQ ID NO: 318131
uagacuaacugaguaagua

SEQ ID NO: 539110 - RNA, 19 nt, Artificial Sequence
  Description of Artificial Sequence: Synthetic oligonucleotide
  Antisense strand to SEQ ID NO: 539109
uacuuacucaguuagucua

SEQ ID NO: 539111 - RNA, 19 nt, Artificial Sequence
  Description of Artificial Sequence: Synthetic oligonucleotide
  Sense strand starting at position 2654 of SEQ ID NO: 318131
gugugagaccuuggaguua

SEQ ID NO: 539112 - RNA, 19 nt, Artificial Sequence
  Description of Artificial Sequence: Synthetic oligonucleotide
  Antisense strand to SEQ ID NO: 539111
uaacuccaaggucucacac

SEQ ID NO: 539113 - RNA, 19 nt, Artificial Sequence
  Description of Artificial Sequence: Synthetic oligonucleotide
  Sense strand starting at position 2672 of SEQ ID NO: 318131
accgguuugaucuaggcua

SEQ ID NO: 539114 - RNA, 19 nt, Artificial Sequence
  Description of Artificial Sequence: Synthetic oligonucleotide
  Antisense strand to SEQ ID NO: 539113
uagccuagaucaaaccggu

SEQ ID NO: 539115 - RNA, 19 nt, Artificial Sequence
  Description of Artificial Sequence: Synthetic oligonucleotide
  Sense strand starting at position 2777 of SEQ ID NO: 318131
aggguacucuccuuugauu

SEQ ID NO: 539116 - RNA, 19 nt, Artificial Sequence
  Description of Artificial Sequence: Synthetic oligonucleotide
  Antisense strand to SEQ ID NO: 539115
aaucaaaggagaguacccu

SEQ ID NO: 539117 - RNA, 19 nt, Artificial Sequence
  Description of Artificial Sequence: Synthetic oligonucleotide
  Sense strand starting at position 2833 of SEQ ID NO: 318131
uugcaaacuggcuagagaa

SEQ ID NO: 539118 - RNA, 19 nt, Artificial Sequence
  Description of Artificial Sequence: Synthetic oligonucleotide
  Antisense strand to SEQ ID NO: 539117
uucucuagccaguuugcaa

SEQ ID NO: 539119 - RNA, 19 nt, Artificial Sequence
  Description of Artificial Sequence: Synthetic oligonucleotide
  Sense strand starting at position 2885 of SEQ ID NO: 318131
gccugagaaucacuauaga

SEQ ID NO: 539120 - RNA, 19 nt, Artificial Sequence
  Description of Artificial Sequence: Synthetic oligonucleotide
  Antisense strand to SEQ ID NO: 539119
ucuauagugauucucaggc

SEQ ID NO: 539121 - RNA, 19 nt, Artificial Sequence
  Description of Artificial Sequence: Synthetic oligonucleotide
  Sense strand starting at position 2966 of SEQ ID NO: 318131
cuugucugaccguaacaga

SEQ ID NO: 539122 - RNA, 19 nt, Artificial Sequence
  Description of Artificial Sequence: Synthetic oligonucleotide
  Antisense strand to SEQ ID NO: 539121
ucuguuacggucagacaag

SEQ ID NO: 539123 - RNA, 19 nt, Artificial Sequence
  Description of Artificial Sequence: Synthetic oligonucleotide
  Sense strand starting at position 3061 of SEQ ID NO: 318131
uuuggauucugugcacaag

SEQ ID NO: 539124 - RNA, 19 nt, Artificial Sequence
  Description of Artificial Sequence: Synthetic oligonucleotide
  Antisense strand to SEQ ID NO: 539123
cuugugcacagaauccaaa

SEQ ID NO: 539125 - RNA, 19 nt, Artificial Sequence
  Description of Artificial Sequence: Synthetic oligonucleotide
  Sense strand starting at position 3110 of SEQ ID NO: 318131
aaaggaagaugcuuagagu

SEQ ID NO: 539126 - RNA, 19 nt, Artificial Sequence
  Description of Artificial Sequence: Synthetic oligonucleotide
  Antisense strand to SEQ ID NO: 539125
acucuaagcaucuuccuuu

SEQ ID NO: 539127 - RNA, 19 nt, Artificial Sequence
  Description of Artificial Sequence: Synthetic oligonucleotide
  Sense strand starting at position 3132 of SEQ ID NO: 318131
guguuuaaagcagguaaag

SEQ ID NO: 539128 - RNA, 19 nt, Artificial Sequence
  Description of Artificial Sequence: Synthetic oligonucleotide
  Antisense strand to SEQ ID NO: 539127
cuuuaccugcuuuaaacac

SEQ ID NO: 539129 - RNA, 19 nt, Artificial Sequence
  Description of Artificial Sequence: Synthetic oligonucleotide
  Sense strand starting at position 3172 of SEQ ID NO: 318131
uggcuugagacuugaauca

SEQ ID NO: 539130 - RNA, 19 nt, Artificial Sequence
  Description of Artificial Sequence: Synthetic oligonucleotide
  Antisense strand to SEQ ID NO: 539129
ugauucaagucucaagcca

SEQ ID NO: 539131 - RNA, 19 nt, Artificial Sequence
  Description of Artificial Sequence: Synthetic oligonucleotide
  Sense strand starting at position 3235 of SEQ ID NO: 318131
ugagcuauuccauaagcau

SEQ ID NO: 539132 - RNA, 19 nt, Artificial Sequence
  Description of Artificial Sequence: Synthetic oligonucleotide
  Antisense strand to SEQ ID NO: 539131
augcuuauggaauagcuca

SEQ ID NO: 539133 - RNA, 19 nt, Artificial Sequence
  Description of Artificial Sequence: Synthetic oligonucleotide
  Sense strand starting at position 3266 of SEQ ID NO: 318131
ggugucuuucuuuacuaua

SEQ ID NO: 539134 - RNA, 19 nt, Artificial Sequence
  Description of Artificial Sequence: Synthetic oligonucleotide
  Antisense strand to SEQ ID NO: 539133
uauaguaaagaaagacacc

SEQ ID NO: 539135 - RNA, 19 nt, Artificial Sequence
  Description of Artificial Sequence: Synthetic oligonucleotide
  Sense strand starting at position 3666 of SEQ ID NO: 318131
ugauauuuaugucaggaua

SEQ ID NO: 539136 - RNA, 19 nt, Artificial Sequence
  Description of Artificial Sequence: Synthetic oligonucleotide
  Antisense strand to SEQ ID NO: 539135
uauccugacauaaauauca

SEQ ID NO: 539137 - RNA, 19 nt, Artificial Sequence
  Description of Artificial Sequence: Synthetic oligonucleotide
  Sense strand starting at position 3704 of SEQ ID NO: 318131
ucuccauaaguuugaugua

SEQ ID NO: 539138 - RNA, 19 nt, Artificial Sequence
  Description of Artificial Sequence: Synthetic oligonucleotide
  Antisense strand to SEQ ID NO: 539137
uacaucaaacuuauggaga

SEQ ID NO: 539139 - RNA, 19 nt, Artificial Sequence
  Description of Artificial Sequence: Synthetic oligonucleotide
  Sense strand starting at position 3758 of SEQ ID NO: 318131
gccaucuuaggucacauau

SEQ ID NO: 539140 - RNA, 19 nt, Artificial Sequence
  Description of Artificial Sequence: Synthetic oligonucleotide
  Antisense strand to SEQ ID NO: 539139
auaugugaccuaagauggc

SEQ ID NO: 539141 - RNA, 19 nt, Artificial Sequence
  Description of Artificial Sequence: Synthetic oligonucleotide
  Sense strand starting at position 3849 of SEQ ID NO: 318131
guaacaguaccacaugauu

SEQ ID NO: 539142 - RNA, 19 nt, Artificial Sequence
  Description of Artificial Sequence: Synthetic oligonucleotide
  Antisense strand to SEQ ID NO: 539141
aaucaugugguacuguuac

SEQ ID NO: 539143 - RNA, 19 nt, Artificial Sequence
  Description of Artificial Sequence: Synthetic oligonucleotide
  Sense strand starting at position 62 of SEQ ID NO: 318132
guguuuaauccuuaguaaa

SEQ ID NO: 539144 - RNA, 19 nt, Artificial Sequence
  Description of Artificial Sequence: Synthetic oligonucleotide
  Antisense strand to SEQ ID NO: 539143
uuuacuaaggauuaaacac

SEQ ID NO: 539145 - RNA, 19 nt, Artificial Sequence
  Description of Artificial Sequence: Synthetic oligonucleotide
  Sense strand starting at position 64 of SEQ ID NO: 318132
guuuaauccuuaguaaaga

SEQ ID NO: 539146 - RNA, 19 nt, Artificial Sequence
  Description of Artificial Sequence: Synthetic oligonucleotide
  Antisense strand to SEQ ID NO: 539145
ucuuuacuaaggauuaaac

SEQ ID NO: 539147 - RNA, 19 nt, Artificial Sequence
  Description of Artificial Sequence: Synthetic oligonucleotide
  Sense strand starting at position 143 of SEQ ID NO: 318132
auaguuuaucuccaauggu

SEQ ID NO: 539148 - RNA, 19 nt, Artificial Sequence
  Description of Artificial Sequence: Synthetic oligonucleotide
  Antisense strand to SEQ ID NO: 539147
accauuggagauaaacuau

SEQ ID NO: 539149 - RNA, 19 nt, Artificial Sequence
  Description of Artificial Sequence: Synthetic oligonucleotide
  Sense strand starting at position 209 of SEQ ID NO: 318132
ucagaccaucuuggucaaa

SEQ ID NO: 539150 - RNA, 19 nt, Artificial Sequence
  Description of Artificial Sequence: Synthetic oligonucleotide
  Antisense strand to SEQ ID NO: 539149
uuugaccaagauggucuga

SEQ ID NO: 539151 - RNA, 19 nt, Artificial Sequence
  Description of Artificial Sequence: Synthetic oligonucleotide
  Sense strand starting at position 344 of SEQ ID NO: 318132
cugcaucaaggguaacauu

SEQ ID NO: 539152 - RNA, 19 nt, Artificial Sequence
  Description of Artificial Sequence: Synthetic oligonucleotide
  Antisense strand to SEQ ID NO: 539151
aauguuacccuugaugcag

SEQ ID NO: 539153 - RNA, 19 nt, Artificial Sequence
  Description of Artificial Sequence: Synthetic oligonucleotide
  Sense strand starting at position 407 of SEQ ID NO: 318132
ugggucucuugagccagaa

SEQ ID NO: 539154 - RNA, 19 nt, Artificial Sequence
  Description of Artificial Sequence: Synthetic oligonucleotide
  Antisense strand to SEQ ID NO: 539153
uucuggcucaagagaccca

SEQ ID NO: 539155 - RNA, 19 nt, Artificial Sequence
  Description of Artificial Sequence: Synthetic oligonucleotide
  Sense strand starting at position 466 of SEQ ID NO: 318132
gaagaagcccuaugucacu

SEQ ID NO: 539156 - RNA, 19 nt, Artificial Sequence
  Description of Artificial Sequence: Synthetic oligonucleotide
  Antisense strand to SEQ ID NO: 539155
agugacauagggcuucuuc

SEQ ID NO: 539157 - RNA, 19 nt, Artificial Sequence
  Description of Artificial Sequence: Synthetic oligonucleotide
  Sense strand starting at position 513 of SEQ ID NO: 318132
agaagauagccacguggaa

SEQ ID NO: 539158 - RNA, 19 nt, Artificial Sequence
  Description of Artificial Sequence: Synthetic oligonucleotide
  Antisense strand to SEQ ID NO: 539157
uuccacguggcuaucuucu

SEQ ID NO: 539159 - RNA, 19 nt, Artificial Sequence
  Description of Artificial Sequence: Synthetic oligonucleotide
  Sense strand starting at position 685 of SEQ ID NO: 318132
gcccacuuugucuaagaaa

SEQ ID NO: 539160 - RNA, 19 nt, Artificial Sequence
  Description of Artificial Sequence: Synthetic oligonucleotide
  Antisense strand to SEQ ID NO: 539159
uuucuuagacaaagugggc

SEQ ID NO: 539161 - RNA, 19 nt, Artificial Sequence
  Description of Artificial Sequence: Synthetic oligonucleotide
  Sense strand starting at position 903 of SEQ ID NO: 318132
augccugggaagugaauaa

SEQ ID NO: 539162 - RNA, 19 nt, Artificial Sequence
  Description of Artificial Sequence: Synthetic oligonucleotide
  Antisense strand to SEQ ID NO: 539161
uuauucacuucccaggcau

SEQ ID NO: 539163 - RNA, 19 nt, Artificial Sequence
  Description of Artificial Sequence: Synthetic oligonucleotide
  Sense strand starting at position 1178 of SEQ ID NO: 318132
ggcuucauuugggauggaa

SEQ ID NO: 539164 - RNA, 19 nt, Artificial Sequence
  Description of Artificial Sequence: Synthetic oligonucleotide
  Antisense strand to SEQ ID NO: 539163
uuccaucccaaaugaagcc

SEQ ID NO: 539165 - RNA, 19 nt, Artificial Sequence
  Description of Artificial Sequence: Synthetic oligonucleotide
  Sense strand starting at position 1214 of SEQ ID NO: 318132
ccaugauuaugggcauaag

SEQ ID NO: 539166 - RNA, 19 nt, Artificial Sequence
  Description of Artificial Sequence: Synthetic oligonucleotide
  Antisense strand to SEQ ID NO: 539165
cuuaugcccauaaucaugg

SEQ ID NO: 539167 - RNA, 19 nt, Artificial Sequence
  Description of Artificial Sequence: Synthetic oligonucleotide
  Sense strand starting at position 1242 of SEQ ID NO: 318132
ccauauauucuguagaccu

SEQ ID NO: 539168 - RNA, 19 nt, Artificial Sequence
  Description of Artificial Sequence: Synthetic oligonucleotide
  Antisense strand to SEQ ID NO: 539167
aggucuacagaauauaugg

SEQ ID NO: 539169 - RNA, 19 nt, Artificial Sequence
  Description of Artificial Sequence: Synthetic oligonucleotide
  Sense strand starting at position 1288 of SEQ ID NO: 318132
gcuguaucuggaugacaug

SEQ ID NO: 539170 - RNA, 19 nt, Artificial Sequence
  Description of Artificial Sequence: Synthetic oligonucleotide
  Antisense strand to SEQ ID NO: 539169
caugucauccagauacagc

SEQ ID NO: 539171 - RNA, 19 nt, Artificial Sequence
  Description of Artificial Sequence: Synthetic oligonucleotide
  Sense strand starting at position 1355 of SEQ ID NO: 318132
ugguaaagggcaugauaaa

SEQ ID NO: 539172 - RNA, 19 nt, Artificial Sequence
  Description of Artificial Sequence: Synthetic oligonucleotide
  Antisense strand to SEQ ID NO: 539171
uuuaucaugcccuuuacca

SEQ ID NO: 539173 - RNA, 19 nt, Artificial Sequence
  Description of Artificial Sequence: Synthetic oligonucleotide
  Sense strand starting at position 1518 of SEQ ID NO: 318132
ucaaguuaugcugaaagca

SEQ ID NO: 539174 - RNA, 19 nt, Artificial Sequence
  Description of Artificial Sequence: Synthetic oligonucleotide
  Antisense strand to SEQ ID NO: 539173
ugcuuucagcauaacuuga

SEQ ID NO: 539175 - RNA, 19 nt, Artificial Sequence
  Description of Artificial Sequence: Synthetic oligonucleotide
  Sense strand starting at position 1573 of SEQ ID NO: 318132
uucuuauagacugguugga

SEQ ID NO: 539176 - RNA, 19 nt, Artificial Sequence
  Description of Artificial Sequence: Synthetic oligonucleotide
  Antisense strand to SEQ ID NO: 539175
uccaaccagucuauaagaa

SEQ ID NO: 539177 - RNA, 19 nt, Artificial Sequence
  Description of Artificial Sequence: Synthetic oligonucleotide
  Sense strand starting at position 1575 of SEQ ID NO: 318132
cuuauagacugguuggauu

SEQ ID NO: 539178 - RNA, 19 nt, Artificial Sequence
  Description of Artificial Sequence: Synthetic oligonucleotide
  Antisense strand to SEQ ID NO: 539177
aauccaaccagucuauaag

SEQ ID NO: 539179 - RNA, 19 nt, Artificial Sequence
  Description of Artificial Sequence: Synthetic oligonucleotide
  Sense strand starting at position 1642 of SEQ ID NO: 318132
aguuauuguccacaggaca

SEQ ID NO: 539180 - RNA, 19 nt, Artificial Sequence
  Description of Artificial Sequence: Synthetic oligonucleotide
  Antisense strand to SEQ ID NO: 539179
uguccuguggacaauaacu

SEQ ID NO: 539181 - RNA, 19 nt, Artificial Sequence
  Description of Artificial Sequence: Synthetic oligonucleotide
  Sense strand starting at position 1657 of SEQ ID NO: 318132
gacaauggucaagaagugu

SEQ ID NO: 539182 - RNA, 19 nt, Artificial Sequence
  Description of Artificial Sequence: Synthetic oligonucleotide
  Antisense strand to SEQ ID NO: 539181
acacuucuugaccauuguc

SEQ ID NO: 539183 - RNA, 19 nt, Artificial Sequence
  Description of Artificial Sequence: Synthetic oligonucleotide
  Sense strand starting at position 1663 of SEQ ID NO: 318132
ggucaagaagugugggauu

SEQ ID NO: 539184 - RNA, 19 nt, Artificial Sequence
  Description of Artificial Sequence: Synthetic oligonucleotide
  Antisense strand to SEQ ID NO: 539183
aaucccacacuucuugacc

SEQ ID NO: 539185 - RNA, 19 nt, Artificial Sequence
  Description of Artificial Sequence: Synthetic oligonucleotide
  Sense strand starting at position 1711 of SEQ ID NO: 318132
gcaacaugaacucggaaga

SEQ ID NO: 539186 - RNA, 19 nt, Artificial Sequence
  Description of Artificial Sequence: Synthetic oligonucleotide
  Antisense strand to SEQ ID NO: 539185
ucuuccgaguucauguugc

SEQ ID NO: 539187 - RNA, 19 nt, Artificial Sequence
  Description of Artificial Sequence: Synthetic oligonucleotide
  Sense strand starting at position 1929 of SEQ ID NO: 318132
uuugcaauguuacuggaga

SEQ ID NO: 539188 - RNA, 19 nt, Artificial Sequence
  Description of Artificial Sequence: Synthetic oligonucleotide
  Antisense strand to SEQ ID NO: 539187
ucuccaguaacauugcaaa

SEQ ID NO: 539189 - RNA, 19 nt, Artificial Sequence
  Description of Artificial Sequence: Synthetic oligonucleotide
  Sense strand starting at position 1931 of SEQ ID NO: 318132
ugcaauguuacuggagauu

SEQ ID NO: 539190 - RNA, 19 nt, Artificial Sequence
  Description of Artificial Sequence: Synthetic oligonucleotide
  Antisense strand to SEQ ID NO: 539189
aaucuccaguaacauugca

SEQ ID NO: 539191 - RNA, 19 nt, Artificial Sequence
  Description of Artificial Sequence: Synthetic oligonucleotide
  Sense strand starting at position 1951 of SEQ ID NO: 318132
uuaguaucuguuuaccaag

SEQ ID NO: 539192 - RNA, 19 nt, Artificial Sequence
  Description of Artificial Sequence: Synthetic oligonucleotide
  Antisense strand to SEQ ID NO: 539191
cuugguaaacagauacuaa

SEQ ID NO: 539193 - RNA, 19 nt, Artificial Sequence
  Description of Artificial Sequence: Synthetic oligonucleotide
  Sense strand starting at position 2040 of SEQ ID NO: 318132
guacaacuguucuuuagau

SEQ ID NO: 539194 - RNA, 19 nt, Artificial Sequence
  Description of Artificial Sequence: Synthetic oligonucleotide
  Antisense strand to SEQ ID NO: 539193
aucuaaagaacaguuguac

SEQ ID NO: 539195 - RNA, 19 nt, Artificial Sequence
  Description of Artificial Sequence: Synthetic oligonucleotide
  Sense strand starting at position 2110 of SEQ ID NO: 318132
aguacuucuuauucuagga

SEQ ID NO: 539196 - RNA, 19 nt, Artificial Sequence
  Description of Artificial Sequence: Synthetic oligonucleotide
  Antisense strand to SEQ ID NO: 539195
uccuagaauaagaaguacu

SEQ ID NO: 539197 - RNA, 19 nt, Artificial Sequence
  Description of Artificial Sequence: Synthetic oligonucleotide
  Sense strand starting at position 2123 of SEQ ID NO: 318132
cuaggaaucuauucuagua

SEQ ID NO: 539198 - RNA, 19 nt, Artificial Sequence
  Description of Artificial Sequence: Synthetic oligonucleotide
  Antisense strand to SEQ ID NO: 539197
uacuagaauagauuccuag

SEQ ID NO: 539199 - RNA, 19 nt, Artificial Sequence
  Description of Artificial Sequence: Synthetic oligonucleotide
  Sense strand starting at position 2458 of SEQ ID NO: 318132
gaguaugauuggccaggga

SEQ ID NO: 539200 - RNA, 19 nt, Artificial Sequence
  Description of Artificial Sequence: Synthetic oligonucleotide
  Antisense strand to SEQ ID NO: 539199
ucccuggccaaucauacuc

SEQ ID NO: 539201 - RNA, 19 nt, Artificial Sequence
  Description of Artificial Sequence: Synthetic oligonucleotide
  Sense strand starting at position 2461 of SEQ ID NO: 318132
uaugauuggccagggaaau

SEQ ID NO: 539202 - RNA, 19 nt, Artificial Sequence
  Description of Artificial Sequence: Synthetic oligonucleotide
  Antisense strand to SEQ ID NO: 539201
auuucccuggccaaucaua

SEQ ID NO: 539203 - RNA, 19 nt, Artificial Sequence
  Description of Artificial Sequence: Synthetic oligonucleotide
  Sense strand starting at position 2462 of SEQ ID NO: 318132
augauuggccagggaaauc

SEQ ID NO: 539204 - RNA, 19 nt, Artificial Sequence
  Description of Artificial Sequence: Synthetic oligonucleotide
  Antisense strand to SEQ ID NO: 539203
gauuucccuggccaaucau

SEQ ID NO: 539205 - RNA, 19 nt, Artificial Sequence
  Description of Artificial Sequence: Synthetic oligonucleotide
  Sense strand starting at position 2494 of SEQ ID NO: 318132
guaauaagaugaguaguaa

SEQ ID NO: 539206 - RNA, 19 nt, Artificial Sequence
  Description of Artificial Sequence: Synthetic oligonucleotide
  Antisense strand to SEQ ID NO: 539205
uuacuacucaucuuauuac

SEQ ID NO: 539207 - RNA, 19 nt, Artificial Sequence
  Description of Artificial Sequence: Synthetic oligonucleotide
  Sense strand starting at position 2526 of SEQ ID NO: 318132
uauaaaguaccaugggagu

SEQ ID NO: 539208 - RNA, 19 nt, Artificial Sequence
  Description of Artificial Sequence: Synthetic oligonucleotide
  Antisense strand to SEQ ID NO: 539207
acucccaugguacuuuaua

SEQ ID NO: 539209 - RNA, 19 nt, Artificial Sequence
  Description of Artificial Sequence: Synthetic oligonucleotide
  Sense strand starting at position 2598 of SEQ ID NO: 318132
ggaagugaugcuuaagcag

SEQ ID NO: 539210 - RNA, 19 nt, Artificial Sequence
  Description of Artificial Sequence: Synthetic oligonucleotide
  Antisense strand to SEQ ID NO: 539209
cugcuuaagcaucacuucc

SEQ ID NO: 539211 - RNA, 19 nt, Artificial Sequence
  Description of Artificial Sequence: Synthetic oligonucleotide
  Sense strand starting at position 2605 of SEQ ID NO: 318132
augcuuaagcaguaaugaa

SEQ ID NO: 539212 - RNA, 19 nt, Artificial Sequence
  Description of Artificial Sequence: Synthetic oligonucleotide
  Antisense strand to SEQ ID NO: 539211
uucauuacugcuuaagcau

SEQ ID NO: 539213 - RNA, 19 nt, Artificial Sequence
  Description of Artificial Sequence: Synthetic oligonucleotide
  Sense strand starting at position 2659 of SEQ ID NO: 318132
gagagaacauuccaggaag

SEQ ID NO: 539214 - RNA, 19 nt, Artificial Sequence
  Description of Artificial Sequence: Synthetic oligonucleotide
  Antisense strand to SEQ ID NO: 539213
cuuccuggaauguucucuc

SEQ ID NO: 539215 - RNA, 19 nt, Artificial Sequence
  Description of Artificial Sequence: Synthetic oligonucleotide
  Sense strand starting at position 2718 of SEQ ID NO: 318132
gcuauuuaggcugggagca

SEQ ID NO: 539216 - RNA, 19 nt, Artificial Sequence
  Description of Artificial Sequence: Synthetic oligonucleotide
  Antisense strand to SEQ ID NO: 539215
ugcucccagccuaaauagc

SEQ ID NO: 539217 - RNA, 19 nt, Artificial Sequence
  Description of Artificial Sequence: Synthetic oligonucleotide
  Sense strand starting at position 3208 of SEQ ID NO: 318132
uuuggauggacgggugaau

SEQ ID NO: 539218 - RNA, 19 nt, Artificial Sequence
  Description of Artificial Sequence: Synthetic oligonucleotide
  Antisense strand to SEQ ID NO: 539217
auucacccguccauccaaa

SEQ ID NO: 539219 - RNA, 19 nt, Artificial Sequence
  Description of Artificial Sequence: Synthetic oligonucleotide
  Sense strand starting at position 3415 of SEQ ID NO: 318132
aggcaaguucguuaacaaa

SEQ ID NO: 539220 - RNA, 19 nt, Artificial Sequence
  Description of Artificial Sequence: Synthetic oligonucleotide
  Antisense strand to SEQ ID NO: 539219
uuuguuaacgaacuugccu

SEQ ID NO: 539221 - RNA, 19 nt, Artificial Sequence
  Description of Artificial Sequence: Synthetic oligonucleotide
  Sense strand starting at position 3516 of SEQ ID NO: 318132
gaauaacuggcagagcuau

SEQ ID NO: 539222 - RNA, 19 nt, Artificial Sequence
  Description of Artificial Sequence: Synthetic oligonucleotide
  Antisense strand to SEQ ID NO: 539221
auagcucugccaguuauuc

SEQ ID NO: 539223 - RNA, 19 nt, Artificial Sequence
  Description of Artificial Sequence: Synthetic oligonucleotide
  Sense strand starting at position 20 of SEQ ID NO: 318133
guuugauccgcugcuggua

SEQ ID NO: 539224 - RNA, 19 nt, Artificial Sequence
  Description of Artificial Sequence: Synthetic oligonucleotide
  Antisense strand to SEQ ID NO: 539223
uaccagcagcggaucaaac

SEQ ID NO: 539225 - RNA, 19 nt, Artificial Sequence
  Description of Artificial Sequence: Synthetic oligonucleotide
  Sense strand starting at position 406 of SEQ ID NO: 318133
agggucuagagauguuuaa

SEQ ID NO: 539226 - RNA, 19 nt, Artificial Sequence
  Description of Artificial Sequence: Synthetic oligonucleotide
  Antisense strand to SEQ ID NO: 539225
uuaaacaucucuagacccu

SEQ ID NO: 539227 - RNA, 19 nt, Artificial Sequence
  Description of Artificial Sequence: Synthetic oligonucleotide
  Sense strand starting at position 488 of SEQ ID NO: 318133
ugagauacucucuaguguu

SEQ ID NO: 539228 - RNA, 19 nt, Artificial Sequence
  Description of Artificial Sequence: Synthetic oligonucleotide
  Antisense strand to SEQ ID NO: 539227
aacacuagagaguaucuca

SEQ ID NO: 539229 - RNA, 19 nt, Artificial Sequence
  Description of Artificial Sequence: Synthetic oligonucleotide
  Sense strand starting at position 509 of SEQ ID NO: 318133
cuuaguugagccuauuauu

SEQ ID NO: 539230 - RNA, 19 nt, Artificial Sequence
  Description of Artificial Sequence: Synthetic oligonucleotide
  Antisense strand to SEQ ID NO: 539229
aauaauaggcucaacuaag

SEQ ID NO: 539231 - RNA, 19 nt, Artificial Sequence
  Description of Artificial Sequence: Synthetic oligonucleotide
  Sense strand starting at position 524 of SEQ ID NO: 318133
uauuguuaaccagaugguu

SEQ ID NO: 539232 - RNA, 19 nt, Artificial Sequence
  Description of Artificial Sequence: Synthetic oligonucleotide
  Antisense strand to SEQ ID NO: 539231
aaccaucugguuaacaaua

SEQ ID NO: 539233 - RNA, 19 nt, Artificial Sequence
  Description of Artificial Sequence: Synthetic oligonucleotide
  Sense strand starting at position 539 of SEQ ID NO: 318133
gguuacugucugcaucaaa

SEQ ID NO: 539234 - RNA, 19 nt, Artificial Sequence
  Description of Artificial Sequence: Synthetic oligonucleotide
  Antisense strand to SEQ ID NO: 539233
uuugaugcagacaguaacc

SEQ ID NO: 539235 - RNA, 19 nt, Artificial Sequence
  Description of Artificial Sequence: Synthetic oligonucleotide
  Sense strand starting at position 622 of SEQ ID NO: 318133
agucuucucuccucagaua

SEQ ID NO: 539236 - RNA, 19 nt, Artificial Sequence
  Description of Artificial Sequence: Synthetic oligonucleotide
  Antisense strand to SEQ ID NO: 539235
uaucugaggagagaagacu

SEQ ID NO: 539237 - RNA, 19 nt, Artificial Sequence
  Description of Artificial Sequence: Synthetic oligonucleotide
  Sense strand starting at position 689 of SEQ ID NO: 318133
guuggcacucaagagauau

SEQ ID NO: 539238 - RNA, 19 nt, Artificial Sequence
  Description of Artificial Sequence: Synthetic oligonucleotide
  Antisense strand to SEQ ID NO: 539237
auaucucuugagugccaac

SEQ ID NO: 539239 - RNA, 19 nt, Artificial Sequence
  Description of Artificial Sequence: Synthetic oligonucleotide
  Sense strand starting at position 973 of SEQ ID NO: 318133
gagcaaguaucaucugacu

SEQ ID NO: 539240 - RNA, 19 nt, Artificial Sequence
  Description of Artificial Sequence: Synthetic oligonucleotide
  Antisense strand to SEQ ID NO: 539239
agucagaugauacuugcuc

SEQ ID NO: 539241 - RNA, 19 nt, Artificial Sequence
  Description of Artificial Sequence: Synthetic oligonucleotide
  Sense strand starting at position 978 of SEQ ID NO: 318133
aguaucaucugacuggguu

SEQ ID NO: 539242 - RNA, 19 nt, Artificial Sequence
  Description of Artificial Sequence: Synthetic oligonucleotide
  Antisense strand to SEQ ID NO: 539241
aacccagucagaugauacu

SEQ ID NO: 539243 - RNA, 19 nt, Artificial Sequence
  Description of Artificial Sequence: Synthetic oligonucleotide
  Sense strand starting at position 1212 of SEQ ID NO: 318133
cuugaaacagccugagaaa

SEQ ID NO: 539244 - RNA, 19 nt, Artificial Sequence
  Description of Artificial Sequence: Synthetic oligonucleotide
  Antisense strand to SEQ ID NO: 539243
uuucucaggcuguuucaag

SEQ ID NO: 539245 - RNA, 19 nt, Artificial Sequence
  Description of Artificial Sequence: Synthetic oligonucleotide
  Sense strand starting at position 1250 of SEQ ID NO: 318133
ugcugaaacuauucccgaa

SEQ ID NO: 539246 - RNA, 19 nt, Artificial Sequence
  Description of Artificial Sequence: Synthetic oligonucleotide
  Antisense strand to SEQ ID NO: 539245
uucgggaauaguuucagca

SEQ ID NO: 539247 - RNA, 19 nt, Artificial Sequence
  Description of Artificial Sequence: Synthetic oligonucleotide
  Sense strand starting at position 1252 of SEQ ID NO: 318133
cugaaacuauucccgaaca

SEQ ID NO: 539248 - RNA, 19 nt, Artificial Sequence
  Description of Artificial Sequence: Synthetic oligonucleotide
  Antisense strand to SEQ ID NO: 539247
uguucgggaauaguuucag

SEQ ID NO: 539249 - RNA, 19 nt, Artificial Sequence
  Description of Artificial Sequence: Synthetic oligonucleotide
  Sense strand starting at position 1336 of SEQ ID NO: 318133
aagccagaucucuggagau

SEQ ID NO: 539250 - RNA, 19 nt, Artificial Sequence
  Description of Artificial Sequence: Synthetic oligonucleotide
  Antisense strand to SEQ ID NO: 539249
aucuccagagaucuggcuu

SEQ ID NO: 539251 - RNA, 19 nt, Artificial Sequence
  Description of Artificial Sequence: Synthetic oligonucleotide
  Sense strand starting at position 1338 of SEQ ID NO: 318133
gccagaucucuggagauuc

SEQ ID NO: 539252 - RNA, 19 nt, Artificial Sequence
  Description of Artificial Sequence: Synthetic oligonucleotide
  Antisense strand to SEQ ID NO: 539251
gaaucuccagagaucuggc

SEQ ID NO: 539253 - RNA, 19 nt, Artificial Sequence
  Description of Artificial Sequence: Synthetic oligonucleotide
  Sense strand starting at position 1645 of SEQ ID NO: 318133
ugggaaaucugaucagcaa

SEQ ID NO: 539254 - RNA, 19 nt, Artificial Sequence
  Description of Artificial Sequence: Synthetic oligonucleotide
  Antisense strand to SEQ ID NO: 539253
uugcugaucagauuuccca

SEQ ID NO: 539255 - RNA, 19 nt, Artificial Sequence
  Description of Artificial Sequence: Synthetic oligonucleotide
  Sense strand starting at position 1980 of SEQ ID NO: 318133
cugucuaggcugcaaagaa

SEQ ID NO: 539256 - RNA, 19 nt, Artificial Sequence
  Description of Artificial Sequence: Synthetic oligonucleotide
  Antisense strand to SEQ ID NO: 539255
uucuuugcagccuagacag

SEQ ID NO: 539257 - RNA, 19 nt, Artificial Sequence
  Description of Artificial Sequence: Synthetic oligonucleotide
  Sense strand starting at position 2011 of SEQ ID NO: 318133
ucacuagcccgagaaauac

SEQ ID NO: 539258 - RNA, 19 nt, Artificial Sequence
  Description of Artificial Sequence: Synthetic oligonucleotide
  Antisense strand to SEQ ID NO: 539257
guauuucucgggcuaguga

SEQ ID NO: 539259 - RNA, 19 nt, Artificial Sequence
  Description of Artificial Sequence: Synthetic oligonucleotide
  Sense strand starting at position 2080 of SEQ ID NO: 318133
gccagauugcuggaaugag

SEQ ID NO: 539260 - RNA, 19 nt, Artificial Sequence
  Description of Artificial Sequence: Synthetic oligonucleotide
  Antisense strand to SEQ ID NO: 539259
cucauuccagcaaucuggc

SEQ ID NO: 539261 - RNA, 19 nt, Artificial Sequence
  Description of Artificial Sequence: Synthetic oligonucleotide
  Sense strand starting at position 2121 of SEQ ID NO: 318133
uggaguuuaucauccaccu

SEQ ID NO: 539262 - RNA, 19 nt, Artificial Sequence
  Description of Artificial Sequence: Synthetic oligonucleotide
  Antisense strand to SEQ ID NO: 539261
agguggaugauaaacucca

SEQ ID NO: 539263 - RNA, 19 nt, Artificial Sequence
  Description of Artificial Sequence: Synthetic oligonucleotide
  Sense strand starting at position 2268 of SEQ ID NO: 318133
gagagaaauuaagagaaua

SEQ ID NO: 539264 - RNA, 19 nt, Artificial Sequence
  Description of Artificial Sequence: Synthetic oligonucleotide
  Antisense strand to SEQ ID NO: 539263
uauucucuuaauuucucuc

SEQ ID NO: 539265 - RNA, 19 nt, Artificial Sequence
  Description of Artificial Sequence: Synthetic oligonucleotide
  Sense strand starting at position 2322 of SEQ ID NO: 318133
guaguacaaauaggugaaa

SEQ ID NO: 539266 - RNA, 19 nt, Artificial Sequence
  Description of Artificial Sequence: Synthetic oligonucleotide
  Antisense strand to SEQ ID NO: 539265
uuucaccuauuuguacuac

SEQ ID NO: 539267 - RNA, 19 nt, Artificial Sequence
  Description of Artificial Sequence: Synthetic oligonucleotide
  Sense strand starting at position 2613 of SEQ ID NO: 318133
ccuuuagucuuucugggag

SEQ ID NO: 539268 - RNA, 19 nt, Artificial Sequence
  Description of Artificial Sequence: Synthetic oligonucleotide
  Antisense strand to SEQ ID NO: 539267
cucccagaaagacuaaagg

SEQ ID NO: 539269 - RNA, 19 nt, Artificial Sequence
  Description of Artificial Sequence: Synthetic oligonucleotide
  Sense strand starting at position 2741 of SEQ ID NO: 318133
auauacagucuuggcuaau

SEQ ID NO: 539270 - RNA, 19 nt, Artificial Sequence
  Description of Artificial Sequence: Synthetic oligonucleotide
  Antisense strand to SEQ ID NO: 539269
auuagccaagacuguauau

SEQ ID NO: 539271 - RNA, 19 nt, Artificial Sequence
  Description of Artificial Sequence: Synthetic oligonucleotide
  Sense strand starting at position 2824 of SEQ ID NO: 318133
uguauauccuagccacaga

SEQ ID NO: 539272 - RNA, 19 nt, Artificial Sequence
  Description of Artificial Sequence: Synthetic oligonucleotide
  Antisense strand to SEQ ID NO: 539271
ucuguggcuaggauauaca

SEQ ID NO: 539273 - RNA, 19 nt, Artificial Sequence
  Description of Artificial Sequence: Synthetic oligonucleotide
  Sense strand starting at position 2882 of SEQ ID NO: 318133
ugcagaagcuauccuaaug

SEQ ID NO: 539274 - RNA, 19 nt, Artificial Sequence
  Description of Artificial Sequence: Synthetic oligonucleotide
  Antisense strand to SEQ ID NO: 539273
cauuaggauagcuucugca

SEQ ID NO: 539275 - RNA, 19 nt, Artificial Sequence
  Description of Artificial Sequence: Synthetic oligonucleotide
  Sense strand starting at position 2922 of SEQ ID NO: 318133
gagcaucucucuucuggga

SEQ ID NO: 539276 - RNA, 19 nt, Artificial Sequence
  Description of Artificial Sequence: Synthetic oligonucleotide
  Antisense strand to SEQ ID NO: 539275
ucccagaagagagaugcuc

SEQ ID NO: 539277 - RNA, 19 nt, Artificial Sequence
  Description of Artificial Sequence: Synthetic oligonucleotide
  Sense strand starting at position 2994 of SEQ ID NO: 318133
agugacuuuccugaguagu

SEQ ID NO: 539278 - RNA, 19 nt, Artificial Sequence
  Description of Artificial Sequence: Synthetic oligonucleotide
  Antisense strand to SEQ ID NO: 539277
acuacucaggaaagucacu

SEQ ID NO: 539279 - RNA, 19 nt, Artificial Sequence
  Description of Artificial Sequence: Synthetic oligonucleotide
  Sense strand starting at position 3067 of SEQ ID NO: 318133
accagacaaucuuuagagu

SEQ ID NO: 539280 - RNA, 19 nt, Artificial Sequence
  Description of Artificial Sequence: Synthetic oligonucleotide
  Antisense strand to SEQ ID NO: 539279
acucuaaagauugucuggu

SEQ ID NO: 539281 - RNA, 19 nt, Artificial Sequence
  Description of Artificial Sequence: Synthetic oligonucleotide
  Sense strand starting at position 3217 of SEQ ID NO: 318133
uaacaugauguaggugaaa

SEQ ID NO: 539282 - RNA, 19 nt, Artificial Sequence
  Description of Artificial Sequence: Synthetic oligonucleotide
  Antisense strand to SEQ ID NO: 539281
uuucaccuacaucauguua

SEQ ID NO: 539283 - RNA, 19 nt, Artificial Sequence
  Description of Artificial Sequence: Synthetic oligonucleotide
  Sense strand starting at position 3219 of SEQ ID NO: 318133
acaugauguaggugaaagu

SEQ ID NO: 539284 - RNA, 19 nt, Artificial Sequence
  Description of Artificial Sequence: Synthetic oligonucleotide
  Antisense strand to SEQ ID NO: 539283
acuuucaccuacaucaugu

SEQ ID NO: 539285 - RNA, 19 nt, Artificial Sequence
  Description of Artificial Sequence: Synthetic oligonucleotide
  Sense strand starting at position 3220 of SEQ ID NO: 318133
caugauguaggugaaagua

SEQ ID NO: 539286 - RNA, 19 nt, Artificial Sequence
  Description of Artificial Sequence: Synthetic oligonucleotide
  Antisense strand to SEQ ID NO: 539285
uacuuucaccuacaucaug

SEQ ID NO: 539287 - RNA, 19 nt, Artificial Sequence
  Description of Artificial Sequence: Synthetic oligonucleotide
  Sense strand starting at position 3239 of SEQ ID NO: 318133
cgaagagacgcucaguaaa

SEQ ID NO: 539288 - RNA, 19 nt, Artificial Sequence
  Description of Artificial Sequence: Synthetic oligonucleotide
  Antisense strand to SEQ ID NO: 539287
uuuacugagcgucucuucg

SEQ ID NO: 539289 - RNA, 19 nt, Artificial Sequence
  Description of Artificial Sequence: Synthetic oligonucleotide
  Sense strand starting at position 3241 of SEQ ID NO: 318133
aagagacgcucaguaaauc

SEQ ID NO: 539290 - RNA, 19 nt, Artificial Sequence
  Description of Artificial Sequence: Synthetic oligonucleotide
  Antisense strand to SEQ ID NO: 539289
gauuuacugagcgucucuu

SEQ ID NO: 539291 - RNA, 19 nt, Artificial Sequence
  Description of Artificial Sequence: Synthetic oligonucleotide
  Sense strand starting at position 3242 of SEQ ID NO: 318133
agagacgcucaguaaaucu

SEQ ID NO: 539292 - RNA, 19 nt, Artificial Sequence
  Description of Artificial Sequence: Synthetic oligonucleotide
  Antisense strand to SEQ ID NO: 539291
agauuuacugagcgucucu

SEQ ID NO: 539293 - RNA, 19 nt, Artificial Sequence
  Description of Artificial Sequence: Synthetic oligonucleotide
  Sense strand starting at position 3760 of SEQ ID NO: 318133
agagaugacuccuccuuug

SEQ ID NO: 539294 - RNA, 19 nt, Artificial Sequence
  Description of Artificial Sequence: Synthetic oligonucleotide
  Antisense strand to SEQ ID NO: 539293
caaaggaggagucaucucu

SEQ ID NO: 539295 - RNA, 19 nt, Artificial Sequence
  Description of Artificial Sequence: Synthetic oligonucleotide
  Sense strand starting at position 3792 of SEQ ID NO: 318133
uuacauauucgccauacag

SEQ ID NO: 539296 - RNA, 19 nt, Artificial Sequence
  Description of Artificial Sequence: Synthetic oligonucleotide
  Antisense strand to SEQ ID NO: 539295
cuguauggcgaauauguaa

SEQ ID NO: 539297 - RNA, 19 nt, Artificial Sequence
  Description of Artificial Sequence: Synthetic oligonucleotide
  Sense strand starting at position 3794 of SEQ ID NO: 318133
acauauucgccauacagga

SEQ ID NO: 539298 - RNA, 19 nt, Artificial Sequence
  Description of Artificial Sequence: Synthetic oligonucleotide
  Antisense strand to SEQ ID NO: 539297
uccuguauggcgaauaugu

SEQ ID NO: 539299 - RNA, 19 nt, Artificial Sequence
  Description of Artificial Sequence: Synthetic oligonucleotide
  Sense strand starting at position 3817 of SEQ ID NO: 318133
guggaaaugccacaucuaa

SEQ ID NO: 539300 - RNA, 19 nt, Artificial Sequence
  Description of Artificial Sequence: Synthetic oligonucleotide
  Antisense strand to SEQ ID NO: 539299
uuagauguggcauuuccac

SEQ ID NO: 539301 - RNA, 19 nt, Artificial Sequence
  Description of Artificial Sequence: Synthetic oligonucleotide
  Sense strand starting at position 3867 of SEQ ID NO: 318133
gaaauauguaaggguugua

SEQ ID NO: 539302 - RNA, 19 nt, Artificial Sequence
  Description of Artificial Sequence: Synthetic oligonucleotide
  Antisense strand to SEQ ID NO: 539301
uacaacccuuacauauuuc

SEQ ID NO: 539303 - RNA, 19 nt, Artificial Sequence
  Description of Artificial Sequence: Synthetic oligonucleotide
  Sense strand starting at position 81 of SEQ ID NO: 318134
ucaaauaccugccugaguu

SEQ ID NO: 539304 - RNA, 19 nt, Artificial Sequence
  Description of Artificial Sequence: Synthetic oligonucleotide
  Antisense strand to SEQ ID NO: 539303
aacucaggcagguauuuga

SEQ ID NO: 539305 - RNA, 19 nt, Artificial Sequence
  Description of Artificial Sequence: Synthetic oligonucleotide
  Sense strand starting at position 91 of SEQ ID NO: 318134
gccugaguucccuauuccu

SEQ ID NO: 539306 - RNA, 19 nt, Artificial Sequence
  Description of Artificial Sequence: Synthetic oligonucleotide
  Antisense strand to SEQ ID NO: 539305
aggaauagggaacucaggc

SEQ ID NO: 539307 - RNA, 19 nt, Artificial Sequence
  Description of Artificial Sequence: Synthetic oligonucleotide
  Sense strand starting at position 94 of SEQ ID NO: 318134
ugaguucccuauuccuaga

SEQ ID NO: 539308 - RNA, 19 nt, Artificial Sequence
  Description of Artificial Sequence: Synthetic oligonucleotide
  Antisense strand to SEQ ID NO: 539307
ucuaggaauagggaacuca

SEQ ID NO: 539309 - RNA, 19 nt, Artificial Sequence
  Description of Artificial Sequence: Synthetic oligonucleotide
  Sense strand starting at position 314 of SEQ ID NO: 318134
gggucaucaguaggucuua

SEQ ID NO: 539310 - RNA, 19 nt, Artificial Sequence
  Description of Artificial Sequence: Synthetic oligonucleotide
  Antisense strand to SEQ ID NO: 539309
uaagaccuacugaugaccc

SEQ ID NO: 539311 - RNA, 19 nt, Artificial Sequence
  Description of Artificial Sequence: Synthetic oligonucleotide
  Sense strand starting at position 374 of SEQ ID NO: 318134
uguucuaaccauuguauua

SEQ ID NO: 539312 - RNA, 19 nt, Artificial Sequence
  Description of Artificial Sequence: Synthetic oligonucleotide
  Antisense strand to SEQ ID NO: 539311
uaauacaaugguuagaaca

SEQ ID NO: 539313 - RNA, 19 nt, Artificial Sequence
  Description of Artificial Sequence: Synthetic oligonucleotide
  Sense strand starting at position 437 of SEQ ID NO: 318134
ucccacgagucguuagaaa

SEQ ID NO: 539314 - RNA, 19 nt, Artificial Sequence
  Description of Artificial Sequence: Synthetic oligonucleotide
  Antisense strand to SEQ ID NO: 539313
uuucuaacgacucguggga

SEQ ID NO: 539315 - RNA, 19 nt, Artificial Sequence
  Description of Artificial Sequence: Synthetic oligonucleotide
  Sense strand starting at position 728 of SEQ ID NO: 318134
uguggaaucuaagcuucca

SEQ ID NO: 539316 - RNA, 19 nt, Artificial Sequence
  Description of Artificial Sequence: Synthetic oligonucleotide
  Antisense strand to SEQ ID NO: 539315
uggaagcuuagauuccaca

SEQ ID NO: 539317 - RNA, 19 nt, Artificial Sequence
  Description of Artificial Sequence: Synthetic oligonucleotide
  Sense strand starting at position 750 of SEQ ID NO: 318134
aacagacuuuguuugguca

SEQ ID NO: 539318 - RNA, 19 nt, Artificial Sequence
  Description of Artificial Sequence: Synthetic oligonucleotide
  Antisense strand to SEQ ID NO: 539317
ugaccaaacaaagucuguu

SEQ ID NO: 539319 - RNA, 19 nt, Artificial Sequence
  Description of Artificial Sequence: Synthetic oligonucleotide
  Sense strand starting at position 751 of SEQ ID NO: 318134
acagacuuuguuuggucau

SEQ ID NO: 539320 - RNA, 19 nt, Artificial Sequence
  Description of Artificial Sequence: Synthetic oligonucleotide
  Antisense strand to SEQ ID NO: 539319
augaccaaacaaagucugu

SEQ ID NO: 539321 - RNA, 19 nt, Artificial Sequence
  Description of Artificial Sequence: Synthetic oligonucleotide
  Sense strand starting at position 753 of SEQ ID NO: 318134
agacuuuguuuggucauaa

SEQ ID NO: 539322 - RNA, 19 nt, Artificial Sequence
  Description of Artificial Sequence: Synthetic oligonucleotide
  Antisense strand to SEQ ID NO: 539321
uuaugaccaaacaaagucu

SEQ ID NO: 539323 - RNA, 19 nt, Artificial Sequence
  Description of Artificial Sequence: Synthetic oligonucleotide
  Sense strand starting at position 754 of SEQ ID NO: 318134
gacuuuguuuggucauaag

SEQ ID NO: 539324 - RNA, 19 nt, Artificial Sequence
  Description of Artificial Sequence: Synthetic oligonucleotide
  Antisense strand to SEQ ID NO: 539323
cuuaugaccaaacaaaguc

SEQ ID NO: 539325 - RNA, 19 nt, Artificial Sequence
  Description of Artificial Sequence: Synthetic oligonucleotide
  Sense strand starting at position 787 of SEQ ID NO: 318134
gcaagcauugcccagauua

SEQ ID NO: 539326 - RNA, 19 nt, Artificial Sequence
  Description of Artificial Sequence: Synthetic oligonucleotide
  Antisense strand to SEQ ID NO: 539325
uaaucugggcaaugcuugc

SEQ ID NO: 539327 - RNA, 19 nt, Artificial Sequence
  Description of Artificial Sequence: Synthetic oligonucleotide
  Sense strand starting at position 869 of SEQ ID NO: 318134
agagcuagucagugcagaa

SEQ ID NO: 539328 - RNA, 19 nt, Artificial Sequence
  Description of Artificial Sequence: Synthetic oligonucleotide
  Antisense strand to SEQ ID NO: 539327
uucugcacugacuagcucu

SEQ ID NO: 539329 - RNA, 19 nt, Artificial Sequence
  Description of Artificial Sequence: Synthetic oligonucleotide
  Sense strand starting at position 926 of SEQ ID NO: 318134
cgguaucuaccauauauuc

SEQ ID NO: 539330 - RNA, 19 nt, Artificial Sequence
  Description of Artificial Sequence: Synthetic oligonucleotide
  Antisense strand to SEQ ID NO: 539329
gaauauaugguagauaccg

SEQ ID NO: 539331 - RNA, 19 nt, Artificial Sequence
  Description of Artificial Sequence: Synthetic oligonucleotide
  Sense strand starting at position 1098 of SEQ ID NO: 318134
ggagcagucucuccacaua

SEQ ID NO: 539332 - RNA, 19 nt, Artificial Sequence
  Description of Artificial Sequence: Synthetic oligonucleotide
  Antisense strand to SEQ ID NO: 539331
uauguggagagacugcucc

SEQ ID NO: 539333 - RNA, 19 nt, Artificial Sequence
  Description of Artificial Sequence: Synthetic oligonucleotide
  Sense strand starting at position 1148 of SEQ ID NO: 318134
aagaaugaacccugugugu

SEQ ID NO: 539334 - RNA, 19 nt, Artificial Sequence
  Description of Artificial Sequence: Synthetic oligonucleotide
  Antisense strand to SEQ ID NO: 539333
acacacaggguucauucuu

SEQ ID NO: 539335 - RNA, 19 nt, Artificial Sequence
  Description of Artificial Sequence: Synthetic oligonucleotide
  Sense strand starting at position 1244 of SEQ ID NO: 318134
aaacuagaucuaggaguuc

SEQ ID NO: 539336 - RNA, 19 nt, Artificial Sequence
  Description of Artificial Sequence: Synthetic oligonucleotide
  Antisense strand to SEQ ID NO: 539335
gaacuccuagaucuaguuu

SEQ ID NO: 539337 - RNA, 19 nt, Artificial Sequence
  Description of Artificial Sequence: Synthetic oligonucleotide
  Sense strand starting at position 1395 of SEQ ID NO: 318134
uggcuaaaccugcaucaau

SEQ ID NO: 539338 - RNA, 19 nt, Artificial Sequence
  Description of Artificial Sequence: Synthetic oligonucleotide
  Antisense strand to SEQ ID NO: 539337
auugaugcagguuuagcca

SEQ ID NO: 539339 - RNA, 19 nt, Artificial Sequence
  Description of Artificial Sequence: Synthetic oligonucleotide
  Sense strand starting at position 1409 of SEQ ID NO: 318134
ucaauuuagugguuugugu

SEQ ID NO: 539340 - RNA, 19 nt, Artificial Sequence
  Description of Artificial Sequence: Synthetic oligonucleotide
  Antisense strand to SEQ ID NO: 539339
acacaaaccacuaaauuga

SEQ ID NO: 539341 - RNA, 19 nt, Artificial Sequence
  Description of Artificial Sequence: Synthetic oligonucleotide
  Sense strand starting at position 1578 of SEQ ID NO: 318134
gaaagcugagaguggaauu

SEQ ID NO: 539342 - RNA, 19 nt, Artificial Sequence
  Description of Artificial Sequence: Synthetic oligonucleotide
  Antisense strand to SEQ ID NO: 539341
aauuccacucucagcuuuc

SEQ ID NO: 539343 - RNA, 19 nt, Artificial Sequence
  Description of Artificial Sequence: Synthetic oligonucleotide
  Sense strand starting at position 2198 of SEQ ID NO: 318134
gagagacucaggugaguaa

SEQ ID NO: 539344 - RNA, 19 nt, Artificial Sequence
  Description of Artificial Sequence: Synthetic oligonucleotide
  Antisense strand to SEQ ID NO: 539343
uuacucaccugagucucuc

SEQ ID NO: 539345 - RNA, 19 nt, Artificial Sequence
  Description of Artificial Sequence: Synthetic oligonucleotide
  Sense strand starting at position 2343 of SEQ ID NO: 318134
gugcuuagugcgguucaga

SEQ ID NO: 539346 - RNA, 19 nt, Artificial Sequence
  Description of Artificial Sequence: Synthetic oligonucleotide
  Antisense strand to SEQ ID NO: 539345
ucugaaccgcacuaagcac

SEQ ID NO: 539347 - RNA, 19 nt, Artificial Sequence
  Description of Artificial Sequence: Synthetic oligonucleotide
  Sense strand starting at position 2346 of SEQ ID NO: 318134
cuuagugcgguucagacua

SEQ ID NO: 539348 - RNA, 19 nt, Artificial Sequence
  Description of Artificial Sequence: Synthetic oligonucleotide
  Antisense strand to SEQ ID NO: 539347
uagucugaaccgcacuaag

SEQ ID NO: 539349 - RNA, 19 nt, Artificial Sequence
  Description of Artificial Sequence: Synthetic oligonucleotide
  Sense strand starting at position 2531 of SEQ ID NO: 318134
uuugacuucccauacgguu

SEQ ID NO: 539350 - RNA, 19 nt, Artificial Sequence
  Description of Artificial Sequence: Synthetic oligonucleotide
  Antisense strand to SEQ ID NO: 539349
aaccguaugggaagucaaa

SEQ ID NO: 539351 - RNA, 19 nt, Artificial Sequence
  Description of Artificial Sequence: Synthetic oligonucleotide
  Sense strand starting at position 2615 of SEQ ID NO: 318134
acaucuguagcaugguaua

SEQ ID NO: 539352 - RNA, 19 nt, Artificial Sequence
  Description of Artificial Sequence: Synthetic oligonucleotide
  Antisense strand to SEQ ID NO: 539351
uauaccaugcuacagaugu

SEQ ID NO: 539353 - RNA, 19 nt, Artificial Sequence
  Description of Artificial Sequence: Synthetic oligonucleotide
  Sense strand starting at position 2635 of SEQ ID NO: 318134
ucaugcuagugauccucua

SEQ ID NO: 539354 - RNA, 19 nt, Artificial Sequence
  Description of Artificial Sequence: Synthetic oligonucleotide
  Antisense strand to SEQ ID NO: 539353
uagaggaucacuagcauga

SEQ ID NO: 539355 - RNA, 19 nt, Artificial Sequence
  Description of Artificial Sequence: Synthetic oligonucleotide
  Sense strand starting at position 2643 of SEQ ID NO: 318134
gugauccucuacucacuau

SEQ ID NO: 539356 - RNA, 19 nt, Artificial Sequence
  Description of Artificial Sequence: Synthetic oligonucleotide
  Antisense strand to SEQ ID NO: 539355
auagugaguagaggaucac

SEQ ID NO: 539357 - RNA, 19 nt, Artificial Sequence
  Description of Artificial Sequence: Synthetic oligonucleotide
  Sense strand starting at position 2667 of SEQ ID NO: 318134
guauauaaucuuggguuua

SEQ ID NO: 539358 - RNA, 19 nt, Artificial Sequence
  Description of Artificial Sequence: Synthetic oligonucleotide
  Antisense strand to SEQ ID NO: 539357
uaaacccaagauuauauac

SEQ ID NO: 539359 - RNA, 19 nt, Artificial Sequence
  Description of Artificial Sequence: Synthetic oligonucleotide
  Sense strand starting at position 2678 of SEQ ID NO: 318134
uggguuuaaagcugaaaga

SEQ ID NO: 539360 - RNA, 19 nt, Artificial Sequence
  Description of Artificial Sequence: Synthetic oligonucleotide
  Antisense strand to SEQ ID NO: 539359
ucuuucagcuuuaaaccca

SEQ ID NO: 539361 - RNA, 19 nt, Artificial Sequence
  Description of Artificial Sequence: Synthetic oligonucleotide
  Sense strand starting at position 2721 of SEQ ID NO: 318134
ccagucauuuaucaggcau

SEQ ID NO: 539362 - RNA, 19 nt, Artificial Sequence
  Description of Artificial Sequence: Synthetic oligonucleotide
  Antisense strand to SEQ ID NO: 539361
augccugauaaaugacugg

SEQ ID NO: 539363 - RNA, 19 nt, Artificial Sequence
  Description of Artificial Sequence: Synthetic oligonucleotide
  Sense strand starting at position 2919 of SEQ ID NO: 318134
gaaauagguugauaugaua

SEQ ID NO: 539364 - RNA, 19 nt, Artificial Sequence
  Description of Artificial Sequence: Synthetic oligonucleotide
  Antisense strand to SEQ ID NO: 539363
uaucauaucaaccuauuuc

SEQ ID NO: 539365 - RNA, 19 nt, Artificial Sequence
  Description of Artificial Sequence: Synthetic oligonucleotide
  Sense strand starting at position 2922 of SEQ ID NO: 318134
auagguugauaugauaaag

SEQ ID NO: 539366 - RNA, 19 nt, Artificial Sequence
  Description of Artificial Sequence: Synthetic oligonucleotide
  Antisense strand to SEQ ID NO: 539365
cuuuaucauaucaaccuau

SEQ ID NO: 539367 - RNA, 19 nt, Artificial Sequence
  Description of Artificial Sequence: Synthetic oligonucleotide
  Sense strand starting at position 3012 of SEQ ID NO: 318134
caugaaugaugacaaggaa

SEQ ID NO: 539368 - RNA, 19 nt, Artificial Sequence
  Description of Artificial Sequence: Synthetic oligonucleotide
  Antisense strand to SEQ ID NO: 539367
uuccuugucaucauucaug

SEQ ID NO: 539369 - RNA, 19 nt, Artificial Sequence
  Description of Artificial Sequence: Synthetic oligonucleotide
  Sense strand starting at position 3130 of SEQ ID NO: 318134
agcugcugucacuacaaua

SEQ ID NO: 539370 - RNA, 19 nt, Artificial Sequence
  Description of Artificial Sequence: Synthetic oligonucleotide
  Antisense strand to SEQ ID NO: 539369
uauuguagugacagcagcu

SEQ ID NO: 539371 - RNA, 19 nt, Artificial Sequence
  Description of Artificial Sequence: Synthetic oligonucleotide
  Sense strand starting at position 3199 of SEQ ID NO: 318134
cuuauuuauuccuggaagg

SEQ ID NO: 539372 - RNA, 19 nt, Artificial Sequence
  Description of Artificial Sequence: Synthetic oligonucleotide
  Antisense strand to SEQ ID NO: 539371
ccuuccaggaauaaauaag

SEQ ID NO: 539373 - RNA, 19 nt, Artificial Sequence
  Description of Artificial Sequence: Synthetic oligonucleotide
  Sense strand starting at position 3204 of SEQ ID NO: 318134
uuauuccuggaagguaauu

SEQ ID NO: 539374 - RNA, 19 nt, Artificial Sequence
  Description of Artificial Sequence: Synthetic oligonucleotide
  Antisense strand to SEQ ID NO: 539373
aauuaccuuccaggaauaa

SEQ ID NO: 539375 - RNA, 19 nt, Artificial Sequence
  Description of Artificial Sequence: Synthetic oligonucleotide
  Sense strand starting at position 3250 of SEQ ID NO: 318134
gcccaagauucccucuugu

SEQ ID NO: 539376 - RNA, 19 nt, Artificial Sequence
  Description of Artificial Sequence: Synthetic oligonucleotide
  Antisense strand to SEQ ID NO: 539375
acaagagggaaucuugggc

SEQ ID NO: 539377 - RNA, 19 nt, Artificial Sequence
  Description of Artificial Sequence: Synthetic oligonucleotide
  Sense strand starting at position 3396 of SEQ ID NO: 318134
ucuuccacucuguagacau

SEQ ID NO: 539378 - RNA, 19 nt, Artificial Sequence
  Description of Artificial Sequence: Synthetic oligonucleotide
  Antisense strand to SEQ ID NO: 539377
augucuacagaguggaaga

SEQ ID NO: 539379 - RNA, 19 nt, Artificial Sequence
  Description of Artificial Sequence: Synthetic oligonucleotide
  Sense strand starting at position 3398 of SEQ ID NO: 318134
uuccacucuguagacauau

SEQ ID NO: 539380 - RNA, 19 nt, Artificial Sequence
  Description of Artificial Sequence: Synthetic oligonucleotide
  Antisense strand to SEQ ID NO: 539379
auaugucuacagaguggaa

SEQ ID NO: 539381 - RNA, 19 nt, Artificial Sequence
  Description of Artificial Sequence: Synthetic oligonucleotide
  Sense strand starting at position 3943 of SEQ ID NO: 318134
ucagucucacauuguuagu

SEQ ID NO: 539382 - RNA, 19 nt, Artificial Sequence
  Description of Artificial Sequence: Synthetic oligonucleotide
  Antisense strand to SEQ ID NO: 539381
acuaacaaugugagacuga

SEQ ID NO: 539383 - RNA, 19 nt, Artificial Sequence
  Description of Artificial Sequence: Synthetic oligonucleotide
  Sense strand starting at position 10 of SEQ ID NO: 318135
guuguauaaccuugagcaa

SEQ ID NO: 539384 - RNA, 19 nt, Artificial Sequence
  Description of Artificial Sequence: Synthetic oligonucleotide
  Antisense strand to SEQ ID NO: 539383
uugcucaagguuauacaac

SEQ ID NO: 539385 - RNA, 19 nt, Artificial Sequence
  Description of Artificial Sequence: Synthetic oligonucleotide
  Sense strand starting at position 11 of SEQ ID NO: 318135
uuguauaaccuugagcaag

SEQ ID NO: 539386 - RNA, 19 nt, Artificial Sequence
  Description of Artificial Sequence: Synthetic oligonucleotide
  Antisense strand to SEQ ID NO: 539385
cuugcucaagguuauacaa

SEQ ID NO: 539387 - RNA, 19 nt, Artificial Sequence
  Description of Artificial Sequence: Synthetic oligonucleotide
  Sense strand starting at position 35 of SEQ ID NO: 318135
ugaucaaucugagacucaa

SEQ ID NO: 539388 - RNA, 19 nt, Artificial Sequence
  Description of Artificial Sequence: Synthetic oligonucleotide
  Antisense strand to SEQ ID NO: 539387
uugagucucagauugauca

SEQ ID NO: 539389 - RNA, 19 nt, Artificial Sequence
  Description of Artificial Sequence: Synthetic oligonucleotide
  Sense strand starting at position 261 of SEQ ID NO: 318135
ugcauagguugcucucuua

SEQ ID NO: 539390 - RNA, 19 nt, Artificial Sequence
  Description of Artificial Sequence: Synthetic oligonucleotide
  Antisense strand to SEQ ID NO: 539389
uaagagagcaaccuaugca

SEQ ID NO: 539391 - RNA, 19 nt, Artificial Sequence
  Description of Artificial Sequence: Synthetic oligonucleotide
  Sense strand starting at position 299 of SEQ ID NO: 318135
uuggcaaagccuugcuuga

SEQ ID NO: 539392 - RNA, 19 nt, Artificial Sequence
  Description of Artificial Sequence: Synthetic oligonucleotide
  Antisense strand to SEQ ID NO: 539391
ucaagcaaggcuuugccaa

SEQ ID NO: 539393 - RNA, 19 nt, Artificial Sequence
  Description of Artificial Sequence: Synthetic oligonucleotide
  Sense strand starting at position 301 of SEQ ID NO: 318135
ggcaaagccuugcuugauc

SEQ ID NO: 539394 - RNA, 19 nt, Artificial Sequence
  Description of Artificial Sequence: Synthetic oligonucleotide
  Antisense strand to SEQ ID NO: 539393
gaucaagcaaggcuuugcc

SEQ ID NO: 539395 - RNA, 19 nt, Artificial Sequence
  Description of Artificial Sequence: Synthetic oligonucleotide
  Sense strand starting at position 906 of SEQ ID NO: 318135
gugagaacaucucccaaau

SEQ ID NO: 539396 - RNA, 19 nt, Artificial Sequence
  Description of Artificial Sequence: Synthetic oligonucleotide
  Antisense strand to SEQ ID NO: 539395
auuugggagauguucucac

SEQ ID NO: 539397 - RNA, 19 nt, Artificial Sequence
  Description of Artificial Sequence: Synthetic oligonucleotide
  Sense strand starting at position 1148 of SEQ ID NO: 318135
ugcuguaaguaggaaucaa

SEQ ID NO: 539398 - RNA, 19 nt, Artificial Sequence
  Description of Artificial Sequence: Synthetic oligonucleotide
  Antisense strand to SEQ ID NO: 539397
uugauuccuacuuacagca

SEQ ID NO: 539399 - RNA, 19 nt, Artificial Sequence
  Description of Artificial Sequence: Synthetic oligonucleotide
  Sense strand starting at position 1190 of SEQ ID NO: 318135
cggcuuuauuuguuuguuu

SEQ ID NO: 539400 - RNA, 19 nt, Artificial Sequence
  Description of Artificial Sequence: Synthetic oligonucleotide
  Antisense strand to SEQ ID NO: 539399
aaacaaacaaauaaagccg

SEQ ID NO: 539401 - RNA, 19 nt, Artificial Sequence
  Description of Artificial Sequence: Synthetic oligonucleotide
  Sense strand starting at position 1556 of SEQ ID NO: 318135
ccaaguacuccguaaaguu

SEQ ID NO: 539402 - RNA, 19 nt, Artificial Sequence
  Description of Artificial Sequence: Synthetic oligonucleotide
  Antisense strand to SEQ ID NO: 539401
aacuuuacggaguacuugg

SEQ ID NO: 539403 - RNA, 19 nt, Artificial Sequence
  Description of Artificial Sequence: Synthetic oligonucleotide
  Sense strand starting at position 1565 of SEQ ID NO: 318135
ccguaaaguuaacagacau

SEQ ID NO: 539404 - RNA, 19 nt, Artificial Sequence
  Description of Artificial Sequence: Synthetic oligonucleotide
  Antisense strand to SEQ ID NO: 539403
augucuguuaacuuuacgg

SEQ ID NO: 539405 - RNA, 19 nt, Artificial Sequence
  Description of Artificial Sequence: Synthetic oligonucleotide
  Sense strand starting at position 1577 of SEQ ID NO: 318135
cagacaucaguucgugguu

SEQ ID NO: 539406 - RNA, 19 nt, Artificial Sequence
  Description of Artificial Sequence: Synthetic oligonucleotide
  Antisense strand to SEQ ID NO: 539405
aaccacgaacugaugucug

SEQ ID NO: 539407 - RNA, 19 nt, Artificial Sequence
  Description of Artificial Sequence: Synthetic oligonucleotide
  Sense strand starting at position 1580 of SEQ ID NO: 318135
acaucaguucgugguucau

SEQ ID NO: 539408 - RNA, 19 nt, Artificial Sequence
  Description of Artificial Sequence: Synthetic oligonucleotide
  Antisense strand to SEQ ID NO: 539407
augaaccacgaacugaugu

SEQ ID NO: 539409 - RNA, 19 nt, Artificial Sequence
  Description of Artificial Sequence: Synthetic oligonucleotide
  Sense strand starting at position 1731 of SEQ ID NO: 318135
ugcggauucuucucgcuca

SEQ ID NO: 539410 - RNA, 19 nt, Artificial Sequence
  Description of Artificial Sequence: Synthetic oligonucleotide
  Antisense strand to SEQ ID NO: 539409
ugagcgagaagaauccgca

SEQ ID NO: 539411 - RNA, 19 nt, Artificial Sequence
  Description of Artificial Sequence: Synthetic oligonucleotide
  Sense strand starting at position 1732 of SEQ ID NO: 318135
gcggauucuucucgcucaa

SEQ ID NO: 539412 - RNA, 19 nt, Artificial Sequence
  Description of Artificial Sequence: Synthetic oligonucleotide
  Antisense strand to SEQ ID NO: 539411
uugagcgagaagaauccgc

SEQ ID NO: 539413 - RNA, 19 nt, Artificial Sequence
  Description of Artificial Sequence: Synthetic oligonucleotide
  Sense strand starting at position 1734 of SEQ ID NO: 318135
ggauucuucucgcucaaac

SEQ ID NO: 539414 - RNA, 19 nt, Artificial Sequence
  Description of Artificial Sequence: Synthetic oligonucleotide
  Antisense strand to SEQ ID NO: 539413
guuugagcgagaagaaucc

SEQ ID NO: 539415 - RNA, 19 nt, Artificial Sequence
  Description of Artificial Sequence: Synthetic oligonucleotide
  Sense strand starting at position 1780 of SEQ ID NO: 318135
ugugcaaauccacgacaau

SEQ ID NO: 539416 - RNA, 19 nt, Artificial Sequence
  Description of Artificial Sequence: Synthetic oligonucleotide
  Antisense strand to SEQ ID NO: 539415
auugucguggauuugcaca

SEQ ID NO: 539417 - RNA, 19 nt, Artificial Sequence
  Description of Artificial Sequence: Synthetic oligonucleotide
  Sense strand starting at position 1991 of SEQ ID NO: 318135
ggcgcuaacugacuacaau

SEQ ID NO: 539418 - RNA, 19 nt, Artificial Sequence
  Description of Artificial Sequence: Synthetic oligonucleotide
  Antisense strand to SEQ ID NO: 539417
auuguagucaguuagcgcc

SEQ ID NO: 539419 - RNA, 19 nt, Artificial Sequence
  Description of Artificial Sequence: Synthetic oligonucleotide
  Sense strand starting at position 1992 of SEQ ID NO: 318135
gcgcuaacugacuacaauu

SEQ ID NO: 539420 - RNA, 19 nt, Artificial Sequence
  Description of Artificial Sequence: Synthetic oligonucleotide
  Antisense strand to SEQ ID NO: 539419
aauuguagucaguuagcgc

SEQ ID NO: 539421 - RNA, 19 nt, Artificial Sequence
  Description of Artificial Sequence: Synthetic oligonucleotide
  Sense strand starting at position 2075 of SEQ ID NO: 318135
acgucacuggcauguugaa

SEQ ID NO: 539422 - RNA, 19 nt, Artificial Sequence
  Description of Artificial Sequence: Synthetic oligonucleotide
  Antisense strand to SEQ ID NO: 539421
uucaacaugccagugacgu

SEQ ID NO: 539423 - RNA, 19 nt, Artificial Sequence
  Description of Artificial Sequence: Synthetic oligonucleotide
  Sense strand starting at position 2094 of SEQ ID NO: 318135
cuacaaaguccaugaugca

SEQ ID NO: 539424 - RNA, 19 nt, Artificial Sequence
  Description of Artificial Sequence: Synthetic oligonucleotide
  Antisense strand to SEQ ID NO: 539423
ugcaucauggacuuuguag

SEQ ID NO: 539425 - RNA, 19 nt, Artificial Sequence
  Description of Artificial Sequence: Synthetic oligonucleotide
  Sense strand starting at position 2152 of SEQ ID NO: 318135
guuggagucccuuggccau

SEQ ID NO: 539426 - RNA, 19 nt, Artificial Sequence
  Description of Artificial Sequence: Synthetic oligonucleotide
  Antisense strand to SEQ ID NO: 539425
auggccaagggacuccaac

SEQ ID NO: 539427 - RNA, 19 nt, Artificial Sequence
  Description of Artificial Sequence: Synthetic oligonucleotide
  Sense strand starting at position 2191 of SEQ ID NO: 318135
gcugguugccugucgggau

SEQ ID NO: 539428 - RNA, 19 nt, Artificial Sequence
  Description of Artificial Sequence: Synthetic oligonucleotide
  Antisense strand to SEQ ID NO: 539427
aucccgacaggcaaccagc

SEQ ID NO: 539429 - RNA, 19 nt, Artificial Sequence
  Description of Artificial Sequence: Synthetic oligonucleotide
  Sense strand starting at position 2227 of SEQ ID NO: 318135
auuacuauacggugacuga

SEQ ID NO: 539430 - RNA, 19 nt, Artificial Sequence
  Description of Artificial Sequence: Synthetic oligonucleotide
  Antisense strand to SEQ ID NO: 539429
ucagucaccguauaguaau

SEQ ID NO: 539431 - RNA, 19 nt, Artificial Sequence
  Description of Artificial Sequence: Synthetic oligonucleotide
  Sense strand starting at position 2262 of SEQ ID NO: 318135
ugccacuaugcacagauau

SEQ ID NO: 539432 - RNA, 19 nt, Artificial Sequence
  Description of Artificial Sequence: Synthetic oligonucleotide
  Antisense strand to SEQ ID NO: 539431
auaucugugcauaguggca

SEQ ID NO: 539433 - RNA, 19 nt, Artificial Sequence
  Description of Artificial Sequence: Synthetic oligonucleotide
  Sense strand starting at position 2323 of SEQ ID NO: 318135
uguauaaccgcguauugac

SEQ ID NO: 539434 - RNA, 19 nt, Artificial Sequence
  Description of Artificial Sequence: Synthetic oligonucleotide
  Antisense strand to SEQ ID NO: 539433
gucaauacgcgguuauaca

SEQ ID NO: 539435 - RNA, 19 nt, Artificial Sequence
  Description of Artificial Sequence: Synthetic oligonucleotide
  Sense strand starting at position 2550 of SEQ ID NO: 318135
ccaggaugaucccgauuuc

SEQ ID NO: 539436 - RNA, 19 nt, Artificial Sequence
  Description of Artificial Sequence: Synthetic oligonucleotide
  Antisense strand to SEQ ID NO: 539435
gaaaucgggaucauccugg

SEQ ID NO: 539437 - RNA, 19 nt, Artificial Sequence
  Description of Artificial Sequence: Synthetic oligonucleotide
  Sense strand starting at position 2619 of SEQ ID NO: 318135
gcgugagcuaccguaccua

SEQ ID NO: 539438 - RNA, 19 nt, Artificial Sequence
  Description of Artificial Sequence: Synthetic oligonucleotide
  Antisense strand to SEQ ID NO: 539437
uagguacgguagcucacgc

SEQ ID NO: 539439 - RNA, 19 nt, Artificial Sequence
  Description of Artificial Sequence: Synthetic oligonucleotide
  Sense strand starting at position 3007 of SEQ ID NO: 318135
uugccugacucagacuauu

SEQ ID NO: 539440 - RNA, 19 nt, Artificial Sequence
  Description of Artificial Sequence: Synthetic oligonucleotide
  Antisense strand to SEQ ID NO: 539439
aauagucugagucaggcaa

SEQ ID NO: 539441 - RNA, 19 nt, Artificial Sequence
  Description of Artificial Sequence: Synthetic oligonucleotide
  Sense strand starting at position 3651 of SEQ ID NO: 318135
agagauauauggugucuga

SEQ ID NO: 539442 - RNA, 19 nt, Artificial Sequence
  Description of Artificial Sequence: Synthetic oligonucleotide
  Antisense strand to SEQ ID NO: 539441
ucagacaccauauaucucu

SEQ ID NO: 539443 - RNA, 19 nt, Artificial Sequence
  Description of Artificial Sequence: Synthetic oligonucleotide
  Sense strand starting at position 3654 of SEQ ID NO: 318135
gauauauggugucugauac

SEQ ID NO: 539444 - RNA, 19 nt, Artificial Sequence
  Description of Artificial Sequence: Synthetic oligonucleotide
  Antisense strand to SEQ ID NO: 539443
guaucagacaccauauauc

SEQ ID NO: 539445 - RNA, 19 nt, Artificial Sequence
  Description of Artificial Sequence: Synthetic oligonucleotide
  Sense strand starting at position 3655 of SEQ ID NO: 318135
auauauggugucugauaca

SEQ ID NO: 539446 - RNA, 19 nt, Artificial Sequence
  Description of Artificial Sequence: Synthetic oligonucleotide
  Antisense strand to SEQ ID NO: 539445
uguaucagacaccauauau

SEQ ID NO: 539447 - RNA, 19 nt, Artificial Sequence
  Description of Artificial Sequence: Synthetic oligonucleotide
  Sense strand starting at position 3658 of SEQ ID NO: 318135
uauggugucugauacagua

SEQ ID NO: 539448 - RNA, 19 nt, Artificial Sequence
  Description of Artificial Sequence: Synthetic oligonucleotide
  Antisense strand to SEQ ID NO: 539447
uacuguaucagacaccaua

SEQ ID NO: 539449 - RNA, 19 nt, Artificial Sequence
  Description of Artificial Sequence: Synthetic oligonucleotide
  Sense strand starting at position 102 of SEQ ID NO: 318136
gaggucuuccuguaccauc

SEQ ID NO: 539450 - RNA, 19 nt, Artificial Sequence
  Description of Artificial Sequence: Synthetic oligonucleotide
  Antisense strand to SEQ ID NO: 539449
gaugguacaggaagaccuc

SEQ ID NO: 539451 - RNA, 19 nt, Artificial Sequence
  Description of Artificial Sequence: Synthetic oligonucleotide
  Sense strand starting at position 140 of SEQ ID NO: 318136
cccuguacugaugggaguu

SEQ ID NO: 539452 - RNA, 19 nt, Artificial Sequence
  Description of Artificial Sequence: Synthetic oligonucleotide
  Antisense strand to SEQ ID NO: 539451
aacucccaucaguacaggg

SEQ ID NO: 539453 - RNA, 19 nt, Artificial Sequence
  Description of Artificial Sequence: Synthetic oligonucleotide
  Sense strand starting at position 141 of SEQ ID NO: 318136
ccuguacugaugggaguuu

SEQ ID NO: 539454 - RNA, 19 nt, Artificial Sequence
  Description of Artificial Sequence: Synthetic oligonucleotide
  Antisense strand to SEQ ID NO: 539453
aaacucccaucaguacagg

SEQ ID NO: 539455 - RNA, 19 nt, Artificial Sequence
  Description of Artificial Sequence: Synthetic oligonucleotide
  Sense strand starting at position 179 of SEQ ID NO: 318136
gcucaauuggauuguauaa

SEQ ID NO: 539456 - RNA, 19 nt, Artificial Sequence
  Description of Artificial Sequence: Synthetic oligonucleotide
  Antisense strand to SEQ ID NO: 539455
uuauacaauccaauugagc

SEQ ID NO: 539457 - RNA, 19 nt, Artificial Sequence
  Description of Artificial Sequence: Synthetic oligonucleotide
  Sense strand starting at position 215 of SEQ ID NO: 318136
gaauguuaggccuaucugu

SEQ ID NO: 539458 - RNA, 19 nt, Artificial Sequence
  Description of Artificial Sequence: Synthetic oligonucleotide
  Antisense strand to SEQ ID NO: 539457
acagauaggccuaacauuc

SEQ ID NO: 539459 - RNA, 19 nt, Artificial Sequence
  Description of Artificial Sequence: Synthetic oligonucleotide
  Sense strand starting at position 370 of SEQ ID NO: 318136
gcaagauauuuagaaacau

SEQ ID NO: 539460 - RNA, 19 nt, Artificial Sequence
  Description of Artificial Sequence: Synthetic oligonucleotide
  Antisense strand to SEQ ID NO: 539459
auguuucuaaauaucuugc

SEQ ID NO: 539461 - RNA, 19 nt, Artificial Sequence
  Description of Artificial Sequence: Synthetic oligonucleotide
  Sense strand starting at position 420 of SEQ ID NO: 318136
gcugaaaucuaaguuuauu

SEQ ID NO: 539462 - RNA, 19 nt, Artificial Sequence
  Description of Artificial Sequence: Synthetic oligonucleotide
  Antisense strand to SEQ ID NO: 539461
aauaaacuuagauuucagc

SEQ ID NO: 539463 - RNA, 19 nt, Artificial Sequence
  Description of Artificial Sequence: Synthetic oligonucleotide
  Sense strand starting at position 434 of SEQ ID NO: 318136
uuauuaugaccuugcagaa

SEQ ID NO: 539464 - RNA, 19 nt, Artificial Sequence
  Description of Artificial Sequence: Synthetic oligonucleotide
  Antisense strand to SEQ ID NO: 539463
uucugcaaggucauaauaa

SEQ ID NO: 539465 - RNA, 19 nt, Artificial Sequence
  Description of Artificial Sequence: Synthetic oligonucleotide
  Sense strand starting at position 566 of SEQ ID NO: 318136
ggagaacagcugugacuau

SEQ ID NO: 539466 - RNA, 19 nt, Artificial Sequence
  Description of Artificial Sequence: Synthetic oligonucleotide
  Antisense strand to SEQ ID NO: 539465
auagucacagcuguucucc

SEQ ID NO: 539467 - RNA, 19 nt, Artificial Sequence
  Description of Artificial Sequence: Synthetic oligonucleotide
  Sense strand starting at position 579 of SEQ ID NO: 318136
gacuauaaaugccucggaa

SEQ ID NO: 539468 - RNA, 19 nt, Artificial Sequence
  Description of Artificial Sequence: Synthetic oligonucleotide
  Antisense strand to SEQ ID NO: 539467
uuccgaggcauuuauaguc

SEQ ID NO: 539469 - RNA, 19 nt, Artificial Sequence
  Description of Artificial Sequence: Synthetic oligonucleotide
  Sense strand starting at position 581 of SEQ ID NO: 318136
cuauaaaugccucggaaau

SEQ ID NO: 539470 - RNA, 19 nt, Artificial Sequence
  Description of Artificial Sequence: Synthetic oligonucleotide
  Antisense strand to SEQ ID NO: 539469
auuuccgaggcauuuauag

SEQ ID NO: 539471 - RNA, 19 nt, Artificial Sequence
  Description of Artificial Sequence: Synthetic oligonucleotide
  Sense strand starting at position 582 of SEQ ID NO: 318136
uauaaaugccucggaaaug

SEQ ID NO: 539472 - RNA, 19 nt, Artificial Sequence
  Description of Artificial Sequence: Synthetic oligonucleotide
  Antisense strand to SEQ ID NO: 539471
cauuuccgaggcauuuaua

SEQ ID NO: 539473 - RNA, 19 nt, Artificial Sequence
  Description of Artificial Sequence: Synthetic oligonucleotide
  Sense strand starting at position 682 of SEQ ID NO: 318136
gcugaauuagaugacuucu

SEQ ID NO: 539474 - RNA, 19 nt, Artificial Sequence
  Description of Artificial Sequence: Synthetic oligonucleotide
  Antisense strand to SEQ ID NO: 539473
agaagucaucuaauucagc

SEQ ID NO: 539475 - RNA, 19 nt, Artificial Sequence
  Description of Artificial Sequence: Synthetic oligonucleotide
  Sense strand starting at position 769 of SEQ ID NO: 318136
cagggaugaggguguuaga

SEQ ID NO: 539476 - RNA, 19 nt, Artificial Sequence
  Description of Artificial Sequence: Synthetic oligonucleotide
  Antisense strand to SEQ ID NO: 539475
ucuaacacccucaucccug

SEQ ID NO: 539477 - RNA, 19 nt, Artificial Sequence
  Description of Artificial Sequence: Synthetic oligonucleotide
  Sense strand starting at position 786 of SEQ ID NO: 318136
gaagcuuaaccgucucgca

SEQ ID NO: 539478 - RNA, 19 nt, Artificial Sequence
  Description of Artificial Sequence: Synthetic oligonucleotide
  Antisense strand to SEQ ID NO: 539477
ugcgagacgguuaagcuuc

SEQ ID NO: 539479 - RNA, 19 nt, Artificial Sequence
  Description of Artificial Sequence: Synthetic oligonucleotide
  Sense strand starting at position 846 of SEQ ID NO: 318136
uaagucauguggcuugaga

SEQ ID NO: 539480 - RNA, 19 nt, Artificial Sequence
  Description of Artificial Sequence: Synthetic oligonucleotide
  Antisense strand to SEQ ID NO: 539479
ucucaagccacaugacuua

SEQ ID NO: 539481 - RNA, 19 nt, Artificial Sequence
  Description of Artificial Sequence: Synthetic oligonucleotide
  Sense strand starting at position 1148 of SEQ ID NO: 318136
ucuggcacugcucaucaua

SEQ ID NO: 539482 - RNA, 19 nt, Artificial Sequence
  Description of Artificial Sequence: Synthetic oligonucleotide
  Antisense strand to SEQ ID NO: 539481
uaugaugagcagugccaga

SEQ ID NO: 539483 - RNA, 19 nt, Artificial Sequence
  Description of Artificial Sequence: Synthetic oligonucleotide
  Sense strand starting at position 1248 of SEQ ID NO: 318136
uugaucucauuagcaguua

SEQ ID NO: 539484 - RNA, 19 nt, Artificial Sequence
  Description of Artificial Sequence: Synthetic oligonucleotide
  Antisense strand to SEQ ID NO: 539483
uaacugcuaaugagaucaa

SEQ ID NO: 539485 - RNA, 19 nt, Artificial Sequence
  Description of Artificial Sequence: Synthetic oligonucleotide
  Sense strand starting at position 1366 of SEQ ID NO: 318136
ucacuucccugagcugauu

SEQ ID NO: 539486 - RNA, 19 nt, Artificial Sequence
  Description of Artificial Sequence: Synthetic oligonucleotide
  Antisense strand to SEQ ID NO: 539485
aaucagcucagggaaguga

SEQ ID NO: 539487 - RNA, 19 nt, Artificial Sequence
  Description of Artificial Sequence: Synthetic oligonucleotide
  Sense strand starting at position 1574 of SEQ ID NO: 318136
ucacucaaccaguaaaguu

SEQ ID NO: 539488 - RNA, 19 nt, Artificial Sequence
  Description of Artificial Sequence: Synthetic oligonucleotide
  Antisense strand to SEQ ID NO: 539487
aacuuuacugguugaguga

SEQ ID NO: 539489 - RNA, 19 nt, Artificial Sequence
  Description of Artificial Sequence: Synthetic oligonucleotide
  Sense strand starting at position 1708 of SEQ ID NO: 318136
aggcuuaccuucuugaaau

SEQ ID NO: 539490 - RNA, 19 nt, Artificial Sequence
  Description of Artificial Sequence: Synthetic oligonucleotide
  Antisense strand to SEQ ID NO: 539489
auuucaagaagguaagccu

SEQ ID NO: 539491 - RNA, 19 nt, Artificial Sequence
  Description of Artificial Sequence: Synthetic oligonucleotide
  Sense strand starting at position 1710 of SEQ ID NO: 318136
gcuuaccuucuugaaauag

SEQ ID NO: 539492 - RNA, 19 nt, Artificial Sequence
  Description of Artificial Sequence: Synthetic oligonucleotide
  Antisense strand to SEQ ID NO: 539491
cuauuucaagaagguaagc

SEQ ID NO: 539493 - RNA, 19 nt, Artificial Sequence
  Description of Artificial Sequence: Synthetic oligonucleotide
  Sense strand starting at position 1973 of SEQ ID NO: 318136
uuccucugcgaacaaauau

SEQ ID NO: 539494 - RNA, 19 nt, Artificial Sequence
  Description of Artificial Sequence: Synthetic oligonucleotide
  Antisense strand to SEQ ID NO: 539493
auauuuguucgcagaggaa

SEQ ID NO: 539495 - RNA, 19 nt, Artificial Sequence
  Description of Artificial Sequence: Synthetic oligonucleotide
  Sense strand starting at position 2038 of SEQ ID NO: 318136
ucugcugggcucuaaauaa

SEQ ID NO: 539496 - RNA, 19 nt, Artificial Sequence
  Description of Artificial Sequence: Synthetic oligonucleotide
  Antisense strand to SEQ ID NO: 539495
uuauuuagagcccagcaga

SEQ ID NO: 539497 - RNA, 19 nt, Artificial Sequence
  Description of Artificial Sequence: Synthetic oligonucleotide
  Sense strand starting at position 2045 of SEQ ID NO: 318136
ggcucuaaauaaguaaaca

SEQ ID NO: 539498 - RNA, 19 nt, Artificial Sequence
  Description of Artificial Sequence: Synthetic oligonucleotide
  Antisense strand to SEQ ID NO: 539497
uguuuacuuauuuagagcc

SEQ ID NO: 539499 - RNA, 19 nt, Artificial Sequence
  Description of Artificial Sequence: Synthetic oligonucleotide
  Sense strand starting at position 2099 of SEQ ID NO: 318136
gagccacaggguugguaau

SEQ ID NO: 539500 - RNA, 19 nt, Artificial Sequence
  Description of Artificial Sequence: Synthetic oligonucleotide
  Antisense strand to SEQ ID NO: 539499
auuaccaacccuguggcuc

SEQ ID NO: 539501 - RNA, 19 nt, Artificial Sequence
  Description of Artificial Sequence: Synthetic oligonucleotide
  Sense strand starting at position 2169 of SEQ ID NO: 318136
cuuaaacuccaaugugagu

SEQ ID NO: 539502 - RNA, 19 nt, Artificial Sequence
  Description of Artificial Sequence: Synthetic oligonucleotide
  Antisense strand to SEQ ID NO: 539501
acucacauuggaguuuaag

SEQ ID NO: 539503 - RNA, 19 nt, Artificial Sequence
  Description of Artificial Sequence: Synthetic oligonucleotide
  Sense strand starting at position 2414 of SEQ ID NO: 318136
gaggguccucaaggaguga

SEQ ID NO: 539504 - RNA, 19 nt, Artificial Sequence
  Description of Artificial Sequence: Synthetic oligonucleotide
  Antisense strand to SEQ ID NO: 539503
ucacuccuugaggacccuc

SEQ ID NO: 539505 - RNA, 19 nt, Artificial Sequence
  Description of Artificial Sequence: Synthetic oligonucleotide
  Sense strand starting at position 2496 of SEQ ID NO: 318136
augacuauuucugugcuau

SEQ ID NO: 539506 - RNA, 19 nt, Artificial Sequence
  Description of Artificial Sequence: Synthetic oligonucleotide
  Antisense strand to SEQ ID NO: 539505
auagcacagaaauagucau

SEQ ID NO: 539507 - RNA, 19 nt, Artificial Sequence
  Description of Artificial Sequence: Synthetic oligonucleotide
  Sense strand starting at position 2517 of SEQ ID NO: 318136
aaccuuaggcaaggaguua

SEQ ID NO: 539508 - RNA, 19 nt, Artificial Sequence
  Description of Artificial Sequence: Synthetic oligonucleotide
  Antisense strand to SEQ ID NO: 539507
uaacuccuugccuaagguu

SEQ ID NO: 539509 - RNA, 19 nt, Artificial Sequence
  Description of Artificial Sequence: Synthetic oligonucleotide
  Sense strand starting at position 2540 of SEQ ID NO: 318136
cugggaaucucaguuucca

SEQ ID NO: 539510 - RNA, 19 nt, Artificial Sequence
  Description of Artificial Sequence: Synthetic oligonucleotide
  Antisense strand to SEQ ID NO: 539509
uggaaacugagauucccag

SEQ ID NO: 539511 - RNA, 19 nt, Artificial Sequence
  Description of Artificial Sequence: Synthetic oligonucleotide
  Sense strand starting at position 2674 of SEQ ID NO: 318136
gguagugucauauauucca

SEQ ID NO: 539512 - RNA, 19 nt, Artificial Sequence
  Description of Artificial Sequence: Synthetic oligonucleotide
  Antisense strand to SEQ ID NO: 539511
uggaauauaugacacuacc

SEQ ID NO: 539513 - RNA, 19 nt, Artificial Sequence
  Description of Artificial Sequence: Synthetic oligonucleotide
  Sense strand starting at position 2755 of SEQ ID NO: 318136
gagcacauucccuggagau

SEQ ID NO: 539514 - RNA, 19 nt, Artificial Sequence
  Description of Artificial Sequence: Synthetic oligonucleotide
  Antisense strand to SEQ ID NO: 539513
aucuccagggaaugugcuc

SEQ ID NO: 539515 - RNA, 19 nt, Artificial Sequence
  Description of Artificial Sequence: Synthetic oligonucleotide
  Sense strand starting at position 2756 of SEQ ID NO: 318136
agcacauucccuggagaua

SEQ ID NO: 539516 - RNA, 19 nt, Artificial Sequence
  Description of Artificial Sequence: Synthetic oligonucleotide
  Antisense strand to SEQ ID NO: 539515
uaucuccagggaaugugcu

SEQ ID NO: 539517 - RNA, 19 nt, Artificial Sequence
  Description of Artificial Sequence: Synthetic oligonucleotide
  Sense strand starting at position 2869 of SEQ ID NO: 318136
gcaacuauauuugugcaau

SEQ ID NO: 539518 - RNA, 19 nt, Artificial Sequence
  Description of Artificial Sequence: Synthetic oligonucleotide
  Antisense strand to SEQ ID NO: 539517
auugcacaaauauaguugc

SEQ ID NO: 539519 - RNA, 19 nt, Artificial Sequence
  Description of Artificial Sequence: Synthetic oligonucleotide
  Sense strand starting at position 3222 of SEQ ID NO: 318136
gagggcaucagugaaggua

SEQ ID NO: 539520 - RNA, 19 nt, Artificial Sequence
  Description of Artificial Sequence: Synthetic oligonucleotide
  Antisense strand to SEQ ID NO: 539519
uaccuucacugaugcccuc

SEQ ID NO: 539521 - RNA, 19 nt, Artificial Sequence
  Description of Artificial Sequence: Synthetic oligonucleotide
  Sense strand starting at position 3634 of SEQ ID NO: 318136
cucuuuguagcugaucauu

SEQ ID NO: 539522 - RNA, 19 nt, Artificial Sequence
  Description of Artificial Sequence: Synthetic oligonucleotide
  Antisense strand to SEQ ID NO: 539521
aaugaucagcuacaaagag

SEQ ID NO: 539523 - RNA, 19 nt, Artificial Sequence
  Description of Artificial Sequence: Synthetic oligonucleotide
  Sense strand starting at position 3643 of SEQ ID NO: 318136
gcugaucauucuguauaaa

SEQ ID NO: 539524 - RNA, 19 nt, Artificial Sequence
  Description of Artificial Sequence: Synthetic oligonucleotide
  Antisense strand to SEQ ID NO: 539523
uuuauacagaaugaucagc

SEQ ID NO: 539525 - RNA, 19 nt, Artificial Sequence
  Description of Artificial Sequence: Synthetic oligonucleotide
  Sense strand starting at position 3723 of SEQ ID NO: 318136
cuagcauagcagugaacaa

SEQ ID NO: 539526 - RNA, 19 nt, Artificial Sequence
  Description of Artificial Sequence: Synthetic oligonucleotide
  Antisense strand to SEQ ID NO: 539525
uuguucacugcuaugcuag

SEQ ID NO: 539527 - RNA, 19 nt, Artificial Sequence
  Description of Artificial Sequence: Synthetic oligonucleotide
  Sense strand starting at position 3864 of SEQ ID NO: 318136
auuccugacguggaucaau

SEQ ID NO: 539528 - RNA, 19 nt, Artificial Sequence
  Description of Artificial Sequence: Synthetic oligonucleotide
  Antisense strand to SEQ ID NO: 539527
auugauccacgucaggaau

SEQ ID NO: 539529 - RNA, 19 nt, Artificial Sequence
  Description of Artificial Sequence: Synthetic oligonucleotide
  Sense strand starting at position 18 of SEQ ID NO: 318137
uuuccacaucuguauagua

SEQ ID NO: 539530 - RNA, 19 nt, Artificial Sequence
  Description of Artificial Sequence: Synthetic oligonucleotide
  Antisense strand to SEQ ID NO: 539529
uacuauacagauguggaaa

SEQ ID NO: 539531 - RNA, 19 nt, Artificial Sequence
  Description of Artificial Sequence: Synthetic oligonucleotide
  Sense strand starting at position 20 of SEQ ID NO: 318137
uccacaucuguauaguaua

SEQ ID NO: 539532 - RNA, 19 nt, Artificial Sequence
  Description of Artificial Sequence: Synthetic oligonucleotide
  Antisense strand to SEQ ID NO: 539531
uauacuauacagaugugga

SEQ ID NO: 539533 - RNA, 19 nt, Artificial Sequence
  Description of Artificial Sequence: Synthetic oligonucleotide
  Sense strand starting at position 69 of SEQ ID NO: 318137
gaaaguuuagagugucaaa

SEQ ID NO: 539534 - RNA, 19 nt, Artificial Sequence
  Description of Artificial Sequence: Synthetic oligonucleotide
  Antisense strand to SEQ ID NO: 539533
uuugacacucuaaacuuuc

SEQ ID NO: 539535 - RNA, 19 nt, Artificial Sequence
  Description of Artificial Sequence: Synthetic oligonucleotide
  Sense strand starting at position 140 of SEQ ID NO: 318137
agacaaggguaucacauuu

SEQ ID NO: 539536 - RNA, 19 nt, Artificial Sequence
  Description of Artificial Sequence: Synthetic oligonucleotide
  Antisense strand to SEQ ID NO: 539535
aaaugugauacccuugucu

SEQ ID NO: 539537 - RNA, 19 nt, Artificial Sequence
  Description of Artificial Sequence: Synthetic oligonucleotide
  Sense strand starting at position 194 of SEQ ID NO: 318137
uuaagaugcuuuguacaau

SEQ ID NO: 539538 - RNA, 19 nt, Artificial Sequence
  Description of Artificial Sequence: Synthetic oligonucleotide
  Antisense strand to SEQ ID NO: 539537
auuguacaaagcaucuuaa

SEQ ID NO: 539539 - RNA, 19 nt, Artificial Sequence
  Description of Artificial Sequence: Synthetic oligonucleotide
  Sense strand starting at position 265 of SEQ ID NO: 318137
guauuaaaguuacugaaca

SEQ ID NO: 539540 - RNA, 19 nt, Artificial Sequence
  Description of Artificial Sequence: Synthetic oligonucleotide
  Antisense strand to SEQ ID NO: 539539
uguucaguaacuuuaauac

SEQ ID NO: 539541 - RNA, 19 nt, Artificial Sequence
  Description of Artificial Sequence: Synthetic oligonucleotide
  Sense strand starting at position 757 of SEQ ID NO: 318137
uuugacaccucccugaaga

SEQ ID NO: 539542 - RNA, 19 nt, Artificial Sequence
  Description of Artificial Sequence: Synthetic oligonucleotide
  Antisense strand to SEQ ID NO: 539541
ucuucagggaggugucaaa

SEQ ID NO: 539543 - RNA, 19 nt, Artificial Sequence
  Description of Artificial Sequence: Synthetic oligonucleotide
  Sense strand starting at position 1454 of SEQ ID NO: 318137
ccagucucagucuagaacu

SEQ ID NO: 539544 - RNA, 19 nt, Artificial Sequence
  Description of Artificial Sequence: Synthetic oligonucleotide
  Antisense strand to SEQ ID NO: 539543
aguucuagacugagacugg

SEQ ID NO: 539545 - RNA, 19 nt, Artificial Sequence
  Description of Artificial Sequence: Synthetic oligonucleotide
  Sense strand starting at position 1706 of SEQ ID NO: 318137
ggagccaucuaucuguaag

SEQ ID NO: 539546 - RNA, 19 nt, Artificial Sequence
  Description of Artificial Sequence: Synthetic oligonucleotide
  Antisense strand to SEQ ID NO: 539545
cuuacagauagauggcucc

SEQ ID NO: 539547 - RNA, 19 nt, Artificial Sequence
  Description of Artificial Sequence: Synthetic oligonucleotide
  Sense strand starting at position 2051 of SEQ ID NO: 318137
cauuguuacugggugagau

SEQ ID NO: 539548 - RNA, 19 nt, Artificial Sequence
  Description of Artificial Sequence: Synthetic oligonucleotide
  Antisense strand to SEQ ID NO: 539547
aucucacccaguaacaaug

SEQ ID NO: 539549 - RNA, 19 nt, Artificial Sequence
  Description of Artificial Sequence: Synthetic oligonucleotide
  Sense strand starting at position 2052 of SEQ ID NO: 318137
auuguuacugggugagaug

SEQ ID NO: 539550 - RNA, 19 nt, Artificial Sequence
  Description of Artificial Sequence: Synthetic oligonucleotide
  Antisense strand to SEQ ID NO: 539549
caucucacccaguaacaau

SEQ ID NO: 539551 - RNA, 19 nt, Artificial Sequence
  Description of Artificial Sequence: Synthetic oligonucleotide
  Sense strand starting at position 2108 of SEQ ID NO: 318137
uaaguuaaugucuaccgga

SEQ ID NO: 539552 - RNA, 19 nt, Artificial Sequence
  Description of Artificial Sequence: Synthetic oligonucleotide
  Antisense strand to SEQ ID NO: 539551
uccgguagacauuaacuua

SEQ ID NO: 539553 - RNA, 19 nt, Artificial Sequence
  Description of Artificial Sequence: Synthetic oligonucleotide
  Sense strand starting at position 2154 of SEQ ID NO: 318137
gcacguuguauuuacugau

SEQ ID NO: 539554 - RNA, 19 nt, Artificial Sequence
  Description of Artificial Sequence: Synthetic oligonucleotide
  Antisense strand to SEQ ID NO: 539553
aucaguaaauacaacgugc

SEQ ID NO: 539555 - RNA, 19 nt, Artificial Sequence
  Description of Artificial Sequence: Synthetic oligonucleotide
  Sense strand starting at position 2176 of SEQ ID NO: 318137
ucaucuggacuuugaguga

SEQ ID NO: 539556 - RNA, 19 nt, Artificial Sequence
  Description of Artificial Sequence: Synthetic oligonucleotide
  Antisense strand to SEQ ID NO: 539555
ucacucaaaguccagauga

SEQ ID NO: 539557 - RNA, 19 nt, Artificial Sequence
  Description of Artificial Sequence: Synthetic oligonucleotide
  Sense strand starting at position 2268 of SEQ ID NO: 318137
acgugaaaccauugaggga

SEQ ID NO: 539558 - RNA, 19 nt, Artificial Sequence
  Description of Artificial Sequence: Synthetic oligonucleotide
  Antisense strand to SEQ ID NO: 539557
ucccucaaugguuucacgu

SEQ ID NO: 539559 - RNA, 19 nt, Artificial Sequence
  Description of Artificial Sequence: Synthetic oligonucleotide
  Sense strand starting at position 2387 of SEQ ID NO: 318137
cagccuugucuaggaaaga

SEQ ID NO: 539560 - RNA, 19 nt, Artificial Sequence
  Description of Artificial Sequence: Synthetic oligonucleotide
  Antisense strand to SEQ ID NO: 539559
ucuuuccuagacaaggcug

SEQ ID NO: 539561 - RNA, 19 nt, Artificial Sequence
  Description of Artificial Sequence: Synthetic oligonucleotide
  Sense strand starting at position 2449 of SEQ ID NO: 318137
cuccuuucugugggaggau

SEQ ID NO: 539562 - RNA, 19 nt, Artificial Sequence
  Description of Artificial Sequence: Synthetic oligonucleotide
  Antisense strand to SEQ ID NO: 539561
auccucccacagaaaggag

SEQ ID NO: 539563 - RNA, 19 nt, Artificial Sequence
  Description of Artificial Sequence: Synthetic oligonucleotide
  Sense strand starting at position 2511 of SEQ ID NO: 318137
gauggacugucacccuaau

SEQ ID NO: 539564 - RNA, 19 nt, Artificial Sequence
  Description of Artificial Sequence: Synthetic oligonucleotide
  Antisense strand to SEQ ID NO: 539563
auuagggugacaguccauc

SEQ ID NO: 539565 - RNA, 19 nt, Artificial Sequence
  Description of Artificial Sequence: Synthetic oligonucleotide
  Sense strand starting at position 2561 of SEQ ID NO: 318137
gacccagcuguggaaaguu

SEQ ID NO: 539566 - RNA, 19 nt, Artificial Sequence
  Description of Artificial Sequence: Synthetic oligonucleotide
  Antisense strand to SEQ ID NO: 539565
aacuuuccacagcuggguc

SEQ ID NO: 539567 - RNA, 19 nt, Artificial Sequence
  Description of Artificial Sequence: Synthetic oligonucleotide
  Sense strand starting at position 2622 of SEQ ID NO: 318137
gagacuuauuuggaccaca

SEQ ID NO: 539568 - RNA, 19 nt, Artificial Sequence
  Description of Artificial Sequence: Synthetic oligonucleotide
  Antisense strand to SEQ ID NO: 539567
ugugguccaaauaagucuc

SEQ ID NO: 539569 - RNA, 19 nt, Artificial Sequence
  Description of Artificial Sequence: Synthetic oligonucleotide
  Sense strand starting at position 2765 of SEQ ID NO: 318137
cuuucuucccaguaguuga

SEQ ID NO: 539570 - RNA, 19 nt, Artificial Sequence
  Description of Artificial Sequence: Synthetic oligonucleotide
  Antisense strand to SEQ ID NO: 539569
ucaacuacugggaagaaag

SEQ ID NO: 539571 - RNA, 19 nt, Artificial Sequence
  Description of Artificial Sequence: Synthetic oligonucleotide
  Sense strand starting at position 2855 of SEQ ID NO: 318137
ccaucaguuuaaguaggaa

SEQ ID NO: 539572 - RNA, 19 nt, Artificial Sequence
  Description of Artificial Sequence: Synthetic oligonucleotide
  Antisense strand to SEQ ID NO: 539571
uuccuacuuaaacugaugg

SEQ ID NO: 539573 - RNA, 19 nt, Artificial Sequence
  Description of Artificial Sequence: Synthetic oligonucleotide
  Sense strand starting at position 2907 of SEQ ID NO: 318137
uaucuaaacgauggguagu

SEQ ID NO: 539574 - RNA, 19 nt, Artificial Sequence
  Description of Artificial Sequence: Synthetic oligonucleotide
  Antisense strand to SEQ ID NO: 539573
acuacccaucguuuagaua

SEQ ID NO: 539575 - RNA, 19 nt, Artificial Sequence
  Description of Artificial Sequence: Synthetic oligonucleotide
  Sense strand starting at position 2927 of SEQ ID NO: 318137
auggguacucgugaaauga

SEQ ID NO: 539576 - RNA, 19 nt, Artificial Sequence
  Description of Artificial Sequence: Synthetic oligonucleotide
  Antisense strand to SEQ ID NO: 539575
ucauuucacgaguacccau

SEQ ID NO: 539577 - RNA, 19 nt, Artificial Sequence
  Description of Artificial Sequence: Synthetic oligonucleotide
  Sense strand starting at position 2931 of SEQ ID NO: 318137
guacucgugaaaugacaug

SEQ ID NO: 539578 - RNA, 19 nt, Artificial Sequence
  Description of Artificial Sequence: Synthetic oligonucleotide
  Antisense strand to SEQ ID NO: 539577
caugucauuucacgaguac

SEQ ID NO: 539579 - RNA, 19 nt, Artificial Sequence
  Description of Artificial Sequence: Synthetic oligonucleotide
  Sense strand starting at position 2936 of SEQ ID NO: 318137
cgugaaaugacaugggcau

SEQ ID NO: 539580 - RNA, 19 nt, Artificial Sequence
  Description of Artificial Sequence: Synthetic oligonucleotide
  Antisense strand to SEQ ID NO: 539579
augcccaugucauuucacg

SEQ ID NO: 539581 - RNA, 19 nt, Artificial Sequence
  Description of Artificial Sequence: Synthetic oligonucleotide
  Sense strand starting at position 2937 of SEQ ID NO: 318137
gugaaaugacaugggcauu

SEQ ID NO: 539582 - RNA, 19 nt, Artificial Sequence
  Description of Artificial Sequence: Synthetic oligonucleotide
  Antisense strand to SEQ ID NO: 539581
aaugcccaugucauuucac

SEQ ID NO: 539583 - RNA, 19 nt, Artificial Sequence
  Description of Artificial Sequence: Synthetic oligonucleotide
  Sense strand starting at position 2975 of SEQ ID NO: 318137
ugugaauucugaguaagga

SEQ ID NO: 539584 - RNA, 19 nt, Artificial Sequence
  Description of Artificial Sequence: Synthetic oligonucleotide
  Antisense strand to SEQ ID NO: 539583
uccuuacucagaauucaca

SEQ ID NO: 539585 - RNA, 19 nt, Artificial Sequence
  Description of Artificial Sequence: Synthetic oligonucleotide
  Sense strand starting at position 3250 of SEQ ID NO: 318137
gcuucuugccaagggagaa

SEQ ID NO: 539586 - RNA, 19 nt, Artificial Sequence
  Description of Artificial Sequence: Synthetic oligonucleotide
  Antisense strand to SEQ ID NO: 539585
uucucccuuggcaagaagc

SEQ ID NO: 539587 - RNA, 19 nt, Artificial Sequence
  Description of Artificial Sequence: Synthetic oligonucleotide
  Sense strand starting at position 3283 of SEQ ID NO: 318137
ggaccucagagcuggaauu

SEQ ID NO: 539588 - RNA, 19 nt, Artificial Sequence
  Description of Artificial Sequence: Synthetic oligonucleotide
  Antisense strand to SEQ ID NO: 539587
aauuccagcucugaggucc

SEQ ID NO: 539589 - RNA, 19 nt, Artificial Sequence
  Description of Artificial Sequence: Synthetic oligonucleotide
  Sense strand starting at position 3319 of SEQ ID NO: 318137
agaucugacuguccugauu

SEQ ID NO: 539590 - RNA, 19 nt, Artificial Sequence
  Description of Artificial Sequence: Synthetic oligonucleotide
  Antisense strand to SEQ ID NO: 539589
aaucaggacagucagaucu

SEQ ID NO: 539591 - RNA, 19 nt, Artificial Sequence
  Description of Artificial Sequence: Synthetic oligonucleotide
  Sense strand starting at position 3322 of SEQ ID NO: 318137
ucugacuguccugauucua

SEQ ID NO: 539592 - RNA, 19 nt, Artificial Sequence
  Description of Artificial Sequence: Synthetic oligonucleotide
  Antisense strand to SEQ ID NO: 539591
uagaaucaggacagucaga

SEQ ID NO: 539593 - RNA, 19 nt, Artificial Sequence
  Description of Artificial Sequence: Synthetic oligonucleotide
  Sense strand starting at position 3333 of SEQ ID NO: 318137
ugauucuaguccucucaga

SEQ ID NO: 539594 - RNA, 19 nt, Artificial Sequence
  Description of Artificial Sequence: Synthetic oligonucleotide
  Antisense strand to SEQ ID NO: 539593
ucugagaggacuagaauca

SEQ ID NO: 539595 - RNA, 19 nt, Artificial Sequence
  Description of Artificial Sequence: Synthetic oligonucleotide
  Sense strand starting at position 3395 of SEQ ID NO: 318137
uaggaacauugagaagaga

SEQ ID NO: 539596 - RNA, 19 nt, Artificial Sequence
  Description of Artificial Sequence: Synthetic oligonucleotide
  Antisense strand to SEQ ID NO: 539595
ucucuucucaauguuccua

SEQ ID NO: 539597 - RNA, 19 nt, Artificial Sequence
  Description of Artificial Sequence: Synthetic oligonucleotide
  Sense strand starting at position 3550 of SEQ ID NO: 318137
uagugagcacuggguaaga

SEQ ID NO: 539598 - RNA, 19 nt, Artificial Sequence
  Description of Artificial Sequence: Synthetic oligonucleotide
  Antisense strand to SEQ ID NO: 539597
ucuuacccagugcucacua

SEQ ID NO: 539599 - RNA, 19 nt, Artificial Sequence
  Description of Artificial Sequence: Synthetic oligonucleotide
  Sense strand starting at position 3653 of SEQ ID NO: 318137
uuuaccagucuagagugau

SEQ ID NO: 539600 - RNA, 19 nt, Artificial Sequence
  Description of Artificial Sequence: Synthetic oligonucleotide
  Antisense strand to SEQ ID NO: 539599
aucacucuagacugguaaa

SEQ ID NO: 539601 - RNA, 19 nt, Artificial Sequence
  Description of Artificial Sequence: Synthetic oligonucleotide
  Sense strand starting at position 3668 of SEQ ID NO: 318137
ugaugugccaaaugggauu

SEQ ID NO: 539602 - RNA, 19 nt, Artificial Sequence
  Description of Artificial Sequence: Synthetic oligonucleotide
  Antisense strand to SEQ ID NO: 539601
aaucccauuuggcacauca

SEQ ID NO: 539603 - RNA, 19 nt, Artificial Sequence
  Description of Artificial Sequence: Synthetic oligonucleotide
  Sense strand starting at position 3745 of SEQ ID NO: 318137
guacuucuagcaggaucaa

SEQ ID NO: 539604 - RNA, 19 nt, Artificial Sequence
  Description of Artificial Sequence: Synthetic oligonucleotide
  Antisense strand to SEQ ID NO: 539603
uugauccugcuagaaguac

SEQ ID NO: 539605 - RNA, 19 nt, Artificial Sequence
  Description of Artificial Sequence: Synthetic oligonucleotide
  Sense strand starting at position 3860 of SEQ ID NO: 318137
cauccucaugagugugaca

SEQ ID NO: 539606 - RNA, 19 nt, Artificial Sequence
  Description of Artificial Sequence: Synthetic oligonucleotide
  Antisense strand to SEQ ID NO: 539605
ugucacacucaugaggaug

SEQ ID NO: 539607 - RNA, 19 nt, Artificial Sequence
  Description of Artificial Sequence: Synthetic oligonucleotide
  Sense strand starting at position 3862 of SEQ ID NO: 318137
uccucaugagugugacaac

SEQ ID NO: 539608 - RNA, 19 nt, Artificial Sequence
  Description of Artificial Sequence: Synthetic oligonucleotide
  Antisense strand to SEQ ID NO: 539607
guugucacacucaugagga

SEQ ID NO: 539609 - RNA, 19 nt, Artificial Sequence
  Description of Artificial Sequence: Synthetic oligonucleotide
  Sense strand starting at position 56 of SEQ ID NO: 318138
auguauuuaugggaagauc

SEQ ID NO: 539610 - RNA, 19 nt, Artificial Sequence
  Description of Artificial Sequence: Synthetic oligonucleotide
  Antisense strand to SEQ ID NO: 539609
gaucuucccauaaauacau

SEQ ID NO: 539611 - RNA, 19 nt, Artificial Sequence
  Description of Artificial Sequence: Synthetic oligonucleotide
  Sense strand starting at position 67 of SEQ ID NO: 318138
ggaagaucguccuuccaga

SEQ ID NO: 539612 - RNA, 19 nt, Artificial Sequence
  Description of Artificial Sequence: Synthetic oligonucleotide
  Antisense strand to SEQ ID NO: 539611
ucuggaaggacgaucuucc

SEQ ID NO: 539613 - RNA, 19 nt, Artificial Sequence
  Description of Artificial Sequence: Synthetic oligonucleotide
  Sense strand starting at position 131 of SEQ ID NO: 318138
acagaauucugcuuuguga

SEQ ID NO: 539614 - RNA, 19 nt, Artificial Sequence
  Description of Artificial Sequence: Synthetic oligonucleotide
  Antisense strand to SEQ ID NO: 539613
ucacaaagcagaauucugu

SEQ ID NO: 539615 - RNA, 19 nt, Artificial Sequence
  Description of Artificial Sequence: Synthetic oligonucleotide
  Sense strand starting at position 151 of SEQ ID NO: 318138
guuagaguaucagugaaua

SEQ ID NO: 539616 - RNA, 19 nt, Artificial Sequence
  Description of Artificial Sequence: Synthetic oligonucleotide
  Antisense strand to SEQ ID NO: 539615
uauucacugauacucuaac

SEQ ID NO: 539617 - RNA, 19 nt, Artificial Sequence
  Description of Artificial Sequence: Synthetic oligonucleotide
  Sense strand starting at position 466 of SEQ ID NO: 318138
gaauguguuucuuuauaag

SEQ ID NO: 539618 - RNA, 19 nt, Artificial Sequence
  Description of Artificial Sequence: Synthetic oligonucleotide
  Antisense strand to SEQ ID NO: 539617
cuuauaaagaaacacauuc

SEQ ID NO: 539619 - RNA, 19 nt, Artificial Sequence
  Description of Artificial Sequence: Synthetic oligonucleotide
  Sense strand starting at position 483 of SEQ ID NO: 318138
agcauuggccuccaucauu

SEQ ID NO: 539620 - RNA, 19 nt, Artificial Sequence
  Description of Artificial Sequence: Synthetic oligonucleotide
  Antisense strand to SEQ ID NO: 539619
aaugauggaggccaaugcu

SEQ ID NO: 539621 - RNA, 19 nt, Artificial Sequence
  Description of Artificial Sequence: Synthetic oligonucleotide
  Sense strand starting at position 512 of SEQ ID NO: 318138
ucagauccauuaguaaaug

SEQ ID NO: 539622 - RNA, 19 nt, Artificial Sequence
  Description of Artificial Sequence: Synthetic oligonucleotide
  Antisense strand to SEQ ID NO: 539621
cauuuacuaauggaucuga

SEQ ID NO: 539623 - RNA, 19 nt, Artificial Sequence
  Description of Artificial Sequence: Synthetic oligonucleotide
  Sense strand starting at position 652 of SEQ ID NO: 318138
ugaaaugguuaguuccacu

SEQ ID NO: 539624 - RNA, 19 nt, Artificial Sequence
  Description of Artificial Sequence: Synthetic oligonucleotide
  Antisense strand to SEQ ID NO: 539623
aguggaacuaaccauuuca

SEQ ID NO: 539625 - RNA, 19 nt, Artificial Sequence
  Description of Artificial Sequence: Synthetic oligonucleotide
  Sense strand starting at position 679 of SEQ ID NO: 318138
ccaagcaaauguuugaauu

SEQ ID NO: 539626 - RNA, 19 nt, Artificial Sequence
  Description of Artificial Sequence: Synthetic oligonucleotide
  Antisense strand to SEQ ID NO: 539625
aauucaaacauuugcuugg

SEQ ID NO: 539627 - RNA, 19 nt, Artificial Sequence
  Description of Artificial Sequence: Synthetic oligonucleotide
  Sense strand starting at position 703 of SEQ ID NO: 318138
agaaacgaacucuguacua

SEQ ID NO: 539628 - RNA, 19 nt, Artificial Sequence
  Description of Artificial Sequence: Synthetic oligonucleotide
  Antisense strand to SEQ ID NO: 539627
uaguacagaguucguuucu

SEQ ID NO: 539629 - RNA, 19 nt, Artificial Sequence
  Description of Artificial Sequence: Synthetic oligonucleotide
  Sense strand starting at position 753 of SEQ ID NO: 318138
cauaguugccaacauggaa

SEQ ID NO: 539630 - RNA, 19 nt, Artificial Sequence
  Description of Artificial Sequence: Synthetic oligonucleotide
  Antisense strand to SEQ ID NO: 539629
uuccauguuggcaacuaug

SEQ ID NO: 539631 - RNA, 19 nt, Artificial Sequence
  Description of Artificial Sequence: Synthetic oligonucleotide
  Sense strand starting at position 811 of SEQ ID NO: 318138
uuuagccuagacugagauu

SEQ ID NO: 539632 - RNA, 19 nt, Artificial Sequence
  Description of Artificial Sequence: Synthetic oligonucleotide
  Antisense strand to SEQ ID NO: 539631
aaucucagucuaggcuaaa

SEQ ID NO: 539633 - RNA, 19 nt, Artificial Sequence
  Description of Artificial Sequence: Synthetic oligonucleotide
  Sense strand starting at position 906 of SEQ ID NO: 318138
gcagacuuggugcaaacuu

SEQ ID NO: 539634 - RNA, 19 nt, Artificial Sequence
  Description of Artificial Sequence: Synthetic oligonucleotide
  Antisense strand to SEQ ID NO: 539633
aaguuugcaccaagucugc

SEQ ID NO: 539635 - RNA, 19 nt, Artificial Sequence
  Description of Artificial Sequence: Synthetic oligonucleotide
  Sense strand starting at position 932 of SEQ ID NO: 318138
ggcacaauuuguuucuuua

SEQ ID NO: 539636 - RNA, 19 nt, Artificial Sequence
  Description of Artificial Sequence: Synthetic oligonucleotide
  Antisense strand to SEQ ID NO: 539635
uaaagaaacaaauugugcc

SEQ ID NO: 539637 - RNA, 19 nt, Artificial Sequence
  Description of Artificial Sequence: Synthetic oligonucleotide
  Sense strand starting at position 942 of SEQ ID NO: 318138
guuucuuuacuauaguaag

SEQ ID NO: 539638 - RNA, 19 nt, Artificial Sequence
  Description of Artificial Sequence: Synthetic oligonucleotide
  Antisense strand to SEQ ID NO: 539637
cuuacuauaguaaagaaac

SEQ ID NO: 539639 - RNA, 19 nt, Artificial Sequence
  Description of Artificial Sequence: Synthetic oligonucleotide
  Sense strand starting at position 980 of SEQ ID NO: 318138
ggaauuaaauguccuggau

SEQ ID NO: 539640 - RNA, 19 nt, Artificial Sequence
  Description of Artificial Sequence: Synthetic oligonucleotide
  Antisense strand to SEQ ID NO: 539639
auccaggacauuuaauucc

SEQ ID NO: 539641 - RNA, 19 nt, Artificial Sequence
  Description of Artificial Sequence: Synthetic oligonucleotide
  Sense strand starting at position 1128 of SEQ ID NO: 318138
auaccuauccugugaagag

SEQ ID NO: 539642 - RNA, 19 nt, Artificial Sequence
  Description of Artificial Sequence: Synthetic oligonucleotide
  Antisense strand to SEQ ID NO: 539641
cucuucacaggauagguau

SEQ ID NO: 539643 - RNA, 19 nt, Artificial Sequence
  Description of Artificial Sequence: Synthetic oligonucleotide
  Sense strand starting at position 1283 of SEQ ID NO: 318138
auuuauccuugggaauuga

SEQ ID NO: 539644 - RNA, 19 nt, Artificial Sequence
  Description of Artificial Sequence: Synthetic oligonucleotide
  Antisense strand to SEQ ID NO: 539643
ucaauucccaaggauaaau

SEQ ID NO: 539645 - RNA, 19 nt, Artificial Sequence
  Description of Artificial Sequence: Synthetic oligonucleotide
  Sense strand starting at position 1306 of SEQ ID NO: 318138
aauaucagacaguguagua

SEQ ID NO: 539646 - RNA, 19 nt, Artificial Sequence
  Description of Artificial Sequence: Synthetic oligonucleotide
  Antisense strand to SEQ ID NO: 539645
uacuacacugucugauauu

SEQ ID NO: 539647 - RNA, 19 nt, Artificial Sequence
  Description of Artificial Sequence: Synthetic oligonucleotide
  Sense strand starting at position 1349 of SEQ ID NO: 318138
gugaguauuaagggagcca

SEQ ID NO: 539648 - RNA, 19 nt, Artificial Sequence
  Description of Artificial Sequence: Synthetic oligonucleotide
  Antisense strand to SEQ ID NO: 539647
uggcucccuuaauacucac

SEQ ID NO: 539649 - RNA, 19 nt, Artificial Sequence
  Description of Artificial Sequence: Synthetic oligonucleotide
  Sense strand starting at position 1374 of SEQ ID NO: 318138
ugucuuaauccauaccagu

SEQ ID NO: 539650 - RNA, 19 nt, Artificial Sequence
  Description of Artificial Sequence: Synthetic oligonucleotide
  Antisense strand to SEQ ID NO: 539649
acugguauggauuaagaca

SEQ ID NO: 539651 - RNA, 19 nt, Artificial Sequence
  Description of Artificial Sequence: Synthetic oligonucleotide
  Sense strand starting at position 1507 of SEQ ID NO: 318138
acugaaaggcuuuguaaug

SEQ ID NO: 539652 - RNA, 19 nt, Artificial Sequence
  Description of Artificial Sequence: Synthetic oligonucleotide
  Antisense strand to SEQ ID NO: 539651
cauuacaaagccuuucagu

SEQ ID NO: 539653 - RNA, 19 nt, Artificial Sequence
  Description of Artificial Sequence: Synthetic oligonucleotide
  Sense strand starting at position 1563 of SEQ ID NO: 318138
accggaacauuccauuuaa

SEQ ID NO: 539654 - RNA, 19 nt, Artificial Sequence
  Description of Artificial Sequence: Synthetic oligonucleotide
  Antisense strand to SEQ ID NO: 539653
uuaaauggaauguuccggu

SEQ ID NO: 539655 - RNA, 19 nt, Artificial Sequence
  Description of Artificial Sequence: Synthetic oligonucleotide
  Sense strand starting at position 1745 of SEQ ID NO: 318138
ucgacuuaccgguagaaau

SEQ ID NO: 539656 - RNA, 19 nt, Artificial Sequence
  Description of Artificial Sequence: Synthetic oligonucleotide
  Antisense strand to SEQ ID NO: 539655
auuucuaccgguaagucga

SEQ ID NO: 539657 - RNA, 19 nt, Artificial Sequence
  Description of Artificial Sequence: Synthetic oligonucleotide
  Sense strand starting at position 1820 of SEQ ID NO: 318138
uucuuccucugauuagagu

SEQ ID NO: 539658 - RNA, 19 nt, Artificial Sequence
  Description of Artificial Sequence: Synthetic oligonucleotide
  Antisense strand to SEQ ID NO: 539657
acucuaaucagaggaagaa

SEQ ID NO: 539659 - RNA, 19 nt, Artificial Sequence
  Description of Artificial Sequence: Synthetic oligonucleotide
  Sense strand starting at position 1821 of SEQ ID NO: 318138
ucuuccucugauuagaguu

SEQ ID NO: 539660 - RNA, 19 nt, Artificial Sequence
  Description of Artificial Sequence: Synthetic oligonucleotide
  Antisense strand to SEQ ID NO: 539659
aacucuaaucagaggaaga

SEQ ID NO: 539661 - RNA, 19 nt, Artificial Sequence
  Description of Artificial Sequence: Synthetic oligonucleotide
  Sense strand starting at position 1914 of SEQ ID NO: 318138
ucucucauuucuuuagugu

SEQ ID NO: 539662 - RNA, 19 nt, Artificial Sequence
  Description of Artificial Sequence: Synthetic oligonucleotide
  Antisense strand to SEQ ID NO: 539661
acacuaaagaaaugagaga

SEQ ID NO: 539663 - RNA, 19 nt, Artificial Sequence
  Description of Artificial Sequence: Synthetic oligonucleotide
  Sense strand starting at position 1972 of SEQ ID NO: 318138
cuaauauuccauggauagc

SEQ ID NO: 539664 - RNA, 19 nt, Artificial Sequence
  Description of Artificial Sequence: Synthetic oligonucleotide
  Antisense strand to SEQ ID NO: 539663
gcuauccauggaauauuag

SEQ ID NO: 539665 - RNA, 19 nt, Artificial Sequence
  Description of Artificial Sequence: Synthetic oligonucleotide
  Sense strand starting at position 2001 of SEQ ID NO: 318138
gcagguagggccuauguaa

SEQ ID NO: 539666 - RNA, 19 nt, Artificial Sequence
  Description of Artificial Sequence: Synthetic oligonucleotide
  Antisense strand to SEQ ID NO: 539665
uuacauaggcccuaccugc

SEQ ID NO: 539667 - RNA, 19 nt, Artificial Sequence
  Description of Artificial Sequence: Synthetic oligonucleotide
  Sense strand starting at position 2121 of SEQ ID NO: 318138
uggcuuguaggagaauguu

SEQ ID NO: 539668 - RNA, 19 nt, Artificial Sequence
  Description of Artificial Sequence: Synthetic oligonucleotide
  Antisense strand to SEQ ID NO: 539667
aacauucuccuacaagcca

SEQ ID NO: 539669 - RNA, 19 nt, Artificial Sequence
  Description of Artificial Sequence: Synthetic oligonucleotide
  Sense strand starting at position 2141 of SEQ ID NO: 318138
gugcgaaugauggaauauu

SEQ ID NO: 539670 - RNA, 19 nt, Artificial Sequence
  Description of Artificial Sequence: Synthetic oligonucleotide
  Antisense strand to SEQ ID NO: 539669
aauauuccaucauucgcac

SEQ ID NO: 539671 - RNA, 19 nt, Artificial Sequence
  Description of Artificial Sequence: Synthetic oligonucleotide
  Sense strand starting at position 2395 of SEQ ID NO: 318138
guuuaugauaaugguaagu

SEQ ID NO: 539672 - RNA, 19 nt, Artificial Sequence
  Description of Artificial Sequence: Synthetic oligonucleotide
  Antisense strand to SEQ ID NO: 539671
acuuaccauuaucauaaac

SEQ ID NO: 539673 - RNA, 19 nt, Artificial Sequence
  Description of Artificial Sequence: Synthetic oligonucleotide
  Sense strand starting at position 2400 of SEQ ID NO: 318138
ugauaaugguaaguuaaca

SEQ ID NO: 539674 - RNA, 19 nt, Artificial Sequence
  Description of Artificial Sequence: Synthetic oligonucleotide
  Antisense strand to SEQ ID NO: 539673
uguuaacuuaccauuauca

SEQ ID NO: 539675 - RNA, 19 nt, Artificial Sequence
  Description of Artificial Sequence: Synthetic oligonucleotide
  Sense strand starting at position 2918 of SEQ ID NO: 318138
acagcuagaucucuagaua

SEQ ID NO: 539676 - RNA, 19 nt, Artificial Sequence
  Description of Artificial Sequence: Synthetic oligonucleotide
  Antisense strand to SEQ ID NO: 539675
uaucuagagaucuagcugu

SEQ ID NO: 539677 - RNA, 19 nt, Artificial Sequence
  Description of Artificial Sequence: Synthetic oligonucleotide
  Sense strand starting at position 2921 of SEQ ID NO: 318138
gcuagaucucuagauauac

SEQ ID NO: 539678 - RNA, 19 nt, Artificial Sequence
  Description of Artificial Sequence: Synthetic oligonucleotide
  Antisense strand to SEQ ID NO: 539677
guauaucuagagaucuagc

SEQ ID NO: 539679 - RNA, 19 nt, Artificial Sequence
  Description of Artificial Sequence: Synthetic oligonucleotide
  Sense strand starting at position 3075 of SEQ ID NO: 318138
gguacuaauuacuucugga

SEQ ID NO: 539680 - RNA, 19 nt, Artificial Sequence
  Description of Artificial Sequence: Synthetic oligonucleotide
  Antisense strand to SEQ ID NO: 539679
uccagaaguaauuaguacc

SEQ ID NO: 539681 - RNA, 19 nt, Artificial Sequence
  Description of Artificial Sequence: Synthetic oligonucleotide
  Sense strand starting at position 3452 of SEQ ID NO: 318138
gggaacuuuccucacccuu

SEQ ID NO: 539682 - RNA, 19 nt, Artificial Sequence
  Description of Artificial Sequence: Synthetic oligonucleotide
  Antisense strand to SEQ ID NO: 539681
aagggugaggaaaguuccc

SEQ ID NO: 539683 - RNA, 19 nt, Artificial Sequence
  Description of Artificial Sequence: Synthetic oligonucleotide
  Sense strand starting at position 3757 of SEQ ID NO: 318138
aaacgaugccaaugagauu

SEQ ID NO: 539684 - RNA, 19 nt, Artificial Sequence
  Description of Artificial Sequence: Synthetic oligonucleotide
  Antisense strand to SEQ ID NO: 539683
aaucucauuggcaucguuu

SEQ ID NO: 539685 - RNA, 19 nt, Artificial Sequence
  Description of Artificial Sequence: Synthetic oligonucleotide
  Sense strand starting at position 3934 of SEQ ID NO: 318138
auauauacagcauguagua

SEQ ID NO: 539686 - RNA, 19 nt, Artificial Sequence
  Description of Artificial Sequence: Synthetic oligonucleotide
  Antisense strand to SEQ ID NO: 539685
uacuacaugcuguauauau

SEQ ID NO: 539687 - RNA, 19 nt, Artificial Sequence
  Description of Artificial Sequence: Synthetic oligonucleotide
  Sense strand starting at position 3946 of SEQ ID NO: 318138
uguaguauacaauagaagu

SEQ ID NO: 539688 - RNA, 19 nt, Artificial Sequence
  Description of Artificial Sequence: Synthetic oligonucleotide
  Antisense strand to SEQ ID NO: 539687
acuucuauuguauacuaca

SEQ ID NO: 539689 - RNA, 19 nt, Artificial Sequence
  Description of Artificial Sequence: Synthetic oligonucleotide
  Sense strand starting at position 71 of SEQ ID NO: 318139
guguaauuauucuuccuaa

SEQ ID NO: 539690 - RNA, 19 nt, Artificial Sequence
  Description of Artificial Sequence: Synthetic oligonucleotide
  Antisense strand to SEQ ID NO: 539689
uuaggaagaauaauuacac

SEQ ID NO: 539691 - RNA, 19 nt, Artificial Sequence
  Description of Artificial Sequence: Synthetic oligonucleotide
  Sense strand starting at position 87 of SEQ ID NO: 318139
uaauuaggcugcucugaag

SEQ ID NO: 539692 - RNA, 19 nt, Artificial Sequence
  Description of Artificial Sequence: Synthetic oligonucleotide
  Antisense strand to SEQ ID NO: 539691
cuucagagcagccuaauua

SEQ ID NO: 539693 - RNA, 19 nt, Artificial Sequence
  Description of Artificial Sequence: Synthetic oligonucleotide
  Sense strand starting at position 93 of SEQ ID NO: 318139
ggcugcucugaagacaaau

SEQ ID NO: 539694 - RNA, 19 nt, Artificial Sequence
  Description of Artificial Sequence: Synthetic oligonucleotide
  Antisense strand to SEQ ID NO: 539693
auuugucuucagagcagcc

SEQ ID NO: 539695 - RNA, 19 nt, Artificial Sequence
  Description of Artificial Sequence: Synthetic oligonucleotide
  Sense strand starting at position 309 of SEQ ID NO: 318139
agcuuaucacaguaugaca

SEQ ID NO: 539696 - RNA, 19 nt, Artificial Sequence
  Description of Artificial Sequence: Synthetic oligonucleotide
  Antisense strand to SEQ ID NO: 539695
ugucauacugugauaagcu

SEQ ID NO: 539697 - RNA, 19 nt, Artificial Sequence
  Description of Artificial Sequence: Synthetic oligonucleotide
  Sense strand starting at position 393 of SEQ ID NO: 318139
cgcgaacauguguucucua

SEQ ID NO: 539698 - RNA, 19 nt, Artificial Sequence
  Description of Artificial Sequence: Synthetic oligonucleotide
  Antisense strand to SEQ ID NO: 539697
uagagaacacauguucgcg

SEQ ID NO: 539699 - RNA, 19 nt, Artificial Sequence
  Description of Artificial Sequence: Synthetic oligonucleotide
  Sense strand starting at position 398 of SEQ ID NO: 318139
acauguguucucuaucucu

SEQ ID NO: 539700 - RNA, 19 nt, Artificial Sequence
  Description of Artificial Sequence: Synthetic oligonucleotide
  Antisense strand to SEQ ID NO: 539699
agagauagagaacacaugu

SEQ ID NO: 539701 - RNA, 19 nt, Artificial Sequence
  Description of Artificial Sequence: Synthetic oligonucleotide
  Sense strand starting at position 500 of SEQ ID NO: 318139
aguaucugauccucucuua

SEQ ID NO: 539702 - RNA, 19 nt, Artificial Sequence
  Description of Artificial Sequence: Synthetic oligonucleotide
  Antisense strand to SEQ ID NO: 539701
uaagagaggaucagauacu

SEQ ID NO: 539703 - RNA, 19 nt, Artificial Sequence
  Description of Artificial Sequence: Synthetic oligonucleotide
  Sense strand starting at position 561 of SEQ ID NO: 318139
aagcaaugugcagguuaua

SEQ ID NO: 539704 - RNA, 19 nt, Artificial Sequence
  Description of Artificial Sequence: Synthetic oligonucleotide
  Antisense strand to SEQ ID NO: 539703
uauaaccugcacauugcuu

SEQ ID NO: 539705 - RNA, 19 nt, Artificial Sequence
  Description of Artificial Sequence: Synthetic oligonucleotide
  Sense strand starting at position 564 of SEQ ID NO: 318139
caaugugcagguuauaaau

SEQ ID NO: 539706 - RNA, 19 nt, Artificial Sequence
  Description of Artificial Sequence: Synthetic oligonucleotide
  Antisense strand to SEQ ID NO: 539705
auuuauaaccugcacauug

SEQ ID NO: 539707 - RNA, 19 nt, Artificial Sequence
  Description of Artificial Sequence: Synthetic oligonucleotide
  Sense strand starting at position 836 of SEQ ID NO: 318139
gggauaggacuuugucuuu

SEQ ID NO: 539708 - RNA, 19 nt, Artificial Sequence
  Description of Artificial Sequence: Synthetic oligonucleotide
  Antisense strand to SEQ ID NO: 539707
aaagacaaaguccuauccc

SEQ ID NO: 539709 - RNA, 19 nt, Artificial Sequence
  Description of Artificial Sequence: Synthetic oligonucleotide
  Sense strand starting at position 839 of SEQ ID NO: 318139
auaggacuuugucuuuacu

SEQ ID NO: 539710 - RNA, 19 nt, Artificial Sequence
  Description of Artificial Sequence: Synthetic oligonucleotide
  Antisense strand to SEQ ID NO: 539709
aguaaagacaaaguccuau

SEQ ID NO: 539711 - RNA, 19 nt, Artificial Sequence
  Description of Artificial Sequence: Synthetic oligonucleotide
  Sense strand starting at position 862 of SEQ ID NO: 318139
uguugcucccauugaaaca

SEQ ID NO: 539712 - RNA, 19 nt, Artificial Sequence
  Description of Artificial Sequence: Synthetic oligonucleotide
  Antisense strand to SEQ ID NO: 539711
uguuucaaugggagcaaca

SEQ ID NO: 539713 - RNA, 19 nt, Artificial Sequence
  Description of Artificial Sequence: Synthetic oligonucleotide
  Sense strand starting at position 930 of SEQ ID NO: 318139
gucgaacgggauugaagaa

SEQ ID NO: 539714 - RNA, 19 nt, Artificial Sequence
  Description of Artificial Sequence: Synthetic oligonucleotide
  Antisense strand to SEQ ID NO: 539713
uucuucaaucccguucgac

SEQ ID NO: 539715 - RNA, 19 nt, Artificial Sequence
  Description of Artificial Sequence: Synthetic oligonucleotide
  Sense strand starting at position 2549 of SEQ ID NO: 318139
ggaggcuccggacauaagu

SEQ ID NO: 539716 - RNA, 19 nt, Artificial Sequence
  Description of Artificial Sequence: Synthetic oligonucleotide
  Antisense strand to SEQ ID NO: 539715
acuuauguccggagccucc

SEQ ID NO: 539717 - RNA, 19 nt, Artificial Sequence
  Description of Artificial Sequence: Synthetic oligonucleotide
  Sense strand starting at position 2566 of SEQ ID NO: 318139
guucccgugcccucugaau

SEQ ID NO: 539718 - RNA, 19 nt, Artificial Sequence
  Description of Artificial Sequence: Synthetic oligonucleotide
  Antisense strand to SEQ ID NO: 539717
auucagagggcacgggaac

SEQ ID NO: 539719 - RNA, 19 nt, Artificial Sequence
  Description of Artificial Sequence: Synthetic oligonucleotide
  Sense strand starting at position 2579 of SEQ ID NO: 318139
cugaauaucuaggugugga

SEQ ID NO: 539720 - RNA, 19 nt, Artificial Sequence
  Description of Artificial Sequence: Synthetic oligonucleotide
  Antisense strand to SEQ ID NO: 539719
uccacaccuagauauucag

SEQ ID NO: 539721 - RNA, 19 nt, Artificial Sequence
  Description of Artificial Sequence: Synthetic oligonucleotide
  Sense strand starting at position 2580 of SEQ ID NO: 318139
ugaauaucuagguguggaa

SEQ ID NO: 539722 - RNA, 19 nt, Artificial Sequence
  Description of Artificial Sequence: Synthetic oligonucleotide
  Antisense strand to SEQ ID NO: 539721
uuccacaccuagauauuca

SEQ ID NO: 539723 - RNA, 19 nt, Artificial Sequence
  Description of Artificial Sequence: Synthetic oligonucleotide
  Sense strand starting at position 2719 of SEQ ID NO: 318139
aaggcauucuuguccagag

SEQ ID NO: 539724 - RNA, 19 nt, Artificial Sequence
  Description of Artificial Sequence: Synthetic oligonucleotide
  Antisense strand to SEQ ID NO: 539723
cucuggacaagaaugccuu

SEQ ID NO: 539725 - RNA, 19 nt, Artificial Sequence
  Description of Artificial Sequence: Synthetic oligonucleotide
  Sense strand starting at position 2792 of SEQ ID NO: 318139
guuaaauggccaugaauuc

SEQ ID NO: 539726 - RNA, 19 nt, Artificial Sequence
  Description of Artificial Sequence: Synthetic oligonucleotide
  Antisense strand to SEQ ID NO: 539725
gaauucauggccauuuaac

SEQ ID NO: 539727 - RNA, 19 nt, Artificial Sequence
  Description of Artificial Sequence: Synthetic oligonucleotide
  Sense strand starting at position 2816 of SEQ ID NO: 318139
ccaguauuguuugugauug

SEQ ID NO: 539728 - RNA, 19 nt, Artificial Sequence
  Description of Artificial Sequence: Synthetic oligonucleotide
  Antisense strand to SEQ ID NO: 539727
caaucacaaacaauacugg

SEQ ID NO: 539729 - RNA, 19 nt, Artificial Sequence
  Description of Artificial Sequence: Synthetic oligonucleotide
  Sense strand starting at position 2820 of SEQ ID NO: 318139
uauuguuugugauugaacu

SEQ ID NO: 539730 - RNA, 19 nt, Artificial Sequence
  Description of Artificial Sequence: Synthetic oligonucleotide
  Antisense strand to SEQ ID NO: 539729
aguucaaucacaaacaaua

SEQ ID NO: 539731 - RNA, 19 nt, Artificial Sequence
  Description of Artificial Sequence: Synthetic oligonucleotide
  Sense strand starting at position 2821 of SEQ ID NO: 318139
auuguuugugauugaacug

SEQ ID NO: 539732 - RNA, 19 nt, Artificial Sequence
  Description of Artificial Sequence: Synthetic oligonucleotide
  Antisense strand to SEQ ID NO: 539731
caguucaaucacaaacaau

SEQ ID NO: 539733 - RNA, 19 nt, Artificial Sequence
  Description of Artificial Sequence: Synthetic oligonucleotide
  Sense strand starting at position 2822 of SEQ ID NO: 318139
uuguuugugauugaacugu

SEQ ID NO: 539734 - RNA, 19 nt, Artificial Sequence
  Description of Artificial Sequence: Synthetic oligonucleotide
  Antisense strand to SEQ ID NO: 539733
acaguucaaucacaaacaa

SEQ ID NO: 539735 - RNA, 19 nt, Artificial Sequence
  Description of Artificial Sequence: Synthetic oligonucleotide
  Sense strand starting at position 3227 of SEQ ID NO: 318139
gccacuuccuguucuagaa

SEQ ID NO: 539736 - RNA, 19 nt, Artificial Sequence
  Description of Artificial Sequence: Synthetic oligonucleotide
  Antisense strand to SEQ ID NO: 539735
uucuagaacaggaaguggc

SEQ ID NO: 539737 - RNA, 19 nt, Artificial Sequence
  Description of Artificial Sequence: Synthetic oligonucleotide
  Sense strand starting at position 3231 of SEQ ID NO: 318139
cuuccuguucuagaagcuu

SEQ ID NO: 539738 - RNA, 19 nt, Artificial Sequence
  Description of Artificial Sequence: Synthetic oligonucleotide
  Antisense strand to SEQ ID NO: 539737
aagcuucuagaacaggaag

SEQ ID NO: 539739 - RNA, 19 nt, Artificial Sequence
  Description of Artificial Sequence: Synthetic oligonucleotide
  Sense strand starting at position 3255 of SEQ ID NO: 318139
ggcacuuugccagagaaca

SEQ ID NO: 539740 - RNA, 19 nt, Artificial Sequence
  Description of Artificial Sequence: Synthetic oligonucleotide
  Antisense strand to SEQ ID NO: 539739
uguucucuggcaaagugcc

SEQ ID NO: 539741 - RNA, 19 nt, Artificial Sequence
  Description of Artificial Sequence: Synthetic oligonucleotide
  Sense strand starting at position 3345 of SEQ ID NO: 318139
cugggacucucuuuagaug

SEQ ID NO: 539742 - RNA, 19 nt, Artificial Sequence
  Description of Artificial Sequence: Synthetic oligonucleotide
  Antisense strand to SEQ ID NO: 539741
caucuaaagagagucccag

SEQ ID NO: 539743 - RNA, 19 nt, Artificial Sequence
  Description of Artificial Sequence: Synthetic oligonucleotide
  Sense strand starting at position 3381 of SEQ ID NO: 318139
ccgagaaagauccaugccu

SEQ ID NO: 539744 - RNA, 19 nt, Artificial Sequence
  Description of Artificial Sequence: Synthetic oligonucleotide
  Antisense strand to SEQ ID NO: 539743
aggcauggaucuuucucgg

SEQ ID NO: 539745 - RNA, 19 nt, Artificial Sequence
  Description of Artificial Sequence: Synthetic oligonucleotide
  Sense strand starting at position 3383 of SEQ ID NO: 318139
gagaaagauccaugccugu

SEQ ID NO: 539746 - RNA, 19 nt, Artificial Sequence
  Description of Artificial Sequence: Synthetic oligonucleotide
  Antisense strand to SEQ ID NO: 539745
acaggcauggaucuuucuc

SEQ ID NO: 539747 - RNA, 19 nt, Artificial Sequence
  Description of Artificial Sequence: Synthetic oligonucleotide
  Sense strand starting at position 3397 of SEQ ID NO: 318139
ccuguaucuacacgagagu

SEQ ID NO: 539748 - RNA, 19 nt, Artificial Sequence
  Description of Artificial Sequence: Synthetic oligonucleotide
  Antisense strand to SEQ ID NO: 539747
acucucguguagauacagg

SEQ ID NO: 539749 - RNA, 19 nt, Artificial Sequence
  Description of Artificial Sequence: Synthetic oligonucleotide
  Sense strand starting at position 3398 of SEQ ID NO: 318139
cuguaucuacacgagaguu

SEQ ID NO: 539750 - RNA, 19 nt, Artificial Sequence
  Description of Artificial Sequence: Synthetic oligonucleotide
  Antisense strand to SEQ ID NO: 539749
aacucucguguagauacag

SEQ ID NO: 539751 - RNA, 19 nt, Artificial Sequence
  Description of Artificial Sequence: Synthetic oligonucleotide
  Sense strand starting at position 3494 of SEQ ID NO: 318139
ugaaguuugcaguaccaca

SEQ ID NO: 539752 - RNA, 19 nt, Artificial Sequence
  Description of Artificial Sequence: Synthetic oligonucleotide
  Antisense strand to SEQ ID NO: 539751
ugugguacugcaaacuuca

SEQ ID NO: 539753 - RNA, 19 nt, Artificial Sequence
  Description of Artificial Sequence: Synthetic oligonucleotide
  Sense strand starting at position 3525 of SEQ ID NO: 318139
aaggauauaugugcucuuu

SEQ ID NO: 539754 - RNA, 19 nt, Artificial Sequence
  Description of Artificial Sequence: Synthetic oligonucleotide
  Antisense strand to SEQ ID NO: 539753
aaagagcacauauauccuu

SEQ ID NO: 539755 - RNA, 19 nt, Artificial Sequence
  Description of Artificial Sequence: Synthetic oligonucleotide
  Sense strand starting at position 3679 of SEQ ID NO: 318139
gcuaaugaacuguguuaaa

SEQ ID NO: 539756 - RNA, 19 nt, Artificial Sequence
  Description of Artificial Sequence: Synthetic oligonucleotide
  Antisense strand to SEQ ID NO: 539755
uuuaacacaguucauuagc

SEQ ID NO: 539757 - RNA, 19 nt, Artificial Sequence
  Description of Artificial Sequence: Synthetic oligonucleotide
  Sense strand starting at position 3784 of SEQ ID NO: 318139
ggcugcugacuugagauaa

SEQ ID NO: 539758 - RNA, 19 nt, Artificial Sequence
  Description of Artificial Sequence: Synthetic oligonucleotide
  Antisense strand to SEQ ID NO: 539757
uuaucucaagucagcagcc

SEQ ID NO: 539759 - RNA, 19 nt, Artificial Sequence
  Description of Artificial Sequence: Synthetic oligonucleotide
  Sense strand starting at position 3823 of SEQ ID NO: 318139
aggagaacucucuguccug

SEQ ID NO: 539760 - RNA, 19 nt, Artificial Sequence
  Description of Artificial Sequence: Synthetic oligonucleotide
  Antisense strand to SEQ ID NO: 539759
caggacagagaguucuccu

SEQ ID NO: 539761 - RNA, 19 nt, Artificial Sequence
  Description of Artificial Sequence: Synthetic oligonucleotide
  Sense strand starting at position 3824 of SEQ ID NO: 318139
ggagaacucucuguccugu

SEQ ID NO: 539762 - RNA, 19 nt, Artificial Sequence
  Description of Artificial Sequence: Synthetic oligonucleotide
  Antisense strand to SEQ ID NO: 539761
acaggacagagaguucucc

SEQ ID NO: 539763 - RNA, 19 nt, Artificial Sequence
  Description of Artificial Sequence: Synthetic oligonucleotide
  Sense strand starting at position 3876 of SEQ ID NO: 318139
uagagaggucaaggccaaa

SEQ ID NO: 539764 - RNA, 19 nt, Artificial Sequence
  Description of Artificial Sequence: Synthetic oligonucleotide
  Antisense strand to SEQ ID NO: 539763
uuuggccuugaccucucua

SEQ ID NO: 539765 - RNA, 19 nt, Artificial Sequence
  Description of Artificial Sequence: Synthetic oligonucleotide
  Sense strand starting at position 3919 of SEQ ID NO: 318139
gugaaaugggccuacagca

SEQ ID NO: 539766 - RNA, 19 nt, Artificial Sequence
  Description of Artificial Sequence: Synthetic oligonucleotide
  Antisense strand to SEQ ID NO: 539765
ugcuguaggcccauuucac

SEQ ID NO: 539767 - RNA, 19 nt, Artificial Sequence
  Description of Artificial Sequence: Synthetic oligonucleotide
  Sense strand starting at position 3940 of SEQ ID NO: 318139
cuguguucucuguaacuag

SEQ ID NO: 539768 - RNA, 19 nt, Artificial Sequence
  Description of Artificial Sequence: Synthetic oligonucleotide
  Antisense strand to SEQ ID NO: 539767
cuaguuacagagaacacag

SEQ ID NO: 539769 - RNA, 19 nt, Artificial Sequence
  Description of Artificial Sequence: Synthetic oligonucleotide
  Sense strand starting at position 36 of SEQ ID NO: 318140
gaauguuuacaugagcaua

SEQ ID NO: 539770 - RNA, 19 nt, Artificial Sequence
  Description of Artificial Sequence: Synthetic oligonucleotide
  Antisense strand to SEQ ID NO: 539769
uaugcucauguaaacauuc

SEQ ID NO: 539771 - RNA, 19 nt, Artificial Sequence
  Description of Artificial Sequence: Synthetic oligonucleotide
  Sense strand starting at position 52 of SEQ ID NO: 318140
auaggcuaugucuggaaag

SEQ ID NO: 539772 - RNA, 19 nt, Artificial Sequence
  Description of Artificial Sequence: Synthetic oligonucleotide
  Antisense strand to SEQ ID NO: 539771
cuuuccagacauagccuau

SEQ ID NO: 539773 - RNA, 19 nt, Artificial Sequence
  Description of Artificial Sequence: Synthetic oligonucleotide
  Sense strand starting at position 53 of SEQ ID NO: 318140
uaggcuaugucuggaaaga

SEQ ID NO: 539774 - RNA, 19 nt, Artificial Sequence
  Description of Artificial Sequence: Synthetic oligonucleotide
  Antisense strand to SEQ ID NO: 539773
ucuuuccagacauagccua

SEQ ID NO: 539775 - RNA, 19 nt, Artificial Sequence
  Description of Artificial Sequence: Synthetic oligonucleotide
  Sense strand starting at position 84 of SEQ ID NO: 318140
gccaguagcuguggaacau

SEQ ID NO: 539776 - RNA, 19 nt, Artificial Sequence
  Description of Artificial Sequence: Synthetic oligonucleotide
  Antisense strand to SEQ ID NO: 539775
auguuccacagcuacuggc

SEQ ID NO: 539777 - RNA, 19 nt, Artificial Sequence
  Description of Artificial Sequence: Synthetic oligonucleotide
  Sense strand starting at position 111 of SEQ ID NO: 318140
agagguauacuccguaucu

SEQ ID NO: 539778 - RNA, 19 nt, Artificial Sequence
  Description of Artificial Sequence: Synthetic oligonucleotide
  Antisense strand to SEQ ID NO: 539777
agauacggaguauaccucu

SEQ ID NO: 539779 - RNA, 19 nt, Artificial Sequence
  Description of Artificial Sequence: Synthetic oligonucleotide
  Sense strand starting at position 112 of SEQ ID NO: 318140
gagguauacuccguaucuu

SEQ ID NO: 539780 - RNA, 19 nt, Artificial Sequence
  Description of Artificial Sequence: Synthetic oligonucleotide
  Antisense strand to SEQ ID NO: 539779
aagauacggaguauaccuc

SEQ ID NO: 539781 - RNA, 19 nt, Artificial Sequence
  Description of Artificial Sequence: Synthetic oligonucleotide
  Sense strand starting at position 113 of SEQ ID NO: 318140
agguauacuccguaucuuu

SEQ ID NO: 539782 - RNA, 19 nt, Artificial Sequence
  Description of Artificial Sequence: Synthetic oligonucleotide
  Antisense strand to SEQ ID NO: 539781
aaagauacggaguauaccu

SEQ ID NO: 539783 - RNA, 19 nt, Artificial Sequence
  Description of Artificial Sequence: Synthetic oligonucleotide
  Sense strand starting at position 139 of SEQ ID NO: 318140
auugaaucuucuccagugu

SEQ ID NO: 539784 - RNA, 19 nt, Artificial Sequence
  Description of Artificial Sequence: Synthetic oligonucleotide
  Antisense strand to SEQ ID NO: 539783
acacuggagaagauucaau

SEQ ID NO: 539785 - RNA, 19 nt, Artificial Sequence
  Description of Artificial Sequence: Synthetic oligonucleotide
  Sense strand starting at position 172 of SEQ ID NO: 318140
cugcacaauuaauguaaga

SEQ ID NO: 539786 - RNA, 19 nt, Artificial Sequence
  Description of Artificial Sequence: Synthetic oligonucleotide
  Antisense strand to SEQ ID NO: 539785
ucuuacauuaauugugcag

SEQ ID NO: 539787 - RNA, 19 nt, Artificial Sequence
  Description of Artificial Sequence: Synthetic oligonucleotide
  Sense strand starting at position 322 of SEQ ID NO: 318140
uccacuaaucaagaggcuu

SEQ ID NO: 539788 - RNA, 19 nt, Artificial Sequence
  Description of Artificial Sequence: Synthetic oligonucleotide
  Antisense strand to SEQ ID NO: 539787
aagccucuugauuagugga

SEQ ID NO: 539789 - RNA, 19 nt, Artificial Sequence
  Description of Artificial Sequence: Synthetic oligonucleotide
  Sense strand starting at position 328 of SEQ ID NO: 318140
aaucaagaggcuugcuagu

SEQ ID NO: 539790 - RNA, 19 nt, Artificial Sequence
  Description of Artificial Sequence: Synthetic oligonucleotide
  Antisense strand to SEQ ID NO: 539789
acuagcaagccucuugauu

SEQ ID NO: 539791 - RNA, 19 nt, Artificial Sequence
  Description of Artificial Sequence: Synthetic oligonucleotide
  Sense strand starting at position 330 of SEQ ID NO: 318140
ucaagaggcuugcuaguga

SEQ ID NO: 539792 - RNA, 19 nt, Artificial Sequence
  Description of Artificial Sequence: Synthetic oligonucleotide
  Antisense strand to SEQ ID NO: 539791
ucacuagcaagccucuuga

SEQ ID NO: 539793 - RNA, 19 nt, Artificial Sequence
  Description of Artificial Sequence: Synthetic oligonucleotide
  Sense strand starting at position 334 of SEQ ID NO: 318140
gaggcuugcuagugaucuc

SEQ ID NO: 539794 - RNA, 19 nt, Artificial Sequence
  Description of Artificial Sequence: Synthetic oligonucleotide
  Antisense strand to SEQ ID NO: 539793
gagaucacuagcaagccuc

SEQ ID NO: 539795 - RNA, 19 nt, Artificial Sequence
  Description of Artificial Sequence: Synthetic oligonucleotide
  Sense strand starting at position 335 of SEQ ID NO: 318140
aggcuugcuagugaucuca

SEQ ID NO: 539796 - RNA, 19 nt, Artificial Sequence
  Description of Artificial Sequence: Synthetic oligonucleotide
  Antisense strand to SEQ ID NO: 539795
ugagaucacuagcaagccu

SEQ ID NO: 539797 - RNA, 19 nt, Artificial Sequence
  Description of Artificial Sequence: Synthetic oligonucleotide
  Sense strand starting at position 337 of SEQ ID NO: 318140
gcuugcuagugaucucacu

SEQ ID NO: 539798 - RNA, 19 nt, Artificial Sequence
  Description of Artificial Sequence: Synthetic oligonucleotide
  Antisense strand to SEQ ID NO: 539797
agugagaucacuagcaagc

SEQ ID NO: 539799 - RNA, 19 nt, Artificial Sequence
  Description of Artificial Sequence: Synthetic oligonucleotide
  Sense strand starting at position 399 of SEQ ID NO: 318140
ggaaauagcugcuccgauc

SEQ ID NO: 539800 - RNA, 19 nt, Artificial Sequence
  Description of Artificial Sequence: Synthetic oligonucleotide
  Antisense strand to SEQ ID NO: 539799
gaucggagcagcuauuucc

SEQ ID NO: 539801 - RNA, 19 nt, Artificial Sequence
  Description of Artificial Sequence: Synthetic oligonucleotide
  Sense strand starting at position 423 of SEQ ID NO: 318140
gggaacacaucauauauuu

SEQ ID NO: 539802 - RNA, 19 nt, Artificial Sequence
  Description of Artificial Sequence: Synthetic oligonucleotide
  Antisense strand to SEQ ID NO: 539801
aaauauaugauguguuccc

SEQ ID NO: 539803 - RNA, 19 nt, Artificial Sequence
  Description of Artificial Sequence: Synthetic oligonucleotide
  Sense strand starting at position 440 of SEQ ID NO: 318140
uuaaauugagcuugcaacu

SEQ ID NO: 539804 - RNA, 19 nt, Artificial Sequence
  Description of Artificial Sequence: Synthetic oligonucleotide
  Antisense strand to SEQ ID NO: 539803
aguugcaagcucaauuuaa

SEQ ID NO: 539805 - RNA, 19 nt, Artificial Sequence
  Description of Artificial Sequence: Synthetic oligonucleotide
  Sense strand starting at position 506 of SEQ ID NO: 318140
gcauaaagucaacguagaa

SEQ ID NO: 539806 - RNA, 19 nt, Artificial Sequence
  Description of Artificial Sequence: Synthetic oligonucleotide
  Antisense strand to SEQ ID NO: 539805
uucuacguugacuuuaugc

SEQ ID NO: 539807 - RNA, 19 nt, Artificial Sequence
  Description of Artificial Sequence: Synthetic oligonucleotide
  Sense strand starting at position 533 of SEQ ID NO: 318140
aaagaauggucucguguuu

SEQ ID NO: 539808 - RNA, 19 nt, Artificial Sequence
  Description of Artificial Sequence: Synthetic oligonucleotide
  Antisense strand to SEQ ID NO: 539807
aaacacgagaccauucuuu

SEQ ID NO: 539809 - RNA, 19 nt, Artificial Sequence
  Description of Artificial Sequence: Synthetic oligonucleotide
  Sense strand starting at position 603 of SEQ ID NO: 318140
gaaacucucugguaacagu

SEQ ID NO: 539810 - RNA, 19 nt, Artificial Sequence
  Description of Artificial Sequence: Synthetic oligonucleotide
  Antisense strand to SEQ ID NO: 539809
acuguuaccagagaguuuc

SEQ ID NO: 539811 - RNA, 19 nt, Artificial Sequence
  Description of Artificial Sequence: Synthetic oligonucleotide
  Sense strand starting at position 610 of SEQ ID NO: 318140
ucugguaacagugaaaugu

SEQ ID NO: 539812 - RNA, 19 nt, Artificial Sequence
  Description of Artificial Sequence: Synthetic oligonucleotide
  Antisense strand to SEQ ID NO: 539811
acauuucacuguuaccaga

SEQ ID NO: 539813 - RNA, 19 nt, Artificial Sequence
  Description of Artificial Sequence: Synthetic oligonucleotide
  Sense strand starting at position 672 of SEQ ID NO: 318140
aguagcauucgcgcugaaa

SEQ ID NO: 539814 - RNA, 19 nt, Artificial Sequence
  Description of Artificial Sequence: Synthetic oligonucleotide
  Antisense strand to SEQ ID NO: 539813
uuucagcgcgaaugcuacu

SEQ ID NO: 539815 - RNA, 19 nt, Artificial Sequence
  Description of Artificial Sequence: Synthetic oligonucleotide
  Sense strand starting at position 717 of SEQ ID NO: 318140
aaaggaaagguuugccuua

SEQ ID NO: 539816 - RNA, 19 nt, Artificial Sequence
  Description of Artificial Sequence: Synthetic oligonucleotide
  Antisense strand to SEQ ID NO: 539815
uaaggcaaaccuuuccuuu

SEQ ID NO: 539817 - RNA, 19 nt, Artificial Sequence
  Description of Artificial Sequence: Synthetic oligonucleotide
  Sense strand starting at position 718 of SEQ ID NO: 318140
aaggaaagguuugccuuaa

SEQ ID NO: 539818 - RNA, 19 nt, Artificial Sequence
  Description of Artificial Sequence: Synthetic oligonucleotide
  Antisense strand to SEQ ID NO: 539817
uuaaggcaaaccuuuccuu

SEQ ID NO: 539819 - RNA, 19 nt, Artificial Sequence
  Description of Artificial Sequence: Synthetic oligonucleotide
  Sense strand starting at position 719 of SEQ ID NO: 318140
aggaaagguuugccuuaaa

SEQ ID NO: 539820 - RNA, 19 nt, Artificial Sequence
  Description of Artificial Sequence: Synthetic oligonucleotide
  Antisense strand to SEQ ID NO: 539819
uuuaaggcaaaccuuuccu

SEQ ID NO: 539821 - RNA, 19 nt, Artificial Sequence
  Description of Artificial Sequence: Synthetic oligonucleotide
  Sense strand starting at position 929 of SEQ ID NO: 318140
agaaccgauuuccauauaa

SEQ ID NO: 539822 - RNA, 19 nt, Artificial Sequence
  Description of Artificial Sequence: Synthetic oligonucleotide
  Antisense strand to SEQ ID NO: 539821
uuauauggaaaucgguucu

SEQ ID NO: 539823 - RNA, 19 nt, Artificial Sequence
  Description of Artificial Sequence: Synthetic oligonucleotide
  Sense strand starting at position 1241 of SEQ ID NO: 318140
ggguuuaaccaguacacca

SEQ ID NO: 539824 - RNA, 19 nt, Artificial Sequence
  Description of Artificial Sequence: Synthetic oligonucleotide
  Antisense strand to SEQ ID NO: 539823
ugguguacugguuaaaccc

SEQ ID NO: 539825 - RNA, 19 nt, Artificial Sequence
  Description of Artificial Sequence: Synthetic oligonucleotide
  Sense strand starting at position 1262 of SEQ ID NO: 318140
uucggaaguuagcacauaa

SEQ ID NO: 539826 - RNA, 19 nt, Artificial Sequence
  Description of Artificial Sequence: Synthetic oligonucleotide
  Antisense strand to SEQ ID NO: 539825
uuaugugcuaacuuccgaa

SEQ ID NO: 539827 - RNA, 19 nt, Artificial Sequence
  Description of Artificial Sequence: Synthetic oligonucleotide
  Sense strand starting at position 1292 of SEQ ID NO: 318140
agucaaaugcacuacggau

SEQ ID NO: 539828 - RNA, 19 nt, Artificial Sequence
  Description of Artificial Sequence: Synthetic oligonucleotide
  Antisense strand to SEQ ID NO: 539827
auccguagugcauuugacu

SEQ ID NO: 539829 - RNA, 19 nt, Artificial Sequence
  Description of Artificial Sequence: Synthetic oligonucleotide
  Sense strand starting at position 1375 of SEQ ID NO: 318140
ggucaccucuccgaaggaa

SEQ ID NO: 539830 - RNA, 19 nt, Artificial Sequence
  Description of Artificial Sequence: Synthetic oligonucleotide
  Antisense strand to SEQ ID NO: 539829
uuccuucggagaggugacc

SEQ ID NO: 539831 - RNA, 19 nt, Artificial Sequence
  Description of Artificial Sequence: Synthetic oligonucleotide
  Sense strand starting at position 328 of SEQ ID NO: 318141
gaggccucaugagugagau

SEQ ID NO: 539832 - RNA, 19 nt, Artificial Sequence
  Description of Artificial Sequence: Synthetic oligonucleotide
  Antisense strand to SEQ ID NO: 539831
aucucacucaugaggccuc

SEQ ID NO: 539833 - RNA, 19 nt, Artificial Sequence
  Description of Artificial Sequence: Synthetic oligonucleotide
  Sense strand starting at position 329 of SEQ ID NO: 318141
aggccucaugagugagauu

SEQ ID NO: 539834 - RNA, 19 nt, Artificial Sequence
  Description of Artificial Sequence: Synthetic oligonucleotide
  Antisense strand to SEQ ID NO: 539833
aaucucacucaugaggccu

SEQ ID NO: 539835 - RNA, 19 nt, Artificial Sequence
  Description of Artificial Sequence: Synthetic oligonucleotide
  Sense strand starting at position 330 of SEQ ID NO: 318141
ggccucaugagugagauua

SEQ ID NO: 539836 - RNA, 19 nt, Artificial Sequence
  Description of Artificial Sequence: Synthetic oligonucleotide
  Antisense strand to SEQ ID NO: 539835
uaaucucacucaugaggcc

SEQ ID NO: 539837 - RNA, 19 nt, Artificial Sequence
  Description of Artificial Sequence: Synthetic oligonucleotide
  Sense strand starting at position 391 of SEQ ID NO: 318141
uugcuaugugaagacauga

SEQ ID NO: 539838 - RNA, 19 nt, Artificial Sequence
  Description of Artificial Sequence: Synthetic oligonucleotide
  Antisense strand to SEQ ID NO: 539837
ucaugucuucacauagcaa

SEQ ID NO: 539839 - RNA, 19 nt, Artificial Sequence
  Description of Artificial Sequence: Synthetic oligonucleotide
  Sense strand starting at position 471 of SEQ ID NO: 318141
ugccuugaucugggaauua

SEQ ID NO: 539840 - RNA, 19 nt, Artificial Sequence
  Description of Artificial Sequence: Synthetic oligonucleotide
  Antisense strand to SEQ ID NO: 539839
uaauucccagaucaaggca

SEQ ID NO: 539841 - RNA, 19 nt, Artificial Sequence
  Description of Artificial Sequence: Synthetic oligonucleotide
  Sense strand starting at position 580 of SEQ ID NO: 318141
uagaaacguuuaccaggaa

SEQ ID NO: 539842 - RNA, 19 nt, Artificial Sequence
  Description of Artificial Sequence: Synthetic oligonucleotide
  Antisense strand to SEQ ID NO: 539841
uuccugguaaacguuucua

SEQ ID NO: 539843 - RNA, 19 nt, Artificial Sequence
  Description of Artificial Sequence: Synthetic oligonucleotide
  Sense strand starting at position 601 of SEQ ID NO: 318141
guauaugcuagauggauaa

SEQ ID NO: 539844 - RNA, 19 nt, Artificial Sequence
  Description of Artificial Sequence: Synthetic oligonucleotide
  Antisense strand to SEQ ID NO: 539843
uuauccaucuagcauauac

SEQ ID NO: 539845 - RNA, 19 nt, Artificial Sequence
  Description of Artificial Sequence: Synthetic oligonucleotide
  Sense strand starting at position 646 of SEQ ID NO: 318141
ggacgugauccagggaaag

SEQ ID NO: 539846 - RNA, 19 nt, Artificial Sequence
  Description of Artificial Sequence: Synthetic oligonucleotide
  Antisense strand to SEQ ID NO: 539845
cuuucccuggaucacgucc

SEQ ID NO: 539847 - RNA, 19 nt, Artificial Sequence
  Description of Artificial Sequence: Synthetic oligonucleotide
  Sense strand starting at position 648 of SEQ ID NO: 318141
acgugauccagggaaaggu

SEQ ID NO: 539848 - RNA, 19 nt, Artificial Sequence
  Description of Artificial Sequence: Synthetic oligonucleotide
  Antisense strand to SEQ ID NO: 539847
accuuucccuggaucacgu

SEQ ID NO: 539849 - RNA, 19 nt, Artificial Sequence
  Description of Artificial Sequence: Synthetic oligonucleotide
  Sense strand starting at position 667 of SEQ ID NO: 318141
cuugaauuggguuagagcu

SEQ ID NO: 539850 - RNA, 19 nt, Artificial Sequence
  Description of Artificial Sequence: Synthetic oligonucleotide
  Antisense strand to SEQ ID NO: 539849
agcucuaacccaauucaag

SEQ ID NO: 539851 - RNA, 19 nt, Artificial Sequence
  Description of Artificial Sequence: Synthetic oligonucleotide
  Sense strand starting at position 675 of SEQ ID NO: 318141
ggguuagagcuuggauuca

SEQ ID NO: 539852 - RNA, 19 nt, Artificial Sequence
  Description of Artificial Sequence: Synthetic oligonucleotide
  Antisense strand to SEQ ID NO: 539851
ugaauccaagcucuaaccc

SEQ ID NO: 539853 - RNA, 19 nt, Artificial Sequence
  Description of Artificial Sequence: Synthetic oligonucleotide
  Sense strand starting at position 785 of SEQ ID NO: 318141
caguucuuugugcaaagaa

SEQ ID NO: 539854 - RNA, 19 nt, Artificial Sequence
  Description of Artificial Sequence: Synthetic oligonucleotide
  Antisense strand to SEQ ID NO: 539853
uucuuugcacaaagaacug

SEQ ID NO: 539855 - RNA, 19 nt, Artificial Sequence
  Description of Artificial Sequence: Synthetic oligonucleotide
  Sense strand starting at position 995 of SEQ ID NO: 318141
gcacaacacgaagaguaua

SEQ ID NO: 539856 - RNA, 19 nt, Artificial Sequence
  Description of Artificial Sequence: Synthetic oligonucleotide
  Antisense strand to SEQ ID NO: 539855
uauacucuucguguugugc

SEQ ID NO: 539857 - RNA, 19 nt, Artificial Sequence
  Description of Artificial Sequence: Synthetic oligonucleotide
  Sense strand starting at position 1370 of SEQ ID NO: 318141
aguuauaugugauucuauc

SEQ ID NO: 539858 - RNA, 19 nt, Artificial Sequence
  Description of Artificial Sequence: Synthetic oligonucleotide
  Antisense strand to SEQ ID NO: 539857
gauagaaucacauauaacu

SEQ ID NO: 539859 - RNA, 19 nt, Artificial Sequence
  Description of Artificial Sequence: Synthetic oligonucleotide
  Sense strand starting at position 1426 of SEQ ID NO: 318141
uccucuagguuuccacaga

SEQ ID NO: 539860 - RNA, 19 nt, Artificial Sequence
  Description of Artificial Sequence: Synthetic oligonucleotide
  Antisense strand to SEQ ID NO: 539859
ucuguggaaaccuagagga

SEQ ID NO: 539861 - RNA, 19 nt, Artificial Sequence
  Description of Artificial Sequence: Synthetic oligonucleotide
  Sense strand starting at position 1652 of SEQ ID NO: 318141
ggagaaagucuggguaagu

SEQ ID NO: 539862 - RNA, 19 nt, Artificial Sequence
  Description of Artificial Sequence: Synthetic oligonucleotide
  Antisense strand to SEQ ID NO: 539861
acuuacccagacuuucucc

SEQ ID NO: 539863 - RNA, 19 nt, Artificial Sequence
  Description of Artificial Sequence: Synthetic oligonucleotide
  Sense strand starting at position 1653 of SEQ ID NO: 318141
gagaaagucuggguaagua

SEQ ID NO: 539864 - RNA, 19 nt, Artificial Sequence
  Description of Artificial Sequence: Synthetic oligonucleotide
  Antisense strand to SEQ ID NO: 539863
uacuuacccagacuuucuc

SEQ ID NO: 539865 - RNA, 19 nt, Artificial Sequence
  Description of Artificial Sequence: Synthetic oligonucleotide
  Sense strand starting at position 1723 of SEQ ID NO: 318141
aggucagagcccugagaga

SEQ ID NO: 539866 - RNA, 19 nt, Artificial Sequence
  Description of Artificial Sequence: Synthetic oligonucleotide
  Antisense strand to SEQ ID NO: 539865
ucucucagggcucugaccu

SEQ ID NO: 539867 - RNA, 19 nt, Artificial Sequence
  Description of Artificial Sequence: Synthetic oligonucleotide
  Sense strand starting at position 1887 of SEQ ID NO: 318141
ccuuucugagcugggauua

SEQ ID NO: 539868 - RNA, 19 nt, Artificial Sequence
  Description of Artificial Sequence: Synthetic oligonucleotide
  Antisense strand to SEQ ID NO: 539867
uaaucccagcucagaaagg

SEQ ID NO: 539869 - RNA, 19 nt, Artificial Sequence
  Description of Artificial Sequence: Synthetic oligonucleotide
  Sense strand starting at position 1970 of SEQ ID NO: 318141
agacacguucugggagaga

SEQ ID NO: 539870 - RNA, 19 nt, Artificial Sequence
  Description of Artificial Sequence: Synthetic oligonucleotide
  Antisense strand to SEQ ID NO: 539869
ucucucccagaacgugucu

SEQ ID NO: 539871 - RNA, 19 nt, Artificial Sequence
  Description of Artificial Sequence: Synthetic oligonucleotide
  Sense strand starting at position 1989 of SEQ ID NO: 318141
ggguuaggauuugaguaag

SEQ ID NO: 539872 - RNA, 19 nt, Artificial Sequence
  Description of Artificial Sequence: Synthetic oligonucleotide
  Antisense strand to SEQ ID NO: 539871
cuuacucaaauccuaaccc

SEQ ID NO: 539873 - RNA, 19 nt, Artificial Sequence
  Description of Artificial Sequence: Synthetic oligonucleotide
  Sense strand starting at position 2133 of SEQ ID NO: 318141
accaaauugugucuuggau

SEQ ID NO: 539874 - RNA, 19 nt, Artificial Sequence
  Description of Artificial Sequence: Synthetic oligonucleotide
  Antisense strand to SEQ ID NO: 539873
auccaagacacaauuuggu

SEQ ID NO: 539875 - RNA, 19 nt, Artificial Sequence
  Description of Artificial Sequence: Synthetic oligonucleotide
  Sense strand starting at position 2271 of SEQ ID NO: 318141
gggccaaucuaaccuucua

SEQ ID NO: 539876 - RNA, 19 nt, Artificial Sequence
  Description of Artificial Sequence: Synthetic oligonucleotide
  Antisense strand to SEQ ID NO: 539875
uagaagguuagauuggccc

SEQ ID NO: 539877 - RNA, 19 nt, Artificial Sequence
  Description of Artificial Sequence: Synthetic oligonucleotide
  Sense strand starting at position 2287 of SEQ ID NO: 318141
cuaguauuagaguaauccu

SEQ ID NO: 539878 - RNA, 19 nt, Artificial Sequence
  Description of Artificial Sequence: Synthetic oligonucleotide
  Antisense strand to SEQ ID NO: 539877
aggauuacucuaauacuag

SEQ ID NO: 539879 - RNA, 19 nt, Artificial Sequence
  Description of Artificial Sequence: Synthetic oligonucleotide
  Sense strand starting at position 2290 of SEQ ID NO: 318141
guauuagaguaauccugaa

SEQ ID NO: 539880 - RNA, 19 nt, Artificial Sequence
  Description of Artificial Sequence: Synthetic oligonucleotide
  Antisense strand to SEQ ID NO: 539879
uucaggauuacucuaauac

SEQ ID NO: 539881 - RNA, 19 nt, Artificial Sequence
  Description of Artificial Sequence: Synthetic oligonucleotide
  Sense strand starting at position 2689 of SEQ ID NO: 318141
gugauacuggcucauucuu

SEQ ID NO: 539882 - RNA, 19 nt, Artificial Sequence
  Description of Artificial Sequence: Synthetic oligonucleotide
  Antisense strand to SEQ ID NO: 539881
aagaaugagccaguaucac

SEQ ID NO: 539883 - RNA, 19 nt, Artificial Sequence
  Description of Artificial Sequence: Synthetic oligonucleotide
  Sense strand starting at position 2715 of SEQ ID NO: 318141
gagggagccucuuuagaau

SEQ ID NO: 539884 - RNA, 19 nt, Artificial Sequence
  Description of Artificial Sequence: Synthetic oligonucleotide
  Antisense strand to SEQ ID NO: 539883
auucuaaagaggcucccuc

SEQ ID NO: 539885 - RNA, 19 nt, Artificial Sequence
  Description of Artificial Sequence: Synthetic oligonucleotide
  Sense strand starting at position 2721 of SEQ ID NO: 318141
gccucuuuagaauaagacu

SEQ ID NO: 539886 - RNA, 19 nt, Artificial Sequence
  Description of Artificial Sequence: Synthetic oligonucleotide
  Antisense strand to SEQ ID NO: 539885
agucuuauucuaaagaggc

SEQ ID NO: 539887 - RNA, 19 nt, Artificial Sequence
  Description of Artificial Sequence: Synthetic oligonucleotide
  Sense strand starting at position 3155 of SEQ ID NO: 318141
gaaccauugcuguaaauag

SEQ ID NO: 539888 - RNA, 19 nt, Artificial Sequence
  Description of Artificial Sequence: Synthetic oligonucleotide
  Antisense strand to SEQ ID NO: 539887
cuauuuacagcaaugguuc

SEQ ID NO: 539889 - RNA, 19 nt, Artificial Sequence
  Description of Artificial Sequence: Synthetic oligonucleotide
  Sense strand starting at position 3370 of SEQ ID NO: 318141
gguuccaaauguuuauauu

SEQ ID NO: 539890 - RNA, 19 nt, Artificial Sequence
  Description of Artificial Sequence: Synthetic oligonucleotide
  Antisense strand to SEQ ID NO: 539889
aauauaaacauuuggaacc

SEQ ID NO: 539891 - RNA, 19 nt, Artificial Sequence
  Description of Artificial Sequence: Synthetic oligonucleotide
  Sense strand starting at position 3478 of SEQ ID NO: 318141
cuuugcuugccauaagaaa

SEQ ID NO: 539892 - RNA, 19 nt, Artificial Sequence
  Description of Artificial Sequence: Synthetic oligonucleotide
  Antisense strand to SEQ ID NO: 539891
uuucuuauggcaagcaaag

SEQ ID NO: 539893 - RNA, 19 nt, Artificial Sequence
  Description of Artificial Sequence: Synthetic oligonucleotide
  Sense strand starting at position 3490 of SEQ ID NO: 318141
uaagaaauggcaugcaaga

SEQ ID NO: 539894 - RNA, 19 nt, Artificial Sequence
  Description of Artificial Sequence: Synthetic oligonucleotide
  Antisense strand to SEQ ID NO: 539893
ucuugcaugccauuucuua

SEQ ID NO: 539895 - RNA, 19 nt, Artificial Sequence
  Description of Artificial Sequence: Synthetic oligonucleotide
  Sense strand starting at position 3817 of SEQ ID NO: 318141
gaaagagccuugguccaga

SEQ ID NO: 539896 - RNA, 19 nt, Artificial Sequence
  Description of Artificial Sequence: Synthetic oligonucleotide
  Antisense strand to SEQ ID NO: 539895
ucuggaccaaggcucuuuc

SEQ ID NO: 539897 - RNA, 19 nt, Artificial Sequence
  Description of Artificial Sequence: Synthetic oligonucleotide
  Sense strand starting at position 3820 of SEQ ID NO: 318141
agagccuugguccagacaa

SEQ ID NO: 539898 - RNA, 19 nt, Artificial Sequence
  Description of Artificial Sequence: Synthetic oligonucleotide
  Antisense strand to SEQ ID NO: 539897
uugucuggaccaaggcucu

SEQ ID NO: 539899 - RNA, 19 nt, Artificial Sequence
  Description of Artificial Sequence: Synthetic oligonucleotide
  Sense strand starting at position 3822 of SEQ ID NO: 318141
agccuugguccagacaaga

SEQ ID NO: 539900 - RNA, 19 nt, Artificial Sequence
  Description of Artificial Sequence: Synthetic oligonucleotide
  Antisense strand to SEQ ID NO: 539899
ucuugucuggaccaaggcu

SEQ ID NO: 539901 - RNA, 19 nt, Artificial Sequence
  Description of Artificial Sequence: Synthetic oligonucleotide
  Sense strand starting at position 3833 of SEQ ID NO: 318141
agacaagauuguucugcca

SEQ ID NO: 539902 - RNA, 19 nt, Artificial Sequence
  Description of Artificial Sequence: Synthetic oligonucleotide
  Antisense strand to SEQ ID NO: 539901
uggcagaacaaucuugucu

SEQ ID NO: 539903 - RNA, 19 nt, Artificial Sequence
  Description of Artificial Sequence: Synthetic oligonucleotide
  Sense strand starting at position 3836 of SEQ ID NO: 318141
caagauuguucugccaaga

SEQ ID NO: 539904 - RNA, 19 nt, Artificial Sequence
  Description of Artificial Sequence: Synthetic oligonucleotide
  Antisense strand to SEQ ID NO: 539903
ucuuggcagaacaaucuug

SEQ ID NO: 539905 - RNA, 19 nt, Artificial Sequence
  Description of Artificial Sequence: Synthetic oligonucleotide
  Sense strand starting at position 3841 of SEQ ID NO: 318141
uuguucugccaagagaaug

SEQ ID NO: 539906 - RNA, 19 nt, Artificial Sequence
  Description of Artificial Sequence: Synthetic oligonucleotide
  Antisense strand to SEQ ID NO: 539905
cauucucuuggcagaacaa

SEQ ID NO: 539907 - RNA, 19 nt, Artificial Sequence
  Description of Artificial Sequence: Synthetic oligonucleotide
  Sense strand starting at position 3849 of SEQ ID NO: 318141
ccaagagaauggccguaaa

SEQ ID NO: 539908 - RNA, 19 nt, Artificial Sequence
  Description of Artificial Sequence: Synthetic oligonucleotide
  Antisense strand to SEQ ID NO: 539907
uuuacggccauucucuugg

SEQ ID NO: 539909 - RNA, 19 nt, Artificial Sequence
  Description of Artificial Sequence: Synthetic oligonucleotide
  Sense strand starting at position 3859 of SEQ ID NO: 318141
ggccguaaacaggauuagu

SEQ ID NO: 539910 - RNA, 19 nt, Artificial Sequence
  Description of Artificial Sequence: Synthetic oligonucleotide
  Antisense strand to SEQ ID NO: 539909
acuaauccuguuuacggcc

SEQ ID NO: 539911 - RNA, 19 nt, Artificial Sequence
  Description of Artificial Sequence: Synthetic oligonucleotide
  Sense strand starting at position 21 of SEQ ID NO: 318142
caguccauucuaggguaaa

SEQ ID NO: 539912 - RNA, 19 nt, Artificial Sequence
  Description of Artificial Sequence: Synthetic oligonucleotide
  Antisense strand to SEQ ID NO: 539911
uuuacccuagaauggacug

SEQ ID NO: 539913 - RNA, 19 nt, Artificial Sequence
  Description of Artificial Sequence: Synthetic oligonucleotide
  Sense strand starting at position 46 of SEQ ID NO: 318142
augcucucuggucaaauau

SEQ ID NO: 539914 - RNA, 19 nt, Artificial Sequence
  Description of Artificial Sequence: Synthetic oligonucleotide
  Antisense strand to SEQ ID NO: 539913
auauuugaccagagagcau

SEQ ID NO: 539915 - RNA, 19 nt, Artificial Sequence
  Description of Artificial Sequence: Synthetic oligonucleotide
  Sense strand starting at position 55 of SEQ ID NO: 318142
ggucaaauauagguucuau

SEQ ID NO: 539916 - RNA, 19 nt, Artificial Sequence
  Description of Artificial Sequence: Synthetic oligonucleotide
  Antisense strand to SEQ ID NO: 539915
auagaaccuauauuugacc

SEQ ID NO: 539917 - RNA, 19 nt, Artificial Sequence
  Description of Artificial Sequence: Synthetic oligonucleotide
  Sense strand starting at position 124 of SEQ ID NO: 318142
aaagaaguccugcaaaguc

SEQ ID NO: 539918 - RNA, 19 nt, Artificial Sequence
  Description of Artificial Sequence: Synthetic oligonucleotide
  Antisense strand to SEQ ID NO: 539917
gacuuugcaggacuucuuu

SEQ ID NO: 539919 - RNA, 19 nt, Artificial Sequence
  Description of Artificial Sequence: Synthetic oligonucleotide
  Sense strand starting at position 134 of SEQ ID NO: 318142
ugcaaaguccuggaugaca

SEQ ID NO: 539920 - RNA, 19 nt, Artificial Sequence
  Description of Artificial Sequence: Synthetic oligonucleotide
  Antisense strand to SEQ ID NO: 539919
ugucauccaggacuuugca

SEQ ID NO: 539921 - RNA, 19 nt, Artificial Sequence
  Description of Artificial Sequence: Synthetic oligonucleotide
  Sense strand starting at position 336 of SEQ ID NO: 318142
uuuaaaugcucagcauaag

SEQ ID NO: 539922 - RNA, 19 nt, Artificial Sequence
  Description of Artificial Sequence: Synthetic oligonucleotide
  Antisense strand to SEQ ID NO: 539921
cuuaugcugagcauuuaaa

SEQ ID NO: 539923 - RNA, 19 nt, Artificial Sequence
  Description of Artificial Sequence: Synthetic oligonucleotide
  Sense strand starting at position 337 of SEQ ID NO: 318142
uuaaaugcucagcauaaga

SEQ ID NO: 539924 - RNA, 19 nt, Artificial Sequence
  Description of Artificial Sequence: Synthetic oligonucleotide
  Antisense strand to SEQ ID NO: 539923
ucuuaugcugagcauuuaa

SEQ ID NO: 539925 - RNA, 19 nt, Artificial Sequence
  Description of Artificial Sequence: Synthetic oligonucleotide
  Sense strand starting at position 415 of SEQ ID NO: 318142
acuagugaaucaguucuau

SEQ ID NO: 539926 - RNA, 19 nt, Artificial Sequence
  Description of Artificial Sequence: Synthetic oligonucleotide
  Antisense strand to SEQ ID NO: 539925
auagaacugauucacuagu

SEQ ID NO: 539927 - RNA, 19 nt, Artificial Sequence
  Description of Artificial Sequence: Synthetic oligonucleotide
  Sense strand starting at position 426 of SEQ ID NO: 318142
aguucuauuguaggagaga

SEQ ID NO: 539928 - RNA, 19 nt, Artificial Sequence
  Description of Artificial Sequence: Synthetic oligonucleotide
  Antisense strand to SEQ ID NO: 539927
ucucuccuacaauagaacu

SEQ ID NO: 539929 - RNA, 19 nt, Artificial Sequence
  Description of Artificial Sequence: Synthetic oligonucleotide
  Sense strand starting at position 536 of SEQ ID NO: 318142
cuaacauaguuauuggcaa

SEQ ID NO: 539930 - RNA, 19 nt, Artificial Sequence
  Description of Artificial Sequence: Synthetic oligonucleotide
  Antisense strand to SEQ ID NO: 539929
uugccaauaacuauguuag

SEQ ID NO: 539931 - RNA, 19 nt, Artificial Sequence
  Description of Artificial Sequence: Synthetic oligonucleotide
  Sense strand starting at position 622 of SEQ ID NO: 318142
acagauugguuacaauuua

SEQ ID NO: 539932 - RNA, 19 nt, Artificial Sequence
  Description of Artificial Sequence: Synthetic oligonucleotide
  Antisense strand to SEQ ID NO: 539931
uaaauuguaaccaaucugu

SEQ ID NO: 539933 - RNA, 19 nt, Artificial Sequence
  Description of Artificial Sequence: Synthetic oligonucleotide
  Sense strand starting at position 729 of SEQ ID NO: 318142
ucuggaauggaacguuauu

SEQ ID NO: 539934 - RNA, 19 nt, Artificial Sequence
  Description of Artificial Sequence: Synthetic oligonucleotide
  Antisense strand to SEQ ID NO: 539933
aauaacguuccauuccaga

SEQ ID NO: 539935 - RNA, 19 nt, Artificial Sequence
  Description of Artificial Sequence: Synthetic oligonucleotide
  Sense strand starting at position 930 of SEQ ID NO: 318142
acaugaagauagucuguuu

SEQ ID NO: 539936 - RNA, 19 nt, Artificial Sequence
  Description of Artificial Sequence: Synthetic oligonucleotide
  Antisense strand to SEQ ID NO: 539935
aaacagacuaucuucaugu

SEQ ID NO: 539937 - RNA, 19 nt, Artificial Sequence
  Description of Artificial Sequence: Synthetic oligonucleotide
  Sense strand starting at position 1067 of SEQ ID NO: 318142
uugaaauaacuuugccaug

SEQ ID NO: 539938 - RNA, 19 nt, Artificial Sequence
  Description of Artificial Sequence: Synthetic oligonucleotide
  Antisense strand to SEQ ID NO: 539937
cauggcaaaguuauuucaa

SEQ ID NO: 539939 - RNA, 19 nt, Artificial Sequence
  Description of Artificial Sequence: Synthetic oligonucleotide
  Sense strand starting at position 1123 of SEQ ID NO: 318142
gggaguguugcugagguua

SEQ ID NO: 539940 - RNA, 19 nt, Artificial Sequence
  Description of Artificial Sequence: Synthetic oligonucleotide
  Antisense strand to SEQ ID NO: 539939
uaaccucagcaacacuccc

SEQ ID NO: 539941 - RNA, 19 nt, Artificial Sequence
  Description of Artificial Sequence: Synthetic oligonucleotide
  Sense strand starting at position 1229 of SEQ ID NO: 318142
ucugguuugcaacaaauau

SEQ ID NO: 539942 - RNA, 19 nt, Artificial Sequence
  Description of Artificial Sequence: Synthetic oligonucleotide
  Antisense strand to SEQ ID NO: 539941
auauuuguugcaaaccaga

SEQ ID NO: 539943 - RNA, 19 nt, Artificial Sequence
  Description of Artificial Sequence: Synthetic oligonucleotide
  Sense strand starting at position 1287 of SEQ ID NO: 318142
uguguuguggaguauuaaa

SEQ ID NO: 539944 - RNA, 19 nt, Artificial Sequence
  Description of Artificial Sequence: Synthetic oligonucleotide
  Antisense strand to SEQ ID NO: 539943
uuuaauacuccacaacaca

SEQ ID NO: 539945 - RNA, 19 nt, Artificial Sequence
  Description of Artificial Sequence: Synthetic oligonucleotide
  Sense strand starting at position 1357 of SEQ ID NO: 318142
guuuaaucucaacaccagu

SEQ ID NO: 539946 - RNA, 19 nt, Artificial Sequence
  Description of Artificial Sequence: Synthetic oligonucleotide
  Antisense strand to SEQ ID NO: 539945
acugguguugagauuaaac

SEQ ID NO: 539947 - RNA, 19 nt, Artificial Sequence
  Description of Artificial Sequence: Synthetic oligonucleotide
  Sense strand starting at position 1426 of SEQ ID NO: 318142
caggucuuggauuguagaa

SEQ ID NO: 539948 - RNA, 19 nt, Artificial Sequence
  Description of Artificial Sequence: Synthetic oligonucleotide
  Antisense strand to SEQ ID NO: 539947
uucuacaauccaagaccug

SEQ ID NO: 539949 - RNA, 19 nt, Artificial Sequence
  Description of Artificial Sequence: Synthetic oligonucleotide
  Sense strand starting at position 1444 of SEQ ID NO: 318142
agagacuucuaaguaguua

SEQ ID NO: 539950 - RNA, 19 nt, Artificial Sequence
  Description of Artificial Sequence: Synthetic oligonucleotide
  Antisense strand to SEQ ID NO: 539949
uaacuacuuagaagucucu

SEQ ID NO: 539951 - RNA, 19 nt, Artificial Sequence
  Description of Artificial Sequence: Synthetic oligonucleotide
  Sense strand starting at position 1455 of SEQ ID NO: 318142
aguaguuagcaagauguau

SEQ ID NO: 539952 - RNA, 19 nt, Artificial Sequence
  Description of Artificial Sequence: Synthetic oligonucleotide
  Antisense strand to SEQ ID NO: 539951
auacaucuugcuaacuacu

SEQ ID NO: 539953 - RNA, 19 nt, Artificial Sequence
  Description of Artificial Sequence: Synthetic oligonucleotide
  Sense strand starting at position 1464 of SEQ ID NO: 318142
caagauguaucacugacag

SEQ ID NO: 539954 - RNA, 19 nt, Artificial Sequence
  Description of Artificial Sequence: Synthetic oligonucleotide
  Antisense strand to SEQ ID NO: 539953
cugucagugauacaucuug

SEQ ID NO: 539955 - RNA, 19 nt, Artificial Sequence
  Description of Artificial Sequence: Synthetic oligonucleotide
  Sense strand starting at position 1481 of SEQ ID NO: 318142
agaauaacccagugccuaa

SEQ ID NO: 539956 - RNA, 19 nt, Artificial Sequence
  Description of Artificial Sequence: Synthetic oligonucleotide
  Antisense strand to SEQ ID NO: 539955
uuaggcacuggguuauucu

SEQ ID NO: 539957 - RNA, 19 nt, Artificial Sequence
  Description of Artificial Sequence: Synthetic oligonucleotide
  Sense strand starting at position 1580 of SEQ ID NO: 318142
ugcagagauuuaggagaaa

SEQ ID NO: 539958 - RNA, 19 nt, Artificial Sequence
  Description of Artificial Sequence: Synthetic oligonucleotide
  Antisense strand to SEQ ID NO: 539957
uuucuccuaaaucucugca

SEQ ID NO: 539959 - RNA, 19 nt, Artificial Sequence
  Description of Artificial Sequence: Synthetic oligonucleotide
  Sense strand starting at position 1603 of SEQ ID NO: 318142
acuuaaauaggaugugacu

SEQ ID NO: 539960 - RNA, 19 nt, Artificial Sequence
  Description of Artificial Sequence: Synthetic oligonucleotide
  Antisense strand to SEQ ID NO: 539959
agucacauccuauuuaagu

SEQ ID NO: 539961 - RNA, 19 nt, Artificial Sequence
  Description of Artificial Sequence: Synthetic oligonucleotide
  Sense strand starting at position 1617 of SEQ ID NO: 318142
ugacuugacguuuaggacu

SEQ ID NO: 539962 - RNA, 19 nt, Artificial Sequence
  Description of Artificial Sequence: Synthetic oligonucleotide
  Antisense strand to SEQ ID NO: 539961
aguccuaaacgucaaguca

SEQ ID NO: 539963 - RNA, 19 nt, Artificial Sequence
  Description of Artificial Sequence: Synthetic oligonucleotide
  Sense strand starting at position 1709 of SEQ ID NO: 318142
gaggcaagacuugggcaau

SEQ ID NO: 539964 - RNA, 19 nt, Artificial Sequence
  Description of Artificial Sequence: Synthetic oligonucleotide
  Antisense strand to SEQ ID NO: 539963
auugcccaagucuugccuc

SEQ ID NO: 539965 - RNA, 19 nt, Artificial Sequence
  Description of Artificial Sequence: Synthetic oligonucleotide
  Sense strand starting at position 1712 of SEQ ID NO: 318142
gcaagacuugggcaaugau

SEQ ID NO: 539966 - RNA, 19 nt, Artificial Sequence
  Description of Artificial Sequence: Synthetic oligonucleotide
  Antisense strand to SEQ ID NO: 539965
aucauugcccaagucuugc

SEQ ID NO: 539967 - RNA, 19 nt, Artificial Sequence
  Description of Artificial Sequence: Synthetic oligonucleotide
  Sense strand starting at position 1737 of SEQ ID NO: 318142
cagagauuccaagguucug

SEQ ID NO: 539968 - RNA, 19 nt, Artificial Sequence
  Description of Artificial Sequence: Synthetic oligonucleotide
  Antisense strand to SEQ ID NO: 539967
cagaaccuuggaaucucug

SEQ ID NO: 539969 - RNA, 19 nt, Artificial Sequence
  Description of Artificial Sequence: Synthetic oligonucleotide
  Sense strand starting at position 1816 of SEQ ID NO: 318142
gcaguccugggcugaauuu

SEQ ID NO: 539970 - RNA, 19 nt, Artificial Sequence
  Description of Artificial Sequence: Synthetic oligonucleotide
  Antisense strand to SEQ ID NO: 539969
aaauucagcccaggacugc

SEQ ID NO: 539971 - RNA, 19 nt, Artificial Sequence
  Description of Artificial Sequence: Synthetic oligonucleotide
  Sense strand starting at position 2110 of SEQ ID NO: 318142
gcuuucugacuugaguauu

SEQ ID NO: 539972 - RNA, 19 nt, Artificial Sequence
  Description of Artificial Sequence: Synthetic oligonucleotide
  Antisense strand to SEQ ID NO: 539971
aauacucaagucagaaagc

SEQ ID NO: 539973 - RNA, 19 nt, Artificial Sequence
  Description of Artificial Sequence: Synthetic oligonucleotide
  Sense strand starting at position 2296 of SEQ ID NO: 318142
uugguaaaggagugcuaua

SEQ ID NO: 539974 - RNA, 19 nt, Artificial Sequence
  Description of Artificial Sequence: Synthetic oligonucleotide
  Antisense strand to SEQ ID NO: 539973
uauagcacuccuuuaccaa

SEQ ID NO: 539975 - RNA, 19 nt, Artificial Sequence
  Description of Artificial Sequence: Synthetic oligonucleotide
  Sense strand starting at position 2519 of SEQ ID NO: 318142
augguuugagccuggaaag

SEQ ID NO: 539976 - RNA, 19 nt, Artificial Sequence
  Description of Artificial Sequence: Synthetic oligonucleotide
  Antisense strand to SEQ ID NO: 539975
cuuuccaggcucaaaccau

SEQ ID NO: 539977 - RNA, 19 nt, Artificial Sequence
  Description of Artificial Sequence: Synthetic oligonucleotide
  Sense strand starting at position 2750 of SEQ ID NO: 318142
gcagccuugacucaaguga

SEQ ID NO: 539978 - RNA, 19 nt, Artificial Sequence
  Description of Artificial Sequence: Synthetic oligonucleotide
  Antisense strand to SEQ ID NO: 539977
ucacuugagucaaggcugc

SEQ ID NO: 539979 - RNA, 19 nt, Artificial Sequence
  Description of Artificial Sequence: Synthetic oligonucleotide
  Sense strand starting at position 3542 of SEQ ID NO: 318142
augccuggccuuuaaagau

SEQ ID NO: 539980 - RNA, 19 nt, Artificial Sequence
  Description of Artificial Sequence: Synthetic oligonucleotide
  Antisense strand to SEQ ID NO: 539979
aucuuuaaaggccaggcau

SEQ ID NO: 539981 - RNA, 19 nt, Artificial Sequence
  Description of Artificial Sequence: Synthetic oligonucleotide
  Sense strand starting at position 3714 of SEQ ID NO: 318142
agugguuguaaccaauguu

SEQ ID NO: 539982 - RNA, 19 nt, Artificial Sequence
  Description of Artificial Sequence: Synthetic oligonucleotide
  Antisense strand to SEQ ID NO: 539981
aacauugguuacaaccacu

SEQ ID NO: 539983 - RNA, 19 nt, Artificial Sequence
  Description of Artificial Sequence: Synthetic oligonucleotide
  Sense strand starting at position 3747 of SEQ ID NO: 318142
guuguugaggauugucaaa

SEQ ID NO: 539984 - RNA, 19 nt, Artificial Sequence
  Description of Artificial Sequence: Synthetic oligonucleotide
  Antisense strand to SEQ ID NO: 539983
uuugacaauccucaacaac

SEQ ID NO: 539985 - RNA, 19 nt, Artificial Sequence
  Description of Artificial Sequence: Synthetic oligonucleotide
  Sense strand starting at position 3749 of SEQ ID NO: 318142
uguugaggauugucaaacu

SEQ ID NO: 539986 - RNA, 19 nt, Artificial Sequence
  Description of Artificial Sequence: Synthetic oligonucleotide
  Antisense strand to SEQ ID NO: 539985
aguuugacaauccucaaca

SEQ ID NO: 539987 - RNA, 19 nt, Artificial Sequence
  Description of Artificial Sequence: Synthetic oligonucleotide
  Sense strand starting at position 3834 of SEQ ID NO: 318142
auuccauaacuagguugua

SEQ ID NO: 539988 - RNA, 19 nt, Artificial Sequence
  Description of Artificial Sequence: Synthetic oligonucleotide
  Antisense strand to SEQ ID NO: 539987
uacaaccuaguuauggaau

SEQ ID NO: 539989 - RNA, 19 nt, Artificial Sequence
  Description of Artificial Sequence: Synthetic oligonucleotide
  Sense strand starting at position 3835 of SEQ ID NO: 318142
uuccauaacuagguuguau

SEQ ID NO: 539990 - RNA, 19 nt, Artificial Sequence
  Description of Artificial Sequence: Synthetic oligonucleotide
  Antisense strand to SEQ ID NO: 539989
auacaaccuaguuauggaa

SEQ ID NO: 539991 - RNA, 19 nt, Artificial Sequence
  Description of Artificial Sequence: Synthetic oligonucleotide
  Sense strand starting at position 143 of SEQ ID NO: 318143
ccagauugugcagacauaa

SEQ ID NO: 539992 - RNA, 19 nt, Artificial Sequence
  Description of Artificial Sequence: Synthetic oligonucleotide
  Antisense strand to SEQ ID NO: 539991
uuaugucugcacaaucugg

SEQ ID NO: 539993 - RNA, 19 nt, Artificial Sequence
  Description of Artificial Sequence: Synthetic oligonucleotide
  Sense strand starting at position 216 of SEQ ID NO: 318143
ugaagaaaguauccgcaga

SEQ ID NO: 539994 - RNA, 19 nt, Artificial Sequence
  Description of Artificial Sequence: Synthetic oligonucleotide
  Antisense strand to SEQ ID NO: 539993
ucugcggauacuuucuuca

SEQ ID NO: 539995 - RNA, 19 nt, Artificial Sequence
  Description of Artificial Sequence: Synthetic oligonucleotide
  Sense strand starting at position 218 of SEQ ID NO: 318143
aagaaaguauccgcagaug

SEQ ID NO: 539996 - RNA, 19 nt, Artificial Sequence
  Description of Artificial Sequence: Synthetic oligonucleotide
  Antisense strand to SEQ ID NO: 539995
caucugcggauacuuucuu

SEQ ID NO: 539997 - RNA, 19 nt, Artificial Sequence
  Description of Artificial Sequence: Synthetic oligonucleotide
  Sense strand starting at position 402 of SEQ ID NO: 318143
cagcuuaagccaugggaag

SEQ ID NO: 539998 - RNA, 19 nt, Artificial Sequence
  Description of Artificial Sequence: Synthetic oligonucleotide
  Antisense strand to SEQ ID NO: 539997
cuucccauggcuuaagcug

SEQ ID NO: 539999 - RNA, 19 nt, Artificial Sequence
  Description of Artificial Sequence: Synthetic oligonucleotide
  Sense strand starting at position 525 of SEQ ID NO: 318143
uguggauucuguguagcag

SEQ ID NO: 540000 - RNA, 19 nt, Artificial Sequence
  Description of Artificial Sequence: Synthetic oligonucleotide
  Antisense strand to SEQ ID NO: 539999
cugcuacacagaauccaca

SEQ ID NO: 540001 - RNA, 19 nt, Artificial Sequence
  Description of Artificial Sequence: Synthetic oligonucleotide
  Sense strand starting at position 691 of SEQ ID NO: 318143
cuccacuguccaggugaaa

SEQ ID NO: 540002 - RNA, 19 nt, Artificial Sequence
  Description of Artificial Sequence: Synthetic oligonucleotide
  Antisense strand to SEQ ID NO: 540001
uuucaccuggacaguggag

SEQ ID NO: 540003 - RNA, 19 nt, Artificial Sequence
  Description of Artificial Sequence: Synthetic oligonucleotide
  Sense strand starting at position 725 of SEQ ID NO: 318143
gagugaacugcugggcuua

SEQ ID NO: 540004 - RNA, 19 nt, Artificial Sequence
  Description of Artificial Sequence: Synthetic oligonucleotide
  Antisense strand to SEQ ID NO: 540003
uaagcccagcaguucacuc

SEQ ID NO: 540005 - RNA, 19 nt, Artificial Sequence
  Description of Artificial Sequence: Synthetic oligonucleotide
  Sense strand starting at position 727 of SEQ ID NO: 318143
gugaacugcugggcuuaga

SEQ ID NO: 540006 - RNA, 19 nt, Artificial Sequence
  Description of Artificial Sequence: Synthetic oligonucleotide
  Antisense strand to SEQ ID NO: 540005
ucuaagcccagcaguucac

SEQ ID NO: 540007 - RNA, 19 nt, Artificial Sequence
  Description of Artificial Sequence: Synthetic oligonucleotide
  Sense strand starting at position 730 of SEQ ID NO: 318143
aacugcugggcuuagagau

SEQ ID NO: 540008 - RNA, 19 nt, Artificial Sequence
  Description of Artificial Sequence: Synthetic oligonucleotide
  Antisense strand to SEQ ID NO: 540007
aucucuaagcccagcaguu

SEQ ID NO: 540009 - RNA, 19 nt, Artificial Sequence
  Description of Artificial Sequence: Synthetic oligonucleotide
  Sense strand starting at position 748 of SEQ ID NO: 318143
ucagacaaaucagaguuua

SEQ ID NO: 540010 - RNA, 19 nt, Artificial Sequence
  Description of Artificial Sequence: Synthetic oligonucleotide
  Antisense strand to SEQ ID NO: 540009
uaaacucugauuugucuga

SEQ ID NO: 540011 - RNA, 19 nt, Artificial Sequence
  Description of Artificial Sequence: Synthetic oligonucleotide
  Sense strand starting at position 780 of SEQ ID NO: 318143
acauuugcuagcuggguua

SEQ ID NO: 540012 - RNA, 19 nt, Artificial Sequence
  Description of Artificial Sequence: Synthetic oligonucleotide
  Antisense strand to SEQ ID NO: 540011
uaacccagcuagcaaaugu

SEQ ID NO: 540013 - RNA, 19 nt, Artificial Sequence
  Description of Artificial Sequence: Synthetic oligonucleotide
  Sense strand starting at position 791 of SEQ ID NO: 318143
cuggguuaucuuuguauag

SEQ ID NO: 540014 - RNA, 19 nt, Artificial Sequence
  Description of Artificial Sequence: Synthetic oligonucleotide
  Antisense strand to SEQ ID NO: 540013
cuauacaaagauaacccag

SEQ ID NO: 540015 - RNA, 19 nt, Artificial Sequence
  Description of Artificial Sequence: Synthetic oligonucleotide
  Sense strand starting at position 792 of SEQ ID NO: 318143
uggguuaucuuuguauagu

SEQ ID NO: 540016 - RNA, 19 nt, Artificial Sequence
  Description of Artificial Sequence: Synthetic oligonucleotide
  Antisense strand to SEQ ID NO: 540015
acuauacaaagauaaccca

SEQ ID NO: 540017 - RNA, 19 nt, Artificial Sequence
  Description of Artificial Sequence: Synthetic oligonucleotide
  Sense strand starting at position 795 of SEQ ID NO: 318143
guuaucuuuguauagucau

SEQ ID NO: 540018 - RNA, 19 nt, Artificial Sequence
  Description of Artificial Sequence: Synthetic oligonucleotide
  Antisense strand to SEQ ID NO: 540017
augacuauacaaagauaac

SEQ ID NO: 540019 - RNA, 19 nt, Artificial Sequence
  Description of Artificial Sequence: Synthetic oligonucleotide
  Sense strand starting at position 798 of SEQ ID NO: 318143
aucuuuguauagucaugaa

SEQ ID NO: 540020 - RNA, 19 nt, Artificial Sequence
  Description of Artificial Sequence: Synthetic oligonucleotide
  Antisense strand to SEQ ID NO: 540019
uucaugacuauacaaagau

SEQ ID NO: 540021 - RNA, 19 nt, Artificial Sequence
  Description of Artificial Sequence: Synthetic oligonucleotide
  Sense strand starting at position 828 of SEQ ID NO: 318143
ucaaacagcuuguuugaaa

SEQ ID NO: 540022 - RNA, 19 nt, Artificial Sequence
  Description of Artificial Sequence: Synthetic oligonucleotide
  Antisense strand to SEQ ID NO: 540021
uuucaaacaagcuguuuga

SEQ ID NO: 540023 - RNA, 19 nt, Artificial Sequence
  Description of Artificial Sequence: Synthetic oligonucleotide
  Sense strand starting at position 869 of SEQ ID NO: 318143
aaggucagugccuaauaca

SEQ ID NO: 540024 - RNA, 19 nt, Artificial Sequence
  Description of Artificial Sequence: Synthetic oligonucleotide
  Antisense strand to SEQ ID NO: 540023
uguauuaggcacugaccuu

SEQ ID NO: 540025 - RNA, 19 nt, Artificial Sequence
  Description of Artificial Sequence: Synthetic oligonucleotide
  Sense strand starting at position 970 of SEQ ID NO: 318143
acuacuuucuggcuaugua

SEQ ID NO: 540026 - RNA, 19 nt, Artificial Sequence
  Description of Artificial Sequence: Synthetic oligonucleotide
  Antisense strand to SEQ ID NO: 540025
uacauagccagaaaguagu

SEQ ID NO: 540027 - RNA, 19 nt, Artificial Sequence
  Description of Artificial Sequence: Synthetic oligonucleotide
  Sense strand starting at position 971 of SEQ ID NO: 318143
cuacuuucuggcuauguaa

SEQ ID NO: 540028 - RNA, 19 nt, Artificial Sequence
  Description of Artificial Sequence: Synthetic oligonucleotide
  Antisense strand to SEQ ID NO: 540027
uuacauagccagaaaguag

SEQ ID NO: 540029 - RNA, 19 nt, Artificial Sequence
  Description of Artificial Sequence: Synthetic oligonucleotide
  Sense strand starting at position 1019 of SEQ ID NO: 318143
cuuagcuucucagugggua

SEQ ID NO: 540030 - RNA, 19 nt, Artificial Sequence
  Description of Artificial Sequence: Synthetic oligonucleotide
  Antisense strand to SEQ ID NO: 540029
uacccacugagaagcuaag

SEQ ID NO: 540031 - RNA, 19 nt, Artificial Sequence
  Description of Artificial Sequence: Synthetic oligonucleotide
  Sense strand starting at position 1020 of SEQ ID NO: 318143
uuagcuucucaguggguaa

SEQ ID NO: 540032 - RNA, 19 nt, Artificial Sequence
  Description of Artificial Sequence: Synthetic oligonucleotide
  Antisense strand to SEQ ID NO: 540031
uuacccacugagaagcuaa

SEQ ID NO: 540033 - RNA, 19 nt, Artificial Sequence
  Description of Artificial Sequence: Synthetic oligonucleotide
  Sense strand starting at position 1144 of SEQ ID NO: 318143
uuauuauugguggguguga

SEQ ID NO: 540034 - RNA, 19 nt, Artificial Sequence
  Description of Artificial Sequence: Synthetic oligonucleotide
  Antisense strand to SEQ ID NO: 540033
ucacacccaccaauaauaa

SEQ ID NO: 540035 - RNA, 19 nt, Artificial Sequence
  Description of Artificial Sequence: Synthetic oligonucleotide
  Sense strand starting at position 1153 of SEQ ID NO: 318143
gugggugugaccgagauga

SEQ ID NO: 540036 - RNA, 19 nt, Artificial Sequence
  Description of Artificial Sequence: Synthetic oligonucleotide
  Antisense strand to SEQ ID NO: 540035
ucaucucggucacacccac

SEQ ID NO: 540037 - RNA, 19 nt, Artificial Sequence
  Description of Artificial Sequence: Synthetic oligonucleotide
  Sense strand starting at position 1191 of SEQ ID NO: 318143
ggugcaaaccuauaaacga

SEQ ID NO: 540038 - RNA, 19 nt, Artificial Sequence
  Description of Artificial Sequence: Synthetic oligonucleotide
  Antisense strand to SEQ ID NO: 540037
ucguuuauagguuugcacc

SEQ ID NO: 540039 - RNA, 19 nt, Artificial Sequence
  Description of Artificial Sequence: Synthetic oligonucleotide
  Sense strand starting at position 1476 of SEQ ID NO: 318143
agaugcucugcucaggaga

SEQ ID NO: 540040 - RNA, 19 nt, Artificial Sequence
  Description of Artificial Sequence: Synthetic oligonucleotide
  Antisense strand to SEQ ID NO: 540039
ucuccugagcagagcaucu

SEQ ID NO: 540041 - RNA, 19 nt, Artificial Sequence
  Description of Artificial Sequence: Synthetic oligonucleotide
  Sense strand starting at position 1576 of SEQ ID NO: 318143
ggcuuaaugagcgaaugcu

SEQ ID NO: 540042 - RNA, 19 nt, Artificial Sequence
  Description of Artificial Sequence: Synthetic oligonucleotide
  Antisense strand to SEQ ID NO: 540041
agcauucgcucauuaagcc

SEQ ID NO: 540043 - RNA, 19 nt, Artificial Sequence
  Description of Artificial Sequence: Synthetic oligonucleotide
  Sense strand starting at position 1622 of SEQ ID NO: 318143
caguuauauccgcagucac

SEQ ID NO: 540044 - RNA, 19 nt, Artificial Sequence
  Description of Artificial Sequence: Synthetic oligonucleotide
  Antisense strand to SEQ ID NO: 540043
gugacugcggauauaacug

SEQ ID NO: 540045 - RNA, 19 nt, Artificial Sequence
  Description of Artificial Sequence: Synthetic oligonucleotide
  Sense strand starting at position 1995 of SEQ ID NO: 318143
gguucuuucgagcgacaag

SEQ ID NO: 540046 - RNA, 19 nt, Artificial Sequence
  Description of Artificial Sequence: Synthetic oligonucleotide
  Antisense strand to SEQ ID NO: 540045
cuugucgcucgaaagaacc

SEQ ID NO: 540047 - RNA, 19 nt, Artificial Sequence
  Description of Artificial Sequence: Synthetic oligonucleotide
  Sense strand starting at position 1996 of SEQ ID NO: 318143
guucuuucgagcgacaaga

SEQ ID NO: 540048 - RNA, 19 nt, Artificial Sequence
  Description of Artificial Sequence: Synthetic oligonucleotide
  Antisense strand to SEQ ID NO: 540047
ucuugucgcucgaaagaac

SEQ ID NO: 540049 - RNA, 19 nt, Artificial Sequence
  Description of Artificial Sequence: Synthetic oligonucleotide
  Sense strand starting at position 2015 of SEQ ID NO: 318143
gcuguaaccagucacggaa

SEQ ID NO: 540050 - RNA, 19 nt, Artificial Sequence
  Description of Artificial Sequence: Synthetic oligonucleotide
  Antisense strand to SEQ ID NO: 540049
uuccgugacugguuacagc

SEQ ID NO: 540051 - RNA, 19 nt, Artificial Sequence
  Description of Artificial Sequence: Synthetic oligonucleotide
  Sense strand starting at position 2155 of SEQ ID NO: 318143
gggcggauucgcgaagacu

SEQ ID NO: 540052 - RNA, 19 nt, Artificial Sequence
  Description of Artificial Sequence: Synthetic oligonucleotide
  Antisense strand to SEQ ID NO: 540051
agucuucgcgaauccgccc

SEQ ID NO: 540053 - RNA, 19 nt, Artificial Sequence
  Description of Artificial Sequence: Synthetic oligonucleotide
  Sense strand starting at position 2157 of SEQ ID NO: 318143
gcggauucgcgaagacuag

SEQ ID NO: 540054 - RNA, 19 nt, Artificial Sequence
  Description of Artificial Sequence: Synthetic oligonucleotide
  Antisense strand to SEQ ID NO: 540053
cuagucuucgcgaauccgc

SEQ ID NO: 540055 - RNA, 19 nt, Artificial Sequence
  Description of Artificial Sequence: Synthetic oligonucleotide
  Sense strand starting at position 2198 of SEQ ID NO: 318143
aagucccgucucuggaaua

SEQ ID NO: 540056 - RNA, 19 nt, Artificial Sequence
  Description of Artificial Sequence: Synthetic oligonucleotide
  Antisense strand to SEQ ID NO: 540055
uauuccagagacgggacuu

SEQ ID NO: 540057 - RNA, 19 nt, Artificial Sequence
  Description of Artificial Sequence: Synthetic oligonucleotide
  Sense strand starting at position 2255 of SEQ ID NO: 318143
ggcggaguccugcauucca

SEQ ID NO: 540058 - RNA, 19 nt, Artificial Sequence
  Description of Artificial Sequence: Synthetic oligonucleotide
  Antisense strand to SEQ ID NO: 540057
uggaaugcaggacuccgcc

SEQ ID NO: 540059 - RNA, 19 nt, Artificial Sequence
  Description of Artificial Sequence: Synthetic oligonucleotide
  Sense strand starting at position 2455 of SEQ ID NO: 318143
cccagugaugacuggaacu

SEQ ID NO: 540060 - RNA, 19 nt, Artificial Sequence
  Description of Artificial Sequence: Synthetic oligonucleotide
  Antisense strand to SEQ ID NO: 540059
aguuccagucaucacuggg

SEQ ID NO: 540061 - RNA, 19 nt, Artificial Sequence
  Description of Artificial Sequence: Synthetic oligonucleotide
  Sense strand starting at position 2468 of SEQ ID NO: 318143
ggaacucaucccuaugcaa

SEQ ID NO: 540062 - RNA, 19 nt, Artificial Sequence
  Description of Artificial Sequence: Synthetic oligonucleotide
  Antisense strand to SEQ ID NO: 540061
uugcauagggaugaguucc

SEQ ID NO: 540063 - RNA, 19 nt, Artificial Sequence
  Description of Artificial Sequence: Synthetic oligonucleotide
  Sense strand starting at position 2508 of SEQ ID NO: 318143
gcaaguaacguccauggaa

SEQ ID NO: 540064 - RNA, 19 nt, Artificial Sequence
  Description of Artificial Sequence: Synthetic oligonucleotide
  Antisense strand to SEQ ID NO: 540063
uuccauggacguuacuugc

SEQ ID NO: 540065 - RNA, 19 nt, Artificial Sequence
  Description of Artificial Sequence: Synthetic oligonucleotide
  Sense strand starting at position 2530 of SEQ ID NO: 318143
ccaggaaagcugugaauca

SEQ ID NO: 540066 - RNA, 19 nt, Artificial Sequence
  Description of Artificial Sequence: Synthetic oligonucleotide
  Antisense strand to SEQ ID NO: 540065
ugauucacagcuuuccugg

SEQ ID NO: 540067 - RNA, 19 nt, Artificial Sequence
  Description of Artificial Sequence: Synthetic oligonucleotide
  Sense strand starting at position 2539 of SEQ ID NO: 318143
cugugaaucagaggucgaa

SEQ ID NO: 540068 - RNA, 19 nt, Artificial Sequence
  Description of Artificial Sequence: Synthetic oligonucleotide
  Antisense strand to SEQ ID NO: 540067
uucgaccucugauucacag

SEQ ID NO: 540069 - RNA, 19 nt, Artificial Sequence
  Description of Artificial Sequence: Synthetic oligonucleotide
  Sense strand starting at position 3982 of SEQ ID NO: 318143
ucuugugguguguauggaa

SEQ ID NO: 540070 - RNA, 19 nt, Artificial Sequence
  Description of Artificial Sequence: Synthetic oligonucleotide
  Antisense strand to SEQ ID NO: 540069
uuccauacacaccacaaga

SEQ ID NO: 540071 - RNA, 19 nt, Artificial Sequence
  Description of Artificial Sequence: Synthetic oligonucleotide
  Sense strand starting at position 54 of SEQ ID NO: 318144
aguucuuuaugaccagaua

SEQ ID NO: 540072 - RNA, 19 nt, Artificial Sequence
  Description of Artificial Sequence: Synthetic oligonucleotide
  Antisense strand to SEQ ID NO: 540071
uaucuggucauaaagaacu

SEQ ID NO: 540073 - RNA, 19 nt, Artificial Sequence
  Description of Artificial Sequence: Synthetic oligonucleotide
  Sense strand starting at position 57 of SEQ ID NO: 318144
ucuuuaugaccagauagca

SEQ ID NO: 540074 - RNA, 19 nt, Artificial Sequence
  Description of Artificial Sequence: Synthetic oligonucleotide
  Antisense strand to SEQ ID NO: 540073
ugcuaucuggucauaaaga

SEQ ID NO: 540075 - RNA, 19 nt, Artificial Sequence
  Description of Artificial Sequence: Synthetic oligonucleotide
  Sense strand starting at position 108 of SEQ ID NO: 318144
ggacacaauuccuuacguu

SEQ ID NO: 540076 - RNA, 19 nt, Artificial Sequence
  Description of Artificial Sequence: Synthetic oligonucleotide
  Antisense strand to SEQ ID NO: 540075
aacguaaggaauugugucc

SEQ ID NO: 540077 - RNA, 19 nt, Artificial Sequence
  Description of Artificial Sequence: Synthetic oligonucleotide
  Sense strand starting at position 166 of SEQ ID NO: 318144
auauuaaggcaauagucau

SEQ ID NO: 540078 - RNA, 19 nt, Artificial Sequence
  Description of Artificial Sequence: Synthetic oligonucleotide
  Antisense strand to SEQ ID NO: 540077
augacuauugccuuaauau

SEQ ID NO: 540079 - RNA, 19 nt, Artificial Sequence
  Description of Artificial Sequence: Synthetic oligonucleotide
  Sense strand starting at position 406 of SEQ ID NO: 318144
agaaucaucucaucgauua

SEQ ID NO: 540080 - RNA, 19 nt, Artificial Sequence
  Description of Artificial Sequence: Synthetic oligonucleotide
  Antisense strand to SEQ ID NO: 540079
uaaucgaugagaugauucu

SEQ ID NO: 540081 - RNA, 19 nt, Artificial Sequence
  Description of Artificial Sequence: Synthetic oligonucleotide
  Sense strand starting at position 439 of SEQ ID NO: 318144
ugagaucuauaucugaagu

SEQ ID NO: 540082 - RNA, 19 nt, Artificial Sequence
  Description of Artificial Sequence: Synthetic oligonucleotide
  Antisense strand to SEQ ID NO: 540081
acuucagauauagaucuca

SEQ ID NO: 540083 - RNA, 19 nt, Artificial Sequence
  Description of Artificial Sequence: Synthetic oligonucleotide
  Sense strand starting at position 567 of SEQ ID NO: 318144
guucccuuuccugaaggaa

SEQ ID NO: 540084 - RNA, 19 nt, Artificial Sequence
  Description of Artificial Sequence: Synthetic oligonucleotide
  Antisense strand to SEQ ID NO: 540083
uuccuucaggaaagggaac

SEQ ID NO: 540085 - RNA, 19 nt, Artificial Sequence
  Description of Artificial Sequence: Synthetic oligonucleotide
  Sense strand starting at position 570 of SEQ ID NO: 318144
cccuuuccugaaggaaacu

SEQ ID NO: 540086 - RNA, 19 nt, Artificial Sequence
  Description of Artificial Sequence: Synthetic oligonucleotide
  Antisense strand to SEQ ID NO: 540085
aguuuccuucaggaaaggg

SEQ ID NO: 540087 - RNA, 19 nt, Artificial Sequence
  Description of Artificial Sequence: Synthetic oligonucleotide
  Sense strand starting at position 754 of SEQ ID NO: 318144
uaguuugaugaacggcuua

SEQ ID NO: 540088 - RNA, 19 nt, Artificial Sequence
  Description of Artificial Sequence: Synthetic oligonucleotide
  Antisense strand to SEQ ID NO: 540087
uaagccguucaucaaacua

SEQ ID NO: 540089 - RNA, 19 nt, Artificial Sequence
  Description of Artificial Sequence: Synthetic oligonucleotide
  Sense strand starting at position 764 of SEQ ID NO: 318144
aacggcuuagccuaggauu

SEQ ID NO: 540090 - RNA, 19 nt, Artificial Sequence
  Description of Artificial Sequence: Synthetic oligonucleotide
  Antisense strand to SEQ ID NO: 540089
aauccuaggcuaagccguu

SEQ ID NO: 540091 - RNA, 19 nt, Artificial Sequence
  Description of Artificial Sequence: Synthetic oligonucleotide
  Sense strand starting at position 812 of SEQ ID NO: 318144
gugaacagaucccuucuuu

SEQ ID NO: 540092 - RNA, 19 nt, Artificial Sequence
  Description of Artificial Sequence: Synthetic oligonucleotide
  Antisense strand to SEQ ID NO: 540091
aaagaagggaucuguucac

SEQ ID NO: 540093 - RNA, 19 nt, Artificial Sequence
  Description of Artificial Sequence: Synthetic oligonucleotide
  Sense strand starting at position 869 of SEQ ID NO: 318144
ugaauuccuuccucaagag

SEQ ID NO: 540094 - RNA, 19 nt, Artificial Sequence
  Description of Artificial Sequence: Synthetic oligonucleotide
  Antisense strand to SEQ ID NO: 540093
cucuugaggaaggaauuca

SEQ ID NO: 540095 - RNA, 19 nt, Artificial Sequence
  Description of Artificial Sequence: Synthetic oligonucleotide
  Sense strand starting at position 992 of SEQ ID NO: 318144
gggugugucauacagcauc

SEQ ID NO: 540096 - RNA, 19 nt, Artificial Sequence
  Description of Artificial Sequence: Synthetic oligonucleotide
  Antisense strand to SEQ ID NO: 540095
gaugcuguaugacacaccc

SEQ ID NO: 540097 - RNA, 19 nt, Artificial Sequence
  Description of Artificial Sequence: Synthetic oligonucleotide
  Sense strand starting at position 1151 of SEQ ID NO: 318144
auggauuucgcauggucau

SEQ ID NO: 540098 - RNA, 19 nt, Artificial Sequence
  Description of Artificial Sequence: Synthetic oligonucleotide
  Antisense strand to SEQ ID NO: 540097
augaccaugcgaaauccau

SEQ ID NO: 540099 - RNA, 19 nt, Artificial Sequence
  Description of Artificial Sequence: Synthetic oligonucleotide
  Sense strand starting at position 1152 of SEQ ID NO: 318144
uggauuucgcauggucauu

SEQ ID NO: 540100 - RNA, 19 nt, Artificial Sequence
  Description of Artificial Sequence: Synthetic oligonucleotide
  Antisense strand to SEQ ID NO: 540099
aaugaccaugcgaaaucca

SEQ ID NO: 540101 - RNA, 19 nt, Artificial Sequence
  Description of Artificial Sequence: Synthetic oligonucleotide
  Sense strand starting at position 1163 of SEQ ID NO: 318144
uggucauuguaccuggaau

SEQ ID NO: 540102 - RNA, 19 nt, Artificial Sequence
  Description of Artificial Sequence: Synthetic oligonucleotide
  Antisense strand to SEQ ID NO: 540101
auuccagguacaaugacca

SEQ ID NO: 540103 - RNA, 19 nt, Artificial Sequence
  Description of Artificial Sequence: Synthetic oligonucleotide
  Sense strand starting at position 1164 of SEQ ID NO: 318144
ggucauuguaccuggaaua

SEQ ID NO: 540104 - RNA, 19 nt, Artificial Sequence
  Description of Artificial Sequence: Synthetic oligonucleotide
  Antisense strand to SEQ ID NO: 540103
uauuccagguacaaugacc

SEQ ID NO: 540105 - RNA, 19 nt, Artificial Sequence
  Description of Artificial Sequence: Synthetic oligonucleotide
  Sense strand starting at position 1165 of SEQ ID NO: 318144
gucauuguaccuggaauau

SEQ ID NO: 540106 - RNA, 19 nt, Artificial Sequence
  Description of Artificial Sequence: Synthetic oligonucleotide
  Antisense strand to SEQ ID NO: 540105
auauuccagguacaaugac

SEQ ID NO: 540107 - RNA, 19 nt, Artificial Sequence
  Description of Artificial Sequence: Synthetic oligonucleotide
  Sense strand starting at position 1332 of SEQ ID NO: 318144
cggguaaagcucguugcaa

SEQ ID NO: 540108 - RNA, 19 nt, Artificial Sequence
  Description of Artificial Sequence: Synthetic oligonucleotide
  Antisense strand to SEQ ID NO: 540107
uugcaacgagcuuuacccg

SEQ ID NO: 540109 - RNA, 19 nt, Artificial Sequence
  Description of Artificial Sequence: Synthetic oligonucleotide
  Sense strand starting at position 1582 of SEQ ID NO: 318144
ggaagaagcuuccuggcaa

SEQ ID NO: 540110 - RNA, 19 nt, Artificial Sequence
  Description of Artificial Sequence: Synthetic oligonucleotide
  Antisense strand to SEQ ID NO: 540109
uugccaggaagcuucuucc

SEQ ID NO: 540111 - RNA, 19 nt, Artificial Sequence
  Description of Artificial Sequence: Synthetic oligonucleotide
  Sense strand starting at position 2426 of SEQ ID NO: 318144
aucgcuacuggcuaauauu

SEQ ID NO: 540112 - RNA, 19 nt, Artificial Sequence
  Description of Artificial Sequence: Synthetic oligonucleotide
  Antisense strand to SEQ ID NO: 540111
aauauuagccaguagcgau

SEQ ID NO: 540113 - RNA, 19 nt, Artificial Sequence
  Description of Artificial Sequence: Synthetic oligonucleotide
  Sense strand starting at position 2434 of SEQ ID NO: 318144
uggcuaauauuguuaguaa

SEQ ID NO: 540114 - RNA, 19 nt, Artificial Sequence
  Description of Artificial Sequence: Synthetic oligonucleotide
  Antisense strand to SEQ ID NO: 540113
uuacuaacaauauuagcca

SEQ ID NO: 540115 - RNA, 19 nt, Artificial Sequence
  Description of Artificial Sequence: Synthetic oligonucleotide
  Sense strand starting at position 2458 of SEQ ID NO: 318144
uuaagugaaugguugcuua

SEQ ID NO: 540116 - RNA, 19 nt, Artificial Sequence
  Description of Artificial Sequence: Synthetic oligonucleotide
  Antisense strand to SEQ ID NO: 540115
uaagcaaccauucacuuaa

SEQ ID NO: 540117 - RNA, 19 nt, Artificial Sequence
  Description of Artificial Sequence: Synthetic oligonucleotide
  Sense strand starting at position 2753 of SEQ ID NO: 318144
ugugaagguuuccuacaau

SEQ ID NO: 540118 - RNA, 19 nt, Artificial Sequence
  Description of Artificial Sequence: Synthetic oligonucleotide
  Antisense strand to SEQ ID NO: 540117
auuguaggaaaccuucaca

SEQ ID NO: 540119 - RNA, 19 nt, Artificial Sequence
  Description of Artificial Sequence: Synthetic oligonucleotide
  Sense strand starting at position 2756 of SEQ ID NO: 318144
gaagguuuccuacaaugca

SEQ ID NO: 540120 - RNA, 19 nt, Artificial Sequence
  Description of Artificial Sequence: Synthetic oligonucleotide
  Antisense strand to SEQ ID NO: 540119
ugcauuguaggaaaccuuc

SEQ ID NO: 540121 - RNA, 19 nt, Artificial Sequence
  Description of Artificial Sequence: Synthetic oligonucleotide
  Sense strand starting at position 2759 of SEQ ID NO: 318144
gguuuccuacaaugcauaa

SEQ ID NO: 540122 - RNA, 19 nt, Artificial Sequence
  Description of Artificial Sequence: Synthetic oligonucleotide
  Antisense strand to SEQ ID NO: 540121
uuaugcauuguaggaaacc

SEQ ID NO: 540123 - RNA, 19 nt, Artificial Sequence
  Description of Artificial Sequence: Synthetic oligonucleotide
  Sense strand starting at position 2804 of SEQ ID NO: 318144
auuauuuauggguguguuu

SEQ ID NO: 540124 - RNA, 19 nt, Artificial Sequence
  Description of Artificial Sequence: Synthetic oligonucleotide
  Antisense strand to SEQ ID NO: 540123
aaacacacccauaaauaau

SEQ ID NO: 540125 - RNA, 19 nt, Artificial Sequence
  Description of Artificial Sequence: Synthetic oligonucleotide
  Sense strand starting at position 3169 of SEQ ID NO: 318144
uggauuuagcuauguuguu

SEQ ID NO: 540126 - RNA, 19 nt, Artificial Sequence
  Description of Artificial Sequence: Synthetic oligonucleotide
  Antisense strand to SEQ ID NO: 540125
aacaacauagcuaaaucca

SEQ ID NO: 540127 - RNA, 19 nt, Artificial Sequence
  Description of Artificial Sequence: Synthetic oligonucleotide
  Sense strand starting at position 3174 of SEQ ID NO: 318144
uuagcuauguuguugggaa

SEQ ID NO: 540128 - RNA, 19 nt, Artificial Sequence
  Description of Artificial Sequence: Synthetic oligonucleotide
  Antisense strand to SEQ ID NO: 540127
uucccaacaacauagcuaa

SEQ ID NO: 540129 - RNA, 19 nt, Artificial Sequence
  Description of Artificial Sequence: Synthetic oligonucleotide
  Sense strand starting at position 3176 of SEQ ID NO: 318144
agcuauguuguugggaaac

SEQ ID NO: 540130 - RNA, 19 nt, Artificial Sequence
  Description of Artificial Sequence: Synthetic oligonucleotide
  Antisense strand to SEQ ID NO: 540129
guuucccaacaacauagcu

SEQ ID NO: 540131 - RNA, 19 nt, Artificial Sequence
  Description of Artificial Sequence: Synthetic oligonucleotide
  Sense strand starting at position 3188 of SEQ ID NO: 318144
gggaaaccuuuguucagag

SEQ ID NO: 540132 - RNA, 19 nt, Artificial Sequence
  Description of Artificial Sequence: Synthetic oligonucleotide
  Antisense strand to SEQ ID NO: 540131
cucugaacaaagguuuccc

SEQ ID NO: 540133 - RNA, 19 nt, Artificial Sequence
  Description of Artificial Sequence: Synthetic oligonucleotide
  Sense strand starting at position 3266 of SEQ ID NO: 318144
agggcaagucgucaaguau

SEQ ID NO: 540134 - RNA, 19 nt, Artificial Sequence
  Description of Artificial Sequence: Synthetic oligonucleotide
  Antisense strand to SEQ ID NO: 540133
auacuugacgacuugcccu

SEQ ID NO: 540135 - RNA, 19 nt, Artificial Sequence
  Description of Artificial Sequence: Synthetic oligonucleotide
  Sense strand starting at position 3269 of SEQ ID NO: 318144
gcaagucgucaaguaugca

SEQ ID NO: 540136 - RNA, 19 nt, Artificial Sequence
  Description of Artificial Sequence: Synthetic oligonucleotide
  Antisense strand to SEQ ID NO: 540135
ugcauacuugacgacuugc

SEQ ID NO: 540137 - RNA, 19 nt, Artificial Sequence
  Description of Artificial Sequence: Synthetic oligonucleotide
  Sense strand starting at position 3274 of SEQ ID NO: 318144
ucgucaaguaugcaggaau

SEQ ID NO: 540138 - RNA, 19 nt, Artificial Sequence
  Description of Artificial Sequence: Synthetic oligonucleotide
  Antisense strand to SEQ ID NO: 540137
auuccugcauacuugacga

SEQ ID NO: 540139 - RNA, 19 nt, Artificial Sequence
  Description of Artificial Sequence: Synthetic oligonucleotide
  Sense strand starting at position 3277 of SEQ ID NO: 318144
ucaaguaugcaggaaucuu

SEQ ID NO: 540140 - RNA, 19 nt, Artificial Sequence
  Description of Artificial Sequence: Synthetic oligonucleotide
  Antisense strand to SEQ ID NO: 540139
aagauuccugcauacuuga

SEQ ID NO: 540141 - RNA, 19 nt, Artificial Sequence
  Description of Artificial Sequence: Synthetic oligonucleotide
  Sense strand starting at position 3285 of SEQ ID NO: 318144
gcaggaaucuugguagaua

SEQ ID NO: 540142 - RNA, 19 nt, Artificial Sequence
  Description of Artificial Sequence: Synthetic oligonucleotide
  Antisense strand to SEQ ID NO: 540141
uaucuaccaagauuccugc

SEQ ID NO: 540143 - RNA, 19 nt, Artificial Sequence
  Description of Artificial Sequence: Synthetic oligonucleotide
  Sense strand starting at position 3340 of SEQ ID NO: 318144
ggugcauaaucaccuugaa

SEQ ID NO: 540144 - RNA, 19 nt, Artificial Sequence
  Description of Artificial Sequence: Synthetic oligonucleotide
  Antisense strand to SEQ ID NO: 540143
uucaaggugauuaugcacc

SEQ ID NO: 540145 - RNA, 19 nt, Artificial Sequence
  Description of Artificial Sequence: Synthetic oligonucleotide
  Sense strand starting at position 3619 of SEQ ID NO: 318144
auguucugucuccauuacu

SEQ ID NO: 540146 - RNA, 19 nt, Artificial Sequence
  Description of Artificial Sequence: Synthetic oligonucleotide
  Antisense strand to SEQ ID NO: 540145
aguaauggagacagaacau

SEQ ID NO: 540147 - RNA, 19 nt, Artificial Sequence
  Description of Artificial Sequence: Synthetic oligonucleotide
  Sense strand starting at position 3778 of SEQ ID NO: 318144
gaacuauuggaguggauuc

SEQ ID NO: 540148 - RNA, 19 nt, Artificial Sequence
  Description of Artificial Sequence: Synthetic oligonucleotide
  Antisense strand to SEQ ID NO: 540147
gaauccacuccaauaguuc

SEQ ID NO: 540149 - RNA, 19 nt, Artificial Sequence
  Description of Artificial Sequence: Synthetic oligonucleotide
  Sense strand starting at position 3922 of SEQ ID NO: 318144
gagugccucccagagugaa

SEQ ID NO: 540150 - RNA, 19 nt, Artificial Sequence
  Description of Artificial Sequence: Synthetic oligonucleotide
  Antisense strand to SEQ ID NO: 540149
uucacucugggaggcacuc

SEQ ID NO: 540151 - RNA, 19 nt, Artificial Sequence
  Description of Artificial Sequence: Synthetic oligonucleotide
  Sense strand starting at position 111 of SEQ ID NO: 318145
gcuaauggcgaccaugaau

SEQ ID NO: 540152 - RNA, 19 nt, Artificial Sequence
  Description of Artificial Sequence: Synthetic oligonucleotide
  Antisense strand to SEQ ID NO: 540151
auucauggucgccauuagc

SEQ ID NO: 540153 - RNA, 19 nt, Artificial Sequence
  Description of Artificial Sequence: Synthetic oligonucleotide
  Sense strand starting at position 159 of SEQ ID NO: 318145
gcaugacaucaacacuugu

SEQ ID NO: 540154 - RNA, 19 nt, Artificial Sequence
  Description of Artificial Sequence: Synthetic oligonucleotide
  Antisense strand to SEQ ID NO: 540153
acaaguguugaugucaugc

SEQ ID NO: 540155 - RNA, 19 nt, Artificial Sequence
  Description of Artificial Sequence: Synthetic oligonucleotide
  Sense strand starting at position 170 of SEQ ID NO: 318145
acacuuguugccuacugau

SEQ ID NO: 540156 - RNA, 19 nt, Artificial Sequence
  Description of Artificial Sequence: Synthetic oligonucleotide
  Antisense strand to SEQ ID NO: 540155
aucaguaggcaacaagugu

SEQ ID NO: 540157 - RNA, 19 nt, Artificial Sequence
  Description of Artificial Sequence: Synthetic oligonucleotide
  Sense strand starting at position 226 of SEQ ID NO: 318145
ccagcaaaggucugcaaau

SEQ ID NO: 540158 - RNA, 19 nt, Artificial Sequence
  Description of Artificial Sequence: Synthetic oligonucleotide
  Antisense strand to SEQ ID NO: 540157
auuugcagaccuuugcugg

SEQ ID NO: 540159 - RNA, 19 nt, Artificial Sequence
  Description of Artificial Sequence: Synthetic oligonucleotide
  Sense strand starting at position 227 of SEQ ID NO: 318145
cagcaaaggucugcaaaug

SEQ ID NO: 540160 - RNA, 19 nt, Artificial Sequence
  Description of Artificial Sequence: Synthetic oligonucleotide
  Antisense strand to SEQ ID NO: 540159
cauuugcagaccuuugcug

SEQ ID NO: 540161 - RNA, 19 nt, Artificial Sequence
  Description of Artificial Sequence: Synthetic oligonucleotide
  Sense strand starting at position 228 of SEQ ID NO: 318145
agcaaaggucugcaaaugu

SEQ ID NO: 540162 - RNA, 19 nt, Artificial Sequence
  Description of Artificial Sequence: Synthetic oligonucleotide
  Antisense strand to SEQ ID NO: 540161
acauuugcagaccuuugcu

SEQ ID NO: 540163 - RNA, 19 nt, Artificial Sequence
  Description of Artificial Sequence: Synthetic oligonucleotide
  Sense strand starting at position 239 of SEQ ID NO: 318145
gcaaauguauccuugugca

SEQ ID NO: 540164 - RNA, 19 nt, Artificial Sequence
  Description of Artificial Sequence: Synthetic oligonucleotide
  Antisense strand to SEQ ID NO: 540163
ugcacaaggauacauuugc

SEQ ID NO: 540165 - RNA, 19 nt, Artificial Sequence
  Description of Artificial Sequence: Synthetic oligonucleotide
  Sense strand starting at position 249 of SEQ ID NO: 318145
ccuugugcacuggaaugaa

SEQ ID NO: 540166 - RNA, 19 nt, Artificial Sequence
  Description of Artificial Sequence: Synthetic oligonucleotide
  Antisense strand to SEQ ID NO: 540165
uucauuccagugcacaagg

SEQ ID NO: 540167 - RNA, 19 nt, Artificial Sequence
  Description of Artificial Sequence: Synthetic oligonucleotide
  Sense strand starting at position 349 of SEQ ID NO: 318145
ggucuacuaucugcacagu

SEQ ID NO: 540168 - RNA, 19 nt, Artificial Sequence
  Description of Artificial Sequence: Synthetic oligonucleotide
  Antisense strand to SEQ ID NO: 540167
acugugcagauaguagacc

SEQ ID NO: 540169 - RNA, 19 nt, Artificial Sequence
  Description of Artificial Sequence: Synthetic oligonucleotide
  Sense strand starting at position 399 of SEQ ID NO: 318145
acccgaaagccugacuaua

SEQ ID NO: 540170 - RNA, 19 nt, Artificial Sequence
  Description of Artificial Sequence: Synthetic oligonucleotide
  Antisense strand to SEQ ID NO: 540169
uauagucaggcuuucgggu

SEQ ID NO: 540171 - RNA, 19 nt, Artificial Sequence
  Description of Artificial Sequence: Synthetic oligonucleotide
  Sense strand starting at position 401 of SEQ ID NO: 318145
ccgaaagccugacuauacu

SEQ ID NO: 540172 - RNA, 19 nt, Artificial Sequence
  Description of Artificial Sequence: Synthetic oligonucleotide
  Antisense strand to SEQ ID NO: 540171
aguauagucaggcuuucgg

SEQ ID NO: 540173 - RNA, 19 nt, Artificial Sequence
  Description of Artificial Sequence: Synthetic oligonucleotide
  Sense strand starting at position 463 of SEQ ID NO: 318145
guaggagaaccgcaauucu

SEQ ID NO: 540174 - RNA, 19 nt, Artificial Sequence
  Description of Artificial Sequence: Synthetic oligonucleotide
  Antisense strand to SEQ ID NO: 540173
agaauugcgguucuccuac

SEQ ID NO: 540175 - RNA, 19 nt, Artificial Sequence
  Description of Artificial Sequence: Synthetic oligonucleotide
  Sense strand starting at position 1114 of SEQ ID NO: 318145
cgcuaugaacucuagauuc

SEQ ID NO: 540176 - RNA, 19 nt, Artificial Sequence
  Description of Artificial Sequence: Synthetic oligonucleotide
  Antisense strand to SEQ ID NO: 540175
gaaucuagaguucauagcg

SEQ ID NO: 540177 - RNA, 19 nt, Artificial Sequence
  Description of Artificial Sequence: Synthetic oligonucleotide
  Sense strand starting at position 2673 of SEQ ID NO: 318145
ggcaacuucuuuccaugaa

SEQ ID NO: 540178 - RNA, 19 nt, Artificial Sequence
  Description of Artificial Sequence: Synthetic oligonucleotide
  Antisense strand to SEQ ID NO: 540177
uucauggaaagaaguugcc

SEQ ID NO: 540179 - RNA, 19 nt, Artificial Sequence
  Description of Artificial Sequence: Synthetic oligonucleotide
  Sense strand starting at position 2677 of SEQ ID NO: 318145
acuucuuuccaugaaagug

SEQ ID NO: 540180 - RNA, 19 nt, Artificial Sequence
  Description of Artificial Sequence: Synthetic oligonucleotide
  Antisense strand to SEQ ID NO: 540179
cacuuucauggaaagaagu

SEQ ID NO: 540181 - RNA, 19 nt, Artificial Sequence
  Description of Artificial Sequence: Synthetic oligonucleotide
  Sense strand starting at position 2689 of SEQ ID NO: 318145
gaaagugagaucugugcgu

SEQ ID NO: 540182 - RNA, 19 nt, Artificial Sequence
  Description of Artificial Sequence: Synthetic oligonucleotide
  Antisense strand to SEQ ID NO: 540181
acgcacagaucucacuuuc

SEQ ID NO: 540183 - RNA, 19 nt, Artificial Sequence
  Description of Artificial Sequence: Synthetic oligonucleotide
  Sense strand starting at position 2694 of SEQ ID NO: 318145
ugagaucugugcgucuuga

SEQ ID NO: 540184 - RNA, 19 nt, Artificial Sequence
  Description of Artificial Sequence: Synthetic oligonucleotide
  Antisense strand to SEQ ID NO: 540183
ucaagacgcacagaucuca

SEQ ID NO: 540185 - RNA, 19 nt, Artificial Sequence
  Description of Artificial Sequence: Synthetic oligonucleotide
  Sense strand starting at position 2702 of SEQ ID NO: 318145
gugcgucuugaagccgaua

SEQ ID NO: 540186 - RNA, 19 nt, Artificial Sequence
  Description of Artificial Sequence: Synthetic oligonucleotide
  Antisense strand to SEQ ID NO: 540185
uaucggcuucaagacgcac

SEQ ID NO: 540187 - RNA, 19 nt, Artificial Sequence
  Description of Artificial Sequence: Synthetic oligonucleotide
  Sense strand starting at position 2705 of SEQ ID NO: 318145
cgucuugaagccgauagau

SEQ ID NO: 540188 - RNA, 19 nt, Artificial Sequence
  Description of Artificial Sequence: Synthetic oligonucleotide
  Antisense strand to SEQ ID NO: 540187
aucuaucggcuucaagacg

SEQ ID NO: 540189 - RNA, 19 nt, Artificial Sequence
  Description of Artificial Sequence: Synthetic oligonucleotide
  Sense strand starting at position 2707 of SEQ ID NO: 318145
ucuugaagccgauagauua

SEQ ID NO: 540190 - RNA, 19 nt, Artificial Sequence
  Description of Artificial Sequence: Synthetic oligonucleotide
  Antisense strand to SEQ ID NO: 540189
uaaucuaucggcuucaaga

SEQ ID NO: 540191 - RNA, 19 nt, Artificial Sequence
  Description of Artificial Sequence: Synthetic oligonucleotide
  Sense strand starting at position 2714 of SEQ ID NO: 318145
gccgauagauuaucacaga

SEQ ID NO: 540192 - RNA, 19 nt, Artificial Sequence
  Description of Artificial Sequence: Synthetic oligonucleotide
  Antisense strand to SEQ ID NO: 540191
ucugugauaaucuaucggc

SEQ ID NO: 540193 - RNA, 19 nt, Artificial Sequence
  Description of Artificial Sequence: Synthetic oligonucleotide
  Sense strand starting at position 2715 of SEQ ID NO: 318145
ccgauagauuaucacagaa

SEQ ID NO: 540194 - RNA, 19 nt, Artificial Sequence
  Description of Artificial Sequence: Synthetic oligonucleotide
  Antisense strand to SEQ ID NO: 540193
uucugugauaaucuaucgg

SEQ ID NO: 540195 - RNA, 19 nt, Artificial Sequence
  Description of Artificial Sequence: Synthetic oligonucleotide
  Sense strand starting at position 2759 of SEQ ID NO: 318145
auuugccaacaguguuaau

SEQ ID NO: 540196 - RNA, 19 nt, Artificial Sequence
  Description of Artificial Sequence: Synthetic oligonucleotide
  Antisense strand to SEQ ID NO: 540195
auuaacacuguuggcaaau

SEQ ID NO: 540197 - RNA, 19 nt, Artificial Sequence
  Description of Artificial Sequence: Synthetic oligonucleotide
  Sense strand starting at position 2847 of SEQ ID NO: 318145
uuaacauaugacggugagu

SEQ ID NO: 540198 - RNA, 19 nt, Artificial Sequence
  Description of Artificial Sequence: Synthetic oligonucleotide
  Antisense strand to SEQ ID NO: 540197
acucaccgucauauguuaa

SEQ ID NO: 540199 - RNA, 19 nt, Artificial Sequence
  Description of Artificial Sequence: Synthetic oligonucleotide
  Sense strand starting at position 2849 of SEQ ID NO: 318145
aacauaugacggugaguaa

SEQ ID NO: 540200 - RNA, 19 nt, Artificial Sequence
  Description of Artificial Sequence: Synthetic oligonucleotide
  Antisense strand to SEQ ID NO: 540199
uuacucaccgucauauguu

SEQ ID NO: 540201 - RNA, 19 nt, Artificial Sequence
  Description of Artificial Sequence: Synthetic oligonucleotide
  Sense strand starting at position 3096 of SEQ ID NO: 318145
cacacaaucuccgugugau

SEQ ID NO: 540202 - RNA, 19 nt, Artificial Sequence
  Description of Artificial Sequence: Synthetic oligonucleotide
  Antisense strand to SEQ ID NO: 540201
aucacacggagauugugug

SEQ ID NO: 540203 - RNA, 19 nt, Artificial Sequence
  Description of Artificial Sequence: Synthetic oligonucleotide
  Sense strand starting at position 3097 of SEQ ID NO: 318145
acacaaucuccgugugaug

SEQ ID NO: 540204 - RNA, 19 nt, Artificial Sequence
  Description of Artificial Sequence: Synthetic oligonucleotide
  Antisense strand to SEQ ID NO: 540203
caucacacggagauugugu

SEQ ID NO: 540205 - RNA, 19 nt, Artificial Sequence
  Description of Artificial Sequence: Synthetic oligonucleotide
  Sense strand starting at position 3104 of SEQ ID NO: 318145
cuccgugugaugugggaaa

SEQ ID NO: 540206 - RNA, 19 nt, Artificial Sequence
  Description of Artificial Sequence: Synthetic oligonucleotide
  Antisense strand to SEQ ID NO: 540205
uuucccacaucacacggag

SEQ ID NO: 540207 - RNA, 19 nt, Artificial Sequence
  Description of Artificial Sequence: Synthetic oligonucleotide
  Sense strand starting at position 3106 of SEQ ID NO: 318145
ccgugugaugugggaaacu

SEQ ID NO: 540208 - RNA, 19 nt, Artificial Sequence
  Description of Artificial Sequence: Synthetic oligonucleotide
  Antisense strand to SEQ ID NO: 540207
aguuucccacaucacacgg

SEQ ID NO: 540209 - RNA, 19 nt, Artificial Sequence
  Description of Artificial Sequence: Synthetic oligonucleotide
  Sense strand starting at position 3117 of SEQ ID NO: 318145
gggaaacuggauuguuucu

SEQ ID NO: 540210 - RNA, 19 nt, Artificial Sequence
  Description of Artificial Sequence: Synthetic oligonucleotide
  Antisense strand to SEQ ID NO: 540209
agaaacaauccaguuuccc

SEQ ID NO: 540211 - RNA, 19 nt, Artificial Sequence
  Description of Artificial Sequence: Synthetic oligonucleotide
  Sense strand starting at position 3119 of SEQ ID NO: 318145
gaaacuggauuguuucuau

SEQ ID NO: 540212 - RNA, 19 nt, Artificial Sequence
  Description of Artificial Sequence: Synthetic oligonucleotide
  Antisense strand to SEQ ID NO: 540211
auagaaacaauccaguuuc

SEQ ID NO: 540213 - RNA, 19 nt, Artificial Sequence
  Description of Artificial Sequence: Synthetic oligonucleotide
  Sense strand starting at position 3123 of SEQ ID NO: 318145
cuggauuguuucuauuuga

SEQ ID NO: 540214 - RNA, 19 nt, Artificial Sequence
  Description of Artificial Sequence: Synthetic oligonucleotide
  Antisense strand to SEQ ID NO: 540213
ucaaauagaaacaauccag

SEQ ID NO: 540215 - RNA, 19 nt, Artificial Sequence
  Description of Artificial Sequence: Synthetic oligonucleotide
  Sense strand starting at position 3510 of SEQ ID NO: 318145
ccaggauucuaauugacuc

SEQ ID NO: 540216 - RNA, 19 nt, Artificial Sequence
  Description of Artificial Sequence: Synthetic oligonucleotide
  Antisense strand to SEQ ID NO: 540215
gagucaauuagaauccugg

SEQ ID NO: 540217 - RNA, 19 nt, Artificial Sequence
  Description of Artificial Sequence: Synthetic oligonucleotide
  Sense strand starting at position 3514 of SEQ ID NO: 318145
gauucuaauugacucgagu

SEQ ID NO: 540218 - RNA, 19 nt, Artificial Sequence
  Description of Artificial Sequence: Synthetic oligonucleotide
  Antisense strand to SEQ ID NO: 540217
acucgagucaauuagaauc

SEQ ID NO: 540219 - RNA, 19 nt, Artificial Sequence
  Description of Artificial Sequence: Synthetic oligonucleotide
  Sense strand starting at position 3529 of SEQ ID NO: 318145
gagucuggcccuuagcuau

SEQ ID NO: 540220 - RNA, 19 nt, Artificial Sequence
  Description of Artificial Sequence: Synthetic oligonucleotide
  Antisense strand to SEQ ID NO: 540219
auagcuaagggccagacuc

SEQ ID NO: 540221 - RNA, 19 nt, Artificial Sequence
  Description of Artificial Sequence: Synthetic oligonucleotide
  Sense strand starting at position 3540 of SEQ ID NO: 318145
uuagcuauacccuagauga

SEQ ID NO: 540222 - RNA, 19 nt, Artificial Sequence
  Description of Artificial Sequence: Synthetic oligonucleotide
  Antisense strand to SEQ ID NO: 540221
ucaucuaggguauagcuaa

SEQ ID NO: 540223 - RNA, 19 nt, Artificial Sequence
  Description of Artificial Sequence: Synthetic oligonucleotide
  Sense strand starting at position 3576 of SEQ ID NO: 318145
aggaacgcuucuguaauua

SEQ ID NO: 540224 - RNA, 19 nt, Artificial Sequence
  Description of Artificial Sequence: Synthetic oligonucleotide
  Antisense strand to SEQ ID NO: 540223
uaauuacagaagcguuccu

SEQ ID NO: 540225 - RNA, 19 nt, Artificial Sequence
  Description of Artificial Sequence: Synthetic oligonucleotide
  Sense strand starting at position 3588 of SEQ ID NO: 318145
guaauuaaugguuacuuac

SEQ ID NO: 540226 - RNA, 19 nt, Artificial Sequence
  Description of Artificial Sequence: Synthetic oligonucleotide
  Antisense strand to SEQ ID NO: 540225
guaaguaaccauuaauuac

SEQ ID NO: 540227 - RNA, 19 nt, Artificial Sequence
  Description of Artificial Sequence: Synthetic oligonucleotide
  Sense strand starting at position 3630 of SEQ ID NO: 318145
ccaggauauucuuuaacug

SEQ ID NO: 540228 - RNA, 19 nt, Artificial Sequence
  Description of Artificial Sequence: Synthetic oligonucleotide
  Antisense strand to SEQ ID NO: 540227
caguuaaagaauauccugg

SEQ ID NO: 540229 - RNA, 19 nt, Artificial Sequence
  Description of Artificial Sequence: Synthetic oligonucleotide
  Sense strand starting at position 3717 of SEQ ID NO: 318145
uuuggcacucugugaauga

SEQ ID NO: 540230 - RNA, 19 nt, Artificial Sequence
  Description of Artificial Sequence: Synthetic oligonucleotide
  Antisense strand to SEQ ID NO: 540229
ucauucacagagugccaaa

SEQ ID NO: 540231 - RNA, 19 nt, Artificial Sequence
  Description of Artificial Sequence: Synthetic oligonucleotide
  Sense strand starting at position 143 of SEQ ID NO: 318146
ggcguagaaucuucgcaaa

SEQ ID NO: 540232 - RNA, 19 nt, Artificial Sequence
  Description of Artificial Sequence: Synthetic oligonucleotide
  Antisense strand to SEQ ID NO: 540231
uuugcgaagauucuacgcc

SEQ ID NO: 540233 - RNA, 19 nt, Artificial Sequence
  Description of Artificial Sequence: Synthetic oligonucleotide
  Sense strand starting at position 440 of SEQ ID NO: 318146
cccggauucgagugcgaaa

SEQ ID NO: 540234 - RNA, 19 nt, Artificial Sequence
  Description of Artificial Sequence: Synthetic oligonucleotide
  Antisense strand to SEQ ID NO: 540233
uuucgcacucgaauccggg

SEQ ID NO: 540235 - RNA, 19 nt, Artificial Sequence
  Description of Artificial Sequence: Synthetic oligonucleotide
  Sense strand starting at position 584 of SEQ ID NO: 318146
cgcuaugaacucuagauuc

SEQ ID NO: 540236 - RNA, 19 nt, Artificial Sequence
  Description of Artificial Sequence: Synthetic oligonucleotide
  Antisense strand to SEQ ID NO: 540235
gaaucuagaguucauagcg

SEQ ID NO: 540237 - RNA, 19 nt, Artificial Sequence
  Description of Artificial Sequence: Synthetic oligonucleotide
  Sense strand starting at position 2143 of SEQ ID NO: 318146
ggcaacuucuuuccaugaa

SEQ ID NO: 540238 - RNA, 19 nt, Artificial Sequence
  Description of Artificial Sequence: Synthetic oligonucleotide
  Antisense strand to SEQ ID NO: 540237
uucauggaaagaaguugcc

SEQ ID NO: 540239 - RNA, 19 nt, Artificial Sequence
  Description of Artificial Sequence: Synthetic oligonucleotide
  Sense strand starting at position 2147 of SEQ ID NO: 318146
acuucuuuccaugaaagug

SEQ ID NO: 540240 - RNA, 19 nt, Artificial Sequence
  Description of Artificial Sequence: Synthetic oligonucleotide
  Antisense strand to SEQ ID NO: 540239
cacuuucauggaaagaagu

SEQ ID NO: 540241 - RNA, 19 nt, Artificial Sequence
  Description of Artificial Sequence: Synthetic oligonucleotide
  Sense strand starting at position 2155 of SEQ ID NO: 318146
ccaugaaagugagaucugu

SEQ ID NO: 540242 - RNA, 19 nt, Artificial Sequence
  Description of Artificial Sequence: Synthetic oligonucleotide
  Antisense strand to SEQ ID NO: 540241
acagaucucacuuucaugg

SEQ ID NO: 540243 - RNA, 19 nt, Artificial Sequence
  Description of Artificial Sequence: Synthetic oligonucleotide
  Sense strand starting at position 2159 of SEQ ID NO: 318146
gaaagugagaucugugcgu

SEQ ID NO: 540244 - RNA, 19 nt, Artificial Sequence
  Description of Artificial Sequence: Synthetic oligonucleotide
  Antisense strand to SEQ ID NO: 540243
acgcacagaucucacuuuc

SEQ ID NO: 540245 - RNA, 19 nt, Artificial Sequence
  Description of Artificial Sequence: Synthetic oligonucleotide
  Sense strand starting at position 2161 of SEQ ID NO: 318146
aagugagaucugugcgucu

SEQ ID NO: 540246 - RNA, 19 nt, Artificial Sequence
  Description of Artificial Sequence: Synthetic oligonucleotide
  Antisense strand to SEQ ID NO: 540245
agacgcacagaucucacuu

SEQ ID NO: 540247 - RNA, 19 nt, Artificial Sequence
  Description of Artificial Sequence: Synthetic oligonucleotide
  Sense strand starting at position 2163 of SEQ ID NO: 318146
gugagaucugugcgucuug

SEQ ID NO: 540248 - RNA, 19 nt, Artificial Sequence
  Description of Artificial Sequence: Synthetic oligonucleotide
  Antisense strand to SEQ ID NO: 540247
caagacgcacagaucucac

SEQ ID NO: 540249 - RNA, 19 nt, Artificial Sequence
  Description of Artificial Sequence: Synthetic oligonucleotide
  Sense strand starting at position 2164 of SEQ ID NO: 318146
ugagaucugugcgucuuga

SEQ ID NO: 540250 - RNA, 19 nt, Artificial Sequence
  Description of Artificial Sequence: Synthetic oligonucleotide
  Antisense strand to SEQ ID NO: 540249
ucaagacgcacagaucuca

SEQ ID NO: 540251 - RNA, 19 nt, Artificial Sequence
  Description of Artificial Sequence: Synthetic oligonucleotide
  Sense strand starting at position 2172 of SEQ ID NO: 318146
gugcgucuugaagccgaua

SEQ ID NO: 540252 - RNA, 19 nt, Artificial Sequence
  Description of Artificial Sequence: Synthetic oligonucleotide
  Antisense strand to SEQ ID NO: 540251
uaucggcuucaagacgcac

SEQ ID NO: 540253 - RNA, 19 nt, Artificial Sequence
  Description of Artificial Sequence: Synthetic oligonucleotide
  Sense strand starting at position 2174 of SEQ ID NO: 318146
gcgucuugaagccgauaga

SEQ ID NO: 540254 - RNA, 19 nt, Artificial Sequence
  Description of Artificial Sequence: Synthetic oligonucleotide
  Antisense strand to SEQ ID NO: 540253
ucuaucggcuucaagacgc

SEQ ID NO: 540255 - RNA, 19 nt, Artificial Sequence
  Description of Artificial Sequence: Synthetic oligonucleotide
  Sense strand starting at position 2175 of SEQ ID NO: 318146
cgucuugaagccgauagau

SEQ ID NO: 540256 - RNA, 19 nt, Artificial Sequence
  Description of Artificial Sequence: Synthetic oligonucleotide
  Antisense strand to SEQ ID NO: 540255
aucuaucggcuucaagacg

SEQ ID NO: 540257 - RNA, 19 nt, Artificial Sequence
  Description of Artificial Sequence: Synthetic oligonucleotide
  Sense strand starting at position 2177 of SEQ ID NO: 318146
ucuugaagccgauagauua

SEQ ID NO: 540258 - RNA, 19 nt, Artificial Sequence
  Description of Artificial Sequence: Synthetic oligonucleotide
  Antisense strand to SEQ ID NO: 540257
uaaucuaucggcuucaaga

SEQ ID NO: 540259 - RNA, 19 nt, Artificial Sequence
  Description of Artificial Sequence: Synthetic oligonucleotide
  Sense strand starting at position 2184 of SEQ ID NO: 318146
gccgauagauuaucacaga

SEQ ID NO: 540260 - RNA, 19 nt, Artificial Sequence
  Description of Artificial Sequence: Synthetic oligonucleotide
  Antisense strand to SEQ ID NO: 540259
ucugugauaaucuaucggc

SEQ ID NO: 540261 - RNA, 19 nt, Artificial Sequence
  Description of Artificial Sequence: Synthetic oligonucleotide
  Sense strand starting at position 2185 of SEQ ID NO: 318146
ccgauagauuaucacagaa

SEQ ID NO: 540262 - RNA, 19 nt, Artificial Sequence
  Description of Artificial Sequence: Synthetic oligonucleotide
  Antisense strand to SEQ ID NO: 540261
uucugugauaaucuaucgg

SEQ ID NO: 540263 - RNA, 19 nt, Artificial Sequence
  Description of Artificial Sequence: Synthetic oligonucleotide
  Sense strand starting at position 2229 of SEQ ID NO: 318146
auuugccaacaguguuaau

SEQ ID NO: 540264 - RNA, 19 nt, Artificial Sequence
  Description of Artificial Sequence: Synthetic oligonucleotide
  Antisense strand to SEQ ID NO: 540263
auuaacacuguuggcaaau

SEQ ID NO: 540265 - RNA, 19 nt, Artificial Sequence
  Description of Artificial Sequence: Synthetic oligonucleotide
  Sense strand starting at position 2317 of SEQ ID NO: 318146
uuaacauaugacggugagu

SEQ ID NO: 540266 - RNA, 19 nt, Artificial Sequence
  Description of Artificial Sequence: Synthetic oligonucleotide
  Antisense strand to SEQ ID NO: 540265
acucaccgucauauguuaa

SEQ ID NO: 540267 - RNA, 19 nt, Artificial Sequence
  Description of Artificial Sequence: Synthetic oligonucleotide
  Sense strand starting at position 2319 of SEQ ID NO: 318146
aacauaugacggugaguaa

SEQ ID NO: 540268 - RNA, 19 nt, Artificial Sequence
  Description of Artificial Sequence: Synthetic oligonucleotide
  Antisense strand to SEQ ID NO: 540267
uuacucaccgucauauguu

SEQ ID NO: 540269 - RNA, 19 nt, Artificial Sequence
  Description of Artificial Sequence: Synthetic oligonucleotide
  Sense strand starting at position 2458 of SEQ ID NO: 318146
agcuacuucuauuagaaag

SEQ ID NO: 540270 - RNA, 19 nt, Artificial Sequence
  Description of Artificial Sequence: Synthetic oligonucleotide
  Antisense strand to SEQ ID NO: 540269
cuuucuaauagaaguagcu

SEQ ID NO: 540271 - RNA, 19 nt, Artificial Sequence
  Description of Artificial Sequence: Synthetic oligonucleotide
  Sense strand starting at position 2566 of SEQ ID NO: 318146
cacacaaucuccgugugau

SEQ ID NO: 540272 - RNA, 19 nt, Artificial Sequence
  Description of Artificial Sequence: Synthetic oligonucleotide
  Antisense strand to SEQ ID NO: 540271
aucacacggagauugugug

SEQ ID NO: 540273 - RNA, 19 nt, Artificial Sequence
  Description of Artificial Sequence: Synthetic oligonucleotide
  Sense strand starting at position 2567 of SEQ ID NO: 318146
acacaaucuccgugugaug

SEQ ID NO: 540274 - RNA, 19 nt, Artificial Sequence
  Description of Artificial Sequence: Synthetic oligonucleotide
  Antisense strand to SEQ ID NO: 540273
caucacacggagauugugu

SEQ ID NO: 540275 - RNA, 19 nt, Artificial Sequence
  Description of Artificial Sequence: Synthetic oligonucleotide
  Sense strand starting at position 2574 of SEQ ID NO: 318146
cuccgugugaugugggaaa

SEQ ID NO: 540276 - RNA, 19 nt, Artificial Sequence
  Description of Artificial Sequence: Synthetic oligonucleotide
  Antisense strand to SEQ ID NO: 540275
uuucccacaucacacggag

SEQ ID NO: 540277 - RNA, 19 nt, Artificial Sequence
  Description of Artificial Sequence: Synthetic oligonucleotide
  Sense strand starting at position 2576 of SEQ ID NO: 318146
ccgugugaugugggaaacu

SEQ ID NO: 540278 - RNA, 19 nt, Artificial Sequence
  Description of Artificial Sequence: Synthetic oligonucleotide
  Antisense strand to SEQ ID NO: 540277
aguuucccacaucacacgg

SEQ ID NO: 540279 - RNA, 19 nt, Artificial Sequence
  Description of Artificial Sequence: Synthetic oligonucleotide
  Sense strand starting at position 2587 of SEQ ID NO: 318146
gggaaacuggauuguuucu

SEQ ID NO: 540280 - RNA, 19 nt, Artificial Sequence
  Description of Artificial Sequence: Synthetic oligonucleotide
  Antisense strand to SEQ ID NO: 540279
agaaacaauccaguuuccc

SEQ ID NO: 540281 - RNA, 19 nt, Artificial Sequence
  Description of Artificial Sequence: Synthetic oligonucleotide
  Sense strand starting at position 2589 of SEQ ID NO: 318146
gaaacuggauuguuucuau

SEQ ID NO: 540282 - RNA, 19 nt, Artificial Sequence
  Description of Artificial Sequence: Synthetic oligonucleotide
  Antisense strand to SEQ ID NO: 540281
auagaaacaauccaguuuc

SEQ ID NO: 540283 - RNA, 19 nt, Artificial Sequence
  Description of Artificial Sequence: Synthetic oligonucleotide
  Sense strand starting at position 2593 of SEQ ID NO: 318146
cuggauuguuucuauuuga

SEQ ID NO: 540284 - RNA, 19 nt, Artificial Sequence
  Description of Artificial Sequence: Synthetic oligonucleotide
  Antisense strand to SEQ ID NO: 540283
ucaaauagaaacaauccag

SEQ ID NO: 540285 - RNA, 19 nt, Artificial Sequence
  Description of Artificial Sequence: Synthetic oligonucleotide
  Sense strand starting at position 2969 of SEQ ID NO: 318146
uuugacaggucccaggauu

SEQ ID NO: 540286 - RNA, 19 nt, Artificial Sequence
  Description of Artificial Sequence: Synthetic oligonucleotide
  Antisense strand to SEQ ID NO: 540285
aauccugggaccugucaaa

SEQ ID NO: 540287 - RNA, 19 nt, Artificial Sequence
  Description of Artificial Sequence: Synthetic oligonucleotide
  Sense strand starting at position 2977 of SEQ ID NO: 318146
gucccaggauucuaauuga

SEQ ID NO: 540288 - RNA, 19 nt, Artificial Sequence
  Description of Artificial Sequence: Synthetic oligonucleotide
  Antisense strand to SEQ ID NO: 540287
ucaauuagaauccugggac

SEQ ID NO: 540289 - RNA, 19 nt, Artificial Sequence
  Description of Artificial Sequence: Synthetic oligonucleotide
  Sense strand starting at position 2980 of SEQ ID NO: 318146
ccaggauucuaauugacuc

SEQ ID NO: 540290 - RNA, 19 nt, Artificial Sequence
  Description of Artificial Sequence: Synthetic oligonucleotide
  Antisense strand to SEQ ID NO: 540289
gagucaauuagaauccugg

SEQ ID NO: 540291 - RNA, 19 nt, Artificial Sequence
  Description of Artificial Sequence: Synthetic oligonucleotide
  Sense strand starting at position 2984 of SEQ ID NO: 318146
gauucuaauugacucgagu

SEQ ID NO: 540292 - RNA, 19 nt, Artificial Sequence
  Description of Artificial Sequence: Synthetic oligonucleotide
  Antisense strand to SEQ ID NO: 540291
acucgagucaauuagaauc

SEQ ID NO: 540293 - RNA, 19 nt, Artificial Sequence
  Description of Artificial Sequence: Synthetic oligonucleotide
  Sense strand starting at position 2999 of SEQ ID NO: 318146
gagucuggcccuuagcuau

SEQ ID NO: 540294 - RNA, 19 nt, Artificial Sequence
  Description of Artificial Sequence: Synthetic oligonucleotide
  Antisense strand to SEQ ID NO: 540293
auagcuaagggccagacuc

SEQ ID NO: 540295 - RNA, 19 nt, Artificial Sequence
  Description of Artificial Sequence: Synthetic oligonucleotide
  Sense strand starting at position 3010 of SEQ ID NO: 318146
uuagcuauacccuagauga

SEQ ID NO: 540296 - RNA, 19 nt, Artificial Sequence
  Description of Artificial Sequence: Synthetic oligonucleotide
  Antisense strand to SEQ ID NO: 540295
ucaucuaggguauagcuaa

SEQ ID NO: 540297 - RNA, 19 nt, Artificial Sequence
  Description of Artificial Sequence: Synthetic oligonucleotide
  Sense strand starting at position 3046 of SEQ ID NO: 318146
aggaacgcuucuguaauua

SEQ ID NO: 540298 - RNA, 19 nt, Artificial Sequence
  Description of Artificial Sequence: Synthetic oligonucleotide
  Antisense strand to SEQ ID NO: 540297
uaauuacagaagcguuccu

SEQ ID NO: 540299 - RNA, 19 nt, Artificial Sequence
  Description of Artificial Sequence: Synthetic oligonucleotide
  Sense strand starting at position 3058 of SEQ ID NO: 318146
guaauuaaugguuacuuac

SEQ ID NO: 540300 - RNA, 19 nt, Artificial Sequence
  Description of Artificial Sequence: Synthetic oligonucleotide
  Antisense strand to SEQ ID NO: 540299
guaaguaaccauuaauuac

SEQ ID NO: 540301 - RNA, 19 nt, Artificial Sequence
  Description of Artificial Sequence: Synthetic oligonucleotide
  Sense strand starting at position 3100 of SEQ ID NO: 318146
ccaggauauucuuuaacug

SEQ ID NO: 540302 - RNA, 19 nt, Artificial Sequence
  Description of Artificial Sequence: Synthetic oligonucleotide
  Antisense strand to SEQ ID NO: 540301
caguuaaagaauauccugg

SEQ ID NO: 540303 - RNA, 19 nt, Artificial Sequence
  Description of Artificial Sequence: Synthetic oligonucleotide
  Sense strand starting at position 3187 of SEQ ID NO: 318146
uuuggcacucugugaauga

SEQ ID NO: 540304 - RNA, 19 nt, Artificial Sequence
  Description of Artificial Sequence: Synthetic oligonucleotide
  Antisense strand to SEQ ID NO: 540303
ucauucacagagugccaaa

SEQ ID NO: 540305 - RNA, 19 nt, Artificial Sequence
  Description of Artificial Sequence: Synthetic oligonucleotide
  Sense strand starting at position 3567 of SEQ ID NO: 318146
cgcgccuggccaugaaaua

SEQ ID NO: 540306 - RNA, 19 nt, Artificial Sequence
  Description of Artificial Sequence: Synthetic oligonucleotide
  Antisense strand to SEQ ID NO: 540305
uauuucauggccaggcgcg

SEQ ID NO: 540307 - RNA, 19 nt, Artificial Sequence
  Description of Artificial Sequence: Synthetic oligonucleotide
  Sense strand starting at position 3672 of SEQ ID NO: 318146
cuaaauuacugaugagaaa

SEQ ID NO: 540308 - RNA, 19 nt, Artificial Sequence
  Description of Artificial Sequence: Synthetic oligonucleotide
  Antisense strand to SEQ ID NO: 540307
uuucucaucaguaauuuag

SEQ ID NO: 540309 - RNA, 19 nt, Artificial Sequence
  Description of Artificial Sequence: Synthetic oligonucleotide
  Sense strand starting at position 3958 of SEQ ID NO: 318146
gcaagacccuaucugcaaa

SEQ ID NO: 540310 - RNA, 19 nt, Artificial Sequence
  Description of Artificial Sequence: Synthetic oligonucleotide
  Antisense strand to SEQ ID NO: 540309
uuugcagauagggucuugc

SEQ ID NO: 540311 - RNA, 19 nt, Artificial Sequence
  Description of Artificial Sequence: Synthetic oligonucleotide
  Sense strand starting at position 54 of SEQ ID NO: 318147
uuggaauagucacuuacaa

SEQ ID NO: 540312 - RNA, 19 nt, Artificial Sequence
  Description of Artificial Sequence: Synthetic oligonucleotide
  Antisense strand to SEQ ID NO: 540311
uuguaagugacuauuccaa

SEQ ID NO: 540313 - RNA, 19 nt, Artificial Sequence
  Description of Artificial Sequence: Synthetic oligonucleotide
  Sense strand starting at position 113 of SEQ ID NO: 318147
acuagauggucucuaguuc

SEQ ID NO: 540314 - RNA, 19 nt, Artificial Sequence
  Description of Artificial Sequence: Synthetic oligonucleotide
  Antisense strand to SEQ ID NO: 540313
gaacuagagaccaucuagu

SEQ ID NO: 540315 - RNA, 19 nt, Artificial Sequence
  Description of Artificial Sequence: Synthetic oligonucleotide
  Sense strand starting at position 147 of SEQ ID NO: 318147
uuccuuaauucuucgagua

SEQ ID NO: 540316 - RNA, 19 nt, Artificial Sequence
  Description of Artificial Sequence: Synthetic oligonucleotide
  Antisense strand to SEQ ID NO: 540315
uacucgaagaauuaaggaa

SEQ ID NO: 540317 - RNA, 19 nt, Artificial Sequence
  Description of Artificial Sequence: Synthetic oligonucleotide
  Sense strand starting at position 148 of SEQ ID NO: 318147
uccuuaauucuucgaguaa

SEQ ID NO: 540318 - RNA, 19 nt, Artificial Sequence
  Description of Artificial Sequence: Synthetic oligonucleotide
  Antisense strand to SEQ ID NO: 540317
uuacucgaagaauuaagga

SEQ ID NO: 540319 - RNA, 19 nt, Artificial Sequence
  Description of Artificial Sequence: Synthetic oligonucleotide
  Sense strand starting at position 207 of SEQ ID NO: 318147
gaaccugaaugagaaagaa

SEQ ID NO: 540320 - RNA, 19 nt, Artificial Sequence
  Description of Artificial Sequence: Synthetic oligonucleotide
  Antisense strand to SEQ ID NO: 540319
uucuuucucauucagguuc

SEQ ID NO: 540321 - RNA, 19 nt, Artificial Sequence
  Description of Artificial Sequence: Synthetic oligonucleotide
  Sense strand starting at position 232 of SEQ ID NO: 318147
gaauuaaaguuguuaucag

SEQ ID NO: 540322 - RNA, 19 nt, Artificial Sequence
  Description of Artificial Sequence: Synthetic oligonucleotide
  Antisense strand to SEQ ID NO: 540321
cugauaacaacuuuaauuc

SEQ ID NO: 540323 - RNA, 19 nt, Artificial Sequence
  Description of Artificial Sequence: Synthetic oligonucleotide
  Sense strand starting at position 239 of SEQ ID NO: 318147
aguuguuaucaguaagccu

SEQ ID NO: 540324 - RNA, 19 nt, Artificial Sequence
  Description of Artificial Sequence: Synthetic oligonucleotide
  Antisense strand to SEQ ID NO: 540323
aggcuuacugauaacaacu

SEQ ID NO: 540325 - RNA, 19 nt, Artificial Sequence
  Description of Artificial Sequence: Synthetic oligonucleotide
  Sense strand starting at position 242 of SEQ ID NO: 318147
uguuaucaguaagccuaau

SEQ ID NO: 540326 - RNA, 19 nt, Artificial Sequence
  Description of Artificial Sequence: Synthetic oligonucleotide
  Antisense strand to SEQ ID NO: 540325
auuaggcuuacugauaaca

SEQ ID NO: 540327 - RNA, 19 nt, Artificial Sequence
  Description of Artificial Sequence: Synthetic oligonucleotide
  Sense strand starting at position 319 of SEQ ID NO: 318147
agaauauaaucaguaguuc

SEQ ID NO: 540328 - RNA, 19 nt, Artificial Sequence
  Description of Artificial Sequence: Synthetic oligonucleotide
  Antisense strand to SEQ ID NO: 540327
gaacuacugauuauauucu

SEQ ID NO: 540329 - RNA, 19 nt, Artificial Sequence
  Description of Artificial Sequence: Synthetic oligonucleotide
  Sense strand starting at position 366 of SEQ ID NO: 318147
aacaaagucuggcugggau

SEQ ID NO: 540330 - RNA, 19 nt, Artificial Sequence
  Description of Artificial Sequence: Synthetic oligonucleotide
  Antisense strand to SEQ ID NO: 540329
aucccagccagacuuuguu

SEQ ID NO: 540331 - RNA, 19 nt, Artificial Sequence
  Description of Artificial Sequence: Synthetic oligonucleotide
  Sense strand starting at position 469 of SEQ ID NO: 318147
gugauacuguaccugaagu

SEQ ID NO: 540332 - RNA, 19 nt, Artificial Sequence
  Description of Artificial Sequence: Synthetic oligonucleotide
  Antisense strand to SEQ ID NO: 540331
acuucagguacaguaucac

SEQ ID NO: 540333 - RNA, 19 nt, Artificial Sequence
  Description of Artificial Sequence: Synthetic oligonucleotide
  Sense strand starting at position 679 of SEQ ID NO: 318147
uaacuagggugggauuuau

SEQ ID NO: 540334 - RNA, 19 nt, Artificial Sequence
  Description of Artificial Sequence: Synthetic oligonucleotide
  Antisense strand to SEQ ID NO: 540333
auaaaucccacccuaguua

SEQ ID NO: 540335 - RNA, 19 nt, Artificial Sequence
  Description of Artificial Sequence: Synthetic oligonucleotide
  Sense strand starting at position 806 of SEQ ID NO: 318147
uuaacaagucuuugacuga

SEQ ID NO: 540336 - RNA, 19 nt, Artificial Sequence
  Description of Artificial Sequence: Synthetic oligonucleotide
  Antisense strand to SEQ ID NO: 540335
ucagucaaagacuuguuaa

SEQ ID NO: 540337 - RNA, 19 nt, Artificial Sequence
  Description of Artificial Sequence: Synthetic oligonucleotide
  Sense strand starting at position 939 of SEQ ID NO: 318147
gagcaagccuuuccugaag

SEQ ID NO: 540338 - RNA, 19 nt, Artificial Sequence
  Description of Artificial Sequence: Synthetic oligonucleotide
  Antisense strand to SEQ ID NO: 540337
cuucaggaaaggcuugcuc

SEQ ID NO: 540339 - RNA, 19 nt, Artificial Sequence
  Description of Artificial Sequence: Synthetic oligonucleotide
  Sense strand starting at position 1460 of SEQ ID NO: 318147
cccacucaccauuggugaa

SEQ ID NO: 540340 - RNA, 19 nt, Artificial Sequence
  Description of Artificial Sequence: Synthetic oligonucleotide
  Antisense strand to SEQ ID NO: 540339
uucaccaauggugaguggg

SEQ ID NO: 540341 - RNA, 19 nt, Artificial Sequence
  Description of Artificial Sequence: Synthetic oligonucleotide
  Sense strand starting at position 2022 of SEQ ID NO: 318147
cgagugaguggguaguuaa

SEQ ID NO: 540342 - RNA, 19 nt, Artificial Sequence
  Description of Artificial Sequence: Synthetic oligonucleotide
  Antisense strand to SEQ ID NO: 540341
uuaacuacccacucacucg

SEQ ID NO: 540343 - RNA, 19 nt, Artificial Sequence
  Description of Artificial Sequence: Synthetic oligonucleotide
  Sense strand starting at position 2180 of SEQ ID NO: 318147
gggaucacugcucgaagga

SEQ ID NO: 540344 - RNA, 19 nt, Artificial Sequence
  Description of Artificial Sequence: Synthetic oligonucleotide
  Antisense strand to SEQ ID NO: 540343
uccuucgagcagugauccc

SEQ ID NO: 540345 - RNA, 19 nt, Artificial Sequence
  Description of Artificial Sequence: Synthetic oligonucleotide
  Sense strand starting at position 2445 of SEQ ID NO: 318147
uguuccgagccuuaaauca

SEQ ID NO: 540346 - RNA, 19 nt, Artificial Sequence
  Description of Artificial Sequence: Synthetic oligonucleotide
  Antisense strand to SEQ ID NO: 540345
ugauuuaaggcucggaaca

SEQ ID NO: 540347 - RNA, 19 nt, Artificial Sequence
  Description of Artificial Sequence: Synthetic oligonucleotide
  Sense strand starting at position 2971 of SEQ ID NO: 318147
cuagguuucgaagaaguca

SEQ ID NO: 540348 - RNA, 19 nt, Artificial Sequence
  Description of Artificial Sequence: Synthetic oligonucleotide
  Antisense strand to SEQ ID NO: 540347
ugacuucuucgaaaccuag

SEQ ID NO: 540349 - RNA, 19 nt, Artificial Sequence
  Description of Artificial Sequence: Synthetic oligonucleotide
  Sense strand starting at position 3058 of SEQ ID NO: 318147
ugaaacuuccaguggauac

SEQ ID NO: 540350 - RNA, 19 nt, Artificial Sequence
  Description of Artificial Sequence: Synthetic oligonucleotide
  Antisense strand to SEQ ID NO: 540349
guauccacuggaaguuuca

SEQ ID NO: 540351 - RNA, 19 nt, Artificial Sequence
  Description of Artificial Sequence: Synthetic oligonucleotide
  Sense strand starting at position 3251 of SEQ ID NO: 318147
cugcuuagugcuuugccua

SEQ ID NO: 540352 - RNA, 19 nt, Artificial Sequence
  Description of Artificial Sequence: Synthetic oligonucleotide
  Antisense strand to SEQ ID NO: 540351
uaggcaaagcacuaagcag

SEQ ID NO: 540353 - RNA, 19 nt, Artificial Sequence
  Description of Artificial Sequence: Synthetic oligonucleotide
  Sense strand starting at position 3285 of SEQ ID NO: 318147
cauuuaagucucggcucaa

SEQ ID NO: 540354 - RNA, 19 nt, Artificial Sequence
  Description of Artificial Sequence: Synthetic oligonucleotide
  Antisense strand to SEQ ID NO: 540353
uugagccgagacuuaaaug

SEQ ID NO: 540355 - RNA, 19 nt, Artificial Sequence
  Description of Artificial Sequence: Synthetic oligonucleotide
  Sense strand starting at position 3289 of SEQ ID NO: 318147
uaagucucggcucaaaugu

SEQ ID NO: 540356 - RNA, 19 nt, Artificial Sequence
  Description of Artificial Sequence: Synthetic oligonucleotide
  Antisense strand to SEQ ID NO: 540355
acauuugagccgagacuua

SEQ ID NO: 540357 - RNA, 19 nt, Artificial Sequence
  Description of Artificial Sequence: Synthetic oligonucleotide
  Sense strand starting at position 3304 of SEQ ID NO: 318147
augucaccucugcaaagaa

SEQ ID NO: 540358 - RNA, 19 nt, Artificial Sequence
  Description of Artificial Sequence: Synthetic oligonucleotide
  Antisense strand to SEQ ID NO: 540357
uucuuugcagaggugacau

SEQ ID NO: 540359 - RNA, 19 nt, Artificial Sequence
  Description of Artificial Sequence: Synthetic oligonucleotide
  Sense strand starting at position 3322 of SEQ ID NO: 318147
acccuugucugaccauaca

SEQ ID NO: 540360 - RNA, 19 nt, Artificial Sequence
  Description of Artificial Sequence: Synthetic oligonucleotide
  Antisense strand to SEQ ID NO: 540359
uguauggucagacaagggu

SEQ ID NO: 540361 - RNA, 19 nt, Artificial Sequence
  Description of Artificial Sequence: Synthetic oligonucleotide
  Sense strand starting at position 3425 of SEQ ID NO: 318147
uggauuuguugcuuauuau

SEQ ID NO: 540362 - RNA, 19 nt, Artificial Sequence
  Description of Artificial Sequence: Synthetic oligonucleotide
  Antisense strand to SEQ ID NO: 540361
auaauaagcaacaaaucca

SEQ ID NO: 540363 - RNA, 19 nt, Artificial Sequence
  Description of Artificial Sequence: Synthetic oligonucleotide
  Sense strand starting at position 3510 of SEQ ID NO: 318147
cccaaugccuggguaagua

SEQ ID NO: 540364 - RNA, 19 nt, Artificial Sequence
  Description of Artificial Sequence: Synthetic oligonucleotide
  Antisense strand to SEQ ID NO: 540363
uacuuacccaggcauuggg

SEQ ID NO: 540365 - RNA, 19 nt, Artificial Sequence
  Description of Artificial Sequence: Synthetic oligonucleotide
  Sense strand starting at position 3558 of SEQ ID NO: 318147
gaaggacauagugguguuu

SEQ ID NO: 540366 - RNA, 19 nt, Artificial Sequence
  Description of Artificial Sequence: Synthetic oligonucleotide
  Antisense strand to SEQ ID NO: 540365
aaacaccacuauguccuuc

SEQ ID NO: 540367 - RNA, 19 nt, Artificial Sequence
  Description of Artificial Sequence: Synthetic oligonucleotide
  Sense strand starting at position 3564 of SEQ ID NO: 318147
cauagugguguuuagaguu

SEQ ID NO: 540368 - RNA, 19 nt, Artificial Sequence
  Description of Artificial Sequence: Synthetic oligonucleotide
  Antisense strand to SEQ ID NO: 540367
aacucuaaacaccacuaug

SEQ ID NO: 540369 - RNA, 19 nt, Artificial Sequence
  Description of Artificial Sequence: Synthetic oligonucleotide
  Sense strand starting at position 3623 of SEQ ID NO: 318147
acugaaugauguguuugau

SEQ ID NO: 540370 - RNA, 19 nt, Artificial Sequence
  Description of Artificial Sequence: Synthetic oligonucleotide
  Antisense strand to SEQ ID NO: 540369
aucaaacacaucauucagu

SEQ ID NO: 540371 - RNA, 19 nt, Artificial Sequence
  Description of Artificial Sequence: Synthetic oligonucleotide
  Sense strand starting at position 3626 of SEQ ID NO: 318147
gaaugauguguuugaucag

SEQ ID NO: 540372 - RNA, 19 nt, Artificial Sequence
  Description of Artificial Sequence: Synthetic oligonucleotide
  Antisense strand to SEQ ID NO: 540371
cugaucaaacacaucauuc

SEQ ID NO: 540373 - RNA, 19 nt, Artificial Sequence
  Description of Artificial Sequence: Synthetic oligonucleotide
  Sense strand starting at position 3632 of SEQ ID NO: 318147
uguguuugaucaguacaga

SEQ ID NO: 540374 - RNA, 19 nt, Artificial Sequence
  Description of Artificial Sequence: Synthetic oligonucleotide
  Antisense strand to SEQ ID NO: 540373
ucuguacugaucaaacaca

SEQ ID NO: 540375 - RNA, 19 nt, Artificial Sequence
  Description of Artificial Sequence: Synthetic oligonucleotide
  Sense strand starting at position 3633 of SEQ ID NO: 318147
guguuugaucaguacagag

SEQ ID NO: 540376 - RNA, 19 nt, Artificial Sequence
  Description of Artificial Sequence: Synthetic oligonucleotide
  Antisense strand to SEQ ID NO: 540375
cucuguacugaucaaacac

SEQ ID NO: 540377 - RNA, 19 nt, Artificial Sequence
  Description of Artificial Sequence: Synthetic oligonucleotide
  Sense strand starting at position 3647 of SEQ ID NO: 318147
cagagaaggugucuguauc

SEQ ID NO: 540378 - RNA, 19 nt, Artificial Sequence
  Description of Artificial Sequence: Synthetic oligonucleotide
  Antisense strand to SEQ ID NO: 540377
gauacagacaccuucucug

SEQ ID NO: 540379 - RNA, 19 nt, Artificial Sequence
  Description of Artificial Sequence: Synthetic oligonucleotide
  Sense strand starting at position 3648 of SEQ ID NO: 318147
agagaaggugucuguauca

SEQ ID NO: 540380 - RNA, 19 nt, Artificial Sequence
  Description of Artificial Sequence: Synthetic oligonucleotide
  Antisense strand to SEQ ID NO: 540379
ugauacagacaccuucucu

SEQ ID NO: 540381 - RNA, 19 nt, Artificial Sequence
  Description of Artificial Sequence: Synthetic oligonucleotide
  Sense strand starting at position 3682 of SEQ ID NO: 318147
cugcuaucucccuaaugug

SEQ ID NO: 540382 - RNA, 19 nt, Artificial Sequence
  Description of Artificial Sequence: Synthetic oligonucleotide
  Antisense strand to SEQ ID NO: 540381
cacauuagggagauagcag

SEQ ID NO: 540383 - RNA, 19 nt, Artificial Sequence
  Description of Artificial Sequence: Synthetic oligonucleotide
  Sense strand starting at position 3699 of SEQ ID NO: 318147
ugugaaagguaaucagaac

SEQ ID NO: 540384 - RNA, 19 nt, Artificial Sequence
  Description of Artificial Sequence: Synthetic oligonucleotide
  Antisense strand to SEQ ID NO: 540383
guucugauuaccuuucaca

SEQ ID NO: 540385 - RNA, 19 nt, Artificial Sequence
  Description of Artificial Sequence: Synthetic oligonucleotide
  Sense strand starting at position 3856 of SEQ ID NO: 318147
auaagacgcucuucucuau

SEQ ID NO: 540386 - RNA, 19 nt, Artificial Sequence
  Description of Artificial Sequence: Synthetic oligonucleotide
  Antisense strand to SEQ ID NO: 540385
auagagaagagcgucuuau

SEQ ID NO: 540387 - RNA, 19 nt, Artificial Sequence
  Description of Artificial Sequence: Synthetic oligonucleotide
  Sense strand starting at position 3885 of SEQ ID NO: 318147
augucauguucccuugaag

SEQ ID NO: 540388 - RNA, 19 nt, Artificial Sequence
  Description of Artificial Sequence: Synthetic oligonucleotide
  Antisense strand to SEQ ID NO: 540387
cuucaagggaacaugacau

SEQ ID NO: 540389 - RNA, 19 nt, Artificial Sequence
  Description of Artificial Sequence: Synthetic oligonucleotide
  Sense strand starting at position 3981 of SEQ ID NO: 318147
accuguaaccuacagucua

SEQ ID NO: 540390 - RNA, 19 nt, Artificial Sequence
  Description of Artificial Sequence: Synthetic oligonucleotide
  Antisense strand to SEQ ID NO: 540389
uagacuguagguuacaggu

SEQ ID NO: 540391 - RNA, 19 nt, Artificial Sequence
  Description of Artificial Sequence: Synthetic oligonucleotide
  Sense strand starting at position 12 of SEQ ID NO: 318148
gcauguguugcuuuaaguu

SEQ ID NO: 540392 - RNA, 19 nt, Artificial Sequence
  Description of Artificial Sequence: Synthetic oligonucleotide
  Antisense strand to SEQ ID NO: 540391
aacuuaaagcaacacaugc

SEQ ID NO: 540393 - RNA, 19 nt, Artificial Sequence
  Description of Artificial Sequence: Synthetic oligonucleotide
  Sense strand starting at position 554 of SEQ ID NO: 318148
uguguugaaauauacaugu

SEQ ID NO: 540394 - RNA, 19 nt, Artificial Sequence
  Description of Artificial Sequence: Synthetic oligonucleotide
  Antisense strand to SEQ ID NO: 540393
acauguauauuucaacaca

SEQ ID NO: 540395 - RNA, 19 nt, Artificial Sequence
  Description of Artificial Sequence: Synthetic oligonucleotide
  Sense strand starting at position 604 of SEQ ID NO: 318148
agccaugaauaagacuuau

SEQ ID NO: 540396 - RNA, 19 nt, Artificial Sequence
  Description of Artificial Sequence: Synthetic oligonucleotide
  Antisense strand to SEQ ID NO: 540395
auaagucuuauucauggcu

SEQ ID NO: 540397 - RNA, 19 nt, Artificial Sequence
  Description of Artificial Sequence: Synthetic oligonucleotide
  Sense strand starting at position 694 of SEQ ID NO: 318148
acucaacuuuggucagaua

SEQ ID NO: 540398 - RNA, 19 nt, Artificial Sequence
  Description of Artificial Sequence: Synthetic oligonucleotide
  Antisense strand to SEQ ID NO: 540397
uaucugaccaaaguugagu

SEQ ID NO: 540399 - RNA, 19 nt, Artificial Sequence
  Description of Artificial Sequence: Synthetic oligonucleotide
  Sense strand starting at position 695 of SEQ ID NO: 318148
cucaacuuuggucagauau

SEQ ID NO: 540400 - RNA, 19 nt, Artificial Sequence
  Description of Artificial Sequence: Synthetic oligonucleotide
  Antisense strand to SEQ ID NO: 540399
auaucugaccaaaguugag

SEQ ID NO: 540401 - RNA, 19 nt, Artificial Sequence
  Description of Artificial Sequence: Synthetic oligonucleotide
  Sense strand starting at position 702 of SEQ ID NO: 318148
uuggucagauauggagaau

SEQ ID NO: 540402 - RNA, 19 nt, Artificial Sequence
  Description of Artificial Sequence: Synthetic oligonucleotide
  Antisense strand to SEQ ID NO: 540401
auucuccauaucugaccaa

SEQ ID NO: 540403 - RNA, 19 nt, Artificial Sequence
  Description of Artificial Sequence: Synthetic oligonucleotide
  Sense strand starting at position 962 of SEQ ID NO: 318148
uuuggugaucaugagccau

SEQ ID NO: 540404 - RNA, 19 nt, Artificial Sequence
  Description of Artificial Sequence: Synthetic oligonucleotide
  Antisense strand to SEQ ID NO: 540403
auggcucaugaucaccaaa

SEQ ID NO: 540405 - RNA, 19 nt, Artificial Sequence
  Description of Artificial Sequence: Synthetic oligonucleotide
  Sense strand starting at position 966 of SEQ ID NO: 318148
gugaucaugagccauguca

SEQ ID NO: 540406 - RNA, 19 nt, Artificial Sequence
  Description of Artificial Sequence: Synthetic oligonucleotide
  Antisense strand to SEQ ID NO: 540405
ugacauggcucaugaucac

SEQ ID NO: 540407 - RNA, 19 nt, Artificial Sequence
  Description of Artificial Sequence: Synthetic oligonucleotide
  Sense strand starting at position 1102 of SEQ ID NO: 318148
gaaacuauucugggacgua

SEQ ID NO: 540408 - RNA, 19 nt, Artificial Sequence
  Description of Artificial Sequence: Synthetic oligonucleotide
  Antisense strand to SEQ ID NO: 540407
uacgucccagaauaguuuc

SEQ ID NO: 540409 - RNA, 19 nt, Artificial Sequence
  Description of Artificial Sequence: Synthetic oligonucleotide
  Sense strand starting at position 1105 of SEQ ID NO: 318148
acuauucugggacguauua

SEQ ID NO: 540410 - RNA, 19 nt, Artificial Sequence
  Description of Artificial Sequence: Synthetic oligonucleotide
  Antisense strand to SEQ ID NO: 540409
uaauacgucccagaauagu

SEQ ID NO: 540411 - RNA, 19 nt, Artificial Sequence
  Description of Artificial Sequence: Synthetic oligonucleotide
  Sense strand starting at position 1114 of SEQ ID NO: 318148
ggacguauuauuuguucca

SEQ ID NO: 540412 - RNA, 19 nt, Artificial Sequence
  Description of Artificial Sequence: Synthetic oligonucleotide
  Antisense strand to SEQ ID NO: 540411
uggaacaaauaauacgucc

SEQ ID NO: 540413 - RNA, 19 nt, Artificial Sequence
  Description of Artificial Sequence: Synthetic oligonucleotide
  Sense strand starting at position 1115 of SEQ ID NO: 318148
gacguauuauuuguuccaa

SEQ ID NO: 540414 - RNA, 19 nt, Artificial Sequence
  Description of Artificial Sequence: Synthetic oligonucleotide
  Antisense strand to SEQ ID NO: 540413
uuggaacaaauaauacguc

SEQ ID NO: 540415 - RNA, 19 nt, Artificial Sequence
  Description of Artificial Sequence: Synthetic oligonucleotide
  Sense strand starting at position 1116 of SEQ ID NO: 318148
acguauuauuuguuccaac

SEQ ID NO: 540416 - RNA, 19 nt, Artificial Sequence
  Description of Artificial Sequence: Synthetic oligonucleotide
  Antisense strand to SEQ ID NO: 540415
guuggaacaaauaauacgu

SEQ ID NO: 540417 - RNA, 19 nt, Artificial Sequence
  Description of Artificial Sequence: Synthetic oligonucleotide
  Sense strand starting at position 1117 of SEQ ID NO: 318148
cguauuauuuguuccaaca

SEQ ID NO: 540418 - RNA, 19 nt, Artificial Sequence
  Description of Artificial Sequence: Synthetic oligonucleotide
  Antisense strand to SEQ ID NO: 540417
uguuggaacaaauaauacg

SEQ ID NO: 540419 - RNA, 19 nt, Artificial Sequence
  Description of Artificial Sequence: Synthetic oligonucleotide
  Sense strand starting at position 1217 of SEQ ID NO: 318148
gauuaacugguauggucaa

SEQ ID NO: 540420 - RNA, 19 nt, Artificial Sequence
  Description of Artificial Sequence: Synthetic oligonucleotide
  Antisense strand to SEQ ID NO: 540419
uugaccauaccaguuaauc

SEQ ID NO: 540421 - RNA, 19 nt, Artificial Sequence
  Description of Artificial Sequence: Synthetic oligonucleotide
  Sense strand starting at position 1637 of SEQ ID NO: 318148
aggcuaucagagugaaaua

SEQ ID NO: 540422 - RNA, 19 nt, Artificial Sequence
  Description of Artificial Sequence: Synthetic oligonucleotide
  Antisense strand to SEQ ID NO: 540421
uauuucacucugauagccu

SEQ ID NO: 540423 - RNA, 19 nt, Artificial Sequence
  Description of Artificial Sequence: Synthetic oligonucleotide
  Sense strand starting at position 1992 of SEQ ID NO: 318148
gaguuaggagcuugcccaa

SEQ ID NO: 540424 - RNA, 19 nt, Artificial Sequence
  Description of Artificial Sequence: Synthetic oligonucleotide
  Antisense strand to SEQ ID NO: 540423
uugggcaagcuccuaacuc

SEQ ID NO: 540425 - RNA, 19 nt, Artificial Sequence
  Description of Artificial Sequence: Synthetic oligonucleotide
  Sense strand starting at position 2021 of SEQ ID NO: 318148
ggcauuucgaguuaugcuu

SEQ ID NO: 540426 - RNA, 19 nt, Artificial Sequence
  Description of Artificial Sequence: Synthetic oligonucleotide
  Antisense strand to SEQ ID NO: 540425
aagcauaacucgaaaugcc

SEQ ID NO: 540427 - RNA, 19 nt, Artificial Sequence
  Description of Artificial Sequence: Synthetic oligonucleotide
  Sense strand starting at position 2027 of SEQ ID NO: 318148
ucgaguuaugcuugguaua

SEQ ID NO: 540428 - RNA, 19 nt, Artificial Sequence
  Description of Artificial Sequence: Synthetic oligonucleotide
  Antisense strand to SEQ ID NO: 540427
uauaccaagcauaacucga

SEQ ID NO: 540429 - RNA, 19 nt, Artificial Sequence
  Description of Artificial Sequence: Synthetic oligonucleotide
  Sense strand starting at position 2028 of SEQ ID NO: 318148
cgaguuaugcuugguauag

SEQ ID NO: 540430 - RNA, 19 nt, Artificial Sequence
  Description of Artificial Sequence: Synthetic oligonucleotide
  Antisense strand to SEQ ID NO: 540429
cuauaccaagcauaacucg

SEQ ID NO: 540431 - RNA, 19 nt, Artificial Sequence
  Description of Artificial Sequence: Synthetic oligonucleotide
  Sense strand starting at position 2029 of SEQ ID NO: 318148
gaguuaugcuugguauagc

SEQ ID NO: 540432 - RNA, 19 nt, Artificial Sequence
  Description of Artificial Sequence: Synthetic oligonucleotide
  Antisense strand to SEQ ID NO: 540431
gcuauaccaagcauaacuc

SEQ ID NO: 540433 - RNA, 19 nt, Artificial Sequence
  Description of Artificial Sequence: Synthetic oligonucleotide
  Sense strand starting at position 2032 of SEQ ID NO: 318148
uuaugcuugguauagcuau

SEQ ID NO: 540434 - RNA, 19 nt, Artificial Sequence
  Description of Artificial Sequence: Synthetic oligonucleotide
  Antisense strand to SEQ ID NO: 540433
auagcuauaccaagcauaa

SEQ ID NO: 540435 - RNA, 19 nt, Artificial Sequence
  Description of Artificial Sequence: Synthetic oligonucleotide
  Sense strand starting at position 2084 of SEQ ID NO: 318148
gaaagcaauucugagaaga

SEQ ID NO: 540436 - RNA, 19 nt, Artificial Sequence
  Description of Artificial Sequence: Synthetic oligonucleotide
  Antisense strand to SEQ ID NO: 540435
ucuucucagaauugcuuuc

SEQ ID NO: 540437 - RNA, 19 nt, Artificial Sequence
  Description of Artificial Sequence: Synthetic oligonucleotide
  Sense strand starting at position 2155 of SEQ ID NO: 318148
ugaauuagguaggagacaa

SEQ ID NO: 540438 - RNA, 19 nt, Artificial Sequence
  Description of Artificial Sequence: Synthetic oligonucleotide
  Antisense strand to SEQ ID NO: 540437
uugucuccuaccuaauuca

SEQ ID NO: 540439 - RNA, 19 nt, Artificial Sequence
  Description of Artificial Sequence: Synthetic oligonucleotide
  Sense strand starting at position 2374 of SEQ ID NO: 318148
cacagagugguguggaaau

SEQ ID NO: 540440 - RNA, 19 nt, Artificial Sequence
  Description of Artificial Sequence: Synthetic oligonucleotide
  Antisense strand to SEQ ID NO: 540439
auuuccacaccacucugug

SEQ ID NO: 540441 - RNA, 19 nt, Artificial Sequence
  Description of Artificial Sequence: Synthetic oligonucleotide
  Sense strand starting at position 2510 of SEQ ID NO: 318148
cccuuaaaucugugcauga

SEQ ID NO: 540442 - RNA, 19 nt, Artificial Sequence
  Description of Artificial Sequence: Synthetic oligonucleotide
  Antisense strand to SEQ ID NO: 540441
ucaugcacagauuuaaggg

SEQ ID NO: 540443 - RNA, 19 nt, Artificial Sequence
  Description of Artificial Sequence: Synthetic oligonucleotide
  Sense strand starting at position 2511 of SEQ ID NO: 318148
ccuuaaaucugugcaugaa

SEQ ID NO: 540444 - RNA, 19 nt, Artificial Sequence
  Description of Artificial Sequence: Synthetic oligonucleotide
  Antisense strand to SEQ ID NO: 540443
uucaugcacagauuuaagg

SEQ ID NO: 540445 - RNA, 19 nt, Artificial Sequence
  Description of Artificial Sequence: Synthetic oligonucleotide
  Sense strand starting at position 2512 of SEQ ID NO: 318148
cuuaaaucugugcaugaac

SEQ ID NO: 540446 - RNA, 19 nt, Artificial Sequence
  Description of Artificial Sequence: Synthetic oligonucleotide
  Antisense strand to SEQ ID NO: 540445
guucaugcacagauuuaag

SEQ ID NO: 540447 - RNA, 19 nt, Artificial Sequence
  Description of Artificial Sequence: Synthetic oligonucleotide
  Sense strand starting at position 2542 of SEQ ID NO: 318148
acagaauaaucacugagcu

SEQ ID NO: 540448 - RNA, 19 nt, Artificial Sequence
  Description of Artificial Sequence: Synthetic oligonucleotide
  Antisense strand to SEQ ID NO: 540447
agcucagugauuauucugu

SEQ ID NO: 540449 - RNA, 19 nt, Artificial Sequence
  Description of Artificial Sequence: Synthetic oligonucleotide
  Sense strand starting at position 2558 of SEQ ID NO: 318148
gcuacauaugugcagaaca

SEQ ID NO: 540450 - RNA, 19 nt, Artificial Sequence
  Description of Artificial Sequence: Synthetic oligonucleotide
  Antisense strand to SEQ ID NO: 540449
uguucugcacauauguagc

SEQ ID NO: 540451 - RNA, 19 nt, Artificial Sequence
  Description of Artificial Sequence: Synthetic oligonucleotide
  Sense strand starting at position 2745 of SEQ ID NO: 318148
ucuggaaguucuggagaga

SEQ ID NO: 540452 - RNA, 19 nt, Artificial Sequence
  Description of Artificial Sequence: Synthetic oligonucleotide
  Antisense strand to SEQ ID NO: 540451
ucucuccagaacuuccaga

SEQ ID NO: 540453 - RNA, 19 nt, Artificial Sequence
  Description of Artificial Sequence: Synthetic oligonucleotide
  Sense strand starting at position 2851 of SEQ ID NO: 318148
ggcugaaucuuucucacac

SEQ ID NO: 540454 - RNA, 19 nt, Artificial Sequence
  Description of Artificial Sequence: Synthetic oligonucleotide
  Antisense strand to SEQ ID NO: 540453
gugugagaaagauucagcc

SEQ ID NO: 540455 - RNA, 19 nt, Artificial Sequence
  Description of Artificial Sequence: Synthetic oligonucleotide
  Sense strand starting at position 3181 of SEQ ID NO: 318148
cagggugaucgccagccaa

SEQ ID NO: 540456 - RNA, 19 nt, Artificial Sequence
  Description of Artificial Sequence: Synthetic oligonucleotide
  Antisense strand to SEQ ID NO: 540455
uuggcuggcgaucacccug

SEQ ID NO: 540457 - RNA, 19 nt, Artificial Sequence
  Description of Artificial Sequence: Synthetic oligonucleotide
  Sense strand starting at position 3254 of SEQ ID NO: 318148
cauaauguccaggaugcaa

SEQ ID NO: 540458 - RNA, 19 nt, Artificial Sequence
  Description of Artificial Sequence: Synthetic oligonucleotide
  Antisense strand to SEQ ID NO: 540457
uugcauccuggacauuaug

SEQ ID NO: 540459 - RNA, 19 nt, Artificial Sequence
  Description of Artificial Sequence: Synthetic oligonucleotide
  Sense strand starting at position 3330 of SEQ ID NO: 318148
acgcaaucaccagaugaug

SEQ ID NO: 540460 - RNA, 19 nt, Artificial Sequence
  Description of Artificial Sequence: Synthetic oligonucleotide
  Antisense strand to SEQ ID NO: 540459
caucaucuggugauugcgu

SEQ ID NO: 540461 - RNA, 19 nt, Artificial Sequence
  Description of Artificial Sequence: Synthetic oligonucleotide
  Sense strand starting at position 3332 of SEQ ID NO: 318148
gcaaucaccagaugaugga

SEQ ID NO: 540462 - RNA, 19 nt, Artificial Sequence
  Description of Artificial Sequence: Synthetic oligonucleotide
  Antisense strand to SEQ ID NO: 540461
uccaucaucuggugauugc

SEQ ID NO: 540463 - RNA, 19 nt, Artificial Sequence
  Description of Artificial Sequence: Synthetic oligonucleotide
  Sense strand starting at position 3362 of SEQ ID NO: 318148
cuuuaaagcgguuauuaua

SEQ ID NO: 540464 - RNA, 19 nt, Artificial Sequence
  Description of Artificial Sequence: Synthetic oligonucleotide
  Antisense strand to SEQ ID NO: 540463
uauaauaaccgcuuuaaag

SEQ ID NO: 540465 - RNA, 19 nt, Artificial Sequence
  Description of Artificial Sequence: Synthetic oligonucleotide
  Sense strand starting at position 3370 of SEQ ID NO: 318148
cgguuauuauaauuaugcu

SEQ ID NO: 540466 - RNA, 19 nt, Artificial Sequence
  Description of Artificial Sequence: Synthetic oligonucleotide
  Antisense strand to SEQ ID NO: 540465
agcauaauuauaauaaccg

SEQ ID NO: 540467 - RNA, 19 nt, Artificial Sequence
  Description of Artificial Sequence: Synthetic oligonucleotide
  Sense strand starting at position 3376 of SEQ ID NO: 318148
uuauaauuaugcuccacga

SEQ ID NO: 540468 - RNA, 19 nt, Artificial Sequence
  Description of Artificial Sequence: Synthetic oligonucleotide
  Antisense strand to SEQ ID NO: 540467
ucguggagcauaauuauaa

SEQ ID NO: 540469 - RNA, 19 nt, Artificial Sequence
  Description of Artificial Sequence: Synthetic oligonucleotide
  Sense strand starting at position 3380 of SEQ ID NO: 318148
aauuaugcuccacgaggua

SEQ ID NO: 540470 - RNA, 19 nt, Artificial Sequence
  Description of Artificial Sequence: Synthetic oligonucleotide
  Antisense strand to SEQ ID NO: 540469
uaccucguggagcauaauu

SEQ ID NO: 540471 - RNA, 19 nt, Artificial Sequence
  Description of Artificial Sequence: Synthetic oligonucleotide
  Sense strand starting at position 77 of SEQ ID NO: 318149
uguuaaucuugagcuacaa

SEQ ID NO: 540472 - RNA, 19 nt, Artificial Sequence
  Description of Artificial Sequence: Synthetic oligonucleotide
  Antisense strand to SEQ ID NO: 540471
uuguagcucaagauuaaca

SEQ ID NO: 540473 - RNA, 19 nt, Artificial Sequence
  Description of Artificial Sequence: Synthetic oligonucleotide
  Sense strand starting at position 144 of SEQ ID NO: 318149
uggucuagguuucugaaag

SEQ ID NO: 540474 - RNA, 19 nt, Artificial Sequence
  Description of Artificial Sequence: Synthetic oligonucleotide
  Antisense strand to SEQ ID NO: 540473
cuuucagaaaccuagacca

SEQ ID NO: 540475 - RNA, 19 nt, Artificial Sequence
  Description of Artificial Sequence: Synthetic oligonucleotide
  Sense strand starting at position 162 of SEQ ID NO: 318149
ggaauaauuuccuagcuga

SEQ ID NO: 540476 - RNA, 19 nt, Artificial Sequence
  Description of Artificial Sequence: Synthetic oligonucleotide
  Antisense strand to SEQ ID NO: 540475
ucagcuaggaaauuauucc

SEQ ID NO: 540477 - RNA, 19 nt, Artificial Sequence
  Description of Artificial Sequence: Synthetic oligonucleotide
  Sense strand starting at position 265 of SEQ ID NO: 318149
aggugaaggguuugaggua

SEQ ID NO: 540478 - RNA, 19 nt, Artificial Sequence
  Description of Artificial Sequence: Synthetic oligonucleotide
  Antisense strand to SEQ ID NO: 540477
uaccucaaacccuucaccu

SEQ ID NO: 540479 - RNA, 19 nt, Artificial Sequence
  Description of Artificial Sequence: Synthetic oligonucleotide
  Sense strand starting at position 299 of SEQ ID NO: 318149
gccaaauucuugucugaaa

SEQ ID NO: 540480 - RNA, 19 nt, Artificial Sequence
  Description of Artificial Sequence: Synthetic oligonucleotide
  Antisense strand to SEQ ID NO: 540479
uuucagacaagaauuuggc

SEQ ID NO: 540481 - RNA, 19 nt, Artificial Sequence
  Description of Artificial Sequence: Synthetic oligonucleotide
  Sense strand starting at position 382 of SEQ ID NO: 318149
uggauacaggccugacuuu

SEQ ID NO: 540482 - RNA, 19 nt, Artificial Sequence
  Description of Artificial Sequence: Synthetic oligonucleotide
  Antisense strand to SEQ ID NO: 540481
aaagucaggccuguaucca

SEQ ID NO: 540483 - RNA, 19 nt, Artificial Sequence
  Description of Artificial Sequence: Synthetic oligonucleotide
  Sense strand starting at position 541 of SEQ ID NO: 318149
ugaccugaacuuggacauu

SEQ ID NO: 540484 - RNA, 19 nt, Artificial Sequence
  Description of Artificial Sequence: Synthetic oligonucleotide
  Antisense strand to SEQ ID NO: 540483
aauguccaaguucagguca

SEQ ID NO: 540485 - RNA, 19 nt, Artificial Sequence
  Description of Artificial Sequence: Synthetic oligonucleotide
  Sense strand starting at position 566 of SEQ ID NO: 318149
ucucuagugccugauuugu

SEQ ID NO: 540486 - RNA, 19 nt, Artificial Sequence
  Description of Artificial Sequence: Synthetic oligonucleotide
  Antisense strand to SEQ ID NO: 540485
acaaaucaggcacuagaga

SEQ ID NO: 540487 - RNA, 19 nt, Artificial Sequence
  Description of Artificial Sequence: Synthetic oligonucleotide
  Sense strand starting at position 572 of SEQ ID NO: 318149
gugccugauuugucuacag

SEQ ID NO: 540488 - RNA, 19 nt, Artificial Sequence
  Description of Artificial Sequence: Synthetic oligonucleotide
  Antisense strand to SEQ ID NO: 540487
cuguagacaaaucaggcac

SEQ ID NO: 540489 - RNA, 19 nt, Artificial Sequence
  Description of Artificial Sequence: Synthetic oligonucleotide
  Sense strand starting at position 574 of SEQ ID NO: 318149
gccugauuugucuacagcu

SEQ ID NO: 540490 - RNA, 19 nt, Artificial Sequence
  Description of Artificial Sequence: Synthetic oligonucleotide
  Antisense strand to SEQ ID NO: 540489
agcuguagacaaaucaggc

SEQ ID NO: 540491 - RNA, 19 nt, Artificial Sequence
  Description of Artificial Sequence: Synthetic oligonucleotide
  Sense strand starting at position 607 of SEQ ID NO: 318149
cacauugcucaggagcaga

SEQ ID NO: 540492 - RNA, 19 nt, Artificial Sequence
  Description of Artificial Sequence: Synthetic oligonucleotide
  Antisense strand to SEQ ID NO: 540491
ucugcuccugagcaaugug

SEQ ID NO: 540493 - RNA, 19 nt, Artificial Sequence
  Description of Artificial Sequence: Synthetic oligonucleotide
  Sense strand starting at position 898 of SEQ ID NO: 318149
ggugcuugggcugagaaua

SEQ ID NO: 540494 - RNA, 19 nt, Artificial Sequence
  Description of Artificial Sequence: Synthetic oligonucleotide
  Antisense strand to SEQ ID NO: 540493
uauucucagcccaagcacc

SEQ ID NO: 540495 - RNA, 19 nt, Artificial Sequence
  Description of Artificial Sequence: Synthetic oligonucleotide
  Sense strand starting at position 916 of SEQ ID NO: 318149
acuggaaacuuauugaguu

SEQ ID NO: 540496 - RNA, 19 nt, Artificial Sequence
  Description of Artificial Sequence: Synthetic oligonucleotide
  Antisense strand to SEQ ID NO: 540495
aacucaauaaguuuccagu

SEQ ID NO: 540497 - RNA, 19 nt, Artificial Sequence
  Description of Artificial Sequence: Synthetic oligonucleotide
  Sense strand starting at position 924 of SEQ ID NO: 318149
cuuauugaguuccuggauu

SEQ ID NO: 540498 - RNA, 19 nt, Artificial Sequence
  Description of Artificial Sequence: Synthetic oligonucleotide
  Antisense strand to SEQ ID NO: 540497
aauccaggaacucaauaag

SEQ ID NO: 540499 - RNA, 19 nt, Artificial Sequence
  Description of Artificial Sequence: Synthetic oligonucleotide
  Sense strand starting at position 964 of SEQ ID NO: 318149
guaggucauuucuuucuau

SEQ ID NO: 540500 - RNA, 19 nt, Artificial Sequence
  Description of Artificial Sequence: Synthetic oligonucleotide
  Antisense strand to SEQ ID NO: 540499
auagaaagaaaugaccuac

SEQ ID NO: 540501 - RNA, 19 nt, Artificial Sequence
  Description of Artificial Sequence: Synthetic oligonucleotide
  Sense strand starting at position 1073 of SEQ ID NO: 318149
uggagucccaaguaaaguu

SEQ ID NO: 540502 - RNA, 19 nt, Artificial Sequence
  Description of Artificial Sequence: Synthetic oligonucleotide
  Antisense strand to SEQ ID NO: 540501
aacuuuacuugggacucca

SEQ ID NO: 540503 - RNA, 19 nt, Artificial Sequence
  Description of Artificial Sequence: Synthetic oligonucleotide
  Sense strand starting at position 1133 of SEQ ID NO: 318149
cacauugagcagugagauu

SEQ ID NO: 540504 - RNA, 19 nt, Artificial Sequence
  Description of Artificial Sequence: Synthetic oligonucleotide
  Antisense strand to SEQ ID NO: 540503
aaucucacugcucaaugug

SEQ ID NO: 540505 - RNA, 19 nt, Artificial Sequence
  Description of Artificial Sequence: Synthetic oligonucleotide
  Sense strand starting at position 1144 of SEQ ID NO: 318149
gugagauucuguucauggg

SEQ ID NO: 540506 - RNA, 19 nt, Artificial Sequence
  Description of Artificial Sequence: Synthetic oligonucleotide
  Antisense strand to SEQ ID NO: 540505
cccaugaacagaaucucac

SEQ ID NO: 540507 - RNA, 19 nt, Artificial Sequence
  Description of Artificial Sequence: Synthetic oligonucleotide
  Sense strand starting at position 1239 of SEQ ID NO: 318149
gagagauuguaguuguuga

SEQ ID NO: 540508 - RNA, 19 nt, Artificial Sequence
  Description of Artificial Sequence: Synthetic oligonucleotide
  Antisense strand to SEQ ID NO: 540507
ucaacaacuacaaucucuc

SEQ ID NO: 540509 - RNA, 19 nt, Artificial Sequence
  Description of Artificial Sequence: Synthetic oligonucleotide
  Sense strand starting at position 1324 of SEQ ID NO: 318149
gcaugaucacuaggaaaug

SEQ ID NO: 540510 - RNA, 19 nt, Artificial Sequence
  Description of Artificial Sequence: Synthetic oligonucleotide
  Antisense strand to SEQ ID NO: 540509
cauuuccuagugaucaugc

SEQ ID NO: 540511 - RNA, 19 nt, Artificial Sequence
  Description of Artificial Sequence: Synthetic oligonucleotide
  Sense strand starting at position 1354 of SEQ ID NO: 318149
guguuuggacuggaagcaa

SEQ ID NO: 540512 - RNA, 19 nt, Artificial Sequence
  Description of Artificial Sequence: Synthetic oligonucleotide
  Antisense strand to SEQ ID NO: 540511
uugcuuccaguccaaacac

SEQ ID NO: 540513 - RNA, 19 nt, Artificial Sequence
  Description of Artificial Sequence: Synthetic oligonucleotide
  Sense strand starting at position 1429 of SEQ ID NO: 318149
agaguauaacuauguuaug

SEQ ID NO: 540514 - RNA, 19 nt, Artificial Sequence
  Description of Artificial Sequence: Synthetic oligonucleotide
  Antisense strand to SEQ ID NO: 540513
cauaacauaguuauacucu

SEQ ID NO: 540515 - RNA, 19 nt, Artificial Sequence
  Description of Artificial Sequence: Synthetic oligonucleotide
  Sense strand starting at position 1511 of SEQ ID NO: 318149
agaaguuacagucaguauu

SEQ ID NO: 540516 - RNA, 19 nt, Artificial Sequence
  Description of Artificial Sequence: Synthetic oligonucleotide
  Antisense strand to SEQ ID NO: 540515
aauacugacuguaacuucu

SEQ ID NO: 540517 - RNA, 19 nt, Artificial Sequence
  Description of Artificial Sequence: Synthetic oligonucleotide
  Sense strand starting at position 1642 of SEQ ID NO: 318149
gucucuacccagcaauaug

SEQ ID NO: 540518 - RNA, 19 nt, Artificial Sequence
  Description of Artificial Sequence: Synthetic oligonucleotide
  Antisense strand to SEQ ID NO: 540517
cauauugcuggguagagac

SEQ ID NO: 540519 - RNA, 19 nt, Artificial Sequence
  Description of Artificial Sequence: Synthetic oligonucleotide
  Sense strand starting at position 1712 of SEQ ID NO: 318149
gugauuuguacaggugagu

SEQ ID NO: 540520 - RNA, 19 nt, Artificial Sequence
  Description of Artificial Sequence: Synthetic oligonucleotide
  Antisense strand to SEQ ID NO: 540519
acucaccuguacaaaucac

SEQ ID NO: 540521 - RNA, 19 nt, Artificial Sequence
  Description of Artificial Sequence: Synthetic oligonucleotide
  Sense strand starting at position 1723 of SEQ ID NO: 318149
aggugaguauuauccuuua

SEQ ID NO: 540522 - RNA, 19 nt, Artificial Sequence
  Description of Artificial Sequence: Synthetic oligonucleotide
  Antisense strand to SEQ ID NO: 540521
uaaaggauaauacucaccu

SEQ ID NO: 540523 - RNA, 19 nt, Artificial Sequence
  Description of Artificial Sequence: Synthetic oligonucleotide
  Sense strand starting at position 1751 of SEQ ID NO: 318149
auuagaaagcuacauguca

SEQ ID NO: 540524 - RNA, 19 nt, Artificial Sequence
  Description of Artificial Sequence: Synthetic oligonucleotide
  Antisense strand to SEQ ID NO: 540523
ugacauguagcuuucuaau

SEQ ID NO: 540525 - RNA, 19 nt, Artificial Sequence
  Description of Artificial Sequence: Synthetic oligonucleotide
  Sense strand starting at position 2014 of SEQ ID NO: 318149
caggcaguuggauauuagu

SEQ ID NO: 540526 - RNA, 19 nt, Artificial Sequence
  Description of Artificial Sequence: Synthetic oligonucleotide
  Antisense strand to SEQ ID NO: 540525
acuaauauccaacugccug

SEQ ID NO: 540527 - RNA, 19 nt, Artificial Sequence
  Description of Artificial Sequence: Synthetic oligonucleotide
  Sense strand starting at position 2155 of SEQ ID NO: 318149
guaggaucccacugaaggu

SEQ ID NO: 540528 - RNA, 19 nt, Artificial Sequence
  Description of Artificial Sequence: Synthetic oligonucleotide
  Antisense strand to SEQ ID NO: 540527
accuucagugggauccuac

SEQ ID NO: 540529 - RNA, 19 nt, Artificial Sequence
  Description of Artificial Sequence: Synthetic oligonucleotide
  Sense strand starting at position 2592 of SEQ ID NO: 318149
cuaagaagguucuuaacau

SEQ ID NO: 540530 - RNA, 19 nt, Artificial Sequence
  Description of Artificial Sequence: Synthetic oligonucleotide
  Antisense strand to SEQ ID NO: 540529
auguuaagaaccuucuuag

SEQ ID NO: 540531 - RNA, 19 nt, Artificial Sequence
  Description of Artificial Sequence: Synthetic oligonucleotide
  Sense strand starting at position 2648 of SEQ ID NO: 318149
auccgauaggcuugauaag

SEQ ID NO: 540532 - RNA, 19 nt, Artificial Sequence
  Description of Artificial Sequence: Synthetic oligonucleotide
  Antisense strand to SEQ ID NO: 540531
cuuaucaagccuaucggau

SEQ ID NO: 540533 - RNA, 19 nt, Artificial Sequence
  Description of Artificial Sequence: Synthetic oligonucleotide
  Sense strand starting at position 2649 of SEQ ID NO: 318149
uccgauaggcuugauaaga

SEQ ID NO: 540534 - RNA, 19 nt, Artificial Sequence
  Description of Artificial Sequence: Synthetic oligonucleotide
  Antisense strand to SEQ ID NO: 540533
ucuuaucaagccuaucgga

SEQ ID NO: 540535 - RNA, 19 nt, Artificial Sequence
  Description of Artificial Sequence: Synthetic oligonucleotide
  Sense strand starting at position 2659 of SEQ ID NO: 318149
uugauaagauugcccgaua

SEQ ID NO: 540536 - RNA, 19 nt, Artificial Sequence
  Description of Artificial Sequence: Synthetic oligonucleotide
  Antisense strand to SEQ ID NO: 540535
uaucgggcaaucuuaucaa

SEQ ID NO: 540537 - RNA, 19 nt, Artificial Sequence
  Description of Artificial Sequence: Synthetic oligonucleotide
  Sense strand starting at position 2660 of SEQ ID NO: 318149
ugauaagauugcccgauau

SEQ ID NO: 540538 - RNA, 19 nt, Artificial Sequence
  Description of Artificial Sequence: Synthetic oligonucleotide
  Antisense strand to SEQ ID NO: 540537
auaucgggcaaucuuauca

SEQ ID NO: 540539 - RNA, 19 nt, Artificial Sequence
  Description of Artificial Sequence: Synthetic oligonucleotide
  Sense strand starting at position 3387 of SEQ ID NO: 318149
guuuauaaugcacaaaugu

SEQ ID NO: 540540 - RNA, 19 nt, Artificial Sequence
  Description of Artificial Sequence: Synthetic oligonucleotide
  Antisense strand to SEQ ID NO: 540539
acauuugugcauuauaaac

SEQ ID NO: 540541 - RNA, 19 nt, Artificial Sequence
  Description of Artificial Sequence: Synthetic oligonucleotide
  Sense strand starting at position 3427 of SEQ ID NO: 318149
uucugaguuccagacucau

SEQ ID NO: 540542 - RNA, 19 nt, Artificial Sequence
  Description of Artificial Sequence: Synthetic oligonucleotide
  Antisense strand to SEQ ID NO: 540541
augagucuggaacucagaa

SEQ ID NO: 540543 - RNA, 19 nt, Artificial Sequence
  Description of Artificial Sequence: Synthetic oligonucleotide
  Sense strand starting at position 3588 of SEQ ID NO: 318149
gcuagaaaucugggaguca

SEQ ID NO: 540544 - RNA, 19 nt, Artificial Sequence
  Description of Artificial Sequence: Synthetic oligonucleotide
  Antisense strand to SEQ ID NO: 540543
ugacucccagauuucuagc

SEQ ID NO: 540545 - RNA, 19 nt, Artificial Sequence
  Description of Artificial Sequence: Synthetic oligonucleotide
  Sense strand starting at position 3599 of SEQ ID NO: 318149
gggagucauccuugacccu

SEQ ID NO: 540546 - RNA, 19 nt, Artificial Sequence
  Description of Artificial Sequence: Synthetic oligonucleotide
  Antisense strand to SEQ ID NO: 540545
agggucaaggaugacuccc

SEQ ID NO: 540547 - RNA, 19 nt, Artificial Sequence
  Description of Artificial Sequence: Synthetic oligonucleotide
  Sense strand starting at position 3647 of SEQ ID NO: 318149
ccaagaucugcccauugua

SEQ ID NO: 540548 - RNA, 19 nt, Artificial Sequence
  Description of Artificial Sequence: Synthetic oligonucleotide
  Antisense strand to SEQ ID NO: 540547
uacaaugggcagaucuugg

SEQ ID NO: 540549 - RNA, 19 nt, Artificial Sequence
  Description of Artificial Sequence: Synthetic oligonucleotide
  Sense strand starting at position 3723 of SEQ ID NO: 318149
ggguuccugcaguaaccaa

SEQ ID NO: 540550 - RNA, 19 nt, Artificial Sequence
  Description of Artificial Sequence: Synthetic oligonucleotide
  Antisense strand to SEQ ID NO: 540549
uugguuacugcaggaaccc

SEQ ID NO: 540551 - RNA, 19 nt, Artificial Sequence
  Description of Artificial Sequence: Synthetic oligonucleotide
  Sense strand starting at position 124 of SEQ ID NO: 318150
cuauauuacguguauauca

SEQ ID NO: 540552 - RNA, 19 nt, Artificial Sequence
  Description of Artificial Sequence: Synthetic oligonucleotide
  Antisense strand to SEQ ID NO: 540551
ugauauacacguaauauag

SEQ ID NO: 540553 - RNA, 19 nt, Artificial Sequence
  Description of Artificial Sequence: Synthetic oligonucleotide
  Sense strand starting at position 219 of SEQ ID NO: 318150
agugaaagucuuggcacau

SEQ ID NO: 540554 - RNA, 19 nt, Artificial Sequence
  Description of Artificial Sequence: Synthetic oligonucleotide
  Antisense strand to SEQ ID NO: 540553
augugccaagacuuucacu

SEQ ID NO: 540555 - RNA, 19 nt, Artificial Sequence
  Description of Artificial Sequence: Synthetic oligonucleotide
  Sense strand starting at position 254 of SEQ ID NO: 318150
guggcuaucaaccaaguga

SEQ ID NO: 540556 - RNA, 19 nt, Artificial Sequence
  Description of Artificial Sequence: Synthetic oligonucleotide
  Antisense strand to SEQ ID NO: 540555
ucacuugguugauagccac

SEQ ID NO: 540557 - RNA, 19 nt, Artificial Sequence
  Description of Artificial Sequence: Synthetic oligonucleotide
  Sense strand starting at position 694 of SEQ ID NO: 318150
cgagucaccuggguuaaau

SEQ ID NO: 540558 - RNA, 19 nt, Artificial Sequence
  Description of Artificial Sequence: Synthetic oligonucleotide
  Antisense strand to SEQ ID NO: 540557
auuuaacccaggugacucg

SEQ ID NO: 540559 - RNA, 19 nt, Artificial Sequence
  Description of Artificial Sequence: Synthetic oligonucleotide
  Sense strand starting at position 696 of SEQ ID NO: 318150
agucaccuggguuaaauua

SEQ ID NO: 540560 - RNA, 19 nt, Artificial Sequence
  Description of Artificial Sequence: Synthetic oligonucleotide
  Antisense strand to SEQ ID NO: 540559
uaauuuaacccaggugacu

SEQ ID NO: 540561 - RNA, 19 nt, Artificial Sequence
  Description of Artificial Sequence: Synthetic oligonucleotide
  Sense strand starting at position 703 of SEQ ID NO: 318150
uggguuaaauuacuaaucu

SEQ ID NO: 540562 - RNA, 19 nt, Artificial Sequence
  Description of Artificial Sequence: Synthetic oligonucleotide
  Antisense strand to SEQ ID NO: 540561
agauuaguaauuuaaccca

SEQ ID NO: 540563 - RNA, 19 nt, Artificial Sequence
  Description of Artificial Sequence: Synthetic oligonucleotide
  Sense strand starting at position 726 of SEQ ID NO: 318150
auguuaaauuucgccaauc

SEQ ID NO: 540564 - RNA, 19 nt, Artificial Sequence
  Description of Artificial Sequence: Synthetic oligonucleotide
  Antisense strand to SEQ ID NO: 540563
gauuggcgaaauuuaacau

SEQ ID NO: 540565 - RNA, 19 nt, Artificial Sequence
  Description of Artificial Sequence: Synthetic oligonucleotide
  Sense strand starting at position 727 of SEQ ID NO: 318150
uguuaaauuucgccaaucu

SEQ ID NO: 540566 - RNA, 19 nt, Artificial Sequence
  Description of Artificial Sequence: Synthetic oligonucleotide
  Antisense strand to SEQ ID NO: 540565
agauuggcgaaauuuaaca

SEQ ID NO: 540567 - RNA, 19 nt, Artificial Sequence
  Description of Artificial Sequence: Synthetic oligonucleotide
  Sense strand starting at position 825 of SEQ ID NO: 318150
cuccaaggcccucagaaua

SEQ ID NO: 540568 - RNA, 19 nt, Artificial Sequence
  Description of Artificial Sequence: Synthetic oligonucleotide
  Antisense strand to SEQ ID NO: 540567
uauucugagggccuuggag

SEQ ID NO: 540569 - RNA, 19 nt, Artificial Sequence
  Description of Artificial Sequence: Synthetic oligonucleotide
  Sense strand starting at position 847 of SEQ ID NO: 318150
uccagauuccuuugcagag

SEQ ID NO: 540570 - RNA, 19 nt, Artificial Sequence
  Description of Artificial Sequence: Synthetic oligonucleotide
  Antisense strand to SEQ ID NO: 540569
cucugcaaaggaaucugga

SEQ ID NO: 540571 - RNA, 19 nt, Artificial Sequence
  Description of Artificial Sequence: Synthetic oligonucleotide
  Sense strand starting at position 1441 of SEQ ID NO: 318150
gcaauucgaggcugaacaa

SEQ ID NO: 540572 - RNA, 19 nt, Artificial Sequence
  Description of Artificial Sequence: Synthetic oligonucleotide
  Antisense strand to SEQ ID NO: 540571
uuguucagccucgaauugc

SEQ ID NO: 540573 - RNA, 19 nt, Artificial Sequence
  Description of Artificial Sequence: Synthetic oligonucleotide
  Sense strand starting at position 1442 of SEQ ID NO: 318150
caauucgaggcugaacaau

SEQ ID NO: 540574 - RNA, 19 nt, Artificial Sequence
  Description of Artificial Sequence: Synthetic oligonucleotide
  Antisense strand to SEQ ID NO: 540573
auuguucagccucgaauug

SEQ ID NO: 540575 - RNA, 19 nt, Artificial Sequence
  Description of Artificial Sequence: Synthetic oligonucleotide
  Sense strand starting at position 1695 of SEQ ID NO: 318150
cugaguaauggugagagca

SEQ ID NO: 540576 - RNA, 19 nt, Artificial Sequence
  Description of Artificial Sequence: Synthetic oligonucleotide
  Antisense strand to SEQ ID NO: 540575
ugcucucaccauuacucag

SEQ ID NO: 540577 - RNA, 19 nt, Artificial Sequence
  Description of Artificial Sequence: Synthetic oligonucleotide
  Sense strand starting at position 1797 of SEQ ID NO: 318150
gguacaaaccuaugcggaa

SEQ ID NO: 540578 - RNA, 19 nt, Artificial Sequence
  Description of Artificial Sequence: Synthetic oligonucleotide
  Antisense strand to SEQ ID NO: 540577
uuccgcauagguuuguacc

SEQ ID NO: 540579 - RNA, 19 nt, Artificial Sequence
  Description of Artificial Sequence: Synthetic oligonucleotide
  Sense strand starting at position 1798 of SEQ ID NO: 318150
guacaaaccuaugcggaaa

SEQ ID NO: 540580 - RNA, 19 nt, Artificial Sequence
  Description of Artificial Sequence: Synthetic oligonucleotide
  Antisense strand to SEQ ID NO: 540579
uuuccgcauagguuuguac

SEQ ID NO: 540581 - RNA, 19 nt, Artificial Sequence
  Description of Artificial Sequence: Synthetic oligonucleotide
  Sense strand starting at position 2118 of SEQ ID NO: 318150
agacguguuaacgaauaag

SEQ ID NO: 540582 - RNA, 19 nt, Artificial Sequence
  Description of Artificial Sequence: Synthetic oligonucleotide
  Antisense strand to SEQ ID NO: 540581
cuuauucguuaacacgucu

SEQ ID NO: 540583 - RNA, 19 nt, Artificial Sequence
  Description of Artificial Sequence: Synthetic oligonucleotide
  Sense strand starting at position 2157 of SEQ ID NO: 318150
ggcuacuuugaguaucagu

SEQ ID NO: 540584 - RNA, 19 nt, Artificial Sequence
  Description of Artificial Sequence: Synthetic oligonucleotide
  Antisense strand to SEQ ID NO: 540583
acugauacucaaaguagcc

SEQ ID NO: 540585 - RNA, 19 nt, Artificial Sequence
  Description of Artificial Sequence: Synthetic oligonucleotide
  Sense strand starting at position 2162 of SEQ ID NO: 318150
cuuugaguaucagucaaag

SEQ ID NO: 540586 - RNA, 19 nt, Artificial Sequence
  Description of Artificial Sequence: Synthetic oligonucleotide
  Antisense strand to SEQ ID NO: 540585
cuuugacugauacucaaag

SEQ ID NO: 540587 - RNA, 19 nt, Artificial Sequence
  Description of Artificial Sequence: Synthetic oligonucleotide
  Sense strand starting at position 2184 of SEQ ID NO: 318150
ugcucacucgccuuucuau

SEQ ID NO: 540588 - RNA, 19 nt, Artificial Sequence
  Description of Artificial Sequence: Synthetic oligonucleotide
  Antisense strand to SEQ ID NO: 540587
auagaaaggcgagugagca

SEQ ID NO: 540589 - RNA, 19 nt, Artificial Sequence
  Description of Artificial Sequence: Synthetic oligonucleotide
  Sense strand starting at position 2185 of SEQ ID NO: 318150
gcucacucgccuuucuauu

SEQ ID NO: 540590 - RNA, 19 nt, Artificial Sequence
  Description of Artificial Sequence: Synthetic oligonucleotide
  Antisense strand to SEQ ID NO: 540589
aauagaaaggcgagugagc

SEQ ID NO: 540591 - RNA, 19 nt, Artificial Sequence
  Description of Artificial Sequence: Synthetic oligonucleotide
  Sense strand starting at position 2325 of SEQ ID NO: 318150
cccaauuacuguucgaaga

SEQ ID NO: 540592 - RNA, 19 nt, Artificial Sequence
  Description of Artificial Sequence: Synthetic oligonucleotide
  Antisense strand to SEQ ID NO: 540591
ucuucgaacaguaauuggg

SEQ ID NO: 540593 - RNA, 19 nt, Artificial Sequence
  Description of Artificial Sequence: Synthetic oligonucleotide
  Sense strand starting at position 2326 of SEQ ID NO: 318150
ccaauuacuguucgaagag

SEQ ID NO: 540594 - RNA, 19 nt, Artificial Sequence
  Description of Artificial Sequence: Synthetic oligonucleotide
  Antisense strand to SEQ ID NO: 540593
cucuucgaacaguaauugg

SEQ ID NO: 540595 - RNA, 19 nt, Artificial Sequence
  Description of Artificial Sequence: Synthetic oligonucleotide
  Sense strand starting at position 2405 of SEQ ID NO: 318150
gugaguggcaguuauauag

SEQ ID NO: 540596 - RNA, 19 nt, Artificial Sequence
  Description of Artificial Sequence: Synthetic oligonucleotide
  Antisense strand to SEQ ID NO: 540595
cuauauaacugccacucac

SEQ ID NO: 540597 - RNA, 19 nt, Artificial Sequence
  Description of Artificial Sequence: Synthetic oligonucleotide
  Sense strand starting at position 2582 of SEQ ID NO: 318150
gcacuugugagagggagaa

SEQ ID NO: 540598 - RNA, 19 nt, Artificial Sequence
  Description of Artificial Sequence: Synthetic oligonucleotide
  Antisense strand to SEQ ID NO: 540597
uucucccucucacaagugc

SEQ ID NO: 540599 - RNA, 19 nt, Artificial Sequence
  Description of Artificial Sequence: Synthetic oligonucleotide
  Sense strand starting at position 3003 of SEQ ID NO: 318150
gcagaagcgccuucgguuu

SEQ ID NO: 540600 - RNA, 19 nt, Artificial Sequence
  Description of Artificial Sequence: Synthetic oligonucleotide
  Antisense strand to SEQ ID NO: 540599
aaaccgaaggcgcuucugc

SEQ ID NO: 540601 - RNA, 19 nt, Artificial Sequence
  Description of Artificial Sequence: Synthetic oligonucleotide
  Sense strand starting at position 3376 of SEQ ID NO: 318150
ggcauuuguacuugggcua

SEQ ID NO: 540602 - RNA, 19 nt, Artificial Sequence
  Description of Artificial Sequence: Synthetic oligonucleotide
  Antisense strand to SEQ ID NO: 540601
uagcccaaguacaaaugcc

SEQ ID NO: 540603 - RNA, 19 nt, Artificial Sequence
  Description of Artificial Sequence: Synthetic oligonucleotide
  Sense strand starting at position 3533 of SEQ ID NO: 318150
aacgaugaguaagugcaaa

SEQ ID NO: 540604 - RNA, 19 nt, Artificial Sequence
  Description of Artificial Sequence: Synthetic oligonucleotide
  Antisense strand to SEQ ID NO: 540603
uuugcacuuacucaucguu

SEQ ID NO: 540605 - RNA, 19 nt, Artificial Sequence
  Description of Artificial Sequence: Synthetic oligonucleotide
  Sense strand starting at position 3581 of SEQ ID NO: 318150
ugaaucucagauugcugau

SEQ ID NO: 540606 - RNA, 19 nt, Artificial Sequence
  Description of Artificial Sequence: Synthetic oligonucleotide
  Antisense strand to SEQ ID NO: 540605
aucagcaaucugagauuca

SEQ ID NO: 540607 - RNA, 19 nt, Artificial Sequence
  Description of Artificial Sequence: Synthetic oligonucleotide
  Sense strand starting at position 3588 of SEQ ID NO: 318150
cagauugcugaugggaaau

SEQ ID NO: 540608 - RNA, 19 nt, Artificial Sequence
  Description of Artificial Sequence: Synthetic oligonucleotide
  Antisense strand to SEQ ID NO: 540607
auuucccaucagcaaucug

SEQ ID NO: 540609 - RNA, 19 nt, Artificial Sequence
  Description of Artificial Sequence: Synthetic oligonucleotide
  Sense strand starting at position 3734 of SEQ ID NO: 318150
ggugcaaagcgacgaauuu

SEQ ID NO: 540610 - RNA, 19 nt, Artificial Sequence
  Description of Artificial Sequence: Synthetic oligonucleotide
  Antisense strand to SEQ ID NO: 540609
aaauucgucgcuuugcacc

SEQ ID NO: 540611 - RNA, 19 nt, Artificial Sequence
  Description of Artificial Sequence: Synthetic oligonucleotide
  Sense strand starting at position 3743 of SEQ ID NO: 318150
cgacgaauuuaagaucuca

SEQ ID NO: 540612 - RNA, 19 nt, Artificial Sequence
  Description of Artificial Sequence: Synthetic oligonucleotide
  Antisense strand to SEQ ID NO: 540611
ugagaucuuaaauucgucg

SEQ ID NO: 540613 - RNA, 19 nt, Artificial Sequence
  Description of Artificial Sequence: Synthetic oligonucleotide
  Sense strand starting at position 3810 of SEQ ID NO: 318150
ccaguuacaguauacuauu

SEQ ID NO: 540614 - RNA, 19 nt, Artificial Sequence
  Description of Artificial Sequence: Synthetic oligonucleotide
  Antisense strand to SEQ ID NO: 540613
aauaguauacuguaacugg

SEQ ID NO: 540615 - RNA, 19 nt, Artificial Sequence
  Description of Artificial Sequence: Synthetic oligonucleotide
  Sense strand starting at position 3846 of SEQ ID NO: 318150
ugucaugcuggaugaauua

SEQ ID NO: 540616 - RNA, 19 nt, Artificial Sequence
  Description of Artificial Sequence: Synthetic oligonucleotide
  Antisense strand to SEQ ID NO: 540615
uaauucauccagcaugaca

SEQ ID NO: 540617 - RNA, 19 nt, Artificial Sequence
  Description of Artificial Sequence: Synthetic oligonucleotide
  Sense strand starting at position 3855 of SEQ ID NO: 318150
ggaugaauuacugguguug

SEQ ID NO: 540618 - RNA, 19 nt, Artificial Sequence
  Description of Artificial Sequence: Synthetic oligonucleotide
  Antisense strand to SEQ ID NO: 540617
caacaccaguaauucaucc

SEQ ID NO: 540619 - RNA, 19 nt, Artificial Sequence
  Description of Artificial Sequence: Synthetic oligonucleotide
  Sense strand starting at position 3900 of SEQ ID NO: 318150
acagucgagaucuguggau

SEQ ID NO: 540620 - RNA, 19 nt, Artificial Sequence
  Description of Artificial Sequence: Synthetic oligonucleotide
  Antisense strand to SEQ ID NO: 540619
auccacagaucucgacugu

SEQ ID NO: 540621 - RNA, 19 nt, Artificial Sequence
  Description of Artificial Sequence: Synthetic oligonucleotide
  Sense strand starting at position 3902 of SEQ ID NO: 318150
agucgagaucuguggauga

SEQ ID NO: 540622 - RNA, 19 nt, Artificial Sequence
  Description of Artificial Sequence: Synthetic oligonucleotide
  Antisense strand to SEQ ID NO: 540621
ucauccacagaucucgacu

SEQ ID NO: 540623 - RNA, 19 nt, Artificial Sequence
  Description of Artificial Sequence: Synthetic oligonucleotide
  Sense strand starting at position 3906 of SEQ ID NO: 318150
gagaucuguggaugaaagu

SEQ ID NO: 540624 - RNA, 19 nt, Artificial Sequence
  Description of Artificial Sequence: Synthetic oligonucleotide
  Antisense strand to SEQ ID NO: 540623
acuuucauccacagaucuc

SEQ ID NO: 540625 - RNA, 19 nt, Artificial Sequence
  Description of Artificial Sequence: Synthetic oligonucleotide
  Sense strand starting at position 3915 of SEQ ID NO: 318150
ggaugaaaguuuguguaca

SEQ ID NO: 540626 - RNA, 19 nt, Artificial Sequence
  Description of Artificial Sequence: Synthetic oligonucleotide
  Antisense strand to SEQ ID NO: 540625
uguacacaaacuuucaucc

SEQ ID NO: 540627 - RNA, 19 nt, Artificial Sequence
  Description of Artificial Sequence: Synthetic oligonucleotide
  Sense strand starting at position 3917 of SEQ ID NO: 318150
augaaaguuuguguacacu

SEQ ID NO: 540628 - RNA, 19 nt, Artificial Sequence
  Description of Artificial Sequence: Synthetic oligonucleotide
  Antisense strand to SEQ ID NO: 540627
aguguacacaaacuuucau

SEQ ID NO: 540629 - RNA, 19 nt, Artificial Sequence
  Description of Artificial Sequence: Synthetic oligonucleotide
  Sense strand starting at position 3968 of SEQ ID NO: 318150
uguguauaugcagaaacaa

SEQ ID NO: 540630 - RNA, 19 nt, Artificial Sequence
  Description of Artificial Sequence: Synthetic oligonucleotide
  Antisense strand to SEQ ID NO: 540629
uuguuucugcauauacaca

SEQ ID NO: 540631 - RNA, 19 nt, Artificial Sequence
  Description of Artificial Sequence: Synthetic oligonucleotide
  Sense strand starting at position 30 of SEQ ID NO: 318151
aucucaagugucgagggau

SEQ ID NO: 540632 - RNA, 19 nt, Artificial Sequence
  Description of Artificial Sequence: Synthetic oligonucleotide
  Antisense strand to SEQ ID NO: 540631
aucccucgacacuugagau

SEQ ID NO: 540633 - RNA, 19 nt, Artificial Sequence
  Description of Artificial Sequence: Synthetic oligonucleotide
  Sense strand starting at position 329 of SEQ ID NO: 318151
ccucaaugucaucaucgga

SEQ ID NO: 540634 - RNA, 19 nt, Artificial Sequence
  Description of Artificial Sequence: Synthetic oligonucleotide
  Antisense strand to SEQ ID NO: 540633
uccgaugaugacauugagg

SEQ ID NO: 540635 - RNA, 19 nt, Artificial Sequence
  Description of Artificial Sequence: Synthetic oligonucleotide
  Sense strand starting at position 332 of SEQ ID NO: 318151
caaugucaucaucggauga

SEQ ID NO: 540636 - RNA, 19 nt, Artificial Sequence
  Description of Artificial Sequence: Synthetic oligonucleotide
  Antisense strand to SEQ ID NO: 540635
ucauccgaugaugacauug

SEQ ID NO: 540637 - RNA, 19 nt, Artificial Sequence
  Description of Artificial Sequence: Synthetic oligonucleotide
  Sense strand starting at position 384 of SEQ ID NO: 318151
agaggaagggucuguugua

SEQ ID NO: 540638 - RNA, 19 nt, Artificial Sequence
  Description of Artificial Sequence: Synthetic oligonucleotide
  Antisense strand to SEQ ID NO: 540637
uacaacagacccuuccucu

SEQ ID NO: 540639 - RNA, 19 nt, Artificial Sequence
  Description of Artificial Sequence: Synthetic oligonucleotide
  Sense strand starting at position 385 of SEQ ID NO: 318151
gaggaagggucuguuguag

SEQ ID NO: 540640 - RNA, 19 nt, Artificial Sequence
  Description of Artificial Sequence: Synthetic oligonucleotide
  Antisense strand to SEQ ID NO: 540639
cuacaacagacccuuccuc

SEQ ID NO: 540641 - RNA, 19 nt, Artificial Sequence
  Description of Artificial Sequence: Synthetic oligonucleotide
  Sense strand starting at position 458 of SEQ ID NO: 318151
cuuucugagccauagccaa

SEQ ID NO: 540642 - RNA, 19 nt, Artificial Sequence
  Description of Artificial Sequence: Synthetic oligonucleotide
  Antisense strand to SEQ ID NO: 540641
uuggcuauggcucagaaag

SEQ ID NO: 540643 - RNA, 19 nt, Artificial Sequence
  Description of Artificial Sequence: Synthetic oligonucleotide
  Sense strand starting at position 610 of SEQ ID NO: 318151
cccaguauuugcuuuacau

SEQ ID NO: 540644 - RNA, 19 nt, Artificial Sequence
  Description of Artificial Sequence: Synthetic oligonucleotide
  Antisense strand to SEQ ID NO: 540643
auguaaagcaaauacuggg

SEQ ID NO: 540645 - RNA, 19 nt, Artificial Sequence
  Description of Artificial Sequence: Synthetic oligonucleotide
  Sense strand starting at position 689 of SEQ ID NO: 318151
uuagcaaaccauugauaga

SEQ ID NO: 540646 - RNA, 19 nt, Artificial Sequence
  Description of Artificial Sequence: Synthetic oligonucleotide
  Antisense strand to SEQ ID NO: 540645
ucuaucaaugguuugcuaa

SEQ ID NO: 540647 - RNA, 19 nt, Artificial Sequence
  Description of Artificial Sequence: Synthetic oligonucleotide
  Sense strand starting at position 1177 of SEQ ID NO: 318151
acgugugaucuggcuguuu

SEQ ID NO: 540648 - RNA, 19 nt, Artificial Sequence
  Description of Artificial Sequence: Synthetic oligonucleotide
  Antisense strand to SEQ ID NO: 540647
aaacagccagaucacacgu

SEQ ID NO: 540649 - RNA, 19 nt, Artificial Sequence
  Description of Artificial Sequence: Synthetic oligonucleotide
  Sense strand starting at position 1182 of SEQ ID NO: 318151
ugaucuggcuguuuauuua

SEQ ID NO: 540650 - RNA, 19 nt, Artificial Sequence
  Description of Artificial Sequence: Synthetic oligonucleotide
  Antisense strand to SEQ ID NO: 540649
uaaauaaacagccagauca

SEQ ID NO: 540651 - RNA, 19 nt, Artificial Sequence
  Description of Artificial Sequence: Synthetic oligonucleotide
  Sense strand starting at position 1378 of SEQ ID NO: 318151
uuuaguaccgacgggauuu

SEQ ID NO: 540652 - RNA, 19 nt, Artificial Sequence
  Description of Artificial Sequence: Synthetic oligonucleotide
  Antisense strand to SEQ ID NO: 540651
aaaucccgucgguacuaaa

SEQ ID NO: 540653 - RNA, 19 nt, Artificial Sequence
  Description of Artificial Sequence: Synthetic oligonucleotide
  Sense strand starting at position 1668 of SEQ ID NO: 318151
agagcugugggccaaauaa

SEQ ID NO: 540654 - RNA, 19 nt, Artificial Sequence
  Description of Artificial Sequence: Synthetic oligonucleotide
  Antisense strand to SEQ ID NO: 540653
uuauuuggcccacagcucu

SEQ ID NO: 540655 - RNA, 19 nt, Artificial Sequence
  Description of Artificial Sequence: Synthetic oligonucleotide
  Sense strand starting at position 1716 of SEQ ID NO: 318151
uggguaucccuuuauagca

SEQ ID NO: 540656 - RNA, 19 nt, Artificial Sequence
  Description of Artificial Sequence: Synthetic oligonucleotide
  Antisense strand to SEQ ID NO: 540655
ugcuauaaagggauaccca

SEQ ID NO: 540657 - RNA, 19 nt, Artificial Sequence
  Description of Artificial Sequence: Synthetic oligonucleotide
  Sense strand starting at position 2033 of SEQ ID NO: 318151
cuuacagaccauugugaca

SEQ ID NO: 540658 - RNA, 19 nt, Artificial Sequence
  Description of Artificial Sequence: Synthetic oligonucleotide
  Antisense strand to SEQ ID NO: 540657
ugucacaauggucuguaag

SEQ ID NO: 540659 - RNA, 19 nt, Artificial Sequence
  Description of Artificial Sequence: Synthetic oligonucleotide
  Sense strand starting at position 2046 of SEQ ID NO: 318151
gugacagaccauugugaug

SEQ ID NO: 540660 - RNA, 19 nt, Artificial Sequence
  Description of Artificial Sequence: Synthetic oligonucleotide
  Antisense strand to SEQ ID NO: 540659
caucacaauggucugucac

SEQ ID NO: 540661 - RNA, 19 nt, Artificial Sequence
  Description of Artificial Sequence: Synthetic oligonucleotide
  Sense strand starting at position 2061 of SEQ ID NO: 318151
gaugcugacuauguagaga

SEQ ID NO: 540662 - RNA, 19 nt, Artificial Sequence
  Description of Artificial Sequence: Synthetic oligonucleotide
  Antisense strand to SEQ ID NO: 540661
ucucuacauagucagcauc

SEQ ID NO: 540663 - RNA, 19 nt, Artificial Sequence
  Description of Artificial Sequence: Synthetic oligonucleotide
  Sense strand starting at position 2091 of SEQ ID NO: 318151
cugugacacugacuaugua

SEQ ID NO: 540664 - RNA, 19 nt, Artificial Sequence
  Description of Artificial Sequence: Synthetic oligonucleotide
  Antisense strand to SEQ ID NO: 540663
uacauagucagugucacag

SEQ ID NO: 540665 - RNA, 19 nt, Artificial Sequence
  Description of Artificial Sequence: Synthetic oligonucleotide
  Sense strand starting at position 2138 of SEQ ID NO: 318151
ucuagucuuccuuaguaau

SEQ ID NO: 540666 - RNA, 19 nt, Artificial Sequence
  Description of Artificial Sequence: Synthetic oligonucleotide
  Antisense strand to SEQ ID NO: 540665
auuacuaaggaagacuaga

SEQ ID NO: 540667 - RNA, 19 nt, Artificial Sequence
  Description of Artificial Sequence: Synthetic oligonucleotide
  Sense strand starting at position 2206 of SEQ ID NO: 318151
agacauagcuguuugaaug

SEQ ID NO: 540668 - RNA, 19 nt, Artificial Sequence
  Description of Artificial Sequence: Synthetic oligonucleotide
  Antisense strand to SEQ ID NO: 540667
cauucaaacagcuaugucu

SEQ ID NO: 540669 - RNA, 19 nt, Artificial Sequence
  Description of Artificial Sequence: Synthetic oligonucleotide
  Sense strand starting at position 2250 of SEQ ID NO: 318151
cagggaguguccuuaaaga

SEQ ID NO: 540670 - RNA, 19 nt, Artificial Sequence
  Description of Artificial Sequence: Synthetic oligonucleotide
  Antisense strand to SEQ ID NO: 540669
ucuuuaaggacacucccug

SEQ ID NO: 540671 - RNA, 19 nt, Artificial Sequence
  Description of Artificial Sequence: Synthetic oligonucleotide
  Sense strand starting at position 2302 of SEQ ID NO: 318151
uccuguggucuggaauaca

SEQ ID NO: 540672 - RNA, 19 nt, Artificial Sequence
  Description of Artificial Sequence: Synthetic oligonucleotide
  Antisense strand to SEQ ID NO: 540671
uguauuccagaccacagga

SEQ ID NO: 540673 - RNA, 19 nt, Artificial Sequence
  Description of Artificial Sequence: Synthetic oligonucleotide
  Sense strand starting at position 2358 of SEQ ID NO: 318151
ugaagugaugucgggaaug

SEQ ID NO: 540674 - RNA, 19 nt, Artificial Sequence
  Description of Artificial Sequence: Synthetic oligonucleotide
  Antisense strand to SEQ ID NO: 540673
cauucccgacaucacuuca

SEQ ID NO: 540675 - RNA, 19 nt, Artificial Sequence
  Description of Artificial Sequence: Synthetic oligonucleotide
  Sense strand starting at position 2360 of SEQ ID NO: 318151
aagugaugucgggaaugac

SEQ ID NO: 540676 - RNA, 19 nt, Artificial Sequence
  Description of Artificial Sequence: Synthetic oligonucleotide
  Antisense strand to SEQ ID NO: 540675
gucauucccgacaucacuu

SEQ ID NO: 540677 - RNA, 19 nt, Artificial Sequence
  Description of Artificial Sequence: Synthetic oligonucleotide
  Sense strand starting at position 2400 of SEQ ID NO: 318151
gagucuccuucccuuagga

SEQ ID NO: 540678 - RNA, 19 nt, Artificial Sequence
  Description of Artificial Sequence: Synthetic oligonucleotide
  Antisense strand to SEQ ID NO: 540677
uccuaagggaaggagacuc

SEQ ID NO: 540679 - RNA, 19 nt, Artificial Sequence
  Description of Artificial Sequence: Synthetic oligonucleotide
  Sense strand starting at position 2615 of SEQ ID NO: 318151
guucguuagcagccucuua

SEQ ID NO: 540680 - RNA, 19 nt, Artificial Sequence
  Description of Artificial Sequence: Synthetic oligonucleotide
  Antisense strand to SEQ ID NO: 540679
uaagaggcugcuaacgaac

SEQ ID NO: 540681 - RNA, 19 nt, Artificial Sequence
  Description of Artificial Sequence: Synthetic oligonucleotide
  Sense strand starting at position 2626 of SEQ ID NO: 318151
gccucuuaugcuuauaaga

SEQ ID NO: 540682 - RNA, 19 nt, Artificial Sequence
  Description of Artificial Sequence: Synthetic oligonucleotide
  Antisense strand to SEQ ID NO: 540681
ucuuauaagcauaagaggc

SEQ ID NO: 540683 - RNA, 19 nt, Artificial Sequence
  Description of Artificial Sequence: Synthetic oligonucleotide
  Sense strand starting at position 2634 of SEQ ID NO: 318151
ugcuuauaagauuaggagu

SEQ ID NO: 540684 - RNA, 19 nt, Artificial Sequence
  Description of Artificial Sequence: Synthetic oligonucleotide
  Antisense strand to SEQ ID NO: 540683
acuccuaaucuuauaagca

SEQ ID NO: 540685 - RNA, 19 nt, Artificial Sequence
  Description of Artificial Sequence: Synthetic oligonucleotide
  Sense strand starting at position 2745 of SEQ ID NO: 318151
gcaaguaaaccagagcaaa

SEQ ID NO: 540686 - RNA, 19 nt, Artificial Sequence
  Description of Artificial Sequence: Synthetic oligonucleotide
  Antisense strand to SEQ ID NO: 540685
uuugcucugguuuacuugc

SEQ ID NO: 540687 - RNA, 19 nt, Artificial Sequence
  Description of Artificial Sequence: Synthetic oligonucleotide
  Sense strand starting at position 2784 of SEQ ID NO: 318151
cuguguugugaguaauaaa

SEQ ID NO: 540688 - RNA, 19 nt, Artificial Sequence
  Description of Artificial Sequence: Synthetic oligonucleotide
  Antisense strand to SEQ ID NO: 540687
uuuauuacucacaacacag

SEQ ID NO: 540689 - RNA, 19 nt, Artificial Sequence
  Description of Artificial Sequence: Synthetic oligonucleotide
  Sense strand starting at position 2806 of SEQ ID NO: 318151
cuuugucucugaccuaaga

SEQ ID NO: 540690 - RNA, 19 nt, Artificial Sequence
  Description of Artificial Sequence: Synthetic oligonucleotide
  Antisense strand to SEQ ID NO: 540689
ucuuaggucagagacaaag

SEQ ID NO: 540691 - RNA, 19 nt, Artificial Sequence
  Description of Artificial Sequence: Synthetic oligonucleotide
  Sense strand starting at position 2856 of SEQ ID NO: 318151
ugugguaagcucguuguua

SEQ ID NO: 540692 - RNA, 19 nt, Artificial Sequence
  Description of Artificial Sequence: Synthetic oligonucleotide
  Antisense strand to SEQ ID NO: 540691
uaacaacgagcuuaccaca

SEQ ID NO: 540693 - RNA, 19 nt, Artificial Sequence
  Description of Artificial Sequence: Synthetic oligonucleotide
  Sense strand starting at position 2872 of SEQ ID NO: 318151
uuaguuugcaaguaggaga

SEQ ID NO: 540694 - RNA, 19 nt, Artificial Sequence
  Description of Artificial Sequence: Synthetic oligonucleotide
  Antisense strand to SEQ ID NO: 540693
ucuccuacuugcaaacuaa

SEQ ID NO: 540695 - RNA, 19 nt, Artificial Sequence
  Description of Artificial Sequence: Synthetic oligonucleotide
  Sense strand starting at position 2933 of SEQ ID NO: 318151
ggagcagagcacuaucauu

SEQ ID NO: 540696 - RNA, 19 nt, Artificial Sequence
  Description of Artificial Sequence: Synthetic oligonucleotide
  Antisense strand to SEQ ID NO: 540695
aaugauagugcucugcucc

SEQ ID NO: 540697 - RNA, 19 nt, Artificial Sequence
  Description of Artificial Sequence: Synthetic oligonucleotide
  Sense strand starting at position 3139 of SEQ ID NO: 318151
gaacauauccguggucaaa

SEQ ID NO: 540698 - RNA, 19 nt, Artificial Sequence
  Description of Artificial Sequence: Synthetic oligonucleotide
  Antisense strand to SEQ ID NO: 540697
uuugaccacggauauguuc

SEQ ID NO: 540699 - RNA, 19 nt, Artificial Sequence
  Description of Artificial Sequence: Synthetic oligonucleotide
  Sense strand starting at position 3227 of SEQ ID NO: 318151
gucacuguagacuaaaguu

SEQ ID NO: 540700 - RNA, 19 nt, Artificial Sequence
  Description of Artificial Sequence: Synthetic oligonucleotide
  Antisense strand to SEQ ID NO: 540699
aacuuuagucuacagugac

SEQ ID NO: 540701 - RNA, 19 nt, Artificial Sequence
  Description of Artificial Sequence: Synthetic oligonucleotide
  Sense strand starting at position 3279 of SEQ ID NO: 318151
auaguauuccuuuauugug

SEQ ID NO: 540702 - RNA, 19 nt, Artificial Sequence
  Description of Artificial Sequence: Synthetic oligonucleotide
  Antisense strand to SEQ ID NO: 540701
cacaauaaaggaauacuau

SEQ ID NO: 540703 - RNA, 19 nt, Artificial Sequence
  Description of Artificial Sequence: Synthetic oligonucleotide
  Sense strand starting at position 3287 of SEQ ID NO: 318151
ccuuuauugugucuauuuc

SEQ ID NO: 540704 - RNA, 19 nt, Artificial Sequence
  Description of Artificial Sequence: Synthetic oligonucleotide
  Antisense strand to SEQ ID NO: 540703
gaaauagacacaauaaagg

SEQ ID NO: 540705 - RNA, 19 nt, Artificial Sequence
  Description of Artificial Sequence: Synthetic oligonucleotide
  Sense strand starting at position 3645 of SEQ ID NO: 318151
uguaguaucguacagagga

SEQ ID NO: 540706 - RNA, 19 nt, Artificial Sequence
  Description of Artificial Sequence: Synthetic oligonucleotide
  Antisense strand to SEQ ID NO: 540705
uccucuguacgauacuaca

SEQ ID NO: 540707 - RNA, 19 nt, Artificial Sequence
  Description of Artificial Sequence: Synthetic oligonucleotide
  Sense strand starting at position 3647 of SEQ ID NO: 318151
uaguaucguacagaggagu

SEQ ID NO: 540708 - RNA, 19 nt, Artificial Sequence
  Description of Artificial Sequence: Synthetic oligonucleotide
  Antisense strand to SEQ ID NO: 540707
acuccucuguacgauacua

SEQ ID NO: 540709 - RNA, 19 nt, Artificial Sequence
  Description of Artificial Sequence: Synthetic oligonucleotide
  Sense strand starting at position 3896 of SEQ ID NO: 318151
ucauucucuggauguauua

SEQ ID NO: 540710 - RNA, 19 nt, Artificial Sequence
  Description of Artificial Sequence: Synthetic oligonucleotide
  Antisense strand to SEQ ID NO: 540709
uaauacauccagagaauga

SEQ ID NO: 540711 - RNA, 19 nt, Artificial Sequence
  Description of Artificial Sequence: Synthetic oligonucleotide
  Sense strand starting at position 119 of SEQ ID NO: 318152
ccaauuauaugugugagac

SEQ ID NO: 540712 - RNA, 19 nt, Artificial Sequence
  Description of Artificial Sequence: Synthetic oligonucleotide
  Antisense strand to SEQ ID NO: 540711
gucucacacauauaauugg

SEQ ID NO: 540713 - RNA, 19 nt, Artificial Sequence
  Description of Artificial Sequence: Synthetic oligonucleotide
  Sense strand starting at position 120 of SEQ ID NO: 318152
caauuauaugugugagacg

SEQ ID NO: 540714 - RNA, 19 nt, Artificial Sequence
  Description of Artificial Sequence: Synthetic oligonucleotide
  Antisense strand to SEQ ID NO: 540713
cgucucacacauauaauug

SEQ ID NO: 540715 - RNA, 19 nt, Artificial Sequence
  Description of Artificial Sequence: Synthetic oligonucleotide
  Sense strand starting at position 135 of SEQ ID NO: 318152
gacgaucugccaugaacua

SEQ ID NO: 540716 - RNA, 19 nt, Artificial Sequence
  Description of Artificial Sequence: Synthetic oligonucleotide
  Antisense strand to SEQ ID NO: 540715
uaguucauggcagaucguc

SEQ ID NO: 540717 - RNA, 19 nt, Artificial Sequence
  Description of Artificial Sequence: Synthetic oligonucleotide
  Sense strand starting at position 413 of SEQ ID NO: 318152
gguuguuugagggaauacu

SEQ ID NO: 540718 - RNA, 19 nt, Artificial Sequence
  Description of Artificial Sequence: Synthetic oligonucleotide
  Antisense strand to SEQ ID NO: 540717
aguauucccucaaacaacc

SEQ ID NO: 540719 - RNA, 19 nt, Artificial Sequence
  Description of Artificial Sequence: Synthetic oligonucleotide
  Sense strand starting at position 462 of SEQ ID NO: 318152
gaggcauauagauggaagu

SEQ ID NO: 540720 - RNA, 19 nt, Artificial Sequence
  Description of Artificial Sequence: Synthetic oligonucleotide
  Antisense strand to SEQ ID NO: 540719
acuuccaucuauaugccuc

SEQ ID NO: 540721 - RNA, 19 nt, Artificial Sequence
  Description of Artificial Sequence: Synthetic oligonucleotide
  Sense strand starting at position 463 of SEQ ID NO: 318152
aggcauauagauggaaguu

SEQ ID NO: 540722 - RNA, 19 nt, Artificial Sequence
  Description of Artificial Sequence: Synthetic oligonucleotide
  Antisense strand to SEQ ID NO: 540721
aacuuccaucuauaugccu

SEQ ID NO: 540723 - RNA, 19 nt, Artificial Sequence
  Description of Artificial Sequence: Synthetic oligonucleotide
  Sense strand starting at position 560 of SEQ ID NO: 318152
ggccaaagugcugaaccaa

SEQ ID NO: 540724 - RNA, 19 nt, Artificial Sequence
  Description of Artificial Sequence: Synthetic oligonucleotide
  Antisense strand to SEQ ID NO: 540723
uugguucagcacuuuggcc

SEQ ID NO: 540725 - RNA, 19 nt, Artificial Sequence
  Description of Artificial Sequence: Synthetic oligonucleotide
  Sense strand starting at position 713 of SEQ ID NO: 318152
cuugguuauaggugaggaa

SEQ ID NO: 540726 - RNA, 19 nt, Artificial Sequence
  Description of Artificial Sequence: Synthetic oligonucleotide
  Antisense strand to SEQ ID NO: 540725
uuccucaccuauaaccaag

SEQ ID NO: 540727 - RNA, 19 nt, Artificial Sequence
  Description of Artificial Sequence: Synthetic oligonucleotide
  Sense strand starting at position 1177 of SEQ ID NO: 318152
gacuuugcgcacuaagacu

SEQ ID NO: 540728 - RNA, 19 nt, Artificial Sequence
  Description of Artificial Sequence: Synthetic oligonucleotide
  Antisense strand to SEQ ID NO: 540727
agucuuagugcgcaaaguc

SEQ ID NO: 540729 - RNA, 19 nt, Artificial Sequence
  Description of Artificial Sequence: Synthetic oligonucleotide
  Sense strand starting at position 1189 of SEQ ID NO: 318152
uaagacugugucgacagau

SEQ ID NO: 540730 - RNA, 19 nt, Artificial Sequence
  Description of Artificial Sequence: Synthetic oligonucleotide
  Antisense strand to SEQ ID NO: 540729
aucugucgacacagucuua

SEQ ID NO: 540731 - RNA, 19 nt, Artificial Sequence
  Description of Artificial Sequence: Synthetic oligonucleotide
  Sense strand starting at position 1237 of SEQ ID NO: 318152
uaguguucugcccuguguu

SEQ ID NO: 540732 - RNA, 19 nt, Artificial Sequence
  Description of Artificial Sequence: Synthetic oligonucleotide
  Antisense strand to SEQ ID NO: 540731
aacacagggcagaacacua

SEQ ID NO: 540733 - RNA, 19 nt, Artificial Sequence
  Description of Artificial Sequence: Synthetic oligonucleotide
  Sense strand starting at position 1250 of SEQ ID NO: 318152
uguguuucaguugagagaa

SEQ ID NO: 540734 - RNA, 19 nt, Artificial Sequence
  Description of Artificial Sequence: Synthetic oligonucleotide
  Antisense strand to SEQ ID NO: 540733
uucucucaacugaaacaca

SEQ ID NO: 540735 - RNA, 19 nt, Artificial Sequence
  Description of Artificial Sequence: Synthetic oligonucleotide
  Sense strand starting at position 1394 of SEQ ID NO: 318152
cugagacuguucuuaauug

SEQ ID NO: 540736 - RNA, 19 nt, Artificial Sequence
  Description of Artificial Sequence: Synthetic oligonucleotide
  Antisense strand to SEQ ID NO: 540735
caauuaagaacagucucag

SEQ ID NO: 540737 - RNA, 19 nt, Artificial Sequence
  Description of Artificial Sequence: Synthetic oligonucleotide
  Sense strand starting at position 1465 of SEQ ID NO: 318152
cacagauguggccaaauuc

SEQ ID NO: 540738 - RNA, 19 nt, Artificial Sequence
  Description of Artificial Sequence: Synthetic oligonucleotide
  Antisense strand to SEQ ID NO: 540737
gaauuuggccacaucugug

SEQ ID NO: 540739 - RNA, 19 nt, Artificial Sequence
  Description of Artificial Sequence: Synthetic oligonucleotide
  Sense strand starting at position 1616 of SEQ ID NO: 318152
ucucauuugguuugucuga

SEQ ID NO: 540740 - RNA, 19 nt, Artificial Sequence
  Description of Artificial Sequence: Synthetic oligonucleotide
  Antisense strand to SEQ ID NO: 540739
ucagacaaaccaaaugaga

SEQ ID NO: 540741 - RNA, 19 nt, Artificial Sequence
  Description of Artificial Sequence: Synthetic oligonucleotide
  Sense strand starting at position 1644 of SEQ ID NO: 318152
gguucuaauccuuggugga

SEQ ID NO: 540742 - RNA, 19 nt, Artificial Sequence
  Description of Artificial Sequence: Synthetic oligonucleotide
  Antisense strand to SEQ ID NO: 540741
uccaccaaggauuagaacc

SEQ ID NO: 540743 - RNA, 19 nt, Artificial Sequence
  Description of Artificial Sequence: Synthetic oligonucleotide
  Sense strand starting at position 1645 of SEQ ID NO: 318152
guucuaauccuugguggau

SEQ ID NO: 540744 - RNA, 19 nt, Artificial Sequence
  Description of Artificial Sequence: Synthetic oligonucleotide
  Antisense strand to SEQ ID NO: 540743
auccaccaaggauuagaac

SEQ ID NO: 540745 - RNA, 19 nt, Artificial Sequence
  Description of Artificial Sequence: Synthetic oligonucleotide
  Sense strand starting at position 1646 of SEQ ID NO: 318152
uucuaauccuugguggauu

SEQ ID NO: 540746 - RNA, 19 nt, Artificial Sequence
  Description of Artificial Sequence: Synthetic oligonucleotide
  Antisense strand to SEQ ID NO: 540745
aauccaccaaggauuagaa

SEQ ID NO: 540747 - RNA, 19 nt, Artificial Sequence
  Description of Artificial Sequence: Synthetic oligonucleotide
  Sense strand starting at position 1730 of SEQ ID NO: 318152
gcucuauuuccuggccaga

SEQ ID NO: 540748 - RNA, 19 nt, Artificial Sequence
  Description of Artificial Sequence: Synthetic oligonucleotide
  Antisense strand to SEQ ID NO: 540747
ucuggccaggaaauagagc

SEQ ID NO: 540749 - RNA, 19 nt, Artificial Sequence
  Description of Artificial Sequence: Synthetic oligonucleotide
  Sense strand starting at position 2045 of SEQ ID NO: 318152
gcuaauaaagaauguguua

SEQ ID NO: 540750 - RNA, 19 nt, Artificial Sequence
  Description of Artificial Sequence: Synthetic oligonucleotide
  Antisense strand to SEQ ID NO: 540749
uaacacauucuuuauuagc

SEQ ID NO: 540751 - RNA, 19 nt, Artificial Sequence
  Description of Artificial Sequence: Synthetic oligonucleotide
  Sense strand starting at position 2115 of SEQ ID NO: 318152
gcagaacauuccuuggaau

SEQ ID NO: 540752 - RNA, 19 nt, Artificial Sequence
  Description of Artificial Sequence: Synthetic oligonucleotide
  Antisense strand to SEQ ID NO: 540751
auuccaaggaauguucugc

SEQ ID NO: 540753 - RNA, 19 nt, Artificial Sequence
  Description of Artificial Sequence: Synthetic oligonucleotide
  Sense strand starting at position 2136 of SEQ ID NO: 318152
gggcaaggacuuuggauua

SEQ ID NO: 540754 - RNA, 19 nt, Artificial Sequence
  Description of Artificial Sequence: Synthetic oligonucleotide
  Antisense strand to SEQ ID NO: 540753
uaauccaaaguccuugccc

SEQ ID NO: 540755 - RNA, 19 nt, Artificial Sequence
  Description of Artificial Sequence: Synthetic oligonucleotide
  Sense strand starting at position 2186 of SEQ ID NO: 318152
aagggucauuccuugggca

SEQ ID NO: 540756 - RNA, 19 nt, Artificial Sequence
  Description of Artificial Sequence: Synthetic oligonucleotide
  Antisense strand to SEQ ID NO: 540755
ugcccaaggaaugacccuu

SEQ ID NO: 540757 - RNA, 19 nt, Artificial Sequence
  Description of Artificial Sequence: Synthetic oligonucleotide
  Sense strand starting at position 2187 of SEQ ID NO: 318152
agggucauuccuugggcaa

SEQ ID NO: 540758 - RNA, 19 nt, Artificial Sequence
  Description of Artificial Sequence: Synthetic oligonucleotide
  Antisense strand to SEQ ID NO: 540757
uugcccaaggaaugacccu

SEQ ID NO: 540759 - RNA, 19 nt, Artificial Sequence
  Description of Artificial Sequence: Synthetic oligonucleotide
  Sense strand starting at position 2190 of SEQ ID NO: 318152
gucauuccuugggcaauaa

SEQ ID NO: 540760 - RNA, 19 nt, Artificial Sequence
  Description of Artificial Sequence: Synthetic oligonucleotide
  Antisense strand to SEQ ID NO: 540759
uuauugcccaaggaaugac

SEQ ID NO: 540761 - RNA, 19 nt, Artificial Sequence
  Description of Artificial Sequence: Synthetic oligonucleotide
  Sense strand starting at position 2191 of SEQ ID NO: 318152
ucauuccuugggcaauaau

SEQ ID NO: 540762 - RNA, 19 nt, Artificial Sequence
  Description of Artificial Sequence: Synthetic oligonucleotide
  Antisense strand to SEQ ID NO: 540761
auuauugcccaaggaauga

SEQ ID NO: 540763 - RNA, 19 nt, Artificial Sequence
  Description of Artificial Sequence: Synthetic oligonucleotide
  Sense strand starting at position 2234 of SEQ ID NO: 318152
gugugcuuccaagcucauu

SEQ ID NO: 540764 - RNA, 19 nt, Artificial Sequence
  Description of Artificial Sequence: Synthetic oligonucleotide
  Antisense strand to SEQ ID NO: 540763
aaugagcuuggaagcacac

SEQ ID NO: 540765 - RNA, 19 nt, Artificial Sequence
  Description of Artificial Sequence: Synthetic oligonucleotide
  Sense strand starting at position 2578 of SEQ ID NO: 318152
agcucauuucuauggcuga

SEQ ID NO: 540766 - RNA, 19 nt, Artificial Sequence
  Description of Artificial Sequence: Synthetic oligonucleotide
  Antisense strand to SEQ ID NO: 540765
ucagccauagaaaugagcu

SEQ ID NO: 540767 - RNA, 19 nt, Artificial Sequence
  Description of Artificial Sequence: Synthetic oligonucleotide
  Sense strand starting at position 2819 of SEQ ID NO: 318152
gguaaucacaaagaugugu

SEQ ID NO: 540768 - RNA, 19 nt, Artificial Sequence
  Description of Artificial Sequence: Synthetic oligonucleotide
  Antisense strand to SEQ ID NO: 540767
acacaucuuugugauuacc

SEQ ID NO: 540769 - RNA, 19 nt, Artificial Sequence
  Description of Artificial Sequence: Synthetic oligonucleotide
  Sense strand starting at position 2830 of SEQ ID NO: 318152
agauguguaagacagaguu

SEQ ID NO: 540770 - RNA, 19 nt, Artificial Sequence
  Description of Artificial Sequence: Synthetic oligonucleotide
  Antisense strand to SEQ ID NO: 540769
aacucugucuuacacaucu

SEQ ID NO: 540771 - RNA, 19 nt, Artificial Sequence
  Description of Artificial Sequence: Synthetic oligonucleotide
  Sense strand starting at position 2937 of SEQ ID NO: 318152
gaauaugagaagggcugua

SEQ ID NO: 540772 - RNA, 19 nt, Artificial Sequence
  Description of Artificial Sequence: Synthetic oligonucleotide
  Antisense strand to SEQ ID NO: 540771
uacagcccuucucauauuc

SEQ ID NO: 540773 - RNA, 19 nt, Artificial Sequence
  Description of Artificial Sequence: Synthetic oligonucleotide
  Sense strand starting at position 2953 of SEQ ID NO: 318152
guauuagagccaugaauca

SEQ ID NO: 540774 - RNA, 19 nt, Artificial Sequence
  Description of Artificial Sequence: Synthetic oligonucleotide
  Antisense strand to SEQ ID NO: 540773
ugauucauggcucuaauac

SEQ ID NO: 540775 - RNA, 19 nt, Artificial Sequence
  Description of Artificial Sequence: Synthetic oligonucleotide
  Sense strand starting at position 2965 of SEQ ID NO: 318152
ugaaucacuggcugugaga

SEQ ID NO: 540776 - RNA, 19 nt, Artificial Sequence
  Description of Artificial Sequence: Synthetic oligonucleotide
  Antisense strand to SEQ ID NO: 540775
ucucacagccagugauuca

SEQ ID NO: 540777 - RNA, 19 nt, Artificial Sequence
  Description of Artificial Sequence: Synthetic oligonucleotide
  Sense strand starting at position 3065 of SEQ ID NO: 318152
augcuaaaucgacagacau

SEQ ID NO: 540778 - RNA, 19 nt, Artificial Sequence
  Description of Artificial Sequence: Synthetic oligonucleotide
  Antisense strand to SEQ ID NO: 540777
augucugucgauuuagcau

SEQ ID NO: 540779 - RNA, 19 nt, Artificial Sequence
  Description of Artificial Sequence: Synthetic oligonucleotide
  Sense strand starting at position 3135 of SEQ ID NO: 318152
gccagaaagcagugaaaga

SEQ ID NO: 540780 - RNA, 19 nt, Artificial Sequence
  Description of Artificial Sequence: Synthetic oligonucleotide
  Antisense strand to SEQ ID NO: 540779
ucuuucacugcuuucuggc

SEQ ID NO: 540781 - RNA, 19 nt, Artificial Sequence
  Description of Artificial Sequence: Synthetic oligonucleotide
  Sense strand starting at position 3296 of SEQ ID NO: 318152
cuguucucauuugucgaaa

SEQ ID NO: 540782 - RNA, 19 nt, Artificial Sequence
  Description of Artificial Sequence: Synthetic oligonucleotide
  Antisense strand to SEQ ID NO: 540781
uuucgacaaaugagaacag

SEQ ID NO: 540783 - RNA, 19 nt, Artificial Sequence
  Description of Artificial Sequence: Synthetic oligonucleotide
  Sense strand starting at position 3297 of SEQ ID NO: 318152
uguucucauuugucgaaau

SEQ ID NO: 540784 - RNA, 19 nt, Artificial Sequence
  Description of Artificial Sequence: Synthetic oligonucleotide
  Antisense strand to SEQ ID NO: 540783
auuucgacaaaugagaaca

SEQ ID NO: 540785 - RNA, 19 nt, Artificial Sequence
  Description of Artificial Sequence: Synthetic oligonucleotide
  Sense strand starting at position 3307 of SEQ ID NO: 318152
ugucgaaaugagcaauuaa

SEQ ID NO: 540786 - RNA, 19 nt, Artificial Sequence
  Description of Artificial Sequence: Synthetic oligonucleotide
  Antisense strand to SEQ ID NO: 540785
uuaauugcucauuucgaca

SEQ ID NO: 540787 - RNA, 19 nt, Artificial Sequence
  Description of Artificial Sequence: Synthetic oligonucleotide
  Sense strand starting at position 3325 of SEQ ID NO: 318152
auuaacagucuuugugaag

SEQ ID NO: 540788 - RNA, 19 nt, Artificial Sequence
  Description of Artificial Sequence: Synthetic oligonucleotide
  Antisense strand to SEQ ID NO: 540787
cuucacaaagacuguuaau

SEQ ID NO: 540789 - RNA, 19 nt, Artificial Sequence
  Description of Artificial Sequence: Synthetic oligonucleotide
  Sense strand starting at position 3949 of SEQ ID NO: 318152
ugaauaugcagcuggaagu

SEQ ID NO: 540790 - RNA, 19 nt, Artificial Sequence
  Description of Artificial Sequence: Synthetic oligonucleotide
  Antisense strand to SEQ ID NO: 540789
acuuccagcugcauauuca

SEQ ID NO: 540791 - RNA, 19 nt, Artificial Sequence
  Description of Artificial Sequence: Synthetic oligonucleotide
  Sense strand starting at position 131 of SEQ ID NO: 318153
agaacuuggccagguguga

SEQ ID NO: 540792 - RNA, 19 nt, Artificial Sequence
  Description of Artificial Sequence: Synthetic oligonucleotide
  Antisense strand to SEQ ID NO: 540791
ucacaccuggccaaguucu

SEQ ID NO: 540793 - RNA, 19 nt, Artificial Sequence
  Description of Artificial Sequence: Synthetic oligonucleotide
  Sense strand starting at position 275 of SEQ ID NO: 318153
gguauacaccuguaaucac

SEQ ID NO: 540794 - RNA, 19 nt, Artificial Sequence
  Description of Artificial Sequence: Synthetic oligonucleotide
  Antisense strand to SEQ ID NO: 540793
gugauuacagguguauacc

SEQ ID NO: 540795 - RNA, 19 nt, Artificial Sequence
  Description of Artificial Sequence: Synthetic oligonucleotide
  Sense strand starting at position 430 of SEQ ID NO: 318153
ggaacuugacuaugaaguu

SEQ ID NO: 540796 - RNA, 19 nt, Artificial Sequence
  Description of Artificial Sequence: Synthetic oligonucleotide
  Antisense strand to SEQ ID NO: 540795
aacuucauagucaaguucc

SEQ ID NO: 540797 - RNA, 19 nt, Artificial Sequence
  Description of Artificial Sequence: Synthetic oligonucleotide
  Sense strand starting at position 437 of SEQ ID NO: 318153
gacuaugaaguuuaauguu

SEQ ID NO: 540798 - RNA, 19 nt, Artificial Sequence
  Description of Artificial Sequence: Synthetic oligonucleotide
  Antisense strand to SEQ ID NO: 540797
aacauuaaacuucauaguc

SEQ ID NO: 540799 - RNA, 19 nt, Artificial Sequence
  Description of Artificial Sequence: Synthetic oligonucleotide
  Sense strand starting at position 453 of SEQ ID NO: 318153
guuaaugucagaugaguca

SEQ ID NO: 540800 - RNA, 19 nt, Artificial Sequence
  Description of Artificial Sequence: Synthetic oligonucleotide
  Antisense strand to SEQ ID NO: 540799
ugacucaucugacauuaac

SEQ ID NO: 540801 - RNA, 19 nt, Artificial Sequence
  Description of Artificial Sequence: Synthetic oligonucleotide
  Sense strand starting at position 589 of SEQ ID NO: 318153
acauuagaaugcucuguaa

SEQ ID NO: 540802 - RNA, 19 nt, Artificial Sequence
  Description of Artificial Sequence: Synthetic oligonucleotide
  Antisense strand to SEQ ID NO: 540801
uuacagagcauucuaaugu

SEQ ID NO: 540803 - RNA, 19 nt, Artificial Sequence
  Description of Artificial Sequence: Synthetic oligonucleotide
  Sense strand starting at position 591 of SEQ ID NO: 318153
auuagaaugcucuguaaca

SEQ ID NO: 540804 - RNA, 19 nt, Artificial Sequence
  Description of Artificial Sequence: Synthetic oligonucleotide
  Antisense strand to SEQ ID NO: 540803
uguuacagagcauucuaau

SEQ ID NO: 540805 - RNA, 19 nt, Artificial Sequence
  Description of Artificial Sequence: Synthetic oligonucleotide
  Sense strand starting at position 592 of SEQ ID NO: 318153
uuagaaugcucuguaacau

SEQ ID NO: 540806 - RNA, 19 nt, Artificial Sequence
  Description of Artificial Sequence: Synthetic oligonucleotide
  Antisense strand to SEQ ID NO: 540805
auguuacagagcauucuaa

SEQ ID NO: 540807 - RNA, 19 nt, Artificial Sequence
  Description of Artificial Sequence: Synthetic oligonucleotide
  Sense strand starting at position 624 of SEQ ID NO: 318153
uaaugaauguuuccaguug

SEQ ID NO: 540808 - RNA, 19 nt, Artificial Sequence
  Description of Artificial Sequence: Synthetic oligonucleotide
  Antisense strand to SEQ ID NO: 540807
caacuggaaacauucauua

SEQ ID NO: 540809 - RNA, 19 nt, Artificial Sequence
  Description of Artificial Sequence: Synthetic oligonucleotide
  Sense strand starting at position 675 of SEQ ID NO: 318153
aggaguuauuaaguaacau

SEQ ID NO: 540810 - RNA, 19 nt, Artificial Sequence
  Description of Artificial Sequence: Synthetic oligonucleotide
  Antisense strand to SEQ ID NO: 540809
auguuacuuaauaacuccu

SEQ ID NO: 540811 - RNA, 19 nt, Artificial Sequence
  Description of Artificial Sequence: Synthetic oligonucleotide
  Sense strand starting at position 695 of SEQ ID NO: 318153
uuguauuugucauacagaa

SEQ ID NO: 540812 - RNA, 19 nt, Artificial Sequence
  Description of Artificial Sequence: Synthetic oligonucleotide
  Antisense strand to SEQ ID NO: 540811
uucuguaugacaaauacaa

SEQ ID NO: 540813 - RNA, 19 nt, Artificial Sequence
  Description of Artificial Sequence: Synthetic oligonucleotide
  Sense strand starting at position 814 of SEQ ID NO: 318153
ugucuaaagacacguaagu

SEQ ID NO: 540814 - RNA, 19 nt, Artificial Sequence
  Description of Artificial Sequence: Synthetic oligonucleotide
  Antisense strand to SEQ ID NO: 540813
acuuacgugucuuuagaca

SEQ ID NO: 540815 - RNA, 19 nt, Artificial Sequence
  Description of Artificial Sequence: Synthetic oligonucleotide
  Sense strand starting at position 816 of SEQ ID NO: 318153
ucuaaagacacguaagugu

SEQ ID NO: 540816 - RNA, 19 nt, Artificial Sequence
  Description of Artificial Sequence: Synthetic oligonucleotide
  Antisense strand to SEQ ID NO: 540815
acacuuacgugucuuuaga

SEQ ID NO: 540817 - RNA, 19 nt, Artificial Sequence
  Description of Artificial Sequence: Synthetic oligonucleotide
  Sense strand starting at position 823 of SEQ ID NO: 318153
acacguaaguguuuauaaa

SEQ ID NO: 540818 - RNA, 19 nt, Artificial Sequence
  Description of Artificial Sequence: Synthetic oligonucleotide
  Antisense strand to SEQ ID NO: 540817
uuuauaaacacuuacgugu

SEQ ID NO: 540819 - RNA, 19 nt, Artificial Sequence
  Description of Artificial Sequence: Synthetic oligonucleotide
  Sense strand starting at position 845 of SEQ ID NO: 318153
acuggugagcuauguaaca

SEQ ID NO: 540820 - RNA, 19 nt, Artificial Sequence
  Description of Artificial Sequence: Synthetic oligonucleotide
  Antisense strand to SEQ ID NO: 540819
uguuacauagcucaccagu

SEQ ID NO: 540821 - RNA, 19 nt, Artificial Sequence
  Description of Artificial Sequence: Synthetic oligonucleotide
  Sense strand starting at position 847 of SEQ ID NO: 318153
uggugagcuauguaacauc

SEQ ID NO: 540822 - RNA, 19 nt, Artificial Sequence
  Description of Artificial Sequence: Synthetic oligonucleotide
  Antisense strand to SEQ ID NO: 540821
gauguuacauagcucacca

SEQ ID NO: 540823 - RNA, 19 nt, Artificial Sequence
  Description of Artificial Sequence: Synthetic oligonucleotide
  Sense strand starting at position 931 of SEQ ID NO: 318153
aaguguguccaaggacuaa

SEQ ID NO: 540824 - RNA, 19 nt, Artificial Sequence
  Description of Artificial Sequence: Synthetic oligonucleotide
  Antisense strand to SEQ ID NO: 540823
uuaguccuuggacacacuu

SEQ ID NO: 540825 - RNA, 19 nt, Artificial Sequence
  Description of Artificial Sequence: Synthetic oligonucleotide
  Sense strand starting at position 1131 of SEQ ID NO: 318153
cugaaaggcucuuuaggga

SEQ ID NO: 540826 - RNA, 19 nt, Artificial Sequence
  Description of Artificial Sequence: Synthetic oligonucleotide
  Antisense strand to SEQ ID NO: 540825
ucccuaaagagccuuucag

SEQ ID NO: 540827 - RNA, 19 nt, Artificial Sequence
  Description of Artificial Sequence: Synthetic oligonucleotide
  Sense strand starting at position 1138 of SEQ ID NO: 318153
gcucuuuagggacaucuuu

SEQ ID NO: 540828 - RNA, 19 nt, Artificial Sequence
  Description of Artificial Sequence: Synthetic oligonucleotide
  Antisense strand to SEQ ID NO: 540827
aaagaugucccuaaagagc

SEQ ID NO: 540829 - RNA, 19 nt, Artificial Sequence
  Description of Artificial Sequence: Synthetic oligonucleotide
  Sense strand starting at position 1147 of SEQ ID NO: 318153
ggacaucuuuaggaagaag

SEQ ID NO: 540830 - RNA, 19 nt, Artificial Sequence
  Description of Artificial Sequence: Synthetic oligonucleotide
  Antisense strand to SEQ ID NO: 540829
cuucuuccuaaagaugucc

SEQ ID NO: 540831 - RNA, 19 nt, Artificial Sequence
  Description of Artificial Sequence: Synthetic oligonucleotide
  Sense strand starting at position 1208 of SEQ ID NO: 318153
gacacaaucguauagcuca

SEQ ID NO: 540832 - RNA, 19 nt, Artificial Sequence
  Description of Artificial Sequence: Synthetic oligonucleotide
  Antisense strand to SEQ ID NO: 540831
ugagcuauacgauuguguc

SEQ ID NO: 540833 - RNA, 19 nt, Artificial Sequence
  Description of Artificial Sequence: Synthetic oligonucleotide
  Sense strand starting at position 1541 of SEQ ID NO: 318153
ucucuucgaaccugagaga

SEQ ID NO: 540834 - RNA, 19 nt, Artificial Sequence
  Description of Artificial Sequence: Synthetic oligonucleotide
  Antisense strand to SEQ ID NO: 540833
ucucucagguucgaagaga

SEQ ID NO: 540835 - RNA, 19 nt, Artificial Sequence
  Description of Artificial Sequence: Synthetic oligonucleotide
  Sense strand starting at position 2206 of SEQ ID NO: 318153
uguggcugcaugcuuaauu

SEQ ID NO: 540836 - RNA, 19 nt, Artificial Sequence
  Description of Artificial Sequence: Synthetic oligonucleotide
  Antisense strand to SEQ ID NO: 540835
aauuaagcaugcagccaca

SEQ ID NO: 540837 - RNA, 19 nt, Artificial Sequence
  Description of Artificial Sequence: Synthetic oligonucleotide
  Sense strand starting at position 2307 of SEQ ID NO: 318153
ugcauaaggccuuaguaau

SEQ ID NO: 540838 - RNA, 19 nt, Artificial Sequence
  Description of Artificial Sequence: Synthetic oligonucleotide
  Antisense strand to SEQ ID NO: 540837
auuacuaaggccuuaugca

SEQ ID NO: 540839 - RNA, 19 nt, Artificial Sequence
  Description of Artificial Sequence: Synthetic oligonucleotide
  Sense strand starting at position 2419 of SEQ ID NO: 318153
aggagcuucucccugagga

SEQ ID NO: 540840 - RNA, 19 nt, Artificial Sequence
  Description of Artificial Sequence: Synthetic oligonucleotide
  Antisense strand to SEQ ID NO: 540839
uccucagggagaagcuccu

SEQ ID NO: 540841 - RNA, 19 nt, Artificial Sequence
  Description of Artificial Sequence: Synthetic oligonucleotide
  Sense strand starting at position 2420 of SEQ ID NO: 318153
ggagcuucucccugaggaa

SEQ ID NO: 540842 - RNA, 19 nt, Artificial Sequence
  Description of Artificial Sequence: Synthetic oligonucleotide
  Antisense strand to SEQ ID NO: 540841
uuccucagggagaagcucc

SEQ ID NO: 540843 - RNA, 19 nt, Artificial Sequence
  Description of Artificial Sequence: Synthetic oligonucleotide
  Sense strand starting at position 2421 of SEQ ID NO: 318153
gagcuucucccugaggaau

SEQ ID NO: 540844 - RNA, 19 nt, Artificial Sequence
  Description of Artificial Sequence: Synthetic oligonucleotide
  Antisense strand to SEQ ID NO: 540843
auuccucagggagaagcuc

SEQ ID NO: 540845 - RNA, 19 nt, Artificial Sequence
  Description of Artificial Sequence: Synthetic oligonucleotide
  Sense strand starting at position 2592 of SEQ ID NO: 318153
cauccuugugguuaaggua

SEQ ID NO: 540846 - RNA, 19 nt, Artificial Sequence
  Description of Artificial Sequence: Synthetic oligonucleotide
  Antisense strand to SEQ ID NO: 540845
uaccuuaaccacaaggaug

SEQ ID NO: 540847 - RNA, 19 nt, Artificial Sequence
  Description of Artificial Sequence: Synthetic oligonucleotide
  Sense strand starting at position 2599 of SEQ ID NO: 318153
gugguuaagguagaagauu

SEQ ID NO: 540848 - RNA, 19 nt, Artificial Sequence
  Description of Artificial Sequence: Synthetic oligonucleotide
  Antisense strand to SEQ ID NO: 540847
aaucuucuaccuuaaccac

SEQ ID NO: 540849 - RNA, 19 nt, Artificial Sequence
  Description of Artificial Sequence: Synthetic oligonucleotide
  Sense strand starting at position 2803 of SEQ ID NO: 318153
aguggagugguacaaucau

SEQ ID NO: 540850 - RNA, 19 nt, Artificial Sequence
  Description of Artificial Sequence: Synthetic oligonucleotide
  Antisense strand to SEQ ID NO: 540849
augauuguaccacuccacu

SEQ ID NO: 540851 - RNA, 19 nt, Artificial Sequence
  Description of Artificial Sequence: Synthetic oligonucleotide
  Sense strand starting at position 2907 of SEQ ID NO: 318153
augcccagcugauuuguaa

SEQ ID NO: 540852 - RNA, 19 nt, Artificial Sequence
  Description of Artificial Sequence: Synthetic oligonucleotide
  Antisense strand to SEQ ID NO: 540851
uuacaaaucagcugggcau

SEQ ID NO: 540853 - RNA, 19 nt, Artificial Sequence
  Description of Artificial Sequence: Synthetic oligonucleotide
  Sense strand starting at position 2911 of SEQ ID NO: 318153
ccagcugauuuguaaauuu

SEQ ID NO: 540854 - RNA, 19 nt, Artificial Sequence
  Description of Artificial Sequence: Synthetic oligonucleotide
  Antisense strand to SEQ ID NO: 540853
aaauuuacaaaucagcugg

SEQ ID NO: 540855 - RNA, 19 nt, Artificial Sequence
  Description of Artificial Sequence: Synthetic oligonucleotide
  Sense strand starting at position 3009 of SEQ ID NO: 318153
uccuaaauucuugggacua

SEQ ID NO: 540856 - RNA, 19 nt, Artificial Sequence
  Description of Artificial Sequence: Synthetic oligonucleotide
  Antisense strand to SEQ ID NO: 540855
uagucccaagaauuuagga

SEQ ID NO: 540857 - RNA, 19 nt, Artificial Sequence
  Description of Artificial Sequence: Synthetic oligonucleotide
  Sense strand starting at position 3366 of SEQ ID NO: 318153
gaagacagauuugagcauu

SEQ ID NO: 540858 - RNA, 19 nt, Artificial Sequence
  Description of Artificial Sequence: Synthetic oligonucleotide
  Antisense strand to SEQ ID NO: 540857
aaugcucaaaucugucuuc

SEQ ID NO: 540859 - RNA, 19 nt, Artificial Sequence
  Description of Artificial Sequence: Synthetic oligonucleotide
  Sense strand starting at position 3485 of SEQ ID NO: 318153
uugacugcucgguagcaaa

SEQ ID NO: 540860 - RNA, 19 nt, Artificial Sequence
  Description of Artificial Sequence: Synthetic oligonucleotide
  Antisense strand to SEQ ID NO: 540859
uuugcuaccgagcagucaa

SEQ ID NO: 540861 - RNA, 19 nt, Artificial Sequence
  Description of Artificial Sequence: Synthetic oligonucleotide
  Sense strand starting at position 3568 of SEQ ID NO: 318153
gaaccaucuggcgacauca

SEQ ID NO: 540862 - RNA, 19 nt, Artificial Sequence
  Description of Artificial Sequence: Synthetic oligonucleotide
  Antisense strand to SEQ ID NO: 540861
ugaugucgccagaugguuc

SEQ ID NO: 540863 - RNA, 19 nt, Artificial Sequence
  Description of Artificial Sequence: Synthetic oligonucleotide
  Sense strand starting at position 3577 of SEQ ID NO: 318153
ggcgacaucagaugagcau

SEQ ID NO: 540864 - RNA, 19 nt, Artificial Sequence
  Description of Artificial Sequence: Synthetic oligonucleotide
  Antisense strand to SEQ ID NO: 540863
augcucaucugaugucgcc

SEQ ID NO: 540865 - RNA, 19 nt, Artificial Sequence
  Description of Artificial Sequence: Synthetic oligonucleotide
  Sense strand starting at position 3578 of SEQ ID NO: 318153
gcgacaucagaugagcaua

SEQ ID NO: 540866 - RNA, 19 nt, Artificial Sequence
  Description of Artificial Sequence: Synthetic oligonucleotide
  Antisense strand to SEQ ID NO: 540865
uaugcucaucugaugucgc

SEQ ID NO: 540867 - RNA, 19 nt, Artificial Sequence
  Description of Artificial Sequence: Synthetic oligonucleotide
  Sense strand starting at position 3589 of SEQ ID NO: 318153
ugagcauauuaugcacaua

SEQ ID NO: 540868 - RNA, 19 nt, Artificial Sequence
  Description of Artificial Sequence: Synthetic oligonucleotide
  Antisense strand to SEQ ID NO: 540867
uaugugcauaauaugcuca

SEQ ID NO: 540869 - RNA, 19 nt, Artificial Sequence
  Description of Artificial Sequence: Synthetic oligonucleotide
  Sense strand starting at position 3703 of SEQ ID NO: 318153
ucuguaacaccucagucuu

SEQ ID NO: 540870 - RNA, 19 nt, Artificial Sequence
  Description of Artificial Sequence: Synthetic oligonucleotide
  Antisense strand to SEQ ID NO: 540869
aagacugagguguuacaga

SEQ ID NO: 540871 - RNA, 19 nt, Artificial Sequence
  Description of Artificial Sequence: Synthetic oligonucleotide
  Sense strand starting at position 15 of SEQ ID NO: 318154
ucuuguaguagauggguua

SEQ ID NO: 540872 - RNA, 19 nt, Artificial Sequence
  Description of Artificial Sequence: Synthetic oligonucleotide
  Antisense strand to SEQ ID NO: 540871
uaacccaucuacuacaaga

SEQ ID NO: 540873 - RNA, 19 nt, Artificial Sequence
  Description of Artificial Sequence: Synthetic oligonucleotide
  Sense strand starting at position 16 of SEQ ID NO: 318154
cuuguaguagauggguuau

SEQ ID NO: 540874 - RNA, 19 nt, Artificial Sequence
  Description of Artificial Sequence: Synthetic oligonucleotide
  Antisense strand to SEQ ID NO: 540873
auaacccaucuacuacaag

SEQ ID NO: 540875 - RNA, 19 nt, Artificial Sequence
  Description of Artificial Sequence: Synthetic oligonucleotide
  Sense strand starting at position 106 of SEQ ID NO: 318154
uugcauuugugauaucaaa

SEQ ID NO: 540876 - RNA, 19 nt, Artificial Sequence
  Description of Artificial Sequence: Synthetic oligonucleotide
  Antisense strand to SEQ ID NO: 540875
uuugauaucacaaaugcaa

SEQ ID NO: 540877 - RNA, 19 nt, Artificial Sequence
  Description of Artificial Sequence: Synthetic oligonucleotide
  Sense strand starting at position 181 of SEQ ID NO: 318154
ugaugacaacugugccauu

SEQ ID NO: 540878 - RNA, 19 nt, Artificial Sequence
  Description of Artificial Sequence: Synthetic oligonucleotide
  Antisense strand to SEQ ID NO: 540877
aauggcacaguugucauca

SEQ ID NO: 540879 - RNA, 19 nt, Artificial Sequence
  Description of Artificial Sequence: Synthetic oligonucleotide
  Sense strand starting at position 192 of SEQ ID NO: 318154
gugccauucccaggaauau

SEQ ID NO: 540880 - RNA, 19 nt, Artificial Sequence
  Description of Artificial Sequence: Synthetic oligonucleotide
  Antisense strand to SEQ ID NO: 540879
auauuccugggaauggcac

SEQ ID NO: 540881 - RNA, 19 nt, Artificial Sequence
  Description of Artificial Sequence: Synthetic oligonucleotide
  Sense strand starting at position 193 of SEQ ID NO: 318154
ugccauucccaggaauauc

SEQ ID NO: 540882 - RNA, 19 nt, Artificial Sequence
  Description of Artificial Sequence: Synthetic oligonucleotide
  Antisense strand to SEQ ID NO: 540881
gauauuccugggaauggca

SEQ ID NO: 540883 - RNA, 19 nt, Artificial Sequence
  Description of Artificial Sequence: Synthetic oligonucleotide
  Sense strand starting at position 222 of SEQ ID NO: 318154
ggguaagaaaucugauguc

SEQ ID NO: 540884 - RNA, 19 nt, Artificial Sequence
  Description of Artificial Sequence: Synthetic oligonucleotide
  Antisense strand to SEQ ID NO: 540883
gacaucagauuucuuaccc

SEQ ID NO: 540885 - RNA, 19 nt, Artificial Sequence
  Description of Artificial Sequence: Synthetic oligonucleotide
  Sense strand starting at position 274 of SEQ ID NO: 318154
agcacccugugaucauaau

SEQ ID NO: 540886 - RNA, 19 nt, Artificial Sequence
  Description of Artificial Sequence: Synthetic oligonucleotide
  Antisense strand to SEQ ID NO: 540885
auuaugaucacagggugcu

SEQ ID NO: 540887 - RNA, 19 nt, Artificial Sequence
  Description of Artificial Sequence: Synthetic oligonucleotide
  Sense strand starting at position 280 of SEQ ID NO: 318154
cugugaucauaaucucuga

SEQ ID NO: 540888 - RNA, 19 nt, Artificial Sequence
  Description of Artificial Sequence: Synthetic oligonucleotide
  Antisense strand to SEQ ID NO: 540887
ucagagauuaugaucacag

SEQ ID NO: 540889 - RNA, 19 nt, Artificial Sequence
  Description of Artificial Sequence: Synthetic oligonucleotide
  Sense strand starting at position 437 of SEQ ID NO: 318154
guuccaagagucuaaggca

SEQ ID NO: 540890 - RNA, 19 nt, Artificial Sequence
  Description of Artificial Sequence: Synthetic oligonucleotide
  Antisense strand to SEQ ID NO: 540889
ugccuuagacucuuggaac

SEQ ID NO: 540891 - RNA, 19 nt, Artificial Sequence
  Description of Artificial Sequence: Synthetic oligonucleotide
  Sense strand starting at position 509 of SEQ ID NO: 318154
guagucagagcucaaugaa

SEQ ID NO: 540892 - RNA, 19 nt, Artificial Sequence
  Description of Artificial Sequence: Synthetic oligonucleotide
  Antisense strand to SEQ ID NO: 540891
uucauugagcucugacuac

SEQ ID NO: 540893 - RNA, 19 nt, Artificial Sequence
  Description of Artificial Sequence: Synthetic oligonucleotide
  Sense strand starting at position 512 of SEQ ID NO: 318154
gucagagcucaaugaauau

SEQ ID NO: 540894 - RNA, 19 nt, Artificial Sequence
  Description of Artificial Sequence: Synthetic oligonucleotide
  Antisense strand to SEQ ID NO: 540893
auauucauugagcucugac

SEQ ID NO: 540895 - RNA, 19 nt, Artificial Sequence
  Description of Artificial Sequence: Synthetic oligonucleotide
  Sense strand starting at position 867 of SEQ ID NO: 318154
aguucaauggugugaguga

SEQ ID NO: 540896 - RNA, 19 nt, Artificial Sequence
  Description of Artificial Sequence: Synthetic oligonucleotide
  Antisense strand to SEQ ID NO: 540895
ucacucacaccauugaacu

SEQ ID NO: 540897 - RNA, 19 nt, Artificial Sequence
  Description of Artificial Sequence: Synthetic oligonucleotide
  Sense strand starting at position 872 of SEQ ID NO: 318154
aauggugugagugaugcaa

SEQ ID NO: 540898 - RNA, 19 nt, Artificial Sequence
  Description of Artificial Sequence: Synthetic oligonucleotide
  Antisense strand to SEQ ID NO: 540897
uugcaucacucacaccauu

SEQ ID NO: 540899 - RNA, 19 nt, Artificial Sequence
  Description of Artificial Sequence: Synthetic oligonucleotide
  Sense strand starting at position 876 of SEQ ID NO: 318154
gugugagugaugcaagacu

SEQ ID NO: 540900 - RNA, 19 nt, Artificial Sequence
  Description of Artificial Sequence: Synthetic oligonucleotide
  Antisense strand to SEQ ID NO: 540899
agucuugcaucacucacac

SEQ ID NO: 540901 - RNA, 19 nt, Artificial Sequence
  Description of Artificial Sequence: Synthetic oligonucleotide
  Sense strand starting at position 981 of SEQ ID NO: 318154
aucacuguguuccuacuaa

SEQ ID NO: 540902 - RNA, 19 nt, Artificial Sequence
  Description of Artificial Sequence: Synthetic oligonucleotide
  Antisense strand to SEQ ID NO: 540901
uuaguaggaacacagugau

SEQ ID NO: 540903 - RNA, 19 nt, Artificial Sequence
  Description of Artificial Sequence: Synthetic oligonucleotide
  Sense strand starting at position 1002 of SEQ ID NO: 318154
uauuuagugugucuauaug

SEQ ID NO: 540904 - RNA, 19 nt, Artificial Sequence
  Description of Artificial Sequence: Synthetic oligonucleotide
  Antisense strand to SEQ ID NO: 540903
cauauagacacacuaaaua

SEQ ID NO: 540905 - RNA, 19 nt, Artificial Sequence
  Description of Artificial Sequence: Synthetic oligonucleotide
  Sense strand starting at position 1025 of SEQ ID NO: 318154
ggugguauugaugaccuua

SEQ ID NO: 540906 - RNA, 19 nt, Artificial Sequence
  Description of Artificial Sequence: Synthetic oligonucleotide
  Antisense strand to SEQ ID NO: 540905
uaaggucaucaauaccacc

SEQ ID NO: 540907 - RNA, 19 nt, Artificial Sequence
  Description of Artificial Sequence: Synthetic oligonucleotide
  Sense strand starting at position 1027 of SEQ ID NO: 318154
ugguauugaugaccuuauu

SEQ ID NO: 540908 - RNA, 19 nt, Artificial Sequence
  Description of Artificial Sequence: Synthetic oligonucleotide
  Antisense strand to SEQ ID NO: 540907
aauaaggucaucaauacca

SEQ ID NO: 540909 - RNA, 19 nt, Artificial Sequence
  Description of Artificial Sequence: Synthetic oligonucleotide
  Sense strand starting at position 1087 of SEQ ID NO: 318154
gcuguuucccagcaguaaa

SEQ ID NO: 540910 - RNA, 19 nt, Artificial Sequence
  Description of Artificial Sequence: Synthetic oligonucleotide
  Antisense strand to SEQ ID NO: 540909
uuuacugcugggaaacagc

SEQ ID NO: 540911 - RNA, 19 nt, Artificial Sequence
  Description of Artificial Sequence: Synthetic oligonucleotide
  Sense strand starting at position 1177 of SEQ ID NO: 318154
ucuuauucuggcugaagua

SEQ ID NO: 540912 - RNA, 19 nt, Artificial Sequence
  Description of Artificial Sequence: Synthetic oligonucleotide
  Antisense strand to SEQ ID NO: 540911
uacuucagccagaauaaga

SEQ ID NO: 540913 - RNA, 19 nt, Artificial Sequence
  Description of Artificial Sequence: Synthetic oligonucleotide
  Sense strand starting at position 1178 of SEQ ID NO: 318154
cuuauucuggcugaaguaa

SEQ ID NO: 540914 - RNA, 19 nt, Artificial Sequence
  Description of Artificial Sequence: Synthetic oligonucleotide
  Antisense strand to SEQ ID NO: 540913
uuacuucagccagaauaag

SEQ ID NO: 540915 - RNA, 19 nt, Artificial Sequence
  Description of Artificial Sequence: Synthetic oligonucleotide
  Sense strand starting at position 1246 of SEQ ID NO: 318154
agucuuuaccaaugaggcu

SEQ ID NO: 540916 - RNA, 19 nt, Artificial Sequence
  Description of Artificial Sequence: Synthetic oligonucleotide
  Antisense strand to SEQ ID NO: 540915
agccucauugguaaagacu

SEQ ID NO: 540917 - RNA, 19 nt, Artificial Sequence
  Description of Artificial Sequence: Synthetic oligonucleotide
  Sense strand starting at position 1384 of SEQ ID NO: 318154
aaguuuaaguaucuuggaa

SEQ ID NO: 540918 - RNA, 19 nt, Artificial Sequence
  Description of Artificial Sequence: Synthetic oligonucleotide
  Antisense strand to SEQ ID NO: 540917
uuccaagauacuuaaacuu

SEQ ID NO: 540919 - RNA, 19 nt, Artificial Sequence
  Description of Artificial Sequence: Synthetic oligonucleotide
  Sense strand starting at position 1439 of SEQ ID NO: 318154
uuccuccaccucugugauu

SEQ ID NO: 540920 - RNA, 19 nt, Artificial Sequence
  Description of Artificial Sequence: Synthetic oligonucleotide
  Antisense strand to SEQ ID NO: 540919
aaucacagagguggaggaa

SEQ ID NO: 540921 - RNA, 19 nt, Artificial Sequence
  Description of Artificial Sequence: Synthetic oligonucleotide
  Sense strand starting at position 1694 of SEQ ID NO: 318154
gcgcaucucagguuguaca

SEQ ID NO: 540922 - RNA, 19 nt, Artificial Sequence
  Description of Artificial Sequence: Synthetic oligonucleotide
  Antisense strand to SEQ ID NO: 540921
uguacaaccugagaugcgc

SEQ ID NO: 540923 - RNA, 19 nt, Artificial Sequence
  Description of Artificial Sequence: Synthetic oligonucleotide
  Sense strand starting at position 1701 of SEQ ID NO: 318154
ucagguuguacauggacau

SEQ ID NO: 540924 - RNA, 19 nt, Artificial Sequence
  Description of Artificial Sequence: Synthetic oligonucleotide
  Antisense strand to SEQ ID NO: 540923
auguccauguacaaccuga

SEQ ID NO: 540925 - RNA, 19 nt, Artificial Sequence
  Description of Artificial Sequence: Synthetic oligonucleotide
  Sense strand starting at position 2216 of SEQ ID NO: 318154
aaggguugucgucagagua

SEQ ID NO: 540926 - RNA, 19 nt, Artificial Sequence
  Description of Artificial Sequence: Synthetic oligonucleotide
  Antisense strand to SEQ ID NO: 540925
uacucugacgacaacccuu

SEQ ID NO: 540927 - RNA, 19 nt, Artificial Sequence
  Description of Artificial Sequence: Synthetic oligonucleotide
  Sense strand starting at position 2217 of SEQ ID NO: 318154
aggguugucgucagaguac

SEQ ID NO: 540928 - RNA, 19 nt, Artificial Sequence
  Description of Artificial Sequence: Synthetic oligonucleotide
  Antisense strand to SEQ ID NO: 540927
guacucugacgacaacccu

SEQ ID NO: 540929 - RNA, 19 nt, Artificial Sequence
  Description of Artificial Sequence: Synthetic oligonucleotide
  Sense strand starting at position 2219 of SEQ ID NO: 318154
gguugucgucagaguacuu

SEQ ID NO: 540930 - RNA, 19 nt, Artificial Sequence
  Description of Artificial Sequence: Synthetic oligonucleotide
  Antisense strand to SEQ ID NO: 540929
aaguacucugacgacaacc

SEQ ID NO: 540931 - RNA, 19 nt, Artificial Sequence
  Description of Artificial Sequence: Synthetic oligonucleotide
  Sense strand starting at position 2825 of SEQ ID NO: 318154
gcucaaaucacgugaggga

SEQ ID NO: 540932 - RNA, 19 nt, Artificial Sequence
  Description of Artificial Sequence: Synthetic oligonucleotide
  Antisense strand to SEQ ID NO: 540931
ucccucacgugauuugagc

SEQ ID NO: 540933 - RNA, 19 nt, Artificial Sequence
  Description of Artificial Sequence: Synthetic oligonucleotide
  Sense strand starting at position 3026 of SEQ ID NO: 318154
gggcagugucuggagugaa

SEQ ID NO: 540934 - RNA, 19 nt, Artificial Sequence
  Description of Artificial Sequence: Synthetic oligonucleotide
  Antisense strand to SEQ ID NO: 540933
uucacuccagacacugccc

SEQ ID NO: 540935 - RNA, 19 nt, Artificial Sequence
  Description of Artificial Sequence: Synthetic oligonucleotide
  Sense strand starting at position 3131 of SEQ ID NO: 318154
acguaaugcgauuggaaac

SEQ ID NO: 540936 - RNA, 19 nt, Artificial Sequence
  Description of Artificial Sequence: Synthetic oligonucleotide
  Antisense strand to SEQ ID NO: 540935
guuuccaaucgcauuacgu

SEQ ID NO: 540937 - RNA, 19 nt, Artificial Sequence
  Description of Artificial Sequence: Synthetic oligonucleotide
  Sense strand starting at position 3452 of SEQ ID NO: 318154
ggaggauugugacuaaagu

SEQ ID NO: 540938 - RNA, 19 nt, Artificial Sequence
  Description of Artificial Sequence: Synthetic oligonucleotide
  Antisense strand to SEQ ID NO: 540937
acuuuagucacaauccucc

SEQ ID NO: 540939 - RNA, 19 nt, Artificial Sequence
  Description of Artificial Sequence: Synthetic oligonucleotide
  Sense strand starting at position 3460 of SEQ ID NO: 318154
gugacuaaaguuuauccau

SEQ ID NO: 540940 - RNA, 19 nt, Artificial Sequence
  Description of Artificial Sequence: Synthetic oligonucleotide
  Antisense strand to SEQ ID NO: 540939
auggauaaacuuuagucac

SEQ ID NO: 540941 - RNA, 19 nt, Artificial Sequence
  Description of Artificial Sequence: Synthetic oligonucleotide
  Sense strand starting at position 3594 of SEQ ID NO: 318154
agaaauggguuacaaauuu

SEQ ID NO: 540942 - RNA, 19 nt, Artificial Sequence
  Description of Artificial Sequence: Synthetic oligonucleotide
  Antisense strand to SEQ ID NO: 540941
aaauuuguaacccauuucu

SEQ ID NO: 540943 - RNA, 19 nt, Artificial Sequence
  Description of Artificial Sequence: Synthetic oligonucleotide
  Sense strand starting at position 3724 of SEQ ID NO: 318154
uuuguacuuugaguagaag

SEQ ID NO: 540944 - RNA, 19 nt, Artificial Sequence
  Description of Artificial Sequence: Synthetic oligonucleotide
  Antisense strand to SEQ ID NO: 540943
cuucuacucaaaguacaaa

SEQ ID NO: 540945 - RNA, 19 nt, Artificial Sequence
  Description of Artificial Sequence: Synthetic oligonucleotide
  Sense strand starting at position 3766 of SEQ ID NO: 318154
cagugucuacaaggaagau

SEQ ID NO: 540946 - RNA, 19 nt, Artificial Sequence
  Description of Artificial Sequence: Synthetic oligonucleotide
  Antisense strand to SEQ ID NO: 540945
aucuuccuuguagacacug

SEQ ID NO: 540947 - RNA, 19 nt, Artificial Sequence
  Description of Artificial Sequence: Synthetic oligonucleotide
  Sense strand starting at position 3946 of SEQ ID NO: 318154
aucgcaugcuguuuaauuu

SEQ ID NO: 540948 - RNA, 19 nt, Artificial Sequence
  Description of Artificial Sequence: Synthetic oligonucleotide
  Antisense strand to SEQ ID NO: 540947
aaauuaaacagcaugcgau

SEQ ID NO: 540949 - RNA, 19 nt, Artificial Sequence
  Description of Artificial Sequence: Synthetic oligonucleotide
  Sense strand starting at position 3947 of SEQ ID NO: 318154
ucgcaugcuguuuaauuua

SEQ ID NO: 540950 - RNA, 19 nt, Artificial Sequence
  Description of Artificial Sequence: Synthetic oligonucleotide
  Antisense strand to SEQ ID NO: 540949
uaaauuaaacagcaugcga

SEQ ID NO: 540951 - RNA, 19 nt, Artificial Sequence
  Description of Artificial Sequence: Synthetic oligonucleotide
  Sense strand starting at position 41 of SEQ ID NO: 318155
cuuauucuggcugaaguaa

SEQ ID NO: 540952 - RNA, 19 nt, Artificial Sequence
  Description of Artificial Sequence: Synthetic oligonucleotide
  Antisense strand to SEQ ID NO: 540951
uuacuucagccagaauaag

SEQ ID NO: 540953 - RNA, 19 nt, Artificial Sequence
  Description of Artificial Sequence: Synthetic oligonucleotide
  Sense strand starting at position 247 of SEQ ID NO: 318155
aaguuuaaguaucuuggaa

SEQ ID NO: 540954 - RNA, 19 nt, Artificial Sequence
  Description of Artificial Sequence: Synthetic oligonucleotide
  Antisense strand to SEQ ID NO: 540953
uuccaagauacuuaaacuu

SEQ ID NO: 540955 - RNA, 19 nt, Artificial Sequence
  Description of Artificial Sequence: Synthetic oligonucleotide
  Sense strand starting at position 557 of SEQ ID NO: 318155
gcgcaucucagguuguaca

SEQ ID NO: 540956 - RNA, 19 nt, Artificial Sequence
  Description of Artificial Sequence: Synthetic oligonucleotide
  Antisense strand to SEQ ID NO: 540955
uguacaaccugagaugcgc

SEQ ID NO: 540957 - RNA, 19 nt, Artificial Sequence
  Description of Artificial Sequence: Synthetic oligonucleotide
  Sense strand starting at position 564 of SEQ ID NO: 318155
ucagguuguacauggacau

SEQ ID NO: 540958 - RNA, 19 nt, Artificial Sequence
  Description of Artificial Sequence: Synthetic oligonucleotide
  Antisense strand to SEQ ID NO: 540957
auguccauguacaaccuga

SEQ ID NO: 540959 - RNA, 19 nt, Artificial Sequence
  Description of Artificial Sequence: Synthetic oligonucleotide
  Sense strand starting at position 1080 of SEQ ID NO: 318155
aggguugucgucagaguac

SEQ ID NO: 540960 - RNA, 19 nt, Artificial Sequence
  Description of Artificial Sequence: Synthetic oligonucleotide
  Antisense strand to SEQ ID NO: 540959
guacucugacgacaacccu

SEQ ID NO: 540961 - RNA, 19 nt, Artificial Sequence
  Description of Artificial Sequence: Synthetic oligonucleotide
  Sense strand starting at position 1082 of SEQ ID NO: 318155
gguugucgucagaguacuu

SEQ ID NO: 540962 - RNA, 19 nt, Artificial Sequence
  Description of Artificial Sequence: Synthetic oligonucleotide
  Antisense strand to SEQ ID NO: 540961
aaguacucugacgacaacc

SEQ ID NO: 540963 - RNA, 19 nt, Artificial Sequence
  Description of Artificial Sequence: Synthetic oligonucleotide
  Sense strand starting at position 1688 of SEQ ID NO: 318155
gcucaaaucacgugaggga

SEQ ID NO: 540964 - RNA, 19 nt, Artificial Sequence
  Description of Artificial Sequence: Synthetic oligonucleotide
  Antisense strand to SEQ ID NO: 540963
ucccucacgugauuugagc

SEQ ID NO: 540965 - RNA, 19 nt, Artificial Sequence
  Description of Artificial Sequence: Synthetic oligonucleotide
  Sense strand starting at position 1889 of SEQ ID NO: 318155
gggcagugucuggagugaa

SEQ ID NO: 540966 - RNA, 19 nt, Artificial Sequence
  Description of Artificial Sequence: Synthetic oligonucleotide
  Antisense strand to SEQ ID NO: 540965
uucacuccagacacugccc

SEQ ID NO: 540967 - RNA, 19 nt, Artificial Sequence
  Description of Artificial Sequence: Synthetic oligonucleotide
  Sense strand starting at position 2315 of SEQ ID NO: 318155
ggaggauugugacuaaagu

SEQ ID NO: 540968 - RNA, 19 nt, Artificial Sequence
  Description of Artificial Sequence: Synthetic oligonucleotide
  Antisense strand to SEQ ID NO: 540967
acuuuagucacaauccucc

SEQ ID NO: 540969 - RNA, 19 nt, Artificial Sequence
  Description of Artificial Sequence: Synthetic oligonucleotide
  Sense strand starting at position 2323 of SEQ ID NO: 318155
gugacuaaaguuuauccau

SEQ ID NO: 540970 - RNA, 19 nt, Artificial Sequence
  Description of Artificial Sequence: Synthetic oligonucleotide
  Antisense strand to SEQ ID NO: 540969
auggauaaacuuuagucac

SEQ ID NO: 540971 - RNA, 19 nt, Artificial Sequence
  Description of Artificial Sequence: Synthetic oligonucleotide
  Sense strand starting at position 2457 of SEQ ID NO: 318155
agaaauggguuacaaauuu

SEQ ID NO: 540972 - RNA, 19 nt, Artificial Sequence
  Description of Artificial Sequence: Synthetic oligonucleotide
  Antisense strand to SEQ ID NO: 540971
aaauuuguaacccauuucu

SEQ ID NO: 540973 - RNA, 19 nt, Artificial Sequence
  Description of Artificial Sequence: Synthetic oligonucleotide
  Sense strand starting at position 2587 of SEQ ID NO: 318155
uuuguacuuugaguagaag

SEQ ID NO: 540974 - RNA, 19 nt, Artificial Sequence
  Description of Artificial Sequence: Synthetic oligonucleotide
  Antisense strand to SEQ ID NO: 540973
cuucuacucaaaguacaaa

SEQ ID NO: 540975 - RNA, 19 nt, Artificial Sequence
  Description of Artificial Sequence: Synthetic oligonucleotide
  Sense strand starting at position 2629 of SEQ ID NO: 318155
cagugucuacaaggaagau

SEQ ID NO: 540976 - RNA, 19 nt, Artificial Sequence
  Description of Artificial Sequence: Synthetic oligonucleotide
  Antisense strand to SEQ ID NO: 540975
aucuuccuuguagacacug

SEQ ID NO: 540977 - RNA, 19 nt, Artificial Sequence
  Description of Artificial Sequence: Synthetic oligonucleotide
  Sense strand starting at position 2810 of SEQ ID NO: 318155
ucgcaugcuguuuaauuua

SEQ ID NO: 540978 - RNA, 19 nt, Artificial Sequence
  Description of Artificial Sequence: Synthetic oligonucleotide
  Antisense strand to SEQ ID NO: 540977
uaaauuaaacagcaugcga

SEQ ID NO: 540979 - RNA, 19 nt, Artificial Sequence
  Description of Artificial Sequence: Synthetic oligonucleotide
  Sense strand starting at position 2895 of SEQ ID NO: 318155
ggaaguaggaguggucaga

SEQ ID NO: 540980 - RNA, 19 nt, Artificial Sequence
  Description of Artificial Sequence: Synthetic oligonucleotide
  Antisense strand to SEQ ID NO: 540979
ucugaccacuccuacuucc

SEQ ID NO: 540981 - RNA, 19 nt, Artificial Sequence
  Description of Artificial Sequence: Synthetic oligonucleotide
  Sense strand starting at position 2929 of SEQ ID NO: 318155
gggauaaauuaugcugacu

SEQ ID NO: 540982 - RNA, 19 nt, Artificial Sequence
  Description of Artificial Sequence: Synthetic oligonucleotide
  Antisense strand to SEQ ID NO: 540981
agucagcauaauuuauccc

SEQ ID NO: 540983 - RNA, 19 nt, Artificial Sequence
  Description of Artificial Sequence: Synthetic oligonucleotide
  Sense strand starting at position 2935 of SEQ ID NO: 318155
aauuaugcugacuggaaag

SEQ ID NO: 540984 - RNA, 19 nt, Artificial Sequence
  Description of Artificial Sequence: Synthetic oligonucleotide
  Antisense strand to SEQ ID NO: 540983
cuuuccagucagcauaauu

SEQ ID NO: 540985 - RNA, 19 nt, Artificial Sequence
  Description of Artificial Sequence: Synthetic oligonucleotide
  Sense strand starting at position 2956 of SEQ ID NO: 318155
auacauaauggacgaguua

SEQ ID NO: 540986 - RNA, 19 nt, Artificial Sequence
  Description of Artificial Sequence: Synthetic oligonucleotide
  Antisense strand to SEQ ID NO: 540985
uaacucguccauuauguau

SEQ ID NO: 540987 - RNA, 19 nt, Artificial Sequence
  Description of Artificial Sequence: Synthetic oligonucleotide
  Sense strand starting at position 2995 of SEQ ID NO: 318155
ugggcagugcuagaaacuu

SEQ ID NO: 540988 - RNA, 19 nt, Artificial Sequence
  Description of Artificial Sequence: Synthetic oligonucleotide
  Antisense strand to SEQ ID NO: 540987
aaguuucuagcacugccca

SEQ ID NO: 540989 - RNA, 19 nt, Artificial Sequence
  Description of Artificial Sequence: Synthetic oligonucleotide
  Sense strand starting at position 3028 of SEQ ID NO: 318155
guuacuaaauggucugauu

SEQ ID NO: 540990 - RNA, 19 nt, Artificial Sequence
  Description of Artificial Sequence: Synthetic oligonucleotide
  Antisense strand to SEQ ID NO: 540989
aaucagaccauuuaguaac

SEQ ID NO: 540991 - RNA, 19 nt, Artificial Sequence
  Description of Artificial Sequence: Synthetic oligonucleotide
  Sense strand starting at position 3031 of SEQ ID NO: 318155
acuaaauggucugauuuaa

SEQ ID NO: 540992 - RNA, 19 nt, Artificial Sequence
  Description of Artificial Sequence: Synthetic oligonucleotide
  Antisense strand to SEQ ID NO: 540991
uuaaaucagaccauuuagu

SEQ ID NO: 540993 - RNA, 19 nt, Artificial Sequence
  Description of Artificial Sequence: Synthetic oligonucleotide
  Sense strand starting at position 3100 of SEQ ID NO: 318155
ugggcuauuguccagacau

SEQ ID NO: 540994 - RNA, 19 nt, Artificial Sequence
  Description of Artificial Sequence: Synthetic oligonucleotide
  Antisense strand to SEQ ID NO: 540993
augucuggacaauagccca

SEQ ID NO: 540995 - RNA, 19 nt, Artificial Sequence
  Description of Artificial Sequence: Synthetic oligonucleotide
  Sense strand starting at position 3102 of SEQ ID NO: 318155
ggcuauuguccagacauac

SEQ ID NO: 540996 - RNA, 19 nt, Artificial Sequence
  Description of Artificial Sequence: Synthetic oligonucleotide
  Antisense strand to SEQ ID NO: 540995
guaugucuggacaauagcc

SEQ ID NO: 540997 - RNA, 19 nt, Artificial Sequence
  Description of Artificial Sequence: Synthetic oligonucleotide
  Sense strand starting at position 3309 of SEQ ID NO: 318155
gagcauuuaugagacuuac

SEQ ID NO: 540998 - RNA, 19 nt, Artificial Sequence
  Description of Artificial Sequence: Synthetic oligonucleotide
  Antisense strand to SEQ ID NO: 540997
guaagucucauaaaugcuc

SEQ ID NO: 540999 - RNA, 19 nt, Artificial Sequence
  Description of Artificial Sequence: Synthetic oligonucleotide
  Sense strand starting at position 3342 of SEQ ID NO: 318155
ggucaugagauccagguuu

SEQ ID NO: 541000 - RNA, 19 nt, Artificial Sequence
  Description of Artificial Sequence: Synthetic oligonucleotide
  Antisense strand to SEQ ID NO: 540999
aaaccuggaucucaugacc

SEQ ID NO: 541001 - RNA, 19 nt, Artificial Sequence
  Description of Artificial Sequence: Synthetic oligonucleotide
  Sense strand starting at position 3371 of SEQ ID NO: 318155
gccaucucucuagaugguu

SEQ ID NO: 541002 - RNA, 19 nt, Artificial Sequence
  Description of Artificial Sequence: Synthetic oligonucleotide
  Antisense strand to SEQ ID NO: 541001
aaccaucuagagagauggc

SEQ ID NO: 541003 - RNA, 19 nt, Artificial Sequence
  Description of Artificial Sequence: Synthetic oligonucleotide
  Sense strand starting at position 3374 of SEQ ID NO: 318155
aucucucuagaugguuuaa

SEQ ID NO: 541004 - RNA, 19 nt, Artificial Sequence
  Description of Artificial Sequence: Synthetic oligonucleotide
  Antisense strand to SEQ ID NO: 541003
uuaaaccaucuagagagau

SEQ ID NO: 541005 - RNA, 19 nt, Artificial Sequence
  Description of Artificial Sequence: Synthetic oligonucleotide
  Sense strand starting at position 3376 of SEQ ID NO: 318155
cucucuagaugguuuaauu

SEQ ID NO: 541006 - RNA, 19 nt, Artificial Sequence
  Description of Artificial Sequence: Synthetic oligonucleotide
  Antisense strand to SEQ ID NO: 541005
aauuaaaccaucuagagag

SEQ ID NO: 541007 - RNA, 19 nt, Artificial Sequence
  Description of Artificial Sequence: Synthetic oligonucleotide
  Sense strand starting at position 3405 of SEQ ID NO: 318155
ucugaaucuugagcagaag

SEQ ID NO: 541008 - RNA, 19 nt, Artificial Sequence
  Description of Artificial Sequence: Synthetic oligonucleotide
  Antisense strand to SEQ ID NO: 541007
cuucugcucaagauucaga

SEQ ID NO: 541009 - RNA, 19 nt, Artificial Sequence
  Description of Artificial Sequence: Synthetic oligonucleotide
  Sense strand starting at position 3417 of SEQ ID NO: 318155
gcagaaggacacugucaaa

SEQ ID NO: 541010 - RNA, 19 nt, Artificial Sequence
  Description of Artificial Sequence: Synthetic oligonucleotide
  Antisense strand to SEQ ID NO: 541009
uuugacaguguccuucugc

SEQ ID NO: 541011 - RNA, 19 nt, Artificial Sequence
  Description of Artificial Sequence: Synthetic oligonucleotide
  Sense strand starting at position 3528 of SEQ ID NO: 318155
ggaucauuaucauucgagg

SEQ ID NO: 541012 - RNA, 19 nt, Artificial Sequence
  Description of Artificial Sequence: Synthetic oligonucleotide
  Antisense strand to SEQ ID NO: 541011
ccucgaaugauaaugaucc

SEQ ID NO: 541013 - RNA, 19 nt, Artificial Sequence
  Description of Artificial Sequence: Synthetic oligonucleotide
  Sense strand starting at position 3649 of SEQ ID NO: 318155
acaugucuguaaucccaaa

SEQ ID NO: 541014 - RNA, 19 nt, Artificial Sequence
  Description of Artificial Sequence: Synthetic oligonucleotide
  Antisense strand to SEQ ID NO: 541013
uuugggauuacagacaugu

SEQ ID NO: 541015 - RNA, 19 nt, Artificial Sequence
  Description of Artificial Sequence: Synthetic oligonucleotide
  Sense strand starting at position 3872 of SEQ ID NO: 318155
gcuacuuuaggugaguaca

SEQ ID NO: 541016 - RNA, 19 nt, Artificial Sequence
  Description of Artificial Sequence: Synthetic oligonucleotide
  Antisense strand to SEQ ID NO: 541015
uguacucaccuaaaguagc

SEQ ID NO: 541017 - RNA, 19 nt, Artificial Sequence
  Description of Artificial Sequence: Synthetic oligonucleotide
  Sense strand starting at position 3874 of SEQ ID NO: 318155
uacuuuaggugaguacauu

SEQ ID NO: 541018 - RNA, 19 nt, Artificial Sequence
  Description of Artificial Sequence: Synthetic oligonucleotide
  Antisense strand to SEQ ID NO: 541017
aauguacucaccuaaagua

SEQ ID NO: 541019 - RNA, 19 nt, Artificial Sequence
  Description of Artificial Sequence: Synthetic oligonucleotide
  Sense strand starting at position 3890 of SEQ ID NO: 318155
auucuaagaccugguucuu

SEQ ID NO: 541020 - RNA, 19 nt, Artificial Sequence
  Description of Artificial Sequence: Synthetic oligonucleotide
  Antisense strand to SEQ ID NO: 541019
aagaaccaggucuuagaau

SEQ ID NO: 541021 - RNA, 19 nt, Artificial Sequence
  Description of Artificial Sequence: Synthetic oligonucleotide
  Sense strand starting at position 3958 of SEQ ID NO: 318155
cccauacauuccuuuguga

SEQ ID NO: 541022 - RNA, 19 nt, Artificial Sequence
  Description of Artificial Sequence: Synthetic oligonucleotide
  Antisense strand to SEQ ID NO: 541021
ucacaaaggaauguauggg

SEQ ID NO: 541023 - RNA, 19 nt, Artificial Sequence
  Description of Artificial Sequence: Synthetic oligonucleotide
  Sense strand starting at position 3965 of SEQ ID NO: 318155
auuccuuugugacugaaca

SEQ ID NO: 541024 - RNA, 19 nt, Artificial Sequence
  Description of Artificial Sequence: Synthetic oligonucleotide
  Antisense strand to SEQ ID NO: 541023
uguucagucacaaaggaau

SEQ ID NO: 541025 - RNA, 19 nt, Artificial Sequence
  Description of Artificial Sequence: Synthetic oligonucleotide
  Sense strand starting at position 3966 of SEQ ID NO: 318155
uuccuuugugacugaacau

SEQ ID NO: 541026 - RNA, 19 nt, Artificial Sequence
  Description of Artificial Sequence: Synthetic oligonucleotide
  Antisense strand to SEQ ID NO: 541025
auguucagucacaaaggaa

SEQ ID NO: 541027 - RNA, 19 nt, Artificial Sequence
  Description of Artificial Sequence: Synthetic oligonucleotide
  Sense strand starting at position 3973 of SEQ ID NO: 318155
gugacugaacauggucaga

SEQ ID NO: 541028 - RNA, 19 nt, Artificial Sequence
  Description of Artificial Sequence: Synthetic oligonucleotide
  Antisense strand to SEQ ID NO: 541027
ucugaccauguucagucac

SEQ ID NO: 541029 - RNA, 19 nt, Artificial Sequence
  Description of Artificial Sequence: Synthetic oligonucleotide
  Sense strand starting at position 3975 of SEQ ID NO: 318155
gacugaacauggucagagu

SEQ ID NO: 541030 - RNA, 19 nt, Artificial Sequence
  Description of Artificial Sequence: Synthetic oligonucleotide
  Antisense strand to SEQ ID NO: 541029
acucugaccauguucaguc

SEQ ID NO: 541031 - RNA, 19 nt, Artificial Sequence
  Description of Artificial Sequence: Synthetic oligonucleotide
  Sense strand starting at position 728 of SEQ ID NO: 318156
ucuccaucuucccggaaau

SEQ ID NO: 541032 - RNA, 19 nt, Artificial Sequence
  Description of Artificial Sequence: Synthetic oligonucleotide
  Antisense strand to SEQ ID NO: 541031
auuuccgggaagauggaga

SEQ ID NO: 541033 - RNA, 19 nt, Artificial Sequence
  Description of Artificial Sequence: Synthetic oligonucleotide
  Sense strand starting at position 729 of SEQ ID NO: 318156
cuccaucuucccggaaauc

SEQ ID NO: 541034 - RNA, 19 nt, Artificial Sequence
  Description of Artificial Sequence: Synthetic oligonucleotide
  Antisense strand to SEQ ID NO: 541033
gauuuccgggaagauggag

SEQ ID NO: 541035 - RNA, 19 nt, Artificial Sequence
  Description of Artificial Sequence: Synthetic oligonucleotide
  Sense strand starting at position 730 of SEQ ID NO: 318156
uccaucuucccggaaaucu

SEQ ID NO: 541036 - RNA, 19 nt, Artificial Sequence
  Description of Artificial Sequence: Synthetic oligonucleotide
  Antisense strand to SEQ ID NO: 541035
agauuuccgggaagaugga

SEQ ID NO: 541037 - RNA, 19 nt, Artificial Sequence
  Description of Artificial Sequence: Synthetic oligonucleotide
  Sense strand starting at position 739 of SEQ ID NO: 318156
ccggaaaucuauucucaca

SEQ ID NO: 541038 - RNA, 19 nt, Artificial Sequence
  Description of Artificial Sequence: Synthetic oligonucleotide
  Antisense strand to SEQ ID NO: 541037
ugugagaauagauuuccgg

SEQ ID NO: 541039 - RNA, 19 nt, Artificial Sequence
  Description of Artificial Sequence: Synthetic oligonucleotide
  Sense strand starting at position 763 of SEQ ID NO: 318156
aagcgugcucccuacaaac

SEQ ID NO: 541040 - RNA, 19 nt, Artificial Sequence
  Description of Artificial Sequence: Synthetic oligonucleotide
  Antisense strand to SEQ ID NO: 541039
guuuguagggagcacgcuu

SEQ ID NO: 541041 - RNA, 19 nt, Artificial Sequence
  Description of Artificial Sequence: Synthetic oligonucleotide
  Sense strand starting at position 807 of SEQ ID NO: 318156
agugcuugcuucuaggaau

SEQ ID NO: 541042 - RNA, 19 nt, Artificial Sequence
  Description of Artificial Sequence: Synthetic oligonucleotide
  Antisense strand to SEQ ID NO: 541041
auuccuagaagcaagcacu

SEQ ID NO: 541043 - RNA, 19 nt, Artificial Sequence
  Description of Artificial Sequence: Synthetic oligonucleotide
  Sense strand starting at position 810 of SEQ ID NO: 318156
gcuugcuucuaggaauuau

SEQ ID NO: 541044 - RNA, 19 nt, Artificial Sequence
  Description of Artificial Sequence: Synthetic oligonucleotide
  Antisense strand to SEQ ID NO: 541043
auaauuccuagaagcaagc

SEQ ID NO: 541045 - RNA, 19 nt, Artificial Sequence
  Description of Artificial Sequence: Synthetic oligonucleotide
  Sense strand starting at position 819 of SEQ ID NO: 318156
uaggaauuauucuagaguc

SEQ ID NO: 541046 - RNA, 19 nt, Artificial Sequence
  Description of Artificial Sequence: Synthetic oligonucleotide
  Antisense strand to SEQ ID NO: 541045
gacucuagaauaauuccua

SEQ ID NO: 541047 - RNA, 19 nt, Artificial Sequence
  Description of Artificial Sequence: Synthetic oligonucleotide
  Sense strand starting at position 839 of SEQ ID NO: 318156
aaaguaagguccucuugag

SEQ ID NO: 541048 - RNA, 19 nt, Artificial Sequence
  Description of Artificial Sequence: Synthetic oligonucleotide
  Antisense strand to SEQ ID NO: 541047
cucaagaggaccuuacuuu

SEQ ID NO: 541049 - RNA, 19 nt, Artificial Sequence
  Description of Artificial Sequence: Synthetic oligonucleotide
  Sense strand starting at position 855 of SEQ ID NO: 318156
gagaguggaucucagguaa

SEQ ID NO: 541050 - RNA, 19 nt, Artificial Sequence
  Description of Artificial Sequence: Synthetic oligonucleotide
  Antisense strand to SEQ ID NO: 541049
uuaccugagauccacucuc

SEQ ID NO: 541051 - RNA, 19 nt, Artificial Sequence
  Description of Artificial Sequence: Synthetic oligonucleotide
  Sense strand starting at position 1053 of SEQ ID NO: 318156
aaaguugauucgggucaga

SEQ ID NO: 541052 - RNA, 19 nt, Artificial Sequence
  Description of Artificial Sequence: Synthetic oligonucleotide
  Antisense strand to SEQ ID NO: 541051
ucugacccgaaucaacuuu

SEQ ID NO: 541053 - RNA, 19 nt, Artificial Sequence
  Description of Artificial Sequence: Synthetic oligonucleotide
  Sense strand starting at position 1056 of SEQ ID NO: 318156
guugauucgggucagacca

SEQ ID NO: 541054 - RNA, 19 nt, Artificial Sequence
  Description of Artificial Sequence: Synthetic oligonucleotide
  Antisense strand to SEQ ID NO: 541053
uggucugacccgaaucaac

SEQ ID NO: 541055 - RNA, 19 nt, Artificial Sequence
  Description of Artificial Sequence: Synthetic oligonucleotide
  Sense strand starting at position 2211 of SEQ ID NO: 318156
gggucugcgccaggagaaa

SEQ ID NO: 541056 - RNA, 19 nt, Artificial Sequence
  Description of Artificial Sequence: Synthetic oligonucleotide
  Antisense strand to SEQ ID NO: 541055
uuucuccuggcgcagaccc

SEQ ID NO: 541057 - RNA, 19 nt, Artificial Sequence
  Description of Artificial Sequence: Synthetic oligonucleotide
  Sense strand starting at position 2793 of SEQ ID NO: 318156
ccauaauuagccggagcga

SEQ ID NO: 541058 - RNA, 19 nt, Artificial Sequence
  Description of Artificial Sequence: Synthetic oligonucleotide
  Antisense strand to SEQ ID NO: 541057
ucgcuccggcuaauuaugg

SEQ ID NO: 541059 - RNA, 19 nt, Artificial Sequence
  Description of Artificial Sequence: Synthetic oligonucleotide
  Sense strand starting at position 2836 of SEQ ID NO: 318156
ggugaacacgcuuggauuu

SEQ ID NO: 541060 - RNA, 19 nt, Artificial Sequence
  Description of Artificial Sequence: Synthetic oligonucleotide
  Antisense strand to SEQ ID NO: 541059
aaauccaagcguguucacc

SEQ ID NO: 541061 - RNA, 19 nt, Artificial Sequence
  Description of Artificial Sequence: Synthetic oligonucleotide
  Sense strand starting at position 3561 of SEQ ID NO: 318156
cugagugcucuggagagga

SEQ ID NO: 541062 - RNA, 19 nt, Artificial Sequence
  Description of Artificial Sequence: Synthetic oligonucleotide
  Antisense strand to SEQ ID NO: 541061
uccucuccagagcacucag

SEQ ID NO: 541063 - RNA, 19 nt, Artificial Sequence
  Description of Artificial Sequence: Synthetic oligonucleotide
  Sense strand starting at position 3630 of SEQ ID NO: 318156
cuuggagagccaugaaagu

SEQ ID NO: 541064 - RNA, 19 nt, Artificial Sequence
  Description of Artificial Sequence: Synthetic oligonucleotide
  Antisense strand to SEQ ID NO: 541063
acuuucauggcucuccaag

SEQ ID NO: 541065 - RNA, 19 nt, Artificial Sequence
  Description of Artificial Sequence: Synthetic oligonucleotide
  Sense strand starting at position 3712 of SEQ ID NO: 318156
ggugcagagccagauucaa

SEQ ID NO: 541066 - RNA, 19 nt, Artificial Sequence
  Description of Artificial Sequence: Synthetic oligonucleotide
  Antisense strand to SEQ ID NO: 541065
uugaaucuggcucugcacc

SEQ ID NO: 541067 - RNA, 19 nt, Artificial Sequence
  Description of Artificial Sequence: Synthetic oligonucleotide
  Sense strand starting at position 3742 of SEQ ID NO: 318156
gccagagagucauggcugu

SEQ ID NO: 541068 - RNA, 19 nt, Artificial Sequence
  Description of Artificial Sequence: Synthetic oligonucleotide
  Antisense strand to SEQ ID NO: 541067
acagccaugacucucuggc

SEQ ID NO: 541069 - RNA, 19 nt, Artificial Sequence
  Description of Artificial Sequence: Synthetic oligonucleotide
  Sense strand starting at position 3803 of SEQ ID NO: 318156
ccgcgaccuuauuuggaaa

SEQ ID NO: 541070 - RNA, 19 nt, Artificial Sequence
  Description of Artificial Sequence: Synthetic oligonucleotide
  Antisense strand to SEQ ID NO: 541069
uuuccaaauaaggucgcgg

SEQ ID NO: 541071 - RNA, 19 nt, Artificial Sequence
  Description of Artificial Sequence: Synthetic oligonucleotide
  Sense strand starting at position 3825 of SEQ ID NO: 318156
ggucuuugcagaugaucag

SEQ ID NO: 541072 - RNA, 19 nt, Artificial Sequence
  Description of Artificial Sequence: Synthetic oligonucleotide
  Antisense strand to SEQ ID NO: 541071
cugaucaucugcaaagacc

SEQ ID NO: 541073 - RNA, 19 nt, Artificial Sequence
  Description of Artificial Sequence: Synthetic oligonucleotide
  Sense strand starting at position 3880 of SEQ ID NO: 318156
aauggcuugugucccuaua

SEQ ID NO: 541074 - RNA, 19 nt, Artificial Sequence
  Description of Artificial Sequence: Synthetic oligonucleotide
  Antisense strand to SEQ ID NO: 541073
uauagggacacaagccauu

SEQ ID NO: 541075 - RNA, 19 nt, Artificial Sequence
  Description of Artificial Sequence: Synthetic oligonucleotide
  Sense strand starting at position 3882 of SEQ ID NO: 318156
uggcuugugucccuauaga

SEQ ID NO: 541076 - RNA, 19 nt, Artificial Sequence
  Description of Artificial Sequence: Synthetic oligonucleotide
  Antisense strand to SEQ ID NO: 541075
ucuauagggacacaagcca

SEQ ID NO: 541077 - RNA, 19 nt, Artificial Sequence
  Description of Artificial Sequence: Synthetic oligonucleotide
  Sense strand starting at position 3905 of SEQ ID NO: 318156
gagauucggucucagagac

SEQ ID NO: 541078 - RNA, 19 nt, Artificial Sequence
  Description of Artificial Sequence: Synthetic oligonucleotide
  Antisense strand to SEQ ID NO: 541077
gucucugagaccgaaucuc

SEQ ID NO: 541079 - RNA, 19 nt, Artificial Sequence
  Description of Artificial Sequence: Synthetic oligonucleotide
  Sense strand starting at position 519 of SEQ ID NO: 318157
cgcagaucugcugagagga

SEQ ID NO: 541080 - RNA, 19 nt, Artificial Sequence
  Description of Artificial Sequence: Synthetic oligonucleotide
  Antisense strand to SEQ ID NO: 541079
uccucucagcagaucugcg

SEQ ID NO: 541081 - RNA, 19 nt, Artificial Sequence
  Description of Artificial Sequence: Synthetic oligonucleotide
  Sense strand starting at position 529 of SEQ ID NO: 318157
cugagaggauccugcauaa

SEQ ID NO: 541082 - RNA, 19 nt, Artificial Sequence
  Description of Artificial Sequence: Synthetic oligonucleotide
  Antisense strand to SEQ ID NO: 541081
uuaugcaggauccucucag

SEQ ID NO: 541083 - RNA, 19 nt, Artificial Sequence
  Description of Artificial Sequence: Synthetic oligonucleotide
  Sense strand starting at position 702 of SEQ ID NO: 318157
cugagcugaaaucguguuu

SEQ ID NO: 541084 - RNA, 19 nt, Artificial Sequence
  Description of Artificial Sequence: Synthetic oligonucleotide
  Antisense strand to SEQ ID NO: 541083
aaacacgauuucagcucag

SEQ ID NO: 541085 - RNA, 19 nt, Artificial Sequence
  Description of Artificial Sequence: Synthetic oligonucleotide
  Sense strand starting at position 705 of SEQ ID NO: 318157
agcugaaaucguguuugcu

SEQ ID NO: 541086 - RNA, 19 nt, Artificial Sequence
  Description of Artificial Sequence: Synthetic oligonucleotide
  Antisense strand to SEQ ID NO: 541085
agcaaacacgauuucagcu

SEQ ID NO: 541087 - RNA, 19 nt, Artificial Sequence
  Description of Artificial Sequence: Synthetic oligonucleotide
  Sense strand starting at position 706 of SEQ ID NO: 318157
gcugaaaucguguuugcug

SEQ ID NO: 541088 - RNA, 19 nt, Artificial Sequence
  Description of Artificial Sequence: Synthetic oligonucleotide
  Antisense strand to SEQ ID NO: 541087
cagcaaacacgauuucagc

SEQ ID NO: 541089 - RNA, 19 nt, Artificial Sequence
  Description of Artificial Sequence: Synthetic oligonucleotide
  Sense strand starting at position 707 of SEQ ID NO: 318157
cugaaaucguguuugcugu

SEQ ID NO: 541090 - RNA, 19 nt, Artificial Sequence
  Description of Artificial Sequence: Synthetic oligonucleotide
  Antisense strand to SEQ ID NO: 541089
acagcaaacacgauuucag

SEQ ID NO: 541091 - RNA, 19 nt, Artificial Sequence
  Description of Artificial Sequence: Synthetic oligonucleotide
  Sense strand starting at position 708 of SEQ ID NO: 318157
ugaaaucguguuugcuguu

SEQ ID NO: 541092 - RNA, 19 nt, Artificial Sequence
  Description of Artificial Sequence: Synthetic oligonucleotide
  Antisense strand to SEQ ID NO: 541091
aacagcaaacacgauuuca

SEQ ID NO: 541093 - RNA, 19 nt, Artificial Sequence
  Description of Artificial Sequence: Synthetic oligonucleotide
  Sense strand starting at position 709 of SEQ ID NO: 318157
gaaaucguguuugcuguuu

SEQ ID NO: 541094 - RNA, 19 nt, Artificial Sequence
  Description of Artificial Sequence: Synthetic oligonucleotide
  Antisense strand to SEQ ID NO: 541093
aaacagcaaacacgauuuc

SEQ ID NO: 541095 - RNA, 19 nt, Artificial Sequence
  Description of Artificial Sequence: Synthetic oligonucleotide
  Sense strand starting at position 711 of SEQ ID NO: 318157
aaucguguuugcuguuuga

SEQ ID NO: 541096 - RNA, 19 nt, Artificial Sequence
  Description of Artificial Sequence: Synthetic oligonucleotide
  Antisense strand to SEQ ID NO: 541095
ucaaacagcaaacacgauu

SEQ ID NO: 541097 - RNA, 19 nt, Artificial Sequence
  Description of Artificial Sequence: Synthetic oligonucleotide
  Sense strand starting at position 713 of SEQ ID NO: 318157
ucguguuugcuguuugaag

SEQ ID NO: 541098 - RNA, 19 nt, Artificial Sequence
  Description of Artificial Sequence: Synthetic oligonucleotide
  Antisense strand to SEQ ID NO: 541097
cuucaaacagcaaacacga

SEQ ID NO: 541099 - RNA, 19 nt, Artificial Sequence
  Description of Artificial Sequence: Synthetic oligonucleotide
  Sense strand starting at position 745 of SEQ ID NO: 318157
gggugagucguucaucaac

SEQ ID NO: 541100 - RNA, 19 nt, Artificial Sequence
  Description of Artificial Sequence: Synthetic oligonucleotide
  Antisense strand to SEQ ID NO: 541099
guugaugaacgacucaccc

SEQ ID NO: 541101 - RNA, 19 nt, Artificial Sequence
  Description of Artificial Sequence: Synthetic oligonucleotide
  Sense strand starting at position 797 of SEQ ID NO: 318157
uguuucgucuguuugguaa

SEQ ID NO: 541102 - RNA, 19 nt, Artificial Sequence
  Description of Artificial Sequence: Synthetic oligonucleotide
  Antisense strand to SEQ ID NO: 541101
uuaccaaacagacgaaaca

SEQ ID NO: 541103 - RNA, 19 nt, Artificial Sequence
  Description of Artificial Sequence: Synthetic oligonucleotide
  Sense strand starting at position 799 of SEQ ID NO: 318157
uuucgucuguuugguaauu

SEQ ID NO: 541104 - RNA, 19 nt, Artificial Sequence
  Description of Artificial Sequence: Synthetic oligonucleotide
  Antisense strand to SEQ ID NO: 541103
aauuaccaaacagacgaaa

SEQ ID NO: 541105 - RNA, 19 nt, Artificial Sequence
  Description of Artificial Sequence: Synthetic oligonucleotide
  Sense strand starting at position 800 of SEQ ID NO: 318157
uucgucuguuugguaauuu

SEQ ID NO: 541106 - RNA, 19 nt, Artificial Sequence
  Description of Artificial Sequence: Synthetic oligonucleotide
  Antisense strand to SEQ ID NO: 541105
aaauuaccaaacagacgaa

SEQ ID NO: 541107 - RNA, 19 nt, Artificial Sequence
  Description of Artificial Sequence: Synthetic oligonucleotide
  Sense strand starting at position 809 of SEQ ID NO: 318157
uugguaauuuccguauucu

SEQ ID NO: 541108 - RNA, 19 nt, Artificial Sequence
  Description of Artificial Sequence: Synthetic oligonucleotide
  Antisense strand to SEQ ID NO: 541107
agaauacggaaauuaccaa

SEQ ID NO: 541109 - RNA, 19 nt, Artificial Sequence
  Description of Artificial Sequence: Synthetic oligonucleotide
  Sense strand starting at position 982 of SEQ ID NO: 318157
gccucauggccuuggacau

SEQ ID NO: 541110 - RNA, 19 nt, Artificial Sequence
  Description of Artificial Sequence: Synthetic oligonucleotide
  Antisense strand to SEQ ID NO: 541109
auguccaaggccaugaggc

SEQ ID NO: 541111 - RNA, 19 nt, Artificial Sequence
  Description of Artificial Sequence: Synthetic oligonucleotide
  Sense strand starting at position 2081 of SEQ ID NO: 318157
gggccuuaugaucaucuga

SEQ ID NO: 541112 - RNA, 19 nt, Artificial Sequence
  Description of Artificial Sequence: Synthetic oligonucleotide
  Antisense strand to SEQ ID NO: 541111
ucagaugaucauaaggccc

SEQ ID NO: 541113 - RNA, 19 nt, Artificial Sequence
  Description of Artificial Sequence: Synthetic oligonucleotide
  Sense strand starting at position 2083 of SEQ ID NO: 318157
gccuuaugaucaucugacu

SEQ ID NO: 541114 - RNA, 19 nt, Artificial Sequence
  Description of Artificial Sequence: Synthetic oligonucleotide
  Antisense strand to SEQ ID NO: 541113
agucagaugaucauaaggc

SEQ ID NO: 541115 - RNA, 19 nt, Artificial Sequence
  Description of Artificial Sequence: Synthetic oligonucleotide
  Sense strand starting at position 2088 of SEQ ID NO: 318157
augaucaucugacugcuau

SEQ ID NO: 541116 - RNA, 19 nt, Artificial Sequence
  Description of Artificial Sequence: Synthetic oligonucleotide
  Antisense strand to SEQ ID NO: 541115
auagcagucagaugaucau

SEQ ID NO: 541117 - RNA, 19 nt, Artificial Sequence
  Description of Artificial Sequence: Synthetic oligonucleotide
  Sense strand starting at position 2089 of SEQ ID NO: 318157
ugaucaucugacugcuauu

SEQ ID NO: 541118 - RNA, 19 nt, Artificial Sequence
  Description of Artificial Sequence: Synthetic oligonucleotide
  Antisense strand to SEQ ID NO: 541117
aauagcagucagaugauca

SEQ ID NO: 541119 - RNA, 19 nt, Artificial Sequence
  Description of Artificial Sequence: Synthetic oligonucleotide
  Sense strand starting at position 2286 of SEQ ID NO: 318157
agagaagccugugcuccau

SEQ ID NO: 541120 - RNA, 19 nt, Artificial Sequence
  Description of Artificial Sequence: Synthetic oligonucleotide
  Antisense strand to SEQ ID NO: 541119
auggagcacaggcuucucu

SEQ ID NO: 541121 - RNA, 19 nt, Artificial Sequence
  Description of Artificial Sequence: Synthetic oligonucleotide
  Sense strand starting at position 2364 of SEQ ID NO: 318157
gguccuguuuaccauccaa

SEQ ID NO: 541122 - RNA, 19 nt, Artificial Sequence
  Description of Artificial Sequence: Synthetic oligonucleotide
  Antisense strand to SEQ ID NO: 541121
uuggaugguaaacaggacc

SEQ ID NO: 541123 - RNA, 19 nt, Artificial Sequence
  Description of Artificial Sequence: Synthetic oligonucleotide
  Sense strand starting at position 2613 of SEQ ID NO: 318157
cccuacuuuccaugggaga

SEQ ID NO: 541124 - RNA, 19 nt, Artificial Sequence
  Description of Artificial Sequence: Synthetic oligonucleotide
  Antisense strand to SEQ ID NO: 541123
ucucccauggaaaguaggg

SEQ ID NO: 541125 - RNA, 19 nt, Artificial Sequence
  Description of Artificial Sequence: Synthetic oligonucleotide
  Sense strand starting at position 2656 of SEQ ID NO: 318157
cccugauggccucggauga

SEQ ID NO: 541126 - RNA, 19 nt, Artificial Sequence
  Description of Artificial Sequence: Synthetic oligonucleotide
  Antisense strand to SEQ ID NO: 541125
ucauccgaggccaucaggg

SEQ ID NO: 541127 - RNA, 19 nt, Artificial Sequence
  Description of Artificial Sequence: Synthetic oligonucleotide
  Sense strand starting at position 2695 of SEQ ID NO: 318157
ugcaguguccugucugcaa

SEQ ID NO: 541128 - RNA, 19 nt, Artificial Sequence
  Description of Artificial Sequence: Synthetic oligonucleotide
  Antisense strand to SEQ ID NO: 541127
uugcagacaggacacugca

SEQ ID NO: 541129 - RNA, 19 nt, Artificial Sequence
  Description of Artificial Sequence: Synthetic oligonucleotide
  Sense strand starting at position 3279 of SEQ ID NO: 318157
uucccugagccugagcaau

SEQ ID NO: 541130 - RNA, 19 nt, Artificial Sequence
  Description of Artificial Sequence: Synthetic oligonucleotide
  Antisense strand to SEQ ID NO: 541129
auugcucaggcucagggaa

SEQ ID NO: 541131 - RNA, 19 nt, Artificial Sequence
  Description of Artificial Sequence: Synthetic oligonucleotide
  Sense strand starting at position 3514 of SEQ ID NO: 318157
auaagagaaucucgaagga

SEQ ID NO: 541132 - RNA, 19 nt, Artificial Sequence
  Description of Artificial Sequence: Synthetic oligonucleotide
  Antisense strand to SEQ ID NO: 541131
uccuucgagauucucuuau

SEQ ID NO: 541133 - RNA, 19 nt, Artificial Sequence
  Description of Artificial Sequence: Synthetic oligonucleotide
  Sense strand starting at position 1483 of SEQ ID NO: 318158
gaguauggaauacguucua

SEQ ID NO: 541134 - RNA, 19 nt, Artificial Sequence
  Description of Artificial Sequence: Synthetic oligonucleotide
  Antisense strand to SEQ ID NO: 541133
uagaacguauuccauacuc

SEQ ID NO: 541135 - RNA, 19 nt, Artificial Sequence
  Description of Artificial Sequence: Synthetic oligonucleotide
  Sense strand starting at position 1490 of SEQ ID NO: 318158
gaauacguucuagaauuau

SEQ ID NO: 541136 - RNA, 19 nt, Artificial Sequence
  Description of Artificial Sequence: Synthetic oligonucleotide
  Antisense strand to SEQ ID NO: 541135
auaauucuagaacguauuc

SEQ ID NO: 541137 - RNA, 19 nt, Artificial Sequence
  Description of Artificial Sequence: Synthetic oligonucleotide
  Sense strand starting at position 1559 of SEQ ID NO: 318158
ugaaacauuugcuaaguua

SEQ ID NO: 541138 - RNA, 19 nt, Artificial Sequence
  Description of Artificial Sequence: Synthetic oligonucleotide
  Antisense strand to SEQ ID NO: 541137
uaacuuagcaaauguuuca

SEQ ID NO: 541139 - RNA, 19 nt, Artificial Sequence
  Description of Artificial Sequence: Synthetic oligonucleotide
  Sense strand starting at position 1604 of SEQ ID NO: 318158
acaggugacaaaugaugua

SEQ ID NO: 541140 - RNA, 19 nt, Artificial Sequence
  Description of Artificial Sequence: Synthetic oligonucleotide
  Antisense strand to SEQ ID NO: 541139
uacaucauuugucaccugu

SEQ ID NO: 541141 - RNA, 19 nt, Artificial Sequence
  Description of Artificial Sequence: Synthetic oligonucleotide
  Sense strand starting at position 1760 of SEQ ID NO: 318158
ucaugucagcuagaaguuc

SEQ ID NO: 541142 - RNA, 19 nt, Artificial Sequence
  Description of Artificial Sequence: Synthetic oligonucleotide
  Antisense strand to SEQ ID NO: 541141
gaacuucuagcugacauga

SEQ ID NO: 541143 - RNA, 19 nt, Artificial Sequence
  Description of Artificial Sequence: Synthetic oligonucleotide
  Sense strand starting at position 1987 of SEQ ID NO: 318158
cuuuacagucaauguguaa

SEQ ID NO: 541144 - RNA, 19 nt, Artificial Sequence
  Description of Artificial Sequence: Synthetic oligonucleotide
  Antisense strand to SEQ ID NO: 541143
uuacacauugacuguaaag

SEQ ID NO: 541145 - RNA, 19 nt, Artificial Sequence
  Description of Artificial Sequence: Synthetic oligonucleotide
  Sense strand starting at position 2009 of SEQ ID NO: 318158
agagguugccauggauaca

SEQ ID NO: 541146 - RNA, 19 nt, Artificial Sequence
  Description of Artificial Sequence: Synthetic oligonucleotide
  Antisense strand to SEQ ID NO: 541145
uguauccauggcaaccucu

SEQ ID NO: 541147 - RNA, 19 nt, Artificial Sequence
  Description of Artificial Sequence: Synthetic oligonucleotide
  Sense strand starting at position 2069 of SEQ ID NO: 318158
aguauugcugaacggaaau

SEQ ID NO: 541148 - RNA, 19 nt, Artificial Sequence
  Description of Artificial Sequence: Synthetic oligonucleotide
  Antisense strand to SEQ ID NO: 541147
auuuccguucagcaauacu

SEQ ID NO: 541149 - RNA, 19 nt, Artificial Sequence
  Description of Artificial Sequence: Synthetic oligonucleotide
  Sense strand starting at position 2105 of SEQ ID NO: 318158
ucagaaugcaguuagaguu

SEQ ID NO: 541150 - RNA, 19 nt, Artificial Sequence
  Description of Artificial Sequence: Synthetic oligonucleotide
  Antisense strand to SEQ ID NO: 541149
aacucuaacugcauucuga

SEQ ID NO: 541151 - RNA, 19 nt, Artificial Sequence
  Description of Artificial Sequence: Synthetic oligonucleotide
  Sense strand starting at position 2281 of SEQ ID NO: 318158
auguauaucgaguaauaca

SEQ ID NO: 541152 - RNA, 19 nt, Artificial Sequence
  Description of Artificial Sequence: Synthetic oligonucleotide
  Antisense strand to SEQ ID NO: 541151
uguauuacucgauauacau

SEQ ID NO: 541153 - RNA, 19 nt, Artificial Sequence
  Description of Artificial Sequence: Synthetic oligonucleotide
  Sense strand starting at position 2335 of SEQ ID NO: 318158
uguuguguuaaauacgcau

SEQ ID NO: 541154 - RNA, 19 nt, Artificial Sequence
  Description of Artificial Sequence: Synthetic oligonucleotide
  Antisense strand to SEQ ID NO: 541153
augcguauuuaacacaaca

SEQ ID NO: 541155 - RNA, 19 nt, Artificial Sequence
  Description of Artificial Sequence: Synthetic oligonucleotide
  Sense strand starting at position 2338 of SEQ ID NO: 318158
uguguuaaauacgcauuga

SEQ ID NO: 541156 - RNA, 19 nt, Artificial Sequence
  Description of Artificial Sequence: Synthetic oligonucleotide
  Antisense strand to SEQ ID NO: 541155
ucaaugcguauuuaacaca

SEQ ID NO: 541157 - RNA, 19 nt, Artificial Sequence
  Description of Artificial Sequence: Synthetic oligonucleotide
  Sense strand starting at position 2339 of SEQ ID NO: 318158
guguuaaauacgcauugaa

SEQ ID NO: 541158 - RNA, 19 nt, Artificial Sequence
  Description of Artificial Sequence: Synthetic oligonucleotide
  Antisense strand to SEQ ID NO: 541157
uucaaugcguauuuaacac

SEQ ID NO: 541159 - RNA, 19 nt, Artificial Sequence
  Description of Artificial Sequence: Synthetic oligonucleotide
  Sense strand starting at position 2423 of SEQ ID NO: 318158
guuguuauauuauccucca

SEQ ID NO: 541160 - RNA, 19 nt, Artificial Sequence
  Description of Artificial Sequence: Synthetic oligonucleotide
  Antisense strand to SEQ ID NO: 541159
uggaggauaauauaacaac

SEQ ID NO: 541161 - RNA, 19 nt, Artificial Sequence
  Description of Artificial Sequence: Synthetic oligonucleotide
  Sense strand starting at position 2426 of SEQ ID NO: 318158
guuauauuauccuccagug

SEQ ID NO: 541162 - RNA, 19 nt, Artificial Sequence
  Description of Artificial Sequence: Synthetic oligonucleotide
  Antisense strand to SEQ ID NO: 541161
cacuggaggauaauauaac

SEQ ID NO: 541163 - RNA, 19 nt, Artificial Sequence
  Description of Artificial Sequence: Synthetic oligonucleotide
  Sense strand starting at position 2494 of SEQ ID NO: 318158
cuacuuaauacgugaggua

SEQ ID NO: 541164 - RNA, 19 nt, Artificial Sequence
  Description of Artificial Sequence: Synthetic oligonucleotide
  Antisense strand to SEQ ID NO: 541163
uaccucacguauuaaguag

SEQ ID NO: 541165 - RNA, 19 nt, Artificial Sequence
  Description of Artificial Sequence: Synthetic oligonucleotide
  Sense strand starting at position 2507 of SEQ ID NO: 318158
gagguacuaauugguagua

SEQ ID NO: 541166 - RNA, 19 nt, Artificial Sequence
  Description of Artificial Sequence: Synthetic oligonucleotide
  Antisense strand to SEQ ID NO: 541165
uacuaccaauuaguaccuc

SEQ ID NO: 541167 - RNA, 19 nt, Artificial Sequence
  Description of Artificial Sequence: Synthetic oligonucleotide
  Sense strand starting at position 2508 of SEQ ID NO: 318158
agguacuaauugguaguaa

SEQ ID NO: 541168 - RNA, 19 nt, Artificial Sequence
  Description of Artificial Sequence: Synthetic oligonucleotide
  Antisense strand to SEQ ID NO: 541167
uuacuaccaauuaguaccu

SEQ ID NO: 541169 - RNA, 19 nt, Artificial Sequence
  Description of Artificial Sequence: Synthetic oligonucleotide
  Sense strand starting at position 2546 of SEQ ID NO: 318158
gcacuaauugguuguguug

SEQ ID NO: 541170 - RNA, 19 nt, Artificial Sequence
  Description of Artificial Sequence: Synthetic oligonucleotide
  Antisense strand to SEQ ID NO: 541169
caacacaaccaauuagugc

SEQ ID NO: 541171 - RNA, 19 nt, Artificial Sequence
  Description of Artificial Sequence: Synthetic oligonucleotide
  Sense strand starting at position 2552 of SEQ ID NO: 318158
auugguuguguuggguuau

SEQ ID NO: 541172 - RNA, 19 nt, Artificial Sequence
  Description of Artificial Sequence: Synthetic oligonucleotide
  Antisense strand to SEQ ID NO: 541171
auaacccaacacaaccaau

SEQ ID NO: 541173 - RNA, 19 nt, Artificial Sequence
  Description of Artificial Sequence: Synthetic oligonucleotide
  Sense strand starting at position 2563 of SEQ ID NO: 318158
uggguuauaagauguuaag

SEQ ID NO: 541174 - RNA, 19 nt, Artificial Sequence
  Description of Artificial Sequence: Synthetic oligonucleotide
  Antisense strand to SEQ ID NO: 541173
cuuaacaucuuauaaccca

SEQ ID NO: 541175 - RNA, 19 nt, Artificial Sequence
  Description of Artificial Sequence: Synthetic oligonucleotide
  Sense strand starting at position 2566 of SEQ ID NO: 318158
guuauaagauguuaagaag

SEQ ID NO: 541176 - RNA, 19 nt, Artificial Sequence
  Description of Artificial Sequence: Synthetic oligonucleotide
  Antisense strand to SEQ ID NO: 541175
cuucuuaacaucuuauaac

SEQ ID NO: 541177 - RNA, 19 nt, Artificial Sequence
  Description of Artificial Sequence: Synthetic oligonucleotide
  Sense strand starting at position 2602 of SEQ ID NO: 318158
gacauagguuaucuuugca

SEQ ID NO: 541178 - RNA, 19 nt, Artificial Sequence
  Description of Artificial Sequence: Synthetic oligonucleotide
  Antisense strand to SEQ ID NO: 541177
ugcaaagauaaccuauguc

SEQ ID NO: 541179 - RNA, 19 nt, Artificial Sequence
  Description of Artificial Sequence: Synthetic oligonucleotide
  Sense strand starting at position 2648 of SEQ ID NO: 318158
gauguuucgcccuauauau

SEQ ID NO: 541180 - RNA, 19 nt, Artificial Sequence
  Description of Artificial Sequence: Synthetic oligonucleotide
  Antisense strand to SEQ ID NO: 541179
auauauagggcgaaacauc

SEQ ID NO: 541181 - RNA, 19 nt, Artificial Sequence
  Description of Artificial Sequence: Synthetic oligonucleotide
  Sense strand starting at position 2665 of SEQ ID NO: 318158
auaucuguaucaguuugaa

SEQ ID NO: 541182 - RNA, 19 nt, Artificial Sequence
  Description of Artificial Sequence: Synthetic oligonucleotide
  Antisense strand to SEQ ID NO: 541181
uucaaacugauacagauau

SEQ ID NO: 541183 - RNA, 19 nt, Artificial Sequence
  Description of Artificial Sequence: Synthetic oligonucleotide
  Sense strand starting at position 2668 of SEQ ID NO: 318158
ucuguaucaguuugaaucu

SEQ ID NO: 541184 - RNA, 19 nt, Artificial Sequence
  Description of Artificial Sequence: Synthetic oligonucleotide
  Antisense strand to SEQ ID NO: 541183
agauucaaacugauacaga

SEQ ID NO: 541185 - RNA, 19 nt, Artificial Sequence
  Description of Artificial Sequence: Synthetic oligonucleotide
  Sense strand starting at position 2795 of SEQ ID NO: 318158
acuuuaagcuaguugcuua

SEQ ID NO: 541186 - RNA, 19 nt, Artificial Sequence
  Description of Artificial Sequence: Synthetic oligonucleotide
  Antisense strand to SEQ ID NO: 541185
uaagcaacuagcuuaaagu

SEQ ID NO: 541187 - RNA, 19 nt, Artificial Sequence
  Description of Artificial Sequence: Synthetic oligonucleotide
  Sense strand starting at position 2800 of SEQ ID NO: 318158
aagcuaguugcuuaagcuu

SEQ ID NO: 541188 - RNA, 19 nt, Artificial Sequence
  Description of Artificial Sequence: Synthetic oligonucleotide
  Antisense strand to SEQ ID NO: 541187
aagcuuaagcaacuagcuu

SEQ ID NO: 541189 - RNA, 19 nt, Artificial Sequence
  Description of Artificial Sequence: Synthetic oligonucleotide
  Sense strand starting at position 3031 of SEQ ID NO: 318158
uggauagcagaucguuauc

SEQ ID NO: 541190 - RNA, 19 nt, Artificial Sequence
  Description of Artificial Sequence: Synthetic oligonucleotide
  Antisense strand to SEQ ID NO: 541189
gauaacgaucugcuaucca

SEQ ID NO: 541191 - RNA, 19 nt, Artificial Sequence
  Description of Artificial Sequence: Synthetic oligonucleotide
  Sense strand starting at position 3033 of SEQ ID NO: 318158
gauagcagaucguuaucaa

SEQ ID NO: 541192 - RNA, 19 nt, Artificial Sequence
  Description of Artificial Sequence: Synthetic oligonucleotide
  Antisense strand to SEQ ID NO: 541191
uugauaacgaucugcuauc

SEQ ID NO: 541193 - RNA, 19 nt, Artificial Sequence
  Description of Artificial Sequence: Synthetic oligonucleotide
  Sense strand starting at position 3034 of SEQ ID NO: 318158
auagcagaucguuaucaaa

SEQ ID NO: 541194 - RNA, 19 nt, Artificial Sequence
  Description of Artificial Sequence: Synthetic oligonucleotide
  Antisense strand to SEQ ID NO: 541193
uuugauaacgaucugcuau

SEQ ID NO: 541195 - RNA, 19 nt, Artificial Sequence
  Description of Artificial Sequence: Synthetic oligonucleotide
  Sense strand starting at position 3074 of SEQ ID NO: 318158
uauccauuauggcugguua

SEQ ID NO: 541196 - RNA, 19 nt, Artificial Sequence
  Description of Artificial Sequence: Synthetic oligonucleotide
  Antisense strand to SEQ ID NO: 541195
uaaccagccauaauggaua

SEQ ID NO: 541197 - RNA, 19 nt, Artificial Sequence
  Description of Artificial Sequence: Synthetic oligonucleotide
  Sense strand starting at position 3076 of SEQ ID NO: 318158
uccauuauggcugguuacu

SEQ ID NO: 541198 - RNA, 19 nt, Artificial Sequence
  Description of Artificial Sequence: Synthetic oligonucleotide
  Antisense strand to SEQ ID NO: 541197
aguaaccagccauaaugga

SEQ ID NO: 541199 - RNA, 19 nt, Artificial Sequence
  Description of Artificial Sequence: Synthetic oligonucleotide
  Sense strand starting at position 3087 of SEQ ID NO: 318158
ugguuacuguuauugcuau

SEQ ID NO: 541200 - RNA, 19 nt, Artificial Sequence
  Description of Artificial Sequence: Synthetic oligonucleotide
  Antisense strand to SEQ ID NO: 541199
auagcaauaacaguaacca

SEQ ID NO: 541201 - RNA, 19 nt, Artificial Sequence
  Description of Artificial Sequence: Synthetic oligonucleotide
  Sense strand starting at position 3165 of SEQ ID NO: 318158
gggcuauguuucucagguc

SEQ ID NO: 541202 - RNA, 19 nt, Artificial Sequence
  Description of Artificial Sequence: Synthetic oligonucleotide
  Antisense strand to SEQ ID NO: 541201
gaccugagaaacauagccc

SEQ ID NO: 541203 - RNA, 19 nt, Artificial Sequence
  Description of Artificial Sequence: Synthetic oligonucleotide
  Sense strand starting at position 3217 of SEQ ID NO: 318158
ugauaugaagcuuguccca

SEQ ID NO: 541204 - RNA, 19 nt, Artificial Sequence
  Description of Artificial Sequence: Synthetic oligonucleotide
  Antisense strand to SEQ ID NO: 541203
ugggacaagcuucauauca

SEQ ID NO: 541205 - RNA, 19 nt, Artificial Sequence
  Description of Artificial Sequence: Synthetic oligonucleotide
  Sense strand starting at position 3599 of SEQ ID NO: 318158
aggaguugcuguucuuaga

SEQ ID NO: 541206 - RNA, 19 nt, Artificial Sequence
  Description of Artificial Sequence: Synthetic oligonucleotide
  Antisense strand to SEQ ID NO: 541205
ucuaagaacagcaacuccu

SEQ ID NO: 541207 - RNA, 19 nt, Artificial Sequence
  Description of Artificial Sequence: Synthetic oligonucleotide
  Sense strand starting at position 3735 of SEQ ID NO: 318158
uugacucauugagcuguuu

SEQ ID NO: 541208 - RNA, 19 nt, Artificial Sequence
  Description of Artificial Sequence: Synthetic oligonucleotide
  Antisense strand to SEQ ID NO: 541207
aaacagcucaaugagucaa

SEQ ID NO: 541209 - RNA, 19 nt, Artificial Sequence
  Description of Artificial Sequence: Synthetic oligonucleotide
  Sense strand starting at position 3756 of SEQ ID NO: 318158
cucucauucuuguugcuga

SEQ ID NO: 541210 - RNA, 19 nt, Artificial Sequence
  Description of Artificial Sequence: Synthetic oligonucleotide
  Antisense strand to SEQ ID NO: 541209
ucagcaacaagaaugagag

SEQ ID NO: 541211 - RNA, 19 nt, Artificial Sequence
  Description of Artificial Sequence: Synthetic oligonucleotide
  Sense strand starting at position 3929 of SEQ ID NO: 318158
ucuguauggaugcauguau

SEQ ID NO: 541212 - RNA, 19 nt, Artificial Sequence
  Description of Artificial Sequence: Synthetic oligonucleotide
  Antisense strand to SEQ ID NO: 541211
auacaugcauccauacaga

SEQ ID NO: 541213 - RNA, 19 nt, Artificial Sequence
  Description of Artificial Sequence: Synthetic oligonucleotide
  Sense strand starting at position 21 of SEQ ID NO: 318159
ugguaacuugaugagcuua

SEQ ID NO: 541214 - RNA, 19 nt, Artificial Sequence
  Description of Artificial Sequence: Synthetic oligonucleotide
  Antisense strand to SEQ ID NO: 541213
uaagcucaucaaguuacca

SEQ ID NO: 541215 - RNA, 19 nt, Artificial Sequence
  Description of Artificial Sequence: Synthetic oligonucleotide
  Sense strand starting at position 26 of SEQ ID NO: 318159
acuugaugagcuuauucuu

SEQ ID NO: 541216 - RNA, 19 nt, Artificial Sequence
  Description of Artificial Sequence: Synthetic oligonucleotide
  Antisense strand to SEQ ID NO: 541215
aagaauaagcucaucaagu

SEQ ID NO: 541217 - RNA, 19 nt, Artificial Sequence
  Description of Artificial Sequence: Synthetic oligonucleotide
  Sense strand starting at position 57 of SEQ ID NO: 318159
gugguuggaucucuauaag

SEQ ID NO: 541218 - RNA, 19 nt, Artificial Sequence
  Description of Artificial Sequence: Synthetic oligonucleotide
  Antisense strand to SEQ ID NO: 541217
cuuauagagauccaaccac

SEQ ID NO: 541219 - RNA, 19 nt, Artificial Sequence
  Description of Artificial Sequence: Synthetic oligonucleotide
  Sense strand starting at position 60 of SEQ ID NO: 318159
guuggaucucuauaaguug

SEQ ID NO: 541220 - RNA, 19 nt, Artificial Sequence
  Description of Artificial Sequence: Synthetic oligonucleotide
  Antisense strand to SEQ ID NO: 541219
caacuuauagagauccaac

SEQ ID NO: 541221 - RNA, 19 nt, Artificial Sequence
  Description of Artificial Sequence: Synthetic oligonucleotide
  Sense strand starting at position 88 of SEQ ID NO: 318159
cagugacagugguugacaa

SEQ ID NO: 541222 - RNA, 19 nt, Artificial Sequence
  Description of Artificial Sequence: Synthetic oligonucleotide
  Antisense strand to SEQ ID NO: 541221
uugucaaccacugucacug

SEQ ID NO: 541223 - RNA, 19 nt, Artificial Sequence
  Description of Artificial Sequence: Synthetic oligonucleotide
  Sense strand starting at position 89 of SEQ ID NO: 318159
agugacagugguugacaaa

SEQ ID NO: 541224 - RNA, 19 nt, Artificial Sequence
  Description of Artificial Sequence: Synthetic oligonucleotide
  Antisense strand to SEQ ID NO: 541223
uuugucaaccacugucacu

SEQ ID NO: 541225 - RNA, 19 nt, Artificial Sequence
  Description of Artificial Sequence: Synthetic oligonucleotide
  Sense strand starting at position 90 of SEQ ID NO: 318159
gugacagugguugacaaau

SEQ ID NO: 541226 - RNA, 19 nt, Artificial Sequence
  Description of Artificial Sequence: Synthetic oligonucleotide
  Antisense strand to SEQ ID NO: 541225
auuugucaaccacugucac

SEQ ID NO: 541227 - RNA, 19 nt, Artificial Sequence
  Description of Artificial Sequence: Synthetic oligonucleotide
  Sense strand starting at position 117 of SEQ ID NO: 318159
agcugaaauccauggacug

SEQ ID NO: 541228 - RNA, 19 nt, Artificial Sequence
  Description of Artificial Sequence: Synthetic oligonucleotide
  Antisense strand to SEQ ID NO: 541227
caguccauggauuucagcu

SEQ ID NO: 541229 - RNA, 19 nt, Artificial Sequence
  Description of Artificial Sequence: Synthetic oligonucleotide
  Sense strand starting at position 245 of SEQ ID NO: 318159
gcugcauucccacagauug

SEQ ID NO: 541230 - RNA, 19 nt, Artificial Sequence
  Description of Artificial Sequence: Synthetic oligonucleotide
  Antisense strand to SEQ ID NO: 541229
caaucugugggaaugcagc

SEQ ID NO: 541231 - RNA, 19 nt, Artificial Sequence
  Description of Artificial Sequence: Synthetic oligonucleotide
  Sense strand starting at position 284 of SEQ ID NO: 318159
gagggaucucagggaguuu

SEQ ID NO: 541232 - RNA, 19 nt, Artificial Sequence
  Description of Artificial Sequence: Synthetic oligonucleotide
  Antisense strand to SEQ ID NO: 541231
aaacucccugagaucccuc

SEQ ID NO: 541233 - RNA, 19 nt, Artificial Sequence
  Description of Artificial Sequence: Synthetic oligonucleotide
  Sense strand starting at position 299 of SEQ ID NO: 318159
guuuaagaucuuggaauca

SEQ ID NO: 541234 - RNA, 19 nt, Artificial Sequence
  Description of Artificial Sequence: Synthetic oligonucleotide
  Antisense strand to SEQ ID NO: 541233
ugauuccaagaucuuaaac

SEQ ID NO: 541235 - RNA, 19 nt, Artificial Sequence
  Description of Artificial Sequence: Synthetic oligonucleotide
  Sense strand starting at position 310 of SEQ ID NO: 318159
uggaaucaaggcuguuuaa

SEQ ID NO: 541236 - RNA, 19 nt, Artificial Sequence
  Description of Artificial Sequence: Synthetic oligonucleotide
  Antisense strand to SEQ ID NO: 541235
uuaaacagccuugauucca

SEQ ID NO: 541237 - RNA, 19 nt, Artificial Sequence
  Description of Artificial Sequence: Synthetic oligonucleotide
  Sense strand starting at position 331 of SEQ ID NO: 318159
uguuguuauccaugaggag

SEQ ID NO: 541238 - RNA, 19 nt, Artificial Sequence
  Description of Artificial Sequence: Synthetic oligonucleotide
  Antisense strand to SEQ ID NO: 541237
cuccucauggauaacaaca

SEQ ID NO: 541239 - RNA, 19 nt, Artificial Sequence
  Description of Artificial Sequence: Synthetic oligonucleotide
  Sense strand starting at position 332 of SEQ ID NO: 318159
guuguuauccaugaggagu

SEQ ID NO: 541240 - RNA, 19 nt, Artificial Sequence
  Description of Artificial Sequence: Synthetic oligonucleotide
  Antisense strand to SEQ ID NO: 541239
acuccucauggauaacaac

SEQ ID NO: 541241 - RNA, 19 nt, Artificial Sequence
  Description of Artificial Sequence: Synthetic oligonucleotide
  Sense strand starting at position 335 of SEQ ID NO: 318159
guuauccaugaggaguauu

SEQ ID NO: 541242 - RNA, 19 nt, Artificial Sequence
  Description of Artificial Sequence: Synthetic oligonucleotide
  Antisense strand to SEQ ID NO: 541241
aauacuccucauggauaac

SEQ ID NO: 541243 - RNA, 19 nt, Artificial Sequence
  Description of Artificial Sequence: Synthetic oligonucleotide
  Sense strand starting at position 385 of SEQ ID NO: 318159
agucgauggcuuugauuuc

SEQ ID NO: 541244 - RNA, 19 nt, Artificial Sequence
  Description of Artificial Sequence: Synthetic oligonucleotide
  Antisense strand to SEQ ID NO: 541243
gaaaucaaagccaucgacu

SEQ ID NO: 541245 - RNA, 19 nt, Artificial Sequence
  Description of Artificial Sequence: Synthetic oligonucleotide
  Sense strand starting at position 789 of SEQ ID NO: 318159
agguuaaucaguuggguaa

SEQ ID NO: 541246 - RNA, 19 nt, Artificial Sequence
  Description of Artificial Sequence: Synthetic oligonucleotide
  Antisense strand to SEQ ID NO: 541245
uuacccaacugauuaaccu

SEQ ID NO: 541247 - RNA, 19 nt, Artificial Sequence
  Description of Artificial Sequence: Synthetic oligonucleotide
  Sense strand starting at position 790 of SEQ ID NO: 318159
gguuaaucaguuggguaaa

SEQ ID NO: 541248 - RNA, 19 nt, Artificial Sequence
  Description of Artificial Sequence: Synthetic oligonucleotide
  Antisense strand to SEQ ID NO: 541247
uuuacccaacugauuaacc

SEQ ID NO: 541249 - RNA, 19 nt, Artificial Sequence
  Description of Artificial Sequence: Synthetic oligonucleotide
  Sense strand starting at position 1235 of SEQ ID NO: 318159
gcagaacauaugggcuauu

SEQ ID NO: 541250 - RNA, 19 nt, Artificial Sequence
  Description of Artificial Sequence: Synthetic oligonucleotide
  Antisense strand to SEQ ID NO: 541249
aauagcccauauguucugc

SEQ ID NO: 541251 - RNA, 19 nt, Artificial Sequence
  Description of Artificial Sequence: Synthetic oligonucleotide
  Sense strand starting at position 1340 of SEQ ID NO: 318159
auugguaugacuggaccaa

SEQ ID NO: 541252 - RNA, 19 nt, Artificial Sequence
  Description of Artificial Sequence: Synthetic oligonucleotide
  Antisense strand to SEQ ID NO: 541251
uugguccagucauaccaau

SEQ ID NO: 541253 - RNA, 19 nt, Artificial Sequence
  Description of Artificial Sequence: Synthetic oligonucleotide
  Sense strand starting at position 1468 of SEQ ID NO: 318159
ugaauucgguagcuuauuu

SEQ ID NO: 541254 - RNA, 19 nt, Artificial Sequence
  Description of Artificial Sequence: Synthetic oligonucleotide
  Antisense strand to SEQ ID NO: 541253
aaauaagcuaccgaauuca

SEQ ID NO: 541255 - RNA, 19 nt, Artificial Sequence
  Description of Artificial Sequence: Synthetic oligonucleotide
  Sense strand starting at position 1495 of SEQ ID NO: 318159
ugauuccuuguugaaugua

SEQ ID NO: 541256 - RNA, 19 nt, Artificial Sequence
  Description of Artificial Sequence: Synthetic oligonucleotide
  Antisense strand to SEQ ID NO: 541255
uacauucaacaaggaauca

SEQ ID NO: 541257 - RNA, 19 nt, Artificial Sequence
  Description of Artificial Sequence: Synthetic oligonucleotide
  Sense strand starting at position 1567 of SEQ ID NO: 318159
cauucagucgcgguuguua

SEQ ID NO: 541258 - RNA, 19 nt, Artificial Sequence
  Description of Artificial Sequence: Synthetic oligonucleotide
  Antisense strand to SEQ ID NO: 541257
uaacaaccgcgacugaaug

SEQ ID NO: 541259 - RNA, 19 nt, Artificial Sequence
  Description of Artificial Sequence: Synthetic oligonucleotide
  Sense strand starting at position 1848 of SEQ ID NO: 318159
ccguuaguucucuuggucu

SEQ ID NO: 541260 - RNA, 19 nt, Artificial Sequence
  Description of Artificial Sequence: Synthetic oligonucleotide
  Antisense strand to SEQ ID NO: 541259
agaccaagagaacuaacgg

SEQ ID NO: 541261 - RNA, 19 nt, Artificial Sequence
  Description of Artificial Sequence: Synthetic oligonucleotide
  Sense strand starting at position 2413 of SEQ ID NO: 318159
cuuguugucaugcuugguu

SEQ ID NO: 541262 - RNA, 19 nt, Artificial Sequence
  Description of Artificial Sequence: Synthetic oligonucleotide
  Antisense strand to SEQ ID NO: 541261
aaccaagcaugacaacaag

SEQ ID NO: 541263 - RNA, 19 nt, Artificial Sequence
  Description of Artificial Sequence: Synthetic oligonucleotide
  Sense strand starting at position 2458 of SEQ ID NO: 318159
uuuagauguguugauaaac

SEQ ID NO: 541264 - RNA, 19 nt, Artificial Sequence
  Description of Artificial Sequence: Synthetic oligonucleotide
  Antisense strand to SEQ ID NO: 541263
guuuaucaacacaucuaaa

SEQ ID NO: 541265 - RNA, 19 nt, Artificial Sequence
  Description of Artificial Sequence: Synthetic oligonucleotide
  Sense strand starting at position 2663 of SEQ ID NO: 318159
aaauaaugcugaguugauc

SEQ ID NO: 541266 - RNA, 19 nt, Artificial Sequence
  Description of Artificial Sequence: Synthetic oligonucleotide
  Antisense strand to SEQ ID NO: 541265
gaucaacucagcauuauuu

SEQ ID NO: 541267 - RNA, 19 nt, Artificial Sequence
  Description of Artificial Sequence: Synthetic oligonucleotide
  Sense strand starting at position 2671 of SEQ ID NO: 318159
cugaguugaucuuuaaaug

SEQ ID NO: 541268 - RNA, 19 nt, Artificial Sequence
  Description of Artificial Sequence: Synthetic oligonucleotide
  Antisense strand to SEQ ID NO: 541267
cauuuaaagaucaacucag

SEQ ID NO: 541269 - RNA, 19 nt, Artificial Sequence
  Description of Artificial Sequence: Synthetic oligonucleotide
  Sense strand starting at position 2672 of SEQ ID NO: 318159
ugaguugaucuuuaaaugu

SEQ ID NO: 541270 - RNA, 19 nt, Artificial Sequence
  Description of Artificial Sequence: Synthetic oligonucleotide
  Antisense strand to SEQ ID NO: 541269
acauuuaaagaucaacuca

SEQ ID NO: 541271 - RNA, 19 nt, Artificial Sequence
  Description of Artificial Sequence: Synthetic oligonucleotide
  Sense strand starting at position 2685 of SEQ ID NO: 318159
aaauguccuccugggagga

SEQ ID NO: 541272 - RNA, 19 nt, Artificial Sequence
  Description of Artificial Sequence: Synthetic oligonucleotide
  Antisense strand to SEQ ID NO: 541271
uccucccaggaggacauuu

SEQ ID NO: 541273 - RNA, 19 nt, Artificial Sequence
  Description of Artificial Sequence: Synthetic oligonucleotide
  Sense strand starting at position 2987 of SEQ ID NO: 318159
caugcuuuggacugggauu

SEQ ID NO: 541274 - RNA, 19 nt, Artificial Sequence
  Description of Artificial Sequence: Synthetic oligonucleotide
  Antisense strand to SEQ ID NO: 541273
aaucccaguccaaagcaug

SEQ ID NO: 541275 - RNA, 19 nt, Artificial Sequence
  Description of Artificial Sequence: Synthetic oligonucleotide
  Sense strand starting at position 3076 of SEQ ID NO: 318159
accucaguuguggauguau

SEQ ID NO: 541276 - RNA, 19 nt, Artificial Sequence
  Description of Artificial Sequence: Synthetic oligonucleotide
  Antisense strand to SEQ ID NO: 541275
auacauccacaacugaggu

SEQ ID NO: 541277 - RNA, 19 nt, Artificial Sequence
  Description of Artificial Sequence: Synthetic oligonucleotide
  Sense strand starting at position 3392 of SEQ ID NO: 318159
uguaguguugugcuggagu

SEQ ID NO: 541278 - RNA, 19 nt, Artificial Sequence
  Description of Artificial Sequence: Synthetic oligonucleotide
  Antisense strand to SEQ ID NO: 541277
acuccagcacaacacuaca

SEQ ID NO: 541279 - RNA, 19 nt, Artificial Sequence
  Description of Artificial Sequence: Synthetic oligonucleotide
  Sense strand starting at position 3494 of SEQ ID NO: 318159
ugaguccuccuagaaguga

SEQ ID NO: 541280 - RNA, 19 nt, Artificial Sequence
  Description of Artificial Sequence: Synthetic oligonucleotide
  Antisense strand to SEQ ID NO: 541279
ucacuucuaggaggacuca

SEQ ID NO: 541281 - RNA, 19 nt, Artificial Sequence
  Description of Artificial Sequence: Synthetic oligonucleotide
  Sense strand starting at position 3507 of SEQ ID NO: 318159
aagugaucccaagguagaa

SEQ ID NO: 541282 - RNA, 19 nt, Artificial Sequence
  Description of Artificial Sequence: Synthetic oligonucleotide
  Antisense strand to SEQ ID NO: 541281
uucuaccuugggaucacuu

SEQ ID NO: 541283 - RNA, 19 nt, Artificial Sequence
  Description of Artificial Sequence: Synthetic oligonucleotide
  Sense strand starting at position 3728 of SEQ ID NO: 318159
acagacucuugaguccuua

SEQ ID NO: 541284 - RNA, 19 nt, Artificial Sequence
  Description of Artificial Sequence: Synthetic oligonucleotide
  Antisense strand to SEQ ID NO: 541283
uaaggacucaagagucugu

SEQ ID NO: 541285 - RNA, 19 nt, Artificial Sequence
  Description of Artificial Sequence: Synthetic oligonucleotide
  Sense strand starting at position 3781 of SEQ ID NO: 318159
cuucuugcugguuaaagaa

SEQ ID NO: 541286 - RNA, 19 nt, Artificial Sequence
  Description of Artificial Sequence: Synthetic oligonucleotide
  Antisense strand to SEQ ID NO: 541285
uucuuuaaccagcaagaag

SEQ ID NO: 541287 - RNA, 19 nt, Artificial Sequence
  Description of Artificial Sequence: Synthetic oligonucleotide
  Sense strand starting at position 3806 of SEQ ID NO: 318159
gaaacaaguccugguuuag

SEQ ID NO: 541288 - RNA, 19 nt, Artificial Sequence
  Description of Artificial Sequence: Synthetic oligonucleotide
  Antisense strand to SEQ ID NO: 541287
cuaaaccaggacuuguuuc

SEQ ID NO: 541289 - RNA, 19 nt, Artificial Sequence
  Description of Artificial Sequence: Synthetic oligonucleotide
  Sense strand starting at position 3873 of SEQ ID NO: 318159
cucucaauaggcuagaacu

SEQ ID NO: 541290 - RNA, 19 nt, Artificial Sequence
  Description of Artificial Sequence: Synthetic oligonucleotide
  Antisense strand to SEQ ID NO: 541289
aguucuagccuauugagag

SEQ ID NO: 541291 - RNA, 19 nt, Artificial Sequence
  Description of Artificial Sequence: Synthetic oligonucleotide
  Sense strand starting at position 3950 of SEQ ID NO: 318159
ggauaagguugaguccgau

SEQ ID NO: 541292 - RNA, 19 nt, Artificial Sequence
  Description of Artificial Sequence: Synthetic oligonucleotide
  Antisense strand to SEQ ID NO: 541291
aucggacucaaccuuaucc

SEQ ID NO: 541293 - RNA, 19 nt, Artificial Sequence
  Description of Artificial Sequence: Synthetic oligonucleotide
  Sense strand starting at position 3 of SEQ ID NO: 318160
ucuugauuccagggauaua

SEQ ID NO: 541294 - RNA, 19 nt, Artificial Sequence
  Description of Artificial Sequence: Synthetic oligonucleotide
  Antisense strand to SEQ ID NO: 541293
uauaucccuggaaucaaga

SEQ ID NO: 541295 - RNA, 19 nt, Artificial Sequence
  Description of Artificial Sequence: Synthetic oligonucleotide
  Sense strand starting at position 62 of SEQ ID NO: 318160
cugucauaccauuacagua

SEQ ID NO: 541296 - RNA, 19 nt, Artificial Sequence
  Description of Artificial Sequence: Synthetic oligonucleotide
  Antisense strand to SEQ ID NO: 541295
uacuguaaugguaugacag

SEQ ID NO: 541297 - RNA, 19 nt, Artificial Sequence
  Description of Artificial Sequence: Synthetic oligonucleotide
  Sense strand starting at position 75 of SEQ ID NO: 318160
acaguaaagugcucuauag

SEQ ID NO: 541298 - RNA, 19 nt, Artificial Sequence
  Description of Artificial Sequence: Synthetic oligonucleotide
  Antisense strand to SEQ ID NO: 541297
cuauagagcacuuuacugu

SEQ ID NO: 541299 - RNA, 19 nt, Artificial Sequence
  Description of Artificial Sequence: Synthetic oligonucleotide
  Sense strand starting at position 146 of SEQ ID NO: 318160
uugacaaucuugguagcaa

SEQ ID NO: 541300 - RNA, 19 nt, Artificial Sequence
  Description of Artificial Sequence: Synthetic oligonucleotide
  Antisense strand to SEQ ID NO: 541299
uugcuaccaagauugucaa

SEQ ID NO: 541301 - RNA, 19 nt, Artificial Sequence
  Description of Artificial Sequence: Synthetic oligonucleotide
  Sense strand starting at position 222 of SEQ ID NO: 318160
cuaccuaaugguggcaaau

SEQ ID NO: 541302 - RNA, 19 nt, Artificial Sequence
  Description of Artificial Sequence: Synthetic oligonucleotide
  Antisense strand to SEQ ID NO: 541301
auuugccaccauuagguag

SEQ ID NO: 541303 - RNA, 19 nt, Artificial Sequence
  Description of Artificial Sequence: Synthetic oligonucleotide
  Sense strand starting at position 233 of SEQ ID NO: 318160
uggcaaauugcauaggcaa

SEQ ID NO: 541304 - RNA, 19 nt, Artificial Sequence
  Description of Artificial Sequence: Synthetic oligonucleotide
  Antisense strand to SEQ ID NO: 541303
uugccuaugcaauuugcca

SEQ ID NO: 541305 - RNA, 19 nt, Artificial Sequence
  Description of Artificial Sequence: Synthetic oligonucleotide
  Sense strand starting at position 406 of SEQ ID NO: 318160
ucaggauguucucucuuaa

SEQ ID NO: 541306 - RNA, 19 nt, Artificial Sequence
  Description of Artificial Sequence: Synthetic oligonucleotide
  Antisense strand to SEQ ID NO: 541305
uuaagagagaacauccuga

SEQ ID NO: 541307 - RNA, 19 nt, Artificial Sequence
  Description of Artificial Sequence: Synthetic oligonucleotide
  Sense strand starting at position 522 of SEQ ID NO: 318160
ggauacagaugcuuugaau

SEQ ID NO: 541308 - RNA, 19 nt, Artificial Sequence
  Description of Artificial Sequence: Synthetic oligonucleotide
  Antisense strand to SEQ ID NO: 541307
auucaaagcaucuguaucc

SEQ ID NO: 541309 - RNA, 19 nt, Artificial Sequence
  Description of Artificial Sequence: Synthetic oligonucleotide
  Sense strand starting at position 528 of SEQ ID NO: 318160
agaugcuuugaauggcuaa

SEQ ID NO: 541310 - RNA, 19 nt, Artificial Sequence
  Description of Artificial Sequence: Synthetic oligonucleotide
  Antisense strand to SEQ ID NO: 541309
uuagccauucaaagcaucu

SEQ ID NO: 541311 - RNA, 19 nt, Artificial Sequence
  Description of Artificial Sequence: Synthetic oligonucleotide
  Sense strand starting at position 666 of SEQ ID NO: 318160
uguuuacagcuuuacucua

SEQ ID NO: 541312 - RNA, 19 nt, Artificial Sequence
  Description of Artificial Sequence: Synthetic oligonucleotide
  Antisense strand to SEQ ID NO: 541311
uagaguaaagcuguaaaca

SEQ ID NO: 541313 - RNA, 19 nt, Artificial Sequence
  Description of Artificial Sequence: Synthetic oligonucleotide
  Sense strand starting at position 671 of SEQ ID NO: 318160
acagcuuuacucuaaggau

SEQ ID NO: 541314 - RNA, 19 nt, Artificial Sequence
  Description of Artificial Sequence: Synthetic oligonucleotide
  Antisense strand to SEQ ID NO: 541313
auccuuagaguaaagcugu

SEQ ID NO: 541315 - RNA, 19 nt, Artificial Sequence
  Description of Artificial Sequence: Synthetic oligonucleotide
  Sense strand starting at position 761 of SEQ ID NO: 318160
guaauaugagccugacaga

SEQ ID NO: 541316 - RNA, 19 nt, Artificial Sequence
  Description of Artificial Sequence: Synthetic oligonucleotide
  Antisense strand to SEQ ID NO: 541315
ucugucaggcucauauuac

SEQ ID NO: 541317 - RNA, 19 nt, Artificial Sequence
  Description of Artificial Sequence: Synthetic oligonucleotide
  Sense strand starting at position 863 of SEQ ID NO: 318160
acuugugacuuaguaaugu

SEQ ID NO: 541318 - RNA, 19 nt, Artificial Sequence
  Description of Artificial Sequence: Synthetic oligonucleotide
  Antisense strand to SEQ ID NO: 541317
acauuacuaagucacaagu

SEQ ID NO: 541319 - RNA, 19 nt, Artificial Sequence
  Description of Artificial Sequence: Synthetic oligonucleotide
  Sense strand starting at position 873 of SEQ ID NO: 318160
uaguaaugugaacauaugu

SEQ ID NO: 541320 - RNA, 19 nt, Artificial Sequence
  Description of Artificial Sequence: Synthetic oligonucleotide
  Antisense strand to SEQ ID NO: 541319
acauauguucacauuacua

SEQ ID NO: 541321 - RNA, 19 nt, Artificial Sequence
  Description of Artificial Sequence: Synthetic oligonucleotide
  Sense strand starting at position 879 of SEQ ID NO: 318160
ugugaacauauguguauca

SEQ ID NO: 541322 - RNA, 19 nt, Artificial Sequence
  Description of Artificial Sequence: Synthetic oligonucleotide
  Antisense strand to SEQ ID NO: 541321
ugauacacauauguucaca

SEQ ID NO: 541323 - RNA, 19 nt, Artificial Sequence
  Description of Artificial Sequence: Synthetic oligonucleotide
  Sense strand starting at position 880 of SEQ ID NO: 318160
gugaacauauguguaucaa

SEQ ID NO: 541324 - RNA, 19 nt, Artificial Sequence
  Description of Artificial Sequence: Synthetic oligonucleotide
  Antisense strand to SEQ ID NO: 541323
uugauacacauauguucac

SEQ ID NO: 541325 - RNA, 19 nt, Artificial Sequence
  Description of Artificial Sequence: Synthetic oligonucleotide
  Sense strand starting at position 927 of SEQ ID NO: 318160
ucgagaaggagcugucaau

SEQ ID NO: 541326 - RNA, 19 nt, Artificial Sequence
  Description of Artificial Sequence: Synthetic oligonucleotide
  Antisense strand to SEQ ID NO: 541325
auugacagcuccuucucga

SEQ ID NO: 541327 - RNA, 19 nt, Artificial Sequence
  Description of Artificial Sequence: Synthetic oligonucleotide
  Sense strand starting at position 961 of SEQ ID NO: 318160
gauuaugcgccugugcuau

SEQ ID NO: 541328 - RNA, 19 nt, Artificial Sequence
  Description of Artificial Sequence: Synthetic oligonucleotide
  Antisense strand to SEQ ID NO: 541327
auagcacaggcgcauaauc

SEQ ID NO: 541329 - RNA, 19 nt, Artificial Sequence
  Description of Artificial Sequence: Synthetic oligonucleotide
  Sense strand starting at position 967 of SEQ ID NO: 318160
gcgccugugcuaucugaac

SEQ ID NO: 541330 - RNA, 19 nt, Artificial Sequence
  Description of Artificial Sequence: Synthetic oligonucleotide
  Antisense strand to SEQ ID NO: 541329
guucagauagcacaggcgc

SEQ ID NO: 541331 - RNA, 19 nt, Artificial Sequence
  Description of Artificial Sequence: Synthetic oligonucleotide
  Sense strand starting at position 973 of SEQ ID NO: 318160
gugcuaucugaacaaaucu

SEQ ID NO: 541332 - RNA, 19 nt, Artificial Sequence
  Description of Artificial Sequence: Synthetic oligonucleotide
  Antisense strand to SEQ ID NO: 541331
agauuuguucagauagcac

SEQ ID NO: 541333 - RNA, 19 nt, Artificial Sequence
  Description of Artificial Sequence: Synthetic oligonucleotide
  Sense strand starting at position 1134 of SEQ ID NO: 318160
uguagacgucccuaugaug

SEQ ID NO: 541334 - RNA, 19 nt, Artificial Sequence
  Description of Artificial Sequence: Synthetic oligonucleotide
  Antisense strand to SEQ ID NO: 541333
caucauagggacgucuaca

SEQ ID NO: 541335 - RNA, 19 nt, Artificial Sequence
  Description of Artificial Sequence: Synthetic oligonucleotide
  Sense strand starting at position 1988 of SEQ ID NO: 318160
gcuccuccauguuugaaag

SEQ ID NO: 541336 - RNA, 19 nt, Artificial Sequence
  Description of Artificial Sequence: Synthetic oligonucleotide
  Antisense strand to SEQ ID NO: 541335
cuuucaaacauggaggagc

SEQ ID NO: 541337 - RNA, 19 nt, Artificial Sequence
  Description of Artificial Sequence: Synthetic oligonucleotide
  Sense strand starting at position 2370 of SEQ ID NO: 318160
guuugcuuccaugcugagu

SEQ ID NO: 541338 - RNA, 19 nt, Artificial Sequence
  Description of Artificial Sequence: Synthetic oligonucleotide
  Antisense strand to SEQ ID NO: 541337
acucagcauggaagcaaac

SEQ ID NO: 541339 - RNA, 19 nt, Artificial Sequence
  Description of Artificial Sequence: Synthetic oligonucleotide
  Sense strand starting at position 2414 of SEQ ID NO: 318160
ccuaucugggcucaaagua

SEQ ID NO: 541340 - RNA, 19 nt, Artificial Sequence
  Description of Artificial Sequence: Synthetic oligonucleotide
  Antisense strand to SEQ ID NO: 541339
uacuuugagcccagauagg

SEQ ID NO: 541341 - RNA, 19 nt, Artificial Sequence
  Description of Artificial Sequence: Synthetic oligonucleotide
  Sense strand starting at position 2428 of SEQ ID NO: 318160
aaguauuuagcguguuucu

SEQ ID NO: 541342 - RNA, 19 nt, Artificial Sequence
  Description of Artificial Sequence: Synthetic oligonucleotide
  Antisense strand to SEQ ID NO: 541341
agaaacacgcuaaauacuu

SEQ ID NO: 541343 - RNA, 19 nt, Artificial Sequence
  Description of Artificial Sequence: Synthetic oligonucleotide
  Sense strand starting at position 2438 of SEQ ID NO: 318160
cguguuucucgucugaaau

SEQ ID NO: 541344 - RNA, 19 nt, Artificial Sequence
  Description of Artificial Sequence: Synthetic oligonucleotide
  Antisense strand to SEQ ID NO: 541343
auuucagacgagaaacacg

SEQ ID NO: 541345 - RNA, 19 nt, Artificial Sequence
  Description of Artificial Sequence: Synthetic oligonucleotide
  Sense strand starting at position 2500 of SEQ ID NO: 318160
gagagauacugccuacaga

SEQ ID NO: 541346 - RNA, 19 nt, Artificial Sequence
  Description of Artificial Sequence: Synthetic oligonucleotide
  Antisense strand to SEQ ID NO: 541345
ucuguaggcaguaucucuc

SEQ ID NO: 541347 - RNA, 19 nt, Artificial Sequence
  Description of Artificial Sequence: Synthetic oligonucleotide
  Sense strand starting at position 2510 of SEQ ID NO: 318160
gccuacagagcucauaaua

SEQ ID NO: 541348 - RNA, 19 nt, Artificial Sequence
  Description of Artificial Sequence: Synthetic oligonucleotide
  Antisense strand to SEQ ID NO: 541347
uauuaugagcucuguaggc

SEQ ID NO: 541349 - RNA, 19 nt, Artificial Sequence
  Description of Artificial Sequence: Synthetic oligonucleotide
  Sense strand starting at position 2528 of SEQ ID NO: 318160
agaugcaugucagccaaua

SEQ ID NO: 541350 - RNA, 19 nt, Artificial Sequence
  Description of Artificial Sequence: Synthetic oligonucleotide
  Antisense strand to SEQ ID NO: 541349
uauuggcugacaugcaucu

SEQ ID NO: 541351 - RNA, 19 nt, Artificial Sequence
  Description of Artificial Sequence: Synthetic oligonucleotide
  Sense strand starting at position 2549 of SEQ ID NO: 318160
gggugucuguccuccauuu

SEQ ID NO: 541352 - RNA, 19 nt, Artificial Sequence
  Description of Artificial Sequence: Synthetic oligonucleotide
  Antisense strand to SEQ ID NO: 541351
aaauggaggacagacaccc

SEQ ID NO: 541353 - RNA, 19 nt, Artificial Sequence
  Description of Artificial Sequence: Synthetic oligonucleotide
  Sense strand starting at position 2666 of SEQ ID NO: 318160
gauccagcucuuggaggaa

SEQ ID NO: 541354 - RNA, 19 nt, Artificial Sequence
  Description of Artificial Sequence: Synthetic oligonucleotide
  Antisense strand to SEQ ID NO: 541353
uuccuccaagagcuggauc

SEQ ID NO: 541355 - RNA, 19 nt, Artificial Sequence
  Description of Artificial Sequence: Synthetic oligonucleotide
  Sense strand starting at position 2787 of SEQ ID NO: 318160
gcggaaggcccagauauaa

SEQ ID NO: 541356 - RNA, 19 nt, Artificial Sequence
  Description of Artificial Sequence: Synthetic oligonucleotide
  Antisense strand to SEQ ID NO: 541355
uuauaucugggccuuccgc

SEQ ID NO: 541357 - RNA, 19 nt, Artificial Sequence
  Description of Artificial Sequence: Synthetic oligonucleotide
  Sense strand starting at position 2893 of SEQ ID NO: 318160
acuaguauucucuguacua

SEQ ID NO: 541358 - RNA, 19 nt, Artificial Sequence
  Description of Artificial Sequence: Synthetic oligonucleotide
  Antisense strand to SEQ ID NO: 541357
uaguacagagaauacuagu

SEQ ID NO: 541359 - RNA, 19 nt, Artificial Sequence
  Description of Artificial Sequence: Synthetic oligonucleotide
  Sense strand starting at position 2894 of SEQ ID NO: 318160
cuaguauucucuguacuag

SEQ ID NO: 541360 - RNA, 19 nt, Artificial Sequence
  Description of Artificial Sequence: Synthetic oligonucleotide
  Antisense strand to SEQ ID NO: 541359
cuaguacagagaauacuag

SEQ ID NO: 541361 - RNA, 19 nt, Artificial Sequence
  Description of Artificial Sequence: Synthetic oligonucleotide
  Sense strand starting at position 2895 of SEQ ID NO: 318160
uaguauucucuguacuagu

SEQ ID NO: 541362 - RNA, 19 nt, Artificial Sequence
  Description of Artificial Sequence: Synthetic oligonucleotide
  Antisense strand to SEQ ID NO: 541361
acuaguacagagaauacua

SEQ ID NO: 541363 - RNA, 19 nt, Artificial Sequence
  Description of Artificial Sequence: Synthetic oligonucleotide
  Sense strand starting at position 2906 of SEQ ID NO: 318160
guacuaguugcuuugugua

SEQ ID NO: 541364 - RNA, 19 nt, Artificial Sequence
  Description of Artificial Sequence: Synthetic oligonucleotide
  Antisense strand to SEQ ID NO: 541363
uacacaaagcaacuaguac

SEQ ID NO: 541365 - RNA, 19 nt, Artificial Sequence
  Description of Artificial Sequence: Synthetic oligonucleotide
  Sense strand starting at position 2911 of SEQ ID NO: 318160
aguugcuuuguguacauuu

SEQ ID NO: 541366 - RNA, 19 nt, Artificial Sequence
  Description of Artificial Sequence: Synthetic oligonucleotide
  Antisense strand to SEQ ID NO: 541365
aaauguacacaaagcaacu

SEQ ID NO: 541367 - RNA, 19 nt, Artificial Sequence
  Description of Artificial Sequence: Synthetic oligonucleotide
  Sense strand starting at position 3032 of SEQ ID NO: 318160
gcauacuacagcgaagaca

SEQ ID NO: 541368 - RNA, 19 nt, Artificial Sequence
  Description of Artificial Sequence: Synthetic oligonucleotide
  Antisense strand to SEQ ID NO: 541367
ugucuucgcuguaguaugc

SEQ ID NO: 541369 - RNA, 19 nt, Artificial Sequence
  Description of Artificial Sequence: Synthetic oligonucleotide
  Sense strand starting at position 3540 of SEQ ID NO: 318160
agugauagccuuuauagug

SEQ ID NO: 541370 - RNA, 19 nt, Artificial Sequence
  Description of Artificial Sequence: Synthetic oligonucleotide
  Antisense strand to SEQ ID NO: 541369
cacuauaaaggcuaucacu

SEQ ID NO: 541371 - RNA, 19 nt, Artificial Sequence
  Description of Artificial Sequence: Synthetic oligonucleotide
  Sense strand starting at position 3744 of SEQ ID NO: 318160
gccgaagcugcuguauauu

SEQ ID NO: 541372 - RNA, 19 nt, Artificial Sequence
  Description of Artificial Sequence: Synthetic oligonucleotide
  Antisense strand to SEQ ID NO: 541371
aauauacagcagcuucggc

SEQ ID NO: 541373 - RNA, 19 nt, Artificial Sequence
  Description of Artificial Sequence: Synthetic oligonucleotide
  Sense strand starting at position 574 of SEQ ID NO: 318161
ugcccugugucccugacau

SEQ ID NO: 541374 - RNA, 19 nt, Artificial Sequence
  Description of Artificial Sequence: Synthetic oligonucleotide
  Antisense strand to SEQ ID NO: 541373
augucagggacacagggca

SEQ ID NO: 541375 - RNA, 19 nt, Artificial Sequence
  Description of Artificial Sequence: Synthetic oligonucleotide
  Sense strand starting at position 638 of SEQ ID NO: 318161
gucccaaccugugagugua

SEQ ID NO: 541376 - RNA, 19 nt, Artificial Sequence
  Description of Artificial Sequence: Synthetic oligonucleotide
  Antisense strand to SEQ ID NO: 541375
uacacucacagguugggac

SEQ ID NO: 541377 - RNA, 19 nt, Artificial Sequence
  Description of Artificial Sequence: Synthetic oligonucleotide
  Sense strand starting at position 666 of SEQ ID NO: 318161
gugagugauucaggcacag

SEQ ID NO: 541378 - RNA, 19 nt, Artificial Sequence
  Description of Artificial Sequence: Synthetic oligonucleotide
  Antisense strand to SEQ ID NO: 541377
cugugccugaaucacucac

SEQ ID NO: 541379 - RNA, 19 nt, Artificial Sequence
  Description of Artificial Sequence: Synthetic oligonucleotide
  Sense strand starting at position 687 of SEQ ID NO: 318161
acaccugcuccgcgagaga

SEQ ID NO: 541380 - RNA, 19 nt, Artificial Sequence
  Description of Artificial Sequence: Synthetic oligonucleotide
  Antisense strand to SEQ ID NO: 541379
ucucucgcggagcaggugu

SEQ ID NO: 541381 - RNA, 19 nt, Artificial Sequence
  Description of Artificial Sequence: Synthetic oligonucleotide
  Sense strand starting at position 712 of SEQ ID NO: 318161
uugaguccuuguuucugaa

SEQ ID NO: 541382 - RNA, 19 nt, Artificial Sequence
  Description of Artificial Sequence: Synthetic oligonucleotide
  Antisense strand to SEQ ID NO: 541381
uucagaaacaaggacucaa

SEQ ID NO: 541383 - RNA, 19 nt, Artificial Sequence
  Description of Artificial Sequence: Synthetic oligonucleotide
  Sense strand starting at position 714 of SEQ ID NO: 318161
gaguccuuguuucugaauc

SEQ ID NO: 541384 - RNA, 19 nt, Artificial Sequence
  Description of Artificial Sequence: Synthetic oligonucleotide
  Antisense strand to SEQ ID NO: 541383
gauucagaaacaaggacuc

SEQ ID NO: 541385 - RNA, 19 nt, Artificial Sequence
  Description of Artificial Sequence: Synthetic oligonucleotide
  Sense strand starting at position 715 of SEQ ID NO: 318161
aguccuuguuucugaauca

SEQ ID NO: 541386 - RNA, 19 nt, Artificial Sequence
  Description of Artificial Sequence: Synthetic oligonucleotide
  Antisense strand to SEQ ID NO: 541385
ugauucagaaacaaggacu

SEQ ID NO: 541387 - RNA, 19 nt, Artificial Sequence
  Description of Artificial Sequence: Synthetic oligonucleotide
  Sense strand starting at position 716 of SEQ ID NO: 318161
guccuuguuucugaaucau

SEQ ID NO: 541388 - RNA, 19 nt, Artificial Sequence
  Description of Artificial Sequence: Synthetic oligonucleotide
  Antisense strand to SEQ ID NO: 541387
augauucagaaacaaggac

SEQ ID NO: 541389 - RNA, 19 nt, Artificial Sequence
  Description of Artificial Sequence: Synthetic oligonucleotide
  Sense strand starting at position 988 of SEQ ID NO: 318161
gccuaaaucugacagacac

SEQ ID NO: 541390 - RNA, 19 nt, Artificial Sequence
  Description of Artificial Sequence: Synthetic oligonucleotide
  Antisense strand to SEQ ID NO: 541389
gugucugucagauuuaggc

SEQ ID NO: 541391 - RNA, 19 nt, Artificial Sequence
  Description of Artificial Sequence: Synthetic oligonucleotide
  Sense strand starting at position 1089 of SEQ ID NO: 318161
gugggcuggcccuaaaguu

SEQ ID NO: 541392 - RNA, 19 nt, Artificial Sequence
  Description of Artificial Sequence: Synthetic oligonucleotide
  Antisense strand to SEQ ID NO: 541391
aacuuuagggccagcccac

SEQ ID NO: 541393 - RNA, 19 nt, Artificial Sequence
  Description of Artificial Sequence: Synthetic oligonucleotide
  Sense strand starting at position 1101 of SEQ ID NO: 318161
uaaaguuucucugugggca

SEQ ID NO: 541394 - RNA, 19 nt, Artificial Sequence
  Description of Artificial Sequence: Synthetic oligonucleotide
  Antisense strand to SEQ ID NO: 541393
ugcccacagagaaacuuua

SEQ ID NO: 541395 - RNA, 19 nt, Artificial Sequence
  Description of Artificial Sequence: Synthetic oligonucleotide
  Sense strand starting at position 1355 of SEQ ID NO: 318161
caggcugugccuuauccua

SEQ ID NO: 541396 - RNA, 19 nt, Artificial Sequence
  Description of Artificial Sequence: Synthetic oligonucleotide
  Antisense strand to SEQ ID NO: 541395
uaggauaaggcacagccug

SEQ ID NO: 541397 - RNA, 19 nt, Artificial Sequence
  Description of Artificial Sequence: Synthetic oligonucleotide
  Sense strand starting at position 1399 of SEQ ID NO: 318161
ucucuuagguggcaaggau

SEQ ID NO: 541398 - RNA, 19 nt, Artificial Sequence
  Description of Artificial Sequence: Synthetic oligonucleotide
  Antisense strand to SEQ ID NO: 541397
auccuugccaccuaagaga

SEQ ID NO: 541399 - RNA, 19 nt, Artificial Sequence
  Description of Artificial Sequence: Synthetic oligonucleotide
  Sense strand starting at position 1425 of SEQ ID NO: 318161
caaggaauguguccuuuag

SEQ ID NO: 541400 - RNA, 19 nt, Artificial Sequence
  Description of Artificial Sequence: Synthetic oligonucleotide
  Antisense strand to SEQ ID NO: 541399
cuaaaggacacauuccuug

SEQ ID NO: 541401 - RNA, 19 nt, Artificial Sequence
  Description of Artificial Sequence: Synthetic oligonucleotide
  Sense strand starting at position 1795 of SEQ ID NO: 318161
gcaagcuguagggaucuaa

SEQ ID NO: 541402 - RNA, 19 nt, Artificial Sequence
  Description of Artificial Sequence: Synthetic oligonucleotide
  Antisense strand to SEQ ID NO: 541401
uuagaucccuacagcuugc

SEQ ID NO: 541403 - RNA, 19 nt, Artificial Sequence
  Description of Artificial Sequence: Synthetic oligonucleotide
  Sense strand starting at position 2669 of SEQ ID NO: 318161
gcccucuugccucaaggua

SEQ ID NO: 541404 - RNA, 19 nt, Artificial Sequence
  Description of Artificial Sequence: Synthetic oligonucleotide
  Antisense strand to SEQ ID NO: 541403
uaccuugaggcaagagggc

SEQ ID NO: 541405 - RNA, 19 nt, Artificial Sequence
  Description of Artificial Sequence: Synthetic oligonucleotide
  Sense strand starting at position 2767 of SEQ ID NO: 318161
cuuccaggccugugagaug

SEQ ID NO: 541406 - RNA, 19 nt, Artificial Sequence
  Description of Artificial Sequence: Synthetic oligonucleotide
  Antisense strand to SEQ ID NO: 541405
caucucacaggccuggaag

SEQ ID NO: 541407 - RNA, 19 nt, Artificial Sequence
  Description of Artificial Sequence: Synthetic oligonucleotide
  Sense strand starting at position 2803 of SEQ ID NO: 318161
gacucaagauggugagaug

SEQ ID NO: 541408 - RNA, 19 nt, Artificial Sequence
  Description of Artificial Sequence: Synthetic oligonucleotide
  Antisense strand to SEQ ID NO: 541407
caucucaccaucuugaguc

SEQ ID NO: 541409 - RNA, 19 nt, Artificial Sequence
  Description of Artificial Sequence: Synthetic oligonucleotide
  Sense strand starting at position 2810 of SEQ ID NO: 318161
gauggugagauguaguucu

SEQ ID NO: 541410 - RNA, 19 nt, Artificial Sequence
  Description of Artificial Sequence: Synthetic oligonucleotide
  Antisense strand to SEQ ID NO: 541409
agaacuacaucucaccauc

SEQ ID NO: 541411 - RNA, 19 nt, Artificial Sequence
  Description of Artificial Sequence: Synthetic oligonucleotide
  Sense strand starting at position 2817 of SEQ ID NO: 318161
agauguaguucuggaaacu

SEQ ID NO: 541412 - RNA, 19 nt, Artificial Sequence
  Description of Artificial Sequence: Synthetic oligonucleotide
  Antisense strand to SEQ ID NO: 541411
aguuuccagaacuacaucu

SEQ ID NO: 541413 - RNA, 19 nt, Artificial Sequence
  Description of Artificial Sequence: Synthetic oligonucleotide
  Sense strand starting at position 2818 of SEQ ID NO: 318161
gauguaguucuggaaacuu

SEQ ID NO: 541414 - RNA, 19 nt, Artificial Sequence
  Description of Artificial Sequence: Synthetic oligonucleotide
  Antisense strand to SEQ ID NO: 541413
aaguuuccagaacuacauc

SEQ ID NO: 541415 - RNA, 19 nt, Artificial Sequence
  Description of Artificial Sequence: Synthetic oligonucleotide
  Sense strand starting at position 2827 of SEQ ID NO: 318161
cuggaaacuuccuuaggac

SEQ ID NO: 541416 - RNA, 19 nt, Artificial Sequence
  Description of Artificial Sequence: Synthetic oligonucleotide
  Antisense strand to SEQ ID NO: 541415
guccuaaggaaguuuccag

SEQ ID NO: 541417 - RNA, 19 nt, Artificial Sequence
  Description of Artificial Sequence: Synthetic oligonucleotide
  Sense strand starting at position 3650 of SEQ ID NO: 318161
cuuggucaguugucacaca

SEQ ID NO: 541418 - RNA, 19 nt, Artificial Sequence
  Description of Artificial Sequence: Synthetic oligonucleotide
  Antisense strand to SEQ ID NO: 541417
ugugugacaacugaccaag

SEQ ID NO: 541419 - RNA, 19 nt, Artificial Sequence
  Description of Artificial Sequence: Synthetic oligonucleotide
  Sense strand starting at position 3692 of SEQ ID NO: 318161
guccaagugucuucgugag

SEQ ID NO: 541420 - RNA, 19 nt, Artificial Sequence
  Description of Artificial Sequence: Synthetic oligonucleotide
  Antisense strand to SEQ ID NO: 541419
cucacgaagacacuuggac

SEQ ID NO: 541421 - RNA, 19 nt, Artificial Sequence
  Description of Artificial Sequence: Synthetic oligonucleotide
  Sense strand starting at position 3694 of SEQ ID NO: 318161
ccaagugucuucgugaguc

SEQ ID NO: 541422 - RNA, 19 nt, Artificial Sequence
  Description of Artificial Sequence: Synthetic oligonucleotide
  Antisense strand to SEQ ID NO: 541421
gacucacgaagacacuugg

SEQ ID NO: 541423 - RNA, 19 nt, Artificial Sequence
  Description of Artificial Sequence: Synthetic oligonucleotide
  Sense strand starting at position 3696 of SEQ ID NO: 318161
aagugucuucgugagucca

SEQ ID NO: 541424 - RNA, 19 nt, Artificial Sequence
  Description of Artificial Sequence: Synthetic oligonucleotide
  Antisense strand to SEQ ID NO: 541423
uggacucacgaagacacuu

SEQ ID NO: 541425 - RNA, 19 nt, Artificial Sequence
  Description of Artificial Sequence: Synthetic oligonucleotide
  Sense strand starting at position 3826 of SEQ ID NO: 318161
gaggaagucccuuggcaga

SEQ ID NO: 541426 - RNA, 19 nt, Artificial Sequence
  Description of Artificial Sequence: Synthetic oligonucleotide
  Antisense strand to SEQ ID NO: 541425
ucugccaagggacuuccuc

SEQ ID NO: 541427 - RNA, 19 nt, Artificial Sequence
  Description of Artificial Sequence: Synthetic oligonucleotide
  Sense strand starting at position 64 of SEQ ID NO: 318162
gauucuuuauagucagaug

SEQ ID NO: 541428 - RNA, 19 nt, Artificial Sequence
  Description of Artificial Sequence: Synthetic oligonucleotide
  Antisense strand to SEQ ID NO: 541427
caucugacuauaaagaauc

SEQ ID NO: 541429 - RNA, 19 nt, Artificial Sequence
  Description of Artificial Sequence: Synthetic oligonucleotide
  Sense strand starting at position 72 of SEQ ID NO: 318162
auagucagaugaguuugaa

SEQ ID NO: 541430 - RNA, 19 nt, Artificial Sequence
  Description of Artificial Sequence: Synthetic oligonucleotide
  Antisense strand to SEQ ID NO: 541429
uucaaacucaucugacuau

SEQ ID NO: 541431 - RNA, 19 nt, Artificial Sequence
  Description of Artificial Sequence: Synthetic oligonucleotide
  Sense strand starting at position 81 of SEQ ID NO: 318162
ugaguuugaaucugagauu

SEQ ID NO: 541432 - RNA, 19 nt, Artificial Sequence
  Description of Artificial Sequence: Synthetic oligonucleotide
  Antisense strand to SEQ ID NO: 541431
aaucucagauucaaacuca

SEQ ID NO: 541433 - RNA, 19 nt, Artificial Sequence
  Description of Artificial Sequence: Synthetic oligonucleotide
  Sense strand starting at position 92 of SEQ ID NO: 318162
cugagauugucacuuaaug

SEQ ID NO: 541434 - RNA, 19 nt, Artificial Sequence
  Description of Artificial Sequence: Synthetic oligonucleotide
  Antisense strand to SEQ ID NO: 541433
cauuaagugacaaucucag

SEQ ID NO: 541435 - RNA, 19 nt, Artificial Sequence
  Description of Artificial Sequence: Synthetic oligonucleotide
  Sense strand starting at position 172 of SEQ ID NO: 318162
ggguuauaauuucugugcu

SEQ ID NO: 541436 - RNA, 19 nt, Artificial Sequence
  Description of Artificial Sequence: Synthetic oligonucleotide
  Antisense strand to SEQ ID NO: 541435
agcacagaaauuauaaccc

SEQ ID NO: 541437 - RNA, 19 nt, Artificial Sequence
  Description of Artificial Sequence: Synthetic oligonucleotide
  Sense strand starting at position 174 of SEQ ID NO: 318162
guuauaauuucugugcuag

SEQ ID NO: 541438 - RNA, 19 nt, Artificial Sequence
  Description of Artificial Sequence: Synthetic oligonucleotide
  Antisense strand to SEQ ID NO: 541437
cuagcacagaaauuauaac

SEQ ID NO: 541439 - RNA, 19 nt, Artificial Sequence
  Description of Artificial Sequence: Synthetic oligonucleotide
  Sense strand starting at position 176 of SEQ ID NO: 318162
uauaauuucugugcuaggu

SEQ ID NO: 541440 - RNA, 19 nt, Artificial Sequence
  Description of Artificial Sequence: Synthetic oligonucleotide
  Antisense strand to SEQ ID NO: 541439
accuagcacagaaauuaua

SEQ ID NO: 541441 - RNA, 19 nt, Artificial Sequence
  Description of Artificial Sequence: Synthetic oligonucleotide
  Sense strand starting at position 459 of SEQ ID NO: 318162
ucugaacuuccuugagaga

SEQ ID NO: 541442 - RNA, 19 nt, Artificial Sequence
  Description of Artificial Sequence: Synthetic oligonucleotide
  Antisense strand to SEQ ID NO: 541441
ucucucaaggaaguucaga

SEQ ID NO: 541443 - RNA, 19 nt, Artificial Sequence
  Description of Artificial Sequence: Synthetic oligonucleotide
  Sense strand starting at position 1306 of SEQ ID NO: 318162
ccagguagguacucagaga

SEQ ID NO: 541444 - RNA, 19 nt, Artificial Sequence
  Description of Artificial Sequence: Synthetic oligonucleotide
  Antisense strand to SEQ ID NO: 541443
ucucugaguaccuaccugg

SEQ ID NO: 541445 - RNA, 19 nt, Artificial Sequence
  Description of Artificial Sequence: Synthetic oligonucleotide
  Sense strand starting at position 1313 of SEQ ID NO: 318162
gguacucagagagguauaa

SEQ ID NO: 541446 - RNA, 19 nt, Artificial Sequence
  Description of Artificial Sequence: Synthetic oligonucleotide
  Antisense strand to SEQ ID NO: 541445
uuauaccucucugaguacc

SEQ ID NO: 541447 - RNA, 19 nt, Artificial Sequence
  Description of Artificial Sequence: Synthetic oligonucleotide
  Sense strand starting at position 1389 of SEQ ID NO: 318162
cugcucugucuugcuguua

SEQ ID NO: 541448 - RNA, 19 nt, Artificial Sequence
  Description of Artificial Sequence: Synthetic oligonucleotide
  Antisense strand to SEQ ID NO: 541447
uaacagcaagacagagcag

SEQ ID NO: 541449 - RNA, 19 nt, Artificial Sequence
  Description of Artificial Sequence: Synthetic oligonucleotide
  Sense strand starting at position 1520 of SEQ ID NO: 318162
gccuuuggcgucuccuaua

SEQ ID NO: 541450 - RNA, 19 nt, Artificial Sequence
  Description of Artificial Sequence: Synthetic oligonucleotide
  Antisense strand to SEQ ID NO: 541449
uauaggagacgccaaaggc

SEQ ID NO: 541451 - RNA, 19 nt, Artificial Sequence
  Description of Artificial Sequence: Synthetic oligonucleotide
  Sense strand starting at position 1534 of SEQ ID NO: 318162
cuauacuucccagggauau

SEQ ID NO: 541452 - RNA, 19 nt, Artificial Sequence
  Description of Artificial Sequence: Synthetic oligonucleotide
  Antisense strand to SEQ ID NO: 541451
auaucccugggaaguauag

SEQ ID NO: 541453 - RNA, 19 nt, Artificial Sequence
  Description of Artificial Sequence: Synthetic oligonucleotide
  Sense strand starting at position 1535 of SEQ ID NO: 318162
uauacuucccagggauaug

SEQ ID NO: 541454 - RNA, 19 nt, Artificial Sequence
  Description of Artificial Sequence: Synthetic oligonucleotide
  Antisense strand to SEQ ID NO: 541453
cauaucccugggaaguaua

SEQ ID NO: 541455 - RNA, 19 nt, Artificial Sequence
  Description of Artificial Sequence: Synthetic oligonucleotide
  Sense strand starting at position 1567 of SEQ ID NO: 318162
agacaaauacucggucuga

SEQ ID NO: 541456 - RNA, 19 nt, Artificial Sequence
  Description of Artificial Sequence: Synthetic oligonucleotide
  Antisense strand to SEQ ID NO: 541455
ucagaccgaguauuugucu

SEQ ID NO: 541457 - RNA, 19 nt, Artificial Sequence
  Description of Artificial Sequence: Synthetic oligonucleotide
  Sense strand starting at position 1568 of SEQ ID NO: 318162
gacaaauacucggucugaa

SEQ ID NO: 541458 - RNA, 19 nt, Artificial Sequence
  Description of Artificial Sequence: Synthetic oligonucleotide
  Antisense strand to SEQ ID NO: 541457
uucagaccgaguauuuguc

SEQ ID NO: 541459 - RNA, 19 nt, Artificial Sequence
  Description of Artificial Sequence: Synthetic oligonucleotide
  Sense strand starting at position 1571 of SEQ ID NO: 318162
aaauacucggucugaagau

SEQ ID NO: 541460 - RNA, 19 nt, Artificial Sequence
  Description of Artificial Sequence: Synthetic oligonucleotide
  Antisense strand to SEQ ID NO: 541459
aucuucagaccgaguauuu

SEQ ID NO: 541461 - RNA, 19 nt, Artificial Sequence
  Description of Artificial Sequence: Synthetic oligonucleotide
  Sense strand starting at position 1609 of SEQ ID NO: 318162
agucgcagauuuguaucau

SEQ ID NO: 541462 - RNA, 19 nt, Artificial Sequence
  Description of Artificial Sequence: Synthetic oligonucleotide
  Antisense strand to SEQ ID NO: 541461
augauacaaaucugcgacu

SEQ ID NO: 541463 - RNA, 19 nt, Artificial Sequence
  Description of Artificial Sequence: Synthetic oligonucleotide
  Sense strand starting at position 2088 of SEQ ID NO: 318162
uugcuaaaggcguuugcua

SEQ ID NO: 541464 - RNA, 19 nt, Artificial Sequence
  Description of Artificial Sequence: Synthetic oligonucleotide
  Antisense strand to SEQ ID NO: 541463
uagcaaacgccuuuagcaa

SEQ ID NO: 541465 - RNA, 19 nt, Artificial Sequence
  Description of Artificial Sequence: Synthetic oligonucleotide
  Sense strand starting at position 2089 of SEQ ID NO: 318162
ugcuaaaggcguuugcuaa

SEQ ID NO: 541466 - RNA, 19 nt, Artificial Sequence
  Description of Artificial Sequence: Synthetic oligonucleotide
  Antisense strand to SEQ ID NO: 541465
uuagcaaacgccuuuagca

SEQ ID NO: 541467 - RNA, 19 nt, Artificial Sequence
  Description of Artificial Sequence: Synthetic oligonucleotide
  Sense strand starting at position 2288 of SEQ ID NO: 318162
uccuguuuaggguauagga

SEQ ID NO: 541468 - RNA, 19 nt, Artificial Sequence
  Description of Artificial Sequence: Synthetic oligonucleotide
  Antisense strand to SEQ ID NO: 541467
uccuauacccuaaacagga

SEQ ID NO: 541469 - RNA, 19 nt, Artificial Sequence
  Description of Artificial Sequence: Synthetic oligonucleotide
  Sense strand starting at position 2331 of SEQ ID NO: 318162
uaacguuucccaguugcga

SEQ ID NO: 541470 - RNA, 19 nt, Artificial Sequence
  Description of Artificial Sequence: Synthetic oligonucleotide
  Antisense strand to SEQ ID NO: 541469
ucgcaacugggaaacguua

SEQ ID NO: 541471 - RNA, 19 nt, Artificial Sequence
  Description of Artificial Sequence: Synthetic oligonucleotide
  Sense strand starting at position 2357 of SEQ ID NO: 318162
uuuggaaaugugcauaaau

SEQ ID NO: 541472 - RNA, 19 nt, Artificial Sequence
  Description of Artificial Sequence: Synthetic oligonucleotide
  Antisense strand to SEQ ID NO: 541471
auuuaugcacauuuccaaa

SEQ ID NO: 541473 - RNA, 19 nt, Artificial Sequence
  Description of Artificial Sequence: Synthetic oligonucleotide
  Sense strand starting at position 2512 of SEQ ID NO: 318162
ggagaucugggaugcaaau

SEQ ID NO: 541474 - RNA, 19 nt, Artificial Sequence
  Description of Artificial Sequence: Synthetic oligonucleotide
  Antisense strand to SEQ ID NO: 541473
auuugcaucccagaucucc

SEQ ID NO: 541475 - RNA, 19 nt, Artificial Sequence
  Description of Artificial Sequence: Synthetic oligonucleotide
  Sense strand starting at position 2605 of SEQ ID NO: 318162
ugcugauaaagaggucaga

SEQ ID NO: 541476 - RNA, 19 nt, Artificial Sequence
  Description of Artificial Sequence: Synthetic oligonucleotide
  Antisense strand to SEQ ID NO: 541475
ucugaccucuuuaucagca

SEQ ID NO: 541477 - RNA, 19 nt, Artificial Sequence
  Description of Artificial Sequence: Synthetic oligonucleotide
  Sense strand starting at position 2615 of SEQ ID NO: 318162
gaggucagaaauggguaau

SEQ ID NO: 541478 - RNA, 19 nt, Artificial Sequence
  Description of Artificial Sequence: Synthetic oligonucleotide
  Antisense strand to SEQ ID NO: 541477
auuacccauuucugaccuc

SEQ ID NO: 541479 - RNA, 19 nt, Artificial Sequence
  Description of Artificial Sequence: Synthetic oligonucleotide
  Sense strand starting at position 2616 of SEQ ID NO: 318162
aggucagaaauggguaauu

SEQ ID NO: 541480 - RNA, 19 nt, Artificial Sequence
  Description of Artificial Sequence: Synthetic oligonucleotide
  Antisense strand to SEQ ID NO: 541479
aauuacccauuucugaccu

SEQ ID NO: 541481 - RNA, 19 nt, Artificial Sequence
  Description of Artificial Sequence: Synthetic oligonucleotide
  Sense strand starting at position 2640 of SEQ ID NO: 318162
gcagcaucauaauuagaaa

SEQ ID NO: 541482 - RNA, 19 nt, Artificial Sequence
  Description of Artificial Sequence: Synthetic oligonucleotide
  Antisense strand to SEQ ID NO: 541481
uuucuaauuaugaugcugc

SEQ ID NO: 541483 - RNA, 19 nt, Artificial Sequence
  Description of Artificial Sequence: Synthetic oligonucleotide
  Sense strand starting at position 2694 of SEQ ID NO: 318162
ccuugcaagcaucaagaaa

SEQ ID NO: 541484 - RNA, 19 nt, Artificial Sequence
  Description of Artificial Sequence: Synthetic oligonucleotide
  Antisense strand to SEQ ID NO: 541483
uuucuugaugcuugcaagg

SEQ ID NO: 541485 - RNA, 19 nt, Artificial Sequence
  Description of Artificial Sequence: Synthetic oligonucleotide
  Sense strand starting at position 2790 of SEQ ID NO: 318162
ccguguagccuuucagguu

SEQ ID NO: 541486 - RNA, 19 nt, Artificial Sequence
  Description of Artificial Sequence: Synthetic oligonucleotide
  Antisense strand to SEQ ID NO: 541485
aaccugaaaggcuacacgg

SEQ ID NO: 541487 - RNA, 19 nt, Artificial Sequence
  Description of Artificial Sequence: Synthetic oligonucleotide
  Sense strand starting at position 2889 of SEQ ID NO: 318162
gaucuauguuauucuaagg

SEQ ID NO: 541488 - RNA, 19 nt, Artificial Sequence
  Description of Artificial Sequence: Synthetic oligonucleotide
  Antisense strand to SEQ ID NO: 541487
ccuuagaauaacauagauc

SEQ ID NO: 541489 - RNA, 19 nt, Artificial Sequence
  Description of Artificial Sequence: Synthetic oligonucleotide
  Sense strand starting at position 2962 of SEQ ID NO: 318162
augcauucgauuugcagaa

SEQ ID NO: 541490 - RNA, 19 nt, Artificial Sequence
  Description of Artificial Sequence: Synthetic oligonucleotide
  Antisense strand to SEQ ID NO: 541489
uucugcaaaucgaaugcau

SEQ ID NO: 541491 - RNA, 19 nt, Artificial Sequence
  Description of Artificial Sequence: Synthetic oligonucleotide
  Sense strand starting at position 2987 of SEQ ID NO: 318162
acguaaugaagcgauuaaa

SEQ ID NO: 541492 - RNA, 19 nt, Artificial Sequence
  Description of Artificial Sequence: Synthetic oligonucleotide
  Antisense strand to SEQ ID NO: 541491
uuuaaucgcuucauuacgu

SEQ ID NO: 541493 - RNA, 19 nt, Artificial Sequence
  Description of Artificial Sequence: Synthetic oligonucleotide
  Sense strand starting at position 3048 of SEQ ID NO: 318162
cuagaugaucuuggaccuu

SEQ ID NO: 541494 - RNA, 19 nt, Artificial Sequence
  Description of Artificial Sequence: Synthetic oligonucleotide
  Antisense strand to SEQ ID NO: 541493
aagguccaagaucaucuag

SEQ ID NO: 541495 - RNA, 19 nt, Artificial Sequence
  Description of Artificial Sequence: Synthetic oligonucleotide
  Sense strand starting at position 3173 of SEQ ID NO: 318162
uugugaugauuucuugcua

SEQ ID NO: 541496 - RNA, 19 nt, Artificial Sequence
  Description of Artificial Sequence: Synthetic oligonucleotide
  Antisense strand to SEQ ID NO: 541495
uagcaagaaaucaucacaa

SEQ ID NO: 541497 - RNA, 19 nt, Artificial Sequence
  Description of Artificial Sequence: Synthetic oligonucleotide
  Sense strand starting at position 3177 of SEQ ID NO: 318162
gaugauuucuugcuagcua

SEQ ID NO: 541498 - RNA, 19 nt, Artificial Sequence
  Description of Artificial Sequence: Synthetic oligonucleotide
  Antisense strand to SEQ ID NO: 541497
uagcuagcaagaaaucauc

SEQ ID NO: 541499 - RNA, 19 nt, Artificial Sequence
  Description of Artificial Sequence: Synthetic oligonucleotide
  Sense strand starting at position 3452 of SEQ ID NO: 318162
agggcagucauaugggaac

SEQ ID NO: 541500 - RNA, 19 nt, Artificial Sequence
  Description of Artificial Sequence: Synthetic oligonucleotide
  Antisense strand to SEQ ID NO: 541499
guucccauaugacugcccu

SEQ ID NO: 541501 - RNA, 19 nt, Artificial Sequence
  Description of Artificial Sequence: Synthetic oligonucleotide
  Sense strand starting at position 3704 of SEQ ID NO: 318162
ccagguuugaaacgaagaa

SEQ ID NO: 541502 - RNA, 19 nt, Artificial Sequence
  Description of Artificial Sequence: Synthetic oligonucleotide
  Antisense strand to SEQ ID NO: 541501
uucuucguuucaaaccugg

SEQ ID NO: 541503 - RNA, 19 nt, Artificial Sequence
  Description of Artificial Sequence: Synthetic oligonucleotide
  Sense strand starting at position 3928 of SEQ ID NO: 318162
aggaaauuccagcauguuc

SEQ ID NO: 541504 - RNA, 19 nt, Artificial Sequence
  Description of Artificial Sequence: Synthetic oligonucleotide
  Antisense strand to SEQ ID NO: 541503
gaacaugcuggaauuuccu

SEQ ID NO: 541505 - RNA, 19 nt, Artificial Sequence
  Description of Artificial Sequence: Synthetic oligonucleotide
  Sense strand starting at position 3966 of SEQ ID NO: 318162
cuauguaguaggcagaaua

SEQ ID NO: 541506 - RNA, 19 nt, Artificial Sequence
  Description of Artificial Sequence: Synthetic oligonucleotide
  Antisense strand to SEQ ID NO: 541505
uauucugccuacuacauag

SEQ ID NO: 541507 - RNA, 19 nt, Artificial Sequence
  Description of Artificial Sequence: Synthetic oligonucleotide
  Sense strand starting at position 41 of SEQ ID NO: 318163
cgacuauguguauaaguug

SEQ ID NO: 541508 - RNA, 19 nt, Artificial Sequence
  Description of Artificial Sequence: Synthetic oligonucleotide
  Antisense strand to SEQ ID NO: 541507
caacuuauacacauagucg

SEQ ID NO: 541509 - RNA, 19 nt, Artificial Sequence
  Description of Artificial Sequence: Synthetic oligonucleotide
  Sense strand starting at position 47 of SEQ ID NO: 318163
uguguauaaguugaauaug

SEQ ID NO: 541510 - RNA, 19 nt, Artificial Sequence
  Description of Artificial Sequence: Synthetic oligonucleotide
  Antisense strand to SEQ ID NO: 541509
cauauucaacuuauacaca

SEQ ID NO: 541511 - RNA, 19 nt, Artificial Sequence
  Description of Artificial Sequence: Synthetic oligonucleotide
  Sense strand starting at position 387 of SEQ ID NO: 318163
ucugaagugcuacauuauu

SEQ ID NO: 541512 - RNA, 19 nt, Artificial Sequence
  Description of Artificial Sequence: Synthetic oligonucleotide
  Antisense strand to SEQ ID NO: 541511
aauaauguagcacuucaga

SEQ ID NO: 541513 - RNA, 19 nt, Artificial Sequence
  Description of Artificial Sequence: Synthetic oligonucleotide
  Sense strand starting at position 426 of SEQ ID NO: 318163
acuugacagcuaugaaacu

SEQ ID NO: 541514 - RNA, 19 nt, Artificial Sequence
  Description of Artificial Sequence: Synthetic oligonucleotide
  Antisense strand to SEQ ID NO: 541513
aguuucauagcugucaagu

SEQ ID NO: 541515 - RNA, 19 nt, Artificial Sequence
  Description of Artificial Sequence: Synthetic oligonucleotide
  Sense strand starting at position 561 of SEQ ID NO: 318163
gugucuuuaaccuagggaa

SEQ ID NO: 541516 - RNA, 19 nt, Artificial Sequence
  Description of Artificial Sequence: Synthetic oligonucleotide
  Antisense strand to SEQ ID NO: 541515
uucccuagguuaaagacac

SEQ ID NO: 541517 - RNA, 19 nt, Artificial Sequence
  Description of Artificial Sequence: Synthetic oligonucleotide
  Sense strand starting at position 563 of SEQ ID NO: 318163
gucuuuaaccuagggaaug

SEQ ID NO: 541518 - RNA, 19 nt, Artificial Sequence
  Description of Artificial Sequence: Synthetic oligonucleotide
  Antisense strand to SEQ ID NO: 541517
cauucccuagguuaaagac

SEQ ID NO: 541519 - RNA, 19 nt, Artificial Sequence
  Description of Artificial Sequence: Synthetic oligonucleotide
  Sense strand starting at position 573 of SEQ ID NO: 318163
uagggaaugucuuugaauc

SEQ ID NO: 541520 - RNA, 19 nt, Artificial Sequence
  Description of Artificial Sequence: Synthetic oligonucleotide
  Antisense strand to SEQ ID NO: 541519
gauucaaagacauucccua

SEQ ID NO: 541521 - RNA, 19 nt, Artificial Sequence
  Description of Artificial Sequence: Synthetic oligonucleotide
  Sense strand starting at position 574 of SEQ ID NO: 318163
agggaaugucuuugaaucc

SEQ ID NO: 541522 - RNA, 19 nt, Artificial Sequence
  Description of Artificial Sequence: Synthetic oligonucleotide
  Antisense strand to SEQ ID NO: 541521
ggauucaaagacauucccu

SEQ ID NO: 541523 - RNA, 19 nt, Artificial Sequence
  Description of Artificial Sequence: Synthetic oligonucleotide
  Sense strand starting at position 583 of SEQ ID NO: 318163
cuuugaauccuguagauuc

SEQ ID NO: 541524 - RNA, 19 nt, Artificial Sequence
  Description of Artificial Sequence: Synthetic oligonucleotide
  Antisense strand to SEQ ID NO: 541523
gaaucuacaggauucaaag

SEQ ID NO: 541525 - RNA, 19 nt, Artificial Sequence
  Description of Artificial Sequence: Synthetic oligonucleotide
  Sense strand starting at position 842 of SEQ ID NO: 318163
uuagauacuuguuucuauc

SEQ ID NO: 541526 - RNA, 19 nt, Artificial Sequence
  Description of Artificial Sequence: Synthetic oligonucleotide
  Antisense strand to SEQ ID NO: 541525
gauagaaacaaguaucuaa

SEQ ID NO: 541527 - RNA, 19 nt, Artificial Sequence
  Description of Artificial Sequence: Synthetic oligonucleotide
  Sense strand starting at position 970 of SEQ ID NO: 318163
guuacaaaucuggguauuc

SEQ ID NO: 541528 - RNA, 19 nt, Artificial Sequence
  Description of Artificial Sequence: Synthetic oligonucleotide
  Antisense strand to SEQ ID NO: 541527
gaauacccagauuuguaac

SEQ ID NO: 541529 - RNA, 19 nt, Artificial Sequence
  Description of Artificial Sequence: Synthetic oligonucleotide
  Sense strand starting at position 981 of SEQ ID NO: 318163
ggguauucugaaugaucaa

SEQ ID NO: 541530 - RNA, 19 nt, Artificial Sequence
  Description of Artificial Sequence: Synthetic oligonucleotide
  Antisense strand to SEQ ID NO: 541529
uugaucauucagaauaccc

SEQ ID NO: 541531 - RNA, 19 nt, Artificial Sequence
  Description of Artificial Sequence: Synthetic oligonucleotide
  Sense strand starting at position 1040 of SEQ ID NO: 318163
aggcgaucacuccagucua

SEQ ID NO: 541532 - RNA, 19 nt, Artificial Sequence
  Description of Artificial Sequence: Synthetic oligonucleotide
  Antisense strand to SEQ ID NO: 541531
uagacuggagugaucgccu

SEQ ID NO: 541533 - RNA, 19 nt, Artificial Sequence
  Description of Artificial Sequence: Synthetic oligonucleotide
  Sense strand starting at position 1051 of SEQ ID NO: 318163
ccagucuacuacucagaga

SEQ ID NO: 541534 - RNA, 19 nt, Artificial Sequence
  Description of Artificial Sequence: Synthetic oligonucleotide
  Antisense strand to SEQ ID NO: 541533
ucucugaguaguagacugg

SEQ ID NO: 541535 - RNA, 19 nt, Artificial Sequence
  Description of Artificial Sequence: Synthetic oligonucleotide
  Sense strand starting at position 1519 of SEQ ID NO: 318163
acacuugaacgaugugaca

SEQ ID NO: 541536 - RNA, 19 nt, Artificial Sequence
  Description of Artificial Sequence: Synthetic oligonucleotide
  Antisense strand to SEQ ID NO: 541535
ugucacaucguucaagugu

SEQ ID NO: 541537 - RNA, 19 nt, Artificial Sequence
  Description of Artificial Sequence: Synthetic oligonucleotide
  Sense strand starting at position 1521 of SEQ ID NO: 318163
acuugaacgaugugacaag

SEQ ID NO: 541538 - RNA, 19 nt, Artificial Sequence
  Description of Artificial Sequence: Synthetic oligonucleotide
  Antisense strand to SEQ ID NO: 541537
cuugucacaucguucaagu

SEQ ID NO: 541539 - RNA, 19 nt, Artificial Sequence
  Description of Artificial Sequence: Synthetic oligonucleotide
  Sense strand starting at position 1542 of SEQ ID NO: 318163
gccgucagcgaauauuuca

SEQ ID NO: 541540 - RNA, 19 nt, Artificial Sequence
  Description of Artificial Sequence: Synthetic oligonucleotide
  Antisense strand to SEQ ID NO: 541539
ugaaauauucgcugacggc

SEQ ID NO: 541541 - RNA, 19 nt, Artificial Sequence
  Description of Artificial Sequence: Synthetic oligonucleotide
  Sense strand starting at position 1566 of SEQ ID NO: 318163
acauaaagucgugggagaa

SEQ ID NO: 541542 - RNA, 19 nt, Artificial Sequence
  Description of Artificial Sequence: Synthetic oligonucleotide
  Antisense strand to SEQ ID NO: 541541
uucucccacgacuuuaugu

SEQ ID NO: 541543 - RNA, 19 nt, Artificial Sequence
  Description of Artificial Sequence: Synthetic oligonucleotide
  Sense strand starting at position 1567 of SEQ ID NO: 318163
cauaaagucgugggagaaa

SEQ ID NO: 541544 - RNA, 19 nt, Artificial Sequence
  Description of Artificial Sequence: Synthetic oligonucleotide
  Antisense strand to SEQ ID NO: 541543
uuucucccacgacuuuaug

SEQ ID NO: 541545 - RNA, 19 nt, Artificial Sequence
  Description of Artificial Sequence: Synthetic oligonucleotide
  Sense strand starting at position 2426 of SEQ ID NO: 318163
cuugcugugcaucucgaau

SEQ ID NO: 541546 - RNA, 19 nt, Artificial Sequence
  Description of Artificial Sequence: Synthetic oligonucleotide
  Antisense strand to SEQ ID NO: 541545
auucgagaugcacagcaag

SEQ ID NO: 541547 - RNA, 19 nt, Artificial Sequence
  Description of Artificial Sequence: Synthetic oligonucleotide
  Sense strand starting at position 2751 of SEQ ID NO: 318163
gucauugguagucaccauu

SEQ ID NO: 541548 - RNA, 19 nt, Artificial Sequence
  Description of Artificial Sequence: Synthetic oligonucleotide
  Antisense strand to SEQ ID NO: 541547
aauggugacuaccaaugac

SEQ ID NO: 541549 - RNA, 19 nt, Artificial Sequence
  Description of Artificial Sequence: Synthetic oligonucleotide
  Sense strand starting at position 2754 of SEQ ID NO: 318163
auugguagucaccauugga

SEQ ID NO: 541550 - RNA, 19 nt, Artificial Sequence
  Description of Artificial Sequence: Synthetic oligonucleotide
  Antisense strand to SEQ ID NO: 541549
uccaauggugacuaccaau

SEQ ID NO: 541551 - RNA, 19 nt, Artificial Sequence
  Description of Artificial Sequence: Synthetic oligonucleotide
  Sense strand starting at position 2835 of SEQ ID NO: 318163
guguuaaaugaguaucaua

SEQ ID NO: 541552 - RNA, 19 nt, Artificial Sequence
  Description of Artificial Sequence: Synthetic oligonucleotide
  Antisense strand to SEQ ID NO: 541551
uaugauacucauuuaacac

SEQ ID NO: 541553 - RNA, 19 nt, Artificial Sequence
  Description of Artificial Sequence: Synthetic oligonucleotide
  Sense strand starting at position 2867 of SEQ ID NO: 318163
uauguaugacuuuggcaaa

SEQ ID NO: 541554 - RNA, 19 nt, Artificial Sequence
  Description of Artificial Sequence: Synthetic oligonucleotide
  Antisense strand to SEQ ID NO: 541553
uuugccaaagucauacaua

SEQ ID NO: 541555 - RNA, 19 nt, Artificial Sequence
  Description of Artificial Sequence: Synthetic oligonucleotide
  Sense strand starting at position 2948 of SEQ ID NO: 318163
ucucucaguguugauauua

SEQ ID NO: 541556 - RNA, 19 nt, Artificial Sequence
  Description of Artificial Sequence: Synthetic oligonucleotide
  Antisense strand to SEQ ID NO: 541555
uaauaucaacacugagaga

SEQ ID NO: 541557 - RNA, 19 nt, Artificial Sequence
  Description of Artificial Sequence: Synthetic oligonucleotide
  Sense strand starting at position 2996 of SEQ ID NO: 318163
cuguuacgacaauauccau

SEQ ID NO: 541558 - RNA, 19 nt, Artificial Sequence
  Description of Artificial Sequence: Synthetic oligonucleotide
  Antisense strand to SEQ ID NO: 541557
auggauauugucguaacag

SEQ ID NO: 541559 - RNA, 19 nt, Artificial Sequence
  Description of Artificial Sequence: Synthetic oligonucleotide
  Sense strand starting at position 3357 of SEQ ID NO: 318163
ggauauauucccugcuuga

SEQ ID NO: 541560 - RNA, 19 nt, Artificial Sequence
  Description of Artificial Sequence: Synthetic oligonucleotide
  Antisense strand to SEQ ID NO: 541559
ucaagcagggaauauaucc

SEQ ID NO: 541561 - RNA, 19 nt, Artificial Sequence
  Description of Artificial Sequence: Synthetic oligonucleotide
  Sense strand starting at position 3368 of SEQ ID NO: 318163
cugcuugauauguaggacu

SEQ ID NO: 541562 - RNA, 19 nt, Artificial Sequence
  Description of Artificial Sequence: Synthetic oligonucleotide
  Antisense strand to SEQ ID NO: 541561
aguccuacauaucaagcag

SEQ ID NO: 541563 - RNA, 19 nt, Artificial Sequence
  Description of Artificial Sequence: Synthetic oligonucleotide
  Sense strand starting at position 3397 of SEQ ID NO: 318163
agcccucaugaauguuaau

SEQ ID NO: 541564 - RNA, 19 nt, Artificial Sequence
  Description of Artificial Sequence: Synthetic oligonucleotide
  Antisense strand to SEQ ID NO: 541563
auuaacauucaugagggcu

SEQ ID NO: 541565 - RNA, 19 nt, Artificial Sequence
  Description of Artificial Sequence: Synthetic oligonucleotide
  Sense strand starting at position 3429 of SEQ ID NO: 318163
ucuuucugucuauagguua

SEQ ID NO: 541566 - RNA, 19 nt, Artificial Sequence
  Description of Artificial Sequence: Synthetic oligonucleotide
  Antisense strand to SEQ ID NO: 541565
uaaccuauagacagaaaga

SEQ ID NO: 541567 - RNA, 19 nt, Artificial Sequence
  Description of Artificial Sequence: Synthetic oligonucleotide
  Sense strand starting at position 3464 of SEQ ID NO: 318163
gucaauagacagcggaauu

SEQ ID NO: 541568 - RNA, 19 nt, Artificial Sequence
  Description of Artificial Sequence: Synthetic oligonucleotide
  Antisense strand to SEQ ID NO: 541567
aauuccgcugucuauugac

SEQ ID NO: 541569 - RNA, 19 nt, Artificial Sequence
  Description of Artificial Sequence: Synthetic oligonucleotide
  Sense strand starting at position 3490 of SEQ ID NO: 318163
gagccaaagugauagauuu

SEQ ID NO: 541570 - RNA, 19 nt, Artificial Sequence
  Description of Artificial Sequence: Synthetic oligonucleotide
  Antisense strand to SEQ ID NO: 541569
aaaucuaucacuuuggcuc

SEQ ID NO: 541571 - RNA, 19 nt, Artificial Sequence
  Description of Artificial Sequence: Synthetic oligonucleotide
  Sense strand starting at position 3524 of SEQ ID NO: 318163
gaccgauaccuguauccuu

SEQ ID NO: 541572 - RNA, 19 nt, Artificial Sequence
  Description of Artificial Sequence: Synthetic oligonucleotide
  Antisense strand to SEQ ID NO: 541571
aaggauacagguaucgguc

SEQ ID NO: 541573 - RNA, 19 nt, Artificial Sequence
  Description of Artificial Sequence: Synthetic oligonucleotide
  Sense strand starting at position 3632 of SEQ ID NO: 318163
auggaagaauaggauuaua

SEQ ID NO: 541574 - RNA, 19 nt, Artificial Sequence
  Description of Artificial Sequence: Synthetic oligonucleotide
  Antisense strand to SEQ ID NO: 541573
uauaauccuauucuuccau

SEQ ID NO: 541575 - RNA, 19 nt, Artificial Sequence
  Description of Artificial Sequence: Synthetic oligonucleotide
  Sense strand starting at position 3805 of SEQ ID NO: 318163
cugacacaguuucuguuaa

SEQ ID NO: 541576 - RNA, 19 nt, Artificial Sequence
  Description of Artificial Sequence: Synthetic oligonucleotide
  Antisense strand to SEQ ID NO: 541575
uuaacagaaacugugucag

SEQ ID NO: 541577 - RNA, 19 nt, Artificial Sequence
  Description of Artificial Sequence: Synthetic oligonucleotide
  Sense strand starting at position 3842 of SEQ ID NO: 318163
auaugucauuucuaggaau

SEQ ID NO: 541578 - RNA, 19 nt, Artificial Sequence
  Description of Artificial Sequence: Synthetic oligonucleotide
  Antisense strand to SEQ ID NO: 541577
auuccuagaaaugacauau

SEQ ID NO: 541579 - RNA, 19 nt, Artificial Sequence
  Description of Artificial Sequence: Synthetic oligonucleotide
  Sense strand starting at position 3845 of SEQ ID NO: 318163
ugucauuucuaggaauaug

SEQ ID NO: 541580 - RNA, 19 nt, Artificial Sequence
  Description of Artificial Sequence: Synthetic oligonucleotide
  Antisense strand to SEQ ID NO: 541579
cauauuccuagaaaugaca

SEQ ID NO: 541581 - RNA, 19 nt, Artificial Sequence
  Description of Artificial Sequence: Synthetic oligonucleotide
  Sense strand starting at position 3892 of SEQ ID NO: 318163
ugaguugcccuagaguaga

SEQ ID NO: 541582 - RNA, 19 nt, Artificial Sequence
  Description of Artificial Sequence: Synthetic oligonucleotide
  Antisense strand to SEQ ID NO: 541581
ucuacucuagggcaacuca

SEQ ID NO: 541583 - RNA, 19 nt, Artificial Sequence
  Description of Artificial Sequence: Synthetic oligonucleotide
  Sense strand starting at position 3908 of SEQ ID NO: 318163
agaaguuguacugaaguga

SEQ ID NO: 541584 - RNA, 19 nt, Artificial Sequence
  Description of Artificial Sequence: Synthetic oligonucleotide
  Antisense strand to SEQ ID NO: 541583
ucacuucaguacaacuucu

SEQ ID NO: 541585 - RNA, 19 nt, Artificial Sequence
  Description of Artificial Sequence: Synthetic oligonucleotide
  Sense strand starting at position 3925 of SEQ ID NO: 318163
gagaguguaaauugaugca

SEQ ID NO: 541586 - RNA, 19 nt, Artificial Sequence
  Description of Artificial Sequence: Synthetic oligonucleotide
  Antisense strand to SEQ ID NO: 541585
ugcaucaauuuacacucuc

SEQ ID NO: 541587 - RNA, 19 nt, Artificial Sequence
  Description of Artificial Sequence: Synthetic oligonucleotide
  Sense strand starting at position 115 of SEQ ID NO: 318164
agucuugagccaggaaggu

SEQ ID NO: 541588 - RNA, 19 nt, Artificial Sequence
  Description of Artificial Sequence: Synthetic oligonucleotide
  Antisense strand to SEQ ID NO: 541587
accuuccuggcucaagacu

SEQ ID NO: 541589 - RNA, 19 nt, Artificial Sequence
  Description of Artificial Sequence: Synthetic oligonucleotide
  Sense strand starting at position 273 of SEQ ID NO: 318164
gcuugaccaguugauacaa

SEQ ID NO: 541590 - RNA, 19 nt, Artificial Sequence
  Description of Artificial Sequence: Synthetic oligonucleotide
  Antisense strand to SEQ ID NO: 541589
uuguaucaacuggucaagc

SEQ ID NO: 541591 - RNA, 19 nt, Artificial Sequence
  Description of Artificial Sequence: Synthetic oligonucleotide
  Sense strand starting at position 275 of SEQ ID NO: 318164
uugaccaguugauacaaua

SEQ ID NO: 541592 - RNA, 19 nt, Artificial Sequence
  Description of Artificial Sequence: Synthetic oligonucleotide
  Antisense strand to SEQ ID NO: 541591
uauuguaucaacuggucaa

SEQ ID NO: 541593 - RNA, 19 nt, Artificial Sequence
  Description of Artificial Sequence: Synthetic oligonucleotide
  Sense strand starting at position 297 of SEQ ID NO: 318164
aaugaaaucugagugguuu

SEQ ID NO: 541594 - RNA, 19 nt, Artificial Sequence
  Description of Artificial Sequence: Synthetic oligonucleotide
  Antisense strand to SEQ ID NO: 541593
aaaccacucagauuucauu

SEQ ID NO: 541595 - RNA, 19 nt, Artificial Sequence
  Description of Artificial Sequence: Synthetic oligonucleotide
  Sense strand starting at position 339 of SEQ ID NO: 318164
aggcuaguguggaagagaa

SEQ ID NO: 541596 - RNA, 19 nt, Artificial Sequence
  Description of Artificial Sequence: Synthetic oligonucleotide
  Antisense strand to SEQ ID NO: 541595
uucucuuccacacuagccu

SEQ ID NO: 541597 - RNA, 19 nt, Artificial Sequence
  Description of Artificial Sequence: Synthetic oligonucleotide
  Sense strand starting at position 404 of SEQ ID NO: 318164
aaagauagguuaggucaga

SEQ ID NO: 541598 - RNA, 19 nt, Artificial Sequence
  Description of Artificial Sequence: Synthetic oligonucleotide
  Antisense strand to SEQ ID NO: 541597
ucugaccuaaccuaucuuu

SEQ ID NO: 541599 - RNA, 19 nt, Artificial Sequence
  Description of Artificial Sequence: Synthetic oligonucleotide
  Sense strand starting at position 415 of SEQ ID NO: 318164
aggucagacuggucccaaa

SEQ ID NO: 541600 - RNA, 19 nt, Artificial Sequence
  Description of Artificial Sequence: Synthetic oligonucleotide
  Antisense strand to SEQ ID NO: 541599
uuugggaccagucugaccu

SEQ ID NO: 541601 - RNA, 19 nt, Artificial Sequence
  Description of Artificial Sequence: Synthetic oligonucleotide
  Sense strand starting at position 481 of SEQ ID NO: 318164
uuuccagcauuucgagaau

SEQ ID NO: 541602 - RNA, 19 nt, Artificial Sequence
  Description of Artificial Sequence: Synthetic oligonucleotide
  Antisense strand to SEQ ID NO: 541601
auucucgaaaugcuggaaa

SEQ ID NO: 541603 - RNA, 19 nt, Artificial Sequence
  Description of Artificial Sequence: Synthetic oligonucleotide
  Sense strand starting at position 521 of SEQ ID NO: 318164
ccuacagacugguuaguua

SEQ ID NO: 541604 - RNA, 19 nt, Artificial Sequence
  Description of Artificial Sequence: Synthetic oligonucleotide
  Antisense strand to SEQ ID NO: 541603
uaacuaaccagucuguagg

SEQ ID NO: 541605 - RNA, 19 nt, Artificial Sequence
  Description of Artificial Sequence: Synthetic oligonucleotide
  Sense strand starting at position 525 of SEQ ID NO: 318164
cagacugguuaguuagcua

SEQ ID NO: 541606 - RNA, 19 nt, Artificial Sequence
  Description of Artificial Sequence: Synthetic oligonucleotide
  Antisense strand to SEQ ID NO: 541605
uagcuaacuaaccagucug

SEQ ID NO: 541607 - RNA, 19 nt, Artificial Sequence
  Description of Artificial Sequence: Synthetic oligonucleotide
  Sense strand starting at position 555 of SEQ ID NO: 318164
ugcaauagcccaggugaga

SEQ ID NO: 541608 - RNA, 19 nt, Artificial Sequence
  Description of Artificial Sequence: Synthetic oligonucleotide
  Antisense strand to SEQ ID NO: 541607
ucucaccugggcuauugca

SEQ ID NO: 541609 - RNA, 19 nt, Artificial Sequence
  Description of Artificial Sequence: Synthetic oligonucleotide
  Sense strand starting at position 785 of SEQ ID NO: 318164
uuuaaacaggccugauaaa

SEQ ID NO: 541610 - RNA, 19 nt, Artificial Sequence
  Description of Artificial Sequence: Synthetic oligonucleotide
  Antisense strand to SEQ ID NO: 541609
uuuaucaggccuguuuaaa

SEQ ID NO: 541611 - RNA, 19 nt, Artificial Sequence
  Description of Artificial Sequence: Synthetic oligonucleotide
  Sense strand starting at position 819 of SEQ ID NO: 318164
ucaacaauauugcaggaau

SEQ ID NO: 541612 - RNA, 19 nt, Artificial Sequence
  Description of Artificial Sequence: Synthetic oligonucleotide
  Antisense strand to SEQ ID NO: 541611
auuccugcaauauuguuga

SEQ ID NO: 541613 - RNA, 19 nt, Artificial Sequence
  Description of Artificial Sequence: Synthetic oligonucleotide
  Sense strand starting at position 938 of SEQ ID NO: 318164
agaggaguuucaguugguc

SEQ ID NO: 541614 - RNA, 19 nt, Artificial Sequence
  Description of Artificial Sequence: Synthetic oligonucleotide
  Antisense strand to SEQ ID NO: 541613
gaccaacugaaacuccucu

SEQ ID NO: 541615 - RNA, 19 nt, Artificial Sequence
  Description of Artificial Sequence: Synthetic oligonucleotide
  Sense strand starting at position 941 of SEQ ID NO: 318164
ggaguuucaguuggucaac

SEQ ID NO: 541616 - RNA, 19 nt, Artificial Sequence
  Description of Artificial Sequence: Synthetic oligonucleotide
  Antisense strand to SEQ ID NO: 541615
guugaccaacugaaacucc

SEQ ID NO: 541617 - RNA, 19 nt, Artificial Sequence
  Description of Artificial Sequence: Synthetic oligonucleotide
  Sense strand starting at position 966 of SEQ ID NO: 318164
ccgacuuauuuccacauga

SEQ ID NO: 541618 - RNA, 19 nt, Artificial Sequence
  Description of Artificial Sequence: Synthetic oligonucleotide
  Antisense strand to SEQ ID NO: 541617
ucauguggaaauaagucgg

SEQ ID NO: 541619 - RNA, 19 nt, Artificial Sequence
  Description of Artificial Sequence: Synthetic oligonucleotide
  Sense strand starting at position 979 of SEQ ID NO: 318164
acaugaaagcccugauccu

SEQ ID NO: 541620 - RNA, 19 nt, Artificial Sequence
  Description of Artificial Sequence: Synthetic oligonucleotide
  Antisense strand to SEQ ID NO: 541619
aggaucagggcuuucaugu

SEQ ID NO: 541621 - RNA, 19 nt, Artificial Sequence
  Description of Artificial Sequence: Synthetic oligonucleotide
  Sense strand starting at position 1004 of SEQ ID NO: 318164
agcacaggaucuuguaaag

SEQ ID NO: 541622 - RNA, 19 nt, Artificial Sequence
  Description of Artificial Sequence: Synthetic oligonucleotide
  Antisense strand to SEQ ID NO: 541621
cuuuacaagauccugugcu

SEQ ID NO: 541623 - RNA, 19 nt, Artificial Sequence
  Description of Artificial Sequence: Synthetic oligonucleotide
  Sense strand starting at position 1099 of SEQ ID NO: 318164
cucgaaugcuagucuauuu

SEQ ID NO: 541624 - RNA, 19 nt, Artificial Sequence
  Description of Artificial Sequence: Synthetic oligonucleotide
  Antisense strand to SEQ ID NO: 541623
aaauagacuagcauucgag

SEQ ID NO: 541625 - RNA, 19 nt, Artificial Sequence
  Description of Artificial Sequence: Synthetic oligonucleotide
  Sense strand starting at position 1104 of SEQ ID NO: 318164
augcuagucuauuucgaau

SEQ ID NO: 541626 - RNA, 19 nt, Artificial Sequence
  Description of Artificial Sequence: Synthetic oligonucleotide
  Antisense strand to SEQ ID NO: 541625
auucgaaauagacuagcau

SEQ ID NO: 541627 - RNA, 19 nt, Artificial Sequence
  Description of Artificial Sequence: Synthetic oligonucleotide
  Sense strand starting at position 1106 of SEQ ID NO: 318164
gcuagucuauuucgaauaa

SEQ ID NO: 541628 - RNA, 19 nt, Artificial Sequence
  Description of Artificial Sequence: Synthetic oligonucleotide
  Antisense strand to SEQ ID NO: 541627
uuauucgaaauagacuagc

SEQ ID NO: 541629 - RNA, 19 nt, Artificial Sequence
  Description of Artificial Sequence: Synthetic oligonucleotide
  Sense strand starting at position 1107 of SEQ ID NO: 318164
cuagucuauuucgaauaaa

SEQ ID NO: 541630 - RNA, 19 nt, Artificial Sequence
  Description of Artificial Sequence: Synthetic oligonucleotide
  Antisense strand to SEQ ID NO: 541629
uuuauucgaaauagacuag

SEQ ID NO: 541631 - RNA, 19 nt, Artificial Sequence
  Description of Artificial Sequence: Synthetic oligonucleotide
  Sense strand starting at position 1139 of SEQ ID NO: 318164
cggaaucaagucuggaaga

SEQ ID NO: 541632 - RNA, 19 nt, Artificial Sequence
  Description of Artificial Sequence: Synthetic oligonucleotide
  Antisense strand to SEQ ID NO: 541631
ucuuccagacuugauuccg

SEQ ID NO: 541633 - RNA, 19 nt, Artificial Sequence
  Description of Artificial Sequence: Synthetic oligonucleotide
  Sense strand starting at position 1140 of SEQ ID NO: 318164
ggaaucaagucuggaagaa

SEQ ID NO: 541634 - RNA, 19 nt, Artificial Sequence
  Description of Artificial Sequence: Synthetic oligonucleotide
  Antisense strand to SEQ ID NO: 541633
uucuuccagacuugauucc

SEQ ID NO: 541635 - RNA, 19 nt, Artificial Sequence
  Description of Artificial Sequence: Synthetic oligonucleotide
  Sense strand starting at position 2158 of SEQ ID NO: 318164
gcgccagagcgguauuuaa

SEQ ID NO: 541636 - RNA, 19 nt, Artificial Sequence
  Description of Artificial Sequence: Synthetic oligonucleotide
  Antisense strand to SEQ ID NO: 541635
uuaaauaccgcucuggcgc

SEQ ID NO: 541637 - RNA, 19 nt, Artificial Sequence
  Description of Artificial Sequence: Synthetic oligonucleotide
  Sense strand starting at position 2275 of SEQ ID NO: 318164
gcuauugguuuccugcaca

SEQ ID NO: 541638 - RNA, 19 nt, Artificial Sequence
  Description of Artificial Sequence: Synthetic oligonucleotide
  Antisense strand to SEQ ID NO: 541637
ugugcaggaaaccaauagc

SEQ ID NO: 541639 - RNA, 19 nt, Artificial Sequence
  Description of Artificial Sequence: Synthetic oligonucleotide
  Sense strand starting at position 2278 of SEQ ID NO: 318164
auugguuuccugcacagca

SEQ ID NO: 541640 - RNA, 19 nt, Artificial Sequence
  Description of Artificial Sequence: Synthetic oligonucleotide
  Antisense strand to SEQ ID NO: 541639
ugcugugcaggaaaccaau

SEQ ID NO: 541641 - RNA, 19 nt, Artificial Sequence
  Description of Artificial Sequence: Synthetic oligonucleotide
  Sense strand starting at position 2426 of SEQ ID NO: 318164
uuucgacuuugauaaacuc

SEQ ID NO: 541642 - RNA, 19 nt, Artificial Sequence
  Description of Artificial Sequence: Synthetic oligonucleotide
  Antisense strand to SEQ ID NO: 541641
gaguuuaucaaagucgaaa

SEQ ID NO: 541643 - RNA, 19 nt, Artificial Sequence
  Description of Artificial Sequence: Synthetic oligonucleotide
  Sense strand starting at position 2483 of SEQ ID NO: 318164
ugaccuuauuccuuguauc

SEQ ID NO: 541644 - RNA, 19 nt, Artificial Sequence
  Description of Artificial Sequence: Synthetic oligonucleotide
  Antisense strand to SEQ ID NO: 541643
gauacaaggaauaagguca

SEQ ID NO: 541645 - RNA, 19 nt, Artificial Sequence
  Description of Artificial Sequence: Synthetic oligonucleotide
  Sense strand starting at position 2514 of SEQ ID NO: 318164
uggucagaaucgucuagug

SEQ ID NO: 541646 - RNA, 19 nt, Artificial Sequence
  Description of Artificial Sequence: Synthetic oligonucleotide
  Antisense strand to SEQ ID NO: 541645
cacuagacgauucugacca

SEQ ID NO: 541647 - RNA, 19 nt, Artificial Sequence
  Description of Artificial Sequence: Synthetic oligonucleotide
  Sense strand starting at position 2516 of SEQ ID NO: 318164
gucagaaucgucuagugag

SEQ ID NO: 541648 - RNA, 19 nt, Artificial Sequence
  Description of Artificial Sequence: Synthetic oligonucleotide
  Antisense strand to SEQ ID NO: 541647
cucacuagacgauucugac

SEQ ID NO: 541649 - RNA, 19 nt, Artificial Sequence
  Description of Artificial Sequence: Synthetic oligonucleotide
  Sense strand starting at position 2524 of SEQ ID NO: 318164
cgucuagugagcugguagu

SEQ ID NO: 541650 - RNA, 19 nt, Artificial Sequence
  Description of Artificial Sequence: Synthetic oligonucleotide
  Antisense strand to SEQ ID NO: 541649
acuaccagcucacuagacg

SEQ ID NO: 541651 - RNA, 19 nt, Artificial Sequence
  Description of Artificial Sequence: Synthetic oligonucleotide
  Sense strand starting at position 2535 of SEQ ID NO: 318164
cugguaguuuccucuugca

SEQ ID NO: 541652 - RNA, 19 nt, Artificial Sequence
  Description of Artificial Sequence: Synthetic oligonucleotide
  Antisense strand to SEQ ID NO: 541651
ugcaagaggaaacuaccag

SEQ ID NO: 541653 - RNA, 19 nt, Artificial Sequence
  Description of Artificial Sequence: Synthetic oligonucleotide
  Sense strand starting at position 2557 of SEQ ID NO: 318164
uuccgaaucacugguaguu

SEQ ID NO: 541654 - RNA, 19 nt, Artificial Sequence
  Description of Artificial Sequence: Synthetic oligonucleotide
  Antisense strand to SEQ ID NO: 541653
aacuaccagugauucggaa

SEQ ID NO: 541655 - RNA, 19 nt, Artificial Sequence
  Description of Artificial Sequence: Synthetic oligonucleotide
  Sense strand starting at position 2643 of SEQ ID NO: 318164
uccagaagaugugagcaaa

SEQ ID NO: 541656 - RNA, 19 nt, Artificial Sequence
  Description of Artificial Sequence: Synthetic oligonucleotide
  Antisense strand to SEQ ID NO: 541655
uuugcucacaucuucugga

SEQ ID NO: 541657 - RNA, 19 nt, Artificial Sequence
  Description of Artificial Sequence: Synthetic oligonucleotide
  Sense strand starting at position 3046 of SEQ ID NO: 318164
ggagcaaucaaacaguguu

SEQ ID NO: 541658 - RNA, 19 nt, Artificial Sequence
  Description of Artificial Sequence: Synthetic oligonucleotide
  Antisense strand to SEQ ID NO: 541657
aacacuguuugauugcucc

SEQ ID NO: 541659 - RNA, 19 nt, Artificial Sequence
  Description of Artificial Sequence: Synthetic oligonucleotide
  Sense strand starting at position 3049 of SEQ ID NO: 318164
gcaaucaaacaguguuagu

SEQ ID NO: 541660 - RNA, 19 nt, Artificial Sequence
  Description of Artificial Sequence: Synthetic oligonucleotide
  Antisense strand to SEQ ID NO: 541659
acuaacacuguuugauugc

SEQ ID NO: 541661 - RNA, 19 nt, Artificial Sequence
  Description of Artificial Sequence: Synthetic oligonucleotide
  Sense strand starting at position 3108 of SEQ ID NO: 318164
ucuagauaugggcacucua

SEQ ID NO: 541662 - RNA, 19 nt, Artificial Sequence
  Description of Artificial Sequence: Synthetic oligonucleotide
  Antisense strand to SEQ ID NO: 541661
uagagugcccauaucuaga

SEQ ID NO: 541663 - RNA, 19 nt, Artificial Sequence
  Description of Artificial Sequence: Synthetic oligonucleotide
  Sense strand starting at position 3116 of SEQ ID NO: 318164
ugggcacucuaauugcuaa

SEQ ID NO: 541664 - RNA, 19 nt, Artificial Sequence
  Description of Artificial Sequence: Synthetic oligonucleotide
  Antisense strand to SEQ ID NO: 541663
uuagcaauuagagugccca

SEQ ID NO: 541665 - RNA, 19 nt, Artificial Sequence
  Description of Artificial Sequence: Synthetic oligonucleotide
  Sense strand starting at position 3157 of SEQ ID NO: 318164
gaggcugcacauugagaua

SEQ ID NO: 541666 - RNA, 19 nt, Artificial Sequence
  Description of Artificial Sequence: Synthetic oligonucleotide
  Antisense strand to SEQ ID NO: 541665
uaucucaaugugcagccuc

SEQ ID NO: 541667 - RNA, 19 nt, Artificial Sequence
  Description of Artificial Sequence: Synthetic oligonucleotide
  Sense strand starting at position 168 of SEQ ID NO: 318165
agcuuucggccggaguaua

SEQ ID NO: 541668 - RNA, 19 nt, Artificial Sequence
  Description of Artificial Sequence: Synthetic oligonucleotide
  Antisense strand to SEQ ID NO: 541667
uauacuccggccgaaagcu

SEQ ID NO: 541669 - RNA, 19 nt, Artificial Sequence
  Description of Artificial Sequence: Synthetic oligonucleotide
  Sense strand starting at position 169 of SEQ ID NO: 318165
gcuuucggccggaguauaa

SEQ ID NO: 541670 - RNA, 19 nt, Artificial Sequence
  Description of Artificial Sequence: Synthetic oligonucleotide
  Antisense strand to SEQ ID NO: 541669
uuauacuccggccgaaagc

SEQ ID NO: 541671 - RNA, 19 nt, Artificial Sequence
  Description of Artificial Sequence: Synthetic oligonucleotide
  Sense strand starting at position 233 of SEQ ID NO: 318165
agauguaauagcugaagaa

SEQ ID NO: 541672 - RNA, 19 nt, Artificial Sequence
  Description of Artificial Sequence: Synthetic oligonucleotide
  Antisense strand to SEQ ID NO: 541671
uucuucagcuauuacaucu

SEQ ID NO: 541673 - RNA, 19 nt, Artificial Sequence
  Description of Artificial Sequence: Synthetic oligonucleotide
  Sense strand starting at position 423 of SEQ ID NO: 318165
ggcuuaacccugugagagc

SEQ ID NO: 541674 - RNA, 19 nt, Artificial Sequence
  Description of Artificial Sequence: Synthetic oligonucleotide
  Antisense strand to SEQ ID NO: 541673
gcucucacaggguuaagcc

SEQ ID NO: 541675 - RNA, 19 nt, Artificial Sequence
  Description of Artificial Sequence: Synthetic oligonucleotide
  Sense strand starting at position 568 of SEQ ID NO: 318165
ccacuuuccugagcgggau

SEQ ID NO: 541676 - RNA, 19 nt, Artificial Sequence
  Description of Artificial Sequence: Synthetic oligonucleotide
  Antisense strand to SEQ ID NO: 541675
aucccgcucaggaaagugg

SEQ ID NO: 541677 - RNA, 19 nt, Artificial Sequence
  Description of Artificial Sequence: Synthetic oligonucleotide
  Sense strand starting at position 805 of SEQ ID NO: 318165
aggugcuuaccugagggaa

SEQ ID NO: 541678 - RNA, 19 nt, Artificial Sequence
  Description of Artificial Sequence: Synthetic oligonucleotide
  Antisense strand to SEQ ID NO: 541677
uucccucagguaagcaccu

SEQ ID NO: 541679 - RNA, 19 nt, Artificial Sequence
  Description of Artificial Sequence: Synthetic oligonucleotide
  Sense strand starting at position 2236 of SEQ ID NO: 318165
cagguuuccuauccuagga

SEQ ID NO: 541680 - RNA, 19 nt, Artificial Sequence
  Description of Artificial Sequence: Synthetic oligonucleotide
  Antisense strand to SEQ ID NO: 541679
uccuaggauaggaaaccug

SEQ ID NO: 541681 - RNA, 19 nt, Artificial Sequence
  Description of Artificial Sequence: Synthetic oligonucleotide
  Sense strand starting at position 2431 of SEQ ID NO: 318165
cuacgaaauccaugagugu

SEQ ID NO: 541682 - RNA, 19 nt, Artificial Sequence
  Description of Artificial Sequence: Synthetic oligonucleotide
  Antisense strand to SEQ ID NO: 541681
acacucauggauuucguag

SEQ ID NO: 541683 - RNA, 19 nt, Artificial Sequence
  Description of Artificial Sequence: Synthetic oligonucleotide
  Sense strand starting at position 2432 of SEQ ID NO: 318165
uacgaaauccaugagugua

SEQ ID NO: 541684 - RNA, 19 nt, Artificial Sequence
  Description of Artificial Sequence: Synthetic oligonucleotide
  Antisense strand to SEQ ID NO: 541683
uacacucauggauuucgua

SEQ ID NO: 541685 - RNA, 19 nt, Artificial Sequence
  Description of Artificial Sequence: Synthetic oligonucleotide
  Sense strand starting at position 2434 of SEQ ID NO: 318165
cgaaauccaugaguguaau

SEQ ID NO: 541686 - RNA, 19 nt, Artificial Sequence
  Description of Artificial Sequence: Synthetic oligonucleotide
  Antisense strand to SEQ ID NO: 541685
auuacacucauggauuucg

SEQ ID NO: 541687 - RNA, 19 nt, Artificial Sequence
  Description of Artificial Sequence: Synthetic oligonucleotide
  Sense strand starting at position 2435 of SEQ ID NO: 318165
gaaauccaugaguguaauc

SEQ ID NO: 541688 - RNA, 19 nt, Artificial Sequence
  Description of Artificial Sequence: Synthetic oligonucleotide
  Antisense strand to SEQ ID NO: 541687
gauuacacucauggauuuc

SEQ ID NO: 541689 - RNA, 19 nt, Artificial Sequence
  Description of Artificial Sequence: Synthetic oligonucleotide
  Sense strand starting at position 2440 of SEQ ID NO: 318165
ccaugaguguaaucugaga

SEQ ID NO: 541690 - RNA, 19 nt, Artificial Sequence
  Description of Artificial Sequence: Synthetic oligonucleotide
  Antisense strand to SEQ ID NO: 541689
ucucagauuacacucaugg

SEQ ID NO: 541691 - RNA, 19 nt, Artificial Sequence
  Description of Artificial Sequence: Synthetic oligonucleotide
  Sense strand starting at position 2631 of SEQ ID NO: 318165
gcuuccugauuucugugua

SEQ ID NO: 541692 - RNA, 19 nt, Artificial Sequence
  Description of Artificial Sequence: Synthetic oligonucleotide
  Antisense strand to SEQ ID NO: 541691
uacacagaaaucaggaagc

SEQ ID NO: 541693 - RNA, 19 nt, Artificial Sequence
  Description of Artificial Sequence: Synthetic oligonucleotide
  Sense strand starting at position 2694 of SEQ ID NO: 318165
uccuauagugcucaguaac

SEQ ID NO: 541694 - RNA, 19 nt, Artificial Sequence
  Description of Artificial Sequence: Synthetic oligonucleotide
  Antisense strand to SEQ ID NO: 541693
guuacugagcacuauagga

SEQ ID NO: 541695 - RNA, 19 nt, Artificial Sequence
  Description of Artificial Sequence: Synthetic oligonucleotide
  Sense strand starting at position 2697 of SEQ ID NO: 318165
uauagugcucaguaacuag

SEQ ID NO: 541696 - RNA, 19 nt, Artificial Sequence
  Description of Artificial Sequence: Synthetic oligonucleotide
  Antisense strand to SEQ ID NO: 541695
cuaguuacugagcacuaua

SEQ ID NO: 541697 - RNA, 19 nt, Artificial Sequence
  Description of Artificial Sequence: Synthetic oligonucleotide
  Sense strand starting at position 2743 of SEQ ID NO: 318165
ggagcuuuguagaggaggu

SEQ ID NO: 541698 - RNA, 19 nt, Artificial Sequence
  Description of Artificial Sequence: Synthetic oligonucleotide
  Antisense strand to SEQ ID NO: 541697
accuccucuacaaagcucc

SEQ ID NO: 541699 - RNA, 19 nt, Artificial Sequence
  Description of Artificial Sequence: Synthetic oligonucleotide
  Sense strand starting at position 2860 of SEQ ID NO: 318165
uggugacuucucugccauu

SEQ ID NO: 541700 - RNA, 19 nt, Artificial Sequence
  Description of Artificial Sequence: Synthetic oligonucleotide
  Antisense strand to SEQ ID NO: 541699
aauggcagagaagucacca

SEQ ID NO: 541701 - RNA, 19 nt, Artificial Sequence
  Description of Artificial Sequence: Synthetic oligonucleotide
  Sense strand starting at position 2915 of SEQ ID NO: 318165
gaucuuagcccugggagga

SEQ ID NO: 541702 - RNA, 19 nt, Artificial Sequence
  Description of Artificial Sequence: Synthetic oligonucleotide
  Antisense strand to SEQ ID NO: 541701
uccucccagggcuaagauc

SEQ ID NO: 541703 - RNA, 19 nt, Artificial Sequence
  Description of Artificial Sequence: Synthetic oligonucleotide
  Sense strand starting at position 2916 of SEQ ID NO: 318165
aucuuagcccugggaggaa

SEQ ID NO: 541704 - RNA, 19 nt, Artificial Sequence
  Description of Artificial Sequence: Synthetic oligonucleotide
  Antisense strand to SEQ ID NO: 541703
uuccucccagggcuaagau

SEQ ID NO: 541705 - RNA, 19 nt, Artificial Sequence
  Description of Artificial Sequence: Synthetic oligonucleotide
  Sense strand starting at position 2939 of SEQ ID NO: 318165
ggagguucuucauugggca

SEQ ID NO: 541706 - RNA, 19 nt, Artificial Sequence
  Description of Artificial Sequence: Synthetic oligonucleotide
  Antisense strand to SEQ ID NO: 541705
ugcccaaugaagaaccucc

SEQ ID NO: 541707 - RNA, 19 nt, Artificial Sequence
  Description of Artificial Sequence: Synthetic oligonucleotide
  Sense strand starting at position 2970 of SEQ ID NO: 318165
acccaagaguuaguuauaa

SEQ ID NO: 541708 - RNA, 19 nt, Artificial Sequence
  Description of Artificial Sequence: Synthetic oligonucleotide
  Antisense strand to SEQ ID NO: 541707
uuauaacuaacucuugggu

SEQ ID NO: 541709 - RNA, 19 nt, Artificial Sequence
  Description of Artificial Sequence: Synthetic oligonucleotide
  Sense strand starting at position 2988 of SEQ ID NO: 318165
agguuagcuccuuauagcu

SEQ ID NO: 541710 - RNA, 19 nt, Artificial Sequence
  Description of Artificial Sequence: Synthetic oligonucleotide
  Antisense strand to SEQ ID NO: 541709
agcuauaaggagcuaaccu

SEQ ID NO: 541711 - RNA, 19 nt, Artificial Sequence
  Description of Artificial Sequence: Synthetic oligonucleotide
  Sense strand starting at position 3010 of SEQ ID NO: 318165
guugcuauauucuuuaaag

SEQ ID NO: 541712 - RNA, 19 nt, Artificial Sequence
  Description of Artificial Sequence: Synthetic oligonucleotide
  Antisense strand to SEQ ID NO: 541711
cuuuaaagaauauagcaac

SEQ ID NO: 541713 - RNA, 19 nt, Artificial Sequence
  Description of Artificial Sequence: Synthetic oligonucleotide
  Sense strand starting at position 3134 of SEQ ID NO: 318165
cugcaaagaugggauuaaa

SEQ ID NO: 541714 - RNA, 19 nt, Artificial Sequence
  Description of Artificial Sequence: Synthetic oligonucleotide
  Antisense strand to SEQ ID NO: 541713
uuuaaucccaucuuugcag

SEQ ID NO: 541715 - RNA, 19 nt, Artificial Sequence
  Description of Artificial Sequence: Synthetic oligonucleotide
  Sense strand starting at position 3146 of SEQ ID NO: 318165
gauuaaaggucaguuugau

SEQ ID NO: 541716 - RNA, 19 nt, Artificial Sequence
  Description of Artificial Sequence: Synthetic oligonucleotide
  Antisense strand to SEQ ID NO: 541715
aucaaacugaccuuuaauc

SEQ ID NO: 541717 - RNA, 19 nt, Artificial Sequence
  Description of Artificial Sequence: Synthetic oligonucleotide
  Sense strand starting at position 3152 of SEQ ID NO: 318165
aggucaguuugauugaggu

SEQ ID NO: 541718 - RNA, 19 nt, Artificial Sequence
  Description of Artificial Sequence: Synthetic oligonucleotide
  Antisense strand to SEQ ID NO: 541717
accucaaucaaacugaccu

SEQ ID NO: 541719 - RNA, 19 nt, Artificial Sequence
  Description of Artificial Sequence: Synthetic oligonucleotide
  Sense strand starting at position 3154 of SEQ ID NO: 318165
gucaguuugauugagguuu

SEQ ID NO: 541720 - RNA, 19 nt, Artificial Sequence
  Description of Artificial Sequence: Synthetic oligonucleotide
  Antisense strand to SEQ ID NO: 541719
aaaccucaaucaaacugac

SEQ ID NO: 541721 - RNA, 19 nt, Artificial Sequence
  Description of Artificial Sequence: Synthetic oligonucleotide
  Sense strand starting at position 3189 of SEQ ID NO: 318165
gccaaagggaaauguaauu

SEQ ID NO: 541722 - RNA, 19 nt, Artificial Sequence
  Description of Artificial Sequence: Synthetic oligonucleotide
  Antisense strand to SEQ ID NO: 541721
aauuacauuucccuuuggc

SEQ ID NO: 541723 - RNA, 19 nt, Artificial Sequence
  Description of Artificial Sequence: Synthetic oligonucleotide
  Sense strand starting at position 3233 of SEQ ID NO: 318165
agcaauuaccugugguuga

SEQ ID NO: 541724 - RNA, 19 nt, Artificial Sequence
  Description of Artificial Sequence: Synthetic oligonucleotide
  Antisense strand to SEQ ID NO: 541723
ucaaccacagguaauugcu

SEQ ID NO: 541725 - RNA, 19 nt, Artificial Sequence
  Description of Artificial Sequence: Synthetic oligonucleotide
  Sense strand starting at position 3240 of SEQ ID NO: 318165
accugugguugauccugau

SEQ ID NO: 541726 - RNA, 19 nt, Artificial Sequence
  Description of Artificial Sequence: Synthetic oligonucleotide
  Antisense strand to SEQ ID NO: 541725
aucaggaucaaccacaggu

SEQ ID NO: 541727 - RNA, 19 nt, Artificial Sequence
  Description of Artificial Sequence: Synthetic oligonucleotide
  Sense strand starting at position 3244 of SEQ ID NO: 318165
gugguugauccugaugaag

SEQ ID NO: 541728 - RNA, 19 nt, Artificial Sequence
  Description of Artificial Sequence: Synthetic oligonucleotide
  Antisense strand to SEQ ID NO: 541727
cuucaucaggaucaaccac

SEQ ID NO: 541729 - RNA, 19 nt, Artificial Sequence
  Description of Artificial Sequence: Synthetic oligonucleotide
  Sense strand starting at position 3306 of SEQ ID NO: 318165
acuugacugcuaugguuau

SEQ ID NO: 541730 - RNA, 19 nt, Artificial Sequence
  Description of Artificial Sequence: Synthetic oligonucleotide
  Antisense strand to SEQ ID NO: 541729
auaaccauagcagucaagu

SEQ ID NO: 541731 - RNA, 19 nt, Artificial Sequence
  Description of Artificial Sequence: Synthetic oligonucleotide
  Sense strand starting at position 3310 of SEQ ID NO: 318165
gacugcuaugguuauaaag

SEQ ID NO: 541732 - RNA, 19 nt, Artificial Sequence
  Description of Artificial Sequence: Synthetic oligonucleotide
  Antisense strand to SEQ ID NO: 541731
cuuuauaaccauagcaguc

SEQ ID NO: 541733 - RNA, 19 nt, Artificial Sequence
  Description of Artificial Sequence: Synthetic oligonucleotide
  Sense strand starting at position 3419 of SEQ ID NO: 318165
agaguuaugguaugagaac

SEQ ID NO: 541734 - RNA, 19 nt, Artificial Sequence
  Description of Artificial Sequence: Synthetic oligonucleotide
  Antisense strand to SEQ ID NO: 541733
guucucauaccauaacucu

SEQ ID NO: 541735 - RNA, 19 nt, Artificial Sequence
  Description of Artificial Sequence: Synthetic oligonucleotide
  Sense strand starting at position 3461 of SEQ ID NO: 318165
aaagcucugguuuauugua

SEQ ID NO: 541736 - RNA, 19 nt, Artificial Sequence
  Description of Artificial Sequence: Synthetic oligonucleotide
  Antisense strand to SEQ ID NO: 541735
uacaauaaaccagagcuuu

SEQ ID NO: 541737 - RNA, 19 nt, Artificial Sequence
  Description of Artificial Sequence: Synthetic oligonucleotide
  Sense strand starting at position 3707 of SEQ ID NO: 318165
agagacuagccuugcuuga

SEQ ID NO: 541738 - RNA, 19 nt, Artificial Sequence
  Description of Artificial Sequence: Synthetic oligonucleotide
  Antisense strand to SEQ ID NO: 541737
ucaagcaaggcuagucucu

SEQ ID NO: 541739 - RNA, 19 nt, Artificial Sequence
  Description of Artificial Sequence: Synthetic oligonucleotide
  Sense strand starting at position 3709 of SEQ ID NO: 318165
agacuagccuugcuugaaa

SEQ ID NO: 541740 - RNA, 19 nt, Artificial Sequence
  Description of Artificial Sequence: Synthetic oligonucleotide
  Antisense strand to SEQ ID NO: 541739
uuucaagcaaggcuagucu

SEQ ID NO: 541741 - RNA, 19 nt, Artificial Sequence
  Description of Artificial Sequence: Synthetic oligonucleotide
  Sense strand starting at position 3871 of SEQ ID NO: 318165
aucagacugccuuggcuua

SEQ ID NO: 541742 - RNA, 19 nt, Artificial Sequence
  Description of Artificial Sequence: Synthetic oligonucleotide
  Antisense strand to SEQ ID NO: 541741
uaagccaaggcagucugau

SEQ ID NO: 541743 - RNA, 19 nt, Artificial Sequence
  Description of Artificial Sequence: Synthetic oligonucleotide
  Sense strand starting at position 3922 of SEQ ID NO: 318165
guugaaauagauuauugcu

SEQ ID NO: 541744 - RNA, 19 nt, Artificial Sequence
  Description of Artificial Sequence: Synthetic oligonucleotide
  Antisense strand to SEQ ID NO: 541743
agcaauaaucuauuucaac

SEQ ID NO: 541745 - RNA, 19 nt, Artificial Sequence
  Description of Artificial Sequence: Synthetic oligonucleotide
  Sense strand starting at position 3938 of SEQ ID NO: 318165
gcuugauauuuauaacagg

SEQ ID NO: 541746 - RNA, 19 nt, Artificial Sequence
  Description of Artificial Sequence: Synthetic oligonucleotide
  Antisense strand to SEQ ID NO: 541745
ccuguuauaaauaucaagc

SEQ ID NO: 541747 - RNA, 19 nt, Artificial Sequence
  Description of Artificial Sequence: Synthetic oligonucleotide
  Sense strand starting at position 329 of SEQ ID NO: 318166
cggugucucccggagaaac

SEQ ID NO: 541748 - RNA, 19 nt, Artificial Sequence
  Description of Artificial Sequence: Synthetic oligonucleotide
  Antisense strand to SEQ ID NO: 541747
guuucuccgggagacaccg

SEQ ID NO: 541749 - RNA, 19 nt, Artificial Sequence
  Description of Artificial Sequence: Synthetic oligonucleotide
  Sense strand starting at position 882 of SEQ ID NO: 318166
gucccauuguccuuucuga

SEQ ID NO: 541750 - RNA, 19 nt, Artificial Sequence
  Description of Artificial Sequence: Synthetic oligonucleotide
  Antisense strand to SEQ ID NO: 541749
ucagaaaggacaaugggac

SEQ ID NO: 541751 - RNA, 19 nt, Artificial Sequence
  Description of Artificial Sequence: Synthetic oligonucleotide
  Sense strand starting at position 1022 of SEQ ID NO: 318166
cuaggacuagccuagucau

SEQ ID NO: 541752 - RNA, 19 nt, Artificial Sequence
  Description of Artificial Sequence: Synthetic oligonucleotide
  Antisense strand to SEQ ID NO: 541751
augacuaggcuaguccuag

SEQ ID NO: 541753 - RNA, 19 nt, Artificial Sequence
  Description of Artificial Sequence: Synthetic oligonucleotide
  Sense strand starting at position 1025 of SEQ ID NO: 318166
ggacuagccuagucauucu

SEQ ID NO: 541754 - RNA, 19 nt, Artificial Sequence
  Description of Artificial Sequence: Synthetic oligonucleotide
  Antisense strand to SEQ ID NO: 541753
agaaugacuaggcuagucc

SEQ ID NO: 541755 - RNA, 19 nt, Artificial Sequence
  Description of Artificial Sequence: Synthetic oligonucleotide
  Sense strand starting at position 1052 of SEQ ID NO: 318166
aaaggaucgggagguuuga

SEQ ID NO: 541756 - RNA, 19 nt, Artificial Sequence
  Description of Artificial Sequence: Synthetic oligonucleotide
  Antisense strand to SEQ ID NO: 541755
ucaaaccucccgauccuuu

SEQ ID NO: 541757 - RNA, 19 nt, Artificial Sequence
  Description of Artificial Sequence: Synthetic oligonucleotide
  Sense strand starting at position 1103 of SEQ ID NO: 318166
agccguggugaggaugaau

SEQ ID NO: 541758 - RNA, 19 nt, Artificial Sequence
  Description of Artificial Sequence: Synthetic oligonucleotide
  Antisense strand to SEQ ID NO: 541757
auucauccucaccacggcu

SEQ ID NO: 541759 - RNA, 19 nt, Artificial Sequence
  Description of Artificial Sequence: Synthetic oligonucleotide
  Sense strand starting at position 1360 of SEQ ID NO: 318166
cccucaagguuauuggaga

SEQ ID NO: 541760 - RNA, 19 nt, Artificial Sequence
  Description of Artificial Sequence: Synthetic oligonucleotide
  Antisense strand to SEQ ID NO: 541759
ucuccaauaaccuugaggg

SEQ ID NO: 541761 - RNA, 19 nt, Artificial Sequence
  Description of Artificial Sequence: Synthetic oligonucleotide
  Sense strand starting at position 1388 of SEQ ID NO: 318166
ugggucucauaucuaauaa

SEQ ID NO: 541762 - RNA, 19 nt, Artificial Sequence
  Description of Artificial Sequence: Synthetic oligonucleotide
  Antisense strand to SEQ ID NO: 541761
uuauuagauaugagaccca

SEQ ID NO: 541763 - RNA, 19 nt, Artificial Sequence
  Description of Artificial Sequence: Synthetic oligonucleotide
  Sense strand starting at position 2099 of SEQ ID NO: 318166
ugaugucaucugcagcaaa

SEQ ID NO: 541764 - RNA, 19 nt, Artificial Sequence
  Description of Artificial Sequence: Synthetic oligonucleotide
  Antisense strand to SEQ ID NO: 541763
uuugcugcagaugacauca

SEQ ID NO: 541765 - RNA, 19 nt, Artificial Sequence
  Description of Artificial Sequence: Synthetic oligonucleotide
  Sense strand starting at position 2102 of SEQ ID NO: 318166
ugucaucugcagcaaauca

SEQ ID NO: 541766 - RNA, 19 nt, Artificial Sequence
  Description of Artificial Sequence: Synthetic oligonucleotide
  Antisense strand to SEQ ID NO: 541765
ugauuugcugcagaugaca

SEQ ID NO: 541767 - RNA, 19 nt, Artificial Sequence
  Description of Artificial Sequence: Synthetic oligonucleotide
  Sense strand starting at position 2298 of SEQ ID NO: 318166
ccugucugugcaugggaau

SEQ ID NO: 541768 - RNA, 19 nt, Artificial Sequence
  Description of Artificial Sequence: Synthetic oligonucleotide
  Antisense strand to SEQ ID NO: 541767
auucccaugcacagacagg

SEQ ID NO: 541769 - RNA, 19 nt, Artificial Sequence
  Description of Artificial Sequence: Synthetic oligonucleotide
  Sense strand starting at position 2353 of SEQ ID NO: 318166
ucuuguuggaguugcacua

SEQ ID NO: 541770 - RNA, 19 nt, Artificial Sequence
  Description of Artificial Sequence: Synthetic oligonucleotide
  Antisense strand to SEQ ID NO: 541769
uagugcaacuccaacaaga

SEQ ID NO: 541771 - RNA, 19 nt, Artificial Sequence
  Description of Artificial Sequence: Synthetic oligonucleotide
  Sense strand starting at position 2514 of SEQ ID NO: 318166
agacgaauuuacugauauu

SEQ ID NO: 541772 - RNA, 19 nt, Artificial Sequence
  Description of Artificial Sequence: Synthetic oligonucleotide
  Antisense strand to SEQ ID NO: 541771
aauaucaguaaauucgucu

SEQ ID NO: 541773 - RNA, 19 nt, Artificial Sequence
  Description of Artificial Sequence: Synthetic oligonucleotide
  Sense strand starting at position 2610 of SEQ ID NO: 318166
cuuggauucuacucuggca

SEQ ID NO: 541774 - RNA, 19 nt, Artificial Sequence
  Description of Artificial Sequence: Synthetic oligonucleotide
  Antisense strand to SEQ ID NO: 541773
ugccagaguagaauccaag

SEQ ID NO: 541775 - RNA, 19 nt, Artificial Sequence
  Description of Artificial Sequence: Synthetic oligonucleotide
  Sense strand starting at position 2656 of SEQ ID NO: 318166
uguggugcucaugggaaau

SEQ ID NO: 541776 - RNA, 19 nt, Artificial Sequence
  Description of Artificial Sequence: Synthetic oligonucleotide
  Antisense strand to SEQ ID NO: 541775
auuucccaugagcaccaca

SEQ ID NO: 541777 - RNA, 19 nt, Artificial Sequence
  Description of Artificial Sequence: Synthetic oligonucleotide
  Sense strand starting at position 2716 of SEQ ID NO: 318166
ccuuaaugugcugaacaga

SEQ ID NO: 541778 - RNA, 19 nt, Artificial Sequence
  Description of Artificial Sequence: Synthetic oligonucleotide
  Antisense strand to SEQ ID NO: 541777
ucuguucagcacauuaagg

SEQ ID NO: 541779 - RNA, 19 nt, Artificial Sequence
  Description of Artificial Sequence: Synthetic oligonucleotide
  Sense strand starting at position 2762 of SEQ ID NO: 318166
agaagauacugucucuacu

SEQ ID NO: 541780 - RNA, 19 nt, Artificial Sequence
  Description of Artificial Sequence: Synthetic oligonucleotide
  Antisense strand to SEQ ID NO: 541779
aguagagacaguaucuucu

SEQ ID NO: 541781 - RNA, 19 nt, Artificial Sequence
  Description of Artificial Sequence: Synthetic oligonucleotide
  Sense strand starting at position 2786 of SEQ ID NO: 318166
ggguuacagugacuauaau

SEQ ID NO: 541782 - RNA, 19 nt, Artificial Sequence
  Description of Artificial Sequence: Synthetic oligonucleotide
  Antisense strand to SEQ ID NO: 541781
auuauagucacuguaaccc

SEQ ID NO: 541783 - RNA, 19 nt, Artificial Sequence
  Description of Artificial Sequence: Synthetic oligonucleotide
  Sense strand starting at position 2838 of SEQ ID NO: 318166
aaauuaccucgugacaaug

SEQ ID NO: 541784 - RNA, 19 nt, Artificial Sequence
  Description of Artificial Sequence: Synthetic oligonucleotide
  Antisense strand to SEQ ID NO: 541783
cauugucacgagguaauuu

SEQ ID NO: 541785 - RNA, 19 nt, Artificial Sequence
  Description of Artificial Sequence: Synthetic oligonucleotide
  Sense strand starting at position 2898 of SEQ ID NO: 318166
cuuuguuuguguuuagaag

SEQ ID NO: 541786 - RNA, 19 nt, Artificial Sequence
  Description of Artificial Sequence: Synthetic oligonucleotide
  Antisense strand to SEQ ID NO: 541785
cuucuaaacacaaacaaag

SEQ ID NO: 541787 - RNA, 19 nt, Artificial Sequence
  Description of Artificial Sequence: Synthetic oligonucleotide
  Sense strand starting at position 2899 of SEQ ID NO: 318166
uuuguuuguguuuagaaga

SEQ ID NO: 541788 - RNA, 19 nt, Artificial Sequence
  Description of Artificial Sequence: Synthetic oligonucleotide
  Antisense strand to SEQ ID NO: 541787
ucuucuaaacacaaacaaa

SEQ ID NO: 541789 - RNA, 19 nt, Artificial Sequence
  Description of Artificial Sequence: Synthetic oligonucleotide
  Sense strand starting at position 3258 of SEQ ID NO: 318166
guuagcugccaugacuuau

SEQ ID NO: 541790 - RNA, 19 nt, Artificial Sequence
  Description of Artificial Sequence: Synthetic oligonucleotide
  Antisense strand to SEQ ID NO: 541789
auaagucauggcagcuaac

SEQ ID NO: 541791 - RNA, 19 nt, Artificial Sequence
  Description of Artificial Sequence: Synthetic oligonucleotide
  Sense strand starting at position 3264 of SEQ ID NO: 318166
ugccaugacuuauugguca

SEQ ID NO: 541792 - RNA, 19 nt, Artificial Sequence
  Description of Artificial Sequence: Synthetic oligonucleotide
  Antisense strand to SEQ ID NO: 541791
ugaccaauaagucauggca

SEQ ID NO: 541793 - RNA, 19 nt, Artificial Sequence
  Description of Artificial Sequence: Synthetic oligonucleotide
  Sense strand starting at position 3268 of SEQ ID NO: 318166
augacuuauuggucaugua

SEQ ID NO: 541794 - RNA, 19 nt, Artificial Sequence
  Description of Artificial Sequence: Synthetic oligonucleotide
  Antisense strand to SEQ ID NO: 541793
uacaugaccaauaagucau

SEQ ID NO: 541795 - RNA, 19 nt, Artificial Sequence
  Description of Artificial Sequence: Synthetic oligonucleotide
  Sense strand starting at position 3269 of SEQ ID NO: 318166
ugacuuauuggucauguac

SEQ ID NO: 541796 - RNA, 19 nt, Artificial Sequence
  Description of Artificial Sequence: Synthetic oligonucleotide
  Antisense strand to SEQ ID NO: 541795
guacaugaccaauaaguca

SEQ ID NO: 541797 - RNA, 19 nt, Artificial Sequence
  Description of Artificial Sequence: Synthetic oligonucleotide
  Sense strand starting at position 3283 of SEQ ID NO: 318166
uguacucuuugcucuuaua

SEQ ID NO: 541798 - RNA, 19 nt, Artificial Sequence
  Description of Artificial Sequence: Synthetic oligonucleotide
  Antisense strand to SEQ ID NO: 541797
uauaagagcaaagaguaca

SEQ ID NO: 541799 - RNA, 19 nt, Artificial Sequence
  Description of Artificial Sequence: Synthetic oligonucleotide
  Sense strand starting at position 3354 of SEQ ID NO: 318166
gguuccauccaacauguca

SEQ ID NO: 541800 - RNA, 19 nt, Artificial Sequence
  Description of Artificial Sequence: Synthetic oligonucleotide
  Antisense strand to SEQ ID NO: 541799
ugacauguuggauggaacc

SEQ ID NO: 541801 - RNA, 19 nt, Artificial Sequence
  Description of Artificial Sequence: Synthetic oligonucleotide
  Sense strand starting at position 3368 of SEQ ID NO: 318166
ugucaaucugaucaaugca

SEQ ID NO: 541802 - RNA, 19 nt, Artificial Sequence
  Description of Artificial Sequence: Synthetic oligonucleotide
  Antisense strand to SEQ ID NO: 541801
ugcauugaucagauugaca

SEQ ID NO: 541803 - RNA, 19 nt, Artificial Sequence
  Description of Artificial Sequence: Synthetic oligonucleotide
  Sense strand starting at position 3454 of SEQ ID NO: 318166
ccaguaauuagaugaagug

SEQ ID NO: 541804 - RNA, 19 nt, Artificial Sequence
  Description of Artificial Sequence: Synthetic oligonucleotide
  Antisense strand to SEQ ID NO: 541803
cacuucaucuaauuacugg

SEQ ID NO: 541805 - RNA, 19 nt, Artificial Sequence
  Description of Artificial Sequence: Synthetic oligonucleotide
  Sense strand starting at position 3455 of SEQ ID NO: 318166
caguaauuagaugaagugu

SEQ ID NO: 541806 - RNA, 19 nt, Artificial Sequence
  Description of Artificial Sequence: Synthetic oligonucleotide
  Antisense strand to SEQ ID NO: 541805
acacuucaucuaauuacug

SEQ ID NO: 541807 - RNA, 19 nt, Artificial Sequence
  Description of Artificial Sequence: Synthetic oligonucleotide
  Sense strand starting at position 3464 of SEQ ID NO: 318166
gaugaaguguuuccaacua

SEQ ID NO: 541808 - RNA, 19 nt, Artificial Sequence
  Description of Artificial Sequence: Synthetic oligonucleotide
  Antisense strand to SEQ ID NO: 541807
uaguuggaaacacuucauc

SEQ ID NO: 541809 - RNA, 19 nt, Artificial Sequence
  Description of Artificial Sequence: Synthetic oligonucleotide
  Sense strand starting at position 3503 of SEQ ID NO: 318166
gaugaaguguuuccagaua

SEQ ID NO: 541810 - RNA, 19 nt, Artificial Sequence
  Description of Artificial Sequence: Synthetic oligonucleotide
  Antisense strand to SEQ ID NO: 541809
uaucuggaaacacuucauc

SEQ ID NO: 541811 - RNA, 19 nt, Artificial Sequence
  Description of Artificial Sequence: Synthetic oligonucleotide
  Sense strand starting at position 3648 of SEQ ID NO: 318166
gccucaucuaguuuguguu

SEQ ID NO: 541812 - RNA, 19 nt, Artificial Sequence
  Description of Artificial Sequence: Synthetic oligonucleotide
  Antisense strand to SEQ ID NO: 541811
aacacaaacuagaugaggc

SEQ ID NO: 541813 - RNA, 19 nt, Artificial Sequence
  Description of Artificial Sequence: Synthetic oligonucleotide
  Sense strand starting at position 3904 of SEQ ID NO: 318166
cucuccuuucuugguugaa

SEQ ID NO: 541814 - RNA, 19 nt, Artificial Sequence
  Description of Artificial Sequence: Synthetic oligonucleotide
  Antisense strand to SEQ ID NO: 541813
uucaaccaagaaaggagag

SEQ ID NO: 541815 - RNA, 19 nt, Artificial Sequence
  Description of Artificial Sequence: Synthetic oligonucleotide
  Sense strand starting at position 3905 of SEQ ID NO: 318166
ucuccuuucuugguugaaa

SEQ ID NO: 541816 - RNA, 19 nt, Artificial Sequence
  Description of Artificial Sequence: Synthetic oligonucleotide
  Antisense strand to SEQ ID NO: 541815
uuucaaccaagaaaggaga

SEQ ID NO: 541817 - RNA, 19 nt, Artificial Sequence
  Description of Artificial Sequence: Synthetic oligonucleotide
  Sense strand starting at position 3935 of SEQ ID NO: 318166
ccaaguguuagagagguau

SEQ ID NO: 541818 - RNA, 19 nt, Artificial Sequence
  Description of Artificial Sequence: Synthetic oligonucleotide
  Antisense strand to SEQ ID NO: 541817
auaccucucuaacacuugg

SEQ ID NO: 541819 - RNA, 19 nt, Artificial Sequence
  Description of Artificial Sequence: Synthetic oligonucleotide
  Sense strand starting at position 3937 of SEQ ID NO: 318166
aaguguuagagagguauua

SEQ ID NO: 541820 - RNA, 19 nt, Artificial Sequence
  Description of Artificial Sequence: Synthetic oligonucleotide
  Antisense strand to SEQ ID NO: 541819
uaauaccucucuaacacuu

SEQ ID NO: 541821 - RNA, 19 nt, Artificial Sequence
  Description of Artificial Sequence: Synthetic oligonucleotide
  Sense strand starting at position 3939 of SEQ ID NO: 318166
guguuagagagguauuaaa

SEQ ID NO: 541822 - RNA, 19 nt, Artificial Sequence
  Description of Artificial Sequence: Synthetic oligonucleotide
  Antisense strand to SEQ ID NO: 541821
uuuaauaccucucuaacac

SEQ ID NO: 541823 - RNA, 19 nt, Artificial Sequence
  Description of Artificial Sequence: Synthetic oligonucleotide
  Sense strand starting at position 3975 of SEQ ID NO: 318166
cugaguuguucuccauguu

SEQ ID NO: 541824 - RNA, 19 nt, Artificial Sequence
  Description of Artificial Sequence: Synthetic oligonucleotide
  Antisense strand to SEQ ID NO: 541823
aacauggagaacaacucag

SEQ ID NO: 541825 - RNA, 19 nt, Artificial Sequence
  Description of Artificial Sequence: Synthetic oligonucleotide
  Sense strand starting at position 3976 of SEQ ID NO: 318166
ugaguuguucuccauguug

SEQ ID NO: 541826 - RNA, 19 nt, Artificial Sequence
  Description of Artificial Sequence: Synthetic oligonucleotide
  Antisense strand to SEQ ID NO: 541825
caacauggagaacaacuca

SEQ ID NO: 541827 - RNA, 19 nt, Artificial Sequence
  Description of Artificial Sequence: Synthetic oligonucleotide
  Sense strand starting at position 122 of SEQ ID NO: 318167
agucaccacugcuuugaaa

SEQ ID NO: 541828 - RNA, 19 nt, Artificial Sequence
  Description of Artificial Sequence: Synthetic oligonucleotide
  Antisense strand to SEQ ID NO: 541827
uuucaaagcaguggugacu

SEQ ID NO: 541829 - RNA, 19 nt, Artificial Sequence
  Description of Artificial Sequence: Synthetic oligonucleotide
  Sense strand starting at position 254 of SEQ ID NO: 318167
ucgcauucccaggaacacu

SEQ ID NO: 541830 - RNA, 19 nt, Artificial Sequence
  Description of Artificial Sequence: Synthetic oligonucleotide
  Antisense strand to SEQ ID NO: 541829
aguguuccugggaaugcga

SEQ ID NO: 541831 - RNA, 19 nt, Artificial Sequence
  Description of Artificial Sequence: Synthetic oligonucleotide
  Sense strand starting at position 777 of SEQ ID NO: 318167
ugucacaugucugcaaaca

SEQ ID NO: 541832 - RNA, 19 nt, Artificial Sequence
  Description of Artificial Sequence: Synthetic oligonucleotide
  Antisense strand to SEQ ID NO: 541831
uguuugcagacaugugaca

SEQ ID NO: 541833 - RNA, 19 nt, Artificial Sequence
  Description of Artificial Sequence: Synthetic oligonucleotide
  Sense strand starting at position 778 of SEQ ID NO: 318167
gucacaugucugcaaacaa

SEQ ID NO: 541834 - RNA, 19 nt, Artificial Sequence
  Description of Artificial Sequence: Synthetic oligonucleotide
  Antisense strand to SEQ ID NO: 541833
uuguuugcagacaugugac

SEQ ID NO: 541835 - RNA, 19 nt, Artificial Sequence
  Description of Artificial Sequence: Synthetic oligonucleotide
  Sense strand starting at position 2248 of SEQ ID NO: 318167
gucccugugcuacagauaa

SEQ ID NO: 541836 - RNA, 19 nt, Artificial Sequence
  Description of Artificial Sequence: Synthetic oligonucleotide
  Antisense strand to SEQ ID NO: 541835
uuaucuguagcacagggac

SEQ ID NO: 541837 - RNA, 19 nt, Artificial Sequence
  Description of Artificial Sequence: Synthetic oligonucleotide
  Sense strand starting at position 2416 of SEQ ID NO: 318167
cuuggcugucuuugggaaa

SEQ ID NO: 541838 - RNA, 19 nt, Artificial Sequence
  Description of Artificial Sequence: Synthetic oligonucleotide
  Antisense strand to SEQ ID NO: 541837
uuucccaaagacagccaag

SEQ ID NO: 541839 - RNA, 19 nt, Artificial Sequence
  Description of Artificial Sequence: Synthetic oligonucleotide
  Sense strand starting at position 2433 of SEQ ID NO: 318167
aaggcagucccguacagaa

SEQ ID NO: 541840 - RNA, 19 nt, Artificial Sequence
  Description of Artificial Sequence: Synthetic oligonucleotide
  Antisense strand to SEQ ID NO: 541839
uucuguacgggacugccuu

SEQ ID NO: 541841 - RNA, 19 nt, Artificial Sequence
  Description of Artificial Sequence: Synthetic oligonucleotide
  Sense strand starting at position 2491 of SEQ ID NO: 318167
caggaagugcucgguaaug

SEQ ID NO: 541842 - RNA, 19 nt, Artificial Sequence
  Description of Artificial Sequence: Synthetic oligonucleotide
  Antisense strand to SEQ ID NO: 541841
cauuaccgagcacuuccug

SEQ ID NO: 541843 - RNA, 19 nt, Artificial Sequence
  Description of Artificial Sequence: Synthetic oligonucleotide
  Sense strand starting at position 2493 of SEQ ID NO: 318167
ggaagugcucgguaauguc

SEQ ID NO: 541844 - RNA, 19 nt, Artificial Sequence
  Description of Artificial Sequence: Synthetic oligonucleotide
  Antisense strand to SEQ ID NO: 541843
gacauuaccgagcacuucc

SEQ ID NO: 541845 - RNA, 19 nt, Artificial Sequence
  Description of Artificial Sequence: Synthetic oligonucleotide
  Sense strand starting at position 2640 of SEQ ID NO: 318167
ugcguugugaguccuccua

SEQ ID NO: 541846 - RNA, 19 nt, Artificial Sequence
  Description of Artificial Sequence: Synthetic oligonucleotide
  Antisense strand to SEQ ID NO: 541845
uaggaggacucacaacgca

SEQ ID NO: 541847 - RNA, 19 nt, Artificial Sequence
  Description of Artificial Sequence: Synthetic oligonucleotide
  Sense strand starting at position 2662 of SEQ ID NO: 318167
ccuggacucuacgugagaa

SEQ ID NO: 541848 - RNA, 19 nt, Artificial Sequence
  Description of Artificial Sequence: Synthetic oligonucleotide
  Antisense strand to SEQ ID NO: 541847
uucucacguagaguccagg

SEQ ID NO: 541849 - RNA, 19 nt, Artificial Sequence
  Description of Artificial Sequence: Synthetic oligonucleotide
  Sense strand starting at position 2663 of SEQ ID NO: 318167
cuggacucuacgugagaag

SEQ ID NO: 541850 - RNA, 19 nt, Artificial Sequence
  Description of Artificial Sequence: Synthetic oligonucleotide
  Antisense strand to SEQ ID NO: 541849
cuucucacguagaguccag

SEQ ID NO: 541851 - RNA, 19 nt, Artificial Sequence
  Description of Artificial Sequence: Synthetic oligonucleotide
  Sense strand starting at position 2674 of SEQ ID NO: 318167
gugagaaggugcuuuggga

SEQ ID NO: 541852 - RNA, 19 nt, Artificial Sequence
  Description of Artificial Sequence: Synthetic oligonucleotide
  Antisense strand to SEQ ID NO: 541851
ucccaaagcaccuucucac

SEQ ID NO: 541853 - RNA, 19 nt, Artificial Sequence
  Description of Artificial Sequence: Synthetic oligonucleotide
  Sense strand starting at position 2844 of SEQ ID NO: 318167
agauuuacuuugugaaaca

SEQ ID NO: 541854 - RNA, 19 nt, Artificial Sequence
  Description of Artificial Sequence: Synthetic oligonucleotide
  Antisense strand to SEQ ID NO: 541853
uguuucacaaaguaaaucu

SEQ ID NO: 541855 - RNA, 19 nt, Artificial Sequence
  Description of Artificial Sequence: Synthetic oligonucleotide
  Sense strand starting at position 2897 of SEQ ID NO: 318167
gcggauucucacggagaua

SEQ ID NO: 541856 - RNA, 19 nt, Artificial Sequence
  Description of Artificial Sequence: Synthetic oligonucleotide
  Antisense strand to SEQ ID NO: 541855
uaucuccgugagaauccgc

SEQ ID NO: 541857 - RNA, 19 nt, Artificial Sequence
  Description of Artificial Sequence: Synthetic oligonucleotide
  Sense strand starting at position 2898 of SEQ ID NO: 318167
cggauucucacggagauag

SEQ ID NO: 541858 - RNA, 19 nt, Artificial Sequence
  Description of Artificial Sequence: Synthetic oligonucleotide
  Antisense strand to SEQ ID NO: 541857
cuaucuccgugagaauccg

SEQ ID NO: 541859 - RNA, 19 nt, Artificial Sequence
  Description of Artificial Sequence: Synthetic oligonucleotide
  Sense strand starting at position 2910 of SEQ ID NO: 318167
gagauagucuugucagucu

SEQ ID NO: 541860 - RNA, 19 nt, Artificial Sequence
  Description of Artificial Sequence: Synthetic oligonucleotide
  Antisense strand to SEQ ID NO: 541859
agacugacaagacuaucuc

SEQ ID NO: 541861 - RNA, 19 nt, Artificial Sequence
  Description of Artificial Sequence: Synthetic oligonucleotide
  Sense strand starting at position 3309 of SEQ ID NO: 318167
cggauaaacuuuccuuguu

SEQ ID NO: 541862 - RNA, 19 nt, Artificial Sequence
  Description of Artificial Sequence: Synthetic oligonucleotide
  Antisense strand to SEQ ID NO: 541861
aacaaggaaaguuuauccg

SEQ ID NO: 541863 - RNA, 19 nt, Artificial Sequence
  Description of Artificial Sequence: Synthetic oligonucleotide
  Sense strand starting at position 3310 of SEQ ID NO: 318167
ggauaaacuuuccuuguuc

SEQ ID NO: 541864 - RNA, 19 nt, Artificial Sequence
  Description of Artificial Sequence: Synthetic oligonucleotide
  Antisense strand to SEQ ID NO: 541863
gaacaaggaaaguuuaucc

SEQ ID NO: 541865 - RNA, 19 nt, Artificial Sequence
  Description of Artificial Sequence: Synthetic oligonucleotide
  Sense strand starting at position 3372 of SEQ ID NO: 318167
gguaccuguaagugagaaa

SEQ ID NO: 541866 - RNA, 19 nt, Artificial Sequence
  Description of Artificial Sequence: Synthetic oligonucleotide
  Antisense strand to SEQ ID NO: 541865
uuucucacuuacagguacc

SEQ ID NO: 541867 - RNA, 19 nt, Artificial Sequence
  Description of Artificial Sequence: Synthetic oligonucleotide
  Sense strand starting at position 3398 of SEQ ID NO: 318167
ggaagacuuuagccagagu

SEQ ID NO: 541868 - RNA, 19 nt, Artificial Sequence
  Description of Artificial Sequence: Synthetic oligonucleotide
  Antisense strand to SEQ ID NO: 541867
acucuggcuaaagucuucc

SEQ ID NO: 541869 - RNA, 19 nt, Artificial Sequence
  Description of Artificial Sequence: Synthetic oligonucleotide
  Sense strand starting at position 3409 of SEQ ID NO: 318167
gccagaguagcagaguaaa

SEQ ID NO: 541870 - RNA, 19 nt, Artificial Sequence
  Description of Artificial Sequence: Synthetic oligonucleotide
  Antisense strand to SEQ ID NO: 541869
uuuacucugcuacucuggc

SEQ ID NO: 541871 - RNA, 19 nt, Artificial Sequence
  Description of Artificial Sequence: Synthetic oligonucleotide
  Sense strand starting at position 3460 of SEQ ID NO: 318167
uuuguacagugguugaaac

SEQ ID NO: 541872 - RNA, 19 nt, Artificial Sequence
  Description of Artificial Sequence: Synthetic oligonucleotide
  Antisense strand to SEQ ID NO: 541871
guuucaaccacuguacaaa

SEQ ID NO: 541873 - RNA, 19 nt, Artificial Sequence
  Description of Artificial Sequence: Synthetic oligonucleotide
  Sense strand starting at position 3461 of SEQ ID NO: 318167
uuguacagugguugaaacu

SEQ ID NO: 541874 - RNA, 19 nt, Artificial Sequence
  Description of Artificial Sequence: Synthetic oligonucleotide
  Antisense strand to SEQ ID NO: 541873
aguuucaaccacuguacaa

SEQ ID NO: 541875 - RNA, 19 nt, Artificial Sequence
  Description of Artificial Sequence: Synthetic oligonucleotide
  Sense strand starting at position 3543 of SEQ ID NO: 318167
cuccauccaccacguauua

SEQ ID NO: 541876 - RNA, 19 nt, Artificial Sequence
  Description of Artificial Sequence: Synthetic oligonucleotide
  Antisense strand to SEQ ID NO: 541875
uaauacgugguggauggag

SEQ ID NO: 541877 - RNA, 19 nt, Artificial Sequence
  Description of Artificial Sequence: Synthetic oligonucleotide
  Sense strand starting at position 3553 of SEQ ID NO: 318167
cacguauuaccauggagaa

SEQ ID NO: 541878 - RNA, 19 nt, Artificial Sequence
  Description of Artificial Sequence: Synthetic oligonucleotide
  Antisense strand to SEQ ID NO: 541877
uucuccaugguaauacgug

SEQ ID NO: 541879 - RNA, 19 nt, Artificial Sequence
  Description of Artificial Sequence: Synthetic oligonucleotide
  Sense strand starting at position 3554 of SEQ ID NO: 318167
acguauuaccauggagaaa

SEQ ID NO: 541880 - RNA, 19 nt, Artificial Sequence
  Description of Artificial Sequence: Synthetic oligonucleotide
  Antisense strand to SEQ ID NO: 541879
uuucuccaugguaauacgu

SEQ ID NO: 541881 - RNA, 19 nt, Artificial Sequence
  Description of Artificial Sequence: Synthetic oligonucleotide
  Sense strand starting at position 3567 of SEQ ID NO: 318167
gagaaaccuaaguguuggu

SEQ ID NO: 541882 - RNA, 19 nt, Artificial Sequence
  Description of Artificial Sequence: Synthetic oligonucleotide
  Antisense strand to SEQ ID NO: 541881
accaacacuuagguuucuc

SEQ ID NO: 541883 - RNA, 19 nt, Artificial Sequence
  Description of Artificial Sequence: Synthetic oligonucleotide
  Sense strand starting at position 3727 of SEQ ID NO: 318167
cucccucugccauauguua

SEQ ID NO: 541884 - RNA, 19 nt, Artificial Sequence
  Description of Artificial Sequence: Synthetic oligonucleotide
  Antisense strand to SEQ ID NO: 541883
uaacauauggcagagggag

SEQ ID NO: 541885 - RNA, 19 nt, Artificial Sequence
  Description of Artificial Sequence: Synthetic oligonucleotide
  Sense strand starting at position 3748 of SEQ ID NO: 318167
agaaguuucugagucuaau

SEQ ID NO: 541886 - RNA, 19 nt, Artificial Sequence
  Description of Artificial Sequence: Synthetic oligonucleotide
  Antisense strand to SEQ ID NO: 541885
auuagacucagaaacuucu

SEQ ID NO: 541887 - RNA, 19 nt, Artificial Sequence
  Description of Artificial Sequence: Synthetic oligonucleotide
  Sense strand starting at position 3758 of SEQ ID NO: 318167
gagucuaaugcgugauuaa

SEQ ID NO: 541888 - RNA, 19 nt, Artificial Sequence
  Description of Artificial Sequence: Synthetic oligonucleotide
  Antisense strand to SEQ ID NO: 541887
uuaaucacgcauuagacuc

SEQ ID NO: 541889 - RNA, 19 nt, Artificial Sequence
  Description of Artificial Sequence: Synthetic oligonucleotide
  Sense strand starting at position 3759 of SEQ ID NO: 318167
agucuaaugcgugauuaag

SEQ ID NO: 541890 - RNA, 19 nt, Artificial Sequence
  Description of Artificial Sequence: Synthetic oligonucleotide
  Antisense strand to SEQ ID NO: 541889
cuuaaucacgcauuagacu

SEQ ID NO: 541891 - RNA, 19 nt, Artificial Sequence
  Description of Artificial Sequence: Synthetic oligonucleotide
  Sense strand starting at position 3761 of SEQ ID NO: 318167
ucuaaugcgugauuaagac

SEQ ID NO: 541892 - RNA, 19 nt, Artificial Sequence
  Description of Artificial Sequence: Synthetic oligonucleotide
  Antisense strand to SEQ ID NO: 541891
gucuuaaucacgcauuaga

SEQ ID NO: 541893 - RNA, 19 nt, Artificial Sequence
  Description of Artificial Sequence: Synthetic oligonucleotide
  Sense strand starting at position 3773 of SEQ ID NO: 318167
uuaagacucuagcugguuu

SEQ ID NO: 541894 - RNA, 19 nt, Artificial Sequence
  Description of Artificial Sequence: Synthetic oligonucleotide
  Antisense strand to SEQ ID NO: 541893
aaaccagcuagagucuuaa

SEQ ID NO: 541895 - RNA, 19 nt, Artificial Sequence
  Description of Artificial Sequence: Synthetic oligonucleotide
  Sense strand starting at position 3811 of SEQ ID NO: 318167
uauguuacugcagagaggu

SEQ ID NO: 541896 - RNA, 19 nt, Artificial Sequence
  Description of Artificial Sequence: Synthetic oligonucleotide
  Antisense strand to SEQ ID NO: 541895
accucucugcaguaacaua

SEQ ID NO: 541897 - RNA, 19 nt, Artificial Sequence
  Description of Artificial Sequence: Synthetic oligonucleotide
  Sense strand starting at position 3847 of SEQ ID NO: 318167
uacuguaggcucugaauuc

SEQ ID NO: 541898 - RNA, 19 nt, Artificial Sequence
  Description of Artificial Sequence: Synthetic oligonucleotide
  Antisense strand to SEQ ID NO: 541897
gaauucagagccuacagua

SEQ ID NO: 541899 - RNA, 19 nt, Artificial Sequence
  Description of Artificial Sequence: Synthetic oligonucleotide
  Sense strand starting at position 3854 of SEQ ID NO: 318167
ggcucugaauucucuuaau

SEQ ID NO: 541900 - RNA, 19 nt, Artificial Sequence
  Description of Artificial Sequence: Synthetic oligonucleotide
  Antisense strand to SEQ ID NO: 541899
auuaagagaauucagagcc

SEQ ID NO: 541901 - RNA, 19 nt, Artificial Sequence
  Description of Artificial Sequence: Synthetic oligonucleotide
  Sense strand starting at position 3892 of SEQ ID NO: 318167
ucaggagacuuguauuucu

SEQ ID NO: 541902 - RNA, 19 nt, Artificial Sequence
  Description of Artificial Sequence: Synthetic oligonucleotide
  Antisense strand to SEQ ID NO: 541901
agaaauacaagucuccuga

SEQ ID NO: 541903 - RNA, 19 nt, Artificial Sequence
  Description of Artificial Sequence: Synthetic oligonucleotide
  Sense strand starting at position 3910 of SEQ ID NO: 318167
uuccaagguuguuucuaga

SEQ ID NO: 541904 - RNA, 19 nt, Artificial Sequence
  Description of Artificial Sequence: Synthetic oligonucleotide
  Antisense strand to SEQ ID NO: 541903
ucuagaaacaaccuuggaa

SEQ ID NO: 541905 - RNA, 19 nt, Artificial Sequence
  Description of Artificial Sequence: Synthetic oligonucleotide
  Sense strand starting at position 3978 of SEQ ID NO: 318167
ggacguaaaccuugcaaug

SEQ ID NO: 541906 - RNA, 19 nt, Artificial Sequence
  Description of Artificial Sequence: Synthetic oligonucleotide
  Antisense strand to SEQ ID NO: 541905
cauugcaagguuuacgucc

SEQ ID NO: 541907 - RNA, 19 nt, Artificial Sequence
  Description of Artificial Sequence: Synthetic oligonucleotide
  Sense strand starting at position 41 of SEQ ID NO: 318168
cucccaaagugucuugaaa

SEQ ID NO: 541908 - RNA, 19 nt, Artificial Sequence
  Description of Artificial Sequence: Synthetic oligonucleotide
  Antisense strand to SEQ ID NO: 541907
uuucaagacacuuugggag

SEQ ID NO: 541909 - RNA, 19 nt, Artificial Sequence
  Description of Artificial Sequence: Synthetic oligonucleotide
  Sense strand starting at position 43 of SEQ ID NO: 318168
cccaaagugucuugaaauu

SEQ ID NO: 541910 - RNA, 19 nt, Artificial Sequence
  Description of Artificial Sequence: Synthetic oligonucleotide
  Antisense strand to SEQ ID NO: 541909
aauuucaagacacuuuggg

SEQ ID NO: 541911 - RNA, 19 nt, Artificial Sequence
  Description of Artificial Sequence: Synthetic oligonucleotide
  Sense strand starting at position 53 of SEQ ID NO: 318168
cuugaaauuacuggcguga

SEQ ID NO: 541912 - RNA, 19 nt, Artificial Sequence
  Description of Artificial Sequence: Synthetic oligonucleotide
  Antisense strand to SEQ ID NO: 541911
ucacgccaguaauuucaag

SEQ ID NO: 541913 - RNA, 19 nt, Artificial Sequence
  Description of Artificial Sequence: Synthetic oligonucleotide
  Sense strand starting at position 143 of SEQ ID NO: 318168
ccacgacucuguguccuua

SEQ ID NO: 541914 - RNA, 19 nt, Artificial Sequence
  Description of Artificial Sequence: Synthetic oligonucleotide
  Antisense strand to SEQ ID NO: 541913
uaaggacacagagucgugg

SEQ ID NO: 541915 - RNA, 19 nt, Artificial Sequence
  Description of Artificial Sequence: Synthetic oligonucleotide
  Sense strand starting at position 330 of SEQ ID NO: 318168
cccuauagcaaggguugua

SEQ ID NO: 541916 - RNA, 19 nt, Artificial Sequence
  Description of Artificial Sequence: Synthetic oligonucleotide
  Antisense strand to SEQ ID NO: 541915
uacaacccuugcuauaggg

SEQ ID NO: 541917 - RNA, 19 nt, Artificial Sequence
  Description of Artificial Sequence: Synthetic oligonucleotide
  Sense strand starting at position 344 of SEQ ID NO: 318168
uuguacaguccuggaacua

SEQ ID NO: 541918 - RNA, 19 nt, Artificial Sequence
  Description of Artificial Sequence: Synthetic oligonucleotide
  Antisense strand to SEQ ID NO: 541917
uaguuccaggacuguacaa

SEQ ID NO: 541919 - RNA, 19 nt, Artificial Sequence
  Description of Artificial Sequence: Synthetic oligonucleotide
  Sense strand starting at position 345 of SEQ ID NO: 318168
uguacaguccuggaacuaa

SEQ ID NO: 541920 - RNA, 19 nt, Artificial Sequence
  Description of Artificial Sequence: Synthetic oligonucleotide
  Antisense strand to SEQ ID NO: 541919
uuaguuccaggacuguaca

SEQ ID NO: 541921 - RNA, 19 nt, Artificial Sequence
  Description of Artificial Sequence: Synthetic oligonucleotide
  Sense strand starting at position 439 of SEQ ID NO: 318168
guccguagggucuagcaga

SEQ ID NO: 541922 - RNA, 19 nt, Artificial Sequence
  Description of Artificial Sequence: Synthetic oligonucleotide
  Antisense strand to SEQ ID NO: 541921
ucugcuagacccuacggac

SEQ ID NO: 541923 - RNA, 19 nt, Artificial Sequence
  Description of Artificial Sequence: Synthetic oligonucleotide
  Sense strand starting at position 463 of SEQ ID NO: 318168
ugaccuagauaaugcagaa

SEQ ID NO: 541924 - RNA, 19 nt, Artificial Sequence
  Description of Artificial Sequence: Synthetic oligonucleotide
  Antisense strand to SEQ ID NO: 541923
uucugcauuaucuagguca

SEQ ID NO: 541925 - RNA, 19 nt, Artificial Sequence
  Description of Artificial Sequence: Synthetic oligonucleotide
  Sense strand starting at position 492 of SEQ ID NO: 318168
gucucuuguauguguggaa

SEQ ID NO: 541926 - RNA, 19 nt, Artificial Sequence
  Description of Artificial Sequence: Synthetic oligonucleotide
  Antisense strand to SEQ ID NO: 541925
uuccacacauacaagagac

SEQ ID NO: 541927 - RNA, 19 nt, Artificial Sequence
  Description of Artificial Sequence: Synthetic oligonucleotide
  Sense strand starting at position 495 of SEQ ID NO: 318168
ucuuguauguguggaagaa

SEQ ID NO: 541928 - RNA, 19 nt, Artificial Sequence
  Description of Artificial Sequence: Synthetic oligonucleotide
  Antisense strand to SEQ ID NO: 541927
uucuuccacacauacaaga

SEQ ID NO: 541929 - RNA, 19 nt, Artificial Sequence
  Description of Artificial Sequence: Synthetic oligonucleotide
  Sense strand starting at position 496 of SEQ ID NO: 318168
cuuguauguguggaagaaa

SEQ ID NO: 541930 - RNA, 19 nt, Artificial Sequence
  Description of Artificial Sequence: Synthetic oligonucleotide
  Antisense strand to SEQ ID NO: 541929
uuucuuccacacauacaag

SEQ ID NO: 541931 - RNA, 19 nt, Artificial Sequence
  Description of Artificial Sequence: Synthetic oligonucleotide
  Sense strand starting at position 646 of SEQ ID NO: 318168
acacgcuaaucagaaguca

SEQ ID NO: 541932 - RNA, 19 nt, Artificial Sequence
  Description of Artificial Sequence: Synthetic oligonucleotide
  Antisense strand to SEQ ID NO: 541931
ugacuucugauuagcgugu

SEQ ID NO: 541933 - RNA, 19 nt, Artificial Sequence
  Description of Artificial Sequence: Synthetic oligonucleotide
  Sense strand starting at position 703 of SEQ ID NO: 318168
ggccauuucuuugaucauu

SEQ ID NO: 541934 - RNA, 19 nt, Artificial Sequence
  Description of Artificial Sequence: Synthetic oligonucleotide
  Antisense strand to SEQ ID NO: 541933
aaugaucaaagaaauggcc

SEQ ID NO: 541935 - RNA, 19 nt, Artificial Sequence
  Description of Artificial Sequence: Synthetic oligonucleotide
  Sense strand starting at position 735 of SEQ ID NO: 318168
agcugauacuacugaauac

SEQ ID NO: 541936 - RNA, 19 nt, Artificial Sequence
  Description of Artificial Sequence: Synthetic oligonucleotide
  Antisense strand to SEQ ID NO: 541935
guauucaguaguaucagcu

SEQ ID NO: 541937 - RNA, 19 nt, Artificial Sequence
  Description of Artificial Sequence: Synthetic oligonucleotide
  Sense strand starting at position 748 of SEQ ID NO: 318168
gaauacuuccugugugcuu

SEQ ID NO: 541938 - RNA, 19 nt, Artificial Sequence
  Description of Artificial Sequence: Synthetic oligonucleotide
  Antisense strand to SEQ ID NO: 541937
aagcacacaggaaguauuc

SEQ ID NO: 541939 - RNA, 19 nt, Artificial Sequence
  Description of Artificial Sequence: Synthetic oligonucleotide
  Sense strand starting at position 1003 of SEQ ID NO: 318168
agagcuacuugugccaaga

SEQ ID NO: 541940 - RNA, 19 nt, Artificial Sequence
  Description of Artificial Sequence: Synthetic oligonucleotide
  Antisense strand to SEQ ID NO: 541939
ucuuggcacaaguagcucu

SEQ ID NO: 541941 - RNA, 19 nt, Artificial Sequence
  Description of Artificial Sequence: Synthetic oligonucleotide
  Sense strand starting at position 1298 of SEQ ID NO: 318168
ugcccagucuuccacagau

SEQ ID NO: 541942 - RNA, 19 nt, Artificial Sequence
  Description of Artificial Sequence: Synthetic oligonucleotide
  Antisense strand to SEQ ID NO: 541941
aucuguggaagacugggca

SEQ ID NO: 541943 - RNA, 19 nt, Artificial Sequence
  Description of Artificial Sequence: Synthetic oligonucleotide
  Sense strand starting at position 1428 of SEQ ID NO: 318168
gggucagugccuuggccaa

SEQ ID NO: 541944 - RNA, 19 nt, Artificial Sequence
  Description of Artificial Sequence: Synthetic oligonucleotide
  Antisense strand to SEQ ID NO: 541943
uuggccaaggcacugaccc

SEQ ID NO: 541945 - RNA, 19 nt, Artificial Sequence
  Description of Artificial Sequence: Synthetic oligonucleotide
  Sense strand starting at position 2695 of SEQ ID NO: 318168
cgggaucacuuaguugaca

SEQ ID NO: 541946 - RNA, 19 nt, Artificial Sequence
  Description of Artificial Sequence: Synthetic oligonucleotide
  Antisense strand to SEQ ID NO: 541945
ugucaacuaagugaucccg

SEQ ID NO: 541947 - RNA, 19 nt, Artificial Sequence
  Description of Artificial Sequence: Synthetic oligonucleotide
  Sense strand starting at position 2696 of SEQ ID NO: 318168
gggaucacuuaguugacaa

SEQ ID NO: 541948 - RNA, 19 nt, Artificial Sequence
  Description of Artificial Sequence: Synthetic oligonucleotide
  Antisense strand to SEQ ID NO: 541947
uugucaacuaagugauccc

SEQ ID NO: 541949 - RNA, 19 nt, Artificial Sequence
  Description of Artificial Sequence: Synthetic oligonucleotide
  Sense strand starting at position 3057 of SEQ ID NO: 318168
aagggaggugcucagucaa

SEQ ID NO: 541950 - RNA, 19 nt, Artificial Sequence
  Description of Artificial Sequence: Synthetic oligonucleotide
  Antisense strand to SEQ ID NO: 541949
uugacugagcaccucccuu

SEQ ID NO: 541951 - RNA, 19 nt, Artificial Sequence
  Description of Artificial Sequence: Synthetic oligonucleotide
  Sense strand starting at position 3220 of SEQ ID NO: 318168
uugggauguugccagaucu

SEQ ID NO: 541952 - RNA, 19 nt, Artificial Sequence
  Description of Artificial Sequence: Synthetic oligonucleotide
  Antisense strand to SEQ ID NO: 541951
agaucuggcaacaucccaa

SEQ ID NO: 541953 - RNA, 19 nt, Artificial Sequence
  Description of Artificial Sequence: Synthetic oligonucleotide
  Sense strand starting at position 3228 of SEQ ID NO: 318168
uugccagaucuacguugaa

SEQ ID NO: 541954 - RNA, 19 nt, Artificial Sequence
  Description of Artificial Sequence: Synthetic oligonucleotide
  Antisense strand to SEQ ID NO: 541953
uucaacguagaucuggcaa

SEQ ID NO: 541955 - RNA, 19 nt, Artificial Sequence
  Description of Artificial Sequence: Synthetic oligonucleotide
  Sense strand starting at position 3317 of SEQ ID NO: 318168
cuagaagagugggaacaau

SEQ ID NO: 541956 - RNA, 19 nt, Artificial Sequence
  Description of Artificial Sequence: Synthetic oligonucleotide
  Antisense strand to SEQ ID NO: 541955
auuguucccacucuucuag

SEQ ID NO: 541957 - RNA, 19 nt, Artificial Sequence
  Description of Artificial Sequence: Synthetic oligonucleotide
  Sense strand starting at position 3348 of SEQ ID NO: 318168
gugagugugguguagaaca

SEQ ID NO: 541958 - RNA, 19 nt, Artificial Sequence
  Description of Artificial Sequence: Synthetic oligonucleotide
  Antisense strand to SEQ ID NO: 541957
uguucuacaccacacucac

SEQ ID NO: 541959 - RNA, 19 nt, Artificial Sequence
  Description of Artificial Sequence: Synthetic oligonucleotide
  Sense strand starting at position 3420 of SEQ ID NO: 318168
ggaacaggacucugcagau

SEQ ID NO: 541960 - RNA, 19 nt, Artificial Sequence
  Description of Artificial Sequence: Synthetic oligonucleotide
  Antisense strand to SEQ ID NO: 541959
aucugcagaguccuguucc

SEQ ID NO: 541961 - RNA, 19 nt, Artificial Sequence
  Description of Artificial Sequence: Synthetic oligonucleotide
  Sense strand starting at position 3643 of SEQ ID NO: 318168
uggcucaucgcugcuugaa

SEQ ID NO: 541962 - RNA, 19 nt, Artificial Sequence
  Description of Artificial Sequence: Synthetic oligonucleotide
  Antisense strand to SEQ ID NO: 541961
uucaagcagcgaugagcca

SEQ ID NO: 541963 - RNA, 19 nt, Artificial Sequence
  Description of Artificial Sequence: Synthetic oligonucleotide
  Sense strand starting at position 3645 of SEQ ID NO: 318168
gcucaucgcugcuugaaau

SEQ ID NO: 541964 - RNA, 19 nt, Artificial Sequence
  Description of Artificial Sequence: Synthetic oligonucleotide
  Antisense strand to SEQ ID NO: 541963
auuucaagcagcgaugagc

SEQ ID NO: 541965 - RNA, 19 nt, Artificial Sequence
  Description of Artificial Sequence: Synthetic oligonucleotide
  Sense strand starting at position 3646 of SEQ ID NO: 318168
cucaucgcugcuugaaauu

SEQ ID NO: 541966 - RNA, 19 nt, Artificial Sequence
  Description of Artificial Sequence: Synthetic oligonucleotide
  Antisense strand to SEQ ID NO: 541965
aauuucaagcagcgaugag

SEQ ID NO: 541967 - RNA, 19 nt, Artificial Sequence
  Description of Artificial Sequence: Synthetic oligonucleotide
  Sense strand starting at position 3656 of SEQ ID NO: 318168
cuugaaauucuacgucaca

SEQ ID NO: 541968 - RNA, 19 nt, Artificial Sequence
  Description of Artificial Sequence: Synthetic oligonucleotide
  Antisense strand to SEQ ID NO: 541967
ugugacguagaauuucaag

SEQ ID NO: 541969 - RNA, 19 nt, Artificial Sequence
  Description of Artificial Sequence: Synthetic oligonucleotide
  Sense strand starting at position 3657 of SEQ ID NO: 318168
uugaaauucuacgucacag

SEQ ID NO: 541970 - RNA, 19 nt, Artificial Sequence
  Description of Artificial Sequence: Synthetic oligonucleotide
  Antisense strand to SEQ ID NO: 541969
cugugacguagaauuucaa

SEQ ID NO: 541971 - RNA, 19 nt, Artificial Sequence
  Description of Artificial Sequence: Synthetic oligonucleotide
  Sense strand starting at position 3734 of SEQ ID NO: 318168
gccucaagugcaugagaga

SEQ ID NO: 541972 - RNA, 19 nt, Artificial Sequence
  Description of Artificial Sequence: Synthetic oligonucleotide
  Antisense strand to SEQ ID NO: 541971
ucucucaugcacuugaggc

SEQ ID NO: 541973 - RNA, 19 nt, Artificial Sequence
  Description of Artificial Sequence: Synthetic oligonucleotide
  Sense strand starting at position 3762 of SEQ ID NO: 318168
accagaaauugucaggauc

SEQ ID NO: 541974 - RNA, 19 nt, Artificial Sequence
  Description of Artificial Sequence: Synthetic oligonucleotide
  Antisense strand to SEQ ID NO: 541973
gauccugacaauuucuggu

SEQ ID NO: 541975 - RNA, 19 nt, Artificial Sequence
  Description of Artificial Sequence: Synthetic oligonucleotide
  Sense strand starting at position 3764 of SEQ ID NO: 318168
cagaaauugucaggaucga

SEQ ID NO: 541976 - RNA, 19 nt, Artificial Sequence
  Description of Artificial Sequence: Synthetic oligonucleotide
  Antisense strand to SEQ ID NO: 541975
ucgauccugacaauuucug

SEQ ID NO: 541977 - RNA, 19 nt, Artificial Sequence
  Description of Artificial Sequence: Synthetic oligonucleotide
  Sense strand starting at position 3777 of SEQ ID NO: 318168
gaucgaggauuaugggaaa

SEQ ID NO: 541978 - RNA, 19 nt, Artificial Sequence
  Description of Artificial Sequence: Synthetic oligonucleotide
  Antisense strand to SEQ ID NO: 541977
uuucccauaauccucgauc

SEQ ID NO: 541979 - RNA, 19 nt, Artificial Sequence
  Description of Artificial Sequence: Synthetic oligonucleotide
  Sense strand starting at position 3809 of SEQ ID NO: 318168
agcugucagaucugagguu

SEQ ID NO: 541980 - RNA, 19 nt, Artificial Sequence
  Description of Artificial Sequence: Synthetic oligonucleotide
  Antisense strand to SEQ ID NO: 541979
aaccucagaucugacagcu

SEQ ID NO: 541981 - RNA, 19 nt, Artificial Sequence
  Description of Artificial Sequence: Synthetic oligonucleotide
  Sense strand starting at position 3846 of SEQ ID NO: 318168
gggugcuucucauuaggaa

SEQ ID NO: 541982 - RNA, 19 nt, Artificial Sequence
  Description of Artificial Sequence: Synthetic oligonucleotide
  Antisense strand to SEQ ID NO: 541981
uuccuaaugagaagcaccc

SEQ ID NO: 541983 - RNA, 19 nt, Artificial Sequence
  Description of Artificial Sequence: Synthetic oligonucleotide
  Sense strand starting at position 3847 of SEQ ID NO: 318168
ggugcuucucauuaggaag

SEQ ID NO: 541984 - RNA, 19 nt, Artificial Sequence
  Description of Artificial Sequence: Synthetic oligonucleotide
  Antisense strand to SEQ ID NO: 541983
cuuccuaaugagaagcacc

SEQ ID NO: 541985 - RNA, 19 nt, Artificial Sequence
  Description of Artificial Sequence: Synthetic oligonucleotide
  Sense strand starting at position 3970 of SEQ ID NO: 318168
cgucaucucuauuagaaau

SEQ ID NO: 541986 - RNA, 19 nt, Artificial Sequence
  Description of Artificial Sequence: Synthetic oligonucleotide
  Antisense strand to SEQ ID NO: 541985
auuucuaauagagaugacg

SEQ ID NO: 541987 - RNA, 19 nt, Artificial Sequence
  Description of Artificial Sequence: Synthetic oligonucleotide
  Sense strand starting at position 38 of SEQ ID NO: 318169
agcugauguguauaccgaa

SEQ ID NO: 541988 - RNA, 19 nt, Artificial Sequence
  Description of Artificial Sequence: Synthetic oligonucleotide
  Antisense strand to SEQ ID NO: 541987
uucgguauacacaucagcu

SEQ ID NO: 541989 - RNA, 19 nt, Artificial Sequence
  Description of Artificial Sequence: Synthetic oligonucleotide
  Sense strand starting at position 104 of SEQ ID NO: 318169
aacagcucagugugaauau

SEQ ID NO: 541990 - RNA, 19 nt, Artificial Sequence
  Description of Artificial Sequence: Synthetic oligonucleotide
  Antisense strand to SEQ ID NO: 541989
auauucacacugagcuguu

SEQ ID NO: 541991 - RNA, 19 nt, Artificial Sequence
  Description of Artificial Sequence: Synthetic oligonucleotide
  Sense strand starting at position 195 of SEQ ID NO: 318169
agcaucaggcucuaucaua

SEQ ID NO: 541992 - RNA, 19 nt, Artificial Sequence
  Description of Artificial Sequence: Synthetic oligonucleotide
  Antisense strand to SEQ ID NO: 541991
uaugauagagccugaugcu

SEQ ID NO: 541993 - RNA, 19 nt, Artificial Sequence
  Description of Artificial Sequence: Synthetic oligonucleotide
  Sense strand starting at position 202 of SEQ ID NO: 318169
ggcucuaucauaggaaaug

SEQ ID NO: 541994 - RNA, 19 nt, Artificial Sequence
  Description of Artificial Sequence: Synthetic oligonucleotide
  Antisense strand to SEQ ID NO: 541993
cauuuccuaugauagagcc

SEQ ID NO: 541995 - RNA, 19 nt, Artificial Sequence
  Description of Artificial Sequence: Synthetic oligonucleotide
  Sense strand starting at position 274 of SEQ ID NO: 318169
caaagacauugcuuagagu

SEQ ID NO: 541996 - RNA, 19 nt, Artificial Sequence
  Description of Artificial Sequence: Synthetic oligonucleotide
  Antisense strand to SEQ ID NO: 541995
acucuaagcaaugucuuug

SEQ ID NO: 541997 - RNA, 19 nt, Artificial Sequence
  Description of Artificial Sequence: Synthetic oligonucleotide
  Sense strand starting at position 275 of SEQ ID NO: 318169
aaagacauugcuuagaguu

SEQ ID NO: 541998 - RNA, 19 nt, Artificial Sequence
  Description of Artificial Sequence: Synthetic oligonucleotide
  Antisense strand to SEQ ID NO: 541997
aacucuaagcaaugucuuu

SEQ ID NO: 541999 - RNA, 19 nt, Artificial Sequence
  Description of Artificial Sequence: Synthetic oligonucleotide
  Sense strand starting at position 408 of SEQ ID NO: 318169
ugcauuuccucugcaguua

SEQ ID NO: 542000 - RNA, 19 nt, Artificial Sequence
  Description of Artificial Sequence: Synthetic oligonucleotide
  Antisense strand to SEQ ID NO: 541999
uaacugcagaggaaaugca

SEQ ID NO: 542001 - RNA, 19 nt, Artificial Sequence
  Description of Artificial Sequence: Synthetic oligonucleotide
  Sense strand starting at position 409 of SEQ ID NO: 318169
gcauuuccucugcaguuau

SEQ ID NO: 542002 - RNA, 19 nt, Artificial Sequence
  Description of Artificial Sequence: Synthetic oligonucleotide
  Antisense strand to SEQ ID NO: 542001
auaacugcagaggaaaugc

SEQ ID NO: 542003 - RNA, 19 nt, Artificial Sequence
  Description of Artificial Sequence: Synthetic oligonucleotide
  Sense strand starting at position 510 of SEQ ID NO: 318169
auugucuuagggcacuaua

SEQ ID NO: 542004 - RNA, 19 nt, Artificial Sequence
  Description of Artificial Sequence: Synthetic oligonucleotide
  Antisense strand to SEQ ID NO: 542003
uauagugcccuaagacaau

SEQ ID NO: 542005 - RNA, 19 nt, Artificial Sequence
  Description of Artificial Sequence: Synthetic oligonucleotide
  Sense strand starting at position 520 of SEQ ID NO: 318169
ggcacuauauuccugaaag

SEQ ID NO: 542006 - RNA, 19 nt, Artificial Sequence
  Description of Artificial Sequence: Synthetic oligonucleotide
  Antisense strand to SEQ ID NO: 542005
cuuucaggaauauagugcc

SEQ ID NO: 542007 - RNA, 19 nt, Artificial Sequence
  Description of Artificial Sequence: Synthetic oligonucleotide
  Sense strand starting at position 531 of SEQ ID NO: 318169
ccugaaagccuguauauuc

SEQ ID NO: 542008 - RNA, 19 nt, Artificial Sequence
  Description of Artificial Sequence: Synthetic oligonucleotide
  Antisense strand to SEQ ID NO: 542007
gaauauacaggcuuucagg

SEQ ID NO: 542009 - RNA, 19 nt, Artificial Sequence
  Description of Artificial Sequence: Synthetic oligonucleotide
  Sense strand starting at position 602 of SEQ ID NO: 318169
acacauuuguaagggacau

SEQ ID NO: 542010 - RNA, 19 nt, Artificial Sequence
  Description of Artificial Sequence: Synthetic oligonucleotide
  Antisense strand to SEQ ID NO: 542009
augucccuuacaaaugugu

SEQ ID NO: 542011 - RNA, 19 nt, Artificial Sequence
  Description of Artificial Sequence: Synthetic oligonucleotide
  Sense strand starting at position 608 of SEQ ID NO: 318169
uuguaagggacauaugcua

SEQ ID NO: 542012 - RNA, 19 nt, Artificial Sequence
  Description of Artificial Sequence: Synthetic oligonucleotide
  Antisense strand to SEQ ID NO: 542011
uagcauaugucccuuacaa

SEQ ID NO: 542013 - RNA, 19 nt, Artificial Sequence
  Description of Artificial Sequence: Synthetic oligonucleotide
  Sense strand starting at position 670 of SEQ ID NO: 318169
cuacaaugguguuuauaau

SEQ ID NO: 542014 - RNA, 19 nt, Artificial Sequence
  Description of Artificial Sequence: Synthetic oligonucleotide
  Antisense strand to SEQ ID NO: 542013
auuauaaacaccauuguag

SEQ ID NO: 542015 - RNA, 19 nt, Artificial Sequence
  Description of Artificial Sequence: Synthetic oligonucleotide
  Sense strand starting at position 843 of SEQ ID NO: 318169
cugguugugauaugacauc

SEQ ID NO: 542016 - RNA, 19 nt, Artificial Sequence
  Description of Artificial Sequence: Synthetic oligonucleotide
  Antisense strand to SEQ ID NO: 542015
gaugucauaucacaaccag

SEQ ID NO: 542017 - RNA, 19 nt, Artificial Sequence
  Description of Artificial Sequence: Synthetic oligonucleotide
  Sense strand starting at position 965 of SEQ ID NO: 318169
uggcauuaucacuaaagca

SEQ ID NO: 542018 - RNA, 19 nt, Artificial Sequence
  Description of Artificial Sequence: Synthetic oligonucleotide
  Antisense strand to SEQ ID NO: 542017
ugcuuuagugauaaugcca

SEQ ID NO: 542019 - RNA, 19 nt, Artificial Sequence
  Description of Artificial Sequence: Synthetic oligonucleotide
  Sense strand starting at position 2325 of SEQ ID NO: 318169
uccagaaaccguuacugga

SEQ ID NO: 542020 - RNA, 19 nt, Artificial Sequence
  Description of Artificial Sequence: Synthetic oligonucleotide
  Antisense strand to SEQ ID NO: 542019
uccaguaacgguuucugga

SEQ ID NO: 542021 - RNA, 19 nt, Artificial Sequence
  Description of Artificial Sequence: Synthetic oligonucleotide
  Sense strand starting at position 2859 of SEQ ID NO: 318169
cgaagucaauuucucggua

SEQ ID NO: 542022 - RNA, 19 nt, Artificial Sequence
  Description of Artificial Sequence: Synthetic oligonucleotide
  Antisense strand to SEQ ID NO: 542021
uaccgagaaauugacuucg

SEQ ID NO: 542023 - RNA, 19 nt, Artificial Sequence
  Description of Artificial Sequence: Synthetic oligonucleotide
  Sense strand starting at position 2862 of SEQ ID NO: 318169
agucaauuucucgguaacu

SEQ ID NO: 542024 - RNA, 19 nt, Artificial Sequence
  Description of Artificial Sequence: Synthetic oligonucleotide
  Antisense strand to SEQ ID NO: 542023
aguuaccgagaaauugacu

SEQ ID NO: 542025 - RNA, 19 nt, Artificial Sequence
  Description of Artificial Sequence: Synthetic oligonucleotide
  Sense strand starting at position 2863 of SEQ ID NO: 318169
gucaauuucucgguaacuc

SEQ ID NO: 542026 - RNA, 19 nt, Artificial Sequence
  Description of Artificial Sequence: Synthetic oligonucleotide
  Antisense strand to SEQ ID NO: 542025
gaguuaccgagaaauugac

SEQ ID NO: 542027 - RNA, 19 nt, Artificial Sequence
  Description of Artificial Sequence: Synthetic oligonucleotide
  Sense strand starting at position 3037 of SEQ ID NO: 318169
cggauuuauaugcggcagu

SEQ ID NO: 542028 - RNA, 19 nt, Artificial Sequence
  Description of Artificial Sequence: Synthetic oligonucleotide
  Antisense strand to SEQ ID NO: 542027
acugccgcauauaaauccg

SEQ ID NO: 542029 - RNA, 19 nt, Artificial Sequence
  Description of Artificial Sequence: Synthetic oligonucleotide
  Sense strand starting at position 3301 of SEQ ID NO: 318169
guguguuuggcgccauuga

SEQ ID NO: 542030 - RNA, 19 nt, Artificial Sequence
  Description of Artificial Sequence: Synthetic oligonucleotide
  Antisense strand to SEQ ID NO: 542029
ucaauggcgccaaacacac

SEQ ID NO: 542031 - RNA, 19 nt, Artificial Sequence
  Description of Artificial Sequence: Synthetic oligonucleotide
  Sense strand starting at position 3328 of SEQ ID NO: 318169
aauagauacucuguaaugg

SEQ ID NO: 542032 - RNA, 19 nt, Artificial Sequence
  Description of Artificial Sequence: Synthetic oligonucleotide
  Antisense strand to SEQ ID NO: 542031
ccauuacagaguaucuauu

SEQ ID NO: 542033 - RNA, 19 nt, Artificial Sequence
  Description of Artificial Sequence: Synthetic oligonucleotide
  Sense strand starting at position 3336 of SEQ ID NO: 318169
cucuguaauggcugagaua

SEQ ID NO: 542034 - RNA, 19 nt, Artificial Sequence
  Description of Artificial Sequence: Synthetic oligonucleotide
  Antisense strand to SEQ ID NO: 542033
uaucucagccauuacagag

SEQ ID NO: 542035 - RNA, 19 nt, Artificial Sequence
  Description of Artificial Sequence: Synthetic oligonucleotide
  Sense strand starting at position 3337 of SEQ ID NO: 318169
ucuguaauggcugagauaa

SEQ ID NO: 542036 - RNA, 19 nt, Artificial Sequence
  Description of Artificial Sequence: Synthetic oligonucleotide
  Antisense strand to SEQ ID NO: 542035
uuaucucagccauuacaga

SEQ ID NO: 542037 - RNA, 19 nt, Artificial Sequence
  Description of Artificial Sequence: Synthetic oligonucleotide
  Sense strand starting at position 3503 of SEQ ID NO: 318169
cacaaauggucucugauga

SEQ ID NO: 542038 - RNA, 19 nt, Artificial Sequence
  Description of Artificial Sequence: Synthetic oligonucleotide
  Antisense strand to SEQ ID NO: 542037
ucaucagagaccauuugug

SEQ ID NO: 542039 - RNA, 19 nt, Artificial Sequence
  Description of Artificial Sequence: Synthetic oligonucleotide
  Sense strand starting at position 3504 of SEQ ID NO: 318169
acaaauggucucugaugaa

SEQ ID NO: 542040 - RNA, 19 nt, Artificial Sequence
  Description of Artificial Sequence: Synthetic oligonucleotide
  Antisense strand to SEQ ID NO: 542039
uucaucagagaccauuugu

SEQ ID NO: 542041 - RNA, 19 nt, Artificial Sequence
  Description of Artificial Sequence: Synthetic oligonucleotide
  Sense strand starting at position 3518 of SEQ ID NO: 318169
augaacuaguuuccaggaa

SEQ ID NO: 542042 - RNA, 19 nt, Artificial Sequence
  Description of Artificial Sequence: Synthetic oligonucleotide
  Antisense strand to SEQ ID NO: 542041
uuccuggaaacuaguucau

SEQ ID NO: 542043 - RNA, 19 nt, Artificial Sequence
  Description of Artificial Sequence: Synthetic oligonucleotide
  Sense strand starting at position 3522 of SEQ ID NO: 318169
acuaguuuccaggaauguc

SEQ ID NO: 542044 - RNA, 19 nt, Artificial Sequence
  Description of Artificial Sequence: Synthetic oligonucleotide
  Antisense strand to SEQ ID NO: 542043
gacauuccuggaaacuagu

SEQ ID NO: 542045 - RNA, 19 nt, Artificial Sequence
  Description of Artificial Sequence: Synthetic oligonucleotide
  Sense strand starting at position 3530 of SEQ ID NO: 318169
ccaggaauguccucuaaca

SEQ ID NO: 542046 - RNA, 19 nt, Artificial Sequence
  Description of Artificial Sequence: Synthetic oligonucleotide
  Antisense strand to SEQ ID NO: 542045
uguuagaggacauuccugg

SEQ ID NO: 542047 - RNA, 19 nt, Artificial Sequence
  Description of Artificial Sequence: Synthetic oligonucleotide
  Sense strand starting at position 3624 of SEQ ID NO: 318169
aggaacuuaccacguugaa

SEQ ID NO: 542048 - RNA, 19 nt, Artificial Sequence
  Description of Artificial Sequence: Synthetic oligonucleotide
  Antisense strand to SEQ ID NO: 542047
uucaacgugguaaguuccu

SEQ ID NO: 542049 - RNA, 19 nt, Artificial Sequence
  Description of Artificial Sequence: Synthetic oligonucleotide
  Sense strand starting at position 3640 of SEQ ID NO: 318169
gaagaaaugugguugucga

SEQ ID NO: 542050 - RNA, 19 nt, Artificial Sequence
  Description of Artificial Sequence: Synthetic oligonucleotide
  Antisense strand to SEQ ID NO: 542049
ucgacaaccacauuucuuc

SEQ ID NO: 542051 - RNA, 19 nt, Artificial Sequence
  Description of Artificial Sequence: Synthetic oligonucleotide
  Sense strand starting at position 3761 of SEQ ID NO: 318169
ucauaaguucucgaguuaa

SEQ ID NO: 542052 - RNA, 19 nt, Artificial Sequence
  Description of Artificial Sequence: Synthetic oligonucleotide
  Antisense strand to SEQ ID NO: 542051
uuaacucgagaacuuauga

SEQ ID NO: 542053 - RNA, 19 nt, Artificial Sequence
  Description of Artificial Sequence: Synthetic oligonucleotide
  Sense strand starting at position 3772 of SEQ ID NO: 318169
cgaguuaaagacugucuag

SEQ ID NO: 542054 - RNA, 19 nt, Artificial Sequence
  Description of Artificial Sequence: Synthetic oligonucleotide
  Antisense strand to SEQ ID NO: 542053
cuagacagucuuuaacucg

SEQ ID NO: 542055 - RNA, 19 nt, Artificial Sequence
  Description of Artificial Sequence: Synthetic oligonucleotide
  Sense strand starting at position 3775 of SEQ ID NO: 318169
guuaaagacugucuagauu

SEQ ID NO: 542056 - RNA, 19 nt, Artificial Sequence
  Description of Artificial Sequence: Synthetic oligonucleotide
  Antisense strand to SEQ ID NO: 542055
aaucuagacagucuuuaac

SEQ ID NO: 542057 - RNA, 19 nt, Artificial Sequence
  Description of Artificial Sequence: Synthetic oligonucleotide
  Sense strand starting at position 3784 of SEQ ID NO: 318169
ugucuagauuuguacagaa

SEQ ID NO: 542058 - RNA, 19 nt, Artificial Sequence
  Description of Artificial Sequence: Synthetic oligonucleotide
  Antisense strand to SEQ ID NO: 542057
uucuguacaaaucuagaca

SEQ ID NO: 542059 - RNA, 19 nt, Artificial Sequence
  Description of Artificial Sequence: Synthetic oligonucleotide
  Sense strand starting at position 3836 of SEQ ID NO: 318169
uucuaccaggugugauaaa

SEQ ID NO: 542060 - RNA, 19 nt, Artificial Sequence
  Description of Artificial Sequence: Synthetic oligonucleotide
  Antisense strand to SEQ ID NO: 542059
uuuaucacaccugguagaa

SEQ ID NO: 542061 - RNA, 19 nt, Artificial Sequence
  Description of Artificial Sequence: Synthetic oligonucleotide
  Sense strand starting at position 3895 of SEQ ID NO: 318169
uuguauaaacgguguagaa

SEQ ID NO: 542062 - RNA, 19 nt, Artificial Sequence
  Description of Artificial Sequence: Synthetic oligonucleotide
  Antisense strand to SEQ ID NO: 542061
uucuacaccguuuauacaa

SEQ ID NO: 542063 - RNA, 19 nt, Artificial Sequence
  Description of Artificial Sequence: Synthetic oligonucleotide
  Sense strand starting at position 3897 of SEQ ID NO: 318169
guauaaacgguguagaaua

SEQ ID NO: 542064 - RNA, 19 nt, Artificial Sequence
  Description of Artificial Sequence: Synthetic oligonucleotide
  Antisense strand to SEQ ID NO: 542063
uauucuacaccguuuauac

SEQ ID NO: 542065 - RNA, 19 nt, Artificial Sequence
  Description of Artificial Sequence: Synthetic oligonucleotide
  Sense strand starting at position 3976 of SEQ ID NO: 318169
cucaguuaauuguuucuga

SEQ ID NO: 542066 - RNA, 19 nt, Artificial Sequence
  Description of Artificial Sequence: Synthetic oligonucleotide
  Antisense strand to SEQ ID NO: 542065
ucagaaacaauuaacugag

SEQ ID NO: 542067 - RNA, 19 nt, Artificial Sequence
  Description of Artificial Sequence: Synthetic oligonucleotide
  Sense strand starting at position 71 of SEQ ID NO: 318170
uagcauguuguuucugcua

SEQ ID NO: 542068 - RNA, 19 nt, Artificial Sequence
  Description of Artificial Sequence: Synthetic oligonucleotide
  Antisense strand to SEQ ID NO: 542067
uagcagaaacaacaugcua

SEQ ID NO: 542069 - RNA, 19 nt, Artificial Sequence
  Description of Artificial Sequence: Synthetic oligonucleotide
  Sense strand starting at position 74 of SEQ ID NO: 318170
cauguuguuucugcuaaga

SEQ ID NO: 542070 - RNA, 19 nt, Artificial Sequence
  Description of Artificial Sequence: Synthetic oligonucleotide
  Antisense strand to SEQ ID NO: 542069
ucuuagcagaaacaacaug

SEQ ID NO: 542071 - RNA, 19 nt, Artificial Sequence
  Description of Artificial Sequence: Synthetic oligonucleotide
  Sense strand starting at position 123 of SEQ ID NO: 318170
gucggacugaaguguacau

SEQ ID NO: 542072 - RNA, 19 nt, Artificial Sequence
  Description of Artificial Sequence: Synthetic oligonucleotide
  Antisense strand to SEQ ID NO: 542071
auguacacuucaguccgac

SEQ ID NO: 542073 - RNA, 19 nt, Artificial Sequence
  Description of Artificial Sequence: Synthetic oligonucleotide
  Sense strand starting at position 127 of SEQ ID NO: 318170
gacugaaguguacauguua

SEQ ID NO: 542074 - RNA, 19 nt, Artificial Sequence
  Description of Artificial Sequence: Synthetic oligonucleotide
  Antisense strand to SEQ ID NO: 542073
uaacauguacacuucaguc

SEQ ID NO: 542075 - RNA, 19 nt, Artificial Sequence
  Description of Artificial Sequence: Synthetic oligonucleotide
  Sense strand starting at position 195 of SEQ ID NO: 318170
cgcggauucugcacugagu

SEQ ID NO: 542076 - RNA, 19 nt, Artificial Sequence
  Description of Artificial Sequence: Synthetic oligonucleotide
  Antisense strand to SEQ ID NO: 542075
acucagugcagaauccgcg

SEQ ID NO: 542077 - RNA, 19 nt, Artificial Sequence
  Description of Artificial Sequence: Synthetic oligonucleotide
  Sense strand starting at position 208 of SEQ ID NO: 318170
cugagugguauugaacuga

SEQ ID NO: 542078 - RNA, 19 nt, Artificial Sequence
  Description of Artificial Sequence: Synthetic oligonucleotide
  Antisense strand to SEQ ID NO: 542077
ucaguucaauaccacucag

SEQ ID NO: 542079 - RNA, 19 nt, Artificial Sequence
  Description of Artificial Sequence: Synthetic oligonucleotide
  Sense strand starting at position 276 of SEQ ID NO: 318170
ugcagacaugcuuacgcau

SEQ ID NO: 542080 - RNA, 19 nt, Artificial Sequence
  Description of Artificial Sequence: Synthetic oligonucleotide
  Antisense strand to SEQ ID NO: 542079
augcguaagcaugucugca

SEQ ID NO: 542081 - RNA, 19 nt, Artificial Sequence
  Description of Artificial Sequence: Synthetic oligonucleotide
  Sense strand starting at position 279 of SEQ ID NO: 318170
agacaugcuuacgcauaca

SEQ ID NO: 542082 - RNA, 19 nt, Artificial Sequence
  Description of Artificial Sequence: Synthetic oligonucleotide
  Antisense strand to SEQ ID NO: 542081
uguaugcguaagcaugucu

SEQ ID NO: 542083 - RNA, 19 nt, Artificial Sequence
  Description of Artificial Sequence: Synthetic oligonucleotide
  Sense strand starting at position 344 of SEQ ID NO: 318170
agggaaguucaaggcugaa

SEQ ID NO: 542084 - RNA, 19 nt, Artificial Sequence
  Description of Artificial Sequence: Synthetic oligonucleotide
  Antisense strand to SEQ ID NO: 542083
uucagccuugaacuucccu

SEQ ID NO: 542085 - RNA, 19 nt, Artificial Sequence
  Description of Artificial Sequence: Synthetic oligonucleotide
  Sense strand starting at position 539 of SEQ ID NO: 318170
ccuguuucugucuaguauu

SEQ ID NO: 542086 - RNA, 19 nt, Artificial Sequence
  Description of Artificial Sequence: Synthetic oligonucleotide
  Antisense strand to SEQ ID NO: 542085
aauacuagacagaaacagg

SEQ ID NO: 542087 - RNA, 19 nt, Artificial Sequence
  Description of Artificial Sequence: Synthetic oligonucleotide
  Sense strand starting at position 614 of SEQ ID NO: 318170
cuguuuauuccgcacauaa

SEQ ID NO: 542088 - RNA, 19 nt, Artificial Sequence
  Description of Artificial Sequence: Synthetic oligonucleotide
  Antisense strand to SEQ ID NO: 542087
uuaugugcggaauaaacag

SEQ ID NO: 542089 - RNA, 19 nt, Artificial Sequence
  Description of Artificial Sequence: Synthetic oligonucleotide
  Sense strand starting at position 616 of SEQ ID NO: 318170
guuuauuccgcacauaaua

SEQ ID NO: 542090 - RNA, 19 nt, Artificial Sequence
  Description of Artificial Sequence: Synthetic oligonucleotide
  Antisense strand to SEQ ID NO: 542089
uauuaugugcggaauaaac

SEQ ID NO: 542091 - RNA, 19 nt, Artificial Sequence
  Description of Artificial Sequence: Synthetic oligonucleotide
  Sense strand starting at position 734 of SEQ ID NO: 318170
gagugucagguuuaaccuu

SEQ ID NO: 542092 - RNA, 19 nt, Artificial Sequence
  Description of Artificial Sequence: Synthetic oligonucleotide
  Antisense strand to SEQ ID NO: 542091
aagguuaaaccugacacuc

SEQ ID NO: 542093 - RNA, 19 nt, Artificial Sequence
  Description of Artificial Sequence: Synthetic oligonucleotide
  Sense strand starting at position 740 of SEQ ID NO: 318170
cagguuuaaccuugaguuc

SEQ ID NO: 542094 - RNA, 19 nt, Artificial Sequence
  Description of Artificial Sequence: Synthetic oligonucleotide
  Antisense strand to SEQ ID NO: 542093
gaacucaagguuaaaccug

SEQ ID NO: 542095 - RNA, 19 nt, Artificial Sequence
  Description of Artificial Sequence: Synthetic oligonucleotide
  Sense strand starting at position 741 of SEQ ID NO: 318170
agguuuaaccuugaguucu

SEQ ID NO: 542096 - RNA, 19 nt, Artificial Sequence
  Description of Artificial Sequence: Synthetic oligonucleotide
  Antisense strand to SEQ ID NO: 542095
agaacucaagguuaaaccu

SEQ ID NO: 542097 - RNA, 19 nt, Artificial Sequence
  Description of Artificial Sequence: Synthetic oligonucleotide
  Sense strand starting at position 1132 of SEQ ID NO: 318170
gcucgcucagccuugagau

SEQ ID NO: 542098 - RNA, 19 nt, Artificial Sequence
  Description of Artificial Sequence: Synthetic oligonucleotide
  Antisense strand to SEQ ID NO: 542097
aucucaaggcugagcgagc

SEQ ID NO: 542099 - RNA, 19 nt, Artificial Sequence
  Description of Artificial Sequence: Synthetic oligonucleotide
  Sense strand starting at position 1384 of SEQ ID NO: 318170
gggauauuggcacggagua

SEQ ID NO: 542100 - RNA, 19 nt, Artificial Sequence
  Description of Artificial Sequence: Synthetic oligonucleotide
  Antisense strand to SEQ ID NO: 542099
uacuccgugccaauauccc

SEQ ID NO: 542101 - RNA, 19 nt, Artificial Sequence
  Description of Artificial Sequence: Synthetic oligonucleotide
  Sense strand starting at position 1385 of SEQ ID NO: 318170
ggauauuggcacggaguaa

SEQ ID NO: 542102 - RNA, 19 nt, Artificial Sequence
  Description of Artificial Sequence: Synthetic oligonucleotide
  Antisense strand to SEQ ID NO: 542101
uuacuccgugccaauaucc

SEQ ID NO: 542103 - RNA, 19 nt, Artificial Sequence
  Description of Artificial Sequence: Synthetic oligonucleotide
  Sense strand starting at position 1386 of SEQ ID NO: 318170
gauauuggcacggaguaaa

SEQ ID NO: 542104 - RNA, 19 nt, Artificial Sequence
  Description of Artificial Sequence: Synthetic oligonucleotide
  Antisense strand to SEQ ID NO: 542103
uuuacuccgugccaauauc

SEQ ID NO: 542105 - RNA, 19 nt, Artificial Sequence
  Description of Artificial Sequence: Synthetic oligonucleotide
  Sense strand starting at position 1829 of SEQ ID NO: 318170
gcgucaucagcccaugacu

SEQ ID NO: 542106 - RNA, 19 nt, Artificial Sequence
  Description of Artificial Sequence: Synthetic oligonucleotide
  Antisense strand to SEQ ID NO: 542105
agucaugggcugaugacgc

SEQ ID NO: 542107 - RNA, 19 nt, Artificial Sequence
  Description of Artificial Sequence: Synthetic oligonucleotide
  Sense strand starting at position 1949 of SEQ ID NO: 318170
ggaaguugguuauugcgaa

SEQ ID NO: 542108 - RNA, 19 nt, Artificial Sequence
  Description of Artificial Sequence: Synthetic oligonucleotide
  Antisense strand to SEQ ID NO: 542107
uucgcaauaaccaacuucc

SEQ ID NO: 542109 - RNA, 19 nt, Artificial Sequence
  Description of Artificial Sequence: Synthetic oligonucleotide
  Sense strand starting at position 2290 of SEQ ID NO: 318170
cgaucuggcuaucucugaa

SEQ ID NO: 542110 - RNA, 19 nt, Artificial Sequence
  Description of Artificial Sequence: Synthetic oligonucleotide
  Antisense strand to SEQ ID NO: 542109
uucagagauagccagaucg

SEQ ID NO: 542111 - RNA, 19 nt, Artificial Sequence
  Description of Artificial Sequence: Synthetic oligonucleotide
  Sense strand starting at position 2293 of SEQ ID NO: 318170
ucuggcuaucucugaaaca

SEQ ID NO: 542112 - RNA, 19 nt, Artificial Sequence
  Description of Artificial Sequence: Synthetic oligonucleotide
  Antisense strand to SEQ ID NO: 542111
uguuucagagauagccaga

SEQ ID NO: 542113 - RNA, 19 nt, Artificial Sequence
  Description of Artificial Sequence: Synthetic oligonucleotide
  Sense strand starting at position 2540 of SEQ ID NO: 318170
cggugacuucugcugucuu

SEQ ID NO: 542114 - RNA, 19 nt, Artificial Sequence
  Description of Artificial Sequence: Synthetic oligonucleotide
  Antisense strand to SEQ ID NO: 542113
aagacagcagaagucaccg

SEQ ID NO: 542115 - RNA, 19 nt, Artificial Sequence
  Description of Artificial Sequence: Synthetic oligonucleotide
  Sense strand starting at position 2591 of SEQ ID NO: 318170
ggucgcuagaauuauccau

SEQ ID NO: 542116 - RNA, 19 nt, Artificial Sequence
  Description of Artificial Sequence: Synthetic oligonucleotide
  Antisense strand to SEQ ID NO: 542115
auggauaauucuagcgacc

SEQ ID NO: 542117 - RNA, 19 nt, Artificial Sequence
  Description of Artificial Sequence: Synthetic oligonucleotide
  Sense strand starting at position 2593 of SEQ ID NO: 318170
ucgcuagaauuauccaucu

SEQ ID NO: 542118 - RNA, 19 nt, Artificial Sequence
  Description of Artificial Sequence: Synthetic oligonucleotide
  Antisense strand to SEQ ID NO: 542117
agauggauaauucuagcga

SEQ ID NO: 542119 - RNA, 19 nt, Artificial Sequence
  Description of Artificial Sequence: Synthetic oligonucleotide
  Sense strand starting at position 2747 of SEQ ID NO: 318170
gccgaacagccuggaauau

SEQ ID NO: 542120 - RNA, 19 nt, Artificial Sequence
  Description of Artificial Sequence: Synthetic oligonucleotide
  Antisense strand to SEQ ID NO: 542119
auauuccaggcuguucggc

SEQ ID NO: 542121 - RNA, 19 nt, Artificial Sequence
  Description of Artificial Sequence: Synthetic oligonucleotide
  Sense strand starting at position 2898 of SEQ ID NO: 318170
cagggaguuggguguucuu

SEQ ID NO: 542122 - RNA, 19 nt, Artificial Sequence
  Description of Artificial Sequence: Synthetic oligonucleotide
  Antisense strand to SEQ ID NO: 542121
aagaacacccaacucccug

SEQ ID NO: 542123 - RNA, 19 nt, Artificial Sequence
  Description of Artificial Sequence: Synthetic oligonucleotide
  Sense strand starting at position 2924 of SEQ ID NO: 318170
cgcugaaaccuagaaugua

SEQ ID NO: 542124 - RNA, 19 nt, Artificial Sequence
  Description of Artificial Sequence: Synthetic oligonucleotide
  Antisense strand to SEQ ID NO: 542123
uacauucuagguuucagcg

SEQ ID NO: 542125 - RNA, 19 nt, Artificial Sequence
  Description of Artificial Sequence: Synthetic oligonucleotide
  Sense strand starting at position 3016 of SEQ ID NO: 318170
gcaccuaacccguauuagu

SEQ ID NO: 542126 - RNA, 19 nt, Artificial Sequence
  Description of Artificial Sequence: Synthetic oligonucleotide
  Antisense strand to SEQ ID NO: 542125
acuaauacggguuaggugc

SEQ ID NO: 542127 - RNA, 19 nt, Artificial Sequence
  Description of Artificial Sequence: Synthetic oligonucleotide
  Sense strand starting at position 3021 of SEQ ID NO: 318170
uaacccguauuaguaagaa

SEQ ID NO: 542128 - RNA, 19 nt, Artificial Sequence
  Description of Artificial Sequence: Synthetic oligonucleotide
  Antisense strand to SEQ ID NO: 542127
uucuuacuaauacggguua

SEQ ID NO: 542129 - RNA, 19 nt, Artificial Sequence
  Description of Artificial Sequence: Synthetic oligonucleotide
  Sense strand starting at position 3043 of SEQ ID NO: 318170
aggaaugcaugcucauaac

SEQ ID NO: 542130 - RNA, 19 nt, Artificial Sequence
  Description of Artificial Sequence: Synthetic oligonucleotide
  Antisense strand to SEQ ID NO: 542129
guuaugagcaugcauuccu

SEQ ID NO: 542131 - RNA, 19 nt, Artificial Sequence
  Description of Artificial Sequence: Synthetic oligonucleotide
  Sense strand starting at position 3181 of SEQ ID NO: 318170
cucucaguaugggcaauua

SEQ ID NO: 542132 - RNA, 19 nt, Artificial Sequence
  Description of Artificial Sequence: Synthetic oligonucleotide
  Antisense strand to SEQ ID NO: 542131
uaauugcccauacugagag

SEQ ID NO: 542133 - RNA, 19 nt, Artificial Sequence
  Description of Artificial Sequence: Synthetic oligonucleotide
  Sense strand starting at position 3465 of SEQ ID NO: 318170
gggauagcccuuugcagac

SEQ ID NO: 542134 - RNA, 19 nt, Artificial Sequence
  Description of Artificial Sequence: Synthetic oligonucleotide
  Antisense strand to SEQ ID NO: 542133
gucugcaaagggcuauccc

SEQ ID NO: 542135 - RNA, 19 nt, Artificial Sequence
  Description of Artificial Sequence: Synthetic oligonucleotide
  Sense strand starting at position 3843 of SEQ ID NO: 318170
uucuaucuuguggaccaaa

SEQ ID NO: 542136 - RNA, 19 nt, Artificial Sequence
  Description of Artificial Sequence: Synthetic oligonucleotide
  Antisense strand to SEQ ID NO: 542135
uuugguccacaagauagaa

SEQ ID NO: 542137 - RNA, 19 nt, Artificial Sequence
  Description of Artificial Sequence: Synthetic oligonucleotide
  Sense strand starting at position 3878 of SEQ ID NO: 318170
ggaagaccaucugacucaa

SEQ ID NO: 542138 - RNA, 19 nt, Artificial Sequence
  Description of Artificial Sequence: Synthetic oligonucleotide
  Antisense strand to SEQ ID NO: 542137
uugagucagauggucuucc

SEQ ID NO: 542139 - RNA, 19 nt, Artificial Sequence
  Description of Artificial Sequence: Synthetic oligonucleotide
  Sense strand starting at position 3898 of SEQ ID NO: 318170
uccagagguuccuuagcau

SEQ ID NO: 542140 - RNA, 19 nt, Artificial Sequence
  Description of Artificial Sequence: Synthetic oligonucleotide
  Antisense strand to SEQ ID NO: 542139
augcuaaggaaccucugga

SEQ ID NO: 542141 - RNA, 19 nt, Artificial Sequence
  Description of Artificial Sequence: Synthetic oligonucleotide
  Sense strand starting at position 3921 of SEQ ID NO: 318170
cugacuggccuaggagaau

SEQ ID NO: 542142 - RNA, 19 nt, Artificial Sequence
  Description of Artificial Sequence: Synthetic oligonucleotide
  Antisense strand to SEQ ID NO: 542141
auucuccuaggccagucag

SEQ ID NO: 542143 - RNA, 19 nt, Artificial Sequence
  Description of Artificial Sequence: Synthetic oligonucleotide
  Sense strand starting at position 3934 of SEQ ID NO: 318170
gagaauggccuuugcccau

SEQ ID NO: 542144 - RNA, 19 nt, Artificial Sequence
  Description of Artificial Sequence: Synthetic oligonucleotide
  Antisense strand to SEQ ID NO: 542143
augggcaaaggccauucuc

SEQ ID NO: 542145 - RNA, 19 nt, Artificial Sequence
  Description of Artificial Sequence: Synthetic oligonucleotide
  Sense strand starting at position 3940 of SEQ ID NO: 318170
ggccuuugcccauaaagua

SEQ ID NO: 542146 - RNA, 19 nt, Artificial Sequence
  Description of Artificial Sequence: Synthetic oligonucleotide
  Antisense strand to SEQ ID NO: 542145
uacuuuaugggcaaaggcc

SEQ ID NO: 542147 - RNA, 19 nt, Artificial Sequence
  Description of Artificial Sequence: Synthetic oligonucleotide
  Sense strand starting at position 51 of SEQ ID NO: 318171
auguauaccuuauccugau

SEQ ID NO: 542148 - RNA, 19 nt, Artificial Sequence
  Description of Artificial Sequence: Synthetic oligonucleotide
  Antisense strand to SEQ ID NO: 542147
aucaggauaagguauacau

SEQ ID NO: 542149 - RNA, 19 nt, Artificial Sequence
  Description of Artificial Sequence: Synthetic oligonucleotide
  Sense strand starting at position 52 of SEQ ID NO: 318171
uguauaccuuauccugauu

SEQ ID NO: 542150 - RNA, 19 nt, Artificial Sequence
  Description of Artificial Sequence: Synthetic oligonucleotide
  Antisense strand to SEQ ID NO: 542149
aaucaggauaagguauaca

SEQ ID NO: 542151 - RNA, 19 nt, Artificial Sequence
  Description of Artificial Sequence: Synthetic oligonucleotide
  Sense strand starting at position 148 of SEQ ID NO: 318171
agcgcaauuccugaauuac

SEQ ID NO: 542152 - RNA, 19 nt, Artificial Sequence
  Description of Artificial Sequence: Synthetic oligonucleotide
  Antisense strand to SEQ ID NO: 542151
guaauucaggaauugcgcu

SEQ ID NO: 542153 - RNA, 19 nt, Artificial Sequence
  Description of Artificial Sequence: Synthetic oligonucleotide
  Sense strand starting at position 247 of SEQ ID NO: 318171
guaccuauccugugauaaa

SEQ ID NO: 542154 - RNA, 19 nt, Artificial Sequence
  Description of Artificial Sequence: Synthetic oligonucleotide
  Antisense strand to SEQ ID NO: 542153
uuuaucacaggauagguac

SEQ ID NO: 542155 - RNA, 19 nt, Artificial Sequence
  Description of Artificial Sequence: Synthetic oligonucleotide
  Sense strand starting at position 311 of SEQ ID NO: 318171
augugaaaccuauguagau

SEQ ID NO: 542156 - RNA, 19 nt, Artificial Sequence
  Description of Artificial Sequence: Synthetic oligonucleotide
  Antisense strand to SEQ ID NO: 542155
aucuacauagguuucacau

SEQ ID NO: 542157 - RNA, 19 nt, Artificial Sequence
  Description of Artificial Sequence: Synthetic oligonucleotide
  Sense strand starting at position 312 of SEQ ID NO: 318171
ugugaaaccuauguagaug

SEQ ID NO: 542158 - RNA, 19 nt, Artificial Sequence
  Description of Artificial Sequence: Synthetic oligonucleotide
  Antisense strand to SEQ ID NO: 542157
caucuacauagguuucaca

SEQ ID NO: 542159 - RNA, 19 nt, Artificial Sequence
  Description of Artificial Sequence: Synthetic oligonucleotide
  Sense strand starting at position 318 of SEQ ID NO: 318171
accuauguagauggaaauu

SEQ ID NO: 542160 - RNA, 19 nt, Artificial Sequence
  Description of Artificial Sequence: Synthetic oligonucleotide
  Antisense strand to SEQ ID NO: 542159
aauuuccaucuacauaggu

SEQ ID NO: 542161 - RNA, 19 nt, Artificial Sequence
  Description of Artificial Sequence: Synthetic oligonucleotide
  Sense strand starting at position 327 of SEQ ID NO: 318171
gauggaaauuuacacgcaa

SEQ ID NO: 542162 - RNA, 19 nt, Artificial Sequence
  Description of Artificial Sequence: Synthetic oligonucleotide
  Antisense strand to SEQ ID NO: 542161
uugcguguaaauuuccauc

SEQ ID NO: 542163 - RNA, 19 nt, Artificial Sequence
  Description of Artificial Sequence: Synthetic oligonucleotide
  Sense strand starting at position 430 of SEQ ID NO: 318171
agcuacacucaguguauau

SEQ ID NO: 542164 - RNA, 19 nt, Artificial Sequence
  Description of Artificial Sequence: Synthetic oligonucleotide
  Antisense strand to SEQ ID NO: 542163
auauacacugaguguagcu

SEQ ID NO: 542165 - RNA, 19 nt, Artificial Sequence
  Description of Artificial Sequence: Synthetic oligonucleotide
  Sense strand starting at position 432 of SEQ ID NO: 318171
cuacacucaguguauauaa

SEQ ID NO: 542166 - RNA, 19 nt, Artificial Sequence
  Description of Artificial Sequence: Synthetic oligonucleotide
  Antisense strand to SEQ ID NO: 542165
uuauauacacugaguguag

SEQ ID NO: 542167 - RNA, 19 nt, Artificial Sequence
  Description of Artificial Sequence: Synthetic oligonucleotide
  Sense strand starting at position 455 of SEQ ID NO: 318171
cacacuguggcauaaugaa

SEQ ID NO: 542168 - RNA, 19 nt, Artificial Sequence
  Description of Artificial Sequence: Synthetic oligonucleotide
  Antisense strand to SEQ ID NO: 542167
uucauuaugccacagugug

SEQ ID NO: 542169 - RNA, 19 nt, Artificial Sequence
  Description of Artificial Sequence: Synthetic oligonucleotide
  Sense strand starting at position 488 of SEQ ID NO: 318171
caaucagaaugccuagguu

SEQ ID NO: 542170 - RNA, 19 nt, Artificial Sequence
  Description of Artificial Sequence: Synthetic oligonucleotide
  Antisense strand to SEQ ID NO: 542169
aaccuaggcauucugauug

SEQ ID NO: 542171 - RNA, 19 nt, Artificial Sequence
  Description of Artificial Sequence: Synthetic oligonucleotide
  Sense strand starting at position 517 of SEQ ID NO: 318171
ucuuacuaccuguguaaag

SEQ ID NO: 542172 - RNA, 19 nt, Artificial Sequence
  Description of Artificial Sequence: Synthetic oligonucleotide
  Antisense strand to SEQ ID NO: 542171
cuuuacacagguaguaaga

SEQ ID NO: 542173 - RNA, 19 nt, Artificial Sequence
  Description of Artificial Sequence: Synthetic oligonucleotide
  Sense strand starting at position 527 of SEQ ID NO: 318171
uguguaaagcuucgacaag

SEQ ID NO: 542174 - RNA, 19 nt, Artificial Sequence
  Description of Artificial Sequence: Synthetic oligonucleotide
  Antisense strand to SEQ ID NO: 542173
cuugucgaagcuuuacaca

SEQ ID NO: 542175 - RNA, 19 nt, Artificial Sequence
  Description of Artificial Sequence: Synthetic oligonucleotide
  Sense strand starting at position 649 of SEQ ID NO: 318171
acauguuauaguugaggua

SEQ ID NO: 542176 - RNA, 19 nt, Artificial Sequence
  Description of Artificial Sequence: Synthetic oligonucleotide
  Antisense strand to SEQ ID NO: 542175
uaccucaacuauaacaugu

SEQ ID NO: 542177 - RNA, 19 nt, Artificial Sequence
  Description of Artificial Sequence: Synthetic oligonucleotide
  Sense strand starting at position 650 of SEQ ID NO: 318171
cauguuauaguugagguau

SEQ ID NO: 542178 - RNA, 19 nt, Artificial Sequence
  Description of Artificial Sequence: Synthetic oligonucleotide
  Antisense strand to SEQ ID NO: 542177
auaccucaacuauaacaug

SEQ ID NO: 542179 - RNA, 19 nt, Artificial Sequence
  Description of Artificial Sequence: Synthetic oligonucleotide
  Sense strand starting at position 987 of SEQ ID NO: 318171
ugcguuugaagagacauaa

SEQ ID NO: 542180 - RNA, 19 nt, Artificial Sequence
  Description of Artificial Sequence: Synthetic oligonucleotide
  Antisense strand to SEQ ID NO: 542179
uuaugucucuucaaacgca

SEQ ID NO: 542181 - RNA, 19 nt, Artificial Sequence
  Description of Artificial Sequence: Synthetic oligonucleotide
  Sense strand starting at position 1011 of SEQ ID NO: 318171
ggacguuuauaucuuaagu

SEQ ID NO: 542182 - RNA, 19 nt, Artificial Sequence
  Description of Artificial Sequence: Synthetic oligonucleotide
  Antisense strand to SEQ ID NO: 542181
acuuaagauauaaacgucc

SEQ ID NO: 542183 - RNA, 19 nt, Artificial Sequence
  Description of Artificial Sequence: Synthetic oligonucleotide
  Sense strand starting at position 1108 of SEQ ID NO: 318171
ccugcuuauaggugucaag

SEQ ID NO: 542184 - RNA, 19 nt, Artificial Sequence
  Description of Artificial Sequence: Synthetic oligonucleotide
  Antisense strand to SEQ ID NO: 542183
cuugacaccuauaagcagg

SEQ ID NO: 542185 - RNA, 19 nt, Artificial Sequence
  Description of Artificial Sequence: Synthetic oligonucleotide
  Sense strand starting at position 2180 of SEQ ID NO: 318171
cggcuucuggagggacaaa

SEQ ID NO: 542186 - RNA, 19 nt, Artificial Sequence
  Description of Artificial Sequence: Synthetic oligonucleotide
  Antisense strand to SEQ ID NO: 542185
uuugucccuccagaagccg

SEQ ID NO: 542187 - RNA, 19 nt, Artificial Sequence
  Description of Artificial Sequence: Synthetic oligonucleotide
  Sense strand starting at position 2436 of SEQ ID NO: 318171
aaagccugccugugaugaa

SEQ ID NO: 542188 - RNA, 19 nt, Artificial Sequence
  Description of Artificial Sequence: Synthetic oligonucleotide
  Antisense strand to SEQ ID NO: 542187
uucaucacaggcaggcuuu

SEQ ID NO: 542189 - RNA, 19 nt, Artificial Sequence
  Description of Artificial Sequence: Synthetic oligonucleotide
  Sense strand starting at position 2535 of SEQ ID NO: 318171
gaggcuggugguugaaaca

SEQ ID NO: 542190 - RNA, 19 nt, Artificial Sequence
  Description of Artificial Sequence: Synthetic oligonucleotide
  Antisense strand to SEQ ID NO: 542189
uguuucaaccaccagccuc

SEQ ID NO: 542191 - RNA, 19 nt, Artificial Sequence
  Description of Artificial Sequence: Synthetic oligonucleotide
  Sense strand starting at position 2672 of SEQ ID NO: 318171
acuguaaucccugacuguu

SEQ ID NO: 542192 - RNA, 19 nt, Artificial Sequence
  Description of Artificial Sequence: Synthetic oligonucleotide
  Antisense strand to SEQ ID NO: 542191
aacagucagggauuacagu

SEQ ID NO: 542193 - RNA, 19 nt, Artificial Sequence
  Description of Artificial Sequence: Synthetic oligonucleotide
  Sense strand starting at position 2739 of SEQ ID NO: 318171
acgucagaauugccugagu

SEQ ID NO: 542194 - RNA, 19 nt, Artificial Sequence
  Description of Artificial Sequence: Synthetic oligonucleotide
  Antisense strand to SEQ ID NO: 542193
acucaggcaauucugacgu

SEQ ID NO: 542195 - RNA, 19 nt, Artificial Sequence
  Description of Artificial Sequence: Synthetic oligonucleotide
  Sense strand starting at position 2936 of SEQ ID NO: 318171
aagagcagcgcuugacuaa

SEQ ID NO: 542196 - RNA, 19 nt, Artificial Sequence
  Description of Artificial Sequence: Synthetic oligonucleotide
  Antisense strand to SEQ ID NO: 542195
uuagucaagcgcugcucuu

SEQ ID NO: 542197 - RNA, 19 nt, Artificial Sequence
  Description of Artificial Sequence: Synthetic oligonucleotide
  Sense strand starting at position 2937 of SEQ ID NO: 318171
agagcagcgcuugacuaau

SEQ ID NO: 542198 - RNA, 19 nt, Artificial Sequence
  Description of Artificial Sequence: Synthetic oligonucleotide
  Antisense strand to SEQ ID NO: 542197
auuagucaagcgcugcucu

SEQ ID NO: 542199 - RNA, 19 nt, Artificial Sequence
  Description of Artificial Sequence: Synthetic oligonucleotide
  Sense strand starting at position 2948 of SEQ ID NO: 318171
ugacuaauguuacugaugu

SEQ ID NO: 542200 - RNA, 19 nt, Artificial Sequence
  Description of Artificial Sequence: Synthetic oligonucleotide
  Antisense strand to SEQ ID NO: 542199
acaucaguaacauuaguca

SEQ ID NO: 542201 - RNA, 19 nt, Artificial Sequence
  Description of Artificial Sequence: Synthetic oligonucleotide
  Sense strand starting at position 3029 of SEQ ID NO: 318171
agggcuggcacggagaauu

SEQ ID NO: 542202 - RNA, 19 nt, Artificial Sequence
  Description of Artificial Sequence: Synthetic oligonucleotide
  Antisense strand to SEQ ID NO: 542201
aauucuccgugccagcccu

SEQ ID NO: 542203 - RNA, 19 nt, Artificial Sequence
  Description of Artificial Sequence: Synthetic oligonucleotide
  Sense strand starting at position 3195 of SEQ ID NO: 318171
ucacuauauugaccaguau

SEQ ID NO: 542204 - RNA, 19 nt, Artificial Sequence
  Description of Artificial Sequence: Synthetic oligonucleotide
  Antisense strand to SEQ ID NO: 542203
auacuggucaauauaguga

SEQ ID NO: 542205 - RNA, 19 nt, Artificial Sequence
  Description of Artificial Sequence: Synthetic oligonucleotide
  Sense strand starting at position 3397 of SEQ ID NO: 318171
cuguaagaccuguagcaga

SEQ ID NO: 542206 - RNA, 19 nt, Artificial Sequence
  Description of Artificial Sequence: Synthetic oligonucleotide
  Antisense strand to SEQ ID NO: 542205
ucugcuacaggucuuacag

SEQ ID NO: 542207 - RNA, 19 nt, Artificial Sequence
  Description of Artificial Sequence: Synthetic oligonucleotide
  Sense strand starting at position 3416 of SEQ ID NO: 318171
gcacguauuggccugcuga

SEQ ID NO: 542208 - RNA, 19 nt, Artificial Sequence
  Description of Artificial Sequence: Synthetic oligonucleotide
  Antisense strand to SEQ ID NO: 542207
ucagcaggccaauacgugc

SEQ ID NO: 542209 - RNA, 19 nt, Artificial Sequence
  Description of Artificial Sequence: Synthetic oligonucleotide
  Sense strand starting at position 3503 of SEQ ID NO: 318171
cugagacuugcuggaggaa

SEQ ID NO: 542210 - RNA, 19 nt, Artificial Sequence
  Description of Artificial Sequence: Synthetic oligonucleotide
  Antisense strand to SEQ ID NO: 542209
uuccuccagcaagucucag

SEQ ID NO: 542211 - RNA, 19 nt, Artificial Sequence
  Description of Artificial Sequence: Synthetic oligonucleotide
  Sense strand starting at position 3506 of SEQ ID NO: 318171
agacuugcuggaggaagua

SEQ ID NO: 542212 - RNA, 19 nt, Artificial Sequence
  Description of Artificial Sequence: Synthetic oligonucleotide
  Antisense strand to SEQ ID NO: 542211
uacuuccuccagcaagucu

SEQ ID NO: 542213 - RNA, 19 nt, Artificial Sequence
  Description of Artificial Sequence: Synthetic oligonucleotide
  Sense strand starting at position 3635 of SEQ ID NO: 318171
gugccuucccuugugaugu

SEQ ID NO: 542214 - RNA, 19 nt, Artificial Sequence
  Description of Artificial Sequence: Synthetic oligonucleotide
  Antisense strand to SEQ ID NO: 542213
acaucacaagggaaggcac

SEQ ID NO: 542215 - RNA, 19 nt, Artificial Sequence
  Description of Artificial Sequence: Synthetic oligonucleotide
  Sense strand starting at position 3707 of SEQ ID NO: 318171
cuggaauugcccuaaccuu

SEQ ID NO: 542216 - RNA, 19 nt, Artificial Sequence
  Description of Artificial Sequence: Synthetic oligonucleotide
  Antisense strand to SEQ ID NO: 542215
aagguuagggcaauuccag

SEQ ID NO: 542217 - RNA, 19 nt, Artificial Sequence
  Description of Artificial Sequence: Synthetic oligonucleotide
  Sense strand starting at position 3733 of SEQ ID NO: 318171
ucagacuuuaggcguuaaa

SEQ ID NO: 542218 - RNA, 19 nt, Artificial Sequence
  Description of Artificial Sequence: Synthetic oligonucleotide
  Antisense strand to SEQ ID NO: 542217
uuuaacgccuaaagucuga

SEQ ID NO: 542219 - RNA, 19 nt, Artificial Sequence
  Description of Artificial Sequence: Synthetic oligonucleotide
  Sense strand starting at position 3736 of SEQ ID NO: 318171
gacuuuaggcguuaaauau

SEQ ID NO: 542220 - RNA, 19 nt, Artificial Sequence
  Description of Artificial Sequence: Synthetic oligonucleotide
  Antisense strand to SEQ ID NO: 542219
auauuuaacgccuaaaguc

SEQ ID NO: 542221 - RNA, 19 nt, Artificial Sequence
  Description of Artificial Sequence: Synthetic oligonucleotide
  Sense strand starting at position 3740 of SEQ ID NO: 318171
uuaggcguuaaauauaaga

SEQ ID NO: 542222 - RNA, 19 nt, Artificial Sequence
  Description of Artificial Sequence: Synthetic oligonucleotide
  Antisense strand to SEQ ID NO: 542221
ucuuauauuuaacgccuaa

SEQ ID NO: 542223 - RNA, 19 nt, Artificial Sequence
  Description of Artificial Sequence: Synthetic oligonucleotide
  Sense strand starting at position 3742 of SEQ ID NO: 318171
aggcguuaaauauaagagu

SEQ ID NO: 542224 - RNA, 19 nt, Artificial Sequence
  Description of Artificial Sequence: Synthetic oligonucleotide
  Antisense strand to SEQ ID NO: 542223
acucuuauauuuaacgccu

SEQ ID NO: 542225 - RNA, 19 nt, Artificial Sequence
  Description of Artificial Sequence: Synthetic oligonucleotide
  Sense strand starting at position 3788 of SEQ ID NO: 318171
cugugagucaggcacaagu

SEQ ID NO: 542226 - RNA, 19 nt, Artificial Sequence
  Description of Artificial Sequence: Synthetic oligonucleotide
  Antisense strand to SEQ ID NO: 542225
acuugugccugacucacag

SEQ ID NO: 542227 - RNA, 19 nt, Artificial Sequence
  Description of Artificial Sequence: Synthetic oligonucleotide
  Sense strand starting at position 8 of SEQ ID NO: 318172
gcaggagugccugguaugu

SEQ ID NO: 542228 - RNA, 19 nt, Artificial Sequence
  Description of Artificial Sequence: Synthetic oligonucleotide
  Antisense strand to SEQ ID NO: 542227
acauaccaggcacuccugc

SEQ ID NO: 542229 - RNA, 19 nt, Artificial Sequence
  Description of Artificial Sequence: Synthetic oligonucleotide
  Sense strand starting at position 78 of SEQ ID NO: 318172
gaaggugaauaguagaacu

SEQ ID NO: 542230 - RNA, 19 nt, Artificial Sequence
  Description of Artificial Sequence: Synthetic oligonucleotide
  Antisense strand to SEQ ID NO: 542229
aguucuacuauucaccuuc

SEQ ID NO: 542231 - RNA, 19 nt, Artificial Sequence
  Description of Artificial Sequence: Synthetic oligonucleotide
  Sense strand starting at position 137 of SEQ ID NO: 318172
aagaaaggacuuugucuuu

SEQ ID NO: 542232 - RNA, 19 nt, Artificial Sequence
  Description of Artificial Sequence: Synthetic oligonucleotide
  Antisense strand to SEQ ID NO: 542231
aaagacaaaguccuuucuu

SEQ ID NO: 542233 - RNA, 19 nt, Artificial Sequence
  Description of Artificial Sequence: Synthetic oligonucleotide
  Sense strand starting at position 179 of SEQ ID NO: 318172
acuggaggauucugaauag

SEQ ID NO: 542234 - RNA, 19 nt, Artificial Sequence
  Description of Artificial Sequence: Synthetic oligonucleotide
  Antisense strand to SEQ ID NO: 542233
cuauucagaauccuccagu

SEQ ID NO: 542235 - RNA, 19 nt, Artificial Sequence
  Description of Artificial Sequence: Synthetic oligonucleotide
  Sense strand starting at position 235 of SEQ ID NO: 318172
uauggaugcuguguugaga

SEQ ID NO: 542236 - RNA, 19 nt, Artificial Sequence
  Description of Artificial Sequence: Synthetic oligonucleotide
  Antisense strand to SEQ ID NO: 542235
ucucaacacagcauccaua

SEQ ID NO: 542237 - RNA, 19 nt, Artificial Sequence
  Description of Artificial Sequence: Synthetic oligonucleotide
  Sense strand starting at position 238 of SEQ ID NO: 318172
ggaugcuguguugagagua

SEQ ID NO: 542238 - RNA, 19 nt, Artificial Sequence
  Description of Artificial Sequence: Synthetic oligonucleotide
  Antisense strand to SEQ ID NO: 542237
uacucucaacacagcaucc

SEQ ID NO: 542239 - RNA, 19 nt, Artificial Sequence
  Description of Artificial Sequence: Synthetic oligonucleotide
  Sense strand starting at position 290 of SEQ ID NO: 318172
uggcuaggccauugaaaua

SEQ ID NO: 542240 - RNA, 19 nt, Artificial Sequence
  Description of Artificial Sequence: Synthetic oligonucleotide
  Antisense strand to SEQ ID NO: 542239
uauuucaauggccuagcca

SEQ ID NO: 542241 - RNA, 19 nt, Artificial Sequence
  Description of Artificial Sequence: Synthetic oligonucleotide
  Sense strand starting at position 322 of SEQ ID NO: 318172
cugagaucuugagaagagg

SEQ ID NO: 542242 - RNA, 19 nt, Artificial Sequence
  Description of Artificial Sequence: Synthetic oligonucleotide
  Antisense strand to SEQ ID NO: 542241
ccucuucucaagaucucag

SEQ ID NO: 542243 - RNA, 19 nt, Artificial Sequence
  Description of Artificial Sequence: Synthetic oligonucleotide
  Sense strand starting at position 339 of SEQ ID NO: 318172
ggucaaaugcuagacaggu

SEQ ID NO: 542244 - RNA, 19 nt, Artificial Sequence
  Description of Artificial Sequence: Synthetic oligonucleotide
  Antisense strand to SEQ ID NO: 542243
accugucuagcauuugacc

SEQ ID NO: 542245 - RNA, 19 nt, Artificial Sequence
  Description of Artificial Sequence: Synthetic oligonucleotide
  Sense strand starting at position 507 of SEQ ID NO: 318172
ccaauagaguccucugaag

SEQ ID NO: 542246 - RNA, 19 nt, Artificial Sequence
  Description of Artificial Sequence: Synthetic oligonucleotide
  Antisense strand to SEQ ID NO: 542245
cuucagaggacucuauugg

SEQ ID NO: 542247 - RNA, 19 nt, Artificial Sequence
  Description of Artificial Sequence: Synthetic oligonucleotide
  Sense strand starting at position 509 of SEQ ID NO: 318172
aauagaguccucugaagua

SEQ ID NO: 542248 - RNA, 19 nt, Artificial Sequence
  Description of Artificial Sequence: Synthetic oligonucleotide
  Antisense strand to SEQ ID NO: 542247
uacuucagaggacucuauu

SEQ ID NO: 542249 - RNA, 19 nt, Artificial Sequence
  Description of Artificial Sequence: Synthetic oligonucleotide
  Sense strand starting at position 779 of SEQ ID NO: 318172
ugcaaagcggcucuguaua

SEQ ID NO: 542250 - RNA, 19 nt, Artificial Sequence
  Description of Artificial Sequence: Synthetic oligonucleotide
  Antisense strand to SEQ ID NO: 542249
uauacagagccgcuuugca

SEQ ID NO: 542251 - RNA, 19 nt, Artificial Sequence
  Description of Artificial Sequence: Synthetic oligonucleotide
  Sense strand starting at position 781 of SEQ ID NO: 318172
caaagcggcucuguauauu

SEQ ID NO: 542252 - RNA, 19 nt, Artificial Sequence
  Description of Artificial Sequence: Synthetic oligonucleotide
  Antisense strand to SEQ ID NO: 542251
aauauacagagccgcuuug

SEQ ID NO: 542253 - RNA, 19 nt, Artificial Sequence
  Description of Artificial Sequence: Synthetic oligonucleotide
  Sense strand starting at position 784 of SEQ ID NO: 318172
agcggcucuguauauuaua

SEQ ID NO: 542254 - RNA, 19 nt, Artificial Sequence
  Description of Artificial Sequence: Synthetic oligonucleotide
  Antisense strand to SEQ ID NO: 542253
uauaauauacagagccgcu

SEQ ID NO: 542255 - RNA, 19 nt, Artificial Sequence
  Description of Artificial Sequence: Synthetic oligonucleotide
  Sense strand starting at position 847 of SEQ ID NO: 318172
guguaaguucuagaaaugc

SEQ ID NO: 542256 - RNA, 19 nt, Artificial Sequence
  Description of Artificial Sequence: Synthetic oligonucleotide
  Antisense strand to SEQ ID NO: 542255
gcauuucuagaacuuacac

SEQ ID NO: 542257 - RNA, 19 nt, Artificial Sequence
  Description of Artificial Sequence: Synthetic oligonucleotide
  Sense strand starting at position 956 of SEQ ID NO: 318172
caggauacgcuaugcuuaa

SEQ ID NO: 542258 - RNA, 19 nt, Artificial Sequence
  Description of Artificial Sequence: Synthetic oligonucleotide
  Antisense strand to SEQ ID NO: 542257
uuaagcauagcguauccug

SEQ ID NO: 542259 - RNA, 19 nt, Artificial Sequence
  Description of Artificial Sequence: Synthetic oligonucleotide
  Sense strand starting at position 957 of SEQ ID NO: 318172
aggauacgcuaugcuuaau

SEQ ID NO: 542260 - RNA, 19 nt, Artificial Sequence
  Description of Artificial Sequence: Synthetic oligonucleotide
  Antisense strand to SEQ ID NO: 542259
auuaagcauagcguauccu

SEQ ID NO: 542261 - RNA, 19 nt, Artificial Sequence
  Description of Artificial Sequence: Synthetic oligonucleotide
  Sense strand starting at position 1032 of SEQ ID NO: 318172
aguggcuuauuugaaucaa

SEQ ID NO: 542262 - RNA, 19 nt, Artificial Sequence
  Description of Artificial Sequence: Synthetic oligonucleotide
  Antisense strand to SEQ ID NO: 542261
uugauucaaauaagccacu

SEQ ID NO: 542263 - RNA, 19 nt, Artificial Sequence
  Description of Artificial Sequence: Synthetic oligonucleotide
  Sense strand starting at position 1086 of SEQ ID NO: 318172
uuauuaaagaguuguggaa

SEQ ID NO: 542264 - RNA, 19 nt, Artificial Sequence
  Description of Artificial Sequence: Synthetic oligonucleotide
  Antisense strand to SEQ ID NO: 542263
uuccacaacucuuuaauaa

SEQ ID NO: 542265 - RNA, 19 nt, Artificial Sequence
  Description of Artificial Sequence: Synthetic oligonucleotide
  Sense strand starting at position 1130 of SEQ ID NO: 318172
gggaaugguuagcuguauu

SEQ ID NO: 542266 - RNA, 19 nt, Artificial Sequence
  Description of Artificial Sequence: Synthetic oligonucleotide
  Antisense strand to SEQ ID NO: 542265
aauacagcuaaccauuccc

SEQ ID NO: 542267 - RNA, 19 nt, Artificial Sequence
  Description of Artificial Sequence: Synthetic oligonucleotide
  Sense strand starting at position 1187 of SEQ ID NO: 318172
ucaagaugucacugagagu

SEQ ID NO: 542268 - RNA, 19 nt, Artificial Sequence
  Description of Artificial Sequence: Synthetic oligonucleotide
  Antisense strand to SEQ ID NO: 542267
acucucagugacaucuuga

SEQ ID NO: 542269 - RNA, 19 nt, Artificial Sequence
  Description of Artificial Sequence: Synthetic oligonucleotide
  Sense strand starting at position 1279 of SEQ ID NO: 318172
ggacacucaucuuggaaag

SEQ ID NO: 542270 - RNA, 19 nt, Artificial Sequence
  Description of Artificial Sequence: Synthetic oligonucleotide
  Antisense strand to SEQ ID NO: 542269
cuuuccaagaugagugucc

SEQ ID NO: 542271 - RNA, 19 nt, Artificial Sequence
  Description of Artificial Sequence: Synthetic oligonucleotide
  Sense strand starting at position 1301 of SEQ ID NO: 318172
cggcaauggcaggagaaau

SEQ ID NO: 542272 - RNA, 19 nt, Artificial Sequence
  Description of Artificial Sequence: Synthetic oligonucleotide
  Antisense strand to SEQ ID NO: 542271
auuucuccugccauugccg

SEQ ID NO: 542273 - RNA, 19 nt, Artificial Sequence
  Description of Artificial Sequence: Synthetic oligonucleotide
  Sense strand starting at position 1379 of SEQ ID NO: 318172
accgguuuaccuggcuuaa

SEQ ID NO: 542274 - RNA, 19 nt, Artificial Sequence
  Description of Artificial Sequence: Synthetic oligonucleotide
  Antisense strand to SEQ ID NO: 542273
uuaagccagguaaaccggu

SEQ ID NO: 542275 - RNA, 19 nt, Artificial Sequence
  Description of Artificial Sequence: Synthetic oligonucleotide
  Sense strand starting at position 1420 of SEQ ID NO: 318172
cggguagauuucggauacu

SEQ ID NO: 542276 - RNA, 19 nt, Artificial Sequence
  Description of Artificial Sequence: Synthetic oligonucleotide
  Antisense strand to SEQ ID NO: 542275
aguauccgaaaucuacccg

SEQ ID NO: 542277 - RNA, 19 nt, Artificial Sequence
  Description of Artificial Sequence: Synthetic oligonucleotide
  Sense strand starting at position 1433 of SEQ ID NO: 318172
gauacuucugcgcuuccga

SEQ ID NO: 542278 - RNA, 19 nt, Artificial Sequence
  Description of Artificial Sequence: Synthetic oligonucleotide
  Antisense strand to SEQ ID NO: 542277
ucggaagcgcagaaguauc

SEQ ID NO: 542279 - RNA, 19 nt, Artificial Sequence
  Description of Artificial Sequence: Synthetic oligonucleotide
  Sense strand starting at position 1557 of SEQ ID NO: 318172
ccacaaaucucauuguguc

SEQ ID NO: 542280 - RNA, 19 nt, Artificial Sequence
  Description of Artificial Sequence: Synthetic oligonucleotide
  Antisense strand to SEQ ID NO: 542279
gacacaaugagauuugugg

SEQ ID NO: 542281 - RNA, 19 nt, Artificial Sequence
  Description of Artificial Sequence: Synthetic oligonucleotide
  Sense strand starting at position 1621 of SEQ ID NO: 318172
gcugaaacccacugucuuu

SEQ ID NO: 542282 - RNA, 19 nt, Artificial Sequence
  Description of Artificial Sequence: Synthetic oligonucleotide
  Antisense strand to SEQ ID NO: 542281
aaagacaguggguuucagc

SEQ ID NO: 542283 - RNA, 19 nt, Artificial Sequence
  Description of Artificial Sequence: Synthetic oligonucleotide
  Sense strand starting at position 1626 of SEQ ID NO: 318172
aacccacugucuuuggaga

SEQ ID NO: 542284 - RNA, 19 nt, Artificial Sequence
  Description of Artificial Sequence: Synthetic oligonucleotide
  Antisense strand to SEQ ID NO: 542283
ucuccaaagacaguggguu

SEQ ID NO: 542285 - RNA, 19 nt, Artificial Sequence
  Description of Artificial Sequence: Synthetic oligonucleotide
  Sense strand starting at position 1627 of SEQ ID NO: 318172
acccacugucuuuggagau

SEQ ID NO: 542286 - RNA, 19 nt, Artificial Sequence
  Description of Artificial Sequence: Synthetic oligonucleotide
  Antisense strand to SEQ ID NO: 542285
aucuccaaagacagugggu

SEQ ID NO: 542287 - RNA, 19 nt, Artificial Sequence
  Description of Artificial Sequence: Synthetic oligonucleotide
  Sense strand starting at position 1637 of SEQ ID NO: 318172
uuuggagauuccgacccaa

SEQ ID NO: 542288 - RNA, 19 nt, Artificial Sequence
  Description of Artificial Sequence: Synthetic oligonucleotide
  Antisense strand to SEQ ID NO: 542287
uugggucggaaucuccaaa

SEQ ID NO: 542289 - RNA, 19 nt, Artificial Sequence
  Description of Artificial Sequence: Synthetic oligonucleotide
  Sense strand starting at position 2241 of SEQ ID NO: 318172
ggugcacugugcuuaagga

SEQ ID NO: 542290 - RNA, 19 nt, Artificial Sequence
  Description of Artificial Sequence: Synthetic oligonucleotide
  Antisense strand to SEQ ID NO: 542289
uccuuaagcacagugcacc

SEQ ID NO: 542291 - RNA, 19 nt, Artificial Sequence
  Description of Artificial Sequence: Synthetic oligonucleotide
  Sense strand starting at position 2267 of SEQ ID NO: 318172
cagcgagugcgugcuagau

SEQ ID NO: 542292 - RNA, 19 nt, Artificial Sequence
  Description of Artificial Sequence: Synthetic oligonucleotide
  Antisense strand to SEQ ID NO: 542291
aucuagcacgcacucgcug

SEQ ID NO: 542293 - RNA, 19 nt, Artificial Sequence
  Description of Artificial Sequence: Synthetic oligonucleotide
  Sense strand starting at position 2268 of SEQ ID NO: 318172
agcgagugcgugcuagaua

SEQ ID NO: 542294 - RNA, 19 nt, Artificial Sequence
  Description of Artificial Sequence: Synthetic oligonucleotide
  Antisense strand to SEQ ID NO: 542293
uaucuagcacgcacucgcu

SEQ ID NO: 542295 - RNA, 19 nt, Artificial Sequence
  Description of Artificial Sequence: Synthetic oligonucleotide
  Sense strand starting at position 2271 of SEQ ID NO: 318172
gagugcgugcuagauaaug

SEQ ID NO: 542296 - RNA, 19 nt, Artificial Sequence
  Description of Artificial Sequence: Synthetic oligonucleotide
  Antisense strand to SEQ ID NO: 542295
cauuaucuagcacgcacuc

SEQ ID NO: 542297 - RNA, 19 nt, Artificial Sequence
  Description of Artificial Sequence: Synthetic oligonucleotide
  Sense strand starting at position 2273 of SEQ ID NO: 318172
gugcgugcuagauaauguu

SEQ ID NO: 542298 - RNA, 19 nt, Artificial Sequence
  Description of Artificial Sequence: Synthetic oligonucleotide
  Antisense strand to SEQ ID NO: 542297
aacauuaucuagcacgcac

SEQ ID NO: 542299 - RNA, 19 nt, Artificial Sequence
  Description of Artificial Sequence: Synthetic oligonucleotide
  Sense strand starting at position 3101 of SEQ ID NO: 318172
aggcauuaauaagaaccaa

SEQ ID NO: 542300 - RNA, 19 nt, Artificial Sequence
  Description of Artificial Sequence: Synthetic oligonucleotide
  Antisense strand to SEQ ID NO: 542299
uugguucuuauuaaugccu

SEQ ID NO: 542301 - RNA, 19 nt, Artificial Sequence
  Description of Artificial Sequence: Synthetic oligonucleotide
  Sense strand starting at position 3139 of SEQ ID NO: 318172
acaccaugagugugaugau

SEQ ID NO: 542302 - RNA, 19 nt, Artificial Sequence
  Description of Artificial Sequence: Synthetic oligonucleotide
  Antisense strand to SEQ ID NO: 542301
aucaucacacucauggugu

SEQ ID NO: 542303 - RNA, 19 nt, Artificial Sequence
  Description of Artificial Sequence: Synthetic oligonucleotide
  Sense strand starting at position 3290 of SEQ ID NO: 318172
auggcucaugccuguacua

SEQ ID NO: 542304 - RNA, 19 nt, Artificial Sequence
  Description of Artificial Sequence: Synthetic oligonucleotide
  Antisense strand to SEQ ID NO: 542303
uaguacaggcaugagccau

SEQ ID NO: 542305 - RNA, 19 nt, Artificial Sequence
  Description of Artificial Sequence: Synthetic oligonucleotide
  Sense strand starting at position 3675 of SEQ ID NO: 318172
uugagacugucuuucucua

SEQ ID NO: 542306 - RNA, 19 nt, Artificial Sequence
  Description of Artificial Sequence: Synthetic oligonucleotide
  Antisense strand to SEQ ID NO: 542305
uagagaaagacagucucaa

SEQ ID NO: 542307 - RNA, 19 nt, Artificial Sequence
  Description of Artificial Sequence: Synthetic oligonucleotide
  Sense strand starting at position 11 of SEQ ID NO: 318173
ugauauacccaaggucuca

SEQ ID NO: 542308 - RNA, 19 nt, Artificial Sequence
  Description of Artificial Sequence: Synthetic oligonucleotide
  Antisense strand to SEQ ID NO: 542307
ugagaccuuggguauauca

SEQ ID NO: 542309 - RNA, 19 nt, Artificial Sequence
  Description of Artificial Sequence: Synthetic oligonucleotide
  Sense strand starting at position 43 of SEQ ID NO: 318173
gaggcaguucuagaaagca

SEQ ID NO: 542310 - RNA, 19 nt, Artificial Sequence
  Description of Artificial Sequence: Synthetic oligonucleotide
  Antisense strand to SEQ ID NO: 542309
ugcuuucuagaacugccuc

SEQ ID NO: 542311 - RNA, 19 nt, Artificial Sequence
  Description of Artificial Sequence: Synthetic oligonucleotide
  Sense strand starting at position 252 of SEQ ID NO: 318173
ucugauugcuuacucuaag

SEQ ID NO: 542312 - RNA, 19 nt, Artificial Sequence
  Description of Artificial Sequence: Synthetic oligonucleotide
  Antisense strand to SEQ ID NO: 542311
cuuagaguaagcaaucaga

SEQ ID NO: 542313 - RNA, 19 nt, Artificial Sequence
  Description of Artificial Sequence: Synthetic oligonucleotide
  Sense strand starting at position 348 of SEQ ID NO: 318173
ucacaauaagucuauguua

SEQ ID NO: 542314 - RNA, 19 nt, Artificial Sequence
  Description of Artificial Sequence: Synthetic oligonucleotide
  Antisense strand to SEQ ID NO: 542313
uaacauagacuuauuguga

SEQ ID NO: 542315 - RNA, 19 nt, Artificial Sequence
  Description of Artificial Sequence: Synthetic oligonucleotide
  Sense strand starting at position 350 of SEQ ID NO: 318173
acaauaagucuauguuaag

SEQ ID NO: 542316 - RNA, 19 nt, Artificial Sequence
  Description of Artificial Sequence: Synthetic oligonucleotide
  Antisense strand to SEQ ID NO: 542315
cuuaacauagacuuauugu

SEQ ID NO: 542317 - RNA, 19 nt, Artificial Sequence
  Description of Artificial Sequence: Synthetic oligonucleotide
  Sense strand starting at position 359 of SEQ ID NO: 318173
cuauguuaaggugauguuu

SEQ ID NO: 542318 - RNA, 19 nt, Artificial Sequence
  Description of Artificial Sequence: Synthetic oligonucleotide
  Antisense strand to SEQ ID NO: 542317
aaacaucaccuuaacauag

SEQ ID NO: 542319 - RNA, 19 nt, Artificial Sequence
  Description of Artificial Sequence: Synthetic oligonucleotide
  Sense strand starting at position 385 of SEQ ID NO: 318173
ggcccugccugaucaagau

SEQ ID NO: 542320 - RNA, 19 nt, Artificial Sequence
  Description of Artificial Sequence: Synthetic oligonucleotide
  Antisense strand to SEQ ID NO: 542319
aucuugaucaggcagggcc

SEQ ID NO: 542321 - RNA, 19 nt, Artificial Sequence
  Description of Artificial Sequence: Synthetic oligonucleotide
  Sense strand starting at position 389 of SEQ ID NO: 318173
cugccugaucaagaugacu

SEQ ID NO: 542322 - RNA, 19 nt, Artificial Sequence
  Description of Artificial Sequence: Synthetic oligonucleotide
  Antisense strand to SEQ ID NO: 542321
agucaucuugaucaggcag

SEQ ID NO: 542323 - RNA, 19 nt, Artificial Sequence
  Description of Artificial Sequence: Synthetic oligonucleotide
  Sense strand starting at position 462 of SEQ ID NO: 318173
ggcucugagacgugaagaa

SEQ ID NO: 542324 - RNA, 19 nt, Artificial Sequence
  Description of Artificial Sequence: Synthetic oligonucleotide
  Antisense strand to SEQ ID NO: 542323
uucuucacgucucagagcc

SEQ ID NO: 542325 - RNA, 19 nt, Artificial Sequence
  Description of Artificial Sequence: Synthetic oligonucleotide
  Sense strand starting at position 668 of SEQ ID NO: 318173
guacucgguuuggugacaa

SEQ ID NO: 542326 - RNA, 19 nt, Artificial Sequence
  Description of Artificial Sequence: Synthetic oligonucleotide
  Antisense strand to SEQ ID NO: 542325
uugucaccaaaccgaguac

SEQ ID NO: 542327 - RNA, 19 nt, Artificial Sequence
  Description of Artificial Sequence: Synthetic oligonucleotide
  Sense strand starting at position 765 of SEQ ID NO: 318173
ggaguccucuucucccaga

SEQ ID NO: 542328 - RNA, 19 nt, Artificial Sequence
  Description of Artificial Sequence: Synthetic oligonucleotide
  Antisense strand to SEQ ID NO: 542327
ucugggagaagaggacucc

SEQ ID NO: 542329 - RNA, 19 nt, Artificial Sequence
  Description of Artificial Sequence: Synthetic oligonucleotide
  Sense strand starting at position 982 of SEQ ID NO: 318173
uggagaaucagaggugagu

SEQ ID NO: 542330 - RNA, 19 nt, Artificial Sequence
  Description of Artificial Sequence: Synthetic oligonucleotide
  Antisense strand to SEQ ID NO: 542329
acucaccucugauucucca

SEQ ID NO: 542331 - RNA, 19 nt, Artificial Sequence
  Description of Artificial Sequence: Synthetic oligonucleotide
  Sense strand starting at position 1012 of SEQ ID NO: 318173
gccagauguccagaucgca

SEQ ID NO: 542332 - RNA, 19 nt, Artificial Sequence
  Description of Artificial Sequence: Synthetic oligonucleotide
  Antisense strand to SEQ ID NO: 542331
ugcgaucuggacaucuggc

SEQ ID NO: 542333 - RNA, 19 nt, Artificial Sequence
  Description of Artificial Sequence: Synthetic oligonucleotide
  Sense strand starting at position 1066 of SEQ ID NO: 318173
gaaggaguuugcuucucug

SEQ ID NO: 542334 - RNA, 19 nt, Artificial Sequence
  Description of Artificial Sequence: Synthetic oligonucleotide
  Antisense strand to SEQ ID NO: 542333
cagagaagcaaacuccuuc

SEQ ID NO: 542335 - RNA, 19 nt, Artificial Sequence
  Description of Artificial Sequence: Synthetic oligonucleotide
  Sense strand starting at position 1069 of SEQ ID NO: 318173
ggaguuugcuucucugaca

SEQ ID NO: 542336 - RNA, 19 nt, Artificial Sequence
  Description of Artificial Sequence: Synthetic oligonucleotide
  Antisense strand to SEQ ID NO: 542335
ugucagagaagcaaacucc

SEQ ID NO: 542337 - RNA, 19 nt, Artificial Sequence
  Description of Artificial Sequence: Synthetic oligonucleotide
  Sense strand starting at position 1070 of SEQ ID NO: 318173
gaguuugcuucucugacau

SEQ ID NO: 542338 - RNA, 19 nt, Artificial Sequence
  Description of Artificial Sequence: Synthetic oligonucleotide
  Antisense strand to SEQ ID NO: 542337
augucagagaagcaaacuc

SEQ ID NO: 542339 - RNA, 19 nt, Artificial Sequence
  Description of Artificial Sequence: Synthetic oligonucleotide
  Sense strand starting at position 2322 of SEQ ID NO: 318173
acuggacuuugucuccaaa

SEQ ID NO: 542340 - RNA, 19 nt, Artificial Sequence
  Description of Artificial Sequence: Synthetic oligonucleotide
  Antisense strand to SEQ ID NO: 542339
uuuggagacaaaguccagu

SEQ ID NO: 542341 - RNA, 19 nt, Artificial Sequence
  Description of Artificial Sequence: Synthetic oligonucleotide
  Sense strand starting at position 2449 of SEQ ID NO: 318173
gacagaaacuucgugguau

SEQ ID NO: 542342 - RNA, 19 nt, Artificial Sequence
  Description of Artificial Sequence: Synthetic oligonucleotide
  Antisense strand to SEQ ID NO: 542341
auaccacgaaguuucuguc

SEQ ID NO: 542343 - RNA, 19 nt, Artificial Sequence
  Description of Artificial Sequence: Synthetic oligonucleotide
  Sense strand starting at position 2451 of SEQ ID NO: 318173
cagaaacuucgugguauag

SEQ ID NO: 542344 - RNA, 19 nt, Artificial Sequence
  Description of Artificial Sequence: Synthetic oligonucleotide
  Antisense strand to SEQ ID NO: 542343
cuauaccacgaaguuucug

SEQ ID NO: 542345 - RNA, 19 nt, Artificial Sequence
  Description of Artificial Sequence: Synthetic oligonucleotide
  Sense strand starting at position 2543 of SEQ ID NO: 318173
acuguaaauggcuacauua

SEQ ID NO: 542346 - RNA, 19 nt, Artificial Sequence
  Description of Artificial Sequence: Synthetic oligonucleotide
  Antisense strand to SEQ ID NO: 542345
uaauguagccauuuacagu

SEQ ID NO: 542347 - RNA, 19 nt, Artificial Sequence
  Description of Artificial Sequence: Synthetic oligonucleotide
  Sense strand starting at position 2545 of SEQ ID NO: 318173
uguaaauggcuacauuacu

SEQ ID NO: 542348 - RNA, 19 nt, Artificial Sequence
  Description of Artificial Sequence: Synthetic oligonucleotide
  Antisense strand to SEQ ID NO: 542347
aguaauguagccauuuaca

SEQ ID NO: 542349 - RNA, 19 nt, Artificial Sequence
  Description of Artificial Sequence: Synthetic oligonucleotide
  Sense strand starting at position 2574 of SEQ ID NO: 318173
gcaggcuuagagcaaauau

SEQ ID NO: 542350 - RNA, 19 nt, Artificial Sequence
  Description of Artificial Sequence: Synthetic oligonucleotide
  Antisense strand to SEQ ID NO: 542349
auauuugcucuaagccugc

SEQ ID NO: 542351 - RNA, 19 nt, Artificial Sequence
  Description of Artificial Sequence: Synthetic oligonucleotide
  Sense strand starting at position 2656 of SEQ ID NO: 318173
gucuuuauuucuguuugua

SEQ ID NO: 542352 - RNA, 19 nt, Artificial Sequence
  Description of Artificial Sequence: Synthetic oligonucleotide
  Antisense strand to SEQ ID NO: 542351
uacaaacagaaauaaagac

SEQ ID NO: 542353 - RNA, 19 nt, Artificial Sequence
  Description of Artificial Sequence: Synthetic oligonucleotide
  Sense strand starting at position 2739 of SEQ ID NO: 318173
uguauuuaauuaggaccaa

SEQ ID NO: 542354 - RNA, 19 nt, Artificial Sequence
  Description of Artificial Sequence: Synthetic oligonucleotide
  Antisense strand to SEQ ID NO: 542353
uugguccuaauuaaauaca

SEQ ID NO: 542355 - RNA, 19 nt, Artificial Sequence
  Description of Artificial Sequence: Synthetic oligonucleotide
  Sense strand starting at position 2996 of SEQ ID NO: 318173
ggaauuuccuuggaagcca

SEQ ID NO: 542356 - RNA, 19 nt, Artificial Sequence
  Description of Artificial Sequence: Synthetic oligonucleotide
  Antisense strand to SEQ ID NO: 542355
uggcuuccaaggaaauucc

SEQ ID NO: 542357 - RNA, 19 nt, Artificial Sequence
  Description of Artificial Sequence: Synthetic oligonucleotide
  Sense strand starting at position 3021 of SEQ ID NO: 318173
agcucagcagugggaaaua

SEQ ID NO: 542358 - RNA, 19 nt, Artificial Sequence
  Description of Artificial Sequence: Synthetic oligonucleotide
  Antisense strand to SEQ ID NO: 542357
uauuucccacugcugagcu

SEQ ID NO: 542359 - RNA, 19 nt, Artificial Sequence
  Description of Artificial Sequence: Synthetic oligonucleotide
  Sense strand starting at position 3072 of SEQ ID NO: 318173
cauucugagcucuggcaca

SEQ ID NO: 542360 - RNA, 19 nt, Artificial Sequence
  Description of Artificial Sequence: Synthetic oligonucleotide
  Antisense strand to SEQ ID NO: 542359
ugugccagagcucagaaug

SEQ ID NO: 542361 - RNA, 19 nt, Artificial Sequence
  Description of Artificial Sequence: Synthetic oligonucleotide
  Sense strand starting at position 3087 of SEQ ID NO: 318173
cacagugaccugggaugua

SEQ ID NO: 542362 - RNA, 19 nt, Artificial Sequence
  Description of Artificial Sequence: Synthetic oligonucleotide
  Antisense strand to SEQ ID NO: 542361
uacaucccaggucacugug

SEQ ID NO: 542363 - RNA, 19 nt, Artificial Sequence
  Description of Artificial Sequence: Synthetic oligonucleotide
  Sense strand starting at position 3090 of SEQ ID NO: 318173
agugaccugggauguaaau

SEQ ID NO: 542364 - RNA, 19 nt, Artificial Sequence
  Description of Artificial Sequence: Synthetic oligonucleotide
  Antisense strand to SEQ ID NO: 542363
auuuacaucccaggucacu

SEQ ID NO: 542365 - RNA, 19 nt, Artificial Sequence
  Description of Artificial Sequence: Synthetic oligonucleotide
  Sense strand starting at position 3207 of SEQ ID NO: 318173
ggucaagcgagagauugau

SEQ ID NO: 542366 - RNA, 19 nt, Artificial Sequence
  Description of Artificial Sequence: Synthetic oligonucleotide
  Antisense strand to SEQ ID NO: 542365
aucaaucucucgcuugacc

SEQ ID NO: 542367 - RNA, 19 nt, Artificial Sequence
  Description of Artificial Sequence: Synthetic oligonucleotide
  Sense strand starting at position 3259 of SEQ ID NO: 318173
agcugugauaagugauaca

SEQ ID NO: 542368 - RNA, 19 nt, Artificial Sequence
  Description of Artificial Sequence: Synthetic oligonucleotide
  Antisense strand to SEQ ID NO: 542367
uguaucacuuaucacagcu

SEQ ID NO: 542369 - RNA, 19 nt, Artificial Sequence
  Description of Artificial Sequence: Synthetic oligonucleotide
  Sense strand starting at position 3331 of SEQ ID NO: 318173
ccuugagcaucuuagauuu

SEQ ID NO: 542370 - RNA, 19 nt, Artificial Sequence
  Description of Artificial Sequence: Synthetic oligonucleotide
  Antisense strand to SEQ ID NO: 542369
aaaucuaagaugcucaagg

SEQ ID NO: 542371 - RNA, 19 nt, Artificial Sequence
  Description of Artificial Sequence: Synthetic oligonucleotide
  Sense strand starting at position 3430 of SEQ ID NO: 318173
ucaugcuaucaugguauuu

SEQ ID NO: 542372 - RNA, 19 nt, Artificial Sequence
  Description of Artificial Sequence: Synthetic oligonucleotide
  Antisense strand to SEQ ID NO: 542371
aaauaccaugauagcauga

SEQ ID NO: 542373 - RNA, 19 nt, Artificial Sequence
  Description of Artificial Sequence: Synthetic oligonucleotide
  Sense strand starting at position 3681 of SEQ ID NO: 318173
uugugagagcaaggcuaaa

SEQ ID NO: 542374 - RNA, 19 nt, Artificial Sequence
  Description of Artificial Sequence: Synthetic oligonucleotide
  Antisense strand to SEQ ID NO: 542373
uuuagccuugcucucacaa

SEQ ID NO: 542375 - RNA, 19 nt, Artificial Sequence
  Description of Artificial Sequence: Synthetic oligonucleotide
  Sense strand starting at position 3761 of SEQ ID NO: 318173
gaguucuggucuuuaucug

SEQ ID NO: 542376 - RNA, 19 nt, Artificial Sequence
  Description of Artificial Sequence: Synthetic oligonucleotide
  Antisense strand to SEQ ID NO: 542375
cagauaaagaccagaacuc

SEQ ID NO: 542377 - RNA, 19 nt, Artificial Sequence
  Description of Artificial Sequence: Synthetic oligonucleotide
  Sense strand starting at position 3762 of SEQ ID NO: 318173
aguucuggucuuuaucuga

SEQ ID NO: 542378 - RNA, 19 nt, Artificial Sequence
  Description of Artificial Sequence: Synthetic oligonucleotide
  Antisense strand to SEQ ID NO: 542377
ucagauaaagaccagaacu

SEQ ID NO: 542379 - RNA, 19 nt, Artificial Sequence
  Description of Artificial Sequence: Synthetic oligonucleotide
  Sense strand starting at position 3887 of SEQ ID NO: 318173
aaggucauggucugaauaa

SEQ ID NO: 542380 - RNA, 19 nt, Artificial Sequence
  Description of Artificial Sequence: Synthetic oligonucleotide
  Antisense strand to SEQ ID NO: 542379
uuauucagaccaugaccuu

SEQ ID NO: 542381 - RNA, 19 nt, Artificial Sequence
  Description of Artificial Sequence: Synthetic oligonucleotide
  Sense strand starting at position 3928 of SEQ ID NO: 318173
uuauuaucgccugaguccu

SEQ ID NO: 542382 - RNA, 19 nt, Artificial Sequence
  Description of Artificial Sequence: Synthetic oligonucleotide
  Antisense strand to SEQ ID NO: 542381
aggacucaggcgauaauaa

SEQ ID NO: 542383 - RNA, 19 nt, Artificial Sequence
  Description of Artificial Sequence: Synthetic oligonucleotide
  Sense strand starting at position 3957 of SEQ ID NO: 318173
ucuggauggucucauuuaa

SEQ ID NO: 542384 - RNA, 19 nt, Artificial Sequence
  Description of Artificial Sequence: Synthetic oligonucleotide
  Antisense strand to SEQ ID NO: 542383
uuaaaugagaccauccaga

SEQ ID NO: 542385 - RNA, 19 nt, Artificial Sequence
  Description of Artificial Sequence: Synthetic oligonucleotide
  Sense strand starting at position 3979 of SEQ ID NO: 318173
uggcaacaaccuugugaaa

SEQ ID NO: 542386 - RNA, 19 nt, Artificial Sequence
  Description of Artificial Sequence: Synthetic oligonucleotide
  Antisense strand to SEQ ID NO: 542385
uuucacaagguuguugcca

SEQ ID NO: 542387 - RNA, 19 nt, Artificial Sequence
  Description of Artificial Sequence: Synthetic oligonucleotide
  Sense strand starting at position 274 of SEQ ID NO: 318174
agagcuauggcuuaguuau

SEQ ID NO: 542388 - RNA, 19 nt, Artificial Sequence
  Description of Artificial Sequence: Synthetic oligonucleotide
  Antisense strand to SEQ ID NO: 542387
auaacuaagccauagcucu

SEQ ID NO: 542389 - RNA, 19 nt, Artificial Sequence
  Description of Artificial Sequence: Synthetic oligonucleotide
  Sense strand starting at position 287 of SEQ ID NO: 318174
aguuaugcauuuccagcua

SEQ ID NO: 542390 - RNA, 19 nt, Artificial Sequence
  Description of Artificial Sequence: Synthetic oligonucleotide
  Antisense strand to SEQ ID NO: 542389
uagcuggaaaugcauaacu

SEQ ID NO: 542391 - RNA, 19 nt, Artificial Sequence
  Description of Artificial Sequence: Synthetic oligonucleotide
  Sense strand starting at position 309 of SEQ ID NO: 318174
agaggaggguuaaguagaa

SEQ ID NO: 542392 - RNA, 19 nt, Artificial Sequence
  Description of Artificial Sequence: Synthetic oligonucleotide
  Antisense strand to SEQ ID NO: 542391
uucuacuuaacccuccucu

SEQ ID NO: 542393 - RNA, 19 nt, Artificial Sequence
  Description of Artificial Sequence: Synthetic oligonucleotide
  Sense strand starting at position 361 of SEQ ID NO: 318174
gauggugagaguugaaugu

SEQ ID NO: 542394 - RNA, 19 nt, Artificial Sequence
  Description of Artificial Sequence: Synthetic oligonucleotide
  Antisense strand to SEQ ID NO: 542393
acauucaacucucaccauc

SEQ ID NO: 542395 - RNA, 19 nt, Artificial Sequence
  Description of Artificial Sequence: Synthetic oligonucleotide
  Sense strand starting at position 461 of SEQ ID NO: 318174
uagcaagaagguugugaga

SEQ ID NO: 542396 - RNA, 19 nt, Artificial Sequence
  Description of Artificial Sequence: Synthetic oligonucleotide
  Antisense strand to SEQ ID NO: 542395
ucucacaaccuucuugcua

SEQ ID NO: 542397 - RNA, 19 nt, Artificial Sequence
  Description of Artificial Sequence: Synthetic oligonucleotide
  Sense strand starting at position 474 of SEQ ID NO: 318174
gugagagcccucuaacuuu

SEQ ID NO: 542398 - RNA, 19 nt, Artificial Sequence
  Description of Artificial Sequence: Synthetic oligonucleotide
  Antisense strand to SEQ ID NO: 542397
aaaguuagagggcucucac

SEQ ID NO: 542399 - RNA, 19 nt, Artificial Sequence
  Description of Artificial Sequence: Synthetic oligonucleotide
  Sense strand starting at position 497 of SEQ ID NO: 318174
aagugagucccucauuagu

SEQ ID NO: 542400 - RNA, 19 nt, Artificial Sequence
  Description of Artificial Sequence: Synthetic oligonucleotide
  Antisense strand to SEQ ID NO: 542399
acuaaugagggacucacuu

SEQ ID NO: 542401 - RNA, 19 nt, Artificial Sequence
  Description of Artificial Sequence: Synthetic oligonucleotide
  Sense strand starting at position 500 of SEQ ID NO: 318174
ugagucccucauuaguaua

SEQ ID NO: 542402 - RNA, 19 nt, Artificial Sequence
  Description of Artificial Sequence: Synthetic oligonucleotide
  Antisense strand to SEQ ID NO: 542401
uauacuaaugagggacuca

SEQ ID NO: 542403 - RNA, 19 nt, Artificial Sequence
  Description of Artificial Sequence: Synthetic oligonucleotide
  Sense strand starting at position 502 of SEQ ID NO: 318174
agucccucauuaguauaaa

SEQ ID NO: 542404 - RNA, 19 nt, Artificial Sequence
  Description of Artificial Sequence: Synthetic oligonucleotide
  Antisense strand to SEQ ID NO: 542403
uuuauacuaaugagggacu

SEQ ID NO: 542405 - RNA, 19 nt, Artificial Sequence
  Description of Artificial Sequence: Synthetic oligonucleotide
  Sense strand starting at position 602 of SEQ ID NO: 318174
auuucucuuguaugaugca

SEQ ID NO: 542406 - RNA, 19 nt, Artificial Sequence
  Description of Artificial Sequence: Synthetic oligonucleotide
  Antisense strand to SEQ ID NO: 542405
ugcaucauacaagagaaau

SEQ ID NO: 542407 - RNA, 19 nt, Artificial Sequence
  Description of Artificial Sequence: Synthetic oligonucleotide
  Sense strand starting at position 693 of SEQ ID NO: 318174
gacaguccaguaugagauu

SEQ ID NO: 542408 - RNA, 19 nt, Artificial Sequence
  Description of Artificial Sequence: Synthetic oligonucleotide
  Antisense strand to SEQ ID NO: 542407
aaucucauacuggacuguc

SEQ ID NO: 542409 - RNA, 19 nt, Artificial Sequence
  Description of Artificial Sequence: Synthetic oligonucleotide
  Sense strand starting at position 753 of SEQ ID NO: 318174
ugugcuguaaguuagaaag

SEQ ID NO: 542410 - RNA, 19 nt, Artificial Sequence
  Description of Artificial Sequence: Synthetic oligonucleotide
  Antisense strand to SEQ ID NO: 542409
cuuucuaacuuacagcaca

SEQ ID NO: 542411 - RNA, 19 nt, Artificial Sequence
  Description of Artificial Sequence: Synthetic oligonucleotide
  Sense strand starting at position 855 of SEQ ID NO: 318174
ugcaucuuugacuaacaga

SEQ ID NO: 542412 - RNA, 19 nt, Artificial Sequence
  Description of Artificial Sequence: Synthetic oligonucleotide
  Antisense strand to SEQ ID NO: 542411
ucuguuagucaaagaugca

SEQ ID NO: 542413 - RNA, 19 nt, Artificial Sequence
  Description of Artificial Sequence: Synthetic oligonucleotide
  Sense strand starting at position 973 of SEQ ID NO: 318174
aaggcagucagaugaguua

SEQ ID NO: 542414 - RNA, 19 nt, Artificial Sequence
  Description of Artificial Sequence: Synthetic oligonucleotide
  Antisense strand to SEQ ID NO: 542413
uaacucaucugacugccuu

SEQ ID NO: 542415 - RNA, 19 nt, Artificial Sequence
  Description of Artificial Sequence: Synthetic oligonucleotide
  Sense strand starting at position 976 of SEQ ID NO: 318174
gcagucagaugaguuaaug

SEQ ID NO: 542416 - RNA, 19 nt, Artificial Sequence
  Description of Artificial Sequence: Synthetic oligonucleotide
  Antisense strand to SEQ ID NO: 542415
cauuaacucaucugacugc

SEQ ID NO: 542417 - RNA, 19 nt, Artificial Sequence
  Description of Artificial Sequence: Synthetic oligonucleotide
  Sense strand starting at position 982 of SEQ ID NO: 318174
agaugaguuaauggguuaa

SEQ ID NO: 542418 - RNA, 19 nt, Artificial Sequence
  Description of Artificial Sequence: Synthetic oligonucleotide
  Antisense strand to SEQ ID NO: 542417
uuaacccauuaacucaucu

SEQ ID NO: 542419 - RNA, 19 nt, Artificial Sequence
  Description of Artificial Sequence: Synthetic oligonucleotide
  Sense strand starting at position 1059 of SEQ ID NO: 318174
gcuggagauucugcagaga

SEQ ID NO: 542420 - RNA, 19 nt, Artificial Sequence
  Description of Artificial Sequence: Synthetic oligonucleotide
  Antisense strand to SEQ ID NO: 542419
ucucugcagaaucuccagc

SEQ ID NO: 542421 - RNA, 19 nt, Artificial Sequence
  Description of Artificial Sequence: Synthetic oligonucleotide
  Sense strand starting at position 1212 of SEQ ID NO: 318174
agaggccuuucuuuagaaa

SEQ ID NO: 542422 - RNA, 19 nt, Artificial Sequence
  Description of Artificial Sequence: Synthetic oligonucleotide
  Antisense strand to SEQ ID NO: 542421
uuucuaaagaaaggccucu

SEQ ID NO: 542423 - RNA, 19 nt, Artificial Sequence
  Description of Artificial Sequence: Synthetic oligonucleotide
  Sense strand starting at position 1319 of SEQ ID NO: 318174
cuguuaagauguuuccaga

SEQ ID NO: 542424 - RNA, 19 nt, Artificial Sequence
  Description of Artificial Sequence: Synthetic oligonucleotide
  Antisense strand to SEQ ID NO: 542423
ucuggaaacaucuuaacag

SEQ ID NO: 542425 - RNA, 19 nt, Artificial Sequence
  Description of Artificial Sequence: Synthetic oligonucleotide
  Sense strand starting at position 2065 of SEQ ID NO: 318174
ugugaugcucucgaauaga

SEQ ID NO: 542426 - RNA, 19 nt, Artificial Sequence
  Description of Artificial Sequence: Synthetic oligonucleotide
  Antisense strand to SEQ ID NO: 542425
ucuauucgagagcaucaca

SEQ ID NO: 542427 - RNA, 19 nt, Artificial Sequence
  Description of Artificial Sequence: Synthetic oligonucleotide
  Sense strand starting at position 2068 of SEQ ID NO: 318174
gaugcucucgaauagaauu

SEQ ID NO: 542428 - RNA, 19 nt, Artificial Sequence
  Description of Artificial Sequence: Synthetic oligonucleotide
  Antisense strand to SEQ ID NO: 542427
aauucuauucgagagcauc

SEQ ID NO: 542429 - RNA, 19 nt, Artificial Sequence
  Description of Artificial Sequence: Synthetic oligonucleotide
  Sense strand starting at position 2227 of SEQ ID NO: 318174
ggaauaaacuaacugcauu

SEQ ID NO: 542430 - RNA, 19 nt, Artificial Sequence
  Description of Artificial Sequence: Synthetic oligonucleotide
  Antisense strand to SEQ ID NO: 542429
aaugcaguuaguuuauucc

SEQ ID NO: 542431 - RNA, 19 nt, Artificial Sequence
  Description of Artificial Sequence: Synthetic oligonucleotide
  Sense strand starting at position 2264 of SEQ ID NO: 318174
cuccguugugccgcaaaga

SEQ ID NO: 542432 - RNA, 19 nt, Artificial Sequence
  Description of Artificial Sequence: Synthetic oligonucleotide
  Antisense strand to SEQ ID NO: 542431
ucuuugcggcacaacggag

SEQ ID NO: 542433 - RNA, 19 nt, Artificial Sequence
  Description of Artificial Sequence: Synthetic oligonucleotide
  Sense strand starting at position 2277 of SEQ ID NO: 318174
caaagacuugugugaacag

SEQ ID NO: 542434 - RNA, 19 nt, Artificial Sequence
  Description of Artificial Sequence: Synthetic oligonucleotide
  Antisense strand to SEQ ID NO: 542433
cuguucacacaagucuuug

SEQ ID NO: 542435 - RNA, 19 nt, Artificial Sequence
  Description of Artificial Sequence: Synthetic oligonucleotide
  Sense strand starting at position 2532 of SEQ ID NO: 318174
cauuguaguguaugaagaa

SEQ ID NO: 542436 - RNA, 19 nt, Artificial Sequence
  Description of Artificial Sequence: Synthetic oligonucleotide
  Antisense strand to SEQ ID NO: 542435
uucuucauacacuacaaug

SEQ ID NO: 542437 - RNA, 19 nt, Artificial Sequence
  Description of Artificial Sequence: Synthetic oligonucleotide
  Sense strand starting at position 2890 of SEQ ID NO: 318174
auuagauccuggucuguaa

SEQ ID NO: 542438 - RNA, 19 nt, Artificial Sequence
  Description of Artificial Sequence: Synthetic oligonucleotide
  Antisense strand to SEQ ID NO: 542437
uuacagaccaggaucuaau

SEQ ID NO: 542439 - RNA, 19 nt, Artificial Sequence
  Description of Artificial Sequence: Synthetic oligonucleotide
  Sense strand starting at position 2892 of SEQ ID NO: 318174
uagauccuggucuguaaau

SEQ ID NO: 542440 - RNA, 19 nt, Artificial Sequence
  Description of Artificial Sequence: Synthetic oligonucleotide
  Antisense strand to SEQ ID NO: 542439
auuuacagaccaggaucua

SEQ ID NO: 542441 - RNA, 19 nt, Artificial Sequence
  Description of Artificial Sequence: Synthetic oligonucleotide
  Sense strand starting at position 2893 of SEQ ID NO: 318174
agauccuggucuguaaauu

SEQ ID NO: 542442 - RNA, 19 nt, Artificial Sequence
  Description of Artificial Sequence: Synthetic oligonucleotide
  Antisense strand to SEQ ID NO: 542441
aauuuacagaccaggaucu

SEQ ID NO: 542443 - RNA, 19 nt, Artificial Sequence
  Description of Artificial Sequence: Synthetic oligonucleotide
  Sense strand starting at position 2913 of SEQ ID NO: 318174
acucuuaucccagaggucu

SEQ ID NO: 542444 - RNA, 19 nt, Artificial Sequence
  Description of Artificial Sequence: Synthetic oligonucleotide
  Antisense strand to SEQ ID NO: 542443
agaccucugggauaagagu

SEQ ID NO: 542445 - RNA, 19 nt, Artificial Sequence
  Description of Artificial Sequence: Synthetic oligonucleotide
  Sense strand starting at position 3287 of SEQ ID NO: 318174
uuauccuuuggagguaaca

SEQ ID NO: 542446 - RNA, 19 nt, Artificial Sequence
  Description of Artificial Sequence: Synthetic oligonucleotide
  Antisense strand to SEQ ID NO: 542445
uguuaccuccaaaggauaa

SEQ ID NO: 542447 - RNA, 19 nt, Artificial Sequence
  Description of Artificial Sequence: Synthetic oligonucleotide
  Sense strand starting at position 3314 of SEQ ID NO: 318174
cuugaaauauagucacuga

SEQ ID NO: 542448 - RNA, 19 nt, Artificial Sequence
  Description of Artificial Sequence: Synthetic oligonucleotide
  Antisense strand to SEQ ID NO: 542447
ucagugacuauauuucaag

SEQ ID NO: 542449 - RNA, 19 nt, Artificial Sequence
  Description of Artificial Sequence: Synthetic oligonucleotide
  Sense strand starting at position 3342 of SEQ ID NO: 318174
gaggcagcuagagauguaa

SEQ ID NO: 542450 - RNA, 19 nt, Artificial Sequence
  Description of Artificial Sequence: Synthetic oligonucleotide
  Antisense strand to SEQ ID NO: 542449
uuacaucucuagcugccuc

SEQ ID NO: 542451 - RNA, 19 nt, Artificial Sequence
  Description of Artificial Sequence: Synthetic oligonucleotide
  Sense strand starting at position 3598 of SEQ ID NO: 318174
gggugucacagccagauua

SEQ ID NO: 542452 - RNA, 19 nt, Artificial Sequence
  Description of Artificial Sequence: Synthetic oligonucleotide
  Antisense strand to SEQ ID NO: 542451
uaaucuggcugugacaccc

SEQ ID NO: 542453 - RNA, 19 nt, Artificial Sequence
  Description of Artificial Sequence: Synthetic oligonucleotide
  Sense strand starting at position 3600 of SEQ ID NO: 318174
gugucacagccagauuaug

SEQ ID NO: 542454 - RNA, 19 nt, Artificial Sequence
  Description of Artificial Sequence: Synthetic oligonucleotide
  Antisense strand to SEQ ID NO: 542453
cauaaucuggcugugacac

SEQ ID NO: 542455 - RNA, 19 nt, Artificial Sequence
  Description of Artificial Sequence: Synthetic oligonucleotide
  Sense strand starting at position 3781 of SEQ ID NO: 318174
ccauauagccaauggacua

SEQ ID NO: 542456 - RNA, 19 nt, Artificial Sequence
  Description of Artificial Sequence: Synthetic oligonucleotide
  Antisense strand to SEQ ID NO: 542455
uaguccauuggcuauaugg

SEQ ID NO: 542457 - RNA, 19 nt, Artificial Sequence
  Description of Artificial Sequence: Synthetic oligonucleotide
  Sense strand starting at position 3970 of SEQ ID NO: 318174
uuguaucuuggcuagauua

SEQ ID NO: 542458 - RNA, 19 nt, Artificial Sequence
  Description of Artificial Sequence: Synthetic oligonucleotide
  Antisense strand to SEQ ID NO: 542457
uaaucuagccaagauacaa

SEQ ID NO: 542459 - RNA, 19 nt, Artificial Sequence
  Description of Artificial Sequence: Synthetic oligonucleotide
  Sense strand starting at position 3972 of SEQ ID NO: 318174
guaucuuggcuagauuauu

SEQ ID NO: 542460 - RNA, 19 nt, Artificial Sequence
  Description of Artificial Sequence: Synthetic oligonucleotide
  Antisense strand to SEQ ID NO: 542459
aauaaucuagccaagauac

SEQ ID NO: 542461 - RNA, 19 nt, Artificial Sequence
  Description of Artificial Sequence: Synthetic oligonucleotide
  Sense strand starting at position 3977 of SEQ ID NO: 318174
uuggcuagauuauuccuaa

SEQ ID NO: 542462 - RNA, 19 nt, Artificial Sequence
  Description of Artificial Sequence: Synthetic oligonucleotide
  Antisense strand to SEQ ID NO: 542461
uuaggaauaaucuagccaa

SEQ ID NO: 542463 - RNA, 19 nt, Artificial Sequence
  Description of Artificial Sequence: Synthetic oligonucleotide
  Sense strand starting at position 3978 of SEQ ID NO: 318174
uggcuagauuauuccuaaa

SEQ ID NO: 542464 - RNA, 19 nt, Artificial Sequence
  Description of Artificial Sequence: Synthetic oligonucleotide
  Antisense strand to SEQ ID NO: 542463
uuuaggaauaaucuagcca

SEQ ID NO: 542465 - RNA, 19 nt, Artificial Sequence
  Description of Artificial Sequence: Synthetic oligonucleotide
  Sense strand starting at position 3980 of SEQ ID NO: 318174
gcuagauuauuccuaaaug

SEQ ID NO: 542466 - RNA, 19 nt, Artificial Sequence
  Description of Artificial Sequence: Synthetic oligonucleotide
  Antisense strand to SEQ ID NO: 542465
cauuuaggaauaaucuagc

SEQ ID NO: 542467 - RNA, 19 nt, Artificial Sequence
  Description of Artificial Sequence: Synthetic oligonucleotide
  Sense strand starting at position 25 of SEQ ID NO: 318175
acugguuccagguaagagu

SEQ ID NO: 542468 - RNA, 19 nt, Artificial Sequence
  Description of Artificial Sequence: Synthetic oligonucleotide
  Antisense strand to SEQ ID NO: 542467
acucuuaccuggaaccagu

SEQ ID NO: 542469 - RNA, 19 nt, Artificial Sequence
  Description of Artificial Sequence: Synthetic oligonucleotide
  Sense strand starting at position 77 of SEQ ID NO: 318175
agaaauauuuaagggauuc

SEQ ID NO: 542470 - RNA, 19 nt, Artificial Sequence
  Description of Artificial Sequence: Synthetic oligonucleotide
  Antisense strand to SEQ ID NO: 542469
gaaucccuuaaauauuucu

SEQ ID NO: 542471 - RNA, 19 nt, Artificial Sequence
  Description of Artificial Sequence: Synthetic oligonucleotide
  Sense strand starting at position 88 of SEQ ID NO: 318175
agggauucuguccagcuga

SEQ ID NO: 542472 - RNA, 19 nt, Artificial Sequence
  Description of Artificial Sequence: Synthetic oligonucleotide
  Antisense strand to SEQ ID NO: 542471
ucagcuggacagaaucccu

SEQ ID NO: 542473 - RNA, 19 nt, Artificial Sequence
  Description of Artificial Sequence: Synthetic oligonucleotide
  Sense strand starting at position 123 of SEQ ID NO: 318175
acgaauuaucaccauguug

SEQ ID NO: 542474 - RNA, 19 nt, Artificial Sequence
  Description of Artificial Sequence: Synthetic oligonucleotide
  Antisense strand to SEQ ID NO: 542473
caacauggugauaauucgu

SEQ ID NO: 542475 - RNA, 19 nt, Artificial Sequence
  Description of Artificial Sequence: Synthetic oligonucleotide
  Sense strand starting at position 125 of SEQ ID NO: 318175
gaauuaucaccauguugag

SEQ ID NO: 542476 - RNA, 19 nt, Artificial Sequence
  Description of Artificial Sequence: Synthetic oligonucleotide
  Antisense strand to SEQ ID NO: 542475
cucaacauggugauaauuc

SEQ ID NO: 542477 - RNA, 19 nt, Artificial Sequence
  Description of Artificial Sequence: Synthetic oligonucleotide
  Sense strand starting at position 264 of SEQ ID NO: 318175
gagggucucugaccauaua

SEQ ID NO: 542478 - RNA, 19 nt, Artificial Sequence
  Description of Artificial Sequence: Synthetic oligonucleotide
  Antisense strand to SEQ ID NO: 542477
uauauggucagagacccuc

SEQ ID NO: 542479 - RNA, 19 nt, Artificial Sequence
  Description of Artificial Sequence: Synthetic oligonucleotide
  Sense strand starting at position 474 of SEQ ID NO: 318175
ugaguauuccaggauguuu

SEQ ID NO: 542480 - RNA, 19 nt, Artificial Sequence
  Description of Artificial Sequence: Synthetic oligonucleotide
  Antisense strand to SEQ ID NO: 542479
aaacauccuggaauacuca

SEQ ID NO: 542481 - RNA, 19 nt, Artificial Sequence
  Description of Artificial Sequence: Synthetic oligonucleotide
  Sense strand starting at position 479 of SEQ ID NO: 318175
auuccaggauguuucugaa

SEQ ID NO: 542482 - RNA, 19 nt, Artificial Sequence
  Description of Artificial Sequence: Synthetic oligonucleotide
  Antisense strand to SEQ ID NO: 542481
uucagaaacauccuggaau

SEQ ID NO: 542483 - RNA, 19 nt, Artificial Sequence
  Description of Artificial Sequence: Synthetic oligonucleotide
  Sense strand starting at position 677 of SEQ ID NO: 318175
uuuaucugacugcaaaguu

SEQ ID NO: 542484 - RNA, 19 nt, Artificial Sequence
  Description of Artificial Sequence: Synthetic oligonucleotide
  Antisense strand to SEQ ID NO: 542483
aacuuugcagucagauaaa

SEQ ID NO: 542485 - RNA, 19 nt, Artificial Sequence
  Description of Artificial Sequence: Synthetic oligonucleotide
  Sense strand starting at position 808 of SEQ ID NO: 318175
uucugugcuggacacaaau

SEQ ID NO: 542486 - RNA, 19 nt, Artificial Sequence
  Description of Artificial Sequence: Synthetic oligonucleotide
  Antisense strand to SEQ ID NO: 542485
auuuguguccagcacagaa

SEQ ID NO: 542487 - RNA, 19 nt, Artificial Sequence
  Description of Artificial Sequence: Synthetic oligonucleotide
  Sense strand starting at position 983 of SEQ ID NO: 318175
aggacacuccuguauuagu

SEQ ID NO: 542488 - RNA, 19 nt, Artificial Sequence
  Description of Artificial Sequence: Synthetic oligonucleotide
  Antisense strand to SEQ ID NO: 542487
acuaauacaggaguguccu

SEQ ID NO: 542489 - RNA, 19 nt, Artificial Sequence
  Description of Artificial Sequence: Synthetic oligonucleotide
  Sense strand starting at position 988 of SEQ ID NO: 318175
acuccuguauuaguaauaa

SEQ ID NO: 542490 - RNA, 19 nt, Artificial Sequence
  Description of Artificial Sequence: Synthetic oligonucleotide
  Antisense strand to SEQ ID NO: 542489
uuauuacuaauacaggagu

SEQ ID NO: 542491 - RNA, 19 nt, Artificial Sequence
  Description of Artificial Sequence: Synthetic oligonucleotide
  Sense strand starting at position 1035 of SEQ ID NO: 318175
ugacaaaguuauguagauc

SEQ ID NO: 542492 - RNA, 19 nt, Artificial Sequence
  Description of Artificial Sequence: Synthetic oligonucleotide
  Antisense strand to SEQ ID NO: 542491
gaucuacauaacuuuguca

SEQ ID NO: 542493 - RNA, 19 nt, Artificial Sequence
  Description of Artificial Sequence: Synthetic oligonucleotide
  Sense strand starting at position 1180 of SEQ ID NO: 318175
ccucaaugacugggugaau

SEQ ID NO: 542494 - RNA, 19 nt, Artificial Sequence
  Description of Artificial Sequence: Synthetic oligonucleotide
  Antisense strand to SEQ ID NO: 542493
auucacccagucauugagg

SEQ ID NO: 542495 - RNA, 19 nt, Artificial Sequence
  Description of Artificial Sequence: Synthetic oligonucleotide
  Sense strand starting at position 1286 of SEQ ID NO: 318175
ggaaaugucuuauuaucca

SEQ ID NO: 542496 - RNA, 19 nt, Artificial Sequence
  Description of Artificial Sequence: Synthetic oligonucleotide
  Antisense strand to SEQ ID NO: 542495
uggauaauaagacauuucc

SEQ ID NO: 542497 - RNA, 19 nt, Artificial Sequence
  Description of Artificial Sequence: Synthetic oligonucleotide
  Sense strand starting at position 1994 of SEQ ID NO: 318175
aucuguuuggcagauacca

SEQ ID NO: 542498 - RNA, 19 nt, Artificial Sequence
  Description of Artificial Sequence: Synthetic oligonucleotide
  Antisense strand to SEQ ID NO: 542497
ugguaucugccaaacagau

SEQ ID NO: 542499 - RNA, 19 nt, Artificial Sequence
  Description of Artificial Sequence: Synthetic oligonucleotide
  Sense strand starting at position 2488 of SEQ ID NO: 318175
ggauccgucccggaaauaa

SEQ ID NO: 542500 - RNA, 19 nt, Artificial Sequence
  Description of Artificial Sequence: Synthetic oligonucleotide
  Antisense strand to SEQ ID NO: 542499
uuauuuccgggacggaucc

SEQ ID NO: 542501 - RNA, 19 nt, Artificial Sequence
  Description of Artificial Sequence: Synthetic oligonucleotide
  Sense strand starting at position 2765 of SEQ ID NO: 318175
acuacagaucuagguaaug

SEQ ID NO: 542502 - RNA, 19 nt, Artificial Sequence
  Description of Artificial Sequence: Synthetic oligonucleotide
  Antisense strand to SEQ ID NO: 542501
cauuaccuagaucuguagu

SEQ ID NO: 542503 - RNA, 19 nt, Artificial Sequence
  Description of Artificial Sequence: Synthetic oligonucleotide
  Sense strand starting at position 2811 of SEQ ID NO: 318175
cuggcauuuauguggcaaa

SEQ ID NO: 542504 - RNA, 19 nt, Artificial Sequence
  Description of Artificial Sequence: Synthetic oligonucleotide
  Antisense strand to SEQ ID NO: 542503
uuugccacauaaaugccag

SEQ ID NO: 542505 - RNA, 19 nt, Artificial Sequence
  Description of Artificial Sequence: Synthetic oligonucleotide
  Sense strand starting at position 2911 of SEQ ID NO: 318175
ugaagaaaggcaugguauu

SEQ ID NO: 542506 - RNA, 19 nt, Artificial Sequence
  Description of Artificial Sequence: Synthetic oligonucleotide
  Antisense strand to SEQ ID NO: 542505
aauaccaugccuuucuuca

SEQ ID NO: 542507 - RNA, 19 nt, Artificial Sequence
  Description of Artificial Sequence: Synthetic oligonucleotide
  Sense strand starting at position 2945 of SEQ ID NO: 318175
auccaugaauguuuguaua

SEQ ID NO: 542508 - RNA, 19 nt, Artificial Sequence
  Description of Artificial Sequence: Synthetic oligonucleotide
  Antisense strand to SEQ ID NO: 542507
uauacaaacauucauggau

SEQ ID NO: 542509 - RNA, 19 nt, Artificial Sequence
  Description of Artificial Sequence: Synthetic oligonucleotide
  Sense strand starting at position 2947 of SEQ ID NO: 318175
ccaugaauguuuguauaaa

SEQ ID NO: 542510 - RNA, 19 nt, Artificial Sequence
  Description of Artificial Sequence: Synthetic oligonucleotide
  Antisense strand to SEQ ID NO: 542509
uuuauacaaacauucaugg

SEQ ID NO: 542511 - RNA, 19 nt, Artificial Sequence
  Description of Artificial Sequence: Synthetic oligonucleotide
  Sense strand starting at position 3002 of SEQ ID NO: 318175
uuaagucugguguaauaug

SEQ ID NO: 542512 - RNA, 19 nt, Artificial Sequence
  Description of Artificial Sequence: Synthetic oligonucleotide
  Antisense strand to SEQ ID NO: 542511
cauauuacaccagacuuaa

SEQ ID NO: 542513 - RNA, 19 nt, Artificial Sequence
  Description of Artificial Sequence: Synthetic oligonucleotide
  Sense strand starting at position 3101 of SEQ ID NO: 318175
ggaacaaacucgcuuacaa

SEQ ID NO: 542514 - RNA, 19 nt, Artificial Sequence
  Description of Artificial Sequence: Synthetic oligonucleotide
  Antisense strand to SEQ ID NO: 542513
uuguaagcgaguuuguucc

SEQ ID NO: 542515 - RNA, 19 nt, Artificial Sequence
  Description of Artificial Sequence: Synthetic oligonucleotide
  Sense strand starting at position 3580 of SEQ ID NO: 318175
guugacauaggcuggauaa

SEQ ID NO: 542516 - RNA, 19 nt, Artificial Sequence
  Description of Artificial Sequence: Synthetic oligonucleotide
  Antisense strand to SEQ ID NO: 542515
uuauccagccuaugucaac

SEQ ID NO: 542517 - RNA, 19 nt, Artificial Sequence
  Description of Artificial Sequence: Synthetic oligonucleotide
  Sense strand starting at position 3581 of SEQ ID NO: 318175
uugacauaggcuggauaau

SEQ ID NO: 542518 - RNA, 19 nt, Artificial Sequence
  Description of Artificial Sequence: Synthetic oligonucleotide
  Antisense strand to SEQ ID NO: 542517
auuauccagccuaugucaa

SEQ ID NO: 542519 - RNA, 19 nt, Artificial Sequence
  Description of Artificial Sequence: Synthetic oligonucleotide
  Sense strand starting at position 3592 of SEQ ID NO: 318175
uggauaauucuuugucuga

SEQ ID NO: 542520 - RNA, 19 nt, Artificial Sequence
  Description of Artificial Sequence: Synthetic oligonucleotide
  Antisense strand to SEQ ID NO: 542519
ucagacaaagaauuaucca

SEQ ID NO: 542521 - RNA, 19 nt, Artificial Sequence
  Description of Artificial Sequence: Synthetic oligonucleotide
  Sense strand starting at position 3593 of SEQ ID NO: 318175
ggauaauucuuugucugag

SEQ ID NO: 542522 - RNA, 19 nt, Artificial Sequence
  Description of Artificial Sequence: Synthetic oligonucleotide
  Antisense strand to SEQ ID NO: 542521
cucagacaaagaauuaucc

SEQ ID NO: 542523 - RNA, 19 nt, Artificial Sequence
  Description of Artificial Sequence: Synthetic oligonucleotide
  Sense strand starting at position 3594 of SEQ ID NO: 318175
gauaauucuuugucugagg

SEQ ID NO: 542524 - RNA, 19 nt, Artificial Sequence
  Description of Artificial Sequence: Synthetic oligonucleotide
  Antisense strand to SEQ ID NO: 542523
ccucagacaaagaauuauc

SEQ ID NO: 542525 - RNA, 19 nt, Artificial Sequence
  Description of Artificial Sequence: Synthetic oligonucleotide
  Sense strand starting at position 3595 of SEQ ID NO: 318175
auaauucuuugucugagga

SEQ ID NO: 542526 - RNA, 19 nt, Artificial Sequence
  Description of Artificial Sequence: Synthetic oligonucleotide
  Antisense strand to SEQ ID NO: 542525
uccucagacaaagaauuau

SEQ ID NO: 542527 - RNA, 19 nt, Artificial Sequence
  Description of Artificial Sequence: Synthetic oligonucleotide
  Sense strand starting at position 3596 of SEQ ID NO: 318175
uaauucuuugucugaggag

SEQ ID NO: 542528 - RNA, 19 nt, Artificial Sequence
  Description of Artificial Sequence: Synthetic oligonucleotide
  Antisense strand to SEQ ID NO: 542527
cuccucagacaaagaauua

SEQ ID NO: 542529 - RNA, 19 nt, Artificial Sequence
  Description of Artificial Sequence: Synthetic oligonucleotide
  Sense strand starting at position 3610 of SEQ ID NO: 318175
aggagcuuucuugagcauu

SEQ ID NO: 542530 - RNA, 19 nt, Artificial Sequence
  Description of Artificial Sequence: Synthetic oligonucleotide
  Antisense strand to SEQ ID NO: 542529
aaugcucaagaaagcuccu

SEQ ID NO: 542531 - RNA, 19 nt, Artificial Sequence
  Description of Artificial Sequence: Synthetic oligonucleotide
  Sense strand starting at position 3613 of SEQ ID NO: 318175
agcuuucuugagcauugga

SEQ ID NO: 542532 - RNA, 19 nt, Artificial Sequence
  Description of Artificial Sequence: Synthetic oligonucleotide
  Antisense strand to SEQ ID NO: 542531
uccaaugcucaagaaagcu

SEQ ID NO: 542533 - RNA, 19 nt, Artificial Sequence
  Description of Artificial Sequence: Synthetic oligonucleotide
  Sense strand starting at position 3621 of SEQ ID NO: 318175
ugagcauuggaggauguuu

SEQ ID NO: 542534 - RNA, 19 nt, Artificial Sequence
  Description of Artificial Sequence: Synthetic oligonucleotide
  Antisense strand to SEQ ID NO: 542533
aaacauccuccaaugcuca

SEQ ID NO: 542535 - RNA, 19 nt, Artificial Sequence
  Description of Artificial Sequence: Synthetic oligonucleotide
  Sense strand starting at position 3626 of SEQ ID NO: 318175
auuggaggauguuuagcaa

SEQ ID NO: 542536 - RNA, 19 nt, Artificial Sequence
  Description of Artificial Sequence: Synthetic oligonucleotide
  Antisense strand to SEQ ID NO: 542535
uugcuaaacauccuccaau

SEQ ID NO: 542537 - RNA, 19 nt, Artificial Sequence
  Description of Artificial Sequence: Synthetic oligonucleotide
  Sense strand starting at position 3629 of SEQ ID NO: 318175
ggaggauguuuagcaacau

SEQ ID NO: 542538 - RNA, 19 nt, Artificial Sequence
  Description of Artificial Sequence: Synthetic oligonucleotide
  Antisense strand to SEQ ID NO: 542537
auguugcuaaacauccucc

SEQ ID NO: 542539 - RNA, 19 nt, Artificial Sequence
  Description of Artificial Sequence: Synthetic oligonucleotide
  Sense strand starting at position 3692 of SEQ ID NO: 318175
gucugaggacauugccaaa

SEQ ID NO: 542540 - RNA, 19 nt, Artificial Sequence
  Description of Artificial Sequence: Synthetic oligonucleotide
  Antisense strand to SEQ ID NO: 542539
uuuggcaauguccucagac

SEQ ID NO: 542541 - RNA, 19 nt, Artificial Sequence
  Description of Artificial Sequence: Synthetic oligonucleotide
  Sense strand starting at position 3758 of SEQ ID NO: 318175
gauaaaggcuucucugaga

SEQ ID NO: 542542 - RNA, 19 nt, Artificial Sequence
  Description of Artificial Sequence: Synthetic oligonucleotide
  Antisense strand to SEQ ID NO: 542541
ucucagagaagccuuuauc

SEQ ID NO: 542543 - RNA, 19 nt, Artificial Sequence
  Description of Artificial Sequence: Synthetic oligonucleotide
  Sense strand starting at position 3782 of SEQ ID NO: 318175
gauacagagcacugguuua

SEQ ID NO: 542544 - RNA, 19 nt, Artificial Sequence
  Description of Artificial Sequence: Synthetic oligonucleotide
  Antisense strand to SEQ ID NO: 542543
uaaaccagugcucuguauc

SEQ ID NO: 542545 - RNA, 19 nt, Artificial Sequence
  Description of Artificial Sequence: Synthetic oligonucleotide
  Sense strand starting at position 3903 of SEQ ID NO: 318175
ccuguaagaggcugauaua

SEQ ID NO: 542546 - RNA, 19 nt, Artificial Sequence
  Description of Artificial Sequence: Synthetic oligonucleotide
  Antisense strand to SEQ ID NO: 542545
uauaucagccucuuacagg

SEQ ID NO: 542547 - RNA, 19 nt, Artificial Sequence
  Description of Artificial Sequence: Synthetic oligonucleotide
  Sense strand starting at position 10 of SEQ ID NO: 318176
guguguauucuguaaauag

SEQ ID NO: 542548 - RNA, 19 nt, Artificial Sequence
  Description of Artificial Sequence: Synthetic oligonucleotide
  Antisense strand to SEQ ID NO: 542547
cuauuuacagaauacacac

SEQ ID NO: 542549 - RNA, 19 nt, Artificial Sequence
  Description of Artificial Sequence: Synthetic oligonucleotide
  Sense strand starting at position 20 of SEQ ID NO: 318176
uguaaauaguuucccuaca

SEQ ID NO: 542550 - RNA, 19 nt, Artificial Sequence
  Description of Artificial Sequence: Synthetic oligonucleotide
  Antisense strand to SEQ ID NO: 542549
uguagggaaacuauuuaca

SEQ ID NO: 542551 - RNA, 19 nt, Artificial Sequence
  Description of Artificial Sequence: Synthetic oligonucleotide
  Sense strand starting at position 21 of SEQ ID NO: 318176
guaaauaguuucccuacag

SEQ ID NO: 542552 - RNA, 19 nt, Artificial Sequence
  Description of Artificial Sequence: Synthetic oligonucleotide
  Antisense strand to SEQ ID NO: 542551
cuguagggaaacuauuuac

SEQ ID NO: 542553 - RNA, 19 nt, Artificial Sequence
  Description of Artificial Sequence: Synthetic oligonucleotide
  Sense strand starting at position 86 of SEQ ID NO: 318176
guuagaugcaaugggagua

SEQ ID NO: 542554 - RNA, 19 nt, Artificial Sequence
  Description of Artificial Sequence: Synthetic oligonucleotide
  Antisense strand to SEQ ID NO: 542553
uacucccauugcaucuaac

SEQ ID NO: 542555 - RNA, 19 nt, Artificial Sequence
  Description of Artificial Sequence: Synthetic oligonucleotide
  Sense strand starting at position 121 of SEQ ID NO: 318176
uguauuaagccacaguaaa

SEQ ID NO: 542556 - RNA, 19 nt, Artificial Sequence
  Description of Artificial Sequence: Synthetic oligonucleotide
  Antisense strand to SEQ ID NO: 542555
uuuacuguggcuuaauaca

SEQ ID NO: 542557 - RNA, 19 nt, Artificial Sequence
  Description of Artificial Sequence: Synthetic oligonucleotide
  Sense strand starting at position 148 of SEQ ID NO: 318176
caugaaguggcagaacuuu

SEQ ID NO: 542558 - RNA, 19 nt, Artificial Sequence
  Description of Artificial Sequence: Synthetic oligonucleotide
  Antisense strand to SEQ ID NO: 542557
aaaguucugccacuucaug

SEQ ID NO: 542559 - RNA, 19 nt, Artificial Sequence
  Description of Artificial Sequence: Synthetic oligonucleotide
  Sense strand starting at position 706 of SEQ ID NO: 318176
ugugcauuaccagaacuuu

SEQ ID NO: 542560 - RNA, 19 nt, Artificial Sequence
  Description of Artificial Sequence: Synthetic oligonucleotide
  Antisense strand to SEQ ID NO: 542559
aaaguucugguaaugcaca

SEQ ID NO: 542561 - RNA, 19 nt, Artificial Sequence
  Description of Artificial Sequence: Synthetic oligonucleotide
  Sense strand starting at position 829 of SEQ ID NO: 318176
uuuacuuagguuugaacaa

SEQ ID NO: 542562 - RNA, 19 nt, Artificial Sequence
  Description of Artificial Sequence: Synthetic oligonucleotide
  Antisense strand to SEQ ID NO: 542561
uuguucaaaccuaaguaaa

SEQ ID NO: 542563 - RNA, 19 nt, Artificial Sequence
  Description of Artificial Sequence: Synthetic oligonucleotide
  Sense strand starting at position 1016 of SEQ ID NO: 318176
aggaaacauuucuaaaugu

SEQ ID NO: 542564 - RNA, 19 nt, Artificial Sequence
  Description of Artificial Sequence: Synthetic oligonucleotide
  Antisense strand to SEQ ID NO: 542563
acauuuagaaauguuuccu

SEQ ID NO: 542565 - RNA, 19 nt, Artificial Sequence
  Description of Artificial Sequence: Synthetic oligonucleotide
  Sense strand starting at position 1086 of SEQ ID NO: 318176
agaguuuaacaauggcuaa

SEQ ID NO: 542566 - RNA, 19 nt, Artificial Sequence
  Description of Artificial Sequence: Synthetic oligonucleotide
  Antisense strand to SEQ ID NO: 542565
uuagccauuguuaaacucu

SEQ ID NO: 542567 - RNA, 19 nt, Artificial Sequence
  Description of Artificial Sequence: Synthetic oligonucleotide
  Sense strand starting at position 1149 of SEQ ID NO: 318176
caaagaguuaugcaggagu

SEQ ID NO: 542568 - RNA, 19 nt, Artificial Sequence
  Description of Artificial Sequence: Synthetic oligonucleotide
  Antisense strand to SEQ ID NO: 542567
acuccugcauaacucuuug

SEQ ID NO: 542569 - RNA, 19 nt, Artificial Sequence
  Description of Artificial Sequence: Synthetic oligonucleotide
  Sense strand starting at position 1151 of SEQ ID NO: 318176
aagaguuaugcaggaguua

SEQ ID NO: 542570 - RNA, 19 nt, Artificial Sequence
  Description of Artificial Sequence: Synthetic oligonucleotide
  Antisense strand to SEQ ID NO: 542569
uaacuccugcauaacucuu

SEQ ID NO: 542571 - RNA, 19 nt, Artificial Sequence
  Description of Artificial Sequence: Synthetic oligonucleotide
  Sense strand starting at position 1152 of SEQ ID NO: 318176
agaguuaugcaggaguuaa

SEQ ID NO: 542572 - RNA, 19 nt, Artificial Sequence
  Description of Artificial Sequence: Synthetic oligonucleotide
  Antisense strand to SEQ ID NO: 542571
uuaacuccugcauaacucu

SEQ ID NO: 542573 - RNA, 19 nt, Artificial Sequence
  Description of Artificial Sequence: Synthetic oligonucleotide
  Sense strand starting at position 1560 of SEQ ID NO: 318176
ucgacagacuucccagaca

SEQ ID NO: 542574 - RNA, 19 nt, Artificial Sequence
  Description of Artificial Sequence: Synthetic oligonucleotide
  Antisense strand to SEQ ID NO: 542573
ugucugggaagucugucga

SEQ ID NO: 542575 - RNA, 19 nt, Artificial Sequence
  Description of Artificial Sequence: Synthetic oligonucleotide
  Sense strand starting at position 1685 of SEQ ID NO: 318176
ucauaucuauugucucuga

SEQ ID NO: 542576 - RNA, 19 nt, Artificial Sequence
  Description of Artificial Sequence: Synthetic oligonucleotide
  Antisense strand to SEQ ID NO: 542575
ucagagacaauagauauga

SEQ ID NO: 542577 - RNA, 19 nt, Artificial Sequence
  Description of Artificial Sequence: Synthetic oligonucleotide
  Sense strand starting at position 1719 of SEQ ID NO: 318176
cacugaacccugugaugug

SEQ ID NO: 542578 - RNA, 19 nt, Artificial Sequence
  Description of Artificial Sequence: Synthetic oligonucleotide
  Antisense strand to SEQ ID NO: 542577
cacaucacaggguucagug

SEQ ID NO: 542579 - RNA, 19 nt, Artificial Sequence
  Description of Artificial Sequence: Synthetic oligonucleotide
  Sense strand starting at position 1735 of SEQ ID NO: 318176
gugucauaccuguaaccag

SEQ ID NO: 542580 - RNA, 19 nt, Artificial Sequence
  Description of Artificial Sequence: Synthetic oligonucleotide
  Antisense strand to SEQ ID NO: 542579
cugguuacagguaugacac

SEQ ID NO: 542581 - RNA, 19 nt, Artificial Sequence
  Description of Artificial Sequence: Synthetic oligonucleotide
  Sense strand starting at position 1794 of SEQ ID NO: 318176
gcacauauucgugcccagu

SEQ ID NO: 542582 - RNA, 19 nt, Artificial Sequence
  Description of Artificial Sequence: Synthetic oligonucleotide
  Antisense strand to SEQ ID NO: 542581
acugggcacgaauaugugc

SEQ ID NO: 542583 - RNA, 19 nt, Artificial Sequence
  Description of Artificial Sequence: Synthetic oligonucleotide
  Sense strand starting at position 1800 of SEQ ID NO: 318176
auucgugcccaguaaagga

SEQ ID NO: 542584 - RNA, 19 nt, Artificial Sequence
  Description of Artificial Sequence: Synthetic oligonucleotide
  Antisense strand to SEQ ID NO: 542583
uccuuuacugggcacgaau

SEQ ID NO: 542585 - RNA, 19 nt, Artificial Sequence
  Description of Artificial Sequence: Synthetic oligonucleotide
  Sense strand starting at position 1856 of SEQ ID NO: 318176
cugacaaugcuacauguca

SEQ ID NO: 542586 - RNA, 19 nt, Artificial Sequence
  Description of Artificial Sequence: Synthetic oligonucleotide
  Antisense strand to SEQ ID NO: 542585
ugacauguagcauugucag

SEQ ID NO: 542587 - RNA, 19 nt, Artificial Sequence
  Description of Artificial Sequence: Synthetic oligonucleotide
  Sense strand starting at position 2374 of SEQ ID NO: 318176
gcugacugggauggugaaa

SEQ ID NO: 542588 - RNA, 19 nt, Artificial Sequence
  Description of Artificial Sequence: Synthetic oligonucleotide
  Antisense strand to SEQ ID NO: 542587
uuucaccaucccagucagc

SEQ ID NO: 542589 - RNA, 19 nt, Artificial Sequence
  Description of Artificial Sequence: Synthetic oligonucleotide
  Sense strand starting at position 2711 of SEQ ID NO: 318176
gagccaucauuaguuggaa

SEQ ID NO: 542590 - RNA, 19 nt, Artificial Sequence
  Description of Artificial Sequence: Synthetic oligonucleotide
  Antisense strand to SEQ ID NO: 542589
uuccaacuaaugauggcuc

SEQ ID NO: 542591 - RNA, 19 nt, Artificial Sequence
  Description of Artificial Sequence: Synthetic oligonucleotide
  Sense strand starting at position 2712 of SEQ ID NO: 318176
agccaucauuaguuggaau

SEQ ID NO: 542592 - RNA, 19 nt, Artificial Sequence
  Description of Artificial Sequence: Synthetic oligonucleotide
  Antisense strand to SEQ ID NO: 542591
auuccaacuaaugauggcu

SEQ ID NO: 542593 - RNA, 19 nt, Artificial Sequence
  Description of Artificial Sequence: Synthetic oligonucleotide
  Sense strand starting at position 2714 of SEQ ID NO: 318176
ccaucauuaguuggaauau

SEQ ID NO: 542594 - RNA, 19 nt, Artificial Sequence
  Description of Artificial Sequence: Synthetic oligonucleotide
  Antisense strand to SEQ ID NO: 542593
auauuccaacuaaugaugg

SEQ ID NO: 542595 - RNA, 19 nt, Artificial Sequence
  Description of Artificial Sequence: Synthetic oligonucleotide
  Sense strand starting at position 2792 of SEQ ID NO: 318176
gucugucucagcuuguuua

SEQ ID NO: 542596 - RNA, 19 nt, Artificial Sequence
  Description of Artificial Sequence: Synthetic oligonucleotide
  Antisense strand to SEQ ID NO: 542595
uaaacaagcugagacagac

SEQ ID NO: 542597 - RNA, 19 nt, Artificial Sequence
  Description of Artificial Sequence: Synthetic oligonucleotide
  Sense strand starting at position 2962 of SEQ ID NO: 318176
uugagagaauaguuugauc

SEQ ID NO: 542598 - RNA, 19 nt, Artificial Sequence
  Description of Artificial Sequence: Synthetic oligonucleotide
  Antisense strand to SEQ ID NO: 542597
gaucaaacuauucucucaa

SEQ ID NO: 542599 - RNA, 19 nt, Artificial Sequence
  Description of Artificial Sequence: Synthetic oligonucleotide
  Sense strand starting at position 2964 of SEQ ID NO: 318176
gagagaauaguuugauccu

SEQ ID NO: 542600 - RNA, 19 nt, Artificial Sequence
  Description of Artificial Sequence: Synthetic oligonucleotide
  Antisense strand to SEQ ID NO: 542599
aggaucaaacuauucucuc

SEQ ID NO: 542601 - RNA, 19 nt, Artificial Sequence
  Description of Artificial Sequence: Synthetic oligonucleotide
  Sense strand starting at position 2967 of SEQ ID NO: 318176
agaauaguuugauccugag

SEQ ID NO: 542602 - RNA, 19 nt, Artificial Sequence
  Description of Artificial Sequence: Synthetic oligonucleotide
  Antisense strand to SEQ ID NO: 542601
cucaggaucaaacuauucu

SEQ ID NO: 542603 - RNA, 19 nt, Artificial Sequence
  Description of Artificial Sequence: Synthetic oligonucleotide
  Sense strand starting at position 3002 of SEQ ID NO: 318176
acuguacuuugucuaagaa

SEQ ID NO: 542604 - RNA, 19 nt, Artificial Sequence
  Description of Artificial Sequence: Synthetic oligonucleotide
  Antisense strand to SEQ ID NO: 542603
uucuuagacaaaguacagu

SEQ ID NO: 542605 - RNA, 19 nt, Artificial Sequence
  Description of Artificial Sequence: Synthetic oligonucleotide
  Sense strand starting at position 3003 of SEQ ID NO: 318176
cuguacuuugucuaagaac

SEQ ID NO: 542606 - RNA, 19 nt, Artificial Sequence
  Description of Artificial Sequence: Synthetic oligonucleotide
  Antisense strand to SEQ ID NO: 542605
guucuuagacaaaguacag

SEQ ID NO: 542607 - RNA, 19 nt, Artificial Sequence
  Description of Artificial Sequence: Synthetic oligonucleotide
  Sense strand starting at position 3131 of SEQ ID NO: 318176
ucuagugauguuuaaaugu

SEQ ID NO: 542608 - RNA, 19 nt, Artificial Sequence
  Description of Artificial Sequence: Synthetic oligonucleotide
  Antisense strand to SEQ ID NO: 542607
acauuuaaacaucacuaga

SEQ ID NO: 542609 - RNA, 19 nt, Artificial Sequence
  Description of Artificial Sequence: Synthetic oligonucleotide
  Sense strand starting at position 3137 of SEQ ID NO: 318176
gauguuuaaaugugggaga

SEQ ID NO: 542610 - RNA, 19 nt, Artificial Sequence
  Description of Artificial Sequence: Synthetic oligonucleotide
  Antisense strand to SEQ ID NO: 542609
ucucccacauuuaaacauc

SEQ ID NO: 542611 - RNA, 19 nt, Artificial Sequence
  Description of Artificial Sequence: Synthetic oligonucleotide
  Sense strand starting at position 3159 of SEQ ID NO: 318176
gaaggaagugucuaguggu

SEQ ID NO: 542612 - RNA, 19 nt, Artificial Sequence
  Description of Artificial Sequence: Synthetic oligonucleotide
  Antisense strand to SEQ ID NO: 542611
accacuagacacuuccuuc

SEQ ID NO: 542613 - RNA, 19 nt, Artificial Sequence
  Description of Artificial Sequence: Synthetic oligonucleotide
  Sense strand starting at position 3248 of SEQ ID NO: 318176
gcucucaauugauuagauu

SEQ ID NO: 542614 - RNA, 19 nt, Artificial Sequence
  Description of Artificial Sequence: Synthetic oligonucleotide
  Antisense strand to SEQ ID NO: 542613
aaucuaaucaauugagagc

SEQ ID NO: 542615 - RNA, 19 nt, Artificial Sequence
  Description of Artificial Sequence: Synthetic oligonucleotide
  Sense strand starting at position 3490 of SEQ ID NO: 318176
cuuauauguggaggaguaa

SEQ ID NO: 542616 - RNA, 19 nt, Artificial Sequence
  Description of Artificial Sequence: Synthetic oligonucleotide
  Antisense strand to SEQ ID NO: 542615
uuacuccuccacauauaag

SEQ ID NO: 542617 - RNA, 19 nt, Artificial Sequence
  Description of Artificial Sequence: Synthetic oligonucleotide
  Sense strand starting at position 3502 of SEQ ID NO: 318176
ggaguaauaucaucucuaa

SEQ ID NO: 542618 - RNA, 19 nt, Artificial Sequence
  Description of Artificial Sequence: Synthetic oligonucleotide
  Antisense strand to SEQ ID NO: 542617
uuagagaugauauuacucc

SEQ ID NO: 542619 - RNA, 19 nt, Artificial Sequence
  Description of Artificial Sequence: Synthetic oligonucleotide
  Sense strand starting at position 3571 of SEQ ID NO: 318176
cgaauucuagcacaaauga

SEQ ID NO: 542620 - RNA, 19 nt, Artificial Sequence
  Description of Artificial Sequence: Synthetic oligonucleotide
  Antisense strand to SEQ ID NO: 542619
ucauuugugcuagaauucg

SEQ ID NO: 542621 - RNA, 19 nt, Artificial Sequence
  Description of Artificial Sequence: Synthetic oligonucleotide
  Sense strand starting at position 3864 of SEQ ID NO: 318176
acagaaaguucccugaaug

SEQ ID NO: 542622 - RNA, 19 nt, Artificial Sequence
  Description of Artificial Sequence: Synthetic oligonucleotide
  Antisense strand to SEQ ID NO: 542621
cauucagggaacuuucugu

SEQ ID NO: 542623 - RNA, 19 nt, Artificial Sequence
  Description of Artificial Sequence: Synthetic oligonucleotide
  Sense strand starting at position 3865 of SEQ ID NO: 318176
cagaaaguucccugaaugu

SEQ ID NO: 542624 - RNA, 19 nt, Artificial Sequence
  Description of Artificial Sequence: Synthetic oligonucleotide
  Antisense strand to SEQ ID NO: 542623
acauucagggaacuuucug

SEQ ID NO: 542625 - RNA, 19 nt, Artificial Sequence
  Description of Artificial Sequence: Synthetic oligonucleotide
  Sense strand starting at position 3875 of SEQ ID NO: 318176
ccugaaugucaagaguugu

SEQ ID NO: 542626 - RNA, 19 nt, Artificial Sequence
  Description of Artificial Sequence: Synthetic oligonucleotide
  Antisense strand to SEQ ID NO: 542625
acaacucuugacauucagg

SEQ ID NO: 542627 - RNA, 19 nt, Artificial Sequence
  Description of Artificial Sequence: Synthetic oligonucleotide
  Sense strand starting at position 24 of SEQ ID NO: 318177
aguuuaaguuacucuaaac

SEQ ID NO: 542628 - RNA, 19 nt, Artificial Sequence
  Description of Artificial Sequence: Synthetic oligonucleotide
  Antisense strand to SEQ ID NO: 542627
guuuagaguaacuuaaacu

SEQ ID NO: 542629 - RNA, 19 nt, Artificial Sequence
  Description of Artificial Sequence: Synthetic oligonucleotide
  Sense strand starting at position 57 of SEQ ID NO: 318177
uugucuaaacucugaagua

SEQ ID NO: 542630 - RNA, 19 nt, Artificial Sequence
  Description of Artificial Sequence: Synthetic oligonucleotide
  Antisense strand to SEQ ID NO: 542629
uacuucagaguuuagacaa

SEQ ID NO: 542631 - RNA, 19 nt, Artificial Sequence
  Description of Artificial Sequence: Synthetic oligonucleotide
  Sense strand starting at position 166 of SEQ ID NO: 318177
aucguaucuaaucgaauga

SEQ ID NO: 542632 - RNA, 19 nt, Artificial Sequence
  Description of Artificial Sequence: Synthetic oligonucleotide
  Antisense strand to SEQ ID NO: 542631
ucauucgauuagauacgau

SEQ ID NO: 542633 - RNA, 19 nt, Artificial Sequence
  Description of Artificial Sequence: Synthetic oligonucleotide
  Sense strand starting at position 167 of SEQ ID NO: 318177
ucguaucuaaucgaaugau

SEQ ID NO: 542634 - RNA, 19 nt, Artificial Sequence
  Description of Artificial Sequence: Synthetic oligonucleotide
  Antisense strand to SEQ ID NO: 542633
aucauucgauuagauacga

SEQ ID NO: 542635 - RNA, 19 nt, Artificial Sequence
  Description of Artificial Sequence: Synthetic oligonucleotide
  Sense strand starting at position 193 of SEQ ID NO: 318177
uguauagguaaugggagau

SEQ ID NO: 542636 - RNA, 19 nt, Artificial Sequence
  Description of Artificial Sequence: Synthetic oligonucleotide
  Antisense strand to SEQ ID NO: 542635
aucucccauuaccuauaca

SEQ ID NO: 542637 - RNA, 19 nt, Artificial Sequence
  Description of Artificial Sequence: Synthetic oligonucleotide
  Sense strand starting at position 237 of SEQ ID NO: 318177
cacaguacucugggacagu

SEQ ID NO: 542638 - RNA, 19 nt, Artificial Sequence
  Description of Artificial Sequence: Synthetic oligonucleotide
  Antisense strand to SEQ ID NO: 542637
acugucccagaguacugug

SEQ ID NO: 542639 - RNA, 19 nt, Artificial Sequence
  Description of Artificial Sequence: Synthetic oligonucleotide
  Sense strand starting at position 240 of SEQ ID NO: 318177
aguacucugggacagugau

SEQ ID NO: 542640 - RNA, 19 nt, Artificial Sequence
  Description of Artificial Sequence: Synthetic oligonucleotide
  Antisense strand to SEQ ID NO: 542639
aucacugucccagaguacu

SEQ ID NO: 542641 - RNA, 19 nt, Artificial Sequence
  Description of Artificial Sequence: Synthetic oligonucleotide
  Sense strand starting at position 477 of SEQ ID NO: 318177
ugacuacuuaggugggauu

SEQ ID NO: 542642 - RNA, 19 nt, Artificial Sequence
  Description of Artificial Sequence: Synthetic oligonucleotide
  Antisense strand to SEQ ID NO: 542641
aaucccaccuaaguaguca

SEQ ID NO: 542643 - RNA, 19 nt, Artificial Sequence
  Description of Artificial Sequence: Synthetic oligonucleotide
  Sense strand starting at position 484 of SEQ ID NO: 318177
uuaggugggauuggucuaa

SEQ ID NO: 542644 - RNA, 19 nt, Artificial Sequence
  Description of Artificial Sequence: Synthetic oligonucleotide
  Antisense strand to SEQ ID NO: 542643
uuagaccaaucccaccuaa

SEQ ID NO: 542645 - RNA, 19 nt, Artificial Sequence
  Description of Artificial Sequence: Synthetic oligonucleotide
  Sense strand starting at position 488 of SEQ ID NO: 318177
gugggauuggucuaacuuc

SEQ ID NO: 542646 - RNA, 19 nt, Artificial Sequence
  Description of Artificial Sequence: Synthetic oligonucleotide
  Antisense strand to SEQ ID NO: 542645
gaaguuagaccaaucccac

SEQ ID NO: 542647 - RNA, 19 nt, Artificial Sequence
  Description of Artificial Sequence: Synthetic oligonucleotide
  Sense strand starting at position 571 of SEQ ID NO: 318177
uaacguuaacuaugagaca

SEQ ID NO: 542648 - RNA, 19 nt, Artificial Sequence
  Description of Artificial Sequence: Synthetic oligonucleotide
  Antisense strand to SEQ ID NO: 542647
ugucucauaguuaacguua

SEQ ID NO: 542649 - RNA, 19 nt, Artificial Sequence
  Description of Artificial Sequence: Synthetic oligonucleotide
  Sense strand starting at position 596 of SEQ ID NO: 318177
guucucaugagucaguaag

SEQ ID NO: 542650 - RNA, 19 nt, Artificial Sequence
  Description of Artificial Sequence: Synthetic oligonucleotide
  Antisense strand to SEQ ID NO: 542649
cuuacugacucaugagaac

SEQ ID NO: 542651 - RNA, 19 nt, Artificial Sequence
  Description of Artificial Sequence: Synthetic oligonucleotide
  Sense strand starting at position 602 of SEQ ID NO: 318177
augagucaguaagcuuuaa

SEQ ID NO: 542652 - RNA, 19 nt, Artificial Sequence
  Description of Artificial Sequence: Synthetic oligonucleotide
  Antisense strand to SEQ ID NO: 542651
uuaaagcuuacugacucau

SEQ ID NO: 542653 - RNA, 19 nt, Artificial Sequence
  Description of Artificial Sequence: Synthetic oligonucleotide
  Sense strand starting at position 614 of SEQ ID NO: 318177
gcuuuaauucuacagguuu

SEQ ID NO: 542654 - RNA, 19 nt, Artificial Sequence
  Description of Artificial Sequence: Synthetic oligonucleotide
  Antisense strand to SEQ ID NO: 542653
aaaccuguagaauuaaagc

SEQ ID NO: 542655 - RNA, 19 nt, Artificial Sequence
  Description of Artificial Sequence: Synthetic oligonucleotide
  Sense strand starting at position 729 of SEQ ID NO: 318177
gugaaaguagauuaagcuu

SEQ ID NO: 542656 - RNA, 19 nt, Artificial Sequence
  Description of Artificial Sequence: Synthetic oligonucleotide
  Antisense strand to SEQ ID NO: 542655
aagcuuaaucuacuuucac

SEQ ID NO: 542657 - RNA, 19 nt, Artificial Sequence
  Description of Artificial Sequence: Synthetic oligonucleotide
  Sense strand starting at position 784 of SEQ ID NO: 318177
aauguaaacguauguaaca

SEQ ID NO: 542658 - RNA, 19 nt, Artificial Sequence
  Description of Artificial Sequence: Synthetic oligonucleotide
  Antisense strand to SEQ ID NO: 542657
uguuacauacguuuacauu

SEQ ID NO: 542659 - RNA, 19 nt, Artificial Sequence
  Description of Artificial Sequence: Synthetic oligonucleotide
  Sense strand starting at position 974 of SEQ ID NO: 318177
agacauggucugggcauua

SEQ ID NO: 542660 - RNA, 19 nt, Artificial Sequence
  Description of Artificial Sequence: Synthetic oligonucleotide
  Antisense strand to SEQ ID NO: 542659
uaaugcccagaccaugucu

SEQ ID NO: 542661 - RNA, 19 nt, Artificial Sequence
  Description of Artificial Sequence: Synthetic oligonucleotide
  Sense strand starting at position 1015 of SEQ ID NO: 318177
uggauauguucuguggaca

SEQ ID NO: 542662 - RNA, 19 nt, Artificial Sequence
  Description of Artificial Sequence: Synthetic oligonucleotide
  Antisense strand to SEQ ID NO: 542661
uguccacagaacauaucca

SEQ ID NO: 542663 - RNA, 19 nt, Artificial Sequence
  Description of Artificial Sequence: Synthetic oligonucleotide
  Sense strand starting at position 1016 of SEQ ID NO: 318177
ggauauguucuguggacag

SEQ ID NO: 542664 - RNA, 19 nt, Artificial Sequence
  Description of Artificial Sequence: Synthetic oligonucleotide
  Antisense strand to SEQ ID NO: 542663
cuguccacagaacauaucc

SEQ ID NO: 542665 - RNA, 19 nt, Artificial Sequence
  Description of Artificial Sequence: Synthetic oligonucleotide
  Sense strand starting at position 1018 of SEQ ID NO: 318177
auauguucuguggacagau

SEQ ID NO: 542666 - RNA, 19 nt, Artificial Sequence
  Description of Artificial Sequence: Synthetic oligonucleotide
  Antisense strand to SEQ ID NO: 542665
aucuguccacagaacauau

SEQ ID NO: 542667 - RNA, 19 nt, Artificial Sequence
  Description of Artificial Sequence: Synthetic oligonucleotide
  Sense strand starting at position 1020 of SEQ ID NO: 318177
auguucuguggacagauua

SEQ ID NO: 542668 - RNA, 19 nt, Artificial Sequence
  Description of Artificial Sequence: Synthetic oligonucleotide
  Antisense strand to SEQ ID NO: 542667
uaaucuguccacagaacau

SEQ ID NO: 542669 - RNA, 19 nt, Artificial Sequence
  Description of Artificial Sequence: Synthetic oligonucleotide
  Sense strand starting at position 1134 of SEQ ID NO: 318177
agggaaacuccguaguggu

SEQ ID NO: 542670 - RNA, 19 nt, Artificial Sequence
  Description of Artificial Sequence: Synthetic oligonucleotide
  Antisense strand to SEQ ID NO: 542669
accacuacggaguuucccu

SEQ ID NO: 542671 - RNA, 19 nt, Artificial Sequence
  Description of Artificial Sequence: Synthetic oligonucleotide
  Sense strand starting at position 1320 of SEQ ID NO: 318177
uaacauagugcugagaacu

SEQ ID NO: 542672 - RNA, 19 nt, Artificial Sequence
  Description of Artificial Sequence: Synthetic oligonucleotide
  Antisense strand to SEQ ID NO: 542671
aguucucagcacuauguua

SEQ ID NO: 542673 - RNA, 19 nt, Artificial Sequence
  Description of Artificial Sequence: Synthetic oligonucleotide
  Sense strand starting at position 1588 of SEQ ID NO: 318177
ccgugugcgcugagauaaa

SEQ ID NO: 542674 - RNA, 19 nt, Artificial Sequence
  Description of Artificial Sequence: Synthetic oligonucleotide
  Antisense strand to SEQ ID NO: 542673
uuuaucucagcgcacacgg

SEQ ID NO: 542675 - RNA, 19 nt, Artificial Sequence
  Description of Artificial Sequence: Synthetic oligonucleotide
  Sense strand starting at position 2101 of SEQ ID NO: 318177
gaccuuaggcagugaauuc

SEQ ID NO: 542676 - RNA, 19 nt, Artificial Sequence
  Description of Artificial Sequence: Synthetic oligonucleotide
  Antisense strand to SEQ ID NO: 542675
gaauucacugccuaagguc

SEQ ID NO: 542677 - RNA, 19 nt, Artificial Sequence
  Description of Artificial Sequence: Synthetic oligonucleotide
  Sense strand starting at position 2245 of SEQ ID NO: 318177
aggaucgacugagcaauau

SEQ ID NO: 542678 - RNA, 19 nt, Artificial Sequence
  Description of Artificial Sequence: Synthetic oligonucleotide
  Antisense strand to SEQ ID NO: 542677
auauugcucagucgauccu

SEQ ID NO: 542679 - RNA, 19 nt, Artificial Sequence
  Description of Artificial Sequence: Synthetic oligonucleotide
  Sense strand starting at position 2854 of SEQ ID NO: 318177
gaaaguaaacccuggcaca

SEQ ID NO: 542680 - RNA, 19 nt, Artificial Sequence
  Description of Artificial Sequence: Synthetic oligonucleotide
  Antisense strand to SEQ ID NO: 542679
ugugccaggguuuacuuuc

SEQ ID NO: 542681 - RNA, 19 nt, Artificial Sequence
  Description of Artificial Sequence: Synthetic oligonucleotide
  Sense strand starting at position 3064 of SEQ ID NO: 318177
gucagaacaccaugacuuu

SEQ ID NO: 542682 - RNA, 19 nt, Artificial Sequence
  Description of Artificial Sequence: Synthetic oligonucleotide
  Antisense strand to SEQ ID NO: 542681
aaagucaugguguucugac

SEQ ID NO: 542683 - RNA, 19 nt, Artificial Sequence
  Description of Artificial Sequence: Synthetic oligonucleotide
  Sense strand starting at position 3110 of SEQ ID NO: 318177
ucauuuccuuauucgugua

SEQ ID NO: 542684 - RNA, 19 nt, Artificial Sequence
  Description of Artificial Sequence: Synthetic oligonucleotide
  Antisense strand to SEQ ID NO: 542683
uacacgaauaaggaaauga

SEQ ID NO: 542685 - RNA, 19 nt, Artificial Sequence
  Description of Artificial Sequence: Synthetic oligonucleotide
  Sense strand starting at position 3112 of SEQ ID NO: 318177
auuuccuuauucguguaaa

SEQ ID NO: 542686 - RNA, 19 nt, Artificial Sequence
  Description of Artificial Sequence: Synthetic oligonucleotide
  Antisense strand to SEQ ID NO: 542685
uuuacacgaauaaggaaau

SEQ ID NO: 542687 - RNA, 19 nt, Artificial Sequence
  Description of Artificial Sequence: Synthetic oligonucleotide
  Sense strand starting at position 3115 of SEQ ID NO: 318177
uccuuauucguguaaacau

SEQ ID NO: 542688 - RNA, 19 nt, Artificial Sequence
  Description of Artificial Sequence: Synthetic oligonucleotide
  Antisense strand to SEQ ID NO: 542687
auguuuacacgaauaagga

SEQ ID NO: 542689 - RNA, 19 nt, Artificial Sequence
  Description of Artificial Sequence: Synthetic oligonucleotide
  Sense strand starting at position 3137 of SEQ ID NO: 318177
guuucucuagaacaguaau

SEQ ID NO: 542690 - RNA, 19 nt, Artificial Sequence
  Description of Artificial Sequence: Synthetic oligonucleotide
  Antisense strand to SEQ ID NO: 542689
auuacuguucuagagaaac

SEQ ID NO: 542691 - RNA, 19 nt, Artificial Sequence
  Description of Artificial Sequence: Synthetic oligonucleotide
  Sense strand starting at position 3140 of SEQ ID NO: 318177
ucucuagaacaguaaucga

SEQ ID NO: 542692 - RNA, 19 nt, Artificial Sequence
  Description of Artificial Sequence: Synthetic oligonucleotide
  Antisense strand to SEQ ID NO: 542691
ucgauuacuguucuagaga

SEQ ID NO: 542693 - RNA, 19 nt, Artificial Sequence
  Description of Artificial Sequence: Synthetic oligonucleotide
  Sense strand starting at position 3156 of SEQ ID NO: 318177
cgaagacagccugagguuu

SEQ ID NO: 542694 - RNA, 19 nt, Artificial Sequence
  Description of Artificial Sequence: Synthetic oligonucleotide
  Antisense strand to SEQ ID NO: 542693
aaaccucaggcugucuucg

SEQ ID NO: 542695 - RNA, 19 nt, Artificial Sequence
  Description of Artificial Sequence: Synthetic oligonucleotide
  Sense strand starting at position 3359 of SEQ ID NO: 318177
gggaauucgguuuaaaguu

SEQ ID NO: 542696 - RNA, 19 nt, Artificial Sequence
  Description of Artificial Sequence: Synthetic oligonucleotide
  Antisense strand to SEQ ID NO: 542695
aacuuuaaaccgaauuccc

SEQ ID NO: 542697 - RNA, 19 nt, Artificial Sequence
  Description of Artificial Sequence: Synthetic oligonucleotide
  Sense strand starting at position 3402 of SEQ ID NO: 318177
cuuaccuuucuaugggaga

SEQ ID NO: 542698 - RNA, 19 nt, Artificial Sequence
  Description of Artificial Sequence: Synthetic oligonucleotide
  Antisense strand to SEQ ID NO: 542697
ucucccauagaaagguaag

SEQ ID NO: 542699 - RNA, 19 nt, Artificial Sequence
  Description of Artificial Sequence: Synthetic oligonucleotide
  Sense strand starting at position 3696 of SEQ ID NO: 318177
gguggcuaagucuauacau

SEQ ID NO: 542700 - RNA, 19 nt, Artificial Sequence
  Description of Artificial Sequence: Synthetic oligonucleotide
  Antisense strand to SEQ ID NO: 542699
auguauagacuuagccacc

SEQ ID NO: 542701 - RNA, 19 nt, Artificial Sequence
  Description of Artificial Sequence: Synthetic oligonucleotide
  Sense strand starting at position 3738 of SEQ ID NO: 318177
aaaguuauguuagcagauu

SEQ ID NO: 542702 - RNA, 19 nt, Artificial Sequence
  Description of Artificial Sequence: Synthetic oligonucleotide
  Antisense strand to SEQ ID NO: 542701
aaucugcuaacauaacuuu

SEQ ID NO: 542703 - RNA, 19 nt, Artificial Sequence
  Description of Artificial Sequence: Synthetic oligonucleotide
  Sense strand starting at position 3854 of SEQ ID NO: 318177
gguaaaugaaagugcaauu

SEQ ID NO: 542704 - RNA, 19 nt, Artificial Sequence
  Description of Artificial Sequence: Synthetic oligonucleotide
  Antisense strand to SEQ ID NO: 542703
aauugcacuuucauuuacc

SEQ ID NO: 542705 - RNA, 19 nt, Artificial Sequence
  Description of Artificial Sequence: Synthetic oligonucleotide
  Sense strand starting at position 3884 of SEQ ID NO: 318177
gcuagugagacuuagcuga

SEQ ID NO: 542706 - RNA, 19 nt, Artificial Sequence
  Description of Artificial Sequence: Synthetic oligonucleotide
  Antisense strand to SEQ ID NO: 542705
ucagcuaagucucacuagc

SEQ ID NO: 542707 - RNA, 19 nt, Artificial Sequence
  Description of Artificial Sequence: Synthetic oligonucleotide
  Sense strand starting at position 84 of SEQ ID NO: 318178
aacgcagauccuuggacuu

SEQ ID NO: 542708 - RNA, 19 nt, Artificial Sequence
  Description of Artificial Sequence: Synthetic oligonucleotide
  Antisense strand to SEQ ID NO: 542707
aaguccaaggaucugcguu

SEQ ID NO: 542709 - RNA, 19 nt, Artificial Sequence
  Description of Artificial Sequence: Synthetic oligonucleotide
  Sense strand starting at position 140 of SEQ ID NO: 318178
cgacuucuuaauggguuua

SEQ ID NO: 542710 - RNA, 19 nt, Artificial Sequence
  Description of Artificial Sequence: Synthetic oligonucleotide
  Antisense strand to SEQ ID NO: 542709
uaaacccauuaagaagucg

SEQ ID NO: 542711 - RNA, 19 nt, Artificial Sequence
  Description of Artificial Sequence: Synthetic oligonucleotide
  Sense strand starting at position 229 of SEQ ID NO: 318178
cuuggugagcaccgagaau

SEQ ID NO: 542712 - RNA, 19 nt, Artificial Sequence
  Description of Artificial Sequence: Synthetic oligonucleotide
  Antisense strand to SEQ ID NO: 542711
auucucggugcucaccaag

SEQ ID NO: 542713 - RNA, 19 nt, Artificial Sequence
  Description of Artificial Sequence: Synthetic oligonucleotide
  Sense strand starting at position 390 of SEQ ID NO: 318178
gaaaguaaacccuggcaca

SEQ ID NO: 542714 - RNA, 19 nt, Artificial Sequence
  Description of Artificial Sequence: Synthetic oligonucleotide
  Antisense strand to SEQ ID NO: 542713
ugugccaggguuuacuuuc

SEQ ID NO: 542715 - RNA, 19 nt, Artificial Sequence
  Description of Artificial Sequence: Synthetic oligonucleotide
  Sense strand starting at position 467 of SEQ ID NO: 318178
gauagcaagcucuaaacgu

SEQ ID NO: 542716 - RNA, 19 nt, Artificial Sequence
  Description of Artificial Sequence: Synthetic oligonucleotide
  Antisense strand to SEQ ID NO: 542715
acguuuagagcuugcuauc

SEQ ID NO: 542717 - RNA, 19 nt, Artificial Sequence
  Description of Artificial Sequence: Synthetic oligonucleotide
  Sense strand starting at position 600 of SEQ ID NO: 318178
gucagaacaccaugacuuu

SEQ ID NO: 542718 - RNA, 19 nt, Artificial Sequence
  Description of Artificial Sequence: Synthetic oligonucleotide
  Antisense strand to SEQ ID NO: 542717
aaagucaugguguucugac

SEQ ID NO: 542719 - RNA, 19 nt, Artificial Sequence
  Description of Artificial Sequence: Synthetic oligonucleotide
  Sense strand starting at position 646 of SEQ ID NO: 318178
ucauuuccuuauucgugua

SEQ ID NO: 542720 - RNA, 19 nt, Artificial Sequence
  Description of Artificial Sequence: Synthetic oligonucleotide
  Antisense strand to SEQ ID NO: 542719
uacacgaauaaggaaauga

SEQ ID NO: 542721 - RNA, 19 nt, Artificial Sequence
  Description of Artificial Sequence: Synthetic oligonucleotide
  Sense strand starting at position 648 of SEQ ID NO: 318178
auuuccuuauucguguaaa

SEQ ID NO: 542722 - RNA, 19 nt, Artificial Sequence
  Description of Artificial Sequence: Synthetic oligonucleotide
  Antisense strand to SEQ ID NO: 542721
uuuacacgaauaaggaaau

SEQ ID NO: 542723 - RNA, 19 nt, Artificial Sequence
  Description of Artificial Sequence: Synthetic oligonucleotide
  Sense strand starting at position 651 of SEQ ID NO: 318178
uccuuauucguguaaacau

SEQ ID NO: 542724 - RNA, 19 nt, Artificial Sequence
  Description of Artificial Sequence: Synthetic oligonucleotide
  Antisense strand to SEQ ID NO: 542723
auguuuacacgaauaagga

SEQ ID NO: 542725 - RNA, 19 nt, Artificial Sequence
  Description of Artificial Sequence: Synthetic oligonucleotide
  Sense strand starting at position 673 of SEQ ID NO: 318178
guuucucuagaacaguaau

SEQ ID NO: 542726 - RNA, 19 nt, Artificial Sequence
  Description of Artificial Sequence: Synthetic oligonucleotide
  Antisense strand to SEQ ID NO: 542725
auuacuguucuagagaaac

SEQ ID NO: 542727 - RNA, 19 nt, Artificial Sequence
  Description of Artificial Sequence: Synthetic oligonucleotide
  Sense strand starting at position 676 of SEQ ID NO: 318178
ucucuagaacaguaaucga

SEQ ID NO: 542728 - RNA, 19 nt, Artificial Sequence
  Description of Artificial Sequence: Synthetic oligonucleotide
  Antisense strand to SEQ ID NO: 542727
ucgauuacuguucuagaga

SEQ ID NO: 542729 - RNA, 19 nt, Artificial Sequence
  Description of Artificial Sequence: Synthetic oligonucleotide
  Sense strand starting at position 692 of SEQ ID NO: 318178
cgaagacagccugagguuu

SEQ ID NO: 542730 - RNA, 19 nt, Artificial Sequence
  Description of Artificial Sequence: Synthetic oligonucleotide
  Antisense strand to SEQ ID NO: 542729
aaaccucaggcugucuucg

SEQ ID NO: 542731 - RNA, 19 nt, Artificial Sequence
  Description of Artificial Sequence: Synthetic oligonucleotide
  Sense strand starting at position 895 of SEQ ID NO: 318178
gggaauucgguuuaaaguu

SEQ ID NO: 542732 - RNA, 19 nt, Artificial Sequence
  Description of Artificial Sequence: Synthetic oligonucleotide
  Antisense strand to SEQ ID NO: 542731
aacuuuaaaccgaauuccc

SEQ ID NO: 542733 - RNA, 19 nt, Artificial Sequence
  Description of Artificial Sequence: Synthetic oligonucleotide
  Sense strand starting at position 938 of SEQ ID NO: 318178
cuuaccuuucuaugggaga

SEQ ID NO: 542734 - RNA, 19 nt, Artificial Sequence
  Description of Artificial Sequence: Synthetic oligonucleotide
  Antisense strand to SEQ ID NO: 542733
ucucccauagaaagguaag

SEQ ID NO: 542735 - RNA, 19 nt, Artificial Sequence
  Description of Artificial Sequence: Synthetic oligonucleotide
  Sense strand starting at position 981 of SEQ ID NO: 318178
caacgugaagcagguuuaa

SEQ ID NO: 542736 - RNA, 19 nt, Artificial Sequence
  Description of Artificial Sequence: Synthetic oligonucleotide
  Antisense strand to SEQ ID NO: 542735
uuaaaccugcuucacguug

SEQ ID NO: 542737 - RNA, 19 nt, Artificial Sequence
  Description of Artificial Sequence: Synthetic oligonucleotide
  Sense strand starting at position 1000 of SEQ ID NO: 318178
gggcaagcauaugcaauua

SEQ ID NO: 542738 - RNA, 19 nt, Artificial Sequence
  Description of Artificial Sequence: Synthetic oligonucleotide
  Antisense strand to SEQ ID NO: 542737
uaauugcauaugcuugccc

SEQ ID NO: 542739 - RNA, 19 nt, Artificial Sequence
  Description of Artificial Sequence: Synthetic oligonucleotide
  Sense strand starting at position 1232 of SEQ ID NO: 318178
gguggcuaagucuauacau

SEQ ID NO: 542740 - RNA, 19 nt, Artificial Sequence
  Description of Artificial Sequence: Synthetic oligonucleotide
  Antisense strand to SEQ ID NO: 542739
auguauagacuuagccacc

SEQ ID NO: 542741 - RNA, 19 nt, Artificial Sequence
  Description of Artificial Sequence: Synthetic oligonucleotide
  Sense strand starting at position 1274 of SEQ ID NO: 318178
aaaguuauguuagcagauu

SEQ ID NO: 542742 - RNA, 19 nt, Artificial Sequence
  Description of Artificial Sequence: Synthetic oligonucleotide
  Antisense strand to SEQ ID NO: 542741
aaucugcuaacauaacuuu

SEQ ID NO: 542743 - RNA, 19 nt, Artificial Sequence
  Description of Artificial Sequence: Synthetic oligonucleotide
  Sense strand starting at position 1390 of SEQ ID NO: 318178
gguaaaugaaagugcaauu

SEQ ID NO: 542744 - RNA, 19 nt, Artificial Sequence
  Description of Artificial Sequence: Synthetic oligonucleotide
  Antisense strand to SEQ ID NO: 542743
aauugcacuuucauuuacc

SEQ ID NO: 542745 - RNA, 19 nt, Artificial Sequence
  Description of Artificial Sequence: Synthetic oligonucleotide
  Sense strand starting at position 1410 of SEQ ID NO: 318178
uguauugucagcuagugag

SEQ ID NO: 542746 - RNA, 19 nt, Artificial Sequence
  Description of Artificial Sequence: Synthetic oligonucleotide
  Antisense strand to SEQ ID NO: 542745
cucacuagcugacaauaca

SEQ ID NO: 542747 - RNA, 19 nt, Artificial Sequence
  Description of Artificial Sequence: Synthetic oligonucleotide
  Sense strand starting at position 1420 of SEQ ID NO: 318178
gcuagugagacuuagcuga

SEQ ID NO: 542748 - RNA, 19 nt, Artificial Sequence
  Description of Artificial Sequence: Synthetic oligonucleotide
  Antisense strand to SEQ ID NO: 542747
ucagcuaagucucacuagc

SEQ ID NO: 542749 - RNA, 19 nt, Artificial Sequence
  Description of Artificial Sequence: Synthetic oligonucleotide
  Sense strand starting at position 1487 of SEQ ID NO: 318178
cuuccaugucccgagguua

SEQ ID NO: 542750 - RNA, 19 nt, Artificial Sequence
  Description of Artificial Sequence: Synthetic oligonucleotide
  Antisense strand to SEQ ID NO: 542749
uaaccucgggacauggaag

SEQ ID NO: 542751 - RNA, 19 nt, Artificial Sequence
  Description of Artificial Sequence: Synthetic oligonucleotide
  Sense strand starting at position 2012 of SEQ ID NO: 318178
ugucaagauuccuuguagu

SEQ ID NO: 542752 - RNA, 19 nt, Artificial Sequence
  Description of Artificial Sequence: Synthetic oligonucleotide
  Antisense strand to SEQ ID NO: 542751
acuacaaggaaucuugaca

SEQ ID NO: 542753 - RNA, 19 nt, Artificial Sequence
  Description of Artificial Sequence: Synthetic oligonucleotide
  Sense strand starting at position 2128 of SEQ ID NO: 318178
uuaguuacaccuuauugca

SEQ ID NO: 542754 - RNA, 19 nt, Artificial Sequence
  Description of Artificial Sequence: Synthetic oligonucleotide
  Antisense strand to SEQ ID NO: 542753
ugcaauaagguguaacuaa

SEQ ID NO: 542755 - RNA, 19 nt, Artificial Sequence
  Description of Artificial Sequence: Synthetic oligonucleotide
  Sense strand starting at position 2144 of SEQ ID NO: 318178
gcaacagauuauguuuagu

SEQ ID NO: 542756 - RNA, 19 nt, Artificial Sequence
  Description of Artificial Sequence: Synthetic oligonucleotide
  Antisense strand to SEQ ID NO: 542755
acuaaacauaaucuguugc

SEQ ID NO: 542757 - RNA, 19 nt, Artificial Sequence
  Description of Artificial Sequence: Synthetic oligonucleotide
  Sense strand starting at position 2258 of SEQ ID NO: 318178
acgggucauuuccauuaau

SEQ ID NO: 542758 - RNA, 19 nt, Artificial Sequence
  Description of Artificial Sequence: Synthetic oligonucleotide
  Antisense strand to SEQ ID NO: 542757
auuaauggaaaugacccgu

SEQ ID NO: 542759 - RNA, 19 nt, Artificial Sequence
  Description of Artificial Sequence: Synthetic oligonucleotide
  Sense strand starting at position 2393 of SEQ ID NO: 318178
acgaaaucauucucuggga

SEQ ID NO: 542760 - RNA, 19 nt, Artificial Sequence
  Description of Artificial Sequence: Synthetic oligonucleotide
  Antisense strand to SEQ ID NO: 542759
ucccagagaaugauuucgu

SEQ ID NO: 542761 - RNA, 19 nt, Artificial Sequence
  Description of Artificial Sequence: Synthetic oligonucleotide
  Sense strand starting at position 2397 of SEQ ID NO: 318178
aaucauucucugggagcga

SEQ ID NO: 542762 - RNA, 19 nt, Artificial Sequence
  Description of Artificial Sequence: Synthetic oligonucleotide
  Antisense strand to SEQ ID NO: 542761
ucgcucccagagaaugauu

SEQ ID NO: 542763 - RNA, 19 nt, Artificial Sequence
  Description of Artificial Sequence: Synthetic oligonucleotide
  Sense strand starting at position 2465 of SEQ ID NO: 318178
gugagcuuugcaccgcuau

SEQ ID NO: 542764 - RNA, 19 nt, Artificial Sequence
  Description of Artificial Sequence: Synthetic oligonucleotide
  Antisense strand to SEQ ID NO: 542763
auagcggugcaaagcucac

SEQ ID NO: 542765 - RNA, 19 nt, Artificial Sequence
  Description of Artificial Sequence: Synthetic oligonucleotide
  Sense strand starting at position 2484 of SEQ ID NO: 318178
ucugaauuauggcucugua

SEQ ID NO: 542766 - RNA, 19 nt, Artificial Sequence
  Description of Artificial Sequence: Synthetic oligonucleotide
  Antisense strand to SEQ ID NO: 542765
uacagagccauaauucaga

SEQ ID NO: 542767 - RNA, 19 nt, Artificial Sequence
  Description of Artificial Sequence: Synthetic oligonucleotide
  Sense strand starting at position 2487 of SEQ ID NO: 318178
gaauuauggcucuguacca

SEQ ID NO: 542768 - RNA, 19 nt, Artificial Sequence
  Description of Artificial Sequence: Synthetic oligonucleotide
  Antisense strand to SEQ ID NO: 542767
ugguacagagccauaauuc

SEQ ID NO: 542769 - RNA, 19 nt, Artificial Sequence
  Description of Artificial Sequence: Synthetic oligonucleotide
  Sense strand starting at position 2657 of SEQ ID NO: 318178
uguguuugcauuugugaac

SEQ ID NO: 542770 - RNA, 19 nt, Artificial Sequence
  Description of Artificial Sequence: Synthetic oligonucleotide
  Antisense strand to SEQ ID NO: 542769
guucacaaaugcaaacaca

SEQ ID NO: 542771 - RNA, 19 nt, Artificial Sequence
  Description of Artificial Sequence: Synthetic oligonucleotide
  Sense strand starting at position 2658 of SEQ ID NO: 318178
guguuugcauuugugaaca

SEQ ID NO: 542772 - RNA, 19 nt, Artificial Sequence
  Description of Artificial Sequence: Synthetic oligonucleotide
  Antisense strand to SEQ ID NO: 542771
uguucacaaaugcaaacac

SEQ ID NO: 542773 - RNA, 19 nt, Artificial Sequence
  Description of Artificial Sequence: Synthetic oligonucleotide
  Sense strand starting at position 2719 of SEQ ID NO: 318178
guggcuaacugggcauaau

SEQ ID NO: 542774 - RNA, 19 nt, Artificial Sequence
  Description of Artificial Sequence: Synthetic oligonucleotide
  Antisense strand to SEQ ID NO: 542773
auuaugcccaguuagccac

SEQ ID NO: 542775 - RNA, 19 nt, Artificial Sequence
  Description of Artificial Sequence: Synthetic oligonucleotide
  Sense strand starting at position 2720 of SEQ ID NO: 318178
uggcuaacugggcauaauu

SEQ ID NO: 542776 - RNA, 19 nt, Artificial Sequence
  Description of Artificial Sequence: Synthetic oligonucleotide
  Antisense strand to SEQ ID NO: 542775
aauuaugcccaguuagcca

SEQ ID NO: 542777 - RNA, 19 nt, Artificial Sequence
  Description of Artificial Sequence: Synthetic oligonucleotide
  Sense strand starting at position 2910 of SEQ ID NO: 318178
ccggauuccuuagcuccaa

SEQ ID NO: 542778 - RNA, 19 nt, Artificial Sequence
  Description of Artificial Sequence: Synthetic oligonucleotide
  Antisense strand to SEQ ID NO: 542777
uuggagcuaaggaauccgg

SEQ ID NO: 542779 - RNA, 19 nt, Artificial Sequence
  Description of Artificial Sequence: Synthetic oligonucleotide
  Sense strand starting at position 2954 of SEQ ID NO: 318178
guauucucaggguaugcuu

SEQ ID NO: 542780 - RNA, 19 nt, Artificial Sequence
  Description of Artificial Sequence: Synthetic oligonucleotide
  Antisense strand to SEQ ID NO: 542779
aagcauacccugagaauac

SEQ ID NO: 542781 - RNA, 19 nt, Artificial Sequence
  Description of Artificial Sequence: Synthetic oligonucleotide
  Sense strand starting at position 3668 of SEQ ID NO: 318178
auaagaauagccgauaagu

SEQ ID NO: 542782 - RNA, 19 nt, Artificial Sequence
  Description of Artificial Sequence: Synthetic oligonucleotide
  Antisense strand to SEQ ID NO: 542781
acuuaucggcuauucuuau

SEQ ID NO: 542783 - RNA, 19 nt, Artificial Sequence
  Description of Artificial Sequence: Synthetic oligonucleotide
  Sense strand starting at position 3670 of SEQ ID NO: 318178
aagaauagccgauaaguac

SEQ ID NO: 542784 - RNA, 19 nt, Artificial Sequence
  Description of Artificial Sequence: Synthetic oligonucleotide
  Antisense strand to SEQ ID NO: 542783
guacuuaucggcuauucuu

SEQ ID NO: 542785 - RNA, 19 nt, Artificial Sequence
  Description of Artificial Sequence: Synthetic oligonucleotide
  Sense strand starting at position 3940 of SEQ ID NO: 318178
uggaguuagaguugcaauu

SEQ ID NO: 542786 - RNA, 19 nt, Artificial Sequence
  Description of Artificial Sequence: Synthetic oligonucleotide
  Antisense strand to SEQ ID NO: 542785
aauugcaacucuaacucca

SEQ ID NO: 542787 - RNA, 19 nt, Artificial Sequence
  Description of Artificial Sequence: Synthetic oligonucleotide
  Sense strand starting at position 109 of SEQ ID NO: 318179
cuaauaguccucuguaaau

SEQ ID NO: 542788 - RNA, 19 nt, Artificial Sequence
  Description of Artificial Sequence: Synthetic oligonucleotide
  Antisense strand to SEQ ID NO: 542787
auuuacagaggacuauuag

SEQ ID NO: 542789 - RNA, 19 nt, Artificial Sequence
  Description of Artificial Sequence: Synthetic oligonucleotide
  Sense strand starting at position 133 of SEQ ID NO: 318179
gguugggaggcuuaaguga

SEQ ID NO: 542790 - RNA, 19 nt, Artificial Sequence
  Description of Artificial Sequence: Synthetic oligonucleotide
  Antisense strand to SEQ ID NO: 542789
ucacuuaagccucccaacc

SEQ ID NO: 542791 - RNA, 19 nt, Artificial Sequence
  Description of Artificial Sequence: Synthetic oligonucleotide
  Sense strand starting at position 147 of SEQ ID NO: 318179
agugaaauauaagcuaauc

SEQ ID NO: 542792 - RNA, 19 nt, Artificial Sequence
  Description of Artificial Sequence: Synthetic oligonucleotide
  Antisense strand to SEQ ID NO: 542791
gauuagcuuauauuucacu

SEQ ID NO: 542793 - RNA, 19 nt, Artificial Sequence
  Description of Artificial Sequence: Synthetic oligonucleotide
  Sense strand starting at position 155 of SEQ ID NO: 318179
auaagcuaauccucaggau

SEQ ID NO: 542794 - RNA, 19 nt, Artificial Sequence
  Description of Artificial Sequence: Synthetic oligonucleotide
  Antisense strand to SEQ ID NO: 542793
auccugaggauuagcuuau

SEQ ID NO: 542795 - RNA, 19 nt, Artificial Sequence
  Description of Artificial Sequence: Synthetic oligonucleotide
  Sense strand starting at position 167 of SEQ ID NO: 318179
ucaggauaaugucugguau

SEQ ID NO: 542796 - RNA, 19 nt, Artificial Sequence
  Description of Artificial Sequence: Synthetic oligonucleotide
  Antisense strand to SEQ ID NO: 542795
auaccagacauuauccuga

SEQ ID NO: 542797 - RNA, 19 nt, Artificial Sequence
  Description of Artificial Sequence: Synthetic oligonucleotide
  Sense strand starting at position 168 of SEQ ID NO: 318179
caggauaaugucugguaua

SEQ ID NO: 542798 - RNA, 19 nt, Artificial Sequence
  Description of Artificial Sequence: Synthetic oligonucleotide
  Antisense strand to SEQ ID NO: 542797
uauaccagacauuauccug

SEQ ID NO: 542799 - RNA, 19 nt, Artificial Sequence
  Description of Artificial Sequence: Synthetic oligonucleotide
  Sense strand starting at position 228 of SEQ ID NO: 318179
aaaggcuuagauggugaau

SEQ ID NO: 542800 - RNA, 19 nt, Artificial Sequence
  Description of Artificial Sequence: Synthetic oligonucleotide
  Antisense strand to SEQ ID NO: 542799
auucaccaucuaagccuuu

SEQ ID NO: 542801 - RNA, 19 nt, Artificial Sequence
  Description of Artificial Sequence: Synthetic oligonucleotide
  Sense strand starting at position 231 of SEQ ID NO: 318179
ggcuuagauggugaauaug

SEQ ID NO: 542802 - RNA, 19 nt, Artificial Sequence
  Description of Artificial Sequence: Synthetic oligonucleotide
  Antisense strand to SEQ ID NO: 542801
cauauucaccaucuaagcc

SEQ ID NO: 542803 - RNA, 19 nt, Artificial Sequence
  Description of Artificial Sequence: Synthetic oligonucleotide
  Sense strand starting at position 239 of SEQ ID NO: 318179
uggugaauaugagugagua

SEQ ID NO: 542804 - RNA, 19 nt, Artificial Sequence
  Description of Artificial Sequence: Synthetic oligonucleotide
  Antisense strand to SEQ ID NO: 542803
uacucacucauauucacca

SEQ ID NO: 542805 - RNA, 19 nt, Artificial Sequence
  Description of Artificial Sequence: Synthetic oligonucleotide
  Sense strand starting at position 240 of SEQ ID NO: 318179
ggugaauaugagugaguaa

SEQ ID NO: 542806 - RNA, 19 nt, Artificial Sequence
  Description of Artificial Sequence: Synthetic oligonucleotide
  Antisense strand to SEQ ID NO: 542805
uuacucacucauauucacc

SEQ ID NO: 542807 - RNA, 19 nt, Artificial Sequence
  Description of Artificial Sequence: Synthetic oligonucleotide
  Sense strand starting at position 266 of SEQ ID NO: 318179
aaaguuauccagugagaga

SEQ ID NO: 542808 - RNA, 19 nt, Artificial Sequence
  Description of Artificial Sequence: Synthetic oligonucleotide
  Antisense strand to SEQ ID NO: 542807
ucucucacuggauaacuuu

SEQ ID NO: 542809 - RNA, 19 nt, Artificial Sequence
  Description of Artificial Sequence: Synthetic oligonucleotide
  Sense strand starting at position 391 of SEQ ID NO: 318179
gggaauuggaggcaguagu

SEQ ID NO: 542810 - RNA, 19 nt, Artificial Sequence
  Description of Artificial Sequence: Synthetic oligonucleotide
  Antisense strand to SEQ ID NO: 542809
acuacugccuccaauuccc

SEQ ID NO: 542811 - RNA, 19 nt, Artificial Sequence
  Description of Artificial Sequence: Synthetic oligonucleotide
  Sense strand starting at position 402 of SEQ ID NO: 318179
gcaguagucgugccaagac

SEQ ID NO: 542812 - RNA, 19 nt, Artificial Sequence
  Description of Artificial Sequence: Synthetic oligonucleotide
  Antisense strand to SEQ ID NO: 542811
gucuuggcacgacuacugc

SEQ ID NO: 542813 - RNA, 19 nt, Artificial Sequence
  Description of Artificial Sequence: Synthetic oligonucleotide
  Sense strand starting at position 1095 of SEQ ID NO: 318179
gccucacagucaccauuau

SEQ ID NO: 542814 - RNA, 19 nt, Artificial Sequence
  Description of Artificial Sequence: Synthetic oligonucleotide
  Antisense strand to SEQ ID NO: 542813
auaauggugacugugaggc

SEQ ID NO: 542815 - RNA, 19 nt, Artificial Sequence
  Description of Artificial Sequence: Synthetic oligonucleotide
  Sense strand starting at position 2064 of SEQ ID NO: 318179
cugucauucggcuaaugga
